United States Patent Application Publication US 2006/0123505 A1 - sequence listing, part 19

SEQ ID NO: 36371 - protein, 568 aa, Oryza sativa
MLRAAVSRLRAHLHPHPHAHHHHGLPSVTPAPPRDPERPPRLLVVQPRLRPGSLLDSKLAEALNLANSLEEPRDGFYKEGLAAKGAPPHLVAQNPSSRGRSHVDKFFGPGTVDNVKCYLRTSESEEGVDAVFVNAILTGIQQRNLEVAWGKPVLDRVGLIIEIFNAHAETKEAKLQSELAALMYMKTRLVRVRGPGGRLTFGSSGEAEVVSARGRGSGGRGFISGAGETELQLQRRRIQECRVRLLAQIEDVRRTRAIQRSNRKRHGNSFGQELVTVAVVGYTNAGKSTLVSALSETDLYSDDRLFATVDPRLRSVILPSGRKALLSDTVGFISDLPVQLVEAFHATLEEVVEADMLVHVLDSSAPNIEEHRSTVLQVLQQIGVSQDKINSMIEVWNKIDIVDNNDNDVTDDIEDEIFLTEGEEDKEEELFSENDVPAEESSFESLDDGTDSEYLSEENLEGNNGEISSSLEPSEMRAMNSVSSSSKDCFGELCGPETISTDSCSSTQPMSTCHVKTSAVTGTGLQELLELIDKKLTERQTIVERSYGPFDRKWRPSSSVVGEKAAEQ

SEQ ID NO: 36372 - protein, 694 aa, Oryza sativa
MNKKVVKIRLLEDCPPAPLSSDKKSFGTVNRFSSSDVITKKRKVLVSGGTKHCALSAVAREKTSVPSFIPLSSFPVIDKSTERRIHEFAQKVSSDITIEDIQKKLVVPSTHTPVSKNTDKITLGMVQRSVEAINAALHMLENGASIEDVKSVCAPSDLFQLARWKNKLNIYLAPFLHGMRYTSYGRHFTKLDKLEQIVDRLQWYIESGDTVVDFCCGSNDFSLLLKEKLEASEKSCFYKNFDLIQPKNDFNFERRDWMTVQPDELPTGCRLIMGLNPPFGFKASLANQFINKALTFKPKLIILIVPKETERLDRKYPPYELIWEDSHQLAGKSFYLPGSLDADNKIMEQWNMSPPPLSLWSRSDWARKHKEIAKTMGHISKNVWCLDDTQRSVVNTGHAQMANEGDDDLDNKERQEEAPLNASVIDQLLSDTYHDPTSSPGDYWTDTNGRSRQPCNYEGRNDPTHEYHAGMGCGSDMSISSSDKSDCEKQTETMSNSEHGHTGSEAHDHVGSAPVEQPTGFADCDEVTSAGIEYHSLENSPLTERPADAAGVQYKMLEDTPPPLDELVPGFSGQPIVSLPGGGRLSAGLQYQRLEDTLSRGTPEAGAGCRQLEDSLPAPPAASEVDAVVAKYLPQTTSDLPALPFVPAPRIPFPGLQFAPRNDLWQGWYPPPEFLSRGMDHPPFMHGSSGWLDD

SEQ ID NO: 36373 - protein, 519 aa, Oryza sativa
MGADATTLHIAVHALASSLQAQVAAVFFVSAACTVALALLLALQRLRPPWWCACPVCEAYVTASWAREFDNLCDWYAHLLRRAPGRTVHVHVLGNVLTANPATVDHMLRCRFDNYPKGAPFSAILADFLGRGIFNVDGDGWLFQRKLAAAELASPAIRAFAANVVASELRCRLIPLLRSASSYGSERLLDLQDVFRRFAFDCICKISFGLDPGCLELSLPISAFADAFDTASMLSARRATVPMHVVWKLKRLRNIGEERELRDAIRLVDALAAEVIRQRRKLGSAASCDDLLSRFMGSINDDKYLRDIVVSFMLAGRDTVASGLTAFFLLLSDHPEVAAAIRDEVFRVAGGRDPTAASFDFDKLKDMHYVHAALYESMRLFPPVQFDSKFAAGDDTLPDGTFVAKGTRVTYHAYAMGRMESLWGPDCAVFRPERWLSGGRFVPESPYRYPVFQGGVRVCVGKDLAIMEMKAVIVAVVLSFDVEAVDRSSRRPKFAPGLTATFAGGVPVRVRRRAHCAPS

SEQ ID NO: 36374 - protein, 1107 aa, Oryza sativa
MAKPVKYDEEEEEVSSSGEEEEEQSDGAGSGSGEEEDEEEEEAPAAAAGEAAGGEEEEVDEEEIEAVTTGAGADEEEEESGAAAAAPGEGDEESQSTEDDEAVVGEDDDADEAEGGAVVGKREKARLKEMQKLKKQKIQEILDTQNAAVDADMNNKGKGRLKYLLQQTEIFAHFAKGNQSKEKKPRGRGRHASKMTEEEEDEEYLKEEEDALAGSGGTRLLSQPSCIKGKMRDYQLAGLNWLIRLYENGINGILADEMGLGKTLQTISLLGYLHEFRGITGPHMVVAPKSTLGNWIKEIQRFCPILRAVKFLGNPEERNHIRENLLQPGKFDVCVTSFEMAIKEKTTLKRFSWRYIIIDEAHRIKNENSLLSKTMRIYNTNYRLLITGTPLQNNLHELWSLLNFLLPEIFSSAETFDEWFQISGENDQQEVVQQLHKVLRPFLLRRLKSDVEKGLPPKKETILKVGMSQMQKQYYRALLQKDLEVINAGGERKRLLNIAMQLRKCCNHPYLFQGAEPGPPYTTGEHLVENAGKMVLLDKLLPKLKDRDSRVLIFSQMTRLLDILEDYLMYRGYQYCRIDGNTGGEDRDASIEAFNKPGSEKFVFLLSTRAGGLGINLATADVVVLYDSDWNPQADLQAQDRAHRIGQKKEVQVFRFCTEYTIEEKVIERAYKKLALDALVIQQGRLAEQKTVNKDDLLQMVRFGAEMVFSSKDSTITDEDIDRIIAKGEETTAELDAKMKKFTEDAIKFKMDDTAELYDFDDDKEENKLDFKKLVSDNWIEPPRRERKRNYSESEYFKQALRQGAPAKPREPRIPRMPHLHDFQFFNNQRLNELYEKEVRYLMQANQKKDTIDGEDEDQLEPLTAEEQEEKEQLLEEGFATWTRRDFNTFIRACEKYGRNDIRSIAAEMEGKTEEEVQRYAKVFKERYKELSDYDRIIKNIERGEARISRKDEIMRAIGKKLDRYKNPWLELKIQYGQNKGKFYNEECDRFMLCMVHKLGYGNWDELKAAFRMSPLFRFDWFVKSRTTQELARRCDTLIRLVEKENQEYDEQERQARKDKRMAKNMTPTKRSALRVSEGETTPSNSFKRRRQSLMDDYVGSGRRKRG

SEQ ID NO: 36375 - protein, 551 aa, Oryza sativa
MTTTTTTTNHSAKSILLLALLLVPHLAAASSGDALISQRRRLLDYHGGGGGHGGGDVYVDPSYTFPNARLRDAYVAMQAWKRAVLSDPHNVTGTWIGPDVCAYEGVFCAAARDDPHLVVVASVDLNHADMAGHLPDELGLLADLAVLHANSNRFCGAVPSTLERLHLLHELDLSNNRLVGAFPDVVLRLPSLRYLDLRFNDFEGPVPAELFDRPLDAIFLNSNRLRFRIPDNVGNSPASVLVLANNDFGGCLPASVANMSGTLDEIILMNTGLKSCIPPELGMLTGLAVLDVSHNSLMGAIPGELARLENIEQLDLGHNRLTGDVPEGICHLPHLQNFTYSYNFITGEPPVCMHVKAFDDRRNCIPGRPDQRPAEQCQFQNTHHVNCDAFRCKKFVLPSPPPPSPPPPSPPPPSPSPPPPSPPPPSPPPPSPSPPPPSPPPPSPPPPSPVYYSSPPPPYYEVSPEDRYLSPPPPPAYHEAPPPPYYEVSPEDRYLSPPPPPAYQETPPPPPQYEVSPEDRYLSPPPPSPVKWKLPVYEYSSPPPPAATWKP

SEQ ID NO: 36376 - protein, 415 aa, Oryza sativa
MGQQAAEAQPLLLQGDQVDAEWGCRPHRIVLFVEPSPFAYISGYKNRFQNFIKHLREMGDEMLVVTTHKGAPEEFHGAKVIGSWSFPCPLYQNVPLSLALSPRIFSAVAKFKPDIIHATSPGVMVFGARFIAKMLSVPMVMSYHTHLPAYIPRYNLNWLLGPTWSLIRCLHRSADLTLVPSVAIAEDFETAKVVSANRVRLWNKGVDSESFHPKFRKHEMRIKLSGGEPEKPLIIHVGRFGREKNLDFLKRVMERLPGVRIAFVGDGPYRAELERMFTGMPAVFTGMLQGEELSQAYASGDLFAMPSESETLGQVVLESMASGVPVVAARAGGIPDIIPKDKEGKTSFLFTPGDLDECVRKIEQLLSSKVLRESIGRAAREEMEKCDWRAASKTIRNEHYCTATLYWRKKMGRTN

SEQ ID NO: 36377 - protein, 327 aa, Oryza sativa
MPPNPTPPRRATTTTTRATSGVRRGEEEQGGMAVSASAGEEEEAFEEVDPTGRFGRYADVLGLGSVKKVYRGFDQEEGIEVAWNRVRLRALADRDPAMVERLHAEVRLLRSLHHEHIIGFHKVWLDRDAGVLNFITEVCTSGSLREYRDRHRHVSVKALKKWARQILLGLDHLHTHDPCIIHRDLNCSNVFINGNTGQVKIGDLGLAAIVDKTHVAHTILGTPEFMAPELYTETYTESVDIYSYGMCVLEMVTREMPYAECDSVVQIYHSVTRGVPPAALKRIRDPELRAFIERCIGQPRNRPSAAELLRDPFFAGIDDDDSTGTLG

SEQ ID NO: 36378 - protein, 257 aa, Oryza sativa
MQVPIEHNGGEQTLLVPFRAHRPPRPLLQLGSRASPVSGFQLGVVEGEWRVVQPAYGQARWTTSPPPASPTSGSLRRPTLSASKATCWGGCTIWTRPIIEAFHGKGVQVIADIVINHRTAEHKDSRGIYCRLPPQQARPAGAHRLARLAQDGHRLRRVAPRLRQGLLRRHGKDLHRCHRAELRRGRDMDVDGERRGRQAELRPERAPAGAGQLGQSCRRRQQQCHGVRLHHQGHPQRRRGERSSCGASAARTARRPA

SEQ ID NO: 36379 - protein, 419 aa, Oryza sativa
MAYRRKPQPPQTPPSLDHHHHHHTPSVGPSSPPQDSLAAQAMRASAAHRDASSLSSAYSSSSASAAAAAAAARRGHHEPSVSTPSPGSSGYEYTSMKNLNEAKYGFWGALARKAKSFLDEDGSPGQYDSPARQQPSRDAPPVGVQYTRSQQPPSETWKSETPPSHKRSEAIASSLNYIGGTIKSALEEGRTIVENKTADIIHETRKLNIRRKGAGSTTQGEAPQRFTQRNLPQNPLDYETQLKASRDVANAMAAKAKLLLRELKTVKADLAFAKERCAQLEDENKILRESHDKGDNPEDDDLIRLQLETLLAEKARLAHENSVYARENRFLREIVEYHQLTMQDVIYVDEGIEEVTEVYPTQVLPPAPSRAGSGLGRSVTPATPKTASSSPSSTSIVVPETCPVVPASPKSLSRTSSKQ

SEQ ID NO: 36380 - protein, 481 aa, Oryza sativa
MSSPSRRSSVPLPLPDPSSSRSETSAVRSEGDAAEEKSEEQRPGRRRRKRKQRGPTRPTIALLTEEAKQRLLRAEGQTSPGTTVSPFAPAPRRPQYPPFPEDGNVEDVRKWNDECHEVSKIIKKIEKERDKDIPIKTEPKDPYTTEAIQSSRDKVVVLQAARAIVSISHIMDDGQRRPQCTGIIIKQWSDDTGHHHATIVTYSRIVCEAGRKRDPLPKLSVCLPNKKTVLDAELIYFNDHYDIALLHINLEVTMELPSFGRGPEYGQEVFVLARDGEASLRARRGDIQWLEESDILGRDHYMFLSCDIPEGGNEGMVIDNDGVVRGMAIYCSPYPAVTSISTIVKCIDMFMQFNQVARPLFGIGVRTIALLDVQLQEDISDFGIKGGFLVDRVYNPVAEDLGIKRGNVITSINGKGALTLPELEDYLLLLGWGYLEDKLNCIKDIKLRVCDLKSGVEIDVTLPVRFYDKSERKLRFRHDED

SEQ ID NO: 36381 - protein, 214 aa, Oryza sativa
MESTCWSCGEGAVVADPDTGVLVCTSCGRIHDSGSSEFVHQSICTDNGVYDLRASSFVYHQSQSQYRDQKLSNGVVTIASIAARLGLSPTAADEALAMAKSATGGNLATQGSAFLPALASACAFLVARSHRLPLSLAEAAETAFCSVASLADLVSRIASHLSLPPLMMMNPSTFRLLPNWLLMIWIPIIPGRRGRNWRILRSRRSAYQVLTKMS

SEQ ID NO: 36382 - protein, 447 aa, Oryza sativa
MDFFKIKKLGKARKSGGGGGEVVESEEETKAGNNAASDEQKGKILEDDPAAAAAGAGMDADAGNGAVEGQEEDDDDDDFITNEVKRRLKELRKNSFMVLIPEEECAEVEEDGEEEEEEGSSSREWMESDVGDGFPLCGFDSLYEKYCERMAVFDKMITQLLKDPGSFNISKKSPRSASKLASTLRNLSFKRRDDLQEDCEHLQQQQSEDDPYQTLETAYVGHVSLSWEALHCMYVHLSLILAAQPDNPTTYSCAAQAFQQFQVLLQRFVENEPFEQGSRVEIYARSRSSLSKLLQVPTFQVADGKYNAEDQVEPSIFASDLIKLLEESIMTFRLFLKKDKKKNSALMSVHSHTGSSIQQVQSSLDKKEVKVKELFKKKKGWKSKTWPATMEEVQLLFALIDIKVVSRVLRMAKLSKEQLLWCEEKMSKLDLSDNKLRRDGSPILFPC

SEQ ID NO: 36383 - protein, 630 aa, Oryza sativa
MDPGKHNGMSLKDRRELVYEVSQWPQGASEILQCWTRRDLLELICAELGKERKYTNVPKSKMIAYLLKLVLRKNGQPKDDNANASILGQNNKDDTEKKENEEQPHHFSRSAKSDSSMCREAQAGSTAVCRNVACQATLNSGDAYCKRCSCCICHKYDENKDPSLWLVCSSDTPYSGYSCGTSCHLKCALKNKKAGIFKNGCNKKSDGSFYCVWCGKMNWLMRNLRKQLAIARESRRVDVLCERLSLTHKMVKGSERYRELANIINSAVKILEKEVGCALDQVSAITGRGIVNRLCCGADVQKLCSCALEMVDSTLSSTLDFETNNNLEAPGPQPQVFFVEITPFSVLVVLKYQDNIAEEIDGCKVWHRSANMANYPAEPTCHVLRPNTRSLFSGLSPSTEYFFKVLPFGCSQGYGEWEVKCSTRSLNHGSSQCSTQNSESMSIKEDLEQHQKNELNLKNKQWWGIQYDSPSANSNENDVCPDLHPKRAKLAKLDGASDNDESQLLPTSEVLPFMSSNSSLSEVPSKPDWVSSTPDSACKNHVERQYEYSVKVIRWLEHEGHMDKDFRVKFLTWFSLKASAQERRIVNAFVDALVSDPASLVAQLIDSFMEVVCSKEKPAQPNGGCCNLWH

SEQ ID NO: 36384 - protein, 493 aa, Oryza sativa
MSEMQPHAVCLPFPAQGHITPMMKLAKILHSRGFHVTFVSTEYNHRRLVRSRGAAAAAGIPGFRFATIPDGLPPSDADATQDPPSLSYSTMTTCLPHFRKLLADLNNRLAPDDDDAAPPVTCVVADHLMGFSLDAAAELGVPCALFWTASACGYMGYRNFRLLIDMGIIPLKGEEQLTNGFMDMAVDWAPGMSKHMRLKDFPTFLRTTDRNDILMTFQLRQVERAEEADAVVLNTFDELERPALDAMRAITPAIYTVGPLAFLTEQIPPGGPLDDISPSLWREDDACLRWLDGRNPRSVVYVNYGSVTVMSGHELEEFAWGLAGSGHDFLWIVRPDVVTRTAAATAAEAALPREFTEATKGRGLVASWCDQEAVLRHPAVGLFLTHSGWNSTVEALSGGVPMLCWPFFAEQQTNCRYKCVEWGVAMEVGDSVRREAVEGRIREAMGGGEKGKEMRRRAAEWKEAAARARGRSLANLERLIGDVLLSGKKDRVI

SEQ ID NO: 36385 - protein, 95 aa, Oryza sativa; identical to SEQ ID NO: 33895

SEQ ID NO: 36386 - protein, 213 aa, Oryza sativa
MILKYLEKTYEPVKVGDVVYSATVERIYAVESSALPSYDEIKKLPNKVLLWCGTRSSNLLRHLRDGFVPAVCHIPVPGYMFGKAIVCSDAAAEAALYGFTAVDRPEGYLVLAVASLGKEIQEITGTPGSEDVKRMEEKKMGVKGVGRKTTDPSEHFTWRDGVTVPCGKLVPSTNKDGPLEYNEYAVYDPKQVSIAFLVGVKYEEQNMEVVPDE

SEQ ID NO: 36387 - protein, 344 aa, Oryza sativa
MGHGKEVKTRPDPKVEIQEKGEIFFFYRPKVGKDEARGPDDVQRMYIVLRPEATGDGGDRAVEDKQAPDSGKEGHKNQQPQNSDGDGGGEGGHGKEEVNVEEQALLRLIVMGKKSLPDPAAKRGRPYWGYVELVTTDVEHIKDALKEEEYSTATRGTRRRAAARALGEGVYRILKHDSGRRVHTHLVYKLELPLPARRREHDAEADEAGEPQEAMNVEPEASYLIQIKNPEQPPPSGGGGDGGFRGLQSKRRAAFPAHLQGRFGSNHRYAPADPPDLLNYEGCEFLLIAASDDVEEELGLELETETDAEADLEGDGAAAAKCSDLVKMFGEVADVKPLLSGSWD

SEQ ID NO: 36388 - protein, 447 aa, Oryza sativa
MNMNIPCKCATRHVLITTFRIECQLDKDDFEPKVLEVLHSTCRRIGMLRSKAPGHESYDRLCFIQEYLDDSSEIDPSIALMMGARSSYSEADEVDPKMLLCCREFLSIRELSSCVVLEECRVMVKSEFYFICQSGQHTYLYKISTARGKLTCHETILEAEHSLETIRNGDVGIDDPPAWHFVNYGVKLYVIPSVPQYNHYYEVDVYRNSSLILESKRPSICFSAVCRVGQRIVALGDTLEAVYILDLQNVEWVFCKTSSTFLDLRKEIKISGFVDLGNDSMMISEVDACECFILDLKKKQWFVVEPPNGDIWQYCVGLLSGTCMFIEGFIYTCSDGEMVAYELIEKDGLYHWDAPVIMRLPWKKFSNRKFMAFCPICKDVIHDDIAFSIVEARPFGSSHTVATTIVQVKLQETTRGSKRPVGIAHADISTSSIEQNGWILSNYAFTL

SEQ ID NO: 36389 - protein, 265 aa, Oryza sativa
MHIRGSEHLHISKLILCLPSLVAAIVGDGHISQILVCKPGGLSWSVRAYDMVRNFQDMAFYQGKLYAIANDDEDLLVVNISQDQSTGDPQVSKIGQAIKGEPFHSVWHEFGTMDILANKKLYLVESHGSLLMIRRKIWCWSKQASDTDPEASRPIVAGPNEFEVFKADFEQSRWVKMTTLGDEQVLFLGRRCSRAMSVSQYGMSGDQIFFLDDEEENLKQYYYSTEITSFCVCDMRDGQVDSPLPKASWKRCDEMRPVAWLFPQD

SEQ ID NO: 36390 - protein, 602 aa, Oryza sativa
MRVGGELHSGGGGGEGVLVGRGWRKEEAEGGGGGGGGGGGCSASSTSRGSSLCDSPLPSFVRHRGGPGSDLELDGLPTSSSNASSGSHEEDHGPLQGVKGEGWMQVQGPIKNSAARSTGECQDQRYRLGSVLFHGKNERKQRPASVDFGCPSVDRSSTHSPGFLVNGTGAMNKGLSVSSQNKPGAPTSPGTPSYNRQGATVVGYQQGWSSERVALSSNGQRRHSGNSMVLPHNTGRTLPSKWEDAERWIFSPNPSNALGRTSIPQSRRPKAKSGPLGPPGRFSEPYSSVSSSSYLLDTGRVGNLTANSPFLAGVLLPEHVCVSSSHAGRDLSGASGEDKSNGMGGRSGEANGAHPAVWSTRVCQRMDSAVQSSPSLPTSQESVQACTDEQIEITTDLTTSSKPEISRKDVATQTSPELSRSSSPSGRPSFSRSLSVQQVKELESCFSKLEIRDVQMDDRVTLTRWSKKHVTRGSEKNSTNIIEWKKKTVESKSSAWEVTETAKCISKIEGEEAKMTAWENLQKAKAEAAIQKLVMKLEKKRSYSLERIFNTLRSAHRKTHVIRSTTTTNLDQHISRTVKRPSHLSKNGQMSSLSGCFTCHAF

SEQ ID NO: 36391 - protein, 222 aa, Oryza sativa
MAASSSKKKEEEEVAVVAARKGRLRQRYDGEYRLVAGCVPYRVVAAGGGGGGGELEVLMVSTPNRADLVFPKGGWEDDEDVYEAACREAMEEAGVKGNINRVSLGMWVMRSKSSQSGGGGEASRSPRGGACKGYMFELEVTEEMDRWPEQATHGRRWLPPADAFRLSRYGWMREALAALLDRRCLLLLPPPQPEPSEHAGVYGLAMLKAAAAAAADRAVALC

SEQ ID NO: 36392 - protein, 631 aa, Oryza sativa
MITENSSVQGNENKQKQTQTGTCPNLDKLSYFNVVSNMHIGNQINDHDEIEELDHMSLQERYRILMAENHSSSAVVSSEQCAIDGLENSCKPGTNGMIPKRIHEGTAFRDGMYSMLQEISSAPAIIGSIDNDNNRRLLTEGLSNNQQSHEAGCESGFLSTSSSAAPPQCQVVCSHDLLVNGKTLIYSRDPSSSSTPTFGDKNIQLEGTDDRTLLVDIKLEPALEGDFTEKITSSVQRTDPNHGTEGSNLVGSINSVSSAISKRISEAARSNPENSHVEGLLPSSRIKSEVTGSELPLVVCGLTSISIAELTAKKTNTLNHDGVLAYCSRKRKRRKTLRDPSEKTLEEDSLRNDEGTAYFSRQRRRRKTATDSIETALEEDAPGLLQILLDKGILVKEIKLYGVEEEDDMVPDCTESDFQDLENVITKLFPQRTSLLKSALRHEKGEKAIYCLTCLISLIEQSRYLQFRDCPVEWGWCRDLQSFIFIFKSHNRIVLERPEYGYATYFFEIVKSLPIQWQIQRMVTAMKLSGCGRTALIENRPLLIGEDLTEGEARVLEEYGWVPNSGLGTMLNYRDRVVHDRWNERSGTDWKTKIGKLLMNGYSEGHLVLSHFPTKVGKIEDDTEIKQEDPL

SEQ ID NO: 36393 - protein, 121 aa, Oryza sativa
MVSGVSQGESVLESLARETMRRTPRRSSTLWSQLLRSLQRVSRVWEPRLLRMRSKLFIVICQLALSAYFHDSSHYAESKFGSLALAFCYLLLMIQDCIFLSAWNFDMFVNLLGYILHAIVL

SEQ ID NO: 36394 - protein, 586 aa, Oryza sativa
MDYLKTVVPSQLMAERGANLVVINPGSSNVRIGFASQDVPFNIPHCIARHITQQKDDTPRLSVRDKMLNCHATPSQNAERERAYDIIASLLKIPFLDEDMPSANQALPPKMGRVDALSSQQNKDDSKFTWTDVMDRSIKSSTPIVDKDADVDPLQRSTPDDTEPNSEENMYKEIIFGEDALKIPPSESYCLSHPIRRGHFNISQDYSLHQVLEDLRTIWNWILTEKLHINPRDRHLYSAILVLGETFDNREIKEMLSIVLCDLGFSTAVIHQEALAAAFGNGLLTSCVVNIGAQVTQVVCVEDGVALPHTALALPYGGDDISRCLLWVQRRHCTWPNFQTDPVNKPIDMLMLNKLKESYSQIRSGSFDAVSVVHSYEHEKSVGHQKTKLSALNVPPMGLLYPRVLVPEEYPPPPRSWFQDYDDMLEDTWQTSDSLYSSGNGGFGMWDNYPMFPTRLKKFDNIGLVEAIVSSILSTGRIELQRKLFCSIQLVGGTASTAGLAPVLEQRVLNTIPSNQPIEKAEVLQSRSYPLFVPWKGGVILGVLDIGRDAWIHREDWAKNGVHIGSGRKYRDSYFLQAQAMCYYNS

SEQ ID NO: 36395 - protein, 616 aa, Oryza sativa
MARRHGWQLPAHTLQVVAITVFFLLCIEFYAFFSPFLGKDLYQFIAIGVYSFLALSVLILYVRCTAIDPADPGIMITVNGALTYKSEAKLDTQDETGKSESRTYEDVQKHKSCLGAGCLCCAIFVKEDCRKDDEAYQQEDYDEEALFCTLCNAEVRKNSKHCRSCDKCVDGFDHHCRWLNNCVGRKNYVTFLCLMAVSLAWLAVESGVGIAVFVRCFTDKAAIEDQIGEKLGYGLSRALFAAIGALGTALSMLASVPLGELFFFHMILIRKGITTYEYVVAMRAQSEPPGPSVNDEQQSLPSSPMSSAPTAFSGSSFARHYKGAWCTPPRIFIDQDEIIPHLQPGRVPSTVDPDSMNPTERAKHYPKRPVRISAWKLAKLDSNEAMKAAARARASSSVLKPVNTRAQYEADRCSSDNTSCRSSVMSVDIGNHINSRSVRNSQYKSSYPPSRASADDIELYPQTPSSFQSNSQTPTPISEHHPAKHFNPIYQTSANRSPFSAVASGVNEASVSDISTRRFGASNADRSSRSSVYWDQEAGRFVSSQANHGSSSRLPRSDLLYTGQSIFFGGPLMTDPATRSFRDPGGSSQRAGASRPHQLPVFVPSDPQKDRFSRLP

SEQ ID NO: 36396 - protein, 44 aa, Oryza sativa
MCMDTMESNFRFGSRLHFSSIWCHLSFNTAWNGGPCHHLRSLVH

SEQ ID NO: 36397 - protein, 141 aa, Oryza sativa
MASLFGDMKEKSSRSVEIRDIEPQVFGAMLGFIYTDSVPELDQQDGVVVAQHLLAAADMCGLDGLKIMCEEKLIAGATVETAATTLALAEQHGCPRLKARCVEVVAANLDAVMATEGYKHLMASSPLVMNDLLRAVRGRKS

SEQ ID NO: 36398 - protein, 636 aa, Oryza sativa
MVLPKPEMPFFVLLLFLGLGCLRPAAATDERFVFNGFTGANLSFDGMATVTSNGLLMLTNGTNQLKGHAFFPSPLQFQRGPNSTAMQSFSTAFVNSANNGNATNHLFAVEFDTILNSEFNDMSGNHVGIDVNGLNSVDADNAGYYDDGTGDFKNMSLVSRRPMQVWVDFDGQTMQVNVTMAPLEVARPKKPLLSKIVNISSVIDDTAYVGFSSATGILFCRHYVLGWSFKMNGAAPALNISSLPSLPVTFPKPRSKTLEIVLPIASAVLVFAVAAAVFVFMRRRRMFSELKEEWEVTFGPHRFSYKDLFHATDGFSDKRLLGIGGFGRVYRGVLPSSKAEVAVKKVAHGSRQGMREFVAEVVSIGRLRHRNLVQLLGYCRRKGELLLVYDYMPNGSLDKQLYDQGKITLRWAQRFRIIRGVASGLLYLHEDWEQVVVHRDIKASNVLLDADMNGRLGDFGLARLYDHGTDPHTTHVVGTMGYLAPELGHTGKASKASDVFAFGAFMLEVACGRKPVAQDARDNRVVLVDWVLDRWRAGAITDTVDPRLHGDFVESEASLVLRLGLLCSHPLPGARPGTRQLVQYLEGDVPLPELSPTYQSFNMLALMQDQGFDPYVMSYPMTSTSAGTFSDLSGGR

SEQ ID NO: 36399 - protein, 875 aa, Oryza sativa
MADLVSSCKDKLAYFRIKELKDILNQLGLPKQGKKQDLIDRVLALLTDEQGQRHHGWGRKNSLTKEAVAKIVDDTYRKMQIQCAPDLATRSHSGSDFSFRPIEEAYDSFQPEAKVRCICSSTMVNDSMIQCEDQRCQVWQHLNCVLIPDKPGESAEVPPVFYCELCRLSRADPFWVTAGNPLLPVKFVSSGVTNDGTSVPQSVEKSFQLSRSDRETVQRQEYDLQVWCMLLNDKVQFRMQWPQYAELHVNGISVRVVTRPGSQLLGINGRDDGPLITTCSREGINKICLSRVDARTFCFGVRIAKRRTVAQVLNLVPKEAEGESFEHALARVRRCLGGGDTAENADSDSDLEVVAESVTVNLRCPNSGSRMRIAGRFKPCIHMGCFDLETFVELNQRSRKWQCPICLKNYSLESLMIDPYFNRITSLLRNCNEDVNEVDVKPDGSWRVKGDAASRELSQWHMPDGTLCNPKEDVKPAMQNGNEQMMEGTSDGQKSLKIGIKRNPNGIWEVSSKADDKKPSVVGNRMQNNSGFRALNNIMHMSNSPTSSYRDGEDPSVNQESNRHVDLSLNNGNNEFDSFSLNFGQACNTDDRPQQQHNATDVIVLSDSDEENDAMVCPPAVYDNTTTANGSGFPFTTNGIGYTERYQEDAGVGTSGLGLLSNNVDDFEMNNWQMHSSYQQPEQGFQFFGNDTDVHNTFVGSHNSFGLAPNDYSLDCNVGVEEASVTPALSVCRNSNEMHGSLVDNPLALVGDDPSLQIFLPSQPSSVPLQEELSERANAPNGVQSDDWISLTLAAGGGGNEEPAPADVNSQPQIPSTETGIEPLTDAASAFLSTNIERRSGADLNPRRIENIFSHPRQPRSVRPRLCLSIDTDSE

SEQ ID NO: 36400 - protein, 440 aa, Oryza sativa
MPTDHHHPDAAAAAAGKGAHHHHGGGKVHKLLKSAFKRGGDHHHPGSGGGGGDQEGDLLSRSASGSSSTSAASSSRAASSSSGRRGGGGRRGDDTCSSVDGESGELDGSKNAKVLAALRDAKISYAYESFPWEKKMKELLPVPAASCFLSMLLLPKSADGSHTRYKSLEDTLARADAWLVSSQAAGVPVAFMNVQTEALLTKISGEMALSTVNMGSLSDLANMANASLYGFEDYHGVDIGVVRAVRLWYTPVAGEAALEIKLLPGDTRLGFAISRTEEGFIYVSSVAEESTPGVASTRSGLLELHRAARRASRLLVVSRVGGEKVLPWMVSTAGDVKCFDTVSLSQKLSLHRHALRPITLHFLMWDTALAIKDVVAKPPLPPPPTMLMLPSPPSPPPSDAEGDAPPPSGDGDEAPGSGAKGGKDSSFRFQNIDLLPDSWL

SEQ ID NO: 36401 - protein, 270 aa, Oryza sativa
MLLLAVVVRHGAARAPPGEHLHDEHPERVHVRVEAGASGEEALVRHVAAGARHGLRRVVRHLVEVDDTGEAEVAEARAVLLVEHDVARLDVPVEDPAAAPVVQVLQRGRHAADYLVPSLPGQLSRSSTAIQELVQATHGEVLVDEEQLASLVAPPDQLHEVAVRELADRVHLRDELLLSSVGTGFVVRCHPLDGHLHVHAAQVAVVHGAEATSAELARGAEVGSRTPELLELKFDRAMGVDHLLEVAVGEPSLPRRPSPHQEHKKRRHSK

SEQ ID NO: 36402 - protein, 305 aa, Oryza sativa
MRRNAFIYITKTVQLGLLAVITGTVFLRTHMGVDRAHADYYMGSLFYALLLLLVNGFPELAMAVTRLPVFYKQRDYYFYPAWAYAIPAFILKIPVSLVESITWTSISYYLIGYTPEASRFFRQLLILFLVHTGSLSLFRCVASYCQTMVVGSVGGTMSFLVILLFGGFIIPRPSMPNWLKWGFWISPLSYAEIGLTVNEFLAPRWLKTTTSGVTLGRRVIMDRGLDFSSYFYWISVGALVGFILLLNVGYAIGLTIMKPPGTSRAIISRDKFATFDRRSKDMSKDMDNRMPKLQVGNALAPNKTG

SEQ ID NO: 36403 - protein, 168 aa, Oryza sativa
MQQQQQPRMADIDLDAVRAVRVLGRGAMGTVFLVAAAADDAAGGGACYYALKVFDKRSVVASAARQGDAARRARWEVSVLSGLAHPHLPSLLGRAETGDLVAWAVPYCHGGDLNELRHAQPDRVFSPAAIRFYVAELVSALAELHAAGIAYRDLKPENVLLLPTATSR

SEQ ID NO: 36404 - protein, 247 aa, Oryza sativa
MKGFRAALARASARSRAELQVARRRRHPSDPARRLSHSGTAPARPSFGIAFDIDGVILRGRSPIGGSPQAIRRLYSEDGTLKIPFLFLTNGGGVPEHKRAQELSELLGVNISPAQVVHGSSPYKELVNRFENDLIIAVGKGEPAAVMVDYGFRKVLSIDEYSSYFGDIDPLAPFKKWIVQQPDNINLMSEKVHPSYDVFEERVKGVFVVSDPVDWGRDLQVTLSMFRCFKRNLLVPLFLTLYKIVNA

SEQ ID NO: 36405 - protein, 889 aa, Oryza sativa
MYCGQHPKILELLPQIQEALTHLLGDQNDLTQDLASQGMSIVYELGDASMKEQLVHALVNTLSGAAKKKRAIKLMEDSEVFQEGTIGNNPTGGKLSTYKELCSLANEMGQPDLIYKFMDLANYQAAINSKRGAAFGFSKIAKQAGEALQPHLHTLIPRLVRYQYDPDKNIQDSMAHIWKLIVADPKKTIDEHYDLIVEDLLVQSGSRLWRSREASCLALADIIQGRRYGQVSKHLRKIWITTFRAMDDIKETVRNAGDSLCRAVSLLTVRLCDVSLTTSSDANETMNIVLPYLLSEGILSKVSSVQKASISLVMKLAKGAGPALKPHLSELVSCMLECLSSLEDQRLNYVEMHAGNAGIQTEKLESLRIAVAKDSPMWETLDICLKVFDKESLDLLVPRLAQMVKSAVGLNTRVGVASFITLLVQKVMVEIKPYAATLLRLLYSAVLEEKSSAAKRAFASSCAAVLKYASPSQAQKLIEDTTSLHLGEKNAQLSAAILIKSYLSNAADILSGYNAVVLPVIFASRFDDDKDIGALYGELWEDIPSSERVTLQLYLPEIISLLCDSMSSSSWAGKRKSAKAIKKLCDALGESLSVHHNNILESLLKELPGRFWEGKDAILDALAALCSSCHTAMSAEDSGMPSVILNAVCAACSRKSKLYREAAFSCLQQVITAFKDPGFFNIVFPMLYEVSNRSVICKTRNSSSLTASSSAEQDETEGVSVSLDKVLNCVASSITVAFLQDIINQRKNILEIILNSLSPEESWQIKLSSFLCIKELCYKFQNSDGNNTWPEETTYLVEELFHSTAPKVVDVIRLVKIAQVHTAASECLLELSKLYRDFPLVDRKGPKFSGELAELCESEKSEQAKAFLKQCMDILKDFEDPTGLAMEMD

SEQ ID NO: 36406 - protein, 383 aa, Oryza sativa
MEPSASASADPPRRSPWRHPSNGGNPNPNGDAVIDTTSWPALSEAARNPPKPPPCIDSPSEGQGKQSSRHKPARRGGAGADHSPSPRDDRATSWDHGRHHHHHNSGGRRGSFGGRRRGGGGGGFDALYRAPIGPYVRGATAPPPPPPPPMAVAPPPFLPPPLRPFAAPLLFHHDMASPVSPVSPIYYVGPPPPPEALRPLPPFPPTMLAPPAYPYYHPQPQPDPEPEPDADPQQHRANLLKQIEFYFSKDNLCTDVFLRRNMDDQGWVNIALIAGFNKVQESTDDLQYIKDTIQSSSILEMQDDKIRRQNDWNKWVIPRESNTDVLPSPNINNLTAHLGSVGLQESAASSSSMVDENHHEILTNGPTSGNNQAPVVEDGAGKL

SEQ ID NO: 36407 - protein, 195 aa, Oryza sativa
MRPLRRTAASASGFLRRRLLSELAGNGAPLPRVGAVYAFGDNSHGAAGQPAPAADVYVPTPVPSLPTSVAAVAAGHYHSLAVSAEGEVWAWGRNDEGQLGRGHHAPRNTWSKPEKVRGLENVQVRAVSACGVVSAAIGCDGSLWVWGRSKRGQLGLGKDIVEAAVPSRVEALANYDIVKVLTFSLKLSSRMFAPL

SEQ ID NO: 36408 - protein, 399 aa, Oryza sativa
MGILERIKEIEAEMARTQKNKATEYHLGQLKAKIAKLRTQLLEPPKGSTGGGDGFEVTKFGHGRVALIGFPSVGKSTLLTMLTGTHSEAASYEFTTLTCIPGIIQYNDTKIQLLDLPGIIEGASEGKGRGRQVIAVAKSSDLVLMVLDASKSEGHRQILTRELEAVGLRLNKRPPQIYFKKKKTGGISFNSMIPLTHVDEKLCYQILHEYKIHNAEVLFREDATVDDFIDVIEGNRKYIKCVYVYNKIDVVGIDDVDKLARQPNSLVISCNLQLNLDRLLARMWEEMGLVRVYTKPQGQQPDFTDPVVLSTDRGGCTVEDFCNHIHRSLVKDVKYVLVWGTSARHYPQHCGLGHVLQDEDVVQIVKKKEKEDGGRGRFKSHTNAPARISDREKKAPLKT

SEQ ID NO: 36409 - protein, 98 aa, Oryza sativa; identical to SEQ ID NO: 28718

SEQ ID NO: 36410 - protein, 114 aa, Oryza sativa
MFHRCVLSSIFCTARRMGSECRASSRTKSSGFGSGLGKWSGGRGAHDGCGGGKSDGAVRGGRERRWCTAECDGRRWREGARWRGALGGILGKRRRCRGRAWHGVADGASGVARR

SEQ ID NO: 36411 - protein, 547 aa, Oryza sativa
MAPPPPRRPVVQRSLISLLLLPVVLLALPTAAAAGAGWAPFRARDLLPLLPRGLTWPAVGSVHSAVDLLPRFVAHVAPEASSAVAWRATCFADNEAVLTLTHSSSAAAAGRNATTAGAAALGGALLRLKTASAQSWTCMDLYVFATPYRIGWDYYITAQEHTFEIKAWEEPGEMEYVKQHGIAIFLMPSGMLGTLLSLIDVIPLFSNTIWGQDANLAFLQKHMGASFEKRTQPWSANIRKEDVHSGDFLALSKIRGRWGGFQTLEKWVTGAFAGHTAVCLKDENGTLWVAESGYENKKGEEVIAIVPWDEWWGMALKDDSNPQVAFLPLHPDVRARFNETAAWEFARSMYGKPYGYHNMIFSWIDTMSDNYPPPLDANLVMAVMSMWTRLQPLYASNMWNEALNKRLGTEKLDLHGIITETGKRGMSFNQLLTIPEQDDWEYSDGKSTTCVAFILSMYKKAGVFAPFTESIQVTEFTIRDAYMLKIFEDNQTRLPSWCNSGADRLPFCQILGEYKMELPEYNTIEPYANMNENCPSSPPTYTRPLGC

SEQ ID NO: 36412 - protein, 449 aa, Oryza sativa
MATISNVVTNTYCASPTPLLRRRATAMALRVQLVLAVAVVVPALGVAAGGATLGVNYGQVADNLPPPQAAAMLLRSLNATKVKLYDADARVLSAFAGSGADFTVGLPDRLVPRLAADPSAAAAWVRANILPHIPATSITAVTVGNEVLTGNDSAMLRSLLPAMQSLHAALAACNLTSRVVVTTAHSLAVLSSSFPPSSAAFRRELLPYMAPLLAFLAKTGSPFLINAYPYFAYKGDPEHVDLNYVLFEANAGVGDPATGLRYDNMLHAQVDAVRAAICRANYGKAVEIRVSETGWPSRGDDDEAGATPENAARYNGNLMRLVAQGKGTPAAPGEALQVYVFALFNEDMKPGPASERHYGLFKPDGTPAYDVGVKAPTIGGSWKGRANGTSGGGAGGLVVAEGPGGADGAGQGTGFYTVSAAAHKVKRWRCWESLFATVVLVMSSGLCWS

SEQ ID NO: 36413 - protein, 106 aa, Oryza sativa
MDPVSCIPDTSSKSRYLRLPSEEGSIPEKPLAPRSSFVRDLRLLMELGIIPVKFVLLIRRFSNLLSCEKLGRLPDNPGLLVMLIVTNFLCWKMMGGNNPSNLFLDS

SEQ ID NO: 36414 - protein, 521 aa, Oryza sativa
MVVAMATKEEEGGPSSRVPHLPWMRNPVDIDSFSGCPVAHLPRLDPRLVKPLQRMGIESFFPVQVAAWLETIGPGAFERDICINSPTGSGKTLAYALPIVQMLATRKVRCLRALVVLPTRDLALQVKEVFDAIAPVVGLSVGSAVGQSSIADEVSNLIEKSKQGLFPSLDEEYIQMEPQTKVDILVATPGRLMDHISMTKGFSLEHLQYLVVDETDRMLREAYQSWLPTVIQLTRSSDQNHSWSDMNGETLLHPLTTIRRSGVERGFKGKSFPRLAKIVLSATLTQDPSKLSQLELQHPLLLNSGKKRYRIPTKLQSYKLVCKSNLKPLSLIVLLQELRGEKCLVFTSSVESSHRLSTLLEFFEDLPFKFSEYSRLQRESTRRKTLDAFKEGKIDVLIGTDRMARGIHIDGLRYVINYDMPPYVKTYIHRAGRTARAGESGSCFTFLRKHEVKAFDKMLKKADNSSCSLHSLPEESVETLRPVFSSALKKLEESLESEATKKSKSGDKAPNASKRKRTINT

SEQ ID NO: 36415 - protein, 366 aa, Oryza sativa
MAARPTTSESGSTTTDDDVHLSPTSICSGGGGGACVVVGGSRIKILCSFGGRIMPRPSDGALKYIGGETRVLAVPRSISFSDLKKKVEEMFRTEVAAIKYQLVAEDLDVLVSVTCDEDLTHMLDEYDRFEAKRSPSASPRFRVYVFSSQPPVAAAVPSTSRHAGYAPPASHHHLLQHHLHHFQPDHYVATPDGSPPYAGHSHGAVSAGNSPRADAVGPDHPAVFGLKMQRVRSTPNLGSLDASPQHYHQHAADVGGGGGGMAGYMGGSSPVHAGAGHLVSQGGFHSYYHPHGQYAPAPVPVPHHAGVGRYDTRGGGGYVRGSNYVAAPPPPMMPVAIRSGRPVSRGGGAPPYNEMHTPKNATTIWD

SEQ ID NO: 36416 - protein, 337 aa, Oryza sativa
MHKDELVEKNLKMGDVLHIDAGSTFYMVNSGKGQRLKIICSIDASDNIGFGPYQAFFLGGGGGAAAGQWRPVGRGEEEEEEEEELVVDEASSTWSWTKLVGRLLGVVGGGAPSNSVAAQPKKKKDKTVRAPEPYNLYEQGTGFRNAYGSSVAVDKHDYEPLGHSDIGVYLVNLTAGSMMAPHVNPRATEYGVVLSGTGCIEVVFPNGSKAMSATVRAGDVFYIPRYFPFCQVASRGGPFVFFGFTTSARRNHPQFLVGGSSVLRALLGTELAAAFGVPEKAMRKLVLAQNEAVILPSWPEKKKKKKWEEEPEDERWEEKKKAAKQRKPWVIEQVPAK

SEQ ID NO: 36417 - protein, 136 aa, Oryza sativa
MGKDTIADLLTSIRNADMNKKGTVRVVSTNITENIVKILLREGFIESVRKHQESNRYFLVLTLRHQKRKTRKGIYRTRTFLKRISRPGLRIYANYQGIPKVLGGMGIAILSTSRGIMTDREARLNRIGGEVLCYIW

SEQ ID NO: 36418 - protein, 377 aa, Oryza sativa
MCLGVSSQAMLWKTLASEPSTAFLHISLDVNHVLWWVSVALMALVSAIYLLKVVFYFEAVRREFHHPIRVNFFFAPWIACLFLVKGLPRQVWTIHHVVWFLLMAPILLLDLKIYGQWMSGGERRLSKVANPSNHLAIVGNFVGALLGARMGLREGPIFFLAVGLVHYIVLFVTLYQRLPTNVQLPKELHPVFFLFIAAPSVASMAWARLTGEFDFGARIAYFVALFLYMSLAVRVNMFRGFRFSLAWWAYTFPMTSAAIATVLYASEVTNVATRAMAVGLSGIATVTVTGVLVTTMYHAFVRRDLFPNDVSIAITRRKPKFSKILAHLRSSGTDVKELVFSVSSKNGADDSASVSKASNCSSGDQSPVPHAGAGRGR

SEQ ID NO: 36419 - protein, 491 aa, Oryza sativa
MSTPFDLNSAADPQTLAPPKRGRGRPRKNPPPPPPPATDPNPHPPSGAGAGAGAGAGACPFAPGDLVWGKKLSHPAWPGEVISAAPTGAQLLVSFFGDKALAWCDAAQLRPYEPYFPVAELYDGEADDFDAALDASLLEFERRVELALTAPGRIARPFLPRDFIALLHDLAAHRMGFSNRVHAAVAKAHLRAFDKFRGLPDPPEYTLHLGLPNVSAAAATPNNCNSYPPSRRRGRKRKEVEEEILDDSDEDWDPRKKGATDSDSEVDFDRKRVSKGGRGSGAPRGRPRGRPRKNNAGRPAHLKDEDEVIQETVEYQYPPAADMFLQLTSVAADPFNFKGYDSVPVILSFFSKYKDSEVPATYDDKELLQTLGGKKGRKNTARSLYPAAKEEGDLEVADGHRGRRKSAGSIYSASNAEAIPSVDDINSIFRMHGPIMEGATEINKKSKIARVVFSKSADAEQAYSSSGKYNAFGPALLRYDLKYLPMVPQVP

SEQ ID NO: 36420 - protein, 472 aa, Oryza sativa
MSLVELDVLRDALVGLPGVSGLSTEQRKRLTIAVELVANPSIIFMDEPTSGLDARAAAIVMRTVRNTVNTGRTVVCTIHQPSIDIFESFDELLLLKRGGRVIYAGQLGLHSQILVEYFEAIPGVPKITEGYNPATWMLEVSSSLAEARLDIDFAEVYANSALYRSNQELIKQLSVPPPGFQDLSFPTKYSQNFLNQCVANTWKQFQSYWKDPPYNAMRYVMTLLYGLVFGTVFWRRGKNIESVNDLNNLLGATYAAVFFLGAANLLTLLPVVSVERTVFYREKAAGMYSPLSYAFAQGFVEFCYSAVQGVLYTILIYSMIGYEWKADKFFYFLFFMIAAFAYFTLFSMMLVACTASEMLAAVLVSFVLSSWNNFAGFIIPRPLIPVWWRWFYWANPVSWTIYGVIASQFADSDRVVTVPGQSTTMVVKDFLEKNMGFKHDFLGYVVLAHFGYVIIFFFLFGYGIKCLNFQKR

SEQ ID NO: 36421 - protein, 324 aa, Oryza sativa
MELPADGSALARQGSIYSLTFDEFQSALGSAEKDFGSMNMDELLRNIWTAEESQAIAPAAAAASAAAVVGDAQQQQQPIQRQGSLTLPRTLSQKTVDEVWRDIMGLGGSDDEDPAAAAAAAAPAQRQPTLGEMTLEEFLVRAGVVREDMGQTIVLPPQAQALFPGSNVVAPAMQLANGMLPGVVGVAPGAAAAMTVAAPATPVVLNGLGKVEGGDLSSLSPVPYPFDTALRVRKGPTVEKVVERRQRRMIKNRESAARSRARKQAYIMELEAEVAKLKEQKAELQKKQVEMIQKQNDEVMERITQQLGPKAKRFCLRRTLTGPC

SEQ ID NO: 36422 - protein, 988 aa, Oryza sativa
MERATAAHPASSSVSAAHWMATEDLGLRRNIINNMVKKFMTITNSQQDHHYREIQNYAIRCEQDALNKTTNKEDYLRCIAQRIMNMEMKVRRSQSLQAGTTPSTQRPSSQQQNVCTTPQNPGQVPDQHRASAPNSQIEASQEQTVMVAAPDCYLNFNTTAISPVAMCVHPSQQPQSQQHQQQAKQLHPTNVVGYNPTSLNQIQGQSVSGQNFQQNHVLGQNASGSGTQQRQLVETPEQHQLLRMKQQHMRGNQQQNFTQRNQILPAQQAHLGKMQIGHPAVQNNQQNVGMSCQHMTPPQCQVATAQQSSLGCDSPQTLEPIVIAGEVDWREEIFQKIKSFKDAYLSEVLEYDQIVHVPKLTEEQLRSLPVENAEKLRRIRHVKKIIAIMLDLLNTQKSNVRKGMQNIFPIFQQYLGQLRLSISKSKARKTVAKIGCQSQNCSENSHIVNLGSNTAPFTCDARQQKQQEQVISAKTSRMEQAIMTRTPTPQQESHGCHLLGVPSSCFSPKALQPSSTNTIEECFTPSPVTQTVQPIQVASPHVTSPSAYGKSSVPKPSVARVVSHSASIKSRLASSPSRPEGAHAASPNITSVESTLPTPIAKPGTVRAASPCTPVKSTSQSQLSKPAVTEVDSCRACVTSKLKSPVGKPETAGAASPCASVKSTVSLDVDSVTEFLQHRVVAPTVANGGSSNQAIHTLVSAAPPKAAHQADDQVQNGAEEMEAKKPFSRLIETLLSSSPEALLHSSNSMRLAIWEADRIPAPSPLPYRPRNGKMKRDFDHVTSRPISSPLRSMDESCMTYECVAFEDESSGEYNAKRQKTQVNANDALVDEIKTINNKLVDTVMNFADENGTDEIIYQNGGGMLIKLSYISMSLSPSLKSLFAASEMTIVMPVKLLVPADYPKSSPILVDNDDEQRRLSDISYAVAVAFGCAVDELPEPRSIEAMAMAWDGCVRRAVTEVAHRHGGGTFSSRHNQWRAGYLHGPMMSL

SEQ ID NO: 36423 - protein, 314 aa, Oryza sativa
MPMQTTDKTDAVKSMLSGENSEGSDGSKSSDTVEWDPWDPPHPPCPTLPPTASLMCQVEMVKQHHFQVLAVLAASRATNIIAPDRTPQEVRRKFAEICSELADILEKDSVRRFLNLYRRNMRIMGWGLVITSQTMDFIVSFNALRCAKVVLEGKAPKLCQIRANPNYMTSYGYFPLHKAAEKFSVDMIKLLLCYGASANLRTSGQKVIEGLLPLHVAIENTCMHKYLEDNLLTDRKLKQVDLDFIYKLIHLLCLPEMKIFLDTTRLLADNTDNIVDELWNYIKEGRLVHAAILLLAAQRKFVPVLPLIETSAVT

SEQ ID NO: 36424 - protein, 921 aa, Oryza sativa
MGGHDKISNNAVVDAIKGTKDKMYEMSLEIKDQLFIKGIVDKIKDHLDNKKAVIVLQDEEEYVSQWEKTRNALSLLGCATGSAVIVATKNNQRAKEFCFPPGEPVTYSLVGLYHDRVLKLTNQRENQDDYNRQILRDILDKCDPQEFSMKMFMHALYANPNRSNEELCKLHEALQVPQNSLATSNAKKIFKFSYRDLPREHRTCLLYLAIFPPGHKIRRSTIIARWLTEGLITKEDWPTAVRHAERCFDALINRWLVWPSDIGAAGKVKSCMVCDPIHGFITKMAKKQHILDARLSDLWARHFSIFSGLRLRASDGIDKFVHKLPKYSPQLALLKVLDLENCQCFNKNHYLKDICNKILLLKYLSVRGTNVTHLPSEINNLHELEVLDIQQTKMPEHTTRDVMLLKLRRLLAGHVNQRHSHDMGMPIGDEMSLYSSVRIPRKIEKMENIEVLSNVKASWDGNELKNIRKLWRLRKFGVVIHDKDSHLDKLLRAISDLKECLQSLSITVYETKSEGISPNKQLLLPEMFGRLVQPPKLLESLSINGLTHRVRLLPLLARGSNELAKVTLSGTELKQNDLMVMAVLPNLCCVRFQHKAYTERTLTFKVDEFQHLKYFLVEGVNMTDIIFENGAAPELEHIILSFTNICSLCGIGCLPKLMELQLKGNNSILSLPQDRIAPDMNSESRLLTFKKGEFEQLKNFVVEGPNMTDIIFEKEAAPKLQKIVLSLTNVNSLSGVEGLPKLKEIELKGHKFLLSFFANANQITKVTLCDTLLKQEDMHILANKPNMGSIVLLDKSYDESQLAFNKDEFPKLNLLIVECSTIINISFADGSAPKLEKIVWHFSRKDFCLLSGIANLPEFKELEFNGDFVPDKVRKAINAHKRKPILTHKKPQHHGPAPKEEDETRFPWISNLFSKKQEDRR

SEQ ID NO: 36425 - protein, 531 aa, Oryza sativa
MKTASMAASLLIPLCLCILLLRGASAVSDQQEAGRRDSCDRIDRRIRALEPTRRVDSEAGHTELYDDRDGQLPCAGVAAARITIQRNGLLLPSYSNSPRLAYIVHGRGIVGVVIPGCPETYQETSSSSSQEQEDDERRRRGRRGDEERRRSSEGEEEEEEETSRRSFEQSIRDEHQRITTVRQGDVVAIPAGAPFWVHNDGDSPLVAISVHDVSNNANQLDQTSRRFRLAGGQARSEGRQRYGEGESSESETERGGEESYNILSGFDTELLAESMRVSPDIARKLQGRSDKRGNIVRVRRGGLRMLRPATERVTDEEMMRGANAAAAAGNGIDEAVCLMKLRENVADPMKADLYTPNGGRITVLNSQKLPVLKLIKMSVNRGVMRRNAILAPHWNINAHAAVYATSGSARLQVVSSEGRRVFDGELRRGQMVVVPQSFAVAGRAGDEGFAWVSFQTSDGAMNAPVVGKSSALRGMPADVLDNAFGVSREEARMVKFGRGQELAIFSPKSGAAARRRRSPGHRDDGVLAAPA

SEQ ID NO: 36426 - protein, 146 aa, Oryza sativa
MADLFFGGPFRRILYGRPFPPDWASASATAAMDWVETPTSHVLRINVPGLGKDDVKVQVEDGNVLTVRGAAPHAAAEKEREREKDVVWHVAERGRPEFAREVVLPAEVRVEQIRASVDNGVLTVVVPKEPAPARPRTRPIAVSSKL

SEQ ID NO: 36427 - protein, 150 aa, Oryza sativa
MNYYPVSKYHFDLSGTAFGAMAKPGQNDQLRHAGIIDIQFKRVPCNFPGLKVTFHVEEGSNPVYFAVLVEYEDGDGDVVQVDLMEANSQSWTPMRESWGSIWRLDSNHRLTAPFSLRITNESGKQLVASQVIPANWAPMAVYRSFVQYSS

SEQ ID NO: 36428 - protein, 38 aa, Oryza sativa
MFAAVGAASPAAGRVLWLLGSGRPELLTSEFGEKKKGE

SEQ ID NO: 36429 - protein, 191 aa, Oryza sativa
MARGENNTGAHGSGNVPPPATAASTAAGTAAASGKQQARGAGAEGQSVVRRLQSELMALMMGGDPGVSAFPEGDNIFSWVGTIAGSAATAYEGTSYRLSLAFPGEYPYKPPKVRFETPCFHPNVDAHGNICLDILQDKWSSAYDVRTILLSIQSLLGEPNNDSPLNTQAAALWPNQDEFRKMVEKLYKPTA

SEQ ID NO: 36430 - protein, 52 aa, Oryza sativa
MGLVNLYTLGKLDVGYCFVTNLCMYSRSAKSLCFTLTFCWRHLLWNDAQDNL

SEQ ID NO: 36431 - protein, 159 aa, Oryza sativa
MATREGGGRGGGRPPLRVGRTQEYRMGRETQLLAAEGSPPVSLFVLCGDRFEAARLFRSGGLSVRMARVEGHPVSMASCAVGNHHWMLSRDALVARLDARVFVFEMPGFFYAVVGGGGAERKCATLAEIFSRFCSYHDLSTTQQGIPINMQIRTRVITN

SEQ ID NO: 36432 - protein, 453 aa, Oryza sativa
MSSLTAAQFRSLFEMAGGEDISFLFGDDEAAAVAAPVELQGKRGWEEVDQGEGSGAVAAKRQRSPTSSRENSSGSNEGGQEEVSEAAAAMAAAVGRGGGRRLWVKERDSEWWDMVSSPDYPDSEFRKAFRMSKATFEVVCDELAAAVAKEDTMLRAAIPVRKRVAVCVWRLATGEPLRLVSKRFGLGISTCHKLVLEVCAALKAMVMPKVVRWPEAGDAAAIAAHFEAISGISGVVGAIYTTHIPIIAPKSNVASYYNRRHTERNQKTSYSMTVQCVVDSTGAFTDVCIGWPGSNSDEEVLEKSALYLHRGVPGLIQGQWVVGGGSFPLMDWMLVPYTHQNLTWAQHMLNEKVAAVRGVARDAFERLKRRWGCLQKRTEVKLLDLPTVLGACCVLHNICERSGDAVVDADDCAFDLFDDDMVAENAVRSSAAAQARDAIAHNLLHSGGGASFF

SEQ ID NO: 36433 - protein, 46 aa, Oryza sativa
MGDEGEKKKREEAAEEKRRKKQRKKRGVFGDFLSGATLGQDTHCEL

SEQ ID NO: 36434 - protein, 160 aa, Oryza sativa
MEKSIMVSGDEHKAKFLSYLITVFMVAMAVFFSSRMAGWAVCPGAGGITGGCVSGGEDVAKTCLAFALLTVAAQAHLASVLLMDEKKKRNPPAASWVAWLLAVSTCASVSGMFLAYISYGGFVAATSLEWPVAGVASAVNLAVAACTVLRYVRVNGDMDG

SEQ ID NO: 36435 - protein, 141 aa, Oryza sativa
MARGGGGGQREGNALKTAVVVTGGLVLAWFTMESAFKPFLDRLHGALTRNTDPARDPDEENSAAPADRAVEEPAAAAAPVEEGEGKGVELEEKVKGGGRERRAAVAVEVEVRKSRGVVVLRRRCGCRSCLGGSIVHWGLAR

SEQ ID NO: 36436 - protein, 80 aa, Oryza sativa
MPPPPPLAPPPRPHPSTRVAGLDRDANPSLLGQAPRAAGIPRPRLPPPLPLALPLRVEPILRRRGGGGRRRSLRRGGERG

SEQ ID NO: 36437 - protein, 39 aa, Oryza sativa
MLRGVENKHRSGDSQIGQPFELPAESMSRQETTWRTETS

SEQ ID NO: 36438 - protein, 27 aa, Oryza sativa
MFEMDMKYKHTICSGRLINLSCSCPFL

SEQ ID NO: 36439 - protein, 98 aa, Oryza sativa
MIIRALSHNSLLSSFLEKVNPLGGCYIFINLLKREFEPIRLLGLQFLGELLVGVPSEKKGPKFFGLPVGRPRSISENLRKGMTAAAAPRQVRSSLSMS

SEQ ID NO: 36440 - protein, 302 aa, Oryza sativa
MSSLTAAQFRSLFEMAGGEDISFLFGDDEAAAVAAPVELQGKRGWEEVDQGEGSGAVAAKRQRSPTSSRENSSGSNEGGQEEVSEAAAAMAAAVGRGGGRRLWVKERDSEWWDMVSSPDYPDSEFRKAFRMSKATFEVVCDELAAAVAKEDTMLRAAIPVRKRVAVCVWRLATGEPLRLVSKRFGLGISTCHKLVLEVCAALKAMVMPKVVRWPEAGDAAAIAAHFEAISGISGVVGAIYTTHIPIIAPKSNVASYYNRRRAGPRRHRPQPPPQRRRRILLLIKHHRRSWSDQQRYQTNQQK

SEQ ID NO: 36441 - protein, 187 aa, Oryza sativa
MKIVQSTEFVEIPDNVEVFVKSRVVTVKGPRGVLKRDFKHARVDITRLSKKKLKIEKWFGTKKEVAAVRTISTHIKNLIKGVIKGYKYKMRFVYAHFPINTVITEKGAVVEVRNFLGERLIRRVNLYPGVTCAQSKNKDEIILEGNDVELVSRSAALIQQSTTVKNKDIRKFLDGIYVSERITADQD

SEQ ID NO: 36442 - protein, 326 aa, Oryza sativa
MTVVGVDASYTKPFTTSVLMIAPGQTTDVLVTMDQAPTRYYLAARAYDSAQGVAFDNTTTTAVIEYDCGCATDFGPSIPPAFPVLPAFNDTNTATAFAAGIRSPHEVKIPGPVDENLFFTVGVGLFNCEPGQQCGGPNNTRFTASMNNISFVFPQTTSLLHAHYYGIPGVFTTDFPAYPPVQFDYTAQNVPRYLWQPVPATKLYKLKFGSVVQIVLQDTSIVSPENHPIHIHGYDFYILAEGFGNFDPKKDAKKFNYVDPPQRNTVAVPTNGWAVIRFVADNPGVWLMHCHLDVHITWGLAMTFLVEDGYGKLETLEAPPVDLPMC

SEQ ID NO: 36443 - protein, 207 aa, Oryza sativa
MELYDKNGDGVVSYGDFRAQHNESSGEVNSLGFPWWKEEHFNASDADGHGFLNKTEFNDFLNPSDSENPQIINLLCKQEIRQRDKDGDGKLNFEEYFHGLHDHIHGYDYENADISHIGNNTVAKERFSKLDKDSDGFISEHELEPVLDKLHLSERYYARQQAAHAISEADKDHDGRLTLDEMIENPYAFYGSVFLSDDEDYFHDEFR

SEQ ID NO: 36444 - protein, 147 aa, Oryza sativa
MYQAIPYSSTRPWLRPEPAASVVDVVKVETTTAVAGRGGEAEVVGEEEAAEVRRAVAESPVLVVGRRGCCLIHVVKRLLQGLGVNPAVHEVAGEAALKGVVPAGGEAAALPAVFVGGKLLGGLDRLMAVHISGELVPILKKAGALWL

SEQ ID NO: 36445 - protein, 55 aa, Oryza sativa
MPFMILQYGLVYYGFVCHYKFGSVRLLDGLWVCSWNHGDMALSCISLLRSECMGL

SEQ ID NO: 36446 - protein, 381 aa, Oryza sativa
MGCFAFKSKAKNQRAAASGARSPAPTSDGQKSKASSASTPTRSIQELSDERGAQRLRVFDLDELSSATNGFSRALKIGEGGFGSVYRAFFRSAAGGGGGRVVLAVKRLNQRSLQGHKQWLAEVQFLGVLEHPNLVRLVGYCAVDSETSKHRLLVYEFMPNKSLDDHLFNRAHPPLSWRLRLQIMIGAARGLDYLHEGLQEVQVIYRDFKAANVLLDADFKPKLSDFGLAREGPTEGKTHVSTAVVGTHGYAAPDYIETGHLTTKSDVWSFGVVLYEILTGRRSLERSRPAEEQKLLGWVRRHPPESQSFRSIMDPRLGGRYPAAAARQVARLADRCLVKNPKERPAMREVVEELERVLQMEPPTTTAADKDGDRRLPPAKR

SEQ ID NO: 36447 - protein, 260 aa, Oryza sativa
MEAVAVHASFSSYSPPVVAGGRDDAGSSSSSRSMSRLPARVAGAVARGIVTFVFATVGTILGAITGGLIGLATESGMVRGTGIGAISGAVVAMEVVDSSVAMWCSHDSGIWSVLYVLDVIWSLLTGRLVREKVDPAVQNAVDSQMNAADAPFRESAPTLAEMFDTGIPGVAAAATGMPADAIAALPVTTFAAAAGGDDRAGCSVCLQDLEDGERARRLPECGHTFHLRCIDSWLLRHASCPLCRRTVVAAAVAVDDVVVG

SEQ ID NO: 36448 - protein, 128 aa, Oryza sativa
MAMRYLAGKLRAPAPAAAALRRPRSLSANASQGGRSNATTENVARNMDGDLGWVREEIAKLEKLRLEIEETTRYNRLHKRCLIGSVFAGFGLGGLACAWYTRSYRKALKEHFDNPIVWMPPYSTSSPE

SEQ ID NO: 36449 - protein, 59 aa, Oryza sativa
MSARRGRPVAPSPLWVGARRREPATPSPLPAAPDLFFVFFSICDLLDLICDIRDIGSDL

SEQ ID NO: 36450 - protein, 86 aa, Oryza sativa
MANAGLRAYREVLRLVRRLPADARPYYAKYARENFVNYRDLSADDDLAALLRRAYAHSSWVLSKYSIDADAAAGRLKEVCGAEGGA

SEQ ID NO: 36451 - protein, 337 aa, Oryza sativa
MGSAASAAAPPPPPTAQPHMAAPPYGAGLAGILPPKPDGEEEGKKKEVEKVDYLNLPCPVPFEEIQREALMSLKPELFEGLRFDFTKGLNQKFSLSHSVFMGSLEVPSQSTETIKVPTSHYEFGANFIDPKLILVGRVMTDGRLNARVKCDLTDDLTLKINAQLTHEPHYSQGMFNFDYKGTDYRAQFQIGNNAFYGANYIQSVTPNLSMGTEIFWLGHQRKSGIGFASRYNSDKMVGTLQVASTGIVALSYVQKVSEKVSLASDFMYNHMSRDVTSSFGYDYMLRQCRLRGKFDSNGVVAAYLEERLNMGVNFLLSAEIDHSKKNYKFGFGMTVGE

SEQ ID NO: 36452 - protein, 220 aa, Oryza sativa
MATTASPFLSPAKLSLERRLPRATWTARRSVRFPPVRAQDQQQQVKEEEEEAAVENLPPPPQEEEQRRERKTRRQGPAQPLPVQPLAESKNMSREYGGQWLSCTTRHIRIYAAYINPETNAFDQTQMDKLTLLLDPTDEFVWTDETCQKVYDEFQDLVDHYEGAELSEYTLRLIGSDLEHFIRKLLYDGEIKYNMMSRVLNFSMGKPRIKFNSSQIPDVK

SEQ ID NO: 36453 - protein, 326 aa, Oryza sativa
MDNKLGMQMFDGGYVHHGLLKAAQFILERETKTLQELLQQNGPDYKLIFAGHSLGSGIAALMTVLVVNNRKMFGNIPRSQIRCYALAPARCMSLNLAVKYADVINSVVLQDDFLPRTPTPLEYIFGSIFCLPCLLFIMCLRDTFKQDKRKFKDPRRLYAPGRMYHIVERKFCRCGRFPPEVRTAIPVEGRFEHIVLSCSTTSDHAIVWIERESEKALELMKGNEKPTTPPAQQKMERLQSFEEEHKNALERAKTLDVPHAVDLSEVEIQEGSSPTPPSDTHSEATSEAKSAGRTSWDELMHKLFTRDEGGKLVVKEDIKARNIVIE

SEQ ID NO: 36454 - protein, 98 aa, Oryza sativa
MGSLGPAVVVSASAAKMAGGGQQPSTERKETSSAFGGGCCGGGFQMPLHYPRYKKADYEAMPEWHVDCLLREYGLPVDGGVEEKRRFAMGAFLWPDQY

SEQ ID NO: 36455 - protein, 44 aa, Oryza sativa
MKLNVVLVLKKLLLVAFHLRRKESYQVKKTMKMLSRGIMAEGSE

SEQ ID NO: 36456 - protein, 250 aa, Oryza sativa
MATRARATILLLLAAVLFAAAAAASGEDRRRETSLRRCLQRCEQDRPPYERARCVQECKDQQQQQQERRREHGGHDDDRRDRDRRGEGSSEEEDEGRERGSRRRPYVFGRRSFRQVVRSDQGSVRLLPPFHQASSLLRGIKNYRVAVLEANPRSFVMPTHTDAHCICYVAQGEGVVAIIENGEKWSYAIRQGDVFVAPAGTINYLANTDGRRKLIVTKILHTISVPGQIQARTRSIKSLFINSNQLSTHK

SEQ ID NO: 36457 - protein, 127 aa, Oryza sativa
MGFSCRLVMARALLLLILAALASASSMAAKKQGRQPRGCGGHTSTSPTPELELPPCSGHRGQAPAPVLGLLGRRGSPGAPPPPRSHPPVSYVRPQPRPWPPPPPHPQPPFPISPVAPPPPPPPPPCL

SEQ ID NO: 36458 - protein, 346 aa, Oryza sativa
MQTEARVGMAAATMDSGAAAAAARRYSTQQQQQQPPPPQLHHHQPQLGTVPHLLAGGVAGAVSKTCTAPLARLTILFQVQGMHSDVATMRKTSIWREASRIVYEEGFRAFWKGNLVTIAHRLPYSSISFYTYERYKNLLQMIPGLDRNGGFGADVGVRLIGGGLSGITAASMTYPLDLVRTRLAAQTNTAYYRGISHALYAICRDEGVKGLYKGLGATLLGVGPSIAISFCVYETLRSHWQIERPYDSPVLISLACGSLSGIASSTITFPLDLVRRRMQLEGAAGRARVYQTGLFGTFGHIVRTESLRGLYRGILPEYCKVVPSVGIVFMTYETLKSILTELASDD

SEQ ID NO: 36459 - protein, 340 aa, Oryza sativa
MAAAADHAATAIAIPGDPLADSACSTPFVSAPSSPTREREREHHFASPHGAPCFFSAPASPTRGGGGGGCLGDFDFDFSSRFPSPSAAAMSSADELFHNGQIRAVRLSAMLLQPQPLAPLVDGDGHASHLAEEDAAAVEEDGAEADERGRIRSRSVRRKARSMSPFRTRWRAPSPAPETAEEVEAVATPAASRSSSSSSTASSASSTSSRGSRRWAFLKDLLHRSKSDGGKNHHHDTAPPPPPPKRSPSPSPSPSPAPAAASARGGRGAATGRRSRRRSAHERLYEARRAEAEEMRRRTYLPYRQGLLLFGCIGLGSRGYGAVHGLARGLNAAAAVSSRS

SEQ ID NO: 36460 - protein, 221 aa, Oryza sativa
MARPSLPCAVVAVLLLALLPTPSTAGDPDLLQDICVADLTSAVKVNGFACKAAVTEDDFYFKGLAAAGNTNNTYGSVVTGANVEKLPGLNTLGVSMSRIDYAPGGLNPPHTHPRATEMVFVLQGTLDVGFITTANKLYTKTISAGDVFVFPRGLLHFQKNNGDTPAAVISAFNSQLPGTQSLAMTLFAASPEVPDGVLTKAFQVGTKEVEKIKSRLAPKKR

SEQ ID NO: 36461 - protein, 382 aa, Oryza sativa
MRRRRRGPGRRCWSYSARASSSRRRRAAPPPRLLRARRDPAVAVRHAPDLRLAAAAAAAVRVALPRPQARDRQPPPPAAPRRRRRRARRAVRRVVLRVRAGVAGAAAVHVVAAAGDAAGLHRRVRVPLRGPPVHAVLGQRRRAAHHRPGGAGRRAVVGEAGGGVLQGVLDGVLRGHRRGGASRAGDPARRGRHGEVRAPHGARGEGAASLRDGDADAGGDGRGGHGGVRARHGDQGRLPGGGAGSGGVRARRGQLLPRPRLGRRVVAAAQPGHHGAHHLRVVAARRHHDRRAPAALAGPRRHLPPREVRRDEGHRARALALGIRLLPLRREGAEEEGGAEDARARAGGGAGTEDRRRGVSGALVYNGIVRVYLGGSYTYLRV

SEQ ID NO: 36462 - protein, 80 aa, Oryza sativa
MAAARVSIPAAVRRTIQNIKEIAGGHTDEEVYAVLRECNMDPNETTDRLLNQVALYGWWFHCRRSGFYRMDASTFATWNF

SEQ ID NO: 36463 - protein, 144 aa, Oryza sativa
MRASTPHGRRRNNNQVELQHPGHGEEEGGIGGSMADTGGRPEVSLATVRSPGHPAASTTAAAAADLGHADTGQEKPTVERPTGERCRSDGRVRHGVQGPPRRRRRRANAVVGTHGFDDPCPLYTPPVAEKIEKREKRKKKTDIE

SEQ ID NO: 36464 - protein, 65 aa, Oryza sativa
MPPRRKKGVAAKQKPPEPPAADAPLRDRLRWLNDQECTAPLIPILHPLSRILGVFFFFWPCLCIL

SEQ ID NO: 36465 - protein, 79 aa, Oryza sativa
MGRADPSPLGRGEGGSAAAAGRAPPPPPPTSSSGPHHHHPPSRARLRRAVRPALRGAPAPVRGGDGLVQARAVAAAEAS

SEQ ID NO: 36466 - protein, 343 aa, Oryza sativa
MEPAPLASLQEEGEGEPGESPSSAAAAVPPRPATHHSLHKYAPLDWSAYFDEERRVAIPDTEDVFNVYMARSEGPVVFCLHGGGYSGLSFALAASRMKEKARVVSMDLRGHGKSTTSDDSDLSIETLSSDVIAVLRTLYGDSPPAIILVGHSMGGSVAIHVAAKKVIRNLHGLVVIDVVEGTAMASLIHMQKILANRAQHFPSIEKAIEWSVKGGPLRNIDSARVSIPSTLKYDESRECYTYRTPLEETEKYWKGWYEGLSEKFLSCPVQKVLLLAGTDRLDRALTIGQMQGKFQMVVVRHTGHAIQEDVPEEFASHILNFIARNKIGPNGVEIPGLIKKWQH

SEQ ID NO: 36467 - protein, 115 aa, Oryza sativa
MESAPASRVRREDVARAVAALLRWLQHHPTPAPEPIYLLVTLKRAPARRFEHTLRLPRSPFPSISLVSDRLPADLPDGGNGEAEDAKRKSVAVKEQGIVKRRKKSSSVSVGGDQL

SEQ ID NO: 36468 - protein, 257 aa, Oryza sativa
MLRSVSGSNSSRGIAAVVGVGPRLGSAVARKFASEGYTVAILSRDLEKLSQLAEEIAQEAKAQVFALRVDCADARSVREAFEGVLSLGPVEVLVYNACEPPADGDGDASPRPTPFLAISPDAFHRALAVSAAGAFYCAHQVIPGMVERGRGTVIFTGSSASVTGYAGYSDLSCGKFALRGLSQSLAKEFQPAGVHIAHMIIDGVIGEPRSGRGRCGGETASSAGADPDAVAQSYWHVHAQDRSAWTQEMDIRSPSLM

SEQ ID NO: 36469 - protein, 160 aa, Oryza sativa
MSVTLHTNLGDIKCEVFCDQAPRTAENFLALCASGYYDGTIFHRNIKGFMIQGGDPTGTGKGGTSIWGKKFADEFRESLKHNARGVMSMANSGPNTNGSQFFITYAKQPHLNGHYTVFAKVIHGFEVLDLMEKAQTGPGDRPLAEIRLNRVTIHANPLAN

SEQ ID NO: 36470 - protein, 76 aa, Oryza sativa
MKVVWTHHIHVVEGDEEAGGMVVVWLAPTASTSPPSWSNKMVVTSPMWSNIPTAAPLPTPSYKWVVEGTVWSGARH

SEQ ID NO: 36471 - protein, 295 aa, Oryza sativa
MMADKLTELANKKSPYGDVYRRYMAKEFSVVAIAPPIRQTKRHVEMSATNRYPHGLYSLLQVAKSISLIDDIYVSCLTKLSSFDKLEDCKLRSCHHMKHVLEYAYSMGQSLQNVRVSQLQSLIHFYKPLEYNDTSNFDSLKHLHLEYCPRLERIVPRESALPSLTTLDILFCYNLKTIFYQHPCEQPINYQLPILQRMRLQELPLLQHLRDDVNAAISAPAWKELHVRGCWSLRRLPLLRQEHSSQAVEVSGERAWWRKLIWDDDSTMHSASYKSKLPLPFASFNERATVMSYLR

SEQ ID NO: 36472 - protein, 340 aa, Oryza sativa
MSAAMAAFAFLLVIAIVFPLASAFPSPPVSWGQQQLDPHFYDHSCPQAQQIVASIVGKAHYQDPRMAASLLRLHFHDCFVKGCDASILLDSSATIMSEKRSNPNRDSARGFEVIDEIKAALEAACPHTVSCADILALAARDSTVMTGGPGWIVPLGRRDSRGASVQGSNNDIPAPNNTLPTIITKFKLQGLDIVDLVALLGSHTIGDSRCTSFRQRLYNQTGNGLPDFTLDASYAAALRPRCPRSGGDQNLFFLDPVTPFRFDNQYYKNLLAHRGLLSSDEVLLTGGNPATAELVELYAADQDIFFAHFARSMVKMGNISPLTGGNGEVRTNCRRVNHNY

SEQ ID NO: 36473 - protein, 394 aa, Oryza sativa
MVKETGYYDVLGVSPTATESEIKKAYYMKARQVHPDKNPNDPKAAENFQALGEAYQVLSDPTQRQAYDAHGKSGISTEGIIDPAAIFAMLFGSELFEDYIGQLAMASMASLDNFGEDEHIDTRRLHERMQAVQKEREEKLAETLKNRLHIYVQGNKEEFVQLAQAEVTRLSNAAYGTVMLNTIGYVYSRQAAKELGKKAIFLGVPFVAEWFRDKGHFIKSQVTAAAGAIALMQLQEDLKKYLSAEGHYTEEELEMFMQNHKKVMVDSLWKLNVADIEATLSRVCQMVLQDGSVRREELRARAKGLKTLGKIFQRVKLNNDEGEASDMRNIDNMDDNDGSSPDTSPRREPPYNPIPNPPHAQSPYVEAPQFGGTYYPFNFPMPTAPPGAQRDPIP

SEQ ID NO: 36474 - protein, 318 aa, Oryza sativa
MNTRGSGSSSSSSSSQASLMAFSEPPKPASQPSPPSSPMSERPPSGRSRRRAQEPGRFLGVRRRPWGRYAAEIRDPTTKERHWLGTFDTAQEAALAYDRAALSMKGAQARTNFVYTHAAYNYPPFLAPFHAPQYAAAAAAPSSVQYGGGVGAAPHIGSYGHHHHHHHHHGHGAASGASSVGECSTMPVMVPVDPHRSSMSSSLLDMDRNGHDFLFSGADDNSGYLSSVVPESCLRPRGGGAAADHQDMRRYSDADAYGMMGLREDVDDLAQMVAGFWGGGDAADQLGACGFPASGGAADMVASSQGSDSYSPFSFLSH

SEQ ID NO: 36475 - protein, 185 aa, Oryza sativa
MQQQPMPMPAQAPPTAGITTEQIQKYLDENKQLILAILENQNLGKLAECAQYQAQLQKNLLYLAAIADTQPQTTISRPQMVPHGASPGLGGQYMSQVPMFPPRTPLTPQQMQEQQLQQQQAQLLSFGGQMVMRPGVVNGIPQLLQGEMHRGADHQNAGGATSEPSESHRSTGTENDGGSDFGDQS

SEQ ID NO: 36476 - protein, 155 aa, Oryza sativa
MGVDDIIAELRVLPAKILLKKKPKQFQKVEVKVRMDCEGCERKVRKAVEEMKGVSSVEVDAKQNKVTVTGYVEQEEVVGRLRRRAGKKAEPWPYVPYDVVPHPYAPGAYDKKAPPGYVRNALADPDAAPLARATEEEEKLASAFSDENPNSCAVM

SEQ ID NO: 36477 - protein, 350 aa, Oryza sativa
MALVLPDITVATIEDLHVLAMLDEPRFIDLVSIPAVRRAAEFEVAITPKVDYDGWVCNKLEDLRRVRRFDDLLTDLQKRILPMLGNNPDDKAALRNLRTCGYAMWSVRQHAHPSLHNLVGFYSNTVTRKARQALDPYKAYTIKQEWLHAMALRVEGSRSAFMPFDSDYVPPSPPMPTIVVSSLVDVHGVRFAIDPHRVELGAVDAVRLAPEYLHILLEKVEQEGWICPTLPALRHVARFANLLTDLQDRVLPGLLNDHTDPAVLRKLRTCGCGMKKLRAVAKGPLLRLTRLFSNCLTRHARDALDARKDFRISADWIDKIAVRVDRCLTIPLHLHHHLEDPFVDHLHDLP

SEQ ID NO: 36478 - protein, 49 aa, Oryza sativa; identical to SEQ ID NO: 35410

SEQ ID NO: 36479 - protein, 57 aa, Oryza sativa; identical to SEQ ID NO: 35009

SEQ ID NO: 36480 - protein, 362 aa, Oryza sativa
MQRSPVDKPPFTLGDIKKAIPPHCFHRSVIKSFSYLLHDLAIAAGLLYFALVGIPALPSILRLVAWPLYWAAQGSVLTGVWVIGHECGHHAFSDYLLLDNLVGLVLHSALLTPFFSWKYSHRRHHANTGSMEKDEVYVAKKKSALPWYTPYVFGNPVGRLVYIALQLTLAWPLYLAFNLSGQPYPRLVTCHYDPYSPLFSDQERVQVLVSDAAILAVLLALHRLTAAYGLWWVVRVYGVPVMIVGALFVLITYLHHTHRALPHYDSSEWEWLRGSLATVDRDYGVLNRVLHNVTDTHVLHHLFPSMPHYHAMEATRAARPVLGEYYKFDRTPIIEATWREAKECMYVEPRERDGIYWYNNKF

SEQ ID NO: 36481 - protein, 166 aa, Oryza sativa
MARVEAVVVCLLIIAMDVVAGVLGIHAEKAQHQGRRLRILFIECRQPVRRAYELGVAAAAVLAASHAIANVVGGCSCACSRDRRATPNRQMASFALVISWIVLVVGLALLILGALPNAERKAAKCSLPRHHFLSIGGILCFVHGLFCLVYYASANAAKREEGGRHP

SEQ ID NO: 36482 - protein, 174 aa, Oryza sativa
MKRTRAQQPKLQEGQDGGGAAGNANPKPQRRAKQPRQPKAASAAAKKAAAAAAARESSSSSVGAGAAVTSAASSSCSSGADMAPTVPDVCGGGGGGAGYEAGAATTVEWDLDGGLSNGLSWWTFGVEEEKLLGWFPFVEEDFRCLGARGDAEMAFDDDIWRIHQIYEIPNYAAK

SEQ ID NO: 36483 - protein, 122 aa, Oryza sativa
MWGSARRSSPTSAPRSSPTTRPRSSSCSPSCRPRCARSPWCSSARGRLAAAARTGGRRRRRMGGASPQSTRSPSPSRCTSSPPTSPASGEAAGSCRPSSWPSSLCSSRPPPRCRRTWRGSPG

SEQ ID NO: 36484 - protein, 268 aa, Oryza sativa
MAAAGAMPGGLLLTFLLLAVVASGAYNGAGEPPVSRRSFPKGFIFGTASSSYQYEGGAAEGGRGPSIWDTFTHQHPEKIADRSNGDVASDSYHLYKEDVRLMKDMGMDAYRFSISWTRILPNGSLRGGVNKEGIKYYNNLINELLSKGVQPFITLFHWDSPQALEDKYNGFLSPNIINDFKDYAEICFKEFGDRVKNWITFNEPWTFCSNGYATGLFAPGRCSPWEKGNCSVGDSGREPYTACHHQLLAHAETVRLYKAKYQVTEESL

SEQ ID NO: 36485 - protein, 217 aa, Oryza sativa
MDSPATNQSVEDKAPAIDPSERHPLEEDKASVMDLSGKGKALVVDPSDLGVCRTEVKIPASAVNPSGEGKAPMEKKKKKKTKTKMARFTQAQINNCMAFKEEMPDFDNMPSIIEILGDDLAKCSQEYIDELKAIDDSREEDKKFWIEMNRQIREEREGILNQYYTKGYAEYEVDDDEDEDEGNKGHARVAATSGRRRFRHGVALKKNQSGGGSIRKI

SEQ ID NO: 36486 - protein, 142 aa, Oryza sativa
MQCAANAVFPCTLKILPNRVYRKKDPFLCDVEVLEGVVKVGTPICVYVGGTVHGLGRISSMQTSNGNQIDSAKRGVVVSVKITGESPKEKTWLYGRHFDESNELISQISRRSIDVLKEYYRDEMNDENWQLIRRLKKLLDIA

SEQ ID NO: 36487 - protein, 91 aa, Oryza sativa
MASSSKALLLLAVLLASAVLLAAAADQPHGKEQKKTESGGGAGVQDWHDDHGGGGHHGGGGGGYPGGQCHHGCCATADEKPDPMYRPEAHN

SEQ ID NO: 36488 - protein, 22 aa, Oryza sativa
MTQAALALHPCVFHSLVPLLWI

SEQ ID NO: 36489 - protein, 21 aa, Oryza sativa
MPLVSFKLGLDFDISIKLCID

SEQ ID NO: 36490 - protein, 428 aa, Oryza sativa
MVGVMLENLSCTATIARTTISSVFRTVQIAASIHKSLYNQKAFPEALFHQLLLAMMHPDKKTRVGSHRVLSTIIAPSLLCPWSGISFPIPVKGNDSQSITLLALSAFSSEAVMDEVRIKSRTHEQLQNNVKPETVVGSENGYTHTEPNSRKSPGLGIPLKDENLKFMKLNSSQLVLLLSSIWSQAPLEDNSPANFEAMCHTYNIALLCSMTKSSSHAALVRCFQLAFSLRRMSLNQENGLQPSRRRCLYTMASAMLIFSAKVADIPQTIPLVKAAVPEKMVDPHLCLIDDCRLVISSPQSSNSGIVYGSEEDESDARNFLSCVNKNDTQLKEIVISHFKEKFENLSEKFNGIEEQLLQEFSLDDSFPLSAPLFMETPHSCSMYAEKDDHCFDEEVIPCEMDDDDDIVLNTVDRNLTGKPLDLWLHQMF

SEQ ID NO: 36491 - protein, 866 aa, Oryza sativa
MVSRSYSNLLGRRRIPRVVTASGIVPDLDYSDDDAASAASSSDHSSAHSHAPRERAIIVANQLPIRASRRGGGGGGWEFSWDEDSLLLQLRDSLRAHADRADDMEFVYVGGLRDDVPAAEHDEVAHHLLEGFRCVPTFLPADLRSRFYHGFCKQQLWPLFHYMLPLSPELGGRFDRALWQAYVSVNKIFADKILEVISPDEDYVWVHDYHLMILPTFLRKRFNRVKLGFFLHSPFPSSEIYKTLPVREELLRSLLNAGLIGFHTFDYARHFLSCCGRMLGLKYESQRGYIALEYYGRTVTIKILPVGVHLEQLRSVLNLPETGVKVAELLKQFCDQNRLMLLGVDDMDIFKGISLKLLAFEQLLMQHPEWRGRVVLVQIANPARGRGKDVKEVQDESYAMVRRINEAFGQPGYQPVILIDRPLQFYERMAYYVVAECCLVTAVRDGMNLIPYEYVIARQGNEKLDGILGLGPSARKKSMLVVSEFIGCSPSLSGAIRVNPWNIDAVADAMDSALEMPEGEKVLRHEKHHKYVSTHDVGYWANSFLQDLERTCLDHSRRRCWGIGFGLRFRVVALDPNFKKLAVEHLVSTYRRTTTRIILLDYDGTLMPQTSFGKSPSSKTIDMLNSLSRDQNNMVFLVSTKKRSTLEEWFSSCDNLGLAAEHGYFLRLKRDAEWETCVPVTDRSWKQIAEPVMKTYTETTDGSTIEDKETAIVWSYEDADPDFGSCQAKELHDHLESVLANEPVTVKAGLNHVEVKPQGVSKGLVAKRLLSIIRENSLLPDFVLCIGDDRSDEDMFEVITTAAQDNCLSPDAEVFACTVGRKPSKAKYYLDDLADIVRLIQGLANVSDEMHSTMPTPVDAADTALR

SEQ ID NO: 36492 - protein, 212 aa, Oryza sativa
MEVLSWRTVCLLVLCTVALLRPAAAIRFVIDREECFSHNVEYEGDTVHVSFVVIKADTPWHYSEDGVDLVVKDPNGAQVRDSRDKTSDKFEFIVQKRGVHRFCFTNKSPYHETVDFDVHVGHFSYFDQHAKDEHFAPLFEQIAKLDEALYNIQFEQHWLEAQTDRQAILNENMSRRAVHKALLESAALIAASVIQVYLLRRLFERKLGTSRV

SEQ ID NO: 36493 - protein, 107 aa, Oryza sativa
MGEEAAKQMAEAPGKIESMRKWVIDHKLRAVGCLWLTGISSSIAYNWSRPNMKTSVKIIHARLHAQALTLAALVGSAMVEYYDAKYGTSGPKVDKYTSQYLAHSHKD

SEQ ID NO: 36494 - protein, 197 aa, Oryza sativa
MTGGGGGGGGTAAQAYGEAWYWDERYRKEAGPFDWYQKYPALAPLLAVYVRRHHRLLLAGCGNSVFGENMVDDGYQDIVNIDISSVVIDQMKKKYRDKPHLKYMKMDVRNMAEFESGSFDAVIDKGTLDSIMCGQNSQENASQMLEEVNRILKDKGVYILITYGDPSYRLRLLKDLQLWTVKLHVIDGKGVGSLHGN

SEQ ID NO: 36495 - protein, 76 aa, Oryza sativa
MGAVVTAVIAIAAVVLGWITIEMAYKPCLDSGRRAMDRALDPNYDPDEPTAAGAAANEPLLADLSAASAAALAKTI

SEQ ID NO: 36496 - protein, 82 aa, Oryza sativa
MASIKLALPMALLLCGLMVIGSIQSAEAQGGKFCPQFCYDGLEYMTCPSTGSQHLKPACNCCIAGEKGCVLYLNNGQVINCT

SEQ ID NO: 36497 - protein, 71 aa, Oryza sativa
MNAFIKRLLAVSDPAQMKTTVSETSANQLANLMFWLMIVGYSMRNIEVRFDMERVLGAAPKIGELPPGENI

SEQ ID NO: 36498 - protein, 199 aa, Oryza sativa
MGCSSSVPARSTGGLNNISNDNSATDSKDLRAKLVLLGDSGVGKSCIVLRFVRGQFDPTSKVTVGASFLSQTLALEDSTIVKFEIWDTAGQERYAALAPLYYRGAAAAVVVYDITSPESFSKAQYWVKELQKHGSPDIIMVLVGNKADLHENRHVSSQEAQEYAEKNNMVFIETSAKTADNINQVFEEIAKRLPRPTAS

SEQ ID NO: 36499 - protein, 115 aa, Oryza sativa
MVLSCLGSMSKWEPVTFEESLCFVKKVKARDYVLYLSLLDVLSRNEQIPLEAYSELSLLFRDHDDLLEELAKFRPLPTPSTVYSHSSVWLLFFLMPLLVLSILLKCFLLQQPVAS

SEQ ID NO: 36500 - protein, 234 aa, Oryza sativa
MTQEQILAFEQSGEISFFGHCLKLDDIKVIRQFKRPANVAENEIDAAGDGDVLVVLDLRADQSLFEAGVAREVVNRIQKLRKTAQLEPTDLVDVYYKPMDDGKNTLVEIVQSQDQYIRDALGNPLIPKMAAPPDAVMICEESHNVQDMSFVIYIARVSPVVTDDLLVHAAGNREHFDALKVYLLSRSISRLKNEFQAGNGKITVDFIEGFPPIDLQLGKHVFLSTGDFYLATRS

SEQ ID NO: 36501 - protein, 458 aa, Oryza sativa
MDYNPVDSSGTDDDLPPTYQNRGVRGSGRVSGNGRDIVSAVPYNRTKPQTDMETQIHQLEQDAYCSVLRAFKAQSDAISWEKEGLITELRKELRVSDKEHRELLNRVNGDDIIQRIREWRETKGGLQADMVNNAQRSHDRVPSPTTSARKRQKTSQSIPSASVPVPSPAVHSQTLTAPMQPLSSATKKVAPPGTKGKKTKPGQKIPGGSAIKTMSSAGPSGRGPIMNKNLSGGLPTEPISVNPLIGRKVMTRWPDDNSFYEAVITDYDPQLDRYALVYDINTADETWEWVDFKEMAPEDIRWEGGDPGIIQQGRGATVHGGKKSSSRNGPMSGPGRGSRGPQKNTSRKEFPPSQNGVGKKSSDCIEILHTESLIKEVERVFSASNPDPLEMEKAKKVLKEHEQSLIDAIARLAEASDGESEERAQPLQHNRGWRNHHGGNYANDMTIDGHMVGDADAL

SEQ ID NO: 36502 - protein, 1170 aa, Oryza sativa
MASSGGGGLRHSNSSRLSRMSYSGEDGRAQAPGGGGDRPMVTFARRTHSGRYVSYSRDDLDSELGNSGDMSPESGQEFLNYHVTIPATPDNQPMDPAISARVEEQYVSNSLFTGGFNSVTRAHLMDKVIESEASHPQMAGAKGSSCAINGCDAKVMSDERGDDILPCECDFKICADCFADAVKNGGACPGCKDPYKATELDDVVGARPTLSLPPPPGGLPASRMERRLSIMRSQKAMTRSQTGDWDHNRWLFETKGTYGYGNAIWPKENEVDNGGGGGGGGGLGGGDGQPAEFTSKPWRPLTRKLKIPAGVLSPYRLLILIRMAVLGLFLAWRIKHKNEDAMWLWGMSVVCELWFGLSWLLDQLPKLCPVNRATDLAVLKDKFETPTPSNPNGRSDLPGLDIFVSTADPEKEPPLVTANTILSILAADYPVEKLSCYVSDDGGALLTFEAMAEAASFANMWVPFCRKHDIEPRNPESYFNLKRDPYKNKVRSDFVKDRRRVKREYDEFKVRINSLPDSIRRRSDAYHAREEIKAMKRQREAALDDVVEAVKIPKATWMADGTHWPGTWIQPSAEHARGDHAGIIQVMLKPPSDDPLYGTSGEEGRPLDFTEVDIRLPMLVYVSREKRPGYDHNKKAGAMNALVRSSAVMSNGPFILNLDCDHYVYNSQAFREGMCFMMDRGGDRIGYVQFPQRFEGIDPSDRYANHNTVFFDVNMRALDGIMGPVYVGTGCLFRRIALYGFDPPRSKEHSGCCSCCFPQRRKVKTSTVASEERQALRMADFDDEEMNMSQFPKKFGNSNFLINSIPIAEFQGRPLADHPGVKNGRPPGALTVPRDLLDASTVAEAISVISCWYEDKTEWGQRVGWIYGSVTEDVVTGYRMHNRGWKSVYCVTKRDAFRGTAPINLTDRLHQVLRWATGSVEIFFSRNNALLASRKMKFLQRIAYLNVGIYPFTSIFLIVYCFLPALSLFSGQFIVRTLNVTFLTYLLVITLTMCMLAVLEIKWSGISLEEWWRNEQFWLIGGTSAHLAAVLQGLLKVIAGIEISFTLTSKSGGDEADDEFADLYIVKWTSLMIPPIVIMMVNLIAIAVGFSRTIYSEIPQWSKLLGGVFFSFWVLAHLYPFAKGLMGRRGRTPTIVFVWSGLLAITISLLWVAINPPSQNSQIGGSFTFP

SEQ ID NO: 36503 - protein, 1078 aa, Oryza sativa
MFDQKQSMLCSDDRPGGSPANAGEEIPEDRTTLKDSRFRFVYSRKRSCRRKNGFLNTSEQDSDLKYRKVTGALFASVAGWGSVTENVTSRRHGILVLSQPLKSIYKIMSEACHVWLLNALVLLHRGAMVSLWPAVHLEILLVDDTLGLKHLLLETSLRSAVSLFCLLVGCFNSYSKASTRNESKMLCTSVRVRISGLHGRSQVVFLMFSFVGVKYPKWKHLQGQLQHHHIKRGLSKVNCACADIKQLTNGTDQRVCTSTEHFSKGLSLDAQDSLFFTESKYSNVDPIIFCLDERSKSVQNHLDVAAAPSLLFFHHLKLRSESNLTSKSLPEFMPITLEEDQQSLPQHTSDLVHLAASASEVCSVYVSPSNTGSLDMGTAGCINHSGSASSKLNTAKRTVSLDCNSRGIGGANITSRSFPDQIMDGSLSAVCPPQKYQKRCSSISIPGDNISDPPDDKLLNKEEKAMQPTSDLVQELNEYPIGRVTPTAPRTPYHRNRFTSLSRTFGDGSKLWQEDIMVTGFAGGSKKPRTQVLYSVSPRSDEPGSKHKGHFRKIQSHSSAKRLPDNSRSEQSSPESLACVANVLVTVGDRGWREYDTQITIDSDGQSERRICVKLAEGTKYAHKVLQVLQPGATNRYTHAMIWKGGTEWCLEFPDRSQWLIFKQMHDECYSHNIRAASVKNIPIPGVCFAEAHDDHDAVSFVRSQDYIGHIGTDVEMALDESRVIYDMDSDDEVWVSRWRKLGKDSTSVTDDLFERIMDKFEKLAYSHNCNELTIDQMKELDSDNIPLDTIKVIHDYWQDKRKKKGMPLIRHFQSAMWKIHEQQLQEWESTALRIQGSSNGYQVKLPPKPALFAFCLRPRGLQPQIPYKGPKQRSHKKLMSSGSFSREQDGFYRPGRKYSEYVGDGRACESYDGGSIYSPTGYSPRFSVKTESPRAFDGLERCSTPRFLRTNSVKRTASFAFSEDHQPSPSFRHQRVKRGAPDHWNAVIHEWQSSKHLLPGASQSPRVDIEELKQRDASSAAQHAVAMAKLKREKAHLLMHKADLALHKATVALMMADAIKASSRDSSRDGRRDFRDD

SEQ ID NO: 36504 - protein, 378 aa, Oryza sativa
MNTSKSRQCGSILKKLMDHKSGWIFNTPVDPVVYGIPDYFDVIRNPMDLGTVKRKLTSKQYSNPYEFAADVRLTFSNAMKYNPPGNDVHGIADQLNKIFDSEWKLLERKWKDRNLVQEQPSLKVLKAQPAVTPKPVLPKGVTAGTNSAVSKTLATALSSKVKIKFSVRGSELTSSKDTPLQAVGRRDGTINQSLPCTKDNAKTPRIQSSEDRSESTGNELRPCDDASTSPLASSRQEEEYLPEEPLSPSKALRAAMLKSRFAAAQLKLDEEMKMKREQERRAARLALHMMKKTVDIDNSDFLKDLENLSKKWELNPPGKLIVDFVDGIDLPPGLGSPLERLGLFMKKDLEEEVEHEMEDSVSPSTEIDVEEGEISFCQ

SEQ ID NO: 36505 - protein, 40 aa, Oryza sativa
MNGLSSSPGFWFFCLQTNDGSMSVKLCDLDQWVKVYDVIV

SEQ ID NO: 36506 - protein, 514 aa, Oryza sativa
MPKSKSFVPVAGHANYLHKGSSLSAKHASNVLRSTDGTFSFGFYNLSSTVFTLSIWFTNSADKTIAWSANQDRPVHESGSKVMLNKDGSMVLTDYDGTVVWQISSSAEAVRAELMDSGNLVVKDQGGSILWQSFDHPTNTLLPMQPVTATAKLVSTDPSHPTSYYTLRFDDRYVLSLAYDGPDIFNLYWPNPDQSSWTNYRISYNRSRSGVLDKLGKFMASDNTTFYASDWGLEIKRRLTLDYDGNLRLYSLNESDGSWYNSWMAFSQPCEIHGLCGWNGICAYTPKIGCSCPPGYVVSDPGDWSRGCKPAFNLTCSNDGQKMSFVRIPQTDFWGFDMNYVMSTSLHACRAMCLASCSCVAFVYKVYPNGCFLKSDLFNGKTVSGYPGAAYIKVPQSFLSRSQAHVSELANRHVCNASKTQTFNYATQSNKGTGMMWYYYYCFLAAFFLVELCFIAFGWWFMAKTHSARSAIWAAEEGYRVVTDHFRRFTYKELRRDCYSGSIGTRLQLVWPKG

SEQ ID NO: 36507 - protein, 462 aa, Oryza sativa
MDSGYSSSYAAAAGMHVVICPWLAFGHLLPCLDLAQRLASRGHRVSFVSTPRNISRLPPVRPALAPLVAFVALPLPRVEGLPDGAESTNDVPHDRPDMVELHRRAFDGLAAPFSEFLGTACADWVIVDVFHHWAAAAALEHKVPCAMMLLGSAHMIASIADRRLERAETESPAAAGQGRPAAAPTFEVARMKLIRTKGSSGMSLAERFSLTLSRSSLVVGRSCVEFEPETVPLLSTLRGKPITFLGLMPPLHEGRREDGEDATVRWLDAQPAKSVVYVALGSEVPLGVEKVHELALGLELAGTRFLWALRKPTGVSDADLLPAGFEERTRGRGVVATRWVPQMSILAHAAVGAFLTHCGWNSTIEGLMFGHPLIMLPIFGDQGPNARLIEAKNAGLQVARNDGDGSFDREGVAAAIRAVAVEEESSKVFQAKAKKLQEIVADMACHERYIDGFIQQLRSYKD

SEQ ID NO: 36508 - protein, 708 aa, Oryza sativa
MATVTPGVLLKLLQAMHTDDRVAGDHRSPVLQVTAVVPALTASTADSLWPSNGFLLQLSDGLHSTYVQPSSADADALVSARPQLVGHLVHLDRLRFARPVPRAVGIRPVPSSRSVSFVGNPEPLVARPAACSRGYVIQPGSHSDAAPPLMPSSSGNAAQSDATNAINRTVLAHKNVPEAAPPPAVSAAKRRFSSPAPSKQRDPSPSVKGGASRPSSPSVKGASRASSPAVRGTPRATSPAPSKCVVPSLVAAKEENRRTAREPAIIVPSRYRQPSPVGGRRGAGSPAPGGRRASLSPSSRRLSGEGSSKKKVGVLVAGISKMTDLTNGSAVKPGRKSWDNTSIAAAAGSVMKSKVKVDKSTILRTQEAMARRLSDVTTELSSNDDDSSVDEKPKPRKKIESPAVKTKAMAPKIMLHDPKWTDGSIPLDGVSDVLSKMGKEATERRDAAAIAAADALQEALITESVIRNLSKFSELTSASKTSNPLPTVDIFLAVYEDTLKWKKIAESISTNRTETASWENSVTHWVEAALATDLEVLKLMNKAPESLSRKRGADKPKAPLVVEAPRTTISKRQSHGTSAKVQSKVLPTSSASCAWNKTQGVNETAELATTLCCEMHTWFLKFVDEAMDLGFHLFEDQNVASRGKQSSHITMVLSQFKKISDWLDGVGKIAEEATTKDKVEQLKCKIYGFVINHMGSAFDSSVSISSRN

SEQ ID NO: 36509 - protein, 300 aa, Oryza sativa
MVEIPAIDLRLAGGGGGAEETARLRDACARLGCFRVSGHGVPPGLQAEMKAAVRALFDLPDDAKRRNADIIPGSGYVPPGTANPLYEAFGLCDAAAPADVDAFCARLDAPPHVRETVKAYAERMHSLIVDVAGKVAASLGLHGASFQDWPCQFRMNRYNYTQDSVGSPGVQVHTDSGFLTVLQEDECVGGLEVLDPAAGEFVPVDPLPGSFVVNVGDVGQAWSNGRLHNVKHRVQCVAAVPRVSIAMFLLAPKDDTVSAPGELVDGEHPRRYREFKYDDYRRLRLSTGERAGEALARLAA

SEQ ID NO: 36510 - protein, 609 aa, Oryza sativa
MAAAAAIAAALLRRSTSSQHHRRILLLPADDAHALLLPAFAEFCVTHLADELRKHESVMAAADLTAPHAWYPFARAMRRRVVYHCGPTNSGKTHNALTRFAAAKSGVYCSPLWLLAMEVFDKVNALGVYCSLRTGQEIKEVPFSNHVACTIEMLSTEEPYEVAVVDEIQMMADPVRGYAWTRAVLGLKADEIHLCGDPSVLKIVRKICADTGDDLEVHQYERFKPLVVEAKTLLGDLKNVRSGDCIVAFSRREIFEVKLAIEKFTKHKCCVIYGALPPETRRQQAKLFNEQDNEYDVLVASDAVGMGLNLNIRRVVFYSLAKYNGDRMVPVAASQVKQIAGRAGRRGSIYPDGLTTTFLLDDLDYLIQCLQQPFEEAKKVGLFPCFEQVESFAIQFPDLTFNELLDKFRENCRVDSTYFMCHQESIKKVANMLERIQGLSLKDRYNFCFAPVNIRDPKAMYHLLRFATNYSQSRRVSIAMGMPKGSAKNDTELLDLETKHQVLSMYLWLSHHFEEDHFPHVQKAEEMSINIADLLAKSLAKASWKPTSRQQAKPRRENEEDNDVEQASDDNAKNDSEDGYERSISRIKPFMRKRLDRPSQDPSSLNFVA

SEQ ID NO: 36511 - protein, 306 aa, Oryza sativa
MEERIPLLSKRFPADGTAGVGGGREEEGGDRWWSGLAREAGKVGSMALPMAAMSVAQNAVQVASNMMVGHLPGVLPLSASAIATSLASVSGFSLLVGMASGLETLCGQAYGAKQYDKLGVQTYRAIVTLTVVTIPISLLWVFIGKLLTLIGQDPVISHEAGRYIVWLIPGLFAYAVCQPLTKFLQSQSLIFPMLWSSIATLLLHIPLSWLLVFKTSMGFTGAALAISISYWLNTFMLAAYIRFSCSCKVTRSPPTIEAFRGVGLFLRIALPSALMLCFEWWSFEILVLLSGLLPNPELESSVLSIW

SEQ ID NO: 36512 - protein, 868 aa, Oryza sativa
MLVNDKVSKTEKKRKRGDTGAAENNGKGKKMLTGENALMCHQCQRNDKGRVVWCKTCNNKRFCVPCINQWYPDLPENEFAAKCPYCRKNCNCKACLRMRGVEEQPPRKEISKENQIRYACHVLRLLRPWLIELRQEQMAEKELEAKIQGVSVDQIKVEQAVCDLDERVYCNRCSTSIVDFHRSCKHCFYDLCLTCCQELRKGEIPGGEEVEILDPEERDKDYAFGKILSDGENQRDSLKCRSDTQNSESNKGMASDENQKKALLLWKANSNGSIPCPRKEKEDCSFSSLDLKCLFPEKLLPELEDRSEKVFWSETFAKELGRTSELCPCFDHSGKIRSDSKKLRQAANREDSSDNYLYCPVATDIQDADLLHFQMHWAKGEPVVVSDTLKLTSGLSWEPMVMWRAVRERTKGKAEDEQFAVRAVDCLDWCEVEINIHMFFMGYTRGRTHPRTYWPEMLKLKDWPPSSSFDQRLPRHGAEFISALPFPEYTDPRYGPLNLAVKLPGGVLKPDLGPKTYIAYGFSEELGRGDSVTKLHCDMSDAVNILTHTAEVPCETYDAVQIKNTQKKMKMQDDMEIYGMIESGSELKPSACPVELGNKAVGEAPKASCSKENVHTLKDKSNGLDINASPPDDAGGDARDEALSYESVVHSDVAQCPNHNHETNNSDDARIGAQRCQKKAKGRPPKTGSGVSEHQESGGALWDIFRREDSEKLQDFLRKHAPEFRHIHCNPVKQVIHPIHDQAFYLTAEHKRKLKEEYGVEPWTFEQKLGEAVLIPAGCPHQVRNLKSCIKVALDFVSPENVGECVRLTKEFRRLPSSHRAKEDKLEIKKMAFHALNEVLNFLDPPSSEGSKEAAEKPRRGRGRPRKH

SEQ ID NO: 36513 - protein, 453 aa, Oryza sativa
MKFMKLGSNPDTFQDDGNEVSIVATELVSDVTVRIGTTKFYLHKFPLLSKCARFQKMIPTTGDENIEIHIHDIPGGAKAFEICAKFCYGMIVTLNAYNVIAARCAAEYLEMHETVDKGNLIYKIEVFLSSSIFRSWKDSIIVLGTTKAHLPWSEDLKLVSHCIDSIASKASTDTSKVEWSYSYNRKKLPTENGLDLEWNGVKKQQFVPHDWWVEDLADLDIDSYKQVITAIKTKGMVPKDVIGEAIKAYTYKKLPSLSKVSMVHGDAKVRAMLVTITCLLPSEKGSVSCSFLLKLLKATNLLKCGELCRKELMKRIGRQLDEASVSDLLIPTVDGETTVYDIDMILSIVEEFVRQDSKNAQKHNGGEVDSHVQAPSASMIKVAKVVDGYLAEVAKDPNTPILKFIHLAETMSINSRPVHDGLYRAIDMYLKVLLQISTSNQKCTTHRTCSQAH

SEQ ID NO: 36514 - protein, 91 aa, Oryza sativa
MRLMVSITKAADSAKKMYIALELPRSPLVPSPSLNGLPASCPAGRRGGFKLADEGGPRRAQPSGGTEDSGRFFMISGEERIVEWIRGRDGG

SEQ ID NO: 36515 - protein, 292 aa, Oryza sativa
MARKARPAEPPTPGRKGRKPLPSHAPPTEAAAAAATAAASPAAATASPAADAMEAEAGGVAIVYDALPGLTLAFSPEEEEHLEGATADLGGASTSASAAVVEEVEDATAAYSVFRNEITAAGDALVDIPAADFFSLDVSAAVEDEPATPRALSPQPAPEATLSGSLAPAEQPAQGSERAWFRGGRRFRSPMLQLHKEILDFCDFISPSAEEQSSRTAAVKAVSNVIKHIWPQCKADSSSGNNAENGFKRGKGLAQCDRSHQSAGSSRRSKGPREYDRFTNTLPQYTQHISRW

SEQ ID NO: 36516 - protein, 231 aa, Oryza sativa
MAEEKELVLLDFWVSPFGQRCRIAMAEKGLEFEYREEDLGNKSDLLLRSNPVHRKIPVLLHAGRPVSESLVILQYLDDAFPGTPHLLPPANSGDADAAYARATARFWADYVDRKLYDCGSRLWRLKGEPQAAAGREMAEILRTLEAELGDREFFGGGGGGRLGFVDVALVPFTAWFYSYERCGGFSVEEVAPRLAAWARRCGRIDSVVKHLPSPEKVYDFVGVLKKKYGVE

SEQ ID NO: 36517 - protein, 395 aa, Oryza sativa
MVRETGYYDVLGVSPTATEVEIKKAYYMKARKVHPDKNPNDPLAAAKFQELGEAYQVLSDPTQRQAYDSYGKSGISTEAIIDPAAIFAMLFGSELFEDYIGQLAMASMASLDIFGDEEEIDARMLQEKMRVVQKEREEKLAETLKNKLHLYVQGNKEEFVQFAEAEVSRLSNAAYGVDMLSTIGYVYSRQAAKELGKKAIYLGVPFIAEWFRNKGHYIKSQVTAATGAIALMQLQEDLKKHLSAECHYTEEELEAYMETHKSVMVDSLWKLNVADIEGTLSHVCQMVLQDSTIRREELRARAKGLKTLGKIFQRVKLGSSEGEVTTINNTINNSDDNDGSSPDSSPMSPREHPYDPNPPYYQSPYVEAPQFVGGYPSLNFPMPTAPPGAQRDPIP

SEQ ID NO: 36518 - protein, 270 aa, Oryza sativa
MATAAAAVASGAVTVAAAPIPMALPVTRAGSPAHSSEEQVLSSNSGSGEEHRQASGSGSAPGGGGGGSASGGDMGEENERLRRENARLTRELGHMKKLCNNILLLMSKYAATQHVEGSAGISSIANCSGESSEAVPPPPPLPPAILDLMPSCPALATAAAAAGLAIDGEPDPSARLFGVSIGLKRTRDDAAAAADEDGGGEDQAEHGGADVKPEAADPHPAGGGGGSSTEASPESHPWPIYRPTPMYHAVRPTCNGPDRAGSDQDGSSSR

SEQ ID NO: 36519 - protein, 841 aa, Oryza sativa
MPESNGAACGAAEKVKPAASPASEEPAAIAGNISFHAQYSPHFSPLAFGPEQAFYSTAESVRDHLVQRWNETYLHFHKTDPKQTYYLSMEYLQGRALTNAVGNLGITGAYAEAVKKFGYELEALVGQEKDAALGNGGLGRLASCFLDSMATLNLPAWGYGLRYRYGLFKQCITKEGQEEIAEDWLEKFSPWEIVRHDIVYPIRFFGHVEILPDGSRKWVGGEVLNALAYDVPIPGYKTKNAISLRLWDAKASAEDFNLFQFNDGQYESAAQLHARAQQICAVLYPGDATEEGKLLRLKQQYFLCSASLQDIFFRFKERKADRVSGKWSEFPAKVAVQLNDTHPTLAIPELMRLLMDVEGLGWDEAWDITNKTIAYTNHTVLPEALEKWSQIVMRKLLPRHMEIIEEIDKRFKEMVISTRKEMEGKIDSMRILDNSNPQKPVVRMANLCVVSAHTVNGVAELHSNILKEELFADYLSIWPNKFQNKTNGITPRRWLRFCNPELSEIVTKWLKTDQWTSNLDLLTGLRKFADDEKLHAEWASAKLASKKRLAKHVLDVTGVTIDPNSLFDIQIKRIHEYKRQLLNILGAVYRYKKLKGMSAEERQKVTPRTVMIGGKAFATYTNAKRIVKLVNDVGAVVNNDPDVNKYLKVVFIPNYNVSVAEVLIPGSELSQHISTAGMEASGTSNMKFSLNGCVIIGTLDGANVEIREEVGQENFFLFGAKADQVAGLRKDRENGLFKPDPRFEEAKQLIRSGAFGTYDYAPLLDSLEGNSGFGRGDYFLVGYDFPSYIDAQAQVDEAYKDKKKWIKMSILNTAGSGKFSSDRTIAQYAKEIWGITASPVS

SEQ ID NO: 36520 - protein, 642 aa, Oryza sativa
MKGHHSLPPSTPPKRRCTALAAAVPALVVCSILLPLVFLLGLHRPGHGSEERAAVVISTELGFSKHKHLDGRMKHKLLKDVSRKKIPGSDGILDEKSGSRSKSKSVSTKSKEKLKGVFSLVQLKNETRKNKELHTQRRYQLKDLSWRSKDTTIDKKENQDQEVEHENPRSCELEYGSYCLWSVEYKEVMKDFIVKRLKDQLFMARAHYPSIAKLKNQETFTRELKQNIQEHERMLSDTIADADLPPFFAKKLEKMERTIERAKSCEVGCTSVERKLRQLLDITEDEAYFHTRQSAFLYHLGVQTMPKTHHCLNMRLTVEYFKSTSIHTVQSNKQKLEDPTFHHYVIFSKNVLAVSTTINSTVMNSKDSGSIVFHLFTDSQNFYAMKHWFDRNMYLEATVHVTDIEDHQKLSKDVDFHDMKLLRPAEEFRVTFRNHYQSFQKQMKTEYISTFGHSHFLLPDLLPSLNRVVVLDDDLIVQKDLSSLWNLNMGGKVVGAIQFCEVKLGQLKAYTEERNFGTNSCVWLSGLNVVELKKWRDLHITSRYDQLLQKLQKDSVTSFPLKVLPISLLVFQDLIYPLEDSWVQSGLGHDYGVSQTDIKRSVTLHYNGVMKPWLDLGIHDYKGYWRKYMTNGERFMTECNIH

SEQ ID NO: 36521 - protein, 405 aa, Oryza sativa
MASPIHSPPPEPATDGDDAQSHPPPPTPHPATDPPPISPQNPTPPPPPLPASAAAPTTPSPNHSGDPSRPIPSQAPAPPPPPTADPSPPLPHDNRTPQPRAAPPPAPAPDQPAPPSPPPSLPPSPPAPGSPESMLEREASEADGEPENMTLALALAETETEKAMPPTPPKAAEAAESPTGSPQKESALTIAKLLSGEDHAGTETKPVPEKAAPAATTTTAAVASVGGGGGGGGGGVGSKRWLLGGVPEKVRRSELRRAELGFRVLAAVFCLVSLSVMAADTTPGWSGDSFRRYNEYRYTLSASVLAFTYSGFQLVVEVHYFVTGRRIIRDPSGKYFNLAMDQILAYLLLSASSAALSRNDVWVSRFGVDQFAKLINASASMAFLAFVALGFSSIISAYHVFSSVF

SEQ ID NO: 36522 - protein, 848 aa, Oryza sativa
MLPPLAAAPPPAQHVAPAFPNLPRSRRRHLLGLQLLLRRHRPVSVGHHHHHHHRRRRRLLLAGAYAPGDGGAGQDVDSSESTSSTGSAYIGLFVRMLGLDNDPRDREHAVYTIWQYSLGGRKCIDEIMQFHGCVALIVSLLRSDSVRACEAAAGLLRNITSVKLYRDVAIESGAMEEIFSLLCKSTITPEMLEQSLCTIWNFSIEENLRYKILSSGMLTRMVRFLDDEDIKVKEAAAGIISNLALSHSNHGALVEAGVIPKLVQLLQNKEDDYKIIRKEAKSSLLALSTDEYYHTLIIEEGLVRVPLVGSAVYKAFRPLPHSWPSFPDGSEIQRSSRPSKYGATELLLGLSVGEKETEPDEAKVNAMIGRSNQQFLARISAIELDDEGNEQSGGSQRNDLYTILPWVDGVARLVLIIGLEDASAIAKAAKAIGDASKNEHMRSSFKEAGAVKPLLQLLNHTDVPVRKAAVYALEKLSVSSIVCEQIKTDGGLKLLADIVKDPNTPVEQLEKIIIMLSRIFNTGISMVAVPDSSAINGSEDTMHSEKSNGSCGDIDGGTNGTSFAYLKQEETSSVSIIDFDVISRLTRVLREASPSLQEQVASVLEHLAAFDQHATAMTAARIESVIEAVLEMGVIHGTMGDPENFDELPTVVIEQVSRAVSATVRLLTKLLDFDIFVRSINTEKCIALLRKMFKSSIPLQSKDWLAACLIKLQSTAGLSGHESVSSIDMEITIYETIPRLVDQMMTSFSFENKRNAVIELNKIVSGGVMEYTRAIATAGGIFPLVKMIEEGDGDALEASLAILYNLSMDPENHPAIIAAGAVPLLKRIVVAESSHWNRALELLRTLPV

SEQ ID NO: 36523 - protein, 114 aa, Oryza sativa
MEEQQQEENSPVLFRQNANSSLGLLPRIGYGRLTDWGNKAGEIKRFAPSAAQSTNQCFTFWPNVESLRGFGQKSRDGRILTFKWTNEMTAPRSNTGGTSSLNPPTPQEPLCELY

SEQ ID NO: 36524 - protein, 507 aa, Oryza sativa
MAAARAHVKDPAHRTKVVLRRLPPAIAQQAVVEQVDARFGGRYDWSCFRPGNASQKNHRYSRLYLNFKGPEDVVEFAEVFNGHVFVNEKGAQFKALVEYAPSQQVPKSNTKKDARQGTIMKDPEYLEFLESISKPAEHLPSAEIQLERKEAERAAAGKEPPVVTPLMVYVRQQRAAKSMAQRSGSSRLSRKVAGVVTSSPSPSKRGSEKRRTSASTQYVLRENAKEKPTYILVPKRDEHAQREKDATSGGISGSAHVAENKKEKIVLLKGRARVDSNTSDVTSQQQSGTPMKNAAQSSSRQDPRLEGSGRIIKTILSNKEGRHVVTSQHDQEGHIITAEKRPPRIPNPRSVVKDQVVENAEKNHLDDKHSHLHGSGLISEKTERHARNRDRPDRGVWAPRRYDKSASGGTHSSSSEFSPMQQHSGENFCQQADGHGERKIDPRGHGGIRGGPVENGHRHANRRGPPRGLKEMEISASTSDGKPSKRASANYGAHERQVWVQKSSSAT

SEQ ID NO: 36525 - protein, 353 aa, Oryza sativa
MKKASSLSELGFDAEGASSGFFRPVADGGSTPTSHRRRLTKISVIGAGNVGMAIAQTILTRDMADEIALVDAVPDKLRGEMLDLQHAAAFLPRVRLVSDTDLAVTRGSDLAIVTAGARQIPGESRLNLLQRNVALFRKIVPALAEHSPEALLLIVSNPVDVLTYVAWKLSGFPASRVIGSGTNLDSSRFRFLLAEHLQVNAQDVQAYMVGEHGDSSVAIWSSMSVAGMPVLKSLRESHQSFDEEALEGIRRAVVDSAYEVISLKGYTSWAIGYSVASLAASLLRDQHRIHPVSVLASGFHGIPQDHEVFLSLPARLGRAGVLGVAEMELTEEEARRLRRSAKTLWENCQLLDL

SEQ ID NO: 36526 - protein, 585 aa, Oryza sativa
MLGIEYQSKRGYIGLDYFGRTVGIKIMPVGINMTQLQTQIRLPDLEWRVAELRKQFDGKTVMLGVDDMDIFKGINLKVLAFEQMLRTHPKWQRKAVLVQIANPRGGGGKDLEKIQAEIDESCRRINAQFSRPGYVPVVIINRALSSVERMAYYTVAECVVVTAVRDGMNLTPYEYIVCRQGFPDLDGSGDDGPRRKSMLVVSEFIGCSPSLSGAIRVNPWNIDTTAEAMNESIALSENEKQLRHEKHYRYVSSHDVAYWSKSYIHDLERSCRDHFRRRCWGIGLGFGFRVVALDRNFKKLTVDSIVTDYKNSKSRVILLDYDGTLVPQTTINRTPNESVVKIMNALCDDKKNVVFIVSGRGRDSLEKWFSPCQDLGIAAEHGYFMRWTRDEQWQLNNQCSEFGWMQMAKPVMNLYTEATDGSYIETKESALVWHHQDADPGFGSSQAKEMLDHLESVLANEPVCVKSGQQIVEVKPQGVSKGFVAEKILSTLTENKRQADFVLCIGDDRSDEDMFEGIADIMRRSIVDPQTSLYACTVGQKPSKAKYYLDDTNDVLNMLEALADASEETDSQEDAEEITSIPDPE

SEQ ID NO: 36527 - protein, 535 aa, Oryza sativa
MAKKKERAVNVSGKPRHSLDVNRANDKKGAGGGAGGGGGGRSAATVRRLKMYKMRPLRDRGGKILKHDLQSKELPNTRIEPDRRWFGNTRVVNQKELEFFREELQSRLSNNYNVILKERKLPLSLLQDHQKQARAHLLDTEPFEHAFGPKGKRKRPKLMALDYESLLKKADDSQGAFEDKHATAKLLKEEEEDGLRDLVRHTMFEKGQSKRIWGELYKVIDSSDVVVQVLDARDPMGTRCYHLEKHLKENAKHKHLVFLLNKCDLVPAWATKGWLRTLSKDYPTLAFHASINSSFGKGSLLSVLRQFARLKSDKQAISVGFVGYPNVGKSSVINTLRSKSVCKVAPIPGETKVWQYITLTKRIFLIDCPGVVYQNNDSETDIVLKGVVRVTNLADASEHIGEVLRRVKKEHLKRAYKIEDWVDDNDFLVQLSKTTGKLLRGGEPDLTTTAKMVLHDWQRGKIPFFVPPPQQGEDSPSETAEPVEKSDEEGVSSDRTAAAMKAIAGIISSQQQMNVPCQKEFGVTNEDSEVAEQSE

SEQ ID NO: 36528 - protein, 359 aa, Oryza sativa
MMEVTQVRASSEMAGGREPFVLPKSPPAAAPAPPPPSSGGMQSVRMAYTADGTPIFAPVNSAPAPAPAATYPPAGGNGAAALDAGEPVVKKKRGRPRKYGPDGSMSLALVPVSTAAVAASGPFSPAAAAKSPDAVSSAPPPGAKKRGRPKGSTNKKHVPSFGIGDIGSAGAGFTPHVIFVKAGEDVSAKIMSFSQHGTRGVCVLSANGAISNVTLRQAATSGGTVTYEGRFEILSLSGSFLLSENGGHRSRTGGLSVSLAGPDGRVLGGGVAGLLTAASPVQIVVGSFNTEGKKGPKLHAPSDPMSAPLKMVPMSGTGPSSPPSRGTLSESSGGPGSPLNQGVTASNHGQPGLPSLSWK

SEQ ID NO: 36529 - protein, 561 aa, Oryza sativa
MASASEDDAGSERCCGSYSPSADVSESETSSDCSAPTTTTTTRRFASSSSRGVASSSSSSLLPTPPPSSAAAFFLSAKPAADLSEVDMMKERFAKLLLGEDMSGSGKGVCTALAISNAITNLSATVFGELWRLEPMASARKAMWTREMDWLLSVADSIVELTPSIQELPDGGGQFEVMVPRPRSDLYMNLPALKKLDAMLLAMIDGFKETEFWYVDRGIVVDDSGGPFSSSSSSCGRPSVRQEEKWWLPCPRVPPKGLSEDARRKLQQDRDCANQILKAAMAINSDVLAEMEIPEVYLESLPKSGKSCLGEIIYRYITAEQFSPECLLDCLDLSSEHHTLEVANRIEAAIHVWRLKGQKKSTPQAKSKKSWGGKVKGLVGDTEKSHVLSQRADGLLQSLRLRYPGLPQTSLDMNKIQYNKDVGQSILESYSRVLESLAFNIIARIDDVIYVDDATKKSAAADSVSIFNRGIGVPVQKRISPSPFSIQHTPYASPFATPTFCSSTPVTGSPGRVQPPLNKDNLPTKQEVKVEKLFSGDIEKVWTYAGNLSARKDAGDAPERD

SEQ ID NO: 36530 - protein, 533 aa, Oryza sativa
MFSGQIPAELTKLANLGHLNLSSNGFGGALPLGLRNLRKLKYLDLRGNGFTGKLDDIFAELQSPVHVDLSCNRFSGSLISISDNSSVVSTLQYLNVSHNMLSGALFESDPMPLFDSLEVFDASYNMLEGNIPPFNFVISLKVLRLQNNNFSGSIPEALFRQTSMVLTELDLSCNQLTGPIRRVTSMNLKYLNLSSNSLQGTLPITFGSCSVVDLSRNMLSGNLSVIRTWGNYIETVDLTSNRLTGTWPNETTQFLRLTSLRISDNLLAGELPTVIGTYPELISIDLSLNQLHGPLPGNLFTAVKLTYLNLSGNSFAGTLPLPNSEAKSSTFIDLLVLPVQTSNLSFVDLSNNSLNGSLPSGIGALSGLALLNLCQNNFSGQIPREITKLKHLIYIDLSKNNFNGTIPEDLPDDLVEFNVSYNNLSGSVPSNLLKFPDSSFHPGNELLVLPHSASQNGPDSSGGGRRGMKRGILYALIVCVVVFVTGIIVLLLVHWKISSWKSSEKGTSQSKQPATVGVAMGHPTRLHLTMDMH

SEQ ID NO: 36531 - protein, 259 aa, Oryza sativa
MAIIGATTMNFDFFQSLGLGNSIWNNGPLDTQIQWFQQLLPSICGNDCKSYLSKSLFIVGEFGGNDYNAPLFGGKSMDEVKGYVPQIIAKITSGVDTLIGLGAVDIVVPGVMPIGCFPLYLTLYQSSNSDDYDGNGCLKSYNSLSVYHNGLLKQGLAGVQAKYPAVRLMYGNFYDQVTQMVQSPGSFGLQYGLKVCCGAGGQGSYNYNNKARCGMSGASACGDPENYLVWDGIHLTEAAYRSIADGWLSGPYCSPAILH

SEQ ID NO: 36532 - protein, 703 aa, Oryza sativa
MPPAKLDPNPPPIHRLLELIKSEPDATAALAHLELLVSTRPAFPPPQPLLFHLLRRLATSSPSHLPRLLNLLPRLRHRPRFSESAALVVLSAFSRAIMPDAALDAFRALPSILGCNPGIRSHNALLDAFVRARRFSDADAFFASLSHGAFGRRIAPNLQTYNIVLRSLCARGDLDRAVTLFDSLRRRQVAPDRITYSTLMCGLAKQDRLDHALDLLDEMPRSRVQPDVVCYNALLGGCFKAGEFEKVMRVWDKLVKDPGARPNLATYNVMLDGLCKFGRFKEVGEVWERMVANNLQPDVITYGILIHGLCRSGDVDGAARVYSEIIKTGLVIDAAMYNSLVKGFCQAGRVQEAWKFWDSAGFAGLRNLRTYNIMIKGLFDSGMVDEAIELWDLLEKDVACIPDTVTFGTLIHGLCQNGFANKAFTIFEEARVSGKQLDVFSYSSMINGLCNVGRLVDAVKVYEKMDKDGCKPNSHIYNALISGFCQVYRTSDAVRIYSKMADNGCSPTVITYNTLIDGLCKAEKYQEASSVAREMVENGFTPDITTYGSLIRGLFSDKKIDDALSIWKQILYKGLKVDVMMHNILIHGLCSAGKVDEALHVFSDMKEKKNCPPNLVTYNTLMDGLYETGYIDKAATLWTSITEDGLEPDIISYNTRIKGLCSCDRIHEGIQLLDEVLSRGIIPTVITWNILVRAVIKYGPIQV

SEQ ID NO: 36533 - protein, 296 aa, Oryza sativa
MAAAAASQPRSHQPTSLRRAPPPSSAAAKPEPNEKASNSKPASPVQAPSPERTVKKLRLAKALTLPEATSVSEACRRMALKRVDAALLTDSNGMLSGILTAEDISGRVIAEGLRPDETNVAKAMTRNPVFVMSNSPAIEALQKMVKGKFRHLPVVEHGEVIAMLDITKFLYDAISRMEKAAEQGSAIAAAMEGVERQWGNDFPGPHSFIENLRDQLFKPSLSTIITENNSVPVVSPSDPVIAAAKKNERIPSQLSGCHDREHVARNSYFQGFGIAISGPKFIPRCDSCRKGYDYKP

SEQ ID NO: 36534 - protein, 515 aa, Oryza sativa
MMQQQQQQETWLAAAAAVGLRPTKSAPCSPIKPAESSASAAAAAAMLRTNSDSFHVAHKVPVGDTPYVRAKRVQLVDKDPEKAIALFWAAINAGDRVDSALKDMAIVMKQQNRAEEAIEAIKSLRSRCSDQAQESLDNILLDLYKRCGRLDDQISLLKHKLQLIHQGHAFNGKRTKTARSQGRKFQVTLEQEATRLLGNLGWALMQKENYTEAEGAYRRALLIGPDNNKMCNLGICLMKQGRVLEAKDVLKQVRPAGVDGLRGADSHLKAYERAQEMLRDLEAKLVGRRLPRAGDQLVDKSWLFDALLLGSSSSIWQPQPCIDHMLPPPPPPPRDQFADENAAAAAANKKAAAAALQPNILRVDAQPFYSLRMPPLATKPQNIQQKPPTPQPQVHDPMGNLKRTRSGNAMDKAAAAAAGPVEKEPINDENSGRRKSLSAEERWPELPDHSAFDEALVAAVLAPVLDDSAAAAAERNDNCCKPAPPAGCDTSPAMKEKIGKRLRIFQDITQTLNTF

SEQ ID NO: 36535 - protein, 811 aa, Oryza sativa
MVGGGGYRQKLIQVWNDWQVSVLVLLSLTLQLLFLSTAGARRRAQPSWGKKTYFWALYIGSRFITTYSLGILSRASTGDANADIQAFWASLLLFHLGGPDDFTALSLEDNKLWDRRCLELFIQVSTTLYVFSRYVLDPGFRRFIVPFALIFSAGVVKYVEQVVALHHATMEALIKSVLGKPDAGPDYADTINRLDGIMRSGALPSLDIKNERVDRPNSDPEANVQVKDYSEDEQVAIKTIRSAHSLFSRFSVLFADGIFSFEDRQESQAMFLRKDARWAFKIVEIELGFAYDRLYTKASVSRGARLAVRVCSLSLTLAAGLWAALAILRASQYRQRHRCVTYALLAGAALNDAAILAAHAFSVWSLVHGDWLSWCSVMLVKRRRWSASMAQSNLVTFCLRKLPSNNDSDPAPLSSSFLLRRLLLGGGRGGGVQQQDASPAPALSTTLASMDEFQKLFERRSLLDQVRSGSFWSKYKHTKYVPVSEKLKDFIYAQLEEKVRRLSEYDKRMERERERERKRVRAPSPSPSPSPSPSPSASATTPTQTGTSTTTTTSSMYSILTDCRGDQVMKKERISNLSWSLEKKEFDESLLIWHIATDLRFREEAQAAGAAASAASAATVDQRETRKHMEIARELSNYLYYIMVVHPLMLSSSTTMAIKRCRDTCAEARRLFLKDHVMAAAGKGKGDRRRAVGEDNAHRVLLDVDTPLHAAVVKGDKCKSVLWDGCFLARELRQSMADPGRRWRVVCEVWVEMLGYAAVHCGGYQHAERLKDGGELITFVCLLMTHLGMGKHYRTEVGDAYAHLSPYSAAA

SEQ ID NO: 36536 - protein, 232 aa, Oryza sativa
MLASIKLEVMSPSGEAPDEGSIAVEFHMPPICSPLVRPGRPAEVAPVISKNLEDILMSSGMLNLKELCLISGKASWLAYLDVYCLNADGSLFDAALISAVAAFTHLEIPLVSVGDDGRVFTVGGNEGKAKYELVNREKRKLTITNVPFSLTCALHKDNVLADPTAEEESIIETSVTIVLDSSDQIVSIQKPGGAVTSMTTIKECISLAKDRRRKLREILMDNVEAMEVDQTD

SEQ ID NO: 36537 - protein, 670 aa, Oryza sativa
MRALLRLRRRLPLPINTRAFSPSSPSPAPHEIPTVYSFLQPSVFAPRPKPQPPPPPPPPTPPAHKTLPVGDAVALEDELLAAVSEDRSDDAWLAFRSLASASLSPSPPAAAALVSHLAAAHHHRLGLKRAFAAAVFLLEKSPHADPVPEAALQAVFTSLAAAASAAPALALVRALLRCGRRLPAFPVWGSPLIELTRADTGAFVAFLKVFDEACKQMVSEKSPSAAAAMRPDLAACNAVLGGCCRLLGSVTEAERVLEIMSAIAVSPDVDSFGCLAFLYAWRDIPSRVDELDKLLDALGFGKKIFFKNLISGYLKSCSFESVSSVILRVVEERRVGGSNAFDLESYTEVAQRFVDNGRIRELAQLIIKAQETESLQQSLAVEDSVGFGIVNACVELGLLNKAHSILDEMTAQGASVGLGVYSSILKAYCKEQRTAEAAQLVSEISAAGLQLDAGSYDALIDASMTAHDFLSAFSLFKEMREARLPDLRTSYLTIMTGLTENNRPELMASFLDTVVDDPRIEIATHDWNSIIHAFCKVGRLEDARRTYRRMVFLRYEPNNQTYLSLINGYVSAEKYFSVLILWTEVRRKGADFNHELIDAFLYALVKGGFFDMAMQVIEKAQELKIFLDKWRHKQAFMETHKKLKVAKLRKRNFRKMEALIAFKNWAGLNA

SEQ ID NO: 36538 - protein, 454 aa, Oryza sativa
MAAASPLAAAAALALLLLLLLAAPAAAEIRETVIRSDPRSIIPLDEFGFSHSGVLELNVSGIAFDPPASSELDLSQLGFFLSTLDAWVHVLRQLQDLDVTCALQADLVKLAYSFDRLRPPSNPAGVEVARSSSFSTAFPVSEPGQYTLVFANCLGGGLKVSMDVRSAMYNVDPPTGERSYLSAGATALPTIFGFFGVAYAALAAGWIAILLRKRAAVFRIHYFMLAVLVLKAVNLLAEAEDKSYIERTGTAHGWDVLFYIFSFLKGISLFTLIVLIGTGWSFLKPYLADREKKVLMVVIPLQVVANIAQVVIDESGPYARAWVTWKQVLLLVDVICCCAVLFPIVWSIKNLREAARSDGKAAVNLMKLTLFRQYYVVVICYIYFTRVVVYALMTITSYRYQWTSYVAKELATLAFYVFTGYKFRPEVHNPYFAIDDEEEEAAAEALKLDDEFEL

SEQ ID NO: 36539 - protein, 229 aa, Oryza sativa
MLAPNRLMSQRRGRRRRRHRRPQIRARSAGFIASTGKRKISPCEHDGDGHSQAGKMMRNSIPYLPEDILSRIHSFMSMREAARAACVSRAFLRSWRCHPNLIFNKDTIGLKRNAFGENFHGKIGCILRNHSGISLKTFKLDYSGMCGFDGTSYLDSWLQIALKPGIEELTLFLFDTNKQYNFPCSLLSDGVRDSLRYIKLRFCALHPTPELAPLRSLTSLSLWLVSYMG

SEQ ID NO: 36540 - protein, 528 aa, Oryza sativa
MWRRQHALLRRISLPKPPAATGIGCYYATEPEGRKPKTAPLQSRGMVDRFRLRAKGGDGGNGCISLRRSRSDRQGKPDGGNGGRGGDVILECSRSVWDFSGLQHHMKASRGANGVSKNQIGTRGSDKIAQVPVGTVIHLVEGEQPSLSVNKPTRALDPWDIPDAVEHSPFSSSRIGSKMMKGLDSSRSSQHISSKKNTAENDCERGNRNHRGKEPYYMTEFVRTEDYDGTSYPHQVGVDENDQFDDEDDEFWEDDEEELDMEEVTEEKEEEEDVRYSVAEMTKPGQRLIIARGGEGGLGNACILKEMWLSKAHKEEEMASLSTGHPGTETYLILELKSIADVGLVGMPNAGKSTLLSALSRARPEIADYAFTTLRPNIGSLTYEDYFSVKVADIPGLIKGAHENRGLGHAFLRHIERTKVLAYVLDLAATLNGRKGVPPWEQLRDLVVELEHYQEGLTKRPSLIVANKIDEEGADEMYEELKKRVQGVPMFPICAILQEGVPDLRVGLRDLMDASDPQGIELSKIVVD

SEQ ID NO: 36541 - protein, 275 aa, Oryza sativa
MGSSGLAATLRAAAALLRLDSEWDWFVTLNAADYPLVTQDDLIHVFSSVPRHLNFIDHTSDIGWKETQRVQPIIVDAGIYLAGRNQFFQATEKRDTPDGFKFFTGSPWVILNRRFIEYCIFGWENLPRTLLMYFTNVMLPQEGYFHSVVCNSDFRNSTVNSDMRYMEWDDPPQMEPHFLNTTHYDEIVESGVPFARKFRENEPLLDKIDERVLHRWRHRPVPGAWCTGRKRWFNDPCSQWSNVNIVRPGPQAEKFRKHMNQIIEESASGNNSCKQ

SEQ ID NO: 36542 - protein, 912 aa, Oryza sativa
MNPDNFTHKTNEALVAAHEIASEAGHAQLTPLHLVAALAADKGGILRQAISQASGGDAGAPDSFERVVSGALKKLPSQSPPPDSVPASTALIKVIRRAQSAQKKRGDSHLAVDQLLLGLLEDSLISDCLKEAGVSAARVRAELEKLRGGEGRKVESASGDTNFQALKTYGRDLVEQAGKLDPVIGRDEEIRRVVRILSRRTKNNPVLIGEPGVGKTAVVEGLAQRIVRGDVPSNLLDVRLIALDMGALVAGAKYRGEFEERLKAVLKEVEEAEGKVILFIDEIHLVLGAGRTEGSMDAANLFKPMLARGQLRCIGATTLEEYRKYVEKDAAFERRFQQVFVAEPSVPDTISILRGLKEKYEGHHGVRIQDRALVVAAQLSARYIMGRHLPDKAIDLVDEACANVRVQLDSQPEEIDNLERKRIQLEVEHHALEKEKDKASKARLVEVKKELDDLRDKLQPLTMKYRKEKERIDEIRKLKQRREELQFTLQEAERRMDLARVADLKYGALQEIDVAIAKLESETGENLMLTETVGPEQIAEVVSRWTGIPVTRLGQNDKERLVGLADRLHQRVVGQAEAVSAVAEAVLRSRAGLGRPQQPTGSFLFLGPTGVGKTELAKALAEQLFDDENLLVRIDMSEYMEQHSVARLIGAPPGYVGHEEGGQLTEQVRRRPYSVILFDEVEKAHVAVFNTLLQVLDDGRLTDGQGRTVDFRNTVIIMTSNLGAEHLLAGMVGKNSMKVARDLVMQEVRRHFRPELLNRLDEIVIFDPLSHEQLRKVARLQMKDVAVRLAERGVALAVTDAALDVILSLSYDPVYGARPIRRWIEKRVVTQLSKMLIQEEIDENCTVYIDAAPHKDELAYRVDNRGGLVNAETGQKSDILIQVPNGAATGSDAAQAVKKMRIMEDEDGMDEE

SEQ ID NO: 36543 - protein, 628 aa, Oryza sativa
MPKKPSLSRVASETRLLFSSWEPESPLDATSGSGKDAPADQQEGDGKRGRQRSPGDEARSLKDRFKGRLKEGVASARLKCLDTLLNESRDLSQGNESKGNLLKSLIQKAELDLWQVKELETDPTSGASQSKEEASAAASDGQGDDKERGDLQAVEAYGSPPGKEKVDLQAAKDSSPTAGRKGKGKRIIGYEAQQKESNIQDVKTSSQQETRKPKRKKQKKRQRRKMEESTENLSCRSGSSPSSSHDATSTSTIEGEPEQPSFGDLASIAQDHDDKIASDVVDIKQEQESAEDILALLDMMDKDAIQEKFNYYLKQLGFESNEYDFWSETYEPEQLTALHERLAIYRIVGYELSKGRKLGKQDIAKLKEQYNPSILRKEGYFRHYEESLEWYFDLEWCKYSGFQDYQRLVLHDNVEFLEWEHYHLNYNTYEDDLAYVRYRARLANETKWIEDYLARDITQAEWRRVKDIASVQALKIARVSGGVKAQAALAGFRDHIWSIQFDFNHYKDFDGVYFKIWKRVAKRKMNFREALLEVYREDMFPVRKNGIKYELDNTQLRFKSMKEKYDAHVACLDESVPEDEVRQLIKEAVIKMKPKPHTYLDYARKKLQISMNIDLITKSTCTLLNYQT

SEQ ID NO: 36544 - protein, 797 aa, Oryza sativa
MAEPAAAAAAAEAPATVGQAVIPLVNRLQDIVARLDGGGGGGLELPQVAAIGGQSSGKSSVLEALVGRDFLPRGPDICTRRPLVLQLVRHSAPEEWGEFLHAPARRFHDFDQIKREIQLETDKEAGGNKGVSEKQIRLKIFSPNVLDITLVDLPGITRVPVGDQPSDIESRIRSMIMQYIKHPSCIILAVTPANADLANSDALQLAKLADPDGSRTIGVITKLDIMDRGTDARNFLLGNVIPLKLGYVGVVNRSQEDINFKRSVKDALAFEEKFFSTLPAYHGLTHCCGVPQLAKKLNTILLKHITYMLPGLKSRINSQLVAVAKEHAAYGDTAESTAGQGVKLLNILRKYCEAFSSMVEGKNKVSTDELSGGARIHYIFQSIFVKSLEEVDPCKSITDEDIRTAIQNSDGPKGPMFLPELPFEILVRRQISRLLDPSLQCANFIYDELVKISRGCLTSELQKYPILKKRMGEAVSNFLRDGLRPAETMITHIIEMEMDYINTSHPNFVGGNKVVELARQEILPPKAPTSVTIPKDGTAISPEIQLTSDRSQKSRAIFARDATRGATSDQGVQPDADTGTSVAGRNQRGHSLVAGSSSSKSVARVHSLDNLISIIQLREPPITLKPSENQPAQDATEVAIVKLLIKSYYDIVRKSIEDAVPKAIMHFLVNHTKRELHNVLIRKLYRENLLDEMLRETDEVIIRRQRIQETLQVLEQAHRTLEEFSLEAEKVEKGYSPAEYATGLPKIHGLSNGDPSIIYASSPNHNRKKASHEDQHGSVASYSSTSYPDANGGLLST

SEQ ID NO: 36545 - protein, 462 aa, Oryza sativa
MVDTDERWRAAVIGGGGDAATATEPSLPAAITRRLRELAWEDKDKEKARTVVDLVDSETPIECDHEEGHLCPSPCSDIPSMVAASGGGGGNEEMGKVNCNEKHTYGEEKEKEKEKVVETKSELKPKPRRKNWEEEELTWEEKVLKVLHMVRIWEVTEFDPKMEWFEPTRLCLFNTAFFDLDKESKAGLGPPIHSLTSSDYRHLETSMNIISIKVVESDVGYPISIFGTVLARDQYDYRCVYLFRRSRDDPQIITSPEDMLTLTGPKRGLGAKDYMFFEFNLKMKGDDGVDKDFSKGLLPYNVVCRTGRLETLHLRSWLSVVEFAFVTVQYAVEATLAVKMLGGASVFTGRVTAWTTGNDEDEIVLYDSEVADTRTEITADGSVQLNRGLVVVPLDKELVLNICVFEGEDEAQSFEFILGHYDEEFTCKQGCYEFQVNIIWTAVKTRRRPNMWKRIGCIVLLL

SEQ ID NO: 36546 - protein, 682 aa, Oryza sativa
MTMQTRVFIVHMLPARASRLFARAKALGMMTKGYVWIVTDSIGIVLDVLPQHSIESMEGIVGFRPYIAESTRITDFSSRFTTLFRTKYHPNTDIRMAKPTIFQLWAYDVAWAVATATEKVHRTRSLNPTFHPPGNIGKNLVDDLPALPAGPELLNSILQGEFDGLAGQFRLIDRHLQVPTYEIVNVIGEKTRVIGFYSPDSGLTMSVNSRIIHGDAKFSTSSSDLENIVWPGDSTTVPKGWDFPVNAKILQIGVPVRRDFKTFVNVETNPNTNRSTVSGYSIDMFEAAVKKLPYALRYEYIPYDCAVSYDLLVSQVFYKKFDAAVGDVTIIANRTRYVDFTMPYTESGVSMLVLSKSDDEPTTWIFLQPLAKDLWIATMIFIFFTGLVVWVIERPINRDFQGSKWKQCITAFYFAFSTLTFSHGQKIQSIQSKIVVVIWCLVLMILVQSYTASLSSMLTAERLQPSVTDLKQLLANGDSVGHQSGSFVQSILKKLKFDDHKIKVYSTQEEYAKALRMGSKHGGVSAIFDEIPYLNSFCSKYGREFQMVGPIDRTSGFGFVLPKGSPLVPDLSEAILSLTEEPERLKIEKTWFMDSSLDYYGSHSKGSSRISFQSFQGLFIIVGCLLGAVLLINFSKFLYDKCKEMRGFGSDRVHSGERVVCYGEAQPQPPQIVMVDRRSCAC

SEQ ID NO: 36547 - protein, 271 aa, Oryza sativa
MRPSWLEKDCLEFGPPMYQETIPFSKILHEVHLEAVLWGIGTALGELPPYFLSRAASMSGRKLDELEELDASVSGEGFLSSTLHRAKRWLMSHSQYLNFPTILLLASVPNPLFDLAGILCGQFNIPFWKFFLATLIGKAVIKVYIQTTLVITLCNNQLLDLVEKRIMWVFGNVPMVSSVLPSLVAKLKTAKSKFLSSSVAASASSVVKETKWNLSFSLIWNTVVWLLIMNFIVQIITSTAQSYLKRQQELEIRKKLSATIQTVSETTGLSN

SEQ ID NO: 36548 - protein, 455 aa, Oryza sativa
MRIEEVQSAAKKQRIATHTHIKGLGLDANGAAIGLASGFVGQAAAREAAGLVVDMIRQKKMAGRALLLAGPPATGKTALALGISQELGSKVPFCPMVGSEVYSSEVKKTEVLMENFRRAIGLRIKENKEVYEGEVTELSPEEAESTTSGYGKSISHVIIGLKTVKGTKQLKLDPTIYDALIKEKVAVGDVIYIEANSGAVKRVGRCDSFATEYDLEAEEYVPIPKGEVHKKKEIVQDVTLHDLDAANAQPQGGQDILSLMGQMMKPRKTEITDKLRQEINKVVNRYIDEGIAELVPGVLFIDEVHMLDIECFSYLNRALESPLSPIVILATNRGICNVRGTDMTSPHGIPVDLLDRLVIIRTETYGPTEMIQILAIRAQVEEIEIDEESLAFLGEIGQQTSLRHAIQLLSPASVVAKANGREKISKADLEEVSGLYLDAKSSARLLQEQQERYIT

SEQ ID NO: 36549 - protein, 715 aa, Oryza sativa
MAVRRRGASAVAVHGGGGRVPKRARVTAEPSLLDVRAFPGQKEEGEKQPARGGGKKSSSSSSTFRAQVRGFLARCAVAVPASEAGELSPGMSSWHVGFTTAGGEAVAVMEVVEEEVARARRVYCEHCTVAGWSKHPVCSKRYHFIIRNENETGTSKTCRRCGFMVALQETRCPSCNHVGLSRDDPEDWDYVQLESPRHLLHGIVHENGFGHLVRINGREGGSSVMTGSQLINFWDRLCRYLRVRKVSVIDVSKKYGADYRSLHAVATGCSWYGLWGFKLSSGSFGITPQDYSKAVESLSSVPLSNFFPHTRSPRNQLQNTIAFYQSLSRHPLTTIRELFAYIMELATGKSVHKEKMAYDANYQEEFPEEELQRATNIALKILRAADRWVATRTLKAVTSHPIGSPQLVDYCIKTLGGTRTDDGMVVAIRCNSEMNTVEYRLTTETLFPPNNVCTLTQDHLFRDIKFLYDALLYPYTMHPYMPEENYQHAKRSAMILLDCKQFIKHYDLEEDFLPQNPSQLHIWCQVELADQVDDPPCIPAELITLPQAATIADLKGEAARAFRDIYLMLQSFVADQLLDCATASDTTQIKLLFGAKGAVHIKGRCIGGERRFAIYRMERGVDKWTVKCSCGATDDDGERMLSCDTCHMWMHTRCAGISDFDRVPKRYVCKSCKLTHKPKSSGPRLMYSSAPNKRCKTGTGSFSNAAEGLLWPQIS

SEQ ID NO: 36550 - protein, 726 aa, Oryza sativa
MDASAGSSAPHSHGNPGKQGGGGGGGGRGKAPAAEIRGEAARDDVFFADDTFPLLPDFPCLSSPSSSTFSSSSSSNSSSAFTTAAGGGCGGEPSEPASAADGFGELADIDQLLDLASLSVPWEAEQPLFPDDVGMMIEDAMSGQPHQADDCTGDGDTKAVMEAAGGGDDAGDACMEGSDAPDDLPAFFMEWLTSNREYISADDLRSIRLRRSTIEAAAARLGGGRQGTMQLLKLILTWVQNHHLQKKRPRTAIDDGAASSDPQLPSPGANPGYEFPSGGQEMGSAAATSWMPYQAFTPPAAYGGDAMYPGAAGPFPFQQSCSKSSVVVSSQPFSPPTAAAAGDMHASGGGNMAWPQQFAPFPVSSTSSYTMPSVVPPPFTAGFPGQYSGGHAMCSPRLAGVEPSSTKEARKKRMARQRRLSCLQQQRSQQLNLSQIHISGHPQEPSPRAAHSAPVTPSSAGCRSWGIWPPAAQIIQNPLSNKPNPPPATSKQPKPSPEKPKPKPQAAATAGAESLQRSTASEKRQAKTDKNLRFLLQKVLKQSDVGSLGRIVLPKEAEVHLPELKTRDGVSIPMEDIGTSQVWNMRYRFWPNNKSRMYLLENTGDFVRSNELQEGDFIVIYSDIKSGKYLIRGVKVRRAAQEQGNSSGAVGKHKHGSPEKPGVSSNTKAAGAEDGTGGDDSAEAAAAAAAGKADGGGCKGKSPHGVRRSRQEAAAAASMSQMAVSI

SEQ ID NO: 36551 - protein, 218 aa, Oryza sativa; identical to SEQ ID NO: 31555

SEQ ID NO: 36552 - protein, 465 aa, Oryza sativa
MNDISSYRLTVSSAQSLQYSAIGLSGEEGESPEKGEMPTVWAALKKSLNCKSGDSCGVIEREESQGGVTAGKKSSSTSAAALRRSGCSRSIANLRDVFHSQYGGSRRQEDAVAAAAAGEGDGGCGSPRSIGSNDVLNPVTHDVLLAARSDAKCELRISTPGRGAWAGAGGGVPFPHSPLLLRCSTTPVSTRKSPSAMSPLRRADDDDDNAEAPSPAPARASCEVGIRCHRCGDRFANHDALESHHHSRHAVTELVEGDSSRKVVEIICKAGWAKTENALGRIERVVKVHNAERSVARFEEFREAVKGKAARLSKKHPRCLADGNELLRFHATTLACSLGAGDSSTLCTSGSCSVCRIIRHGFSATREIKDGVGVFTTSTSKRALECIAGDGDGDEAANAGVRKALLVCRVVAGRIHRPLENLQEVAAQPGFDSVAGKVGAYASIEELYLLNPRALLPCFVVICKP

SEQ ID NO: 36553 - protein, 406 aa, Oryza sativa
MLSDQELARYVESFVRQAAAVPGAVAAAGGISAESVARQLGPQLGLDLTPKAPLIRYILLALFSPPPQGAPFTSSAPSPSASASASASAAAAGHFFSQQQQQQQLQTFLTASQQYQHRGGAGAAAAPPSAYGVAAAAAGYRYGQPFPQDEGAHLQRLVQMHHHQQQQQQQQQQQMAAAAAGVAAAPPTAVESPRPAAASKKESASTGVKRRGGPGGLNKVCGVSPELQAIVGEPTMARTEIVKQLWAYIRRNNLQDPNNKRKIICNDELRLVFETDSTDMFKMNKLLAKHIRPLEAKKDSNRDSKKLKPVDSEPISPAETDVNQLPIILSDALASFFGTGEKEMPSSEAVKRVWDHIKSNNLEDPANPTMILCDSKLKQLFGCESLTAVSVSELLSQHLFKQPNKL

SEQ ID NO: 36554 - protein, 617 aa, Oryza sativa
MMSSSSSWSTPSFGLARESSSLLFTPGLVQHMGPNPSSSWSTPAHPVSDSPTFSFPTPFFCEPAKGSRVYAYTKTADDLPHKHTLSISAMPAYISKSHEELRHEDYQRGDKGGDGLQKIMVNSAPVPPMPMLSSVGAPVNMINSSQPAFSLKSKTNFSTPFSPAATADQQSAQLQFSTQNHYYTSNPFWPAPIGLVRPCSSTGLQSSTPGLNCTGITSFPFLPTKQPSVGTQSSTLFPTTFVHPSVELQKNASTHCASSQTAPCTTHGGILFGTAANTVSLTTSSTEPTTSSLGPTSCPATRHGDAPSTGFACQENVFSNSAAYTSTINADVPTNTIDLLLPNNIRLVRLRFSSTNDGNGSVASEVHCHHDAKTSETPISLCIYPGENQELIIKSMVQPAKSHTGKQSSPTGGHPDDQSGRSKVCNSAAGLPSSGPGENQKGNSSAGHKTPKSPLAAPRCEAIAESVLPRLYSADYYTVPSIVELAVGERDEPGYCSHVKGFTVGRHGYGSVKFDGETDWRRLDIGSIVEFNEREIIVYRDVSNTPPVGQELNKPAEVTLLNVKCVEQKNGLQFTEGPAVDRYKEILVQWTKDHGAEFVSFDAAKGEWKFRVKNFNM

SEQ ID NO: 36555 - protein, 508 aa, Oryza sativa
MLAASLRVEAVAVVAAAVLVLLLSPAAVVVVAGQHDYGDALHKSILFFEGQRSGRLPPDQRLRWRRDSGLHDGAAASVDLTGGYYDAGDNVKFGFPMAFTATLMSWGLIDFGRSFGPHKEEARKAVRWATDYLMKATAKPNTVYVQVGDAFRDHSCWERPEDMDTPRTVYKVDPSHPGSDVAAETAAALAAGSIVFRDADPAYSKRLLDRAIAVFEFADKYRGPYSSSLHDAVCPCYCDFSGYKDELLWGAAWLHKASRRREYREYIKKNEVVLGASESINEFGWDNKHAGINVLISKEVLMGKDEYFQSFRVNADNFMCSLLPGISNHPQIQYSPGGLLFKVGGSNMQHVTSLSFLLLAYSNYLSHAGARVSCGAGGSASPTQLRRVAKRQVDYILGDNPLRMSYMVGYGARFPRRIHHRGSSLPSVAAHPARIGCKGGAAYYASAAPNPNLLVGAVVGGPSDATDAFPDARAVFQQSEPTTYINAPLMGLLAYFSAHPNPAEWADD

SEQ ID NO: 36556 - protein, 331 aa, Oryza sativa
MAEEPQPEAAPAAVAATTEVAVAEKAPVEAEKEKKVEEETPAVEAEAKEEKKDEAAAAAAAGGDEAGAIEGTGSFKEESNLVADLPDPEKKALDEFKQLIAAALAACEFNLPPPPPPPKAKVEAAVEETKAEETKAEEEPKAEEPAKEEEPKAEVAAAAAAPPEAGTEEPKAEASSEEAKTEEPKAEAAADEPAKEESKAEAAPAEEAKPAEPEPEEKTVVVTEEEAATKTVEAIEETVEIPVTENSTIGWELRVLGWEVSYGAEFTPDAEGGYTVIVQKTRKVPANEEPIMKGSFKVGEPGKIVLTINNPASKKKKLLYRSKVKSTSESV

SEQ ID NO: 36557 - protein, 132 aa, Oryza sativa
MDRQPPHLVAWKRCLPVATNYSDEILITRFGDNVLKDHVMNLTALHLPIAAVVDRPNQVPANELIEVVFCNFLCRLPMFLSNEPFSNPSSYQSFPANIAALWKCTQVEQTCLKVRWQIFVAVVNYLHYFCVH

SEQ ID NO: 36558 - protein, 886 aa, Oryza sativa
MATRARPPLVLLLCLCLASCLSSAIGGVSAAGNGYRTTAFLVDEEGRRLRAELAAVAGAGGGSTAAYGDDVQRLDVYASLETDSRLHVRIADADGPRWEVPQDVIPRPSPEFFLQTSRPGRPVLSTATSDLTFAIHASSPFRFAVSRRSTGDVLFDTSPNLVFKDRYLELTSSLPPPGRASLYGLGEQTKRTFRLQRNDTFTLWNSDIAAGNVDLNLYGSHPFYMDVRSGGGGAAHGVLLLNSNGMDVIYGGSYVTYKVIGGVLDFYFFAGPSPLAVVDQYTQLIGRPAPMPYWSFGFHQCRWGYKNVSDLEGVVAGYAKARIPLDVMWTDIDYMDAFKEFTLDPANFPADLLRPFVDRLHRNGQKYVVIIDPGISVNATYGTFIRAIKEDIFLKWNGSNYLGVVWPGNVSFPDFLNPRAAEFWAREIAAFRRTLPVDGLWIDMNEISNFVDPPPLNALDDPPYRIDNSGVRRPINNKTVPASAVHYGGVAEYDAHNLFGFLEARATHDALLRDTGRRPFVLSRSTFVGSGRYTAHWTGDNFATWDDLRYSINTMLSFGLFGIPMIGADICGFGGNTTEELCSRWIQLGAFYPFSRDHSAIGTVRRELYLWESVARSARKALGLRYRLLPYLYTLMYEAHTTGAPIARPLFFSYPGDVATYGIDRQFLLGRGVLVSPVLEPGATTVTAYFPAGRWFSLYDFSLAVATKTGKRVTLPAPADTVNVHVAGGNILTLQQPALTSSRVRQSVVHLLVALAEDGTATGDLFLDDGESPEMVGARSRWSQIKFSGATESGGSVVRVRSHVVHDSYAPSRTMVIAKVVLMGLRSPVPPKGFAVYANGVQVNASTAVDGGGGGNPEKGALGVAHVGGLSLVVGQEFDLKVVMTY

SEQ ID NO: 36559 - protein, 226 aa, Oryza sativa
MDCQRLDVAKDCIGVLSKQFPGSMRVGRLEALLFEAKGEWTDAERAYALILENNPFDQIVHKRKIAIAKAQGDMALAVEYLNKYLELFMADHDAWRELAETYVALQMYKQAAFCYEELILAQPTVPLYHLAYAEVLYTMGGLENLQTARKYYASTIQLTGGKNTRALFGVCLCSSAINQLTKGRNKEEESSELQSLASEALLKDYKQRAPSKEALITSLLKNMKLS

SEQ ID NO: 36560 - protein, 589 aa, Oryza sativa
MSALLRETSCGSLLQKLQSVWDEVGESEEDRDKVLFQLDQECLDVYKRKVDQATKSRDLLLQALDYSKTELARLASALGEKSIDISPEKTARTIKEQLTAIAPTLEQLGKKKKERIKELANIQSRIEQIRGEIAGTLEMGQQVALPQINEDDLTVRKLREFQLQLQELEKEKSRRLEKVLEHVGMVHDLCNVLGMDFFRTITQVHSSLDDSIGNEHKNISNETLSKLDRTIGTLNEDKRLRLEKLQELATQLYDLWDLMDTPVEERSLFDHVSCNRTATVEEVMVPGALAVDVIDQAQTEVERLDQLKYSKMKEIAFKKQAILEDIYASTHVVLDTAVAHEKIQALIESGNMEPSELIADMDSQILKAKEEALSRKEILDKVERWISSCEEESWLEDYSRDDNRYNSGRGAHLNLKRAEKARILVSKIPALVETLVAKTRAWEENHGLPFMYDGVSLLAMLDEYVILRQEREEEKKRMREQKRQTEQLLNIDREGPFGTRVNPYRVTSAKKVAGTKPNGGASNGTPSRRLSTGNQLNESKSTGRSAGKDDKKGASKNTATSLNEAAPADKEAADSSTENFDADPVPGST

SEQ ID NO: 36561 - protein, 48 aa, Oryza sativa
MVRMMMMRMMMMRKMMMTRTSRLPRRRNELASFILHLPPQLVSVCCAV

SEQ ID NO: 36562 - protein, 168 aa, Oryza sativa
MLVYQDLLTGDELLSDSFPYREIENGILWEVDGKWVVQGAIDVDIGANPSAEGGGDDEGVDDQAVKVVDIVDTFRLQEQPPFDKKQFVTFMKRYIKNLSAKLDAEKQEEFKKNIEGATKYLLGKLKDLQFFVGESMHDDGGLVFAYYKDGATDPTFLYFSHGLKEVKC

SEQ ID NO: 36563 - protein, 414 aa, Oryza sativa
MAGMAPEGSQFDAKHYDSKMQELLNQGETEEFFTSYDEVHESFDDMGLQENLLRGIYAYGFEKPSAIQQRGIVPFCKGLDVIQQAQSGTGKTATFCSGILQQLDYAVVECQALVLAPTRELAQQIEKVMRALGDYLGVKVHACVGGTSVREDQRILASGVHVVVGTPGRVFDMLRRQSLRPDYIKMFVLDEADEMLSRGFKDQIYDIFQLLPSKIQVGVFSATMPPEALEITRKFMNKPVRILVKRDELTLEGIKQFYVNVEKEEWKLDTLCDLYETLAITQSVIFVNTRRKVDWLTDKMRGRDHTVSATHGDMDQNTRDIIMREFRSGSSRVLITTDLLARGIDVQQVSLVINYDLPTQPENYLHRIGRSGRFGRKGVAINFVTRDDERMLFDIQRFYNVVIEELPANVADLL

SEQ ID NO: 36564 - protein, 179 aa, Oryza sativa
MKSGSLLTLTLGALLLAGIPISSAAVTPNSNIRLPTDGGDEWPSPPWDCCDKLKQSPLRIWPPKYKCLDEVDHCAAACEDCKRADGGGYVCRDWYWGVNPGPKCTGGGGEEAVRSRPWKCCDDAVCTRSMPPTCSCQDKVKSCSGGCGKCVQVESQPPRFRCLDRYHGFPGPKCHNQPA

SEQ ID NO: 36565 - protein, 51 aa, Oryza sativa
MGKKEYVPFALANGNLAVHVGVLQKGLHQIFLLLIEVAKLSFGRQRHVLRL

SEQ ID NO: 36566 - protein, 55 aa, Oryza sativa
MSPARGRPPSTSSSSATRPAPGRRSTIRSWSSPRGGASLSRLSLPWFRKQWSTLT

SEQ ID NO: 36567 - protein, 272 aa, Oryza sativa
MSNAPSIQIPQSRTRFKRVGATSPGIVTLNDNQFGSAAPNNTQLHQPSSPHASQPAQVAPRTLFGTVQKNPPQRSLSAPIALQGQQDQSASSYQAASNGTHGTGPQFSRCISLTAQRTQLLPEPALDVYSKSWQDIIDSLASDLEVPDYNMGAAESQQPDRTISQPLDSITFQGVGLHSEPVVALANLMPCNGQNVANGMIGSNCLAQTTQILPHLNHQPSLVPNESHLNNSVSSTADGLLMEAAHQRDTQGSDSLDLLFDFEFEDWDSAEP

SEQ ID NO: 36568 - protein, 282 aa, Oryza sativa
MEFLQGQSTETAVAVAVAVVAVAAGAAFLLLLLRSSKKPKGCLDPENFKEFKLVEKRQISHNVAKFRFALPTPASVLGLPIGQHISCRGQDATGEEVIKPYTPTTLDSDLGRFELVIKMYPQGRMSHHFHEMKVGDYLSVRGPKGRFKYQPGQVRAFGMLAGGSGITPMFQVTRAILENPSDNTKVHLIYANVTYDDILLKEELDSMVETYPDRFKIYYVLNQPPEIWNGGVGFVSMEMIQTHCPAPAADIQILRCGPPPMNKAMAEHLENLGYTKEMQFQF

SEQ ID NO: 36569 - protein, 432 aa, Oryza sativa
MQAAAAWRRHLLDGNISPTTAAAISAFRSASQPALAPQGLGGADGARYMSARAPAVKGTGHLVRKGTGGRSSVSGIIATVFGATGFLGRYLVQQLAKMGSQVLVPFRGSEDCHRHLKLMGDLGQIVPMKYNPRDVDSIKAVMAKSNVVINLIGREYETRNYGFDEVNHHMAEQLAMISKEHGGIMRFIQVSSLGASASSPSRMLRAKAAGEESVLKEFPEATIMRPATMIGTEDRILNRWAQFAKNWGFLPLVDSGSTKIQPVYVVDVAAAIVNSLKDDGTSMGKTYELGGPEIYTVHELAELMYETIREWPRYIDVPLPIARAIASPREMLLNKVPFPLPTPSIFNKDQINAFSVDTLVSDNALTFSDLGIVPHKLKGYPVEFLVCYRKGGPAFGLLAKYRRETDSEQVPRGKDEKDFDSWKGTLDNALYL

SEQ ID NO: 36570 - protein, 23 aa, Oryza sativa
MGAGDAYREGKMKRTLKRESKSA

SEQ ID NO: 36571 - protein, 154 aa, Oryza sativa
MASDPQSQASKAKVRLVLPDPGSSPSLLSPDPELVVAGVGVGGFLSFSSPLSLGLLYRSPFSEAVGGGARGEAAGDGWRRRVETVRPSGGRRHRRRWPRPPLHGSGVRRRRWRAAGGAAAAWSRPPSVRSGGRKGSGVAPPHRPPRHHRMRWSP

SEQ ID NO: 36572 - protein, 103 aa, Oryza sativa
MAGKVSAVVLVALVVVAAAAGGAAGLSMCGVDRSAVALCRSYCTVGSAEKAPTKECCKAVANADFQCLCDRRDMLRNLENIDADRATQIPSKCGVPGASSSCK

SEQ ID NO: 36573 - protein, 220 aa, Oryza sativa; identical to SEQ ID NO: 35721

SEQ ID NO: 36574 - protein, 422 aa, Oryza sativa
MICKRRSRVGKDTGMSDGHSGWLPLSLYGNSHSSGSAKSHTTGSYASSLPSNLCRHFSFAEIKAATNNFDESLLLGVGGFGKVYRGEIDGGVTKVAIKRGNPLSEQGVHEFQTEIEMLSKLRHRHLVSLIGYCEEKNEMILVYDYMAHGTLREHLYKTKNAPLTWRQRLEICIGAARGLHYLHTGAKHTIIHRDVKTTNILLDEKWVAKVSDFGLSKTGPSMDHTHVSTVVKGSFGYLDPEYFRRQQLTEKSDVYSFGVVLFEVLCARPALNPTLAKEEVSLAEWALHCQKKGILDQIVDPHLKGKIAPQCFKKFAETAEKCVSDEGIDRPSMGDVLWNLEFALQMQESAEDSGSIGCGMSDEGTPLVMPGKKDPNDPSIESSTTTTTTTSISMGDQSVASIDSDGLTPSAVFSQIMNPKGR

SEQ ID NO: 36575 - protein, 666 aa, Oryza sativa
MLYKIIHYPELSSSEGMSHLTVSYNVEFLQSTMMKSMIEGSVRDGLKENFESYAEILSRHVKIADSAGMDKERLLAPLQTDHQSDIRLAYKYFCNFTVISTVIMALYVLVHIFLSRPGPLMGLEFKGLDLPDTFGELIISGILVLQLERLLSMISRFVEVRVQRGSDHGIKANGDGWLLTVALLEATSLPPVSSGSVDPYVVFSCNGITRTSSVQLQTHDPQWNEIMEFDAMEEPPATLDVEVFNFDGPFDLAVSLGHAEINFLKHTSAELADIWVPLEGKLAQTCQSRLHLRIFLENTKGPETSMREYLSKMEKEVGKKLHVQSPHRNATFQKLFGLPHEEFLIAVYACSLKRKLPLQGRLFLSARIVGFYANLFGHKTKFFFLWEDVEEIEELTPSFTTVGTPSLLFVLKSGRGLDAKNGAKSQDKEGRLKFQFHSFASFSKASRTIIGLWKTKSSAIEQRAKLEEDQEDENYVDLNDVQSVLSIGDVPLSKEYTLELPIDADLLMGVFDGGPLEAKAMSRAGCLDYAATPWQDARPGVLERHASYKFNRYMSIFGGEVVSTQLRLPSDDGDGWTVYDVITLRNVPFGDFFRLHLRHNIWSVEAASSEAAASSGSRCEILVGIEWVKRSKFQKRIARNICEKLAHRAKEVLEAAAREIAPALSG

SEQ ID NO: 36576 - protein, 285 aa, Oryza sativa
MASPPPPAAAAASPKRKPKPKPKAAGASTLNPNWAQLQSKLPRPVAATTLGKRKHRPDHPSPAPAPTEPAAEEEAAEVKLVPTSDDTSLTKAVAVDCEMVGVGAGGSKSALGRVTLVNSWGNVVYDEYTRPVERIVDYRTHISGIRPKHMNKAKDFWVVQKDVAELIKGRILVGHALHHDLKVLLLGHPKKDIRDTSEYEVFRREGKRRSLKDLTAQVLGAKIQQKEHCPIEDARAAMFIYNKHKKVWEKNMKEQFRFRKKLKKRGKKKSAEGSGNDPNVPTVLL

SEQ ID NO: 36577 - protein, 330 aa, Oryza sativa
MADFRTSTHRERWIFQTNDLMDRWGAANQRATETLVQYGTTRLKVDPVDGSLSYPEPAPDHVVGSSGVKPLSCEEERLMRVFYEQKIQEVCSAFKFPHKIQATAIIYFKRFYLQWSVMEHHPKHIMLTCIYSSCKVEENHVSAEELGKGIQQDHQIILNNEMIVLKSLDFDLIVYAPYRSIEGFVDDMEDFCRAGNGEHQRLQDLRQTAISQVDKMMLTDAPLLYTPGQLALAALHKSNDMHKILNFERYLESVFSRQHSDCPIEQFVGSINMINYLVEQLKIPTPKDMRHIDRKLKHCLDPSSQDEHKKKEKKSKHKSKRAANEAQLDS

SEQ ID NO: 36578 - protein, 200 aa, Oryza sativa
MFSVAAYKPYFDVDTSDVVERIWESVFPFRGTFTEKTSENPDLYGPFWTCTTLIFVAASIATFVTYLSHKWHKKEWNYDINLVTWSAGLFYGYVTFVPLGLYVILKYFSAPAGLVQLWCLYGYSLFIFIPASLLSIVPIEIFRWVIAGVAGFMSATFVAMNLRAHIVNSGERWFLIVAGIFLLQLGLAVLLKLYFFTITV

SEQ ID NO: 36579 - protein, 148 aa, Oryza sativa
MTDQHRGVIGGGGYGDRGGQEQQEKQPFMMTALKTVTAATAGGSMLVLSGLILAGTVIALTVATPVLVIFSPVLVPAAIALALMAAGFVTSGGLGVAALSVFSWMYKYLTGKHPPGADQLDHAKARLASKARDIKEAAQHRIDQAQAS

SEQ ID NO: 36580 - protein, 306 aa, Oryza sativa
MSDDIKFVLSLLLLSSLMLFVASDDTECLRTLQKSLVDPRGELESTWNFSGNGFNGFICSFTGVNCWNPSDSTVRSLHLVSLGLQGQFPEGLQGCSMIEDLNLSGNSFSGPIPSDISWRLPYLRYLDLSHNSFSGQIPTNITEMTKLEFLNLSNNDFSGPIPSNISLLVPQLSSLDLSYNSFSGPIPVSITDMAYLKLKTLNLRHSKLNGEIPWQFCSLAHSVSFSVAENLFSGLVPSCFENFTASIFAGNRRLCGAPLGNCRLRRVNDETSIGAAVGFVVGFVLAFYFPHWFVFSTSLHSYIFRI

SEQ ID NO: 36581 - protein, 190 aa, Oryza sativa
MASMNNLYRLCIRSKQVTKQILQILGDLPALLDLELRSESDDPMEILIISKCIFRCLKIFRLYGSFVGLIFEDGSMQKVREISVVVRAHKAKSAFADHPDLGIRNLTSLMDLNVWINCEGARVQEVKVLEAAIADATALLPNHPTPHFFRENEENMVKDYLPNHPTPHFFRENEEKMVKDEAHMQEKMFE

SEQ ID NO: 36582 - protein, 403 aa, Oryza sativa
MRAPPPSPAVARTGFSDLQPDLVGEIHGRLSFLDRLAFVAVSSAASRDALKPEPPWLVLPGETPETATVFSLADRRSATVRASGPAMRGHVIIGSFGGWIVTADERGRMRLANPVTGDQGDLPAITTIPFVNATSPWGHHFIMDMEPFVHIRYRGDHESWPHPYGTFTHTAGDIRLWFYRKVVLSASPRPGDYAAMLLLDSYFGAPAFATAGDGRWRVAPSRDGVEDAIHHGGKFLFVTYTGIVEAWERDGVSGEFTGKVVTTPISCPPQRRKYLAAAPDGRLMIVLKNTNGGVKKGYFEVQVFDEMTQRWEAAEDIGELAILVGVNSSVCVSTAKHPELKGGCVYYTDDEIGKAWLRREYGYSNSKPNVGVYSLKDGKEMSIPGLGEHLSWPPPAWFTPSFR

SEQ ID NO: 36583 - protein, 386 aa, Oryza sativa
MDFKGFWESRFGGKKEQEPEQNGHANGVANGSVRKRTSDLAVYEQFEQQARQTEVRAAAIRDGNADAIQKPLLPSFESAEMRNLAETLLRDIIRGSPDVKWESIKGLENAKRLLKEAVVMPIKYPKYFTGLLSPWKGILLFGPPGTGKTMLAKSVATECKTTFFNISASSIVSKWRGDSEKLVKVLFELARHHAPSTIFLDEIDAIISQRGEARSEHEASRRLKTELLIQMDGLTKTNDLVFVLAATNLPWELDAAMLRRLEKRILVPLPEAEARHAMFEELLPSTTSKLEVPYDTLVEKTEGYSGSDIRLVCKEAAMQPLRRLMSVLEARDELVPEEELPEVGPLKPEDIEVALRNTRPSAHLHAHRYEKFNQDYGSQILSQEQA

SEQ ID NO: 36584 - protein, 502 aa, Oryza sativa
MCVAVAVLVAGTVWLCASSAGFMGGPYGGYRVQDVDVNKLWTTAGSNGWRASSAPRSYWPPPPAETNGYLRVRCNGGLNQQRSAICNAVVAARIMNATLVLPELDTNSFWRDKSGFPGIYDVPHFLKTLKHDVHIVTSLPGIMSKGKTKKLKAHKIVPPRDAPLSWYTTLALEEMKKYGAIYLTPFSHRLAEDIDDPELQRLRCRVNYHALRFKPHIMKISNEIVNKLRSEGHFMSIHLRFEMDMLAFAGCIDIFTPEEQKILIEYREKNFAKKILVYKDRRIIGKCPLTPEEVGLILRAIGFDNSTRIYLASGEIFGGDRFMSPFRAMFPRLDNHSSVGPEKLEENTRGLAGSAVDYMVCLLSDIFMPTYDGPSNFANNLMGHRLYYGFQTTITPNRKALAPIFMDREEGHVTGFEDRVRQVMFNTHFGGPHKRIHPESFYTNSWPECFCHMNPMNPSDKCPSDDPHDVLGGQLQNEEIEDVDLKTTDKIESITQIEETMI

SEQ ID NO: 36585 - protein, 196 aa, Oryza sativa
MAATTPRVSAVIFDLDGTLLDTERATRDVLNEFLAAYGKVPDKEKEERRLGQMYRESTTGIIADYGLPLTVEEYAVAIYPLYLKRWQKAKPLPGVERLVKHLHRNGVPLALASNSVRRNIDHKLLKLKDWKDCFSVILGGDQVPRGKPSPDMWVALRITVLLPSNKTICKFAIHYTSDILVLRFTLLKHLRWLITT

SEQ ID NO: 36586 - protein, 95 aa, Oryza sativa
MSSKLCFSSGLASPLSQGCSWYLLSISSFSATSFIIGRSSPLMLTHRITRCVISWSTSSVISFLTWLSISSSWRPSLTAVMKQDTRLLSSSDPPK

SEQ ID NO: 36587 - protein, 166 aa, Oryza sativa
MEFHPQCVTNPPTAAWARMSFCGARVGHTSPLPLVLSKNPSGRSSSSMASVGTRCPGRLSLGGPRSTHRKRCSLRSSAAAISRTLGGGRRPLLPKQTSSTDAGGCASSHRTHSCGCSGGGVSAITGPIAYTVGAGTPRVHRPSAMASMTLCSSSAAVLTMKPVAFM

SEQ ID NO: 36588 - protein, 397 aa, Oryza sativa
MATREGGGRGGGRPPLRVGRTQEYRMGRETQLLAAEGSPPVSLFVLCGDRFEAARLFRSGGLSVRMARVEGHPVSMASCAVGNHHWMLSRDALVARLDARVFVFEMPGFFYAVVGGGGAERKCATLAEIFSRFCSYHDLSTTQQGEDEAGGDMNQHSNPWVRAHGRIQRLKKPTSPPAGAGQATADAAAERAGAGAVVGLASQLERAVRTSAVVKLLSRSLLAGALQPARHLMITLAAAAGGAAANNAAGTSAGAGGSAAALPSKSVVSDLLEAIETSRTSPRREAARRAGGGAGGPGWWSLNVEGVMLLLRVVQAVRGRKLPAPEKRTRDGASDAAGLRGGGIMGGDGGGAARRWCGGRPKKLGNTVGACGTPDLRLCVNVPKSEPRERERLLIGN

SEQ ID NO: 36589 - protein, 102 aa, Oryza sativa
MGKISRAADPSLSLAKNSAAAPHPSHLHDEARTTDHEINNGKDRGQVNKMGVVKVIGKYFIRTRYQVTNIYQLKSRPQGVPLRVRKMLKSAQAIDEFNQDGV

SEQ ID NO: 36590 - protein, 95 aa, Oryza sativa
MATKVEASKIVSFFFHLQHAHIHLHIWSPPVKVAVADSSTRDRSLIDAGAHPSRQDVWTRRRQFKPLVVHLLEAATSPRCQTSSLCCKFHRAGAD

SEQ ID NO: 36591 - protein, 352 aa, Oryza sativa
MDAFLAGIPQLRRPAALIASCCALVLLATVLLLPRAPPAAPEQLASAAAAAAVRLDARVERRSGNEVLWQLPPPTTPPRAAVFVAPGCTIRATDFFDASPGCPRCAGLPEERRFTREALRRGYAVLAVSSRAECWSLDTGDGGELAAVESIIEWWVKERHPNQLAGLPLVGIGASSGGYFLSALAARVRFSSVAIMIAEGVFATMEEIPARYPPALFVQMPKDGERAREVAASMGKLRGSRVSVREIQCGEFAVSAQFLAARIPGLTLAVADGLVDVLRRKGFVDEKGFLKNDGRSTPWKKAAEEAKILPEEFRLERHVTEELNLAYAYHEFTSLKNGEIFDWFESHMDHKS

SEQ ID NO: 36592 - protein, 213 aa, Oryza sativa
MLACIACSSKEGGEDGSRGAATPHGRDAVKSLTSQLKDMVLKFSGSNKHQHYKAATAGSPSFRSRSYRRPYPGFIDDSAFMTTTRPGGEAYMYTRAAPPPPVRAASTSMATWDMTRSKSNRGWQQDAGRSPGGTTWIQSIEEEAGADDVTVVEDAVPREWTAQMEPGVQITFVTLPGGGNDLKRIRFSRERFGEDRAKVWWEHNRDRIQAQYL

SEQ ID NO: 36593 - protein, 277 aa, Oryza sativa
MKRPGGAGGGGGSPSLVTMANSSDDGYGGVGMEAEGDVEEEMMACGGGGEKKRRLSVEQVRALERSFEVENKLEPERKARLARDLGLQPRQVAVWFQNRRARWKTKQLERDYAALRHSYDSLRLDHDALRRDKDALLAEIKELKAKLGDEEAAASFTSVKEEPAASDGPPAAGFGSSDSDSSAVLNDVDAAGAAPAATDALAPEACTFLGAPPAAGAGAGAATAASHEEVFFHGNFLKVEEDETGFLDDDEPCGGFFADDQPPPLSSWWAEPTEHWN

SEQ ID NO: 36594 - protein, 360 aa, Oryza sativa
MERLSKIPLPPGTVIPCTRRRKPKDIYTARDVASTPDKLMIRKAARSVVAIETTYSDGKIIAVFSGIVVSWNETTRSATIVTCSEAVCDDGALIDPKPKVLVHLPNNTILDGQLLFFNDHYRIMLLEVVSDTPLQPANFGSTPKFGQDVFALSRDYESSMHARRGTVLWQEPPNVLEYMYYCLSLSCQLAPCGSGGSVIDQHGDVVGMAIGAPPNPDILPISIVQTCIEMWTKFSRIARPVLNMELRAFELIEVSHQEEIELDHNINDGFIVAVVYDDSTAVRLGISQGDIILSYNGLHDFTLHKLEEFLLSLGWELLASGDPSWNVGLELVVYDAVRHATRSITYPLEFSDASERVLPP

SEQ ID NO: 36595 - protein, 485 aa, Oryza sativa
MGKKHAAAGSGGGWLAAVRKVFRPSKDAADKKGGGGGDREEEAAAEAAPEVLLLEHFPAGGTSPSAEGTGNDQGGTVVGKGEGEEEDGEDGYGEVERARALAAAAEAAVAAAEAAARVVRMSALRRASREERAAVRIQAFYRGYLARRALRALRGLVRLQALVRGHQVRRQVHLTMRCMQALVRAQARVRARRLITDHIHAGVAPLRLPPLPPATAAATYSSRRREGGYSWHPLRNNSYHAQLGERDESDDDVDGDGGKVGEHARQQQQRRRGNDVRSRSPFRSWDGSSRTPEEDRAEGVRRHDAAARRERARAYAYGYQQRQWQEKAGGFQWLDRWMAAQAQQHAPEPDKSRRRAALTAAADGTTMPERTVEMDTTSYRSPLNSHSAAVQGRPPAVPGYMAATQAARARARTAPPATPAHARSRSGAVLAGDTSSSGQSGSGSGGGGAHVQKPCAVYSPESRGTGDWTPPRLAVSSRATRLVYA

SEQ ID NO: 36596 - protein, 482 aa, Oryza sativa
MAATTTTMSSSMAASLVTSLRSLSAHALVPLVASALLFVVAVVLRRRRRPVYLLNYSCHLPDVDRKVNLEVCEYFGQRCRHYSDDTADFMRLIYRKSGLGQETYAPPFIFSGEFQKTQAFAVQEAEEGLFATVAHLLAKSDVRPRDVGFVVVACSMFSPAPSLASMIVRRFGMPPGTRTYSLAGMGCSAGMVGIDMAARALRVSRRGGYALVVVTENMSLNWYFGENKHMLVTNCIFRVGSAAALVTDVAARRGDAKYELVRTLRTHHGGDDAAYNAAVQMEDEEGNVGVALTKDLVRVAGAGLRQHIATLAPHVLPVCELLRYVWRVARAYVAGNPKAVAAIVPDFQRAFEHMCIHSGGKAVIDAVVKLMAFGPQVVEPARATLHRFGNTSSSLVFYELAYFEAKRRVRAGDRLWMLAFGTGFKACSNVWRALRDSAPDADNPWNACAHRYPAALPPPSTRRSSGGAPAMDFTHLKNDKLP

SEQ ID NO: 36597 - protein, 364 aa, Oryza sativa
MDNKPAQERRETWVPGAVIVGAGPSGLAAAACLAARGVPATVLERSDSLASTWRHRMYDRLALHLPKRFCELPLLPFPEEYPTYPSKDQFVAYMEAYAAAAGVAPRFGATVEEAAFDAAVGAWRVRLDGGEVLMARWLVVATGENAEPRVPDFPGMQKFAGCAMHTSEYKSGEQFAGKKVLVVGCGNSGMEVSLDLCRHGAKPSMVVRNTVHVLPREMFGLSTFGIAMALLRWLPVQLVDRFLLTAAHLILGNTGQFGLRRPKTGPIELKNLTGRTPVLDVGTLDHIKSGKIKVVGAVKEMTRQGVRFTDGKEEQFDTIILATGYRSNVPSWLKVKQSVTHSCSFYFSFCPHCTILLLVIYISR

SEQ ID NO: 36598 - protein, 352 aa, Oryza sativa
MLGDKVRTEAYRDALLGNPSLMNGATVLDVGCGTGILSLFAAKAGASRVIAVDGSAKMVSVATEIAKSNGFLYDENMEMQQKRDTQVITVVHTKAEELNHKIQVPSNKFDVLVSEWMGYCLLYESMLSSVLYARDHFLKPGGAILPDTATIFGAGFGKGGTSLPFWENVYGFDMSCIGKEVTGNSARFPVVDILASEDIVTETAVLNSFDLATMKENEMDFTSSFELRLSESGVSQSGVTWCYGIILWFDTGFTNRFCKEKPVNLSTSPFSTPTHWSQTIFTFEEPIAMAKEESAVVSSASVGTDECPAVMIRSRISIVRASEHRSIDISIETTGISSDGRKRSWPVQIFNL

SEQ ID NO: 36599 - protein, 141 aa, Oryza sativa
MVWTLLLLLVSLCFAWAAAAALIFSLRRGTRPTRSRRVACRTDLIRRNDEHDDTCCRLDRFLRTEKHRWLGITSSISNTLIPLIINIDTQQRHEFYVKNPYGENHMRRPTITTIKMLITNVEESQWERHPSRTAYESIYRG

SEQ ID NO: 36600 - protein, 309 aa, Oryza sativa
MAIPVIDFSKLDGDESEATLAELAAGFEEWGFFQLVNTGIPDDLLERVKKVCSDIYKLREDGFKESNPAVKALARLVDQEGEGLAMKKIEDMDWEDVFTLQDDLPWPSNPPSFKETMMEYRRELKKLAEKLLGVMEELLGLEEGHIRKAFTNDGDFEPFYGTKVSHYPPCPRPELVDGLRAHTDAGGLILLFQDDRFGGLQMIPNRGGDGRWIDVQPVENAIVVNTGDQIEVLSNGRFKSAWHRILATRDGNRRSIASFYNPARMANIAPAIPAAAADYPSFKFGDYMEVYVKQKFQAKEPRFAALANK

SEQ ID NO: 36601 - protein, 116 aa, Oryza sativa
MAGGRRSCTGWSPVVGGAAAHFFLPAAVIVVVLHQLAVWLPPSPHTAADGRRLRLGRRGQAHPDGPRGLGIPQSDYPFFLLPIHFFSLFDLCPGTLVRPNLNFIIEFSQELFLLEI

SEQ ID NO: 36602 - protein, 290 aa, Oryza sativa
MSPSRPDEADPAADFGSHPTDQELVTKYLRRHVDSGGNPWRYVHEADVYAADPDDLTGKYSPAVASDGSRAWYFFTTVRSKSTGGQRRARAVGDGGCWHSEAGAKDVVGGIRSPRPIGRRQFFSFVNKEGPRRVRSGWIMVEIGLKYAQQNASSDELVLCKVYRSPRAPPAAAAANKSMAAPPPTATKSKTEEATPPPDDVKPVVAAAQTPDTKILRAAKEAAATGCKRKADVKSSGARRGKRLCSRCRAETSESDSETAVLDRSPSIEDETADSSEIHGSSDGKFIRFL

SEQ ID NO: 36603 - protein, 94 aa, Oryza sativa
MMICTSAACKFLDDELRTRTRGGNFCGCPCHLQQLWIVRVFGGGFSTVTPYHQMWGDDISMSNEILEKKLYMQLWIVRRGFSTVTPYHQMWGDD

SEQ ID NO: 36604 - protein, 184 aa, Oryza sativa
MLYEAGRLVGCHHCLLPNVTDLTLRYALRMATRAALRAVVSSDGGGVTAVLRTVSPSQYEGGEWNKDGNCVRTRPYRRGEKTLQGFELDFHTLQVEEFEAAKRAASGGGVRMMLMDTTEAMIRRADAHPSRYRGWTRRKEWMKEYFTIFNDCVHWCVPGAIDAWNDMLSHMLLTVSVTRWTQHN

SEQ ID NO: 36605 - protein, 582 aa, Oryza sativa
MKVFTGKLVFFLAIILFEGCLVRSQSVPYDYSANIECVKEPEKPLYGGGILKETEAKGYASGKKLLSENSKSAAPVKGSALKVDLKKDHHYALSVWLQLSKGEGDIRAVLVTPDGKFNTAGMIAAKCGCWTMLKGGATSYDDGKGDIFFETNVTAEVMAEGMALQPFSFDEWKGHRAESVKKERMKKVKITVVGPDGKPVPEADVSLERVGKGFPLGNAMTKEILDMPEYEKWFAARFRYATLENEMKWYSTEFHQNEEDYKVSDKMVELAEKHNITLRGHNVFWDDQDKQMDWVEKLGVPELKEAMAKRLKDIVTRYAGKVIHWDVVNENLHFNFFEGKLGKDASAEIFRDVAKLDSKPILFMNEFNTIEEPNDAAPLPTKYVAKLKQIREFPGNADLKYGIGLESHFAAPNIPYMRGSIDTLAQAKVPIWLTEVDVKPCKNQVEYLDEVMREGFAHPAVKGIVLWGAWHAKGCYVMCFTDNSFKNLPVGDAIDKLLKEWTAGHTGKTDSKGVLEVEIFHGEYNATVKHKEFKENCMTLDLDSKAEAKIELRSDKVLTPWVELKYPNRHLGLHRSQESGCS

SEQ ID NO: 36606 - protein, 482 aa, Oryza sativa
MTGGLPPPLRPSTAPPPPSVTRALHAINTCTTAAALAPIRGAILGDRALLRSTAVVSAFFLACGRLRHLDPALSLFACHPRPHVFVFNSLLRSLGRAPARSPLPLFRHFLRCRGVRPNRFTFPLLLTSLSSLADLRAVHCQVVKSGFGPDLHVRNALLARYADCDPDLAHAEQMFDEMPRPEVVAWTTMITSYRNRGRTFHALATFRRMLAAHVAPNRVTMVAALGACAAHCAVDTGIWIHEYVQKQGWEMDVVLGTALVDMYGKCGKVSDGMHVFSKMAKRNVYTWNSIIGALALAQDGKTALQWFSRMQNDGVQPDEVTLICVLCACAHAGFVDIGRKIFNLAIQGEYGFQPGIKHFGCMVDLLSCSGHLDDAFRVVETMPSQPNAVIWGLLLRGCRARGDSWLSEHVTMRLVELEPENASHYVLLSNLYAETGRWQEAQGILHWMKKKGLRKDAGWSLRMLEDKSKKYTTDGCLLEYVE

SEQ ID NO: 36607 - protein, 237 aa, Oryza sativa
MASSGKEHRRGVPRPPPLSLYIEREQGEVIMAGQALATTRMLQQVATSSSGKKRILSKQLSMKETTREVKWEKRRRQIHRQRSSMALQDVEEEASANMFAATTDSEMGSSTERVPKRLTDGDLDELRGSMELGFGFDEENGGQNLCDTLPALDLYFAVNRQLSEPKMRLSTSSLPSPTSATSSSSTLGGTSNPGSPVAPSSFMDSWKICSPGDNPQLVKTRLRHWAQVVACSVKHSS

SEQ ID NO: 36608 - protein, 324 aa, Oryza sativa
MAAEDNPGYALRATLAGHRRAVSAVKFSPDGRLLASASADKLLRVWSTSDLASPVAELAGHGEGVSDLAFSPDGRLIASASDDRTVRIWDLGDGGGGGGGGEPRLMKTLSGHTNYAFCLAFSPHGNMLASGSFDETVRVWEVRSGRCLRVLPAHSEPVTSVDFNRDGAMIVSGSYDGLCRIWDSATGHCIKTLIDDESPPVSFAKFSPNGKFVLAATLDSKLRLWNFSAGKFLKTYTGHVNTKYCIPAAFSITNGKYIVSGSEDKCVYIWDLQSRKILQKLEGHTDTVIAVSCHPNENMIASGGLDGDKTVKVWVQKEEDQMEV

SEQ ID NO: 36609 - protein, 171 aa, Oryza sativa
MAAVPAPALLPTTSGCGGALPPLPASGGDGSLRPVSLSSPAAAPFVLSRLLAPSSSPPRLPPAVARVDGGRGRIRGWWRRLPPSPLAFLLWQIRRRRRPPQADQAAVAPSAPSRQVPRSIRRWWRRWRRPRVDPLTVAVGRSGSGGSLRRLSSPSGGGGGVGGGRGWTQWR

SEQ ID NO: 36610 - protein, 333 aa, Oryza sativa
MLGRLHHRNLVKLLGICVEENARCLVYELIPNGSVESHLHGVDLETAPLDWNARMKIALGAARALAYLHEDSSPCVIHRDFKSSNILLEHDFTPKVSDFGLARTARGEGNQHISTRVMGTFGYVAPEYAMTGHLLVKSDVYSYGVVLLELLTGRKPVDMSRPGGQENLVSWARPLLTNVVSLRQAVDPLLGPNVPLDNVAKAAAIASMCVQPEVAHRPSMGEVVQALKLVCSDGDEGLGSGSFSQELAAQAAAIYDVTGMEAERVLLSEMFGSTPVFTPAADSGSFRKQSSSGPLMTGKNRKFWQRLRSLSRGSMSEHGASPDFETRSQCSNR

SEQ ID NO: 36611 - protein, 48 aa, Oryza sativa
MSLMYCLFGVRSASSASPCNIFGRKFFMCRANAASICSSGNCLVKKQC

SEQ ID NO: 36612 - protein, 69 aa, Oryza sativa
MLMVPPSATLETRVWFSPKDSTMDGRDATTMPLAGLRWCSRASPLSALKGLGFLPKSPNPRMSKRHRKN

SEQ ID NO: 36613 - protein, 181 aa, Oryza sativa
MRKEHGKPAKAGISEQKAVGVQVLQSIAMDGWKQARWRRREEEEGPGEDGAAIALVLAGAADLGVGLPVGVDGVLLGALVALPLLLAVLAEEVLLDAGEVAEGAGGVVVDAAGLRADVHLLPHRLLAPPLLQLPRQVVPPPVQLQVLVPLEPLPADLAHEPVRRHQRRRRQRHHLRFRVYI

SEQ ID NO: 36614 - protein, 112 aa, Oryza sativa
MPPSPCRWMGVRRSMVARRWVGAGRQLRAPTTARRSPPPFNIVAIKDVCEDGRAVHIVMELFIVGELLDKIQEEGHYNERKAAEIKDDGLSIKAIDIRRLQRLKTMVCQLRR

SEQ ID NO: 36615 - protein, 439 aa, Oryza sativa
MAFTVVYISFSIVLSAYLIGNMTALIVKGSRTERFRDRMTDLIRYMNRNRLGSAIRSQVKDHLMLQYESSYTRDRVIVDDIPVAVRSKMSQTLYLDMVSRVGLFRGCSDDFLSQIVLKLHEEFFLPGEVILEQGTVVDQIYIVAHGCLEEVANGEDGSEEIISELRPYGIVGDVAVICNIPQPYTVRVCELCSLLRIDKQSLTSILQIYFKDNSQILSNLLKGKETESKRKQLESDITYLLAKQESELVLGVNNAAYHGDIFRLKSLISAGADPSKSDYDGRTALHIAALRGYENIVRFLIQRGANVNSIDRFGNSPLLQAVKSGHDRITSLLVEHGAILNLEDAGGYLCRVVRGGRIDLLKKLLRFGISPNCRNYDQRTPLHIAAAEGLHLVASTLIESGADIQAKDRWGNTPLDEGRRCSSKPLVRILEQARTVATN

SEQ ID NO: 36616 - protein, 419 aa, Oryza sativa
MQLRRLLALSGEVSGRLRRRSHSTFASPSRPAWAMVVSEPQEEAPELRATFRLAEPPRASQLLVPYDAIRPRGSQGPLCAAAEEATSEDGLLLLRAIVAHGACACAHATAPNLPASSRPPGQRSVARVVCNPLTGQLLRLPDIDGASSEVSPGLMGYAGLLTQADGGDGPPDRYAVAEVSCDDFVMHRFLSETGRWDAMPGFLSPLPAARPIVVDQPVVAFGGRLWWIDLAWGAVSVDPFADEPDFRFVELPRGRVLPSSNEMSFERRRRKKVLSTHRRVGVSEGTLRYVEVSGVEQFVVRSYVLDDDGSSWTMEQSTALRAQGAPFPGMPGISCIDPVNADVVYIMVGSGLVLGVDMERGMGFGLSVLDEPAWPTPCVLPPWLESTRIPSSTETLLSKKTNVERKSLADMLVRVDRCC

SEQ ID NO: 36617 - protein, 181 aa, Oryza sativa
MGLTFTKLFSRLFAKKEMRILMVGLDAAGKTTILYKLKLGEIVTTIPTIGFNVETVEYKNISFTVWDVGGQDKIRPLWRHYFQNTQGLIFVVDSNDRDRVVEARDELHRMLNEDELRDAVLLVFANKQDLPNAMNAAEITDKLGLHSLRQRHWYIQSTCATTGEGLYEGLDWLSSNIASRA

SEQ ID NO: 36618 - protein, 413 aa, Oryza sativa
MDKGHLGGGGGGGGGLLALDASPRPLGFLNLLSPPPFHRSTMEADDSGGGGGRARRSVEVDFFSDEKKNMKKSRVSGGVAAEADDAKGPAAAGLAIKKEDLTINLLPAGNNARSDRSMVVDDDAASRPDHEEKSRSSNELAAMQAELGRMNEENQRLRGMLTQVTTSYQALQMHLVALMQQRPQMMQPPTQPEPPPPHQDGKAEGAVVPRQFLDLGPSSGAGGEAAEEPSNSSTEAGSPRRSSSTGNKDQERGDSPDAPPGAPNAVPLNAARPGAPAPQFQVPLPGGGMAPAFAVPPQVLYNQSKFSGLQMSSDSAEAAAAAAAAAQFAQPRPPIGQLPGPLSDTVSAAAAAITADPNFTVALAAAITSIIGGQHAAAAGNSNANNTNTNTTSNTNNTSSNNTTSNNTNSETQ

SEQ ID NO: 36619 - protein, 389 aa, Oryza sativa
MADLGFGDARSGNGSRSQCSRGKAMLLALGKGLPEQVLPQEKVVETYLQDTICDDPATRAKLERLCKTTTVRTRYTVMSKELLDEHPELRTEGTPTLTPRLDICNAAVLELGATAARAALGEWGRPAADITHLVYISSSELRLPGGDLFLATRLGLHPNTVRTSLLFLGCSGGAAALRTAKDIAENNPGSRVLVVAAETTVLGFRPPSPDRPYDLVGAALFGDGASAAIIGAGPIAAEESPFLELQFSTQEFLPGTDKVIDGKITEEGINFKLGRDLPEKIENRIEGFCRTLMDRVGIKEFNDVFWAVHPGGPAILNRLEVCLELQPEKLKISRKALMNYGNVSSNTVFYVLEYLRDELKKGMIREEWGLILAFGPGITFEGMLVRGIN

SEQ ID NO: 36620 - protein, 324 aa, Oryza sativa
MAAAAGAPPGFFSFLKHGVLVPARGRGVFLPLLALTAALAGALLLANSLAVQPRAVAALLDADALSRADPASAAYPKLVRRFRDDLRGLLVDAAACVAAAVVAGSAIKIATVFGAVAAFSPAGGEDRRATVSGLIAAARGNVWGPVLTIAFGYVLEVVCAAAIVAMAMLVVPLLEYSLLLLFLDAMAVLLASLFLVYLTVVCAVALAVSAAEPGGRGAGAVSRAWRLMSGKNAQAVLYVVATFALAAAVSPVYTLALRWWPRSAPAGIAAGVAYVLLLGAVEVFSVASVTAYYFECREMKQVEEDMAAGHHHYTKLSNGDEANI

SEQ ID NO: 36621 - protein, 332 aa, Oryza sativa
MELPLDKAAARSTPLALPAAGAAAAANQSPASLPLGPPAAASAKPLVAAANPPLLPVVAPAAAAPKSSSGAVEESKEGVEESNKSNVLTIGSIRSTLMKHEDTIIFGLLERSQFCYNPDTYDPNASRIVRFNGSLVEFMVKKTEKMHARMGRYKSPDEHPFFPENLLEVVEPSVEYENVLHPAAANININKRIWDVYFGDLLPRLVKEGSDGNCGSSACWDMLILQALSKRIHYGKYVAEAKFQGAPDTYTPAILNKDSDKLMELLTFAKVEDDVRARVMSKAMTFGQVVSEDLENEIKLKIEPELAVELYDKWIMPLTKEVQVQYLLKRLD

SEQ ID NO: 36622 - protein, 290 aa, Oryza sativa
MAALLVVVLVAMSAMVATANFNQEFDITWGDGRGKILEDGQLLTLTLDRTSGSGFQSKHEYLYGKIDMQLKLVPGNSAGTVTAYYLSSQGPTHDEIDFEFLGNVTGEPYTLHTNVFTQGQGQREMQFRLWYDPTKDFHTYSILWNPKHIIFMVDDMPIRDFRNLEGKGIAFPKNQPMRLYSSLWNADDWATQGGRVKTDWTHAPFSASYRGFRADACVVAAGGRTRCGATVGTDAAPGTGAAAAAGGWYNQELDLTRQQRMRWVQSKYMIYNYCTDPKRFPQGVPAECSM

SEQ ID NO: 36623 - protein, 89 aa, Oryza sativa
MYVKTIAFPCPWATNCYFCKNLHGIFLKLHGISCILAKNPQQVADRVLTSRDIMAYPCASFSRSTDEQPHQLQQNAQYINPCIVIICVK

SEQ ID NO: 36624 - protein, 201 aa, Oryza sativa
MPGRQQAASETMEQERKGEVSIGMYTYNHNSDSGFDVHEIYVKRSRFWVLLSYIGMVFLLASVCQLYLSKEGLSTGSVWSIAFGILVAKCLQYKPVKKESVVIMPTFGVQLEIHFWSGRVHRRFVPIGKILKPLLNECVTPVTCYWSLALLLRDEEELRLVFQKSHPPVKMLVPVWKALCKFLNSGCQTSSAVSEPNRSET

SEQ ID NO: 36625 - protein, 95 aa, Oryza sativa
MGNGFTFCIAWFITGCQTEKRREVRGGRWGVHASGCRGGDYDPGMVHCGELCCARGIVTVPFRGTVVVLRRMVTCRGAVSCGYSGTSLARVKLFE

SEQ ID NO: 36626 - protein, 435 aa, Oryza sativa
MQARREVRTKEEQWRGEERVVESPLGSARWSPEAEIGMRVEDTWDSLDQPQLSDRDRLNSCFDAIPVASFPHTFDGAQVVEIPSDATLAEAVDILSRHRIITAPVRNVDAPDDASWIDRYIGVVEFAGIAVWLLHQSEAAAARADDLGADELAAKLGTVALEGAAAARAPDQQQSAEGAVAEAFGALPSSDLLNKTKVKDISGSFRCAPFLALQSSDTFLTMLLLLSKYRMKSLPVVDIGEGTISNVITQAAVVHMLAECAGLHWFEDWGAKSLTELGLPMIRPSRLVKVRHDEPALKAFRLMRKRGVGGIPVVDHAGKPTGSIMIKDVKHLLASSDANRDYRTLTAQEFIANARQSSGEKQMNIVTCKKEESIKEIIFKLDAEKRQRIYVVDEQGNLDGLITLRDIIAKLVYEPPGYFGDFFNGVFPLPQNSRV

SEQ ID NO: 36627 - protein, 237 aa, Oryza sativa
MQRCSTTVIYASGGDQRLDMERLAVYDSSTGAWSARPWTNTSDIDMPLPLKVKRYSAMHAPGRICWKRLRGGSPNSLVSLDAETMGFPEVVPPPGVLLGPSYAVGDTDDGSMCLVNMEERGTMRLVMLSKKKWHLRVWLLGKSGCGGRAWVLDQEQETSLTTSTEDAADMLWDYDRACRVVAVNAGVVLMCLHSPRRLNDRYIAFRLSNLEVVASFSASEPVFQYQMPWPPVLLPTA

SEQ ID NO: 36628 - protein, 467 aa, Oryza sativa
MLPFVVAHLGRLLDAAAAALPELGCTFMFRGPWLVGADFLVTCDPAVFRHCLVANFAGYDKGRDFAEMFDVVGDGLLVADAASWAAKRHLAASVFTSAAFRGFVLSTVERQTRRLLVPFLDHAGGVVELEDVFMRYSLDVSYTVAFAADLDSLSVASAAEPFPPFGEATRVTGEAVLLRHIAPAGWWKLMRWLNVGVERRLADAKAVLDEFVYREIANRRSRPAPAVAGGDDLLCMYMASPIDPAMSDQTLRDAAVGFMFAAKDLIAAALTWLFYMICTHPHVEAKILDELRSLHTTTTAGAVVFDADELRAATYLHAAVLETLRLYPSAPFEEKEAVGDDVLPGGTAVRKGTRVVFCLYAMGRVEGIWGSDCREFRPERWLSTGDGDGGAGKVRQEPSYKFAAFNAGPRSCLGKDLGLSNIKIAAAAIVYNFTVELVAGHVVEPKDSVVLHTKNGLMVRVKRRETA

SEQ ID NO: 36629 - protein, 438 aa, Oryza sativa
MGPRKLHLASISALSIFLYVFAHTNSAQAFPVADGTYPPEAEGPAAESSDMDEQLELTPGPQPRVVDVDDYRARADAGDHTEAFLQAWKEACNSSDYPSVLLVPEGKTYLLMPVSFNGPCRATTITATIRGTLEAPSNRSVWLDRDLQEWITFDNIDHLRVLGGGTLNGNGHQWWINSCKTNRSMRCVTGPTALYFRRCNHLVVEGLQIRDSMQMHVVIAYSWRVLVSRLLITAPGWSPNTDGIHVSNSREVLMSGCIISTGDDCISIVTGSMFIRATGIFCGPGHGISIGSLGANKSWAHVSDVLVEKATLVGTTNGVRIKTWQGGDGHAERITFQDITMHNVTNPVIIDQNYCDSMTPCHEQGSAVAINNIRYRNIRGTSSSKVAINFVCSNSVHCDGIVMQDVSLVGEGSYVSCSYMNARVVELGYNFPYCRAEM

SEQ ID NO: 36630 - protein, 312 aa, Oryza sativa
MEGKETKNTVAAAASSSPLFSFSNSNASFGFGFGFSASSGPPPPPPPPAVEVLLSEESPVAAGELEPVVIDDSLSIYKGRASTSDVFGVKNSDLVPGKYEGGLKLWEGSLDLVKTLNSDIKEDRLLLEGKRVLELGCGHGLPGIYAILKGAVLVHFQDFNAEVLRCLTIPNVKANLLKESSEEKFTSGSVGFFAGDWSEIDSLLLRGDADLDKSTNSHENDTAYNGYDIILMAETVYAVSSLPNLYRLIKKCLRYPGGIVYMAGKKHYFGVGGGTRHFVRLVTEDGAMQSDLLAEVADGSSNVREVWKLSFK

SEQ ID NO: 36631 - protein, 412 aa, Oryza sativa
MSHRKFHAPRHGSTAYLPRKRCSHHRGKVKSFPKDDKTKPVHLTAFLGYKAGMTHIVREVDKPGSKVNKKEVVEAVTIIETPPMVIVGVVGYIETPRGLRALKTIFAEHLSDDARRRFYKNWCKSKKKAFTKAQAKWQQPEGLKIIERDFKKIQKYCTVVRVIAHTQMAMLKRRQKKAHIMEIQLNGGSIADKLKFAREHMEKAVPIKSVFAQDEMIDIIGVTKGHGVKGVTSRWHTKKLPRKTHKGLRKVACIGAWHPSRVQFTVARAGQKGYHHRTEINKKIYRLGDGFHTTDGKLVSNNGSTEYDNTNKSINPMGGFKHYGEVKQDFVMLKGCVMGPRKRVITLRKSLITQTKRAATENITLKFIDTSSKMGHGRFQTHEEKAAFMGPLKKDRLKAEAEAAAAAAAATA

SEQ ID NO: 36632 - protein, 369 aa, Oryza sativa
MGIGAFQEIGPFRVDTDGKTLCRNPHSWITAANLLFLESPVGVGFSYAAVKPQEVYSTIGDNMTAHDSHTFLLRWLDRFPEYKTRDLFIVGESYAGHYVPELAVTILDNNLLPHATPIKLKGIAIGNGILEFAAEQTQLYEYLWQHAFISDSAHALITQSCKYPDDHPSALCESARKAAYSRIGNIDIYNIYSSTCHEQKVRPSASKCMDLADPCSQYFVEAYMNQPQVQKTIHANTELKYPWTRCRVYNLDHFGDSPKSMLPYIKAVITGRIRIWIFSGDLDAMVPVTATRQSMERLQLRVAADWRPWSADGKDVAGYVIAYDGLVFATVRGSGHMAPIDQPERALVLVSSFIRGQPLPPPQPDQHDA

SEQ ID NO: 36633 - protein, 99 aa, Oryza sativa
MSRSWRRCQSASPCSWSTWRRSRSPAPASTRPGASERPSSSTTRRRGTTIGSSGSARSSAPPSRRSTTSTSSGPAPSKPSAPSGATRDIKGVRAAIVGG

SEQ ID NO: 36634 - protein, 167 aa, Oryza sativa
MVKTVVSYHLRFSCFLTLAEKHECTKRQAISHYSKDLKVTNDDGVAEVHFPTEREIRMMGDKNLSDPKPVDGALTMIFVRLAVDDTTYPCVAHFCAETDTVIYRIRLLQNRLNVDPLNEKKWVQGLSAIHESLNKKCLPLCPMHASDLLLGKITLQDIDCTRFVDVE

SEQ ID NO: 36635 - protein, 444 aa, Oryza sativa
MDAEDLHLPQRAAGGRQHLVPRPRPRPHSRQPPRRPPRRLHRRVARARDALQPPLRRVRPPPRHRRPQVQRRRHHLHGHRRRRAIRPPAVAAGVLRRGHHRQRQGVAVPSRPAPPLPPPHPQRQQREVPQHQVLQWSPPHRHRLRRDVPLPPGHRLQPPPLPGRDLRRHRRLLPRGEPQRHRHRVAQLGALPVPHRHSGERDTRRQGDGVQCLRQVAGRRRHADAGAGKLDGGAGDRCAVREGDGAAADDEDEVHRPVREHDEQRPEHRQDDEPLHQRAPAGGSADGDADIGDDGAVARDQPHPRQPPAAPPPRRVPGRPDAAARRPGHLQELHAEAQRHLRLQPRPARRRGPAAGAGGGEDVEERREDPAGVRHVGGGGVQARPQQHALPLRRHGGAGIRLSLPHPGSRRQRHDQATHAASMNKTAHCTWWLMHEEIKMPHQD

SEQ ID NO: 36636 - protein, 251 aa, Oryza sativa
MASSSSTSNSAISSVVASAVATTTPGAGSPCAACKFLRRKCLPGCVFAPYFPPEEPQKFANVHKVFGASNVTKLLNELLPHQREDAVSSLAYEAEARVKDPVYGCVGAISVLQRQVHRLQKELDTAHAELLRYACGEVGIPTALPVTAAPRLAAAMPAPGQLAAAVSAGMYGGGRRLGVIDGGGIAPPSPHTAGCYYARNNNAGSIGADVAPVLPYASVANWTVNAISTTTTNSGSESIGMDHKEGGDSSM

SEQ ID NO: 36637 - protein, 89 aa, Oryza sativa
MQAPYIAQQFGLSSLQGFPGISPFGQLQEPAPAPLQQPHLQQPPFHSGPQIPQAPPPDIQSLQFLSSNPQLGHQATDQSQYTIPVWDFL

SEQ ID NO: 36638 - protein, 490 aa, Oryza sativa
MDPATVGGGGGEPEAAAEWRARAVGGMEYGWYRAVPGGTGTTLLALRLARGAEAAVAAATVQAALRAILDAHPVLRARLRGSASGSPTLAFPSAAAPPPPPLALELLPVPESATDFPSLLEHELNRNPWTAAAATATASEHEPDAPPVLFATLYELPPPAGGGSALFVRIHTAACDRAASASLVRELLAQLAGDGAAAAAASEPEDAAVRASLEERIPQRDSWKPFWARGLDMVGYSINGLRTSTLPFEVTGTERSTQMLRLGFDRDETTRLLDACKQNGVKLCAAMAAATLLAARQSKLQLASNQQETYSIATLINCRKFLEPALDDHNVGFYHSAITNTHAIHGGEELWELAKRCQDSYTNAKNNKKHLTDIADLNFLMCRAIENPQLTTGSALRTAVVSVFEEPVVYDLSDLQSKAGVEEFVCCATVHGVGPSIGLFDSIRDGQLEFACMYPCPLHSRKQMQEILNKVNQILHEGSIGDDESFEDCT

SEQ ID NO: 36639 - protein, 330 aa, Oryza sativa
MYKGGILWFHNLTEFPHGSSGLVFPTLVAGLHYLNIQIAFHGTHTKHYPGIFGVLAKYYRVYLEILTIPLFLIGYVIPQGSLVYWTTNGLITVAQQLSLKNDAVKKVLGLPDTRAHQKFPRVGHKMMQERPLEDAHMHTNLTSTNNETANNIMEGKVSASSSPEELLEQALQHLETGNQDQAIPLIRTAIEKDSSLYVALIGMGQTLFSNRLFPEATVCFEHAIPKIEEQDPLLVLACYGAGLSRMRQGDSKMAIENLQRLAELKEPEKPINKKCYYQGLVALGSILINEGRKSEAVKFVQRAVAYDPNCEIYLKECDDTTEDKPKSAEH

SEQ ID NO: 36640 - protein, 308 aa, Oryza sativa
MAETLNEIVLIDDELTGCIPPQVGLLRKVTVFDVSGNHLQGPLPGSVAGLAAVEQLDVAGNLVEGPVPATICSLQSLKNFTYEDNFFSSRPGCPAATADGRWNCIPGAPAQRPPAQCAAAAAHPFDCSKAQCQATPPTTRRPGGRTPLAPHRSPLPHHMPPRRTPPTPPPPSSPTPSHLPPPPPTYSESPKSSMPPSTSPPSSHGASPPSSSSSPPTEHPGYVLPPLTPPPPTTTPPGHHAPVPGTPSSPPSSSWSPPQGGGGKLPFPPVHGVAYSSPPPPPSGDKLPFPPVYGVAYSSPPPPSKPYN

SEQ ID NO: 36641 - protein, 419 aa, Oryza sativa
MPATDYQGSSSTHSHPSPFSSFGRSLLSLRRDSPAAAAGASPAMASGEEADLEAFQRHVAAHLADLRGGEDELLSIEWIRRLLEAFLLCQEEFRVVVALARRRGALSAAAEKMVGDFYERAVKALDVCNAARDGVDQVRRWERLAGIAASVLLAPGEIHEGQLRRARKALSDLSVLLIDDAAAAAGGGGVASFLSSHRNRSFGRARASPSRSATLASSSSSSSSSSSSSHFRSLSWSVSRNWSAARQLQAIGSGLAAPRAHEGGLVAPVYSMGCLLHLAAWALVAAVPCPDRAAALQAHHLPAAPPRAAFPWAPPLLALQERLTEEGKRKDRRNSCGLLKEIHALEKCTQRLAEAIDAAPVPLSGEREAEVREAAAELAAVCAAMRAGLEPLERQVREVFHRIVRSRMEGLDSPMLNAD

SEQ ID NO: 36642 - protein, 351 aa, Oryza sativa
MSAAACISSFPPPPMAAAAAPAPETTIDVFVVANHTPVTAAADKSCEGDVVAGGGRTVRRPRAVARTLECERRVVGEGFAVRRGIGRKELDSLDPFISLDEFEFSPPAGFHDHPHRGFENVTYMLEGGFSYHDFSGHKGTINTGDVQWMTAGRGVVHAEMPGGHGVQRGINLWINLSSKDKMVEPRYQELASHDIPAAERDGVSVKVIAGEALGARSPLQTRTPALCLDVAMRPGARLRAPVPPGWSACSYVIDGEAVFGDEAAAAGAHTCVVFGGGGDGVAARATERSAARFLLVAARPHGEAVVKDGPFVMNTREEVEQAREDYRNRRNGFEMAAGWSSDHVATAAAAH

SEQ ID NO: 36643 - protein, 159 aa, Oryza sativa
MPRSCLRPLPILSAAAAAAAAGRASPSPWRAGRSRRSGTAAEEEEEAAGVMARGCREGSRSTSPRGNTSCGIRRWWTPSSRRPASSPPTPSSRSARHGEPHQAAPPGRRQGRRRYPAWFSRSTAAWFQFFNRFLKYITSLTNTTILGPANFTLPFYSSI

SEQ ID NO: 36644 - protein, 316 aa, Oryza sativa
MWLGASTSSASYVNELSSLVEMGGVGTSNHHESARLQVEIADMEVFKDEKKRVENLRGVKLVNNDLGEIVVEGDESNPTEDIIAQYPIKVTADNSGEAGHRMTDPTDVGGIDTAPIFSQSQPDDFAAGFDDVNPNASFDLYEKVDVNHRLFVSRVAAAKTFFHRIEPSKKVSFHSNPAATAVSKATEKFHFPVTTKVSGRVSIFSKFKALIRDKFLMMRPSHSYQRLGSKETTVNELLQIVSLLLAPKQINGCPTEQELVKKKAKEVMKPGWGREGSNKLWLPLSKGKGISSMFLSGKWTFLTSALAISTPAECDH

SEQ ID NO: 36645 - protein, 202 aa, Oryza sativa
MEDAHHHHWTMVERRGTQLWASGRPFIIHGFNTYWLMSFAADQATRLRVTAAIAEAGLNVCCTWAFSDGGYRALQTAPFHYDEDVFRALDFVVSEARRHNMRLILSLCNNWEDYGGKAQYVRWGKEAGLDLTSEDDFFSDPTIKSYYKAFVEAVVTRINTVTNETYKDDPTILAWELINEPRCPSDPSGDTLQVFITYVFFG

SEQ ID NO: 36646 - protein, 85 aa, Oryza sativa
MSTVPCPAGRRAAFFLPESRLFWSSIYLGWPGLESSSLHTVSKMRLFFYNDDSSNERRMATALFSWGKNFRFSYHIGYTDTHLIV

SEQ ID NO: 36647 - protein, 449 aa, Oryza sativa
MREVISIHVGQAGVQMGQSCWQLYCLEHGIQPDGTMPSDKQPGDESFTTFFSETGTGQYVPRSVMVDLEPTVVDEIRTGTYRQLFHPAGLISGKEDAANNYARGHYTVGKENVDTVVDRLGKIAENSSGLQGFLFFNSIGGGTGSGFTSLLMERLSVDYGKKMKLQFAVYPAPEVATAVVEPYNAVLTSHTTMEHSDCAFMVDNEAIYALCQKKLDVPRPSYLNLNRLVSQAVSSITASLRFDGALNVDLNEFQTNLVPYPRIHFPLVTYAPIISAEKAHHENLTVGELTNSCFEATNQMVKCDPRMGKYMACCLLFRGDVVPKDVNNAIAVIKNKRSIQFVDWCPTGFKVGINYQPPTVVPNGDLAKVNRAVCMLSNTTAIAEAWARVNHKFDLMYAKRAFVHWYVGEGMEEGEFTEAREDLAALEKDYEEVGMDSGDGDELADEEEY

SEQ ID NO: 36648 - protein, 391 aa, Oryza sativa
MDHSNSKASSAATPTAAAAPVPDRALLADIEAAVERYTAGGGGGDDERHVHEILFLVSNAPGAITFLSRRITARLEAARAPPAAALRSLLLVHRLLRAGDRYFEQDLRGLWASRDLRIDAPRCSCSPHAGGGGGSGEYATATGTCSFLHGYSAYLEERMQWAINQSGNLEPTRPRPPPHDGGDDHAAGAAAAEAPLVFKLAMSQRLLDLAIQLLPDNNTSATSAAARSAFGIVLRESFKVYDAFKDGLDALLRSLAAAGGGGKASRASSSAHEILKKARAQTPELKEFYHKCKKSSNVSSKSLDYPVVRVVTSAMELVMPPPVTDDEDDDGGGAATTEEAAGVAAQEASHPQPFATKLETTISTVWVEFDDGDGDGGGGDHSLQGVQSSYL

SEQ ID NO: 36649 - protein, 428 aa, Oryza sativa
MARRIIFLLFLIACVVDRSVNVHCEKQLVSSFDKHDNASSSLAELFSGKRIPLFRYITNKTSRLSTKAVQVGWDRGLQTSLYVISVGLGTPAKTQIVEIDTGSSTSWVFCECDGCHTNPRTFLQSRSTTCAKVSCGTSMCLLGGSDPHCQDSENYPDCPFRVSYQDGSASYGILYQDTLTFSDVQKIPGFSFGCSMDSFGANEFGNVDGLLGMGAGPMSVLKQSSPTFDCFSYCLPLQKSERGFFSKTTGYFSLGKVATRTDVRYTKMVARKKNTELFFVDLTAISVDGERLGLSPSVFSRKGVVFDSGSELSYIPDRALSVLSQRIRELLLKRGAAEEESERNCYDMRSVDEGDMPAISLHFDDGARFDLGSHGVFVERSVQEQDVWCLAFAPTESVSIIGSLMQTSKEVVYDLKRQLIGIGPSGAC

SEQ ID NO: 36650 - protein, 424 aa, Oryza sativa
MVAAGGGGGEGQEEPVPDARGGAAAGLPGGGGGAEERGAGGGGDPGDEPRRAVGGLQERGAGVRAGARVARGAAAAHVGARAAGGADAVLGGGAQGAHARARPAAAVRPRPARGAPRPRPLRPRRLPRPLVVADQDVGLLRLRARLLPLPGHPLPLRRPGHGQQRRRRRRRRGRAPRRRVEAAAPARPAHANPTIRGRHGAGPHPGGDGLRRHRDLRGVQPDMHRHRPLPRRRPRIGADDAAAAAGGDHGRRAAAEGAAGDACAAEGLGAERAAHVVLRALPEPRRAQRRRVPGGGARPRRRHQGPREAHHEPRGRGPREGEGERGEGVGRRGGHRRGVEDGGDERVGGVRRRRRRRRRRRREARAFWSLREPVLWRAVGSCDGERELASLDGLTDAVKVFFFSRKEIAVYVEYLSTSEFLFCL

SEQ ID NO: 36651 - protein, 94 aa, Oryza sativa
MYACERTMSKRLERRLLLVFLAALLWRRKNFWAWLATWVGVLVVTKLREMPRQSPLPSFSSPARNSLSSCSLHGTPARTTSYVASINFQLQESN

SEQ ID NO: 36652 - protein, 351 aa, Oryza sativa
MSAPAGLRQHCALGRAIAVVAICLLVIVGTYLLSSPAAGDGDTEEEFFSVRRRRRSSVDAGDDDLEAAVRGAAYANGTLIVSVLNRAYADEDGGLLDLFLRSMREGEGTEQLIAHVLLVAMDRPAFLRCRRLGGVRCYQLPAAQDGADDLSSEQLYMSDGFIRMMWRRIRLLGDVLKLGYSFIFTDLDVMWLRNPLSRLEYRAEEEDLLISSDQFNGRPGDIAGNELNTGFFFVASNNRTAALFDEWHAARDRSAGMKEQDVLNDMKRRGALRRLGVRARVLDTARFSGFCQDSRDAREVATVHANCCRTMRAKVADLAAVLAAARRRLDGDGASPVLRWPPHSQCVKSWE

SEQ ID NO: 36653 - protein, 348 aa, Oryza sativa
MASTRRRRAGGVPMAVIRLGVAAIVVLGAGVIGGARAQLRMGFYDESCPAAERIVGEYVRQHVGRVPTVAAALLRLHYHDCFVRGCDASILLNSTGNGGAAEKDAAPNQTLRGFDLIDRVKGLVEAACPGVVSCADVLALAARDAVAAIGGPSWRVPTGRRDGTVSSMQEALAEIPSPAMSFPELAGLFATKGLSVRDLVWLSGAHTIGIAHCSSFADRLYNGGGGAGNANGNNTDPPPLDAAYAANLRERKCRTAGDGVVEMDPGSHLTFDLGYYRAVLRHRGLLRSDAALVTDAAARADIAGAVASPPEVFFQVFGRSMATLGAVQVKTGSDGEIRRNCAVVNSGH

SEQ ID NO: 36654 - protein, 480 aa, Oryza sativa
MHAPLLFWHGWVKIDGPTTAHVKAKILTLANAASQCLGTALVRNDCWSFLKGGFTLNSASETSVLYFQTASPNASTISIRSASLQPFSPEQWNQHREDRIQLNRKRSVNVHVADSNGSRVVGAKVAVHQITRDFPFGSAISRTILGNKLYQEWFNKRFNAAVFENELKWYATEPYPGKEDYTVADQLLQFVQANDAVARGHNIFWEDPKYTPAWVKNLTGSQLRAAVSGRIESLLSRYKGDFVHWDVSNEMLHFDFYENRLGGNATVDFFDTAKRADPLATLFLNDFNVVEVCDDLSSSADSYVSRLRQLADGGVTFEGIGLEGHFGKPNIPYVRAVLDKLGTLRLPIWLTEIDISSSFDPKTQAAYLEEVLREGFAHPSVDGIMLWTAMDTNASCYQMCLTNQNFTNLPAGDVVDKLLGEWQTKETLGTTNDRGSFNFSAFLGEYKLSVTYLNLTAEGTFSLAHSDDTKHINIRLSPSC

SEQ ID NO: 36655 - protein, 383 aa, Oryza sativa
MINELVKAGIQIHAVLYHIDLPQSLQDEYGGWVSPKVVDDFAAYADVCFREFGDRVAHWTTSIEPNVMAQSGYDDGYLPPNRCSYPFGRSNCTLGNSTVEPYLFIHHTLLAHASAVRLYREKHQAAQKGVVGMNIYSMWFYPLTESTEDIAATERVKDFMYGWILHPLVFGDYPETMKKAAGSRLPLFSDYESELVTNAFDFIGLNHYTSNYVSDNSNAVKAPLQDVTDDISSLFWASKNSTPTREFLPGTSLDPRGLELALEYLQEKYGNLLFYIQENGSGSNATLDDVGRIDCLTQYIAATLRSIRNGANVKGYCVWSFMDQYEMFGDYKAHFGIVAVDFGSEELTRQPRRSARWYSDFLKNNAVIKVDDGSVSTAFHAQL

SEQ ID NO: 36656 - protein, 360 aa, Oryza sativa
MKLKSTRSTLSESRSSQEQNSTPHRRSAQKPCPSNEKVRSATNELSSSSHWLGRLAVLVSSHGEEDDEGHRRRTSCQLMSLSPSSSPPANSTFLALPRKTSSPVRTSSSSPVRTSSSANSGIFPLPLASSPPELGVVLAGELGHLGHENQCVRLVIIAGVAARDEKSCGTADLTAGRFTRDHGEHLANCVIDDVGATRSLRQVRCENHNVLVDGVDEGKQSLSTAALSSSQGERGEFWGIGDARFQIQTPHQRFGVEAGLDVVAQGIEPPRVTAFGSQAQAPQGWSLICVGGGVTARVAVQHGPGREKRRHGGGGGGGGEGEGGGERKGKGGLGRGIDLVVSICKRRRNRRMKDDTDRCD

SEQ ID NO: 36657 - protein, 109 aa, Oryza sativa
MVMRAPVVLICDSISDLLACCPKFRIMLFCTNVIFATYYLLNKISSMQNLNHLAISFDVEICILLCTIIYGVSLAEYLSYSCCYFQVRMPALMLCPTTIPPRVARVASS

SEQ ID NO: 36658 - protein, 162 aa, Oryza sativa
MLSSDHCLLAIQQFWTQGSLDKNKALVEYLKQYGAVRTDKVAEVMESIDRALFVAEGLTPYTDSPMPIGYNATISAPHMHATCLELLKDHLQPGMHALDVGSGSGYLTACFAMMVGPEGRAVGIEHIPELVAASTENVQRSAAAQLLKDGSLSFHVAGMLSC

SEQ ID NO: 36659 - protein, 574 aa, Oryza sativa
MEHSLVAEAEAQVFFKAKAKGGFRALPFIISNEILEKVAGFGLNINFITYLNMQYHLSHANAGSLLFVWGAVSNFAPIPGAVIADMYLGRFIVVAIGSIACFVGMVFLWLSAMIPGARPPPCDMSASPELCAPPEARHMAWLLAGFVFLSVGAGGVRPCSMAFGADQFSRHPKERRSRILQVYFNAYYGSIGVAFMVAVTVVVYVQDNLGWKVGLAVPTCLMLLSAASFLLGSGLYIKDRGSKRMFAGIGAAVAAAVRNRRAWLPAKTEDGVYHHLKDCKLTVPTDRLRFLNKACMISNTKEDKSGSGGADGISDRGRLCTVDQVEQLKSAIRVMPIWSSTIFLAQAMNQYFAVPQADAMDRRVGAGGFRVPSGTFAVFNMLTMSLWSGCYDRWTAPALRRLTGNPRGLTMKQRIGGGLVFGTAAMAAAAVVEAARRRQALGGGGMSAFWLVPQYALAGLAEAFGVIGVIEFFYTELPKSMASFSMALLYMALGAGSLVGSLIIKLVHEVSGRRGRTSWLAEDLNAGRYDYYYWLLAGLGAVNFVYFLWCGWAYGEEGQNVEWEDEGEGETTIA

SEQ ID NO: 36660 - protein, 479 aa, Oryza sativa
MDHSAAAMANKPSLAVAAASRQRWALATSLCALLCLSLVVSAGLLLLGSTRPFRRPLFAAPQQQREVVGEAPWERYVKLAQAASPGGARDRAPDLGGDEGAEGDDDDAISTAPAPAPSPAAEEGGDEESCDLFQGRWVRDGAAAGGYPLYEAAECPFLSDQVTCRRNGRPDAEYEQWRWEPRGCGGGGGGGGGSREAALALALEQCRNRRVVFVGDSLNRNMWESLACLLYTAVPDRSRSRVLDVASDYRIFRAMDYNCSVEFFWSPFLVTLETKQDRTRALKLDQLPATLEKLRGADVLVFNTGHWWTHTGNLRAWDHLEADGKPVEMGGEEAFNQALGTWASWVDQNVDSARTRVFFRSISPEHKSENWCYNQTSPITDETKIVPWFPRGLVSIVERNIRSTRTPVTYLNITRLSELRVDAHPSVYTITREGKPLSTEQRQQPLVYADCSHWCLPGLPDTWNLLLLASLARSPVNVH

SEQ ID NO: 36661 - protein, 346 aa, Oryza sativa
MASPPSLLPSAGEDDESQREVYEQLRQLVSTYPTVPSGLDTPYYRHPDGWYTFLPAMVSVMVAQRHFTARDTDIIIATFPKCGTTWLKALLFATVHRDGGGAGGVEDDAALAQLRARNPHQLVPFLEIQVYVRDRAPDLSSLPAPRLLATHIPRPSLPASVAISGCKVVYMCRDPKDCPVSLWHFLDAQRPEPRGDVGEDFRLFCDGVSLVGPYWDHVLAYWRWHVERPGQVLFMTYEELSGDTLGQLRRLAEFVGRPFTGEERAARVDEAIVKACSFESLAGAEVNRSGTIELMEEPMRNAEFFRRGVVGGWPNYLSPEMATRIDEITESKFRGSGLVLPTMMTM

SEQ ID NO: 36662 - protein, 176 aa, Oryza sativa
MHTCEVISDYMFFLLVTQPAMLPVQRNVYDLLALVLNDAGYARTSSKEQFLETVASGEYSWDQPFMDFRAAPPDDMLQQGWKGLHAALQVMLQIWVRLLIYAAGKSQHARRLSMGGELLTFVWLLMAHRELGDIYNIQFQLVEKEKDGSVRTGPNSTITTDIYTLFRLGHPIDMIK

SEQ ID NO: 36663 - protein, 167 aa, Oryza sativa
MFVFTVAGSRGTRIFFHLMVKGSMVAQFLRITNVFRQQFNVSGDVSIPCTGVHRGGHVRQAAGRLVQQEGNHAAEKRESQRAQAEVEHEAHDKHLGDAHRAHRHGVASAPDHARGADGLDLTGHFERREVAGGQERERHRPRGPGVQHDAQQAGVDEVGDEGDLRPE

SEQ ID NO: 36664 - protein, 255 aa, Oryza sativa; identical to SEQ ID NO: 30616

SEQ ID NO: 36665 - protein, 100 aa, Oryza sativa
MARPRRDGDGDASPGFIADSHLRLPAHPVPTSPPCRPRFLQRPARAAGAQTEVSCSCCGCDPTSASRRRGGVCRRRSSSNTTTPAAAAREDAKQHHGAKT

SEQ ID NO: 36666 - protein, 164 aa, Oryza sativa
MSSSFPPPFSLPSSRRRRFPSTHSSPRWPPTPTHLASSSSSAAGPAAAYRSPTPAGSTPPMSPTTLSASCSTFSATSPSETATSGVASGRSAVISSPSDPRSAGSESASSGWATSARRLRGDWRRSAASSPTTTAGEGRTWSTPTSRPPPTSPRAPTCSSWRAR

SEQ ID NO: 36667 - protein, 123 aa, Oryza sativa
MGELNCVLVVLQSMDLPPLPGGQEPETQVLNQPALPPPREEEEVDSMESDTSAVAESSSASAIMPDNLQSTYPVIVPAYFSPFLQFSVPFWQNQKDEDGPVQETHEIVKPVPVHCAQEETINA

SEQ ID NO: 36668 - protein, 85 aa, Oryza sativa
MAVEGHITDKIHRCLAMDGLRSRVLQCGKVRSLLQCGSCLPLTKSGLEKFGLNQCNGQFIEDFKQWKKETSTTATGLKFGLRYRS

SEQ ID NO: 36669 - protein, 328 aa, Oryza sativa
MHKRSKSCEPSSEMDERRRRGGVGGNGATTCDDSACGARAAASSASSSSSSATTSHCSSVSVYRAKINGAPRHVTAVWHRTLINQSFTISIDGGGGGGAGAGDDGALSHKVELKPWPFWSKRGAKTLDVDGDRLDIVWDLRSAKFPASSPEPAAGYYVALVSRDEVVLLLGDGKKDAFKRTRSRPSLDDAVLVSRRESVSGRRTFAARAPLAAGRKDHEIVVDSAIAGPREPEMRITVDGVVLVHVRSLQWKFRGNETVIVDQSPVQVLWDVHDWIFAGGPAAQAVFVFKPGAPPPGGDRCGRRGGAGAGGIGDEGGYSFFLQAWKTE

SEQ ID NO: 36670 - protein, 657 aa, Oryza sativa
MPLDLCDAMTPNPDALSIGYSGSHASGLMLPNHPSSIGPTLPTGNMNTRLPGTPGMVLGNTLPSPSTPNTPRDSQRYGMPRPTSLQGDEQQRIQYNQMLNSRSLQQPGVPVPGAPAGVDRGVRMMPGAHGMGVMTGLNRGTPVTRPPFPRLGSSGMLNMVSPGNMLPNNGQGMQNTVNVHPGTIPGHGNTMLRPRDPMQMLRPGQNMEEHRQMMQEFQMQVSQGNNQSIHFSGTPFSNVGASSPGQPFPVQSSQPHQMPQQSHVLGNTHHPHIQGTTQSSPQQQAYAMRLAKDRHMQQCMMTQQQHPLSGASAVSTVQNGSQMQQQSQGPASSAIPSSQSQHKQQHPAQNSLDSSVPPNQPVNTSHKQKKQQGQQQSRQNQQQRNQGSQQAKLMKSLGRGNMMHQSSPVDATQASGISTTSKNQVSDKSMVQQGPGYFAGNKGLVPSVVQPGNQPKIYGSQMPHSPIQTSDVGSQSSMQGSPNQTMLTSQQAPLHSSSPLAQQQQQRYMNPSHNNIQRLVMQQNRHMNTDGRIESPVDQVQHNQAIPSTSIAKSTDSGSPGGVSSINQRRQESSHDPTTVPSTSQLASSPQDTFVGNEMLLSVSSQGMLQRQMSGGVPIHGHGIGGQRQQLQSRQQQQQKPAVQGSVYAHPSNSGPG

SEQ ID NO: 36671 - protein, 55 aa, Oryza sativa
MELDSASAHCLVFIDQLIYHLLFVTSCLLFTFTHMVTYSQICQQLISQNNWCILY

SEQ ID NO: 36672 - protein, 489 aa, Oryza sativa
MEPFTSAAVEPAPPTADDQRDAPRPHVVLLASPGAGHLIPLAELARRLADHHGVAPTLVTFADLDNPDARSAVLSSLPASVATATLPAVPLDDIPADAGLERMLFEVVHRSLPHLRVLLRSIGSTAALVPDFFCAAALSVAAELGVPGYIFFPTSITALYLMRRTVELHDFAAAGEYHALPDPLELPGGVSLRTAEFPEAFRDSTAPVYGQLVETGRLYRGAAGFLANSFYELEPAAVEDSKKAAEKGTFPPAYPVGPFVRSSSDEAGESACLEWLDLQPAGSVVFVSFGSFGVLSVEQTRELAAGLEMSGHRFLWVVRMPSLNDAHRNGGHDEDPLAWVPDGFLERTRGRGLAVAAWAPQVRVLSHPATAAFVSHCGWNSTLESVATGVPMIAWPLHSEQRMNAVVLEESVGMALRPRAREEDVGGTVVRRGEIAVAVKEVMEGEKGHGVRRRARELQQAAGRVWSPEGSSRRALEVVAGKWKAAAQK

SEQ ID NO: 36673 - protein, 377 aa, Oryza sativa
MEATATAAQGLRDWSSLPLDMLVLVLDRLGWSTHPSFALTCRHWRSAVSPFYPAWITPLLLSAADIGVTNVRYYSPYYHRCFEIADTLLKVPKIAARICCSSGQHLTLCLPRLILQADLVAGTMYELPEMPFYSFEFIVYDEHARRMYCVNTTYALQLARATQQDDGEWGPWELTDFDVEGPQLLAAPISNPVLHGGLLYVLGEDGKMAVYDPCNHDNNFTVPDKPKGFGIKHQVDSHLFESDQGALMAVLVGYSGAPIHVVKLNEETMEWEKMRSLEGHALFTGTYTTMLRKTKLRLMQNKVFLPRLYDWPETIHVDIVTRDGETAFVPKSSSSSNTKEITSDINIWFYEFGQQDAREFWGSERVDYSIWVDFSTN

SEQ ID NO: 36674 - protein, 371 aa, Oryza sativa
MRKRIEEQRRREAERRRQLEKDMRRWEEEEEEEEAWPWEDDDDDFLRMSQQLSVICSESRGKRGDWPNMKATRRGRRRTHALTPDNEEEEENLSELELAVENTRRRIHHCNCNHIPRHTLFTSHADVEELFLPFKLEEPYLCFASRCQKSAPSYAHFFPDFNRSPRITSDWLRPSTFEGDLQYILFFHKLMDTVECGNTEDTILAKAITIATQSYQKMLYFQIEAAVQDCLELLKEMERMNDRYDFYHFIASEILFNNKSYEDVLKLIRDGHVELHYTLKEFSTPHADHHMDDLVHRLVGRTRAYMPTDAQRECGMFKDWVCQQVDKEYGSLGYLYMHFLDNKMRAWFAPFPEDLNSSYIWRATVTSINRK

SEQ ID NO: 36675 - protein, 207 aa, Oryza sativa
MYMARCQSKLVVFTFSSDTQQWSSTSYDGWGILVAATPSQETALTQRHHAHGCIFWFLRWAKKLLVLDTFTMELSTINLPSSELIEIQQVAIVESARGGIGMFAMVDEILDSTFDMFYVVWDPEGANKWPLERLMKLPVEFRYNLVGAAGGYLLVQGISVQGPVQDQVCFTVELKTFKVEMFCETRRTLIGADLFAGFAPSLSPPSV

SEQ ID NO: 36676 - protein, 94 aa, Oryza sativa
MAGGDELLCTGGVQGVGAAVRGRSSLEELRRETRSRTGGGGLGSKQQWRTSQAEEMLEPGSRGTAGALRRSARWISATARRQRRSQMYMLLTKG

SEQ ID NO: 36677 - protein, 382 aa, Oryza sativa
MTVAYLKEMPSTPSIPSCTSGMRSVAARLLGAGTGTRPLSFVGSNGVGGRSASGSCHAGQSRALVNYDDDRGTYIIFNIADSLFIRDLNYRRPVKRICFSDMKPLCHAFDSEAKDGHDLIVGFLSGEVYSMSLRQQLKEPGPEPIALQHFFNTNSRCTGVAWVPGHEGFFVVSNADGNLFVYDKSKDVNTDWTFPTVEDQSEMKISYAKSSKSNPVARWHICQGAINAISFSPDGTYLATIGRDGYLRVFDFAKEQLIFGGKSYFGALLCCSWSTDGKYLLSGGEDDLVQVWSMHDRKMVAWGEGHKSWVSAVAFDSYCPHQNRMKENKIACIASLHQNRMKQKKIPYIPSLHQNQMKQKKIPISCIASLLLVRMPSCFSGI

SEQ ID NO: 36678 - protein, 387 aa, Oryza sativa
MGSCFSSEGGNESRKESAERPQITPDETAASEMDVNLNTTNADSISNHGMERLIHGQSFTYGELYAATGGFSDDRFLGEGGFGQVYRGVLDNSQEVAIKILNLQGNQGDREFITEASVLSKLHHTNLVKLIGCCQDGDQRLLVYEYMPLGSLKSHLHDLSPDKKPLDWNTRIKILVGAAKGLQHLHVNVDPPVINRDVKSENILLGDGYHPKLSDFGLAKMGPTGDDTHISTRVMGTLGYCAPDYLESGKLTVQSDIYSFGVVMLEVITGQKVIDDSRAKPERNIVEWAIPKINKKDFPKLADPVLNGQYHMRSLFRALTVAALCVDRTANRRPDITAVVDALTQISESQSSRKRWSSRLQSSVGSSASTEPRIEDWNQAKDQGEGS

SEQ ID NO: 36679 - protein, 387 aa, Oryza sativa
MDTTDPTGTLRPNEVCVILENGQFSGDVLVYKHSGLHFGDIHVLKATYIRDLEKEYVGYAKYAILFPISGPRSLADEMANSDFDGDIYWVSKNPKLLEHFKPSEPWVQAIKPKKTKQKKPQDCNESKLERLLFHEFLKTRFTPSFALGTAADSWLAYMDRLLTDSLDEIEKKLIEEKMLKLVDLYYLALDAPKTGNKVNIPSDLMVKQYPHFMGRSFSYHSSSILGQIYDKAEDVESLRSCNVQPIGVSLLPCFMEREAPPAARHLWQHRYEEYLTDSTMLYRAMVDKEERNMKFQELYEKYKHMLYDASEFEQTQRDPDDVFSEACVIYQIVYEKARWSNDASRCGFAWKVAGRALCHFYALKNEGDTALCSLPLLRKIIKKDHRR

SEQ ID NO: 36680 - protein, 117 aa, Oryza sativa
MSASRKSPCRCLSGWSRVSAMRRSIMSSNNPKTMPRWLPVCRRKPCRSSCRRKGKKSDTLGPATVAMMSSISPRSPRADSERTSAMSMEKKEVDMRLSTPLCTTSRTHISSPATVRM

SEQ ID NO: 36681 - protein, 224 aa, Oryza sativa
MTSSSSSRVCVTGASGYIATCLIKKLLQRGCVVHATLRNLGDEKKTAPLRELPGAAERLVLFEADMYDADTFEPAIAGCEFVFLLATPLQHDPRSTKYKNTTEAAVDAMRIILQQCERSKTVRRVIHTASVTAASPLREDGGEGYKDFINESCWTPLDHSHSYNNTMVDVLSPFHSVSHFSISHIYVNVNKSRHIYININVKNTRMTYIVKQRKYVINQLRISC

SEQ ID NO: 36682 - protein, 152 aa, Oryza sativa
MADSGQHGQRCKWMMGGTSGEMRAAGMAMRVWVAGTTGVVGREASDSAGSGMARAAGCSSDLSTRSSASLSSLWQISTTKSGMQLLSTVTPLMVCSPDGGVSLIGSSTLGVWREVSARITPKLFLVARMEYLLETDFHFQYAIFRMMGWSIW

SEQ ID NO: 36683 - protein, 46 aa, Oryza sativa
MDREELEKTIRGFLKELDSTEAAPMRTTGCTSAMRPSTIDQDFNTQ

SEQ ID NO: 36684 - protein, 199 aa, Oryza sativa
MKLLVALLVSTLLVHSLLADGSRRGKEAAAAALGYSNATVYDMSVAKCAGCGALGAWAESLEFLYYHNLVRLARWELPLAWSPRLESYARWWAAQRRGDCALRHSFPEGQFALGENIFWGGAGGAWRPGDAVKDWAAEGVDYSYAANACAAGRECGHYTQIVWRGTTSVGCARVACDDGGVFMTCNYYPPGNVVGERPY

SEQ ID NO: 36685 - protein, 71 aa, Oryza sativa
MQTKGLLQRCMCHVRPQINKRKREKKAAAAKDKEACEKKQKRNRRGGAPFSLHLSRGKGLSLIRQKLHTVV

SEQ ID NO: 36686 - protein, 115 aa, Oryza sativa
MASRAGRAAAATVASTGKASATATASTASTAATATPASGPPARAMASAPRPAPTAAPTPASSRAASSTASAATISGMVIDTRGSTSRTGSTALACTASPMAIATRAPGTKARSRG

SEQ ID NO: 36687 - protein, 387 aa, Oryza sativa
MSSALDTLCGQAYGAGQHRLLGVYAQRAMLVLAAAAVPIALVWASAGEILLLFGQDPAIAAEAGAYARWMIPSLAAYVPLACALRFLQAQGIVVPVMASSGVAAVGHVAVCWALVHKAGMGSKGAALSGAVTYWTNLAVLALYVRLSGACETTWTGFSIDAFRELRRFTELAVPSAMMVCLEWWSFEILVLLSGILPNPQLETSVLSICLSTSSLLFMVPRGIGSSLSTRVSNELGGGHPRAARMAARVAIAMTVLVCLVLVIAMIFLRNVWGNAYSSEEEVVAYIASMLPVLAVSFFIDGINGALSGVLTGCGKQNIGAHVNLAAFYLVGIPTAVLLAFVLHLNGEGLWLGLVCGSISKVGMLLFITLRTDWGKEVRKPSPYKHFG

SEQ ID NO: 36688 - protein, 59 aa, Oryza sativa
MPTSPVTTTLDALAQPDITILRWPSLLHPVLLRDDRVLASPTLCAPRSRLSLARVHHRR

SEQ ID NO: 36689 - protein, 441 aa, Oryza sativa
MAFTVTMLSWGAIDFAADIAAAGEWRHALEAIKWGTDYFVKAHTHPFVYWAEVGDGDTDHYCWQRPEDMTTSRQAYRVDRDNPGSDLAGETAAALAAASIVFRRSDPHYSHLLLHHAQQLFEFGDTYRGSYDSSIEEVRSYYASVSGYHDELLWAALWLHRATGKEEYLRYAVDNADSFGGVGWAITEFSWDVKYAGLQVLAAKLLLDGDPQAAAHRGVLEKYREKAEHYLCACLGRNINGADNVDRSPGGMLYVRQWNNLQYASSAAFLLTAYSHYLSSSSASASAALRCPGGAAAAAEMVSLARSQADYILGRNPLRLSYMVGYGRRYPARVHHRGASIVSHKEDGRFIGCVQGFDDWFGRGRANPNVLAGAIVGGPSRRDEFRDDRANYMQTEACTYNTAPMVAVFARLHRLTTAITTAAAAEDPDGGSPDRRSVDRR

SEQ ID NO: 36690 - protein, 372 aa, Oryza sativa
MRSGRRAPGVRRHRVREPVPARVGRERAGRRDPRRHWQLQAAGELEAAAQRAHRRDTGGDRRAAVDHRGRPVLERAHRHRPAGVHQLHDAGDVRRVVQPPGAGRAVVGRRRTRQPRAAHGGGGKRTVAEVEVLGHLRHRNIVRLLGWCTNGESTMLLYEYMPNGSLDELLHGAAAKARPGWDARYKIAVGVAQGVSYLHHDCLPAIAHRDIKPSNILLDDDMEARVADFGVAKALQSAAPMSVVAGSCGYIAPEYTYTLKVNEKSDVYSFGVVLLEILTGRRSAEAEYGEGNNIVDWVRRKVAGGGVGDVIDAAAWADNDVGGTRDEMALALRVALLCTSRCPQERPSMREVLSMLQEARPKRKNSAKKQVK

SEQ ID NO: 36691 - protein, 364 aa, Oryza sativa
MAGAAAMALLLSTSVLLVLCLLPVDPAAPPVAAIPHRRSGRHDVPFGRHAAFGPFATEVELLLHGGGAVPDIRTCRDTLDRLPDWSHFDAELGPLERYFGSDGELNVKERLLYLFPMLDRAPKDGGVSCGELEAWLRRQAADRLDAVARRELKRHDKDGDGVVTLREYLAVDHDQHIDWTDTEHGEPGWWLHKFISADRDHSGAMDFIELNDFLHPEDSSQEKVKLWLLKDKLSGMDHDRDGKLSLDEFISQFHMIDHNSIVEHSADDDTSCAEAEKKFRELDSNNDGYLTVEEARPVIQSLISGEFSYAKSHAKLLMKADDNKDNKLSLEEMLNHYLSFYNIVYMDDHYDYDDIGNNIHDELR

SEQ ID NO: 36692 - protein, 417 aa, Oryza sativa
MDDDDVVVLSSASATRHSCKVCGKGFACGRSLGGHMRSHSLTEVDAVAAAVAPAYERADDDEGGDGKTVRRWMQSGGGYGLRENPKKTRRLSAGSGGGGGGGDNDDGDACHHRGGDLLSSSSCRPVLGRVRSHAPPAGGAAYADDSEDVGVDVDGGGGDDRYRDREMLVMAAPRRRPRSMRVPAPVRDEFVVDEEPEDVALCLVMLSRDTGRPWNSRPSDEYSSLMYNSSYHHHHDAVSDDDLELSLSSPYADTEIRTKKRRKTTGAASTAGGEKRGRYECHGCGRAFLSYQALGGHRASHKRINSNCSLVKPPADQPEPSIETSFSSASTSVSPADTMISAATISKTVKKATKFVCPICSKEFGSGQALGGHKRSHSIAGELYERGHADGIVKLEQPLLADRFLDLNLPAPGGDDG

SEQ ID NO: 36693 - protein, 84 aa, Oryza sativa
MVEMGVELTCTQNLQRTSCHLLPSRATAGMGLGKAVVAPTHETLRGSSHTSSRCSDVVLTDGAGTCSSELVALAVDVWAISSMG

SEQ ID NO: 36694 - protein, 379 aa, Oryza sativa
METVSVCGLHPGVAVTGFCPACLRDRLAGLHPPSDLRRCKSFSYYARSSSYLEPHPQQDALVLPDAADAPTNTKLALGSLGKRWQEWRRKSKLKHHHPPPATATDPALLARRSCDAFSTRTMLDEPRASYHPTLFVPRSDDQIPVEEEERAYVPGGSAQTRDYYLDSSSSSRRRRSVDRKSSSDAGDQIPRMVAAAANARVSPATELYHQPHTFHYHQPSFEPPPLLARERQEAKSKPKNKGIKGWSIWGLLHKKSSTTNSVGATASAFAGEARAAPPELRARGYDGQMLRCNSSVSARSSFSGIGSSFNGGRLGMRRADEVLLERNFSARYSSSSSCGYQFHKDDYSNSIANNSGAGAGSRPPRSSTLPRTSLGLYYY

SEQ ID NO: 36695 - protein, 48 aa, Oryza sativa
MDWCSLIFFGEICGDRDLPVNIRYSLLRTTIIRCVFFFFLKEQFGVLT

SEQ ID NO: 36696 - protein, 93 aa, Oryza sativa
MWFVGRGYSDAARASDRGSKPDKEIITRVSGPEIGYITTPIVLVQCALVLLSQRGNLPKGGVYTPGAVFGPTDIQQRLQENGLSFDLVSTRTL

SEQ ID NO: 36697 - protein, 57 aa, Oryza sativa
MPASQHRIRQINYTMVVGSLPSDFPRRKKVQHYDVPAKMLKRKAQVWYLLLELCCNS

SEQ ID NO: 36698 - protein, 117 aa, Oryza sativa
MAVGSERLGEEAARRQLGEARKARGGCSATRDGADDEGRRQINPPSPVWSSPPSLPLPLRSARRGTGGGRRPPFPLSSQIRPVGRGHRRQRHGPPLCSSRGRQGGGHRAVFFYLFLF

SEQ ID NO: 36699 - protein, 380 aa, Oryza sativa
MAREAEKDAAAAAEIPLLTPYKMGRFELSHRVVLAPLTRNRSYGNVPRPHAVLYYTQRATSGGLLVTEATGVSDTAQGYPDTPGIWTQQQVEAWKPIVDAVHRKGALFICQLWHVGRVSTNEYQPDGQAPISSTDRQITPDDSGIVYSKPRRLRTEEIPQIIDDFRRAARNAIEAGFDGVEIHGAHGYLLEQFMKDSANDRSDEYGGSLENRCRFVVEVIDAIVAEVGAHRVGIRLSPFIDYMDCVDSDPVALGSYMVQQLNKHPGFLYCHMVEPRMAIVEGRRKITHGLLPFRKLFNGTFIAAGGYDREEGNKVIADGYADLVAYGRHFLANPDLPKRFAINAPLNKYNRSTFYIQDPVVGYTDYPFLDEKDEGAATYA

SEQ ID NO: 36700 - protein, 198 aa, Oryza sativa
MPLEVTPSRSPQASPSAPPPPTPSTSTTTATKTSTPSSTTLTPTTTTSTRRRSASPATPTSCCPAETSTRATYAVTSPTAPASISGRTAACTRGRGAAAARPAAASSRGRRAPSTRATSPAGTCTDRGRTSASSGTRSPGCGRTTSGTAAARRRTSTATCTTATGATGCRTGTASTSGAAATSTSGRGRPARCTAAGR

SEQ ID NO: 36701 - protein, 240 aa, Oryza sativa
MDSSRPRRDPIKSRRRPDWREELRSNCLKRIKEERVQFLWKKRIDGPLPASDMIKVESAVRDIISDELQKLKQHGDGKAEEEADMIWEYQGPQTAKPVETESEDILLEMERLLYEDMRDEAIQIEVEALDEEDEYLAQAFLEHMQLTDKEANAKLWCPVCKQGELRETHNLVYCTMCKLRLDLGEDKINLEFLRERLANVHMDHLDRGCKSAPKFCLQTMFELTALYIQCEECNTFDVVI

SEQ ID NO: 36702 - protein, 417 aa, Oryza sativa
MGARCSKLSVCWWPPHFKSPLLENGAAADDGSGVPVFAEYSLDELRVATDGFSPERIVSEHGEKAPNVVYRGTLFSTGRTVAIKRFGRSAWPDSRQFLEEARAVGQLRSVRLANLIGCCCENGERLLVAEFMPHETLAKHLFHWETKPLSWAMRVRAAFYVAQALEYCSSKGRALYHDLHAYRVLFDVDGNPRLSCFGLMKNSRDGKSYSTNLAFTPPEYLKTGRVIPESVVYSFGTILLDLLSGKHIPPSHALDLIRGKNYLVLMDSCLEGHVSSSDEVHEMLENDGYCEDERATFEVSFHSWTGQQVSDSILVKKHGDSAFQSKDFATAVECYSRFIDTGVMVSPTMLARRSFVYMVLGKLQEGLADAKKAADISPEWPTAHYLQGMAYLAMGMEPEGHEELKQGAALEAERNAR

SEQ ID NO: 36703 - protein, 251 aa, Oryza sativa
MFTFMISQSYQICLDTFLFCEELINFYGHKNNGLFLLIASFVWFYTGFPIDKVAMLDQETRNYVGCKLLELTIKELFVFRFMQTDPNWSNFLFDEPTRKFNLIDFGAARDFPKRFVDDYLRMVVACANKDRAGVLEMSRRLGFLTGEEPEVMLDAHVQAAFIVGVPFAKPGGHDFRANNITHSVSNLGATMLKHRLTPPPDEVYSLHRKLSGAFLACIKIGAVVPCREMLFKVYEQYNFSDDRPEVLSSTG

SEQ ID NO: 36704 - protein, 538 aa, Oryza sativa
MQKPGATGGGTPVVDMESFFTSVIVPELQAPDWESEPMLKATVLRFLKEFKDQIPKATALALLPSVIRFLIHESNVVHSYAATFIENLLIIKDMVPVPSANVITRAPRYVAADINPYAQPIVQNLSKALSFPESYENPYLMKCLMRVLGIANIAGQIVHEVTARLVGILMEVCNNPKNPDFNHYLFEALAAVIGRAGEQDPALLPVFEASLFPVLQRILVEDISEFWPYAFQIFAQLVNLSRPPLSQNYMQLFGVLLSNATWDRPPCVPALVRLLRAFLRKIPNELNQEGRLPNILVIFRSLLSRSSTEDSAFYMLNTLVENVSFDIMNPHINEIWSALFTRLQTRQAVKFVNSLVVFMSLVVVKYGPGVLVSSVDAIQPNIFMTILQRFWIPNLKFIKGTVEVKLTSVASTKLICESALLLDGAAAQTWGKLLDSIVALLSRTDQDGAQQDQNDGADADSQRTSGYSVSFVRLQYAGKSEDDLLKEVNDPKQFLVTSLATLSAQSPGRFGPIIEQNVDPANKGALIQLCAAYNTNIV

SEQ ID NO: 36705 - protein, 70 aa, Oryza sativa
MVGSYEQVSCFSGLPALPMKGSISFGDLLAMDTSAEKKAIRVLHNSNTAKLELSPDWGQESGLSQMWNPQ

SEQ ID NO: 36706 - protein, 182 aa, Oryza sativa
MIQAQLGGQGVEQLAGDARHVVAVLRHQRPDPHPAIIIIIIAIADLRRRRRRAGDEIDMESLQPVDLLDAERLQRSRAPEVARPRLLQLEGVATQQLLPQLQQPPPELAGGAVVHHAERAQIPAGRHQRRPVLAADALQVQRRQLQPGQTRLQLQLQRQRWRLRLRERRARRVHLRGPRRRR

SEQ ID NO: 36707 - protein, 275 aa, Oryza sativa
MHVAKKSLASMAASATTTILVAAMLVVMAVESPVANGQAAAAAPAPAPAAPKTITAILTKAGQFTKFLQLLQSTQAGEQINNQIKGKASSSGGLTVFAPPDNAFAALPTGTLNKLSDQQKTSLVQFHVVSALLPMAQFDTVSNPLRTQAGETAAGKYPLNVTAEGSRVNISTGVVNATVDNTLYSGDRLVVYQVDKVLLPWALYGPPVPAPAPSPADKAKKKAGPVGVADAPAADTAAGTTTTTVATASEAAARGTVRRGLVGVAVAVAVAWCGM

SEQ ID NO: 36708 - protein, 238 aa, Oryza sativa
MCGIKQEMSGESSGSPCSSASAERQHQTVWTAPPKRPAGRTKFRETRHPVFRGVRRRGNAGRWVCEVRVPGRRGCRLWLGTFDTAEGAARAHDAAMLAINAGGGGGGGACCLNFADSAWLLAVPRSYRTLADVRHAVAEAVEDFFRRRLADDALSATSSSSTTPSTPRTDDDEESAATDGDEPSSPASDLAFELDVLSDMGWDLYYASLAQGMLMEPPSAALGDDGDAILADVPLWSY

SEQ ID NO: 36709 - protein, 484 aa, Oryza sativa
MSCREGRMSPQTETKASVGFKAGVKDYKLTYYTPEYETKDTDILAAFRVTPQPGVPPEEAGAAVAAESSTGTWTTVWTDGLTSLDRYKGRCYHIEPVVGEDNQYIAYVAYPLDLFEEGSVTNMFTSIVGNVFGFKALRALRLEDLRIPPTYSKTFQGPPHGIQVERDKLNKYGRPLLGCTIKPKLGLSAKNYGRACYECLRGGLDFTKDDENVNSQPFMRWRDRFVFCAEAIYKSQAETGEIKGHYLNATAGTCEEMIKRAVFARELGVPIVMHDYLTGGFTANTSLAHYCRDNGLLLHIHRAMHAVIDRQKNHGMHFRVLAKALRMSGGDHIHAGTVVGKLEGEREMTLGFVDLLRDDFIEKDRARGIFFTQDWVSMPGVIPVASGGIHVWHMPALTEIFGDDSVLQFGGGTLGHPWGNAPGAAANRVALEACVQARNEGRDLAREGNEIIRSACKWSPELAAACEIWKAIKFEFEPVDKLDS

SEQ ID NO: 36710 - protein, 384 aa, Oryza sativa
MEGFLQKLKGLDAYPKVNEDFYKRTLSGGVVTVVASVVMLLLFVSETRSYFYSATETKLVVDTSRGERLRVNFDVTFPSVPCTLLSVDTMDISGEQHHDIRHDIEKRRLDAHGNVIEARKEGIGGAKIESPLQKHGGRLSKGEEYCGTCYGAEESDEQCCNSCEEVREAYKKKGWALTNPDLIDQCTREDFVERVKTQQGEGCNVHGFLDVSKVAGNLHFAPGKGFYESNINVPELSALEHGFNITHKINKLSFGTEFPGVVNPPDGAQWTQPASDGTYQHFIKVVPTIYTDLRGRKIHSNQFSVTEHFRDGNIRPKPQPGVFFFYDFSPIKVIFTEENSSLLHYLTNLCAIVGGVFTVSGIIDSFIYHGQKALKKKMELGKYR

SEQ ID NO: 36711 - protein, 511 aa, Oryza sativa
MPRHLPAAAASRRLLCTTTHLLALPPVEPSPAADELARLLLAHHNPFHPAESPLQLLSGGGVSLTGDLLVQLLLRLRGASKLALSLLHAARLHPPPAASSRAADAYDAVVDALGRARQFDAAWRLVVEAAADGAATPRTFAVLARRYVAAGMTRQAVRAFDDMEAFVGREPDAAEFTTLLDTLCKYKYPKVAAEVFNKRKYKYEPNEKMYTVLIYGWCKVNRNDMAQKFLKDMIYHGIEPNIVTYNILLNGICRHASLHPDYRFDRTVRAAEDLLKEMHQRGIEPNVTSYSVILHVYSRAHKPELCLCMFRSMKERGICPTVATYTSVIKCLASCGRLDDAESLLDEMASEGVCPSPATYNCFFKEYRGRKDVNGALQLYNKMKAPGSPATPDIHTYNILLGMFIKLNQHDTVMQVWNDMCESTVGPDLNSYTLLVHGLCDNKKWREACQFFMEMIERGFLPQKITFETLYRGLIQADMLRTWRRLKKRVDEEAAKFGEEFKPYHIKPYKR

SEQ ID NO: 36712 - protein, 247 aa, Oryza sativa
MARSVAVVVLLAMAAVAAAQAPGPAATPAAGATGPPNVTAVLEKGGQYTTFIRLMKETQQDTQLNSQLNNSFNGNGYTVFAPTDNAFNNLKPGTLNSLTQQQQVALVQGHVLPQFYSMDSFQTASNPVRTQASGTDGPYTLNITSTTNNNVNVSTGVVEVTVTNALSAVKPLAVYSVDKVLLPFELFGVKAPAAAPTASTAKPKKGGSTEAASGPAGAEDAEPTGAASARAVGWGVAGLAAVVGCLL

SEQ ID NO: 36713 - protein, 86 aa, Oryza sativa
MVAAAFSTYDPNRTVIQIDPRNTEEMGFWESNNAIIAQMARSSPPEKPAVAHVCQDFKCSPPVTSADALRVLLNKTVAAATSSAAA

SEQ ID NO: 36714 - protein, 633 aa, Oryza sativa
MAAAVQLLVVAAAAAMAAACCAGMTAAAATVEVTWDVEYVLWAPDCQQRVMIGINGRFPGPNITARAGDVISVTMNNKMHTEGVVIHWHGIRQFGTPWADGTASISQCAVNPGETFVYKFVADKPGTYFYHGHFGMQRAAGLYGSLIVLDSPEQPEPFRHQYDDGGELPMMLLSDWWHQNVYAQAAGLDGKDRHFEWIGEPQTILINGRGQFECTLGPARKSFEKLLNENVETCVDDQKMCSDQEKCLRRSECGPYCPRSQCAPVVFNVEQGKTYRLRIASTTSLSLLNVKIQGHKMTVVEADGNHVEPFVVDDIDIYSGESYSVLLKADQKPASYWISVGVRGRHPKTVPALAILSYGNGNAAPPPLQLPAGEPPVTPAWNDTQRSKAFTYSIRARKDTNRPPPAAADRQIVLLNTQNLMDGRYRWSINNVSLTLPATPYLGAFHHGLQDSAFDASGEPPAAFPEDYDVMRPPANNATTASDRVFRLRHGGVVDVVLQNANMLREEVSETHPWHLHGHDFWVLGYGDGRYDPAAHAAGLNAADPPLRNTAVVFPHGWTALRFVANNTGAWAFHCHIEPHLHMGMGVVFVEGEDRMHELDVPKDAMACGLVARTAATPLTPATPLPPSPAPAP

SEQ ID NO: 36715 - protein, 168 aa, Oryza sativa
MYNAMIDLCCSVGDTDYALRMLDEMPFNGVFADFITYNAILEGLIKQRKAREAEAFLAEMSKNEQLPSPTNCAAAISMFSKEFNPSAAIDVWHCIVEHQITPADESARELIVGLLDFGRFAEVKKYTDEMLDMGIELPQSTIDNMKRTFDKVGKHHTYDHIARRPKRC

SEQ ID NO: 36716 - protein, 498 aa, Oryza sativa
MRGGLLVLLLLTAAVAGGGGHEGSSSCPFHAHDKPHDDHHHGHGHGHGHSCGGGGDDSHLVHHHHHGHGHGHDGGIQRRLLPEELAEEADLELDSFGDHHHHHHHHHEHHHHDHHHGHGDFQAELSPLGMWLSAMGCSLLVSMASLVCLVLLPVIFFQGKPSKTMVDCLAIFGAGAMLGDSFLHQLPHAFGGGHSHTHDHQNHNHSHEHSHAHSLEDLSIGLSVLFGIVFFFIVEKIVRYVEDNSQKGAHGMGHRHHHHKRHDRSDKAKLNHAEKDHEDKGVNQAEKEPSHDGAIEKTDGVTRADSKSAIRKRGLSSGSNSADREPVNSESDPAPNKALSSEDSSVSNSNMVFGYLNLFSDGVHNFTDGMALGSAFLLHGSVGGWSRTLFLLAHELPQEVGDFGILVRSGFTVTKALFFNFLSALVALAGTALALSLGKDPGHSSLIEGFTAGGFIYIAVAGVLPEMNDQKTTVKSSMIQLVSLTMGMLVALGISLVE

SEQ ID NO: 36717 - protein, 434 aa, Oryza sativa
MYDVAGERWSGGCGGHHRRLMGASSSSAPAPAGEDDAGKSGSSKDAMKIMVSVLVVVIFCTLLYCVYCWRWRKRNAVRRAQMERLRPMSSSDLPLMDLASIHAATDSFSKANKLGEGGFGPVYRGVLPGGGAEIAVKRLSARSRQGAAEFRNEVELIAKLQHRNLVRLLGWCAERDEKLLVYEFLPNGSLDAFLFNEGKSAQLGWATRHNIIVGIARGLLYLHEDSLLKVVHRDLKASNVLLDDKMSPKISDFGMAKIFEDECNEVNTGRVVGTYGYMAPEFALEGVYSVKSDVFSFGVLLLEILSGQRNGALYLEEHQQSLIQDAWKLWTEGLAAEFMDPALGRGYAAEEAWRCYHVGLLCVQEDADARPTMSNVLLALISDHMNLPEPSRPPMFTRLRRALLLAPPLMTTKTDSTASPVSVNDVSITVIEPR

SEQ ID NO: 36718 - protein, 898 aa, Oryza sativa
MAPPENPNGAGPAAPSDPAQPQPQPPAKSKWKKKDEKKDDDLSEEDLALKEQLELYVVRAQDADPGVQKLALESMRQEIRSATSSMTSVPKPLKFLRPHYGTLKSYFETMPESSDLKRYMADILSVLALTMSAEGERESLKYRLLGSEGDIGSWGHEYVRNLAGEIAQEFQKRQDDDMPIDALMELVQQIVSFHMKHNAEPEAVDLLMEVEDLDLLVEHVDSTNYKRTCLYLTSSSKYLPAPDDMLALDIAYTIYMKFEDLTSALRIALLLDNKSMQYVKQVYTATEDLQLKKQFSFIIARHGLAMEIDDEIAADGNDKEGLQEIVNNSKLSEGYLTLARDIEVMEAKSPEDIYKVHLIDGRGASSSLDSARQNLAATFVNAFVNAGFGQDKLMTAPSDSSSSGASGNWLFKNKEHGKASAAASLGMILLWDTDSGLAQLDKYLHSNDAHVVAGALLGIGIVTCGVKNDCDPALAILMEYINKDDTNIRIGAILGLGIAYAGSQKEELKSYLSTVLGDSEKSTLEVLIFSAIALGLVFVGSCNEEIAQSIIFALMERSEAELAEPIIRLLPVALGLLYLGKQESVEATAEVSKTFDEKIRKYCDVTLMSLAYAGTGNVLKVQKLLGICSQHLEKGETHQGPAVLGIALIAMAEELGAEMAVRSLERLLQYGEQNIRRAVPLALGILCISNPKVNVMDTLSRLSHDADADVSMAAIISLGFIGAGTNNARIAGMLRNLSSYYYKEAAHLFCVRIAQGLVHLGKGLLTLSPYHSDRFLLSPMALGGLVTVLHACLDMKSTILGKYHYILYIIVLAMQPRMLLTVDEDLKPLSVPVRVGQAVDVVGQAGRPKTITGFQTHSTPVLLAAGERAELATEKYIPLTSVLEGFVILKKNPEYNEE

SEQ ID NO: 36719 - protein, 303 aa, Oryza sativa
MSFGKDVWPAVCTAMEYMEQFDHDDDGMIENDGFPDQTYDAWTVRGVSAYCGRLWLAALQTAAALARTLGHHDYAERCMLKFAKAKPVFEAKLWNGSYFNYDSGTSYNSRSIHADQLAGQWYTASSGLPPLFDEGRIKCTLQKIFDYNVMRVKGGRMGAVNGMHPNGKVDETCMQSREIWTGVTYSLAATMLLHGMDDQAFTTAEGIFTAGWSEEGYGYWFQTPEAWTIDGHYRSLIYMRPLAIWAMQYALSPPRTILEAPKVNTMDRTSYISPSTLQFLQDSVRKMTPKNSCFGSSSSNCEC

SEQ ID NO: 36720 - protein, 459 aa, Oryza sativa
MAAAASDSDSPAAAAARHHDDPTLPAFASFSLSLSLRTPASPSPAALASVPSTIHLPTQISTLAVCLHPSASASASPSSRRRLNAAAAASSLLAPLPASTPGLSRSFPSGAPAAAGRRRTLVWFRADLRLHDHEPLHAAVGASSSLPPVFVFDPRDFGKSPSGFDRTGPYRAGFLLDSVADLRRGLRARGGDLVVRVGRPEVVIPELARAAGAEAVFAHGEVSRDECRAEEKVSKAVEKEGIEVKYFWGSTLYHLDDLPFRLEDMPSNYGGFREAVKGLDVRKVLDAPEEVKCVPMKNVLEPGEIPTLAELGLTAPPAMAHGSKAAVGSTLIGGEAEALERLKKFASECCMQPNKGDKDSTRDSIYGANFSCKISPWLATGCLSPRFMYEELKKHASRAIPSGSTPKNGDGTSDAGTNWLMFELLWRDFFRFITKKYSSAQKTSEVAPATGCTPTPALA

SEQ ID NO: 36721 - protein, 355 aa, Oryza sativa
MEFGDKDVASEEALWELYERWRGQHRVARDLGEKARRFNVFKDNVRLIHEFNRRDEPYKLRLNRFGDMTADEFRRAYASSRVSHHRMFRGRGERRSGFMYAGARDLPAAVDWREKGAVGAVKDQGQCGSCWAFSTIAAVEGINAIRTSNLTALSEQQLVDCDTKTGNAGCDGGLMDNAFQYIAKHGGVAASSAYPYRARQSSCKSSAASSPAVTIDGYEDVPANSESALKKAVANQPVSVAIEAGGSHFQFYSEGVFAGKCGTELDHGVAAVGYGTTVDGTKYWIVRNSWGADWGEKGYIRMKRDVSAKEGLCGIAMEASYPIKTSPNPAPKKIKKVTDDDEDDDDEEHRHHDEL

SEQ ID NO: 36722 - protein, 220 aa, Oryza sativa
MAGVPSDLVSRPELSYCMVAGTVEVERLHVLYTVRSVVAWTGEGQHVDLNTIADDVHSAYRIHRNDIQVTKYHLENFFLTFTIHGDREAVLQEPRLVTRSGREYFFRPWDEKKNAEAADIIEGVPMHARTEDSVAKLIGPWCSVHYIEEDTRRRNYNRTFDVWVWTSDPSSIPKVLRLTVTRPDEEGHPMNTPFPDLEPEQPAPREPKKGLTYPVIIHVD

SEQ ID NO: 36723 - protein, 632 aa, Oryza sativa
MARRLAAALCLAVAAVSVAVATARFVVEKNSVKVLSPRSLRGRHEAAIANYGVPDYGGTLTGVVVYPADARLADGCRPFGEAAAKALSSRSRRPVVLLVDRGGCYFALKTWHAQLAGAAAVLVADGVDEPLLTMDSPEEETPDMAFLANITVPSALVTKQFGDALRAAASAADDEVVVRLDWRESMPHPDERVEYELWTNSNDECGPRCDEQAAFVGAFRGHAQLLEKRGYALFTPHYITWFCPDAFLETTQCKAQCVNRGRYCAPDPDGDLAAGYSGRDVVLENLRQLCVHRVANARNASWLWWDYVADYHLRCSMKGDHYTRRCADDVAKSLGLPMDLIDECMGDPDADVENDVLKTEQIVQIGHGTRGDVTILPTLVINNVQYRGKLESTSVLKAICAGFKESTEPDVCLTPEMETDECLNNNGGCWRDEKTNITACKDTFRGRICQCPVVDGVQYQGDGYTHCKAVGPGRCAMNNGGCWKGTRDGKTFSACSDSDLSGCKCPPGFKGDGLHCEDVDECSEKLACSCPHCSCKNTWGSFDCSCHGNNLMYIKAEDTCIAKNMSAFGWLVTTLVLSCLAGAGVAGYVFYKYRLRRYMDSEVMAIMSQYMPLEGQNGERLPLREEAQVEHA

SEQ ID NO: 36724 - protein, 645 aa, Oryza sativa
MAQPAMEGTVQGGGGGGGGAQEPRGQYGGGGKNGGDASPRKHAAAAAAAALPRHRRSKSASSDRSLEPCKHAALHDQRCTQAAQATPSSHHQPDATTRKSHAAAAAAAEGSSIHHVLTRDRSRASASPSHRVSLENDIRQLQLNLHQERSIRIMLDRAIGRASSTLSPGHMHFPAQTKELIAEIELLEEEIANREQHVLTLYRSIFDQSASGASSGQSSGLSSPAHTKSISSRTRRHPSIISSAFCSSKKLPLQPFQIMTSVSESGRSKSMLKTKIKHESFSSETLDIHPATFPPDPRKLPYSGSSSLTRTLKDHLYQCPSKISEEMVRCMASIYCLLRTECPENPEKVRSPFLSRSSTNVIIPRRGNGEDTNLSNTKCTVEVSSISADKNHMPDVSYAITHYRLLVEQLERVDLSMSETNIKLAFWINVYNSLVMHAYLAYGIPNSSLRRMALFHKAAYNIGGHAVTANSIEHALLCCRSPRIGRWFESILSTAMRKKCADEKQLVQLKFGLPDCQPLALFALCTGASSDPMLKVYTAKNISEELERAKREFLQASVVVRKSKKVFLPRLVERYAREAGLAGADELLAWARDNADARATQDAIQRLCVDAGGGRRKAAQAVEWLPYNARFRYAFPRTMVDKPLF

SEQ ID NO: 36725 - protein, 539 aa, Oryza sativa
MTTPRATTTTSPFSSLLLLPISPSAATPPRRARTPPPAVAHGGVRWTAGGRRRRRGCRAAAAVVEDGVLLPKEQEDDASAARYDWREEWYPLYLAKEVPDDAALPLTVFDRQLVLYRDAAGVLRCHEDRCPHRLAKLSEGQLVDGKLECLYHGWQFDGEGKCVKIPQLPDGAKIPRNACARSYEVRDSQGVVWAWMSGTNPPDERKLPWFEPYARPGFTDLSTVHELPYDHSILLENLMDPAHVPISHDRTDWTAKREDAQPLFFEVTERTPRGFAGYWGKQRTPHLRNLLRFEAPCVLTNTLEFVDKDGKEQCFSAHFLCRPAGQGKSMLLVRFGSTQTSPLVKVLPRWYFHQNACKVFEQDMGFLSSQNEVLLREKVPTKELYLNLRSSDTWVAEYRRWMDRAGHGMPYYFGHSTLSPPPVPAVVEQAPAGAVAGMSASFPAKGGVGATHAPNPTNRYFRHVVHCKGCRDSVKRYASLKNAFAALAAAAVAAAILAATRQLKAVLLASAAALAAASYACNWVLSLITTNFIRTHRRL

SEQ ID NO: 36726 - protein, 555 aa, Oryza sativa
MNCFPLNSISLTRSWKAMTEATLVESENNFAQRSEENRDNLSSKNNEKIQRSIDNTPYGVEVTLEPKRKGLIADFERPRVLVRRNGELLEAICLNSINEQQGAIATNRKGLVFFNWNDKQDNKNLAEYIWAGSDWPLDGWAGCESTPTSTSFSPSVGLGRRKGSHLSSGGPAISLGSLAKPGRDLTGGGAFGIPGYAGIGASGFGWGEPDEFEDFVDLPATLENIHSRALSRHPSLPLLLVGSSNTHVYLWEFGKDSAMATYGVLPAANIPPPYALASISAVQFDYYGQQFATAALDGTVCTWQVEVGGRSNVHPTESSLCFNTHASDVAFLTASGSVLAAAGCSSNGANVVIWDTLAPPSTCQTSIMCHEGGVRSLSVFDRNIGCGSISPLIVTGGKSGDVTLHDFRFISTGKTKHHRSSNEHDVKASSTSMHDTKSGTSNGVSNSGMIWHIPKAHTGSVSSVSTIPNTSLFLTGSKDGDVKLWDAKSSQLVFHWQKLHERHTFFQPTSRGFGGVVRAAVTDIQVLPNGFVSCGGDGSVKLVQVKNDFADVRPH

SEQ ID NO: 36727 - protein, 669 aa, Oryza sativa
MGGGTKKVFTVQVEDGKPRKDGRPAVGPVFRSALSKDGFPPLEPDMKTSWDVFRVAAGKYPDNRMLGWRPVKDGVIGPYIWKSYREVYEEVLQVGSALQQLGVKPGSRIGIYGSNCPQWIVAMQACNGYSLICVPLYDTLGAGAVDFIIDHAEIDVIFVQDKKIKEILSANCKSAKRVKGLVAFTSGTSEEITSADQIGMKLYSWKDFLKMGKENPAQPCAPKPNDTCTIMYTSGTSGEPKGVMLSHESHAIYVKGVDLFMEQFDDKMTTDDVFLSFLPLAHILDRMIEEFFFHKGASVGYYHGDLNALRDDLMELKPTLLVGVPRVYEKIYEGILKALSELRPLRRLIFNALYNRKLANMKAGCTHKTASPFADMLAFRKVKARLGGRLRLLISGGAPLSNEIEEFLRVTSCAYFIQGYGLTETLGPSTVCYPDDMSLVGTVGVAATYTELRLEEVPEMGYNPLGTPSRGEICVRGNFFTGYYKNPELTNEVMADGWFHTGDIGEMNSDGILKVIDRKKNIFKLSQGEYVAVEYLEKVYVFPPTVEDVWVYGDSFRSMLVAVVNPHEENTMKWAESNGCKGSFAEICKSEGLKEHILKELQSVAAKNKLRGFEYVKGVILDPIPFDLERDLVTATMKKKRNNMLKYYKPEIEKVYQKLEEQRVAAKSK

SEQ ID NO: 36728 - protein, 295 aa, Oryza sativa
MNPAGGFTWQSYGEATNSLDETAFTKDGLVEQLSMTWDKSDYLWYTTYVNIDSGEQFLKSGQWPQLTVYSAGHSVQVFVNGQYFGNAYGGYDGPKLTYSGYVKMWQGSNKISILSSAVGLPNVGTHYETWNIGVLGPVTLSGLNEGKRDLSKQKWTYQIGLKGEKLGVHSVSGSSSVEWGGAAGKQPVTWHRAYFNAPAGGAPVALDLGSMGKGQAWVNGHLIGRYWSYKASGNCGGCSYAGTYSEKKCQANCGDASQRWYHVPRSWLNPSGNLVVLLEEFGGDLSGVTLMTRTT

SEQ ID NO: 36729 - protein, 660 aa, Oryza sativa
MGEGVKAMLARPIQLADEVAKQCGAARCFRAECGELKARADKLAALLRQAARADLYDRPAVRIMAGAQQALLKASSLAARCASGHPRLRRLFTLSPAAGFPRTVALLDTALEDVAWLLRISSPRSGGGGGGGGGGGDDDGDGDDGDLRGLPNIAQNEPILFLIWDHVARLHTGGLAARADSAANLASLARDSQHFAKLIIEEDGVPPLLRLLKEGTDDGQEAAARALGLLGCDDESIDKLVQAGVCSVFAAALKDPPMRVQAAVADAIGTLADRSATCQELFAQNNAVRYLVGHLASGTIQEHSRYSVGSSSSKNSAAAPQHMTSLHSVVLAKTLSMRHGGDRGTSSSTDEPPRVSNEQDTKRNQMQSVVQSAMAAKTKTNGSLVPPFRPQLGTSGSSGRGAVREVEDPETKARLKAMAAGALWKLARGHLGVCKSITDSRALLCFAVLLEKGDGGMGTSVQYFSAMAIMEISRVAEHSLALRQSAFKPSSPAAKAVVDQLLHIVSKGDYDDLLLPCITALGCLARTFTASENRVIAPLVELLDEREPPVIKEAVLALTKFACNENHLHVNHCKAIVDSGGARHLVQLVYLGDEVQIEALILLCFIALHVPESEELAQAGVLAVLLWASKQAHMIQDMRVDALLPDAKGRLELFQSRASR

SEQ ID NO: 36730 - protein, 535 aa, Oryza sativa
MAREIQILRRLDHPNVMKLEGLITSRLSCSLYLVFEYMEHDLAGLSSSPDIKFSEAQVKCYMNQLLSGLEHCHSRRIVHRDIKGANLLVNNEGVLKIADFGLANYFDPNKNHPLTSRVVTLWYRPPELLLGSTHYDAAVDLWSAGCVFAEMFRGKPILQGRTEVEQLHKIFKLCGSPADEYWKKSKLPHATIFKPHCPYQSTLQDVFKEMPANALRLLETLLSVEPYKRGTASAALTSEFFKTKPYACDPSSLPKYAPNKEMDAKLREDSHRRKASRGHGPEASRKSRLSRAARETTTVNKQTDGKEESKTKANGTKDNSILDRTKVNGDARLFSDIQPVSVAQVKERSRHVKNDSREEIPFSGPLIVSSSSGFAWAKKPPEDRSFARSRTKSSSRGQFTAELDQDNKMPAKENQNLGLKEQPNRDMHIARANSKVREPHDAAKRAVLKKWSQLGRPDSFDSYDTYHSQNFSNAMYLGDTLSSKNSIKGDHDQGERVEYSGPLLSQSHKVDELLEKHERHIRQVVRKSWFSRGKK

SEQ ID NO: 36731 - protein, 312 aa, Oryza sativa
MRCMQMLVRVQSQVRASRVEAMERRNRHHHAAMLRDAARWRAASQDGGIWEDSLLSRDEMDARTKRKVEAVIKRERALAYAYSHQLLKATPMAAHAILADLQSGRNPWWWTPIERRHEAEAAAALLSRQRVEHVGNGGGGGRHVAVTATPARSVVSSYSTATATTAARPRATRPAKVASSYGGGGSIRDDESLTSCPAFGGALPNYMTPTMSASAKARARAQMLRQQQEKQAQAAQEKLRFSFGLGQSIGSWAKSPFWKGGAAAAPPSISSRVATPAASVAGRHRPTRSSVSELSVDSAVSMPAGIGRRTFK

SEQ ID NO: 36732 - protein, 450 aa, Oryza sativa
MGHGVSCARTGDEHDFFRAAQLGDLDALAALLAADPSLARRATLYDRLPVLHIAAANGRIEVLSMFLDRGAPPDAVNRHKQTPLMLAAMHGKIDCVLKLLQADANILMFDSVHARTCLHHAAYYGHVDCLQAILAAAQTTPVADSWGFARFVNVRDDHGATPLHLAARQGRPGCVQVLLENGAIVSALTGSYGFPGSTSLHLAARSGNLDCIRKLLAWGADRLQRDSAGRIPYSVALKRNHGACAALLNPTSAEPMVWPSPLKFISELEPAAKALLEAALMEANREREKKILNGTKYSLPSPSPGDDSADDDACSEVSDTELCCICFDQACTIEVQDCGHQMCAPCTLALCCHNKPNPTTLTPPSPACPFCRGSISRLVVAQTRSACDPDKPSSLQLTRKRSRRSHNLSEGSSSFKGLPSAMGSFSKLGRGSSRMADSDSSNLDKPEHDL

SEQ ID NO: 36733 - protein, 471 aa, Oryza sativa
MDSVASWGLTPLAAADPLVHDLLEREKRRQRSGIELIASENFTSFAVMEALGSALTNKYSEGMPGARYYGGNDVIDEIENLCRDRALAAFRLDAASWGVNVQPYSGSPANFAAYTALLNPHDRIMGLDLPSGGHLTHGYYTAGGKKISATSIYFESLPYKVSAATGYIDYEKLEEKALDFRPKLIICGGSAYPRDWDYAKLRAVADKVGALLLCDMAHISGLVAAQEAANPFEYCDVVTTTTHKSLRGPRAGMIFYRKGPKPPKKGQPEGAVYDYEDKINFAVFPSLQGGPHNHQIAALAVALQQTMTPGFKAYAKQVKANAVAIGKYLMSKGYKMVTDGTENHLVLWDLRPLGLTGNKVEKMCDLCSITLNKNAVFGDSSALAPGGVRIGTPAMTSRGLVEKDFEQIGEFLHQAVTICLNIQKEHGKLLKDFSKGLVNNKDVENLKLEVEKFATSFDMPGFTLDSMKYKE

SEQ ID NO: 36734 - protein, 348 aa, Oryza sativa
MGLDVGEIGMGLDLSLDLKMFAARSAVRMAAAAAKEATGVEACIRSLEEERRKIEMFRRELPLCARLLADVIELMKEEAGKRRKDGDDAEAKAEDGDKTKWMSTAQLWVDSRGSDADSENDRRSGSTSPASRLLGGAEESSSRAVAPPPYFRREERVVLRPAMPLLPPASHRSPPPAAAAAATAAGDDHRHVVASSFATAVPSPVPAALSLQAQAQQQQQQARKSRRCWSPELHRQFVAALQQLGGPQVATPKQIREVMKVDGLTNDEVKSHLQKYRLHNRKSPGTASASHSIVLVGDLWASQEVSCSQSGSPQGPLQLSGSGVAVSAATAGDSCCEDDDKSEGYVRK

SEQ ID NO: 36735 - protein, 384 aa, Oryza sativa
MAAVREVGSKAELEAAAGGARAAAVHFWAAWCEASKQMDEVFAHLAVDFSHAVFLRVEAEEQPEISEAYGVTAVPYFVFLKEGKTVDTLEGANPASLANKVAKLAGPASVAESAVPASLGVAAGPAVLEKVQEMAQQNGASATSSAEDALNKRLEQLVNSHPVFLFMKGTPEQPRCGFSRKVVDVLKQEGVEFGSFDILTDNDVREGMKKFSNWPTFPQLYCKGELLGGCDIVIAMHESGELKDVFKEHNIPLQPQGSKNEEAVKAKPDTEKSGAVSEPALLTAAQKERLESLVNFSTVMAFIKGTPEEPKCGFSGKLVHILKQEKIPFSSFDILTDDEVRQGLKLLSNWPSYPQLYINGELIGGCDIVLELEKSGELKSTLSE

SEQ ID NO: 36736 - protein, 126 aa, Oryza sativa
MYRETEGVFTFCRSHRHIKLFGIGNRVNLSHSSHFLCFHPCFAPMVFVLYSFTSRRLNKHEVLAKCLLVMAPGTNPSTCVNCFANLRLQLITDVTSTSSVSPSLALANCFFFWGGNFVAKFGGFAP

SEQ ID NO: 36737 - protein, 520 aa, Oryza sativa
MSSMSDSGTGGRGGAELMVEQFHLKVLHAVLAVRGPRPLQPAASASFRRRDRWFHLPLHDPQPPPAAEGVEAPEAGEPLVVDILLAHAAAGGGGGGGAGGEVVERWTVVCEPWPDAAAGEGIPVNRAYKRCMTMLRSVYATLRFLPAYRVFRLLCANQSYNYEMVHRVGSFAVPLSRDEEAAMRSYQFVPVETQHGRLVASVQYLPSLAAFNLEISSLSPSMLIADYVGSPAAEPMRAFPASLTGATGSAFPQALSNQPQRPHSWATPALWPQAPRQQARFSPPHLLNASPTPSPPNFPSGYLQSRPKGGSAPMSIPQVGDRRSPIHRPITLPPTSPRRVGETGTSSAQQSPSERCPSFGRADGFRIMDPYASLSPGRKGKDTKDESGRFSALSSCDSPRQDDIDDADYPFAVDDVDTPSSQPGSSDGKEARDQASSSSHKSQDAAVGSLVHLLKTARPLRNSNCPSQASAVESSEAASTSSVVSRRKSDALEELQSFKEIKERLMSRSRAKQQEPPEKP

SEQ ID NO: 36738 - protein, 568 aa, Oryza sativa
MVFFPEEVVEHILGFLASHRDRNAVSLVCREWYRVERLSRRSVLVRNCYAARPERVHARFPGLRSLSVKGRPRFVPAGWGAAARPWVAACVAACPGLEELRLKRMVVTDGCLKLLACSFPNLKSLVLVGCQGFSTDGLATVATNCRFMKELDLQESLVEDRDSRWLGCFPKPSTLLESLNFSCLTGEVNSPALEILVARSPNLRNLRLNRSVPLDVLARILCRRPRLVDLCTGSFVRGNIVGAYAGLFNSFQHCSLLKSLSGFWDATSLFIPVIAPVCKNLTCLNLSSAPMVRSAYLIEFICQCKKLQQLWVLDHIGDEGLKIVASSCIQLQELRVFPANANARASTVTEEGLVAISAGCNKLQSVLYFCQRMTNSALITVAKNCPRFTSFRLCVLDPGSADAVTGQPLDEGYGAIVQSCKGLRRLCLSGLLTDTVFLYIGMYAERLEMLSVAFAGDTDDGMTYVLNGCKNLKKLEIRDSPFGDSALLAGMHQYEAMRSLWLSSCNVTLGGCKSLAASMANLNIEVMNRAASINEADNANDAKKVKKLYIYRTVAGPRGDAPEFISTF

SEQ ID NO: 36739 - protein, 148 aa, Oryza sativa
MLVRRHGLFCGRHCGGACVGDTKTSAKALPCLWPVRRRRRPWAPFSFLEALSWRFFHIPHKSPGENLVPASDERRRRSYDVVSSFGASLRRSSNTLTTVDGPFRFKSSHTLCSARPSPSWVRFVSRGGCHALWLFLQMKSELLADGVR

SEQ ID NO: 36740 - protein, 50 aa, Oryza sativa
MTTRRWAWKQPSFEESVIAHWSSSMAPKMSQGSSDSPKRRDLESCFFKCQ

SEQ ID NO: 36741 - protein, 381 aa, Oryza sativa
MGCFGCFSPEVDDDLKPSKPNYHSSDESSGADARRKVAPLATDGGNGYAHSFTFKDLSVATGYFNEANFIGEGGFGKVYKGKINGQMVAVKQLTRDGVQGRNEFLVEVLMLTVLNHPHLVSLVGFCAQGDERLLVYEYMPFGSLESHLFDVPLGKQPLDWNTRMRIAVGVAEGLSYLHNVADPPIIYRDMKAANILLDEDYRPKLSDFGLAKVGPVGDRTHVSTRVMGTYGYCAPDYVVSGKLTMKSDIYSFGVLLLELITGRRIYDASRPKPEQSLLTWSRPFLHDKRKFYRLADPALHGCYPTSALNQLVVISIMCLQDQPHVRPIISDVVIGLNHVASQPYVPERSSVSLSSPARCGSPQYAGTPSRRRGGRRVAQYA

SEQ ID NO: 36742 - protein, 640 aa, Oryza sativa
MSSMKISCNNQDENRGPHHLSKCLVNNDSYATLNVPTHFHGDHMVASSTDLSLKSSCFIQETPNQYPLFYLEDGNGSSEQYLDHEMVEQASCCTAETCHANEEPSMHPQVYPNNTLHTFYSSLANNLEYSKSGQSDMTNSSINVAHEEKQKFSPSPLSLVDLSGDLDLQLRCLRQVQYHLEYMFDGFLQSVQEASSDCKVARDSFEIPAVNITSNSDVVLPGLLSPSSTETDERRLSPVSSSHSTEDSSQQSHGESNWGASCQQNFLLIPSQTIAPTNGLSPCSSYANSDNSVQLYDSSDDISNMHETDQHILQKHMVSLGQNKTLINRQVRVKSNQASVPKGKFSICKEQITQDTATKDIKLSRHLRVKDSEHEYISTAKKISSYNCDTCLECVKPESEAMLPRHYKHARSSKNSFEHRIYDIDMGFARSGSSRNQMPKYQSLKNQDMSSLNVQKEHEINWPRKQMPSELLKLQNSLRGRACSNKKLAAKQINNNHKEHLSFVRDPEQMPYNQVNSNKEFETVGKSSQLLPRVQLSLHNDRSLTASTCQSSFPVTKGSTQFNDLEMPSLENIEFGTLGSFSLTLVSPKSNKNPNTHSTSKTCADAAALALQSHPTQSRSPGFYKVGDEDHFPPLRAGTR

SEQ ID NO: 36743 - protein, 331 aa, Oryza sativa
MFPPFSHLRRRLLAAIPNPNLLLRPSRSLSTSTTPATRAPATPVAVLWDLAASRPPSTLPLYDAAVRLHLAATSFGRVRLSAAFVHPGHRLPAPSPSAAAAAVHLCRVCGRRFRARDTLLRHFDAIHAREHAKRLARIDSSRGDRRVRLAAALSLKLSKYEKAARELTAAADPCSPADDLRRARVAVELSPTLSVSLLERAHEVLDGGSVRCLMLVSARDELAPLLRLAREKGVRSVVVGGESGPARWADVGFSWAEVIAGKARKAAPSVSGKWRDRDVLKRLEWRYDDDDEEVVFEEDGDEDGIDELTRNSKGKPWWKLESDGEDSSACR

SEQ ID NO: 36744 - protein, 540 aa, Oryza sativa
MMNMVSYLRGTMHMGVAQASTTASNYFAALQMFSIPAAFLADSYLKRFYTVLLFAPIEIIGYILLAVQAYTTSLHPPPCSPAATAASATTTCEPVRGANLSLLLLGLYLIPIGDGAARACLPALGGDQFDLGDPDEQRQETSFYNWYTFAVSTGGFVGLVFIVWVQNSKGWGVGFAVSAAFVALGLLVWAAAFPLYRNQLPMGSPITRVLQVFVAAFKKRNVRLPENPSELKQINQDDDANAHEVLPKTDGFRCLEKAAVETGNDAGPWSLCSVTQVEETKIVLRMAPIFVAAVLSYIPVPLLLSLTVQQGNTMDTRLGAVHISPATLFLIPTVFQMVILIIYDRAIVPPLRRLTGYVGGVTHLQRIGIGFVATIVATAIAAVVETRRKMTAEESGLEDATTGIPLSVFWLTPQFFLIGIVDVTSFVGLLEFFCSEASMGMKSIGSSIFYCILGVSAWLGSLLIQVTNRVTQRTNGGGWLDGANLNKGKLDRFYVVLCIIEVVALVIYVFFARRYVYRNDQRVVAQEQRKGDTGNGMAVI

SEQ ID NO: 36745 - protein, 569 aa, Oryza sativa
MITVAAPEAQPQVAAAVDEAPPEAVTVFRSKLPDIDIPSHLPLHEYCFARAAELPDAPCLIAAATGRTYTFAETRLLCRRAAAALHRLGVGHGDRVMVLLQNCVEFAVAFFAASFLGAVTTAANPFCTPQEIHKQFKASGVKLILTQSVYVDKLRQHEAFPRIDACTVGDDTLTVITIDDDEATPEGCLPFWDLIADADEGSVPEVAISPDDPVALPFSSGTTGLPKGVVLTHRSVVSGVAQQVDGENPNLHMGAGDVALCVLPLFHIFSLNSVLLCAVRAGAAVALMPRFEMGAMLGAIERWRVTVAAVVPPLVLALAKNPFVERHDLSSIRIVLSGAAPLGKELEDALRARLPQAIFGQGYGMTEAGPVLSMCPAFAKEPTPAKSGSCGTVVRNAELKVVDPDTGFSLGRNLPGEICIRGPQIMKGYLNDPEATAATIDVEGWLHTGDIGYVDDDDEVFIVDRVKELIKFKGFQVPPAELESLLIAHPSIADAAVVPQKDDVAGEVPVAFVVRAADSDITEESIKEFISKQVVFYKRLHKVHFIHAIPKSASGKILRRELRAKLAAC

SEQ ID NO: 36746 - protein, 410 aa, Oryza sativa
MAICSTDNELVELLWHNGGVVAQPQAAQARVVSSSGRGQSASVLTGDDTETAAWFPDTLDDALEKDLYTQLWRSVTGDAFPAAAAAGPSSHHAPPPDLPPPAARPPMRSGIGSSWTGDICSAFCGSNHIPETAAQRCRDAGAALPPERPRRSSTHDGAGTSSSGGSGSNFGASGLPSESASAHKRKGREDSDSRSEDAECEATEETKSSSRRYGSKRRTRAAEVHNLSERRRRDRINEKMRALQELIPHCNKTDKASILDEAIEYLKSLQMQVQIMWMTTGMAPMMFPGAHQFMPPMAVGMNSACMPAAQGLSHMSRLPYMNHSMPNHIPLNSSPAMNPMNVANQMQNIQLREASNPFLHPDGWQTVPPQVSGPYASGPQVAQQNQIPKASASTVLPNSGAEQPPTSDGI

SEQ ID NO: 36747 - protein, 502 aa, Oryza sativa
MAAANGGDSKGFEVPKLEIKFTKLFINGRFVDAVSGKTFETRDPRTGEVIAKIAEGDKADIDLAVKAAREAFDHGPWPRMSGFARGRILHKFADLVEQHVEELAALDTVDAGKLFAMGKLVDIPGGANLLRYYAGAADKVHGETLKMARPCHGYTLKEPVGVVGHIVPWNYPTTMFFFKASPALAAGCTMVVKPAEQTPLSALFYAHLAKLAGVPDGVLNVVPGFGPTAGAAISSHMDIDKVSFTGSTEVGRLVMEAAAKSNLKPVSLELGGKSPVIVFDDADLDTAVNLVHMASYTNKGEICVAGSRIYVQEGIYDAFVKKATEMAKKSVVGDPFNPRVHQGPQIDKEQYEKILKYIDIGKREGATLVTGGKPCGENGYYIEPTIFTDVKEEMSIAQEETFGPVMALMKFKTVEEAIQKANSTRYGLAAGIVTKNIDVANTVSRSIRAGAIWINCYLGFDPDVPFGGYKMSGFGKDMGMDALEKYLHTKAVVTPLYNTPWL

SEQ ID NO: 36748 - protein, 551 aa, Oryza sativa
MSELLNQKSSVQGKVPSGYFNTLFDLSGAWMTDAKETKHLAFDGYFTSLYKLHLKTSPLVLRDEVRSAVPPKWDPAALSRFIKTYGTHIIVEMAVGGQDVICVKQSPSSTISSADLKLHLEDLGDFLFSDGRNHSPIHRKTRDGKSKVPDVFVRMEQQPNNLHLSSYSESSTKDGLTITCSKRGGDASIASHSKWLQTVPRVPDAIMFKFVPITSLLTGIPGSGYLSHAINLYLRYKPDPEDLQHFLEFQVPLQWAPLFNELILGPQKRKGSYPSLQFRFLGPKLQVSTSQVSSSHKPVVGLRLYLEGRKCNRLAIHVQHLSSAPSMLGDSLSSSMSEWRESEEVGAGYIEPIQWKSYSCVCTSKVDYNPEWLKRVPGGRGVFVVTGAQLVTKGTWSRKVLHLRLHYTHVPGCAIQRTEWAAAPAASQRGSFLTTISTTLSSPFTQLQAAAAPAAPPRNEPAPAALLNSGVYPDGPPVPLQSRKLLKFVDMSEVVKGPHDVPGHWLVTAAKLVKDGGKIGLNVKFALLNYDGTQPATATMAGGDQGHGLLN

SEQ ID NO: 36749 - protein, 522 aa, Oryza sativa
MLTGLSEFSVSDGGFAKGSIDLGGLEVRQVTTFAKVWSTGQDGGGATFFRPEQVPAGFSALGHYAQRNDRPLFGHVLVARDVSGGGLLAPPLDYAPVWSSQDDAAHFWLPTPPDGYRAIGVAVTASPDKPPRDEVACVRADFTDACEAEATVWDKDGFSVVALRPAVRGVDARGVHAGTFVLARSDATAASASALACLKNNGAAYTSCMPDLAQVNALLAAYAPQLFLHPDEPYLPSSVTWFFQNGALLYQKGSQTPTPVAADGSNLPQGGGNDGGYWLDLPVDNFQRERVKKGDLAGAKVYVQAKPMLGATATDLAVWFFYPFNGPARAKVGPLTIPLGKIGEHVGDWEHVTLRVSNFSGELLRMYFSQHSAGAWVDAPQLEYLDGGNRPSAYSSLHGHALYPRAGLVLQGDARLGVGIRNDCDRGSRLDTGGAGRCEVVSAEYLGGGGGGVAEPTWLLFDREWGPREEYDIGREINRVAKLLPRSTRERLRKLVESVFVGEGPTGPRMKGSWRNDEREAK

SEQ ID NO: 36750 - protein, 485 aa, Oryza sativa
MKKKVCVVGGGLVGLAAARELQREGHDVSVLEQRGGVGGQWLYDHTAAIDGADPLGVAGVQSSVYASLRLITPREVTGFSDFPFSPTTVAGGGDARRFPSHAEFLRYLRDFCDAFGLMDVVRLNTRVLRVAADRDGWAVRSRRGEVETEEVFDAVVVAVGSYTQPRLPSIDGMEAWPGRQLHSHSYRVPDSFRGEVVVVVGCGFSGKDIALELRRVAREVHLSVRSTEEAMASPAMSKMLARYGNLHLRPQIARLCEEEDGAVVAFADGSRVAADTVVYCTGYSYSYPFLDTGGKVTVDDDNRVGPLFEHVFPPELAPSLSFLGIPNMVTTRFFEAQARWVAQVLSGRRALPPAGDMLRAAEEHARAMDAAGVARRRAHDVPDLGEEFCERSCGFPRLEEWEKELIWTSITAMRDDLESFRDDFRVTDLVADGLRRHGWILAPAPEPEPLRQEDVVAGDGEGEGVQPVQANQAAVASPLGFINSA

SEQ ID NO: 36751 - protein, 486 aa, Oryza sativa
MAVSSSSLLLRRGATGGAGRRWGPGEALRRLVSSSEAAPAEKVPARSPPVMPPFEHRPRPYAGWSGDEILAKRKQFLGSSVFYYYQKPLNIVEGKMQYLYDENGKRYLDCFGGIVTVSCGHCHPDIVNAVVEQTKLLQHTTTIYLNQPIVEFAEALASKMPGNLKVVYFVNSGTEANELAMLMARLYSGDLNMIALRNAYHGGSAGTIGLTGLQTWKYPIPQGEIHHVMNPDPYRGTFGSDAVAYAKEVEEQINYGTSGRVAGFIAETFQGVGGAVELAPGYLKLAYDTVRKAGGVCIADEVQSGFGRTGSHYWGFQTQDVIPDIVTMAKGIGNGLPLGAVVTTPEIANVLAQKIQFNTFGGNPVCSVGGLAVLKVLDKEKRQAHCADVGSHLVNRLKELQQKHEIIGDVRGRGLMLGVELVTDRKEKTPAKAETNLLFEKLKDLNILVGKGGLHGNVFRIKPPMCFTRDDADYLVDAMDYAMSGL

SEQ ID NO: 36752 - protein, 174 aa, Oryza sativa
MGLAGGARVVLFVVAAAAAAALTAAADQIFTSSGAPFGRNSREPRYHVEFHPVDAPFNPENGQESVPMTSHVGKHYTCFLPVEETKTMKSIIPQNATNVIIESERRVKPKDPDELLEILKDQCFYRHEGWWSYEFCYYGKIRQVHVEGEKVSCPILFIFFAQISHCILSSLCTI

SEQ ID NO: 36753 - protein, 311 aa, Oryza sativa
MKRPTSSSRKSKKQGEDLAFSEEGSLPAVTMEQKDEAEMEEVDEEEEEEVDEDMAGGHAAQSPSPSCGLGEKKRRLALEQVRALERSFDTDNKLDPDRKARIARDLGLQPRQVAVWFQNRRARWKTKQLERDFAALRARHDALRADCDALRRDKDALAAEIRELREKLPTKPADTAASVKVEAGNDAAAGAAAATVCKDGSSDDSDSSVVFNDEASPYSGAAFIGFGPSFLVDDASAATVGCSSSLPALESKWHGPYSDDSCKGGVYGFTEEWLAACSGEMAGNDAAGFFSDEHASNLNFGWCASGNEGWE

SEQ ID NO: 36754 - protein, 301 aa, Oryza sativa
MSESEVSVINQLEEEETRLELPPGFRFHPTDEEVVTHYLTRKAQDRSFSCVVIADVNLNNCEPWDLPSKAKMGEKEWFFFCHKDRKYPTGMRTNRATASGYWKATGKDKEIFRGRGLLVGMKKTLVFYMGRAPRGEKTPWVMHEYRLDGKLPPNLPRSAKEEWAVCRVFNKDLAAKIAQMPPPPFPRNDSFDLDLDDFLHLDADLPPLIDDPFASTSTLKTEPPPPANLMHNHYGYFSLPASATNYNHSSGAMADQAIRRFCKAEASTACFSGADADVDPVVDELLSFPDSITDYSYIWKA

SEQ ID NO: 36755 - protein, 456 aa, Oryza sativa
MARARASAMGAAPPPHLRSHDLVVVVAVAAAALCLACRGASAGGGGGVDVLDRARRPEFAAWMAGVRWAIHERPELAFEEIETSRLVRAELDAMGVAYRHPVAGTGVVATVGTGRPPFVALRADMDALPMQEEVQWEHKSKVAMKMHACGHDAHTTMLLGAARILQERRHELQGTVVLLFQPGEEVGTGARRMVEAGAVDNVEAIFGFHVSVELPTGVVGSRPGPLLAGCGFFEAVITGKGGHAAHPHASVDPILAASTVVLALQGLVSREADPLEAQVVTVTRFLAGDALNVIPESITIGGTFRVFSNEGFLRLKRWIEEVIVAQSAVYRCAAAVDFHAGGRPLLPPTINSAALHAHFQAVAAETLGASAAVLGAMEPCMGSEDFAVFSEAVPASHFYFVGVRNEAEGLVHLAHSPHFRVDDAALPYGAALHASLAMRYLDERRREGGSHPHEEL

SEQ ID NO: 36756 - protein, 1161 aa, Oryza sativa
MEEEEQPGAGAPAPEPLPSQLDILKNTIQSLRDSNRHDFDAWVSLIKAAGETSMYAAHKARLCTNKQVEEVYEQAVQAVPHSIDLWVSYCGFAMCTYEEPAHIRRLFERALSLVGKDYLCYHLWDKYIEFEKSQKQLIQLATIYIDTLKFPTKKLRRYYESFRKLVTLMEHEAAGAERSSENLRTLEVIKAEDSEVDASIKISALLDEHSGHLRADAVKQYLLSGESLYQRSSKIDKEISCFEASIKRPFFHVKPLDDDQLENWHRYLDFVEKKGDFDWAVKLYERCLIPCANYSEFWIRYAEFVDAKGGREIASYALGRASSYFVKGVPTFHMYYAMFKEQIGDAQGARSLFIEGSNNLTSNFCANINRLANMEKRMGNTKAASEIYETAIQDAMQKNVKILPDLYTNFAQFKYAVNHNISEAKEVFVEGIKQAPCKALIKGFMQFMSTHGGPTEIPILDSVISNAVVPGSDISTVLSREDREDISLLFLEFVDLYGDVRDLRKAWARHSKLFPHNTRHMLQQYCNSENSLQENNKRRRTENYIVSQDDSPKDAITLKQLSKSDTSLLVDKVVGLQVDKSTVDSGIGHTVEEQNILGNVDVHHEVGDTAQECIDMTDSQHNLDKSGMQNQVSAHGTHESCEQNDQTTESHPSVCENAPHAESFTCDSPSKSNSFSKISALDKANTIDVSASVDQGAICPRSDSPSVASLPKEETSPDPVRISPELEEKKHDKIQGQLETKDDMSLSNANIEKSSDSPDATQHDREVSALSQEHVQSAQPQQLPDCARPSSSEMATTPATTSSQFSPSTAVTSQAQLQHQIVSSQMHQSDKLSLAEQNTQQQGLAYEIPQNVQASSQSQAQIFAQPNQGDQQSLQTMQGYASQMWQYYQQQMYYLQAQHNQQLQSLQQQQLPTEHLQQNFMQQVQQLNQQMVLWQQQVQQQQQQQQQQQQQQQQLQLQQHALPVQQQPDQKYSQLPSSGDTRHEQNKPQKLESQMDHQSELVQQQQVYFQQQQQMYLMQQQQMYQQQQQLQQQLLQQQLLQQQQYLSQMPQQQQNMTQQQQLFQQQQQQLFQQQQQQMVVLQQQQQQQFIQQQMQQYLQQQTNQQGANSQSCELNPQDARNMKMEHGQQSEASQGDGSKLRSGEQSELSYPSTPQSQHSNR

SEQ ID NO: 36757 - protein, 606 aa, Oryza sativa
MESIAAATFTPSRLAARPATPAAAAAPVRARAAVAAGGRRRTSRRGGVRCSAGKPEASAVINGSAAARAAEEDRRRFFEAAERGSGKGNLVPMWECIVSDHLTPVLAYRCLVPEDNMETPSFLFESVEQGPEGTTNVGRYSMVGAHPVMEVVAKEHKVTIMDHEKGKVTEQVVDDPMQIPRSMMEGWHPQQIDQLPDSFTGGWVGFFSYDTVRYVEKKKLPFSGAPQEDRNLPDVHLGLYDDVLVFDNVEKKVYVIHWVNLDRHATTEDAFQDGKSRLNLLLSKVHNSNVPKLSPGFVKLHTRQFGTPLNKSTMTSDEYKNAVMQAKEHIMAGDIFQIVLSQRFERRTYANPFEVYRALRIVNPSPYMAYVQARGCVLVASSPEILTRVRKGKIINRPLAGTVRRGKTEKEDEMQEQQLLSDEKQCAEHIMLVDLGRNDVGKVSKPGSVKVEKLMNIERYSHVMHISSTVSGELDDHLQSWDALRAALPVGTVSGAPKVKAMELIDELEVTRRGPYSGGLGGISFDGDMLIALALRTIVFSTAPSHNTMYSYKDTERRREWVAHLQAGAGIVADSSPDDEQRECENKAAALARAIDLAESAFVDKE

SEQ ID NO: 36758 - protein, 247 aa, Oryza sativa
MVVVPYWVLCAMGQFHGGDSFAVSQFLLFLGSTLGALALMAARLSQLAGAAPGLAPASELLRRATLVVMLVTAHAAAAELLGEATIALLCLPELAPALFWFTLHLDGESSPAATIDGTKSHRNVLSVLAAAAVASVAYLAAAMGERGLSVSTITMVSCGVSGLLVRCAVVVLGQWPGQAETAGSTAASLMEVVLVLKFWGNTLLAVAAMLLLLALLTAFRLCLQEPMFATVAKCFSDYIDKVPQMTV

SEQ ID NO: 36759 - protein, 499 aa, Oryza sativa
MRPPPGRVGDGGGAAPRPGGAHRRAEHVPGAELPRAHGVADGLRRRGRRHDVEHGGFQVGGGPPVAVLRRGRRRGDAVRAGGEVAHWAVQPDEPLHPVPPQRRRHPGVPGHGRVAHHRSPPVVRPRPRQGRRPVREPDRRVQPDGRGDHRRERDDRRAGGDVVVQVPFEQAQVHAWVPDRGDALGHGGDIERDAGELAGVEHPPGVQQQHRGAGGDDPGTDALAQHRRHQPGLVLPRPHRGLLHRVRRRLRGDQVRVGRVRDRVRDAQPAHRGAEADVRVADERGDRAGQRDVGRDQRRAGGGHNGGELGVGGADQDGGGAWGVRARRVRPGDVAGHHEVGVLDDGELQVPPGRRLRPQRHPRRGQHQLPGRGGHGGVQGGRQAGGHPGRPLPRHLHRQRHRHALQVAQVPVDLHRHRGGVHRRHAGAVPAAAGGARWRLPVPHGHAAHRPARHAAVRLLRPGLHLADLAAACSAVAVAVTVVTTTTLASACGLLKQKQ

SEQ ID NO: 36760 - protein, 449 aa, Oryza sativa
MADESERSGMVIDDVGGGLNLPIIVAGKRKRELTWEEKALTVLDIVGSQQHPACQPAERDCSLIDSEKDYSSMAGCQAGEHASIFGIDKNGDDSDEPCAKDDAKQSDVAPLKEEENWELDSEPELTWDERVVEVLNIVRRREITEYNPKQFCSIPTRFCAYNIAFFDLDKESKLARGPPIKSLAFPDYWWEMDSVNVIAIKVAESDVGYPIRVFGTVLARDEYDFRCVYLFRRDRNNPQIITSPEDTLTLTGPNRALGAIDKMYFEFNLKIRDGDVDKDFCKGVREHNAICYTKQPMTLSLESCLSRIDFVYSPVQLAVEASVAVKIKGVVSKFFTGKVTAWTTGDDQNKIILYDSEVEGRNRVLGADGSVDLTRCFVAVNLDDELVLNVCVSEGAGSIFELVLGHNDEECVLEQGPYELQVNVVWTAALKHRQRRKLFERIGDFRVLR

SEQ ID NO: 36761 - protein, 602 aa, Oryza sativa
MMAAELIKQFSNITLGEEQELCDIEHALKALRKKILTLDFENSMRVHDPQNSFQYLEVLYKIRQLTERLGSLHPGGEAKEHNELIVYAGDLFDMAMARLEEEFVYLLTHYKQPIEQGLVSFRSTEDGSVDDFSSSSFNEEQCDGKTTQTETTGGSEYFATDLIQHGALSAVKSIANFMFLSEYDKECSQAYISTRQSAVDENLGSLRIDKLSMEELLSTNWTKLSSLIKRWNRAMKVFVQVYLTSEKRLSNHVFGELSESTADLCFYEISLSSVMQLLTFYESVAIGPPKPEKLFRLLDMYEVLNDLLPEVEFLFQEGCDDIVLTEYNEVLLQLGESVRKTITEFKYAVQSYTSSNAMARGEVHPLTKYVMNYIKALTAYSKTLDSLLKDTDRRCQHFSTDIQSMANQCPHFTVSALHLQSVTAILEENLEAGSRLYRDDRLRNIFMMNNIYYMVQKVKNSELKIFLGDDWIRVHNRKFQQQAMSYERASWSHVLSFLSDDGLCAAGDGASRKIIKEKFKNFNLSFEDAYRTQTGWSIPDDQLREDVRISISLKIIQAYRTFTGRYYSRLDGTRHLERYIKYKPEDLEKLLLDLFEGAQKTL

SEQ ID NO: 36762 - protein, 306 aa, Oryza sativa; identical to SEQ ID NO: 30402

SEQ ID NO: 36763 - protein, 522 aa, Oryza sativa
MANRRKFSQAGGGGGGGVFDPFGTKQAVSSLRKGGRLPVYVAGVFFVIFVIIMYGEDIRSLTLDPIARAGTTPARIVEPVVTEERHVARVNPPRREVSSAEKAAALPLDVDERPKLATPTPTEAAKEVPKVEKIRKPKKPKTTKKKPRKPRPAKKTVAAAAGGLLGVPETCDLSKGEWVFDNTSYPLYREEQCEFLTSQVTCMRNGRRDDTYQKWRWQPKDCSMPRFDAKLFMERLRGKRFMFVGDSLNRNQWESMVCLVQSVMSPGKKYVTWEDQRVVFHAVEYNATVEFYWAPFLVESNSDDPKIHSIQHRIIKADAIAAHAQNWRGVDYLVFNTYIWWMNTLNMKIMRPGGQSWEEHDEVVRIEAYRKVLTTWASWVNDNIDPARTSVFFMSISPLHISPEVWGNPGGIRCAKETMPLLNWHGPIWLGTDWDMFHAAANVSRTAATRVPITFVDVTTMSERRKDGHTSVHTIRQGKVLTPEQQADPGTYADCIHWCLPGVPDIWNLILYTRIMSRPQLV

SEQ ID NO: 36764 - protein, 67 aa, Oryza sativa
MFLQIYSDLCMHTIGLFCNFNILTDILTARTFPFFPANNQSAMGGRVINDVFSFLTSDRSTYICIQI

SEQ ID NO: 36765 - protein, 502 aa, Oryza sativa
MTWNKAPAADAEAGGGGDTGHARLRELGYKQELKRDLSVLSNFAFSFSIISVLTGITTLYNTGLSFGGPATMTFGWFVAGAFTMTVGLSMAEICSSFPTSGGLYYWSARLSGKRWAPFASWITGWFNIVGQWAVTTSVDFSLAQLIQVIILLSTGGNNGGGYMASKYVVIAFHAAILLSHAAINSLPITWLSFFGQFAAAWNMLGVFVLMIAVPTVATERASAKFVFTHFNTENNAGIHSNFYIFVLGLLMSQYTLTGYDASAHMTEETKNADRNGPIGIISAIGISIIVGWGYILGITFAVKDIPYLLNPENDAGGYAIAEVFYLAFKSRYGSGIGGIICLGIVAVAIYFCGMSSVTSNSRMAYAFSRDGAMPLSSVWHKVNKHEVPTNAVWLSALISLCMALPSLGSLVAFQAMVSIATIGLYVAYALPILFRVTLARKHFVPGPFNLGRCGAAVGWAAVLWVATITVLFSLPVSYPVIKDTLNYTPVAVGGLFLLVLSS

SEQ ID NO: 36766 - protein, 350 aa, Oryza sativa
MIGRGSYGTVYKAKFHHTVAAVKVLNSPEGCGTQQSQQELEVLGKIRHPHLLLMLGACPEHGCLVYEFMENGSLDDMLQRRNNTPPLTWFDRFRIAWEVATALMFLHSSKPEPIIHRDLKPANILLDRNLVSKIGDVGLSTLLPSMDQYLSTMIKNTAPVGTFCYIDPEYQRSGVVSMKSDVYALGIVILQLLTAKSPMGIAHVVETALEDGHFVDILDAAAGQWPLNEAQELAFLALKCAEMRRRDRPDLSDHVLPALERLKDVATKAREMAFNGHQTAPPSHFICPILQEVVADPYVASDGYTYDRKAIELWLSMNDKSPMTNLRLPHKSLIPNHSLRSAIIDWRTKS

SEQ ID NO: 36767 - protein, 98 aa, Oryza sativa
MSAKAVALPYTRIRFLAPSRVSTITRSRFLAGADTDFSLKARTQKWANTRPSGRTCRLRLRAPADTFRSTFTCEPKSSCRTPSFLISVLAFSIFRRGL

SEQ ID NO: 36768 - protein, 492 aa, Oryza sativa
MEFSLVVALIAVASSCVFVHFLARGATKKRRSPAAKKLPPGSLGLPVIGQSLGLLRAMRSNSGERWVRRRIDRYGAVSKQSLFGKPTVLVAGAAGNRFVFFSGALALQQPRSVQRILGDRSILDLVGADHRRVRGALSEFLRPEMLRMYVGKIDGEARRHVAGCWSGRAAVTVMPLMKRLTFDIIASLLFGLGPGAAARDALAGDFERVMGGMWAVPVDLPFTAFRRSLRAAARARRLLAGITRERKAALERGAATRSSDLIACLLSLTDDRGGAPLLSEEEIVDTAMVALVAGHDTSSILMTFMVRHLANDPDTLAAMVQEHEEIARSKRDGEALTWEDLTRMKLTWRVAQETLRMVPPIFGNFRRALEDIELDGYVIPKGWQVFWVASVTHMDAAIFHDPDKFLPSRFDSQSSSPSTAKAAPPCSYVAFGGGPRICPGIEFARIETLVMMHHLVRKFRWKLCCKEDTFARDPMPTPLHGLPIEIEPRISP

SEQ ID NO: 36769 - protein, 297 aa, Oryza sativa
MGAPKQKWTAEEESALKAGIAKHGAGKWRTILKDPDFSNVLRYRSNVDLKDKWRNMNVTVNASGARDRVKAPVVKKPRSAPKHEGHSTSTAIAAVTSDGDDDVAEPVPLATSTSSKRSLSRLDNIIVEAVRSLNEPTGSYKTAIANYIEEQYWPPADFDHVLSSKLNDLTASGKLIKVNRKYRIAPSSSLSEGRSSKVVLLEDIKKEPTKLDREDVAVLTKSQIDAELARMRTMTAEEAAAAAARAVAEAEAIMAEAEAAVREAEAAEADAVAAQAFAEAAMATFNNRSSAKLIIRA

SEQ ID NO: 36770 - protein, 612 aa, Oryza sativa
MAPPLYLLLLLPLLACADEVPDRYAVLRAPQGPGASAAAKEYLDPTFPLPAPPPAAPSCTVPVLSYSFGDTYGAAPAKASYAPPAGCPAPWSLVVLTFSASCAGDQYDRVAAVWLDGAELLRTTTAEPTPEGVRWTVRKDVTRYSALLRSPPGGVLSVMLENVVNDKYTGVYSVNVSLEFHGTPPYLSDAASSSPAGVASNDPKEPMLPESYFQPADLIVPISDVAGNGKGGFWFRIQNASDSHSRLVTIPSSTYRAVLEVFVSPHSNDEYWYSNPPDIYIRENNLTTRRGNAAYREVVVSVDHRFVGSFVPFPVIYTGGINPLFWQPVAALGAFDLPTYDVELTPFLGLLVDSNAHEIGLSVFDGIAEWLVDANLHLWLDPSTSDVHAALGAYQTPRLKISRHYSTRLLEGRFKIKAKRKSSFSGWVKSSFGNFTTEVEAELKATSLVEFTGDGRNKTVSLEAKQETKTLIRAGDTRKVIGRVEREAKYPLSLFAETEDGENGTSVVTVSLTHGLSVETEVETKALESKEKLDDAQAAQGWMVLLDHDVLNGSVTTTQAYRFSDDEREYERAIDVVDGAVLSDNVTESFSALAAAAADARRRRFHAGIAAL

SEQ ID NO: 36771 - protein, 151 aa, Oryza sativa
MQFNAPAAATAPPTKLLVGVRLNGDGVKVEELIRRRQRREQSIRRPLPLLHGSHGLSAPSCADPSSAAMGGVRSGDLFLSRSDPVVSQRPAHADPWPATTGGSRSGGVHCGRGFPATAASARAAHTPHPAVSFFPVLVCLSYVFNVFVLFL

SEQ ID NO: 36772 - protein, 487 aa, Oryza sativa
MMLKDLAEIQQQQLLAAAEENMSNLTSASGDQASVSSHPAPPPAKKKRSLPGNPDPEAEVIALSPRTLMATNRYVCEICGKGFQRDQNLQLHRRGHNLPWKLKQRNPKEVVRKKVYVCPEAGCVHHDPARALGDLTGIKKHFSRKHGEKKWKCDKCSKRYAVHSDWKAHSKVCGTREYRCDCGTLFSRRDSFITHRAFCDALAEESARAVTAAAAVAGQQQHGGGMLFSQVADVLDHQAAMAMGGHGLMQELCLKREQQQQQQQFAPSWLTAQQQQQQLEAMAGAGNPAAMYGSARLDQEFIGSSTPESGGAQQAGLSFGFSSTSSAPPHPAASSAHMSATALLQKAAQMGATLSRPSSHAHMAAAAAASTHNSSSSAATTNAPPPPPTSHVSSTCVGAGGYGLAFEASHFIAADESSRGARSDRDTGNGVAGAGNDGLTRDFLGLRAFSHGNIMSMAGFDPCMSTTSASSAAPYDHHHHSNKPWHS

SEQ ID NO: 36773 - protein, 580 aa, Oryza sativa
MGEVAEDIYTQDGTVDVKGNPATKKNTGNWRACPYILANECCERLAYYGMSTNLVNYMKTRLGQESAIAANNVTNWSGTCYITPLLGAFLADAYMGRFWTIASFMIIYILGLALLTMASSVKGLVPACDGGACHPTEAQTGVVFLALYLIALGTGGIKPCVSSFGADQFDENDEGEKRSKSSFFNWFYFSINIGALVASSVLVYVQTHVGWGWGFGIPAVVMAVAVASFFVGTPLYRHQRPGGSPLTRIAQVLVASARKWGVEVPADGSRLHETLDRESGIEGSRKLEHTGQFACLDRAAVETPEDRSAANASAWRLCTVTQVEELKSVVRLLPIWASGIVFATVYGQMSTMFVLQGNTLDASMGPHFSIPAASLSIFDTLSVIVWVPVYDRLIVPAVRAVTGRPRGFTQLQRMGIGLVISVFSMLAAGVLDVVRLRAIARHGLYGDKDVVPISIFWQVPQYFIIGAAEVFTFVGQLEFFYDQAPDAMRSMCSALSLTTVALGNYLSTLLVTIVTHVTTRNGAVGWIPDNLNRGHLDYFFWLLAVLSLINFGVYLVIVSWYTYKKTADSPDDKAEHAGAN

SEQ ID NO: 36774 - protein, 403 aa, Oryza sativa
MAAMPGGPDLAGAGGAVAVAVDAMQVDDPPRASAEEKHGPTIMGGNDPVTGHIISTTIGGKNDEPKRTISYMAERVVGTGSFGVVFQAKCLETGETVAIKKVLQDKRYKNRELQIMRSMDHCNVISLKHCFFSTTSRDELFLNLVMEFVPESLYRVLKHYKDMKQRMPLIYVKLYMYQIFRGLAYIHTVPGVCHRDIKPQNILVDPLTHQVKVCDFGSAKMLIKGEANISYICSRYYRAPELIFGATEYTTSFDIWSAGCVLAELLLGQPLFPGESAVDQLVEIIKVLGTPTREEIRCMNPNYTEFKFPQIKACPWHKIFHKRMPPEAIDLVSRLLQYSPNLRCTALEACAHSFFDELREPHAKLPNGRPFPPLFNFKQELANTHPELVSRLLPEHAQRHSGF

SEQ ID NO: 36775 - protein, 485 aa, Oryza sativa
MASSSSLLVRGRAFALVVAVALVAAPRRINGGAAGPAARTNDPNWHVFSVSSLLPSSACTASKAASNSSALGVVHRHGPCSPVQARPRGGGGAVTHAEILERDQARVDSIHRKVAGAGGAPSVVDPARASEQGVSLPAQRGISLGTGNYVVSVGLGTPAKQCAVIFDTGSDLSWVQCKPCADCYEQQDPLFDPSLSSTYAAVACGAPECQELDASGCSSDSRCRYEVQYGDQSQTDGNLVRDTLTLSASDTLPGFVFGCGDQNAGLFGQVDGLSGLGREKVSLPSQGAPSYGPGFTYCLPSSSSGRGYLSLGGAPPANAQFTALADGATPSFYYIDLVGIKVGGRAIRIPATAFAAAGGTVIDPGTVITRLPPRAYAPLRAAFARSMAQYKKAPALSILDTCYDFTGHRTAQIPTVELAFAGGATVSLDFTGVLYVSKVSQACLAFAPNADDSSIAILGNTQQKTFAVAYDVANQRIGFGAKGCS

SEQ ID NO: 36776 - protein, 432 aa, Oryza sativa
MNIMLTNVLDAAAGALFYYLFGFAFAFGTPSNGFIGKQFFGLKHMPQTGFDYDFFLFQWAFAIAAAGITSGSIAERTQFVAYLIYSAFLTGFVYPVVSHWIWSADGWASASRTSGPLLFGSGVIDFAGSGVVHMVGGVAGLWGALIEGPRIGRFDHAGRSVALKGHSASLVVLGTFLLWFGWYGFNPGSFTTILKTYGPAGGINGQWSGVGRTAVTTTLAGSVAALTTLFGKRLQTGHWNVVDVCNGLLGGFAAITAGCSVVDPWAAIICGFVSAWVLIGLNALAARLKFDDPLEAAQLHGGCGAWGILFTALFARQKYVEEIYGAGRPYGLFMGGGGKLLAAHVIQILVIFGWVSCTMGPLFYGLKKLGLLRISAEDETSGMDLTRHGGFAYVYHDEDEHDKSGVGGFMLRSAQTRVELAAAAASNSNNQV

SEQ ID NO: 36777 - protein, 479 aa, Oryza sativa
MARLVVVIVAVAMAAWWAVAAVEGLGINWGTQATHPLPPKAVVQLLKDNGIAKVKLFDTDFAAMSALAGSGVEVMVAIPNKDLATMASDYGNAKDWVKKNVKRFDFDGGVTIKYVAVGNEPFLKAYNGSFINITLPALQNVQNALNDAGIGDRIKATVPLNADVYESTVPSAGRFRPEIAGLMTDIVKFLAKNNAPFTVNIYPFLSLYLDEHFPINFAFFDGGSTPVNDGGIMYTNVFDANFDTLVAALKAVGHGDMPIIVGEVGWPTDGDKNARVDLAQRFYAGLLKRLAANVGTPARPNQYIEMYLFGLVDEDMKSVAPGSFERHWGVLRYDGQPKFAMDLAGQGRNTMLVPAKGIEYLPKTWCVINTNAKDVSKLGDNINFACTYADCTPLGFGSSCNGMDTNGNASYAFNAYFQAQSQKEEACNFQGLAVPTETDPTTAQCNFTIQIKSSAAAAAAAPVAAGVVVAALAQLLLLW

SEQ ID NO: 36778 - protein, 766 aa, Oryza sativa
MSMNNLAGVIPAAIGNLRQLWKIELYGNNLTGELPPELGRLTGLREIDVSRNQLSGGIPPELAALEGFEVIQLYRNNLSGQIPAAWGELRSLKSFSAYENRFSGEFPANFGRFSPLNSVDISENAFSGPFPRHLCDGKNLQYLLALQNGFSGELPDEYSSCDSLQRFRINKNKLTGSLPAGLWGLPAVTIIDVSDNGFTGSISPAIGDAQSLNQLWLQNNHLDGEIPPEIGRLGQLQKLYLSNNSFSGEIPPEIGSLSQLTALHLEENALTGRLPGEIGGCARLVEIDVSRNALTGPIPATLSALSSLNSLNLSHNAITGAIPAQLVVLKLSSVDFSSNRLTGNVPPALLVIDGDVAFAGNPGLCVGGRSELGVCKVEDGRRDGLARRSLVLVPVLVSATLLLVVGILFVSYRSFKLEELKKRDMEQGGGCGAEWKLESFHPPELDADEICAVGEENLIGSGGTGRVYRLALKGGGGTVVAVKRLWKGDAARVMAAEMAILGKIRHRNILKLHACLSRGELNFIVYEYMPRSNLYQALRREAKGGGCGAAAAELDWARRCKIALGAAKGLMYLHHDCTPAIIHRDIKSTNILLDDDYEAKIADFGIAKIAAEDSAEFSCFAGTHGYLAPELAYSMKVTEKTDVYSFGVVLLELVTGRSPIDPAFGEGKDIVFWLSTKLAAESIDDVLDPRVAAPSPSSSSAAAAARDREDMIKVLKVAVLCTAKLPAGRPTMRDVVKMLTDAGAGPCSPRGQPPAARACARSKSCC

SEQ ID NO: 36779 - protein, 570 aa, Oryza sativa
MTTTTTTTNHSAKSILLLALLLVPHLAAASSGDALISQRRRLLDYHGGGGGHGGGDVYVDPSYTFPNARLRDAYVAMQAWKRAVLSDPHNVTGTWIGPDVCAYEGVFCAAARDDPHLVVVASVDLNHADMAGHLPDELGLLADLAVLHANSNRFCGAVPSTLERLHLLHELDLSNNRLVGAFPDVVLRLPSLRYLDLRFNDFEGPVPAELFDRPLDAIFLNSNRLRFRIPDNVGNSPASVLVLANNDFGGCLPASVANMSGTLDEIILMNTGLKSCIPPELGMLTGLAVLDVSHNSLMGAIPGELARLENIEQLDLGHNRLTGDVPEGICHLPHLQNFTYSYNFITGEPPVCMHVKAFDDRRNCIPGRPDQRPAEQCQFQNTHHVNCDAFRCKKFVLPSPPPPPPSPPPPSPPPPSPSPPPPSPPPPSPPPPSPSPPPPSPPPPSPPPPSPSPPPPSPPPPSPPPPSPVYYSSPPPPYYEVSPEDRYLSPPPPPAYHEAPPPPYYEVSPEDRYLSPPPPPAYQETPPPPPQYEVSPEDRYLSPPPPSPVKWKLPVYEYSSPPPPAATWKP

SEQ ID NO: 36780 - protein, 369 aa, Oryza sativa
MSDGKDSLDLSGLGAAVPNAKELSAEDKANLVESIKNTLQGLAARHTDVLESLEPKVRKRVEVLREIQSQHDDLEAKFFEERAALEAKYQKMYEPLYSKRYEIVNGVVEVDGVTKEAADETPAEQKEEKGVPEFWLNAMKNHEILSEEIQERDEEALKYLKDIKWYRISEPKGFKLEFYFDTNPFFKNSVLTKTYHMIDEDEPILEKAIGTEIEWFPGKCLTQKVLKKKPKKGSKNTNLSQKLKTVRASLTSSAHLKFLMMMRKLMRIQLNSCRTKWSKIMTLDLPSETRSFHMLFHGLLESLLKMRTSKALWMMKMMTMKMTTMMKMRMTRVMMKTTRMKRRADEFLQGKGSRESDLQNASNSKMLPT

SEQ ID NO: 36781 - protein, 764 aa, Oryza sativa
MDAIYYAGTGNLLCKAEDRVTIFDLQQRLILGELQAPAVKYVVWSSDMESIALLSKHAVVIANKKLVHRCTLHETIRVKSGAWDENGVFIYTTLNHIKYCLPNGDSGIIKTLDVPIYITRAIGNNIFCLDRDGENKLITVDASEYIFKLALLRKRYDHVMSMIKNSQLCGQAVISYLQQKGFPEVALHFVKDEKTRFNLALESGNIQIAVASAKEIDDKDHWYRLGIEALRQGNVGIVEYAYQRTKNFERLAFLYLITGYMDKVGFMCKIAGQNNNLMGQFHNALYLGDAMKRVEILENAGQLPLAYITAATHGLTEIADRLAAELGENIPSLPEGKTRSLLIPPAPLTASGDWPLLRVMRGIFEGGLDATGKAELEEDDEAAGADWGDEDLDMVDASEAMANGGDGFDAEEGEANEEDGEEGGWDLEDLELPPEAETPKNAGNALSVVFVAPPPGMPVSQIWTQKSSLAGEHAAAGNFDTAMRLLSRQLGIKNFAPLKPLFLDLHMGSHSYLRALATAPIIPVAVEKGWSESASPNVRGPPALVFTFSQMEDRLKAAYKATTEGKFPEALRQFLNILHTIPLIVVDSRREVDEVKELIEIVREYVLGLRMELKRKELRDDVNRQQELAAYFTNCKLQRVHMRLVLGSAMGLCYKQKNFATAEHFARMLLENNPNESQAKRARQVQQQCSGKKDSCELNYDYRNPFVVCGATYVPIYRGQKDVSCPYCGSRFVPSIEGQLCTICELAVVGADASGLLCSPTQLR

SEQ ID NO: 36782 - protein, 401 aa, Oryza sativa
MTDNGIDIKDYNMVQSDASLLASGQLKGSAVNGSSYGENDMNENSKVWIDSNSCCLALYSKLDQDQVLMLQSPIALPKAVKNPVELDGLRKAHIRDGAAVVQYLAWLDNQMQENYGASGYFSEAKGSQKKQHMEVKLTEVSVSDKLEGFRASKEHFKGLSFPTISSVGPNAAVIHYSPEASSCAELDADKIYLCDSGAQYLDGTTDITRTVHFGKPSEHEKSCYTAVLKGHIALDSAVFPNGTTGHALDILARTPLWRSGLDYRHGTGHGIGSYLNVHEGPHLISFRPSARNIPLQASMTVTDEPGYYEDGSFGIRLENVLIVKEANTKYNFGDKGYLAFEHITWAPYQTKLIDTTLLTPAEIEWVNAYHADCRKILQPYLNEQEKEWLRKATEPIAVSCC

SEQ ID NO: 36783 - protein, 148 aa, Oryza sativa
MGGPSLCYACACRMLPLCCPRLDLLVVNQLLDLVLDLLLGDNPSLIRLELHSSPPHIAYVALVAVLVGEVRPAQKRHTMPEPFHRRVPPAVRHEACDRRVREHALLGSPTDDHSLAADTVPELLQPAFAGTIGEVLPDHPQEWPARKH

SEQ ID NO: 36784 - protein, 391 aa, Oryza sativa
MKQEDDSDEEDNRKRRRRSSGTLEERKRRRLREKEEDLADKLREEEEIAEARRRAVELQQQADEAAAAAAAAAVVAESATVMEVDGDDGKERDAQDKPAVVDVGNNDAFANGVDSGVNNGKDNIGDGKNMTPGEISDTKHNTSAPAKKLGFGLIGSGKRTSVPSVFAEEDDEDNDDKRARPLVPIDYSTEELQAVQANSSTGQPNIVAAAEFAKRILVTKDDKSDVEKDRSWRSSDRTNQRDRDRNDQDVGRTSDERREKTHDREKDKQDKPKSENKNILDAKQLIDMIPRTKEELFAYDINWAIYDKHELHERMRPWIAKKIIEFLGEEESTLVDYIVSCTKDHVQASKMLELLQSILDVEAEMFVLKMWRMLIFEIKKVETGLSGRAKA

SEQ ID NO: 36785 - protein, 244 aa, Oryza sativa
MVHDVTIRTSLDAPLTDGIVPDSCSNMCIEDSSISVAHDAISLKSGWDNYGITIGRPASDIHISRVDLQASLGAALAFGSEMSGGISDIHVDHLNIHGSSRGILFKTAPGRGGYIRDVVISDVQMEDVNVAIKFTGDWSTHPDNHFDPSALPMINRITLKNMVGTNISVAGVLSGINGDPFTNICLSNISFSLADSTQSSSWSCSNISGYSELVFPEPCPDLHHSSSNSSICFSLLTYHALAAA

SEQ ID NO: 36786 - protein, 561 aa, Oryza sativa
MEAARESMAALVDAGLYDCAQTLGCFLVSSSPASSEAGMSMKVESLALHGDALHGEKEFRRALSAYKQAMQYSKNIPRQATSNTRSSVTATGRSPSPNSSSPAPLNENEVRFKIALCYSALREHREALQEMEGIPSKARTLKMNLMLGKLYRISRNNRAAAVCYKECLRQCPYVFEAITALAEMGLSSKEFSLIFSQAPNRGGKAPGDSLDAQRWWNRYVEAQCCIASHDYKGGLDIYLDLMQRFPNNVHILLEIAKVEAIIGRNDEAIMNFEKARLIDPNIMTYMDEYAILLKSKSDYTKLNKLVHDMLHIDPARPETCLALAALWERKDERKALTYAEKSLRVDDRHITGYIMKGNLHLLLNRPDLAVTDFRGAQELRADLRSYQGLVRAYLALSKCKDALFTAREAMKVMHQSAKALKLVGDVHAISSSGREKARKFYESAIRLEPGFLGAALALADLHVAEGRNKDAVLLLERYLRQWTDDSLHIKLAQVFAATNMLSDALSHYQSALRINPHNEAAKKGLERLEKQMKGVDPDAPEEDEENEADDVDGDQDDAELL

SEQ ID NO: 36787 - protein, 523 aa, Oryza sativa
MDTWHVAVAAILVLIPFLRLILSRRGGRGGGKRGRLPPGPPAVPLLGSTVWLTNSLADAEPLLRRLIARHGPVVSLRVASRLLVFVADRRLAHAALVEKGASLADRPAMASTRLLGESDNLISRASYGPVWRLLRRNLVAETLHPSRVRLFAPARAWVRRVLVEKLRDENGDAAAPHAVVETFQYAMFCLLVLMCFGERLDEDAVRAIAVAQRDALLYLSSKMPVFAFFPAVTKHLFRGRLQKAHALRRRQTELFVPLINARREYKKRQGGANGEPKKETTFEHSYVDTLLDIKLPDDGNRPLTDDEMVNLCSEFLNAGTDTTSTALQWIMAELVKNPSIQSKLHDEIMAKTGGGGGGGQREVSEEDIHDMPYLKAVVLEGLRKHPPGHMVLPHRAAEDMEIGGYLIPKGTTVNFMVAEMGRDEKEWEKPMEFMPERFLAGGDGEGVDVTGSREIRMMPFGVGRRICAGLGVAMLHVEYFVANMVSEFEWKEVAGDEVDFAEKIEFTTVMAKPLRARLVPRRA

SEQ ID NO: 36788 - protein, 936 aa, Oryza sativa
MGSNTPPSRAALEPFATLDPAALAGLPASSPLTVRSAAISSPYLYLGTGGGKLLLFTLDSPSPDFLRLLPIGPTRPVSAILPLPAVARLLLLADGLLLLADPLLSRPVRRLGSVRNVAAVAARASESDDDRPSCSLAVSVGRKLLLVDLTLHDADELEVRTRDIALVDGVKALAWVGDSVFVGTASGYSLFSTTNAQGGDIFTLPESSRPPRVKPLSGGDEVMLLVDNVGVVVDRSGHPVGSSFVFNTTPDCIAEVYPYVVVAGDSKVDVYRRKNGAHLQAIPFARPGTGGLIVASEDAGIGSDVVVIATAYKVFCYRKVSAVEQIKALLRRKSYAEAISLLQEFEADGEISNDMISFVHAQLGFLLFFDLRFEDAVNHFLLSETMQPAEIFPFIMRDPNRWSDLVPRKRYWGLHAPPKPLEEVIDDGLVTLQQALFLKKAGVDTVVDDDFLSNPPSRADLLEVAIRNIIRYLCASREKDLSSSEMEGVDTLLMYPYRALNLVDDMEKLASSQNSCVVEELESLLDDSGHLRTLAFLYGSKGMCSKSLGIWRILARNYSTGLWKDHAILPETDSLETSVGKMSGEEIAAVEASKILQASSDQDFVLEHLGWVADIDQELATAILTSEMREKQLSPEKVVAAIDPEKVGIHQRYLQWLIEEQECDEPHYHTSYALSLSRSAMDAVRLGSNNEERNNKEFDSDMQFIYLLRERLQFFLQSSDLYDPEEVLYVISESELWLEKAILYRKMGQENIVLQILALKLEDSEAAEQYCAEIGRDDAYIQLLDLYLDPKNGKGPMFTAAVRLLHNHGESLDPIQVLERLSADMPLQLASDTILRMLRARVHHHRQGQVVHNLSRATNLDARLTRLEERSRHVQLTDESICDSCRARLGTKLFVMYPDDSVVCYRCYRNQGDSASPHGRNFRKGGIFKQSWLVSR

SEQ ID NO: 36789 - protein, 117 aa, Oryza sativa
MVGGLVLSQAQHQVGIAATSPAQAQAAEQAAFRGRDHRAPCANLDEARKAHARHVKLGLLSTPEGAPVRVVTNLRMSKECHAYSALISEIFGREIVVRDRNRFHRFKRGACSCRNYW

SEQ ID NO: 36790 - protein, 354 aa, Oryza sativa
MSTQSKDKSSAANNSSSSSPSSSEVGGAPAVRRMKVKDVSEYMISAAKENPQIAERIHAVLLENGVVPPPDLFSEESREQPKDLIVYDTSLFQTKDEMIKRMNELESTTNADFCHGPSVPHPPGHELQTKAVPYRIPLDLKPIQGLGTYHPSDSRNSTGSSHMYEPSAPPQEDPLQLIKQMPVAAAAVATAAVVASSMVVAAAKSNSDIKLDVPVAAAATAAAVVATTAAVNKQYEYLEPGCQLLSLPSSSGANELIPKGRHDFWDNQLEIDHGQTSVPEKEKDLVEVPQEAERVSDKSVGTESSRSDIALDGVAEFEIQWEEITLGERVGLGSFGEVYKGEWHGTEVAVKKFL

SEQ ID NO: 36791 - protein, 540 aa, Oryza sativa
MSPPPLRLLLFLLLLHLPSSLSSRHHHHAPSPSKPAPASYAAPLAVLLACNATRFQPACVSTLSNASADASTPDLLAATLSALRARIPPAVSTARSVLAASSNVNLTNAATNCLTFLSFSTHRLSPPPSTSSPSLLSASTALLHLYDCWSAYKYVNFSRTISDAMAYLDDTIAVNSNYISMLAALQRYGDDTFRWAPPQTERDGYWPPAAAGSAADEDALGVPKGLPPNVTVCGAGCHYKTVGEAVAAAPDYGDEMFVVHVKEGVYKETVSVPLEKTNVVVVGDGMGKTVITGDLNADTPGVSTFNTATVGVLANDFMARDLTISNTAGPDAHQAVAFRSTGDRTVLDTVELLGHQDTLYAHAMRQFYTRCRVSGTVDFVFGNSATVLRDTALIVLPRQLRPEKGENDAVTAQGRTDPAQPTGIVLRGCVVNGSDDYMALYREKPDVHHVYLGRPWKEYSRTVYVGCTLSEIVQPRGWMAWNGDFALKTLYYGEYESAGPGGDGASGSRIGWSSQVPRDHVDVYSVASFIQGDKWIPKIH

SEQ ID NO: 36792 - protein, 391 aa, Oryza sativa
MPPWQKRRAKELKERADPFASWAAGQKDSGGAPQLKGARFFSFDELKICTNNFSDNHEIGSGGYGKVYRGILGDGTRVAIKRADRNSMQGAVEFKNEIELLSRVHHRNLVSLIGFCYEQGEQMLVYEYISNGTLRENLTGSGMYLDWKKRLRIALGSARGLAYLHELADPPIIHRDIKSTNILLDNNLKAKVADFGLSKLVADTEKGHVSTQVKGTLGYLDPEYYMTQQLSEKSDVYSFGVVMLELVSGRQPIEKGRYVVREVRLAIDPADHDHHYGLRGIVDPAIRDAARTPVFRRFVQLAMRCVDESAAARPAMGAVVKEIEAMLQNEPDDAGAGEGDSSADPSANEFDRHRGGGGPPAHPYSDVEISRGSYAGDGASDYMPYFEVKPK

SEQ ID NO: 36793 - protein, 543 aa, Oryza sativa
MLNPIEKKLKMRARRVLAKLAEKKKSAAEYARAERSLDGIDMTCKIVDFGNACWADKQFTDFIQTRQYRAPEVILGSGYSFPVDMWSFACIAFELATGEMLFTPKEGQGYSEDEDHLALMMEILGKIPKKIATMGTRSKEYFDRHGDLKRIRRLKFSSIERVLVDKYKISESDAREFAEFLCPLFDFAPEKRPTAAQCLQHKWLQYSDGKNYGTLNISDVKNASVTCSPGTTASSDSKSIDVTRNIGDKPDSYAERADAKCNTSKKSIINSNSENSNVQPNTASVGNRNSKIDDVNSNTGSITNKDSKNTVIKPSIGSFVNRNAETVDVKPNIGSITSRGDSSSDTKSNIGSVASKDAKTIDAKPSTSSITSQDSKIGDGRSNIDGIANRDAKTADVKHNIRSVVNTYLRNFDVKHNTGNIVDGGVKHSDLKPGTVSAANVDSKSISAKPSTGSFENSDAKSISAKTSTGSFDNSDARNIMKANTGIVANNDIKDTDVQTNTESVTSGDDLNDIDRKPNIGRVAASIQRLESSIGKVQSGKYR

SEQ ID NO: 36794 - protein, 385 aa, Oryza sativa
MLMLLFWKKQAIVKSRGQEQYGDHIHIPENREFTYEELVKITNNFSVFIGEGGFGPVFHGQLKDDTQLAVKMRSPTSMSGKGMPEFLAEVESLTTVHHRYLVLLVGYCTDQDHLGLVYEYMPNGSLYDHLRGKNAIIQRLSWQHRAKIAHEAAQGLDYLHTGCVLPIVHRDVKSHNILLGCDLTAKISDFGLSKSYLNVAQSHITATAAGTLGYIDPEYCLSGRLTISSDVFSFGVVLLEIVTGEPPIIPTNGHIVQRIKEKVNMGNIEAIADPRLHGEFDISSIWKVVDIALLCTKEASSERPTMSMVVAQLKDALALEEARLSYSTSDISQGGANAELSINSMPTASLSNLEEYAKKSLLPAVALFALCLHGVSDKSGDIAST

SEQ ID NO: 36795 - protein, 983 aa, Oryza sativa
MLVPNPDQITLERLFRVDDIRVGATSRKSIPLLVDLLKPIPERPGAPFLALGLLTQLAIDCPPNMMLMAEAGILEALTKYLSLSPQDATEEATTDLLGILFSCAEIRHNEAALGTVNQLVAVLRLGGRNSRYSAAKALESLFIADHVRNSESARQAIQPLVEILNTGMEREQHAATSALVRLLSDNPSRALTVADVEMNAVDVLCRILSSDSSAELKGDAAELCCVLFANTRIRSTSAAARCVEPLVALLVCEANPAQLSVVRALDRLLDDEQLAELVAAHGAVIPLVGLLFGKNYTLHEAVARALVKLGKDRPGCKLEMVKAGVIESILDILHDAPDFLCIALAEMLRILTNNASIAKGPSAAKVVQPLFSLLSKADIGPEGQYSTLQVLVNILEHPECRADYNLTPRQTIEPVISLLDSSPPAVQQLAAELLSHLILEENLQKDTITELAIPPLIQVLSSGLPNLQQRAIKALANLALAWPNTIAKEGGVFELSKVLLQSDPPLPHVVWESAASVLSSILQYSTEFFLEVPVAVLVQLLRSGTESTVVGALNALLVLESDDSTSAEAMAESGAVEALLDLLRSHQCEEAAARLIEALLNNVRIREAKAAKNAIAPLSMYLLDPQTQSQQGRLLAALALGDLFQNEGLARSTDAVAACRALVNLLEDQPTEEMKVVAICALQNLVMYSRANKRAVAESGGVQVLLDLISSSNPDTSVQAAMFVKLLFNNHTIQEYATSETVRVITASIEKDIWASGSANEEYLKALNALLSNFPRLRVTEPATLCIPHLVTSLKTGSEATQEAALDSLYLLRQAWGACAAEIFKAQSVAASEAIPLLQYLIQSGPPRFQEKAELLLQCLPGTLTVTIKRGNNLRQSVGNPSAFCKLTLGNNPPRLTKIVSTGATPEWDEAFAWAFDSPPKGQKLHISCKNNSKFGKKSFGKVTIQIDRVVMLGSVAGEYTLLPESKSGPNRNLEIEFQWSNK

SEQ ID NO: 36796 - protein, 537 aa, Oryza sativa
MALATNSAAVSGGAAAAASSAPQPRLAATFLPMRRRTVSAVHAADPAKSNGPVQAAAKASSPSTVAAPEKKPVGLGKWTVDSWKAKKALQLPEYPSQEELDSVLKTIETFPPVVFAGEARHLEERLADAAMGRAFVLQGGDCAESFKEFNANNIRDTFRILLQMGAVLMFGGQMPVVKVGRMAGQFAKPRSDSFEERDGVKLPSYRGDNINGDTFDEKSRVPDPQRMIRAYAQSVATLNLLRAFATGGYAAMQRVTQWNLDFMDHSEQGDRYRELAHRVDEALGFMTAAGLTVDHPIMTTTDFWTSHECLLLPYEQSLTREDSTSGLFYDCSAHMLWVGERTRQLDGAHVEFLRGVANPLGIKVSDKMNPRDLVKLIEILNPSNKPGRITIITRMGAENMRVKLPHLIRAVRNSGQIVTWITDPMHGNTIKAPCGLKTRPFDSILAEVRAFFDVHDQEGSHPGGIHLEMTGQNVTECIGGSRTVTFDDLSDRYHTHCDPRLNASQSLELAFIIAERLRRRRMRSGVNSNLPLPPLAF

SEQ ID NO: 36797 - protein, 568 aa, Oryza sativa
MSTPAGVAPRRSSRLASSAPPLGAGQPSSSPLPRRRRRRASPSGCAREVDNSPPPVVILDDNEMEQHVEAEEMKKQGEESVEANEAEEKDKDAEVLEELPDWLPDGWIMEVRCGDNGNIYRYYTSPVSGYTFSTKMETLHYLFSEMDERVLESQACADDNELHRMHTWLPDGWAIEVRAGGKKMEKMYKFYVHLPTGMRFLSKENVLLYSNEGKISRCDVKGLCDTSSEDNILAMVEFNPDGLPEGWVKEIIFRKCNDGIRKDPYYTDPVSRHVFRTLKSVINYLETGQITKHAYIPRRSVTDMYSFDRCTDLPQSMLKRLKIQGKAKKKSVGASVKGKKLSNGLASNNCMSSGLDPEIGPEERKLGTVKSITKEAVNSDTIKRSRGRPPKILMPTIESTKPEIALVTSEAIKRSRAEGVNSCLIHLSEPNEKMVKATSAVEPASSNNAKRHGGSPQKKFKHITDITLDCAKSSNKESEHIVTAKKLGIGGGEQVANENTLEHTNMKEHLGVIQDYTSNRKKDKLNLITDPDLHEHKNGKFTEKLACTAVHKFYMRRSSNHTVALKKG

SEQ ID NO: 36798 - protein, 494 aa, Oryza sativa
MAAAGHDVQLPHVAIFPFMARGHTVPMTHLACLLRRRGLATVTFFSTPGNAPFVRGQLDDDVAVVELPFPDHVVARGAAECVEALDSLFPLPAFVEAVSALRPGLEVSLAAARPRVGLLVADAFLHWAHASAAALGVPTVAFLGGNMFATIMRDVILRDNPAAALLSGGGGAEAATFAVPEFPHVHLTLADIPVPFNRPSPEGPIMELNAKLWKAIAGSNGLIVNTFDAMEGRYVEHWNRDHRAGPRAWPIGPLCLAHGGTGTGTGAVEPSWMKWLDEKAAAGRAVLYVALGTAMAIPDAQLREVAGGLEAAAAAGVYFLWAVRPSDADLGAGFEERVEGRGMVVREWVDQWRILQHGCVRGFLSHCGWNSAVEGVAAGVPLAAWPMGAEQPLNAMLVVDELRVGVRVPVPTAMATGGHGVVGSEVIARVARELMMMAGEGKGGGGGEEARNVAALASKAREAVAEGGSSWKALEEMVATLCRPVEGDTPKPTK

SEQ ID NO: 36799 - protein, 348 aa, Oryza sativa
MAMAMHRFSLCCVVLLVLAPLAAVAWRPWPPRNGSGEVEGIGASKKFEGSSDFVKLQYHMGPVLAADITVHPIWYGRWPAEQKRTIRAFLRSLSPPGSGSGDGGIPSPSVAAWWRTVRLYTDQTSANVSGVVRLGREKCDARASRGGRLTRLDIQSVVRDAVTARTRPLPVDSSGVYLVLTSPEVVVENFCGQVCGFHYFTFPSVVGYTLPYAWVGNSAARCPEVCAYPFAIPSYVGGGRRAEAPPNGDVGVDGMVSVIAHELAELASNPLANAWYAGEDPSFPTEIADLCEGIYGTGGGGAYTGQLLTDGRSGASYNVNGVGGRKFLVQWVWNPILSYCSGPNALDQ

SEQ ID NO: 36800 - protein, 343 aa, Oryza sativa
MFVARLSGYHPHSGSMIPPRGRGVESSNFNDGSRYGYELASKGGERLQYVSPPNGRGRPHRRDGGAPGKDFIFINGEYVHRNDPNLSPREGDWICQNPTCGNLNFARRSHCNNCNKERYAPAMYKSSYSPDRRQFNSPPQGPPSRVIGPPSGRDLPREKQRYRSPPRGWGMVRPDDHRDYSTQLSQDRPGRMADPMHRDRINFGDELPHRQRGKFDWDGYNHREHPRDGPYLDRREPRLGSPRGNWGQAVRDRSHSPMRNKPMNRGLDLRERSRSPFRDRPLNKASIGRGGPDRDYVHPFDTHGRPHNLGNSRGHGYRQEDDLFPIRNQGDQRVLSRHRNGIH

SEQ ID NO: 36801 - protein, 475 aa, Oryza sativa
MAFPDWVMLDPYVFRDGPFPDDDPTAAIGHNSRGDKVGVRFPLRAPPEPSSIFLDWEAGTGDCDDFSVVAAHRDAVLFQMGYLVSLGPSNAYKAFDYLLYRAAGAGGSSPSLDLLAPFGGSVDELKARMEADGLIRLTNQHLRRLKCLDIGVLCRDGEEFAVAELQITRSEVGPELHVLRSSTSSRKWELKRPPITPANGGSLDLEKFLWDWDADTVIPFGSYLCWVDYCLGILFCDMFDENPQLHYLEFPADVRGACFGGCCQAVGVTNGVMKLVSLVPDDGLIAENYTPESGFTIVCWTLRMDEMDKMVWEKDAVLKSDYLWSMLKPGFLWPLDEFPFITTNRFPRVQFPLISIDDSSVIYLVLAQNGMVEEAGYNYDETWLLAIDMSKMTLKMSFPYINDEMGDPSPEMLAFAEDKFWRFEPFLAADFSRHFNLRCPRLSKQICMESALLPQKRKFGCAEYLPLDGPSLAIF

SEQ ID NO: 36802 - protein, 518 aa, Oryza sativa
METPTLTTLLKAAVATFPSRRALAVPGKVDLSHAALDALVDAAAARLAADAGVLPGHVVALAFPNTVELVIMFLAVIRARAVAAPLNPAYTQEEFEFYLSDSGARLLITNPEGNVAAQAAASKLGLAHTTASLKDAAGQVHLAGFPASAAAAAKDFANDPSDVALFLHTSGTTSRPKGVPLTQRNLAASVQNIRAVYRLTEADATVIVLPLFHVHGLLCGLLASLASGASVTLPAAGRFSASTFWADMRGAGATWYTAVPTIHQIIIDRHTSKPEAEYPALRFIRSCSASLAPAIMEKLEAAFGAPVVEAYAMTEASHLMTSNPLPEDGARKAGSVGRAVGQEMAILDEEGRRVEAGKSGEVCVRGANVTSGYKGNPEANEAAFRFGWFHTGDIGVVDEEGYLRLVGRIKELINRGGEKISPIEVDSVLLGHPAIAQAVAFGVPDAKYGEEINCAVIPREGVSLGEEEVLAYCRRNLAAFKVPKKVYIADELPKTATGKIQRRIVAQHFVVPVLPTKA

SEQ ID NO: 36803 - protein, 487 aa, Oryza sativa
MVPSFPQPASAAAATRPIPGSYGPPLLGPLRDRLDYFWFQGPDDFFRRRAADHKSTVFRANIPPTFPFFLGVDPRVVAVVDAAAFTALFDPALVDKRDVLIGPYVPSLAFTRGTRVGVYLDTQDPDHARTKAFSIDLLRRAARNWAAELRAAVDDMLAAVEEDLNRAPDPAAASASYLIPLQKCIFRFLCKALVGADPAADGLVDRFGVYILDVWLALQLVPTQKVGVIPQPLEELLLHSFPLPSFVVKPGYDLLYRFVEKHGAAAVSIAEKEHGISKEEAINNILFVLGFNAFGGFSVFLPFLVMEVGKPGRDDLRRRLREEVRRVLGGGDGGEAGFAAVREMALVRSTVYEVLRMQPPVPLQFGRARRDFVLRSHGGAAYEVGKGELLCGYQPLAMRDPAVFDRPEEFMPERYLGDDGEALLQYVYWSNGPETGEPSPGNKQCAAKEVVVATACMLVAELFRRYDDFECDGTSFTKLDKRELTPS

SEQ ID NO: 36804 - protein, 327 aa, Oryza sativa
MKMLPKNASDPEQIVQAIYDVEEATAQALQIILERKTIKPKNRDSLIRFLQILVARHPSKRCRRGSAELLINFDDHWSSNLSLSSQEGSKLLESVAEENHWICGKEVPRGYWLFCRGSKSETRGFSCGLWVLMHSLTVRIGDGESQSTFTSICDFIHNFFICEECRKHFYEMCSSVSAPFRTARELSLWLWSTHNKVNMRLMKEEKDMGTGDPLFPKVTWPPNQLCPSCYRSSKVTDGAVDWNEDAVYQFLVNYYGKKLVSSYKETYMESLQQQEKKIVSEDSSISNAASVPIGAALGVAIASCTFGALACFWRAQQKNRKQRKNWN

SEQ ID NO: 36805 - protein, 613 aa, Oryza sativa
MDSSARSGGGGTGGYTSTRVWMVAGVAIAGAIVFVEAARRRRRWLRDRSEVPPDFGAFCYRFEIAPAPQPPPPAARQLLSGLTFAASDNFEIEGYVAGFGNPDWKRTHKAATRTAVPVTMLQKQGGTYVGSTVMDELGFGVSGGNLHNGTPINPASPSLFPGGSCSGSAVAASAQLVDFALGTDTTGDVRIPACFCGVLCFKSSHGVVSTLGTIANSQSLDTIGWFARDPSVLHRVGDVLLPAATGGLTQTRQLFFADDCFQLLKVPNEKTVNVIENAIQTLPGYQPPKHINIGEYISSHVPSLKDFCEPTVEMLEGMSALKALSTVMLLLQRYEFKTNHEDWVNTVKPKLGLDTSTRVLQAVNSKSDNIKSLYIVRNELRAALKNLLKDTGILVLPTTAGYPLKRNARQRLSPGFEDRMSAFVGIATLSGCCQAVIPLGSHNDHPISLSLLAAHGSDKFLLRNVLYMFSSIKEQVVLASKLVTAPVINRDADFGAAELLKEKGNSAFKGRKWSKAVEFYSDAIKLNGTNATYYSNRAAAYLELGRYKQAEADCEQALLLDKKNVKAYLRRGIAREAVLNHQEALQDIRHALALEPQNKAGLLAERRLQKKLR

SEQ ID NO: 36806 - protein, 222 aa, Oryza sativa
MASTVTTPSRPVSAGCHRRSPRRSAPVVLSLGGGPRRRTPSSTSCSALASPAKQGTAKLPPPQPTASRTAAADAERERERTDYNEVAAALESIYKLSPAVVEEKDADEEDEKSKQTKRKRKGRVGRSRNATVTVRSSRRRRRGQRMDLGKRVEMRRREEEEGGAASASPPTPSSGSATPSSAPSPSPTSPASPSPWNPRGRRSTGLGRSWRSSWGGRRRRRR

SEQ ID NO: 36807 - protein, 61 aa, Oryza sativa
MVKRWSKSQRRHTLRYGGSIYYRVMPASAYICVELRPDSQRLCFCRHSNTSSVHHLHGLGR

SEQ ID NO: 36808 - protein, 451 aa, Oryza sativa
MVRGAAPPPASTAPPAANNVTPAINATTASNSPAVGFGGLLHGLGGSGSANSGGLGSFGSGLPELSQMQQQLSENPTLMREIMNMPLMQNILNSPDLIRNIIMNNPQMREIVDRNPDLAHVLNDPSILRQTVEAARNPELMREMMRNTDRAMSNIESSPEGFNMLRRMYETVQEPFLNATTMAGEGDRSSNPFSALLGNHGSNQARDPAANSPTTTSESTTGSPAPNTNPLPNPWSTTAGAAQGATRPSPVTNARSATAGGLGGLSSTDLEGMLGGGSDTSFLSQVLQNPTMMQMMQNIMSNPQSMNQLLNINPNVRNMMESNTQLREMFQNPEFVRQLTSPETLQQLISFQQSLMSQLGQQQAGPERTQSGAGAGNTNLNNLMSMFSGLGAGGGLGVPSAPNVPPEELYATQLAQLQEMGFFDTQENIRALIATAGNVHAAVERLLGNIG

SEQ ID NO: 36809 - protein, 147 aa, Oryza sativa; identical to SEQ ID NO: 33883

SEQ ID NO: 36810 - protein, 535 aa, Oryza sativa
MALAFDEFGRPFIILREQEKKSRLRGLDAQKANIAAGKAVARILRTSLGPKGMDKMLQSPDGDVTITNDGATILEQMDVDNQIAKLMVELSCSQDYEIGDGTTGVVVMAGSLLEQAEKLLERGIHPIRIAEGYELASRIAFDHLEHISHKFEFSATNIEPLVQTCMTTLSSKIVNRCKRTLAEIAVKAVLAVADLERKDVNLDLIKVEGKVGGKLEDTELVYGIIVDKDMSHPQMPKRIEDAKIAILTCPFEPPKPKTKHKVDIDTVEKFQMLREQEQKYFDEMVQKCKDVGATLVICQWGFDDEANHLLMHRNLPAVRWVGGVELELIAIATGGRIVPRFQELSPEKLGKAGVVREKSFGTTKDRMLYIEQCANSRAVTIFIRGGNKMMIEETKRSLHDALCVARNLIRNNSIVYGGGSAEISCSVAVEAAADRYPGVEQYAIRSFADALDAIPLALAENSGLSPIDTLTAVKSQQVKESNPHCGIDCNDVGTNHMKEQNVFETLIGKQQQILLATQVVKMILKIDDVISPSDY

SEQ ID NO: 36811 - protein, 342 aa, Oryza sativa
MYNMYFIHCDPSLAGLEIEGQTVWKNPTGYLPGRMAPLKNFFGIMSFAFVVLGIYWFYQYMKFWREVLPLQNCITLVITLGMLEMSLWYFEYAEFNETGVRPKGITFWAVTFGTVKRTVARVIILIVSMGYGVVRPSLGGLTSKVVMLGGTFFLATEILELVENLGAVNDLSGKARLFLVYPVAILDAAFVVWIFISLAKTLDKLQARRSMAKLDIYRKFTIALAVTVLVSIGWIGYEIYFKSTDVFNERWQYAWIIPAFWHVLSFSLLCVISYLWAPSQNSMRFTYDASENFDRGDSLSLIRPGPIASKNGWSLSSSPDTKATKNVTVTSFDGDDEENKRE

SEQ ID NO: 36812 - protein, 77 aa, Oryza sativa
MFGTVRIDPSVPNYVLISNIMQIKSEFALHFGHVLNYVSCPWLIRKFTNITRIHNFLSGQETVKVNYSISLPSSKHC

SEQ ID NO: 36813 - protein, 93 aa, Oryza sativa
MKSRKPPSYRRPRPYLAPLTSAAAMSVPKVGDGRQEREDGETAHELQSQGGNVVGWGEIVDAKLPCYPPTIRNRLVPALNRPSWRAVQNLSSH

SEQ ID NO: 36814 - protein, 557 aa, Oryza sativa
MDKKFNVSWSFNVDPDFDYLVRLHFCELEYDKAEQRKFKIYINNKTAAENYDVFAKAGGKNKAFHEDFLDAASPQMDTLWVQLGSESSAGPAATDALLNGMEIFKVSRNGNLAHPTVRIGGFNSAMGKPKRSPKWVLIGAAAGLVIFVSIVGVIFVCFYLRWKKKTSANKTKDNPPGWRPLVLHGATTPAANSRSPTLRAAGTFGSNRMGRQFTVAEIREATMNFDDSLVIGVGGFGKVYKGEMEDGKLVAIKRGHPESQQGVKEFETEIEILSRLRHRHLVSLIGYCDEQNEMILVYEHMANGTLRSHLYGTDLPALTWKQRLEICIGAARGLHYLHTGLDRGIIHRDVKTTNILLDDNFVAKMADFGISKDGPPLDHTHVSTAVKGSFGYLDPEYYRRQQLTQSSDVYSFGVVLFEVLCARPVINPALPRDQINLAEWALKWQKQKLLETIIDPRLEGNYTLESIRKFSEIAEKCLADEGRSRPSIGEVLWHLESALQLHQGLLQSANTDDLSQPELKLSDASCNLGCIEEVEESCRAGSQDVNEEYVDVKIEVP

SEQ ID NO: 36815 - protein, 715 aa, Oryza sativa
MSFVAATMAGLASVGGRGVRGSRDRRGLSLGGSINEHNKLIFMAGGKQLSKHLTVYQALQRQLMFEEDDDEKFNGSDLSNDGNRFWGDVFTITYQKADSQAEKVSQGGSTSLNSKSDPSRSISELKGVSLLDSILQAELPCDLERTNSTYNILALLRVLEGLNQLSPRLRVHAASDDFAEGKITTLDELYRTGAKVPSEEFVNSKLTPKLARQMQDVLALCSGSLPSWCYQMTKACPFLFPFETRRQYFYSTAFGLSRALNRLQQQQGDNQNAGGEREIRFGRLQRQKVRVSRNRILDSAAKVMEMFSSQRAVLEVEYFGEVGTGLGPTLEFYTLLSHELQSVRLGLWRSSSPSDTGMQIDRSASPDDDLAAKELSSDLPDNGSHLIQAPFGLFPRPWPLTVDASEGSRFSKVIEHFRLVGRVMAKVLQDGRLLDLPLSTALYKLILGQELDLFDIISFDAEFGKTLQELQILVERKRFLESTYGMNQLEVTDLRFRGTPIEDLCLDFTLPGYPDYILKEGEENTIVNIYNLEEYVTLVVDATVKSGIMRQVEAFRSGFNQVFDISSLKIFSPEELDYLICGRREIWEPDSLVDNIKFDHGYTAKSPAIVNLLEIMAEFTPEQQHAFCQFVTGAPRLPPGGLAALNPKLTIVRKHPSSAVNTSNIAGVTESADDDLPSVMTCANYLKLPPYSTKEVMRKKLLYAILEGRGSFDLS

SEQ ID NO: 36816 - protein, 288 aa, Oryza sativa
MTAFALGQLWPKGCEGLLDRIRVLQSDTLNLIQGGLTAGSTTSESSCAATLQACNMLIERLKPVMERLQLQSDTVSWDTLISQASQENINLSASAYWVPEQDSNFYLNYGAGTSEVEVDLLTGAITIIRSDLIYDCGKSLNPAVDLGQIEGSFIQGIGFFIYEEHQTNSDGLVISNSTWDYKIPSVDTIPKQFNAEVLNTGYHKHRVLSSKASGEPAVVLGASVHCAVREAIRAARIEFAGNNGSGSSLLTFQLDVPAPMTVVKELCGLDIVEKYLEDLSNRGAASGN

SEQ ID NO: 36817 - protein, 240 aa, Oryza sativa
MAMRGGGATMLSWYLQVAAVSLLARATGLEAQLRVGFYDNSCPAAEIIVQQEVSKAVSANPGLAAGLVRLHFHDCFVRGCDASVLIDSTKGNQAEKDAGPNTSLRGFEVVDRIKARVEQACFGVVSCADILAFAARDSVALTGGNAYQVPAGRRDGSVSRSSDTGGNLPPPTASVSQLTQLFAAKGLSQREMVALSGAHTIGASHCSSFSSRLYRAGTTAGGAGGGQDPTMDPAYVAQLA

SEQ ID NO: 36818 - protein, 723 aa, Oryza sativa
MLPPAPTRNPGACRFIPLLPPKPLLSPAAAAASSRGGLCVAAASRRDFLLLVPSIAAASTVLQSLPLSASAADDEKQAASPAPGPAAAPAPTSAGEPEAEALSRVYDATVIGEPQAVGKDARRRVWEKLMAARVVYLGEAELVPDRDDRVLELEVVRKLAARCAEAGRSISLALEAFPCNLQEQLNQFMDRRIDGNNLRLYTSHWAPERWQEYEPLLNYCRDNGVKLVACGTPLEVSRTVQAEGIRGLSKAQRKLYAPPAGSGFISGFTSISGRSLIDKISAIHGSPFGPSSYLSAQARVVDDYTMSQKIMKEITNGYPSGMLVVVTGSSHVIYGSRGIGVPARISKKMQKKKQVVVLLNPERQGIRREGEIPVADFLWYSAAKPCSRNCFDRAEIARVMNAAGRRREALPQDLQKGIDLGVVSPEILQNFFDLEKYPVMAELIHRFQGFRERLLADPKFLHRLAIEEGISITTTLIAQYEKRKGRFLEEIDYVLTDTIRGSVVDFFTVWLPAPTISLLSLGDNGSGESLELLKGLLGSLPDNAFQKGIMGQSWNTNQRFASVLMGGIKLAGVGFISSIGAGVASDVLYAARRVLRPSTSVETARRRTPIWKSATVYSCFLGTSANLRYQVIAGLVEHRLGEYLMAYYNQPLLANLLSFVSRTINSYWGTQQWIDLARATGLQTSKKELPSPEISNLPDMPLLECGTTEVQNMDDSNKQQPMK

SEQ ID NO: 36819 - protein, 98 aa, Oryza sativa
MVAAIGRRQLVMAVSLDAGSSWRRQPRCDGVGQLAARWWRATARRQFAEAVVGVGGSGDGSCDSGGGGNVGGEEGVGCEVRMTTARWLGVWQQRPRWW

SEQ ID NO: 36820 - protein, 92 aa, Oryza sativa
MVNDMIRMFIAAPCCTNVVFSCAYAADSTMLVAHIGSSRIRILSSSTCVTVHSLHEPAAAAEASFESSSRSDCTITAALSRKLNSSVCVILG

SEQ ID NO: 36821 - protein, 488 aa, Oryza sativa
METFLPAILSDLLGRSISYLVQRYRQQSTVQDDLEKLRLALVRVHVTVEEAEARHITNKAMLRQLDVLREAMYSGYHMLDALTYRAHADGASFSFAPSRLNAAKRLRLLAADEGAAELRRTVDSLGRTIADMREFVVFLKGYPRISTQPYSMHLLLDKLMFGRQKEVEQVVGFLLQPDVCGAGAGAGAGVLHIVGVARVGKSTLVEHVCHDERVRGRFSSIVCLSREDLEDMGDHRALTVKHGSHASHGSSLVVVDLAEDEEPVGDGAWRRLRSSAMCRARGSRIIVTSRSPETVRGIPAARAIELKFLRDDVYWYFFKVLAFGSANPDDHPRLASIAMDISAEQKGGFIGATIASSLMRANPDAHYWTLILKNMREYTRKHRAMFGKHPHDLLRNNHPVYLWRLAESSKIFLCHGFYTACPAKQEIPRVTFQEVLSGRVTPRGRFEVLAWTSQIPPCRSYLMSCSLDTPPGPHRVLDRKKRLRQLVT

SEQ ID NO: 36822 - protein, 387 aa, Oryza sativa
MNRMTAPHGGMPPPPMPAAGGLARYGSAPGSLLASIADSVIRGRGVGVVDQLHHHQHQHQLPPPPPPQQQQMVGRYFSAESSGLTSCESSCRTTTTTPTAAAADVGRHPLERAYGGSGEIHVDASSAAVPLFRHSSSPAGLLSRLMADPHGNGMAATRGMGGYSGGGGDAGAMAHRRLSSQWSFSRQDLPQISEMGGLIPDIGESIVTGGGGNSSSDGAGHGAQSSSFLSSRNFSMSSWDDTNSIMFSPPSSSKKARVAAAAAGDHGDDMVSSFSNIDSQFGLSKQSSLEMAGMDDFLQLQPDSVACRARAKRGCATHPRSIAERERRTRISKRLKKLQDLVPNMDKQTNTSDMLDIAVTYIKELQGQVEKLKHDQANCTCSGKHDC

SEQ ID NO: 36823 - protein, 648 aa, Oryza sativa
MYMNSLTYLTSEAFSNIPADLVVDLQRMLSVDVASRPSAMAFTGSSFFRNDTRLRALRFLDHLLERDNMQKTEFLKALSDMWKDFDSRVLRYKVLPPLCAELRNMVMQPMILPMVLTIAESQDKGDFELSTLPALVPVFTSASGETLLLLVKHADLIIHKATQEHLISHVLPMLVRAYDDTDPRLQEEVLRRTVPLSRQLDVKLLKQSVLPRVHGLALKTTVAAVRVNALRCLGDLVPSLDKEGILEILQTLRRCTAVDHTAPTLMCTLGVANAIFKQCGVEFAAEYVIPLVFPLLTAHQLNVQQFAKYILFVKDITSKIEEKRGVTVTDNGNTEVKVSPSLANGIHSEPLSRGVGQTEQIQTAKGAAWDEDWGPTKKASTPSQSSDSNARMKQPSDPFDFSTQTKQPSALPFDFSTQQPKPSSAIPQVTPATISPAPSLPSLQSLAPSSGPQTSGSCVPVDIEWPPRKNTSSDFNAPLSVSEQSKSGGLSSDGLADIDPFADWPPKASSGASILAVGHLSSTSQSISGLSTGNIGFSGNSGSLGQMKTNQMSWSAKPNTTNLMAVNSTGNYLNQGNSALGFGNPIGGRSTGSLSSSTTQGPPRLAPPPSASVGRGRGRNQGQSALSRASRTPHSNVSSEQPPILDLL

SEQ ID NO: 36824 - protein, 118 aa, Oryza sativa
MASCTATPVEEEDSAPPPPPPPPLPRARSSTAGAFSELSHGKKGTRGRGRRRRRGRRRAVRARGSVASQWGQLLLRCSICSCSAASSASALRSRRASSSSRTRVAAPASRSRISPSAA

SEQ ID NO: 36825 - protein, 585 aa, Oryza sativa
MRPPPRPRRPVPARLVAAAVLLSALAGGAAAGAAIAGDGYGRGRRLYMRNKVLEMFYHAYDNYMTYAFPHDELKPLTKSFTDSLSELGNLNLEHLPNDYNGSALTLVESLSSLVVLGNLTEFERGVLWLSENLTFDVDARINLFECNIRLLGGLISGHILAKEHSSHLKDGPYQDQLLHLAENLGSRFLPAFETPTGLPYAWINLKYGVMENETTETSTSGCGSLILEMGALSRLTGDSRYEAAALRALRKLWSMRSSLNLVGTTLDVLTGKWIEYSSGIGAGVDSFYEYLIKAYVLFGSEEYWDMFHSAYLAVQKYFRHGPWYHEADMRTGEATHWQLTSLQAFWPGLQTLLGDVAAANISHREFYNVWQRFGVLPERYLLDFGMLHPTEKYYPLRPEFAESTFYLYQATKDPWYLEVGEAIIGSLNYYTKVDGGFASVRDVSTMKLEDHQHSFFLSETCKYLFLLYDDSFLRNQNYIFTTEGHPLPIRSTWHEIIPTTHVPSNWTFVKDDSQPFRVSALSSQVCPETIFRQSVGSPWESACHVPDVLPTHRCRTDDDCGVEAVSCRRRTCSMAGYCGLWLGVY

SEQ ID NO: 36826 - protein, 242 aa, Oryza sativa
MERDSHSASIAWCPLRSHDVPVCNGHCKKATTNGAISPKSVPAPSNMVSAVSSMLLSLGEDPFRKELVGTPQRYVQWLMKFRACNLDVKLNGFTLNNLSVYQSPAGDAADHRAIHSELHLPFCAQCEHHLLPFYGVVHIGYLDGGDGEVIDRSHFQALVHFYGCKLQVQERMTRQIAEAVYSVSHCGAIVVVEANHICMISRGIEKIRSSTGTIAVLGQFLTDPSAKARFLQNVVDTTGLAV

SEQ ID NO: 36827 - protein, 734 aa, Oryza sativa
MKDGASGEVNKISMEREERRLTELGRKILETFVLSHIFSGIEVAYQEAVALKRQEELIREEEEEAWLLGNEMKGKRGGGANEKDRRAKKKQAKQKKNNRKIKDKERDEKFEAKILERLHDETAIDDSDGLSSKQAEEVTTKVENLEEGASDRQGDLDSSEIAHRPDSGDKYPRQMNGLSDVTGNAQKVKKASSMEANSPVFLADSVAASGTHSRGNNLSDSKNRMTPNKDHVPKPTLQANRASANCSKSTPVDIEKDVPLPSRSPQINKPAPVPPKSPQVGNATPVPPKSPPIEKACPVPPKSPPSAKDTSLPSVRSLQIDKPVPVPPRLPQVDKAASLSSELPQTSTTSNSEAQEETAAIRVASPSVSEVTVTASRPSSAPVFPAPRSTVPATQVQVSTLLSRSMSEATRRSGNDPSPSAPAYIPQTYRNAIIGKHGRGTTSGTTAYQSTSLGQGTALSQPLSTYAPTMSVTMPPAGRNDQFSGRHGLESGLGKPEARDSWQPWNANRHVDKHLWRDDSTYQQTTNGHAYPQPWKDVNFLQARGTETEIPSRFGGPQLPRQFQAETHADYLLQQPQGPVAEEFPHLDIINDLLEEEQSNGSMPESIGHDYHTFGLPLPFLLRGNLADQEMASASSPGRFNLTEPYYDEGYSRAYDMSAFQGTRERQFPSLDAYSNGLSDMSPSKPWLNGSPNPSMNHAVGTNGYPQQIPDYTNLASELNGASLYHRRYANGRW

SEQ ID NO: 36828 - protein, 486 aa, Oryza sativa
MGWLTKFFRGSTHKISEGQYHSKPAEETIWNGPSNSAVVTGVPSEFDNEDIARAISLSLLEEEQRKAKAIEKDMHLEEDEQLARAIQESLNVESPPRARENGNANGGNMYQPLPFMFSSGFRTCAGCHSEIGHGRFLSCMGAVWHPECFRCHACNQPIYDYEFSMSGNHPYHKTCYKERFHPKCDVCKQFIPTNMNGLIEYRAHPFWLQKYCPSHEVDGTPRCCSCERMEPRESRYVLLDDGRKLCLECLDSAVMDTSECQPLYLEIQEFYEGLNMKVEQQVPLLLVERQALNEAMEGEKTGHHHLPETRGLCLSEEQTVSTILRRPRMAGNKVMEMITEPYRLTRRCEVTAILILYGLPRLLTGSILAHEMMHAWLRLKGYRTLSPDVEEGICQVLAHMWIESEIIAGSGSNGASTSSSSSASTSSKKGGRSQFERKLGDFFKHQIESDTSMAYGDGFRAGNRAVLQYGLKRTLEHIRLTGTFPF

SEQ ID NO: 36829 - protein, 162 aa, Oryza sativa
MQQQLLESESGPSVKKKLKRPSGDLSSEDSDDEEDGSGDSGDEKPIRSRKRKIADKRQQSQRMAEKSRTSISSIHELLQDFLVQQQRMDIQWHEMMERRSQERIVFEQEWRQSMQKLEQERLMLEHTWMEREEQRRMREEARAEKRDALLTTLLNKVLQEDL

SEQ ID NO: 36830 - protein, 437 aa, Oryza sativa
MSSGLPAPIKVAATAKGPFVPPENLLRFQPETGWKGSAATSAFRPAEPRKIFEMTLSAPGIPVSDAADKHRPALDIDLNVADEQFLEEDISQSSVQTTGSESGNTRRSNGPVRSVGIELDLNRADEVAENHFVSNTPHRVEVPLLSSRPLPAIFSSADTNGSRDFDLNNGPTLDETGTEHAARSLSSKNTSSIPFIPQVAGGRMNSAEMSNISPWFASAHPYAPVAAQPFLPSRGEQPHPVETAAGSGTQRIITSLADGVQRGSDPCRAPVISTSPTMVFHPPAYQYAGFPFTPGVHLQAPGFSIGSTSYANSAPAGVPYFPSIAPTLLGPAGALPAQHTRQYAINLPEGSSTVGHDSNRKWGRQGLDLNSGPGSVDAEIKDERVSLPVRQNLITPPHAFGEEHTRMYQMPSVGIKRKEPEGSWDAERSSYKQLSWQ

SEQ ID NO: 36831 - protein, 321 aa, Oryza sativa
MNLTSFPSPQVLQRLTMLKRLYIRSCWCLRSLGGLREATSLSEVKIDSCISLELVDENGIAVMPSSIGKLSLFGCILGANFLSTDFPRLRSISITCCRSSSSFAIGHLRSLESLSLNNMPDLCFLEGLSCPHLQDIHLINVPNLTAESFSRHHAWKSLAISSSAMLSLMLSIKDFMLPEKLCFEQYDEPSITFQSSANFTSIKFLEFRDSKVMYLPSSLKNLSSLERIKFVRIPNLSSLPDFPNSIQQIEIQDCECLKRSCQAPNGENWQKIECIRWKLIEVSKPDESIAWFIHRYDKVGIAAYPKKLQPGQPVVWHDKNH

SEQ ID NO: 36832 - protein, 478 aa, Oryza sativa
MFADLGHFNIRAVQISFNSILFPSVALCYIGQAAYLRKFPENVSDTFYKSIPGPLFWPTFIVAILAAIIASQAMLSGAFAILSKALSLGCLPRVRVIHTSKKYEGQVYIPEVNFMMGLASIIVAIAFRTTTSIGNAYGICVVTTFMVTTHLMTVVMLLIWKKHLVFILLFYCVFGFTEVVYLSSILSKFVDGGYLPFCFAMVLMTMMATWHYVHVRRYWYELDHIVPTAELASLLEENGGVRRVPGVGLLYTELVQGIPPLFPRLVRKIPSVHAVFVFISIKHLPIPHVAAAERFLFRQVGPRARRVFRCVARYGYTDALEEPREFAAFLVDGLKMFIQEESAFAPHQEMIDAAADDDDEAAARPRRSTSSAVHSEEAIQAASSGRTTASSVQLQAGGEPPAAMDVEEEKRLIDREVGRGVVYLMGEANVSAGPNSSILKRIAVNYIYTFLRKNLTEGHRALAIPNDQLLKVGITYEI

SEQ ID NO: 36833 - protein, 435 aa, Oryza sativa
MPAAEGAVAAAAVADQMYGPKEDRKLAIVLVGLPARGKTFTAAKLTRYLRWLGHETKHFNVGKYRRLKHGINQTADFFRGDNKEGVEARNEVAALAMEDMLSWMQEGGQVGIFDATNSTRNRRNMLMKMAEGKCKIIFLETICNDQNVLERSMRLKVQRSPDYAEQTDFEAGVRDFKERLAYYEKVYEPVEEGSYVKMIDMVSGTGGQLQINDISGYLPGRIVFFLVNCHLTPRPILLTRHGESLDNVRGRIGGDSSLSETGSLYSRKLASFIEKRLASERTASIWTSTLQRSILTAQPIIGFPKIQWRALDEINAGICDGMTYDEIKKIKPEEYESRSKDKLRYRYPRGESYLDVIQRLEPVIIELERQRAPVVVISHQAVLRALYAYFADKPLEELPNIEIPLHTIIEIQMGVAGVQEKRYKLMDAVNSTAGI

SEQ ID NO: 36834 - protein, 280 aa, Oryza sativa
MAAAIEGNLMRALGEAPSPQMQKIAPPPFHPGLPPAPANFSSAGVHGFHYMGPAQLSPAQIQRVQAQLHMQRQAQSGLGPRAQPMKPASAAAPAAAAARAQKLYRGVRQRHWGKWVAEIRLPRNRTRLWLGTFDTAEEAALTYDQAAYRLRGDAARLNFPDNAASRGPLDAAVDAKLQAICDTIAASKNASSRSRGGAGRAMPINAPLVAAASSSSGSDHSGGGDDGGSETSSSSAAASPLAEMEQLDFSEVPWDEAEGFALTKYPSYEIDWDSLLNNNN

SEQ ID NO: 36835 - protein, 569 aa, Oryza sativa
MGMESGDAQLPLLHHQASASNQHYTKPPFNWKAPALILAFEFLESIAYAGISLNLVVYLGTVLHGTTASNAANVDTWNGTTFLTPVLGAFLADTYWGKYKTIAISTVFYLIGLLVITASAVIPSLQPAPCNGSSCPPATGFQYFVFFTALYLISVGTGGVKSALLPFGADQYNDSNLEESKKKQSFFSLFFIAINLGVFISGTVVVWIQQNVAWSLGFGISSICLVVATVAFLAGTPVYKVQLPSGSPLKSVVMVFVASFKKRKLEVPADNALLYEGDDADLSNGQSVKLAHTDGFRWLDKAAVVFEEVEEINKDEGGGGGWLQCSVTQVEEVKILLRVLPIWVTSVLYAASLGQTATTFVQQGNAMNTKIGSFSVPAASLNSAEVIFMMIWVVFQDTVVVPIARRYTGNPAGLTQLQRMGVGRLLAVPALAVAAVLETWRLRSVRDGGNLSIAWQLPQFVILACSDVFCGIAQLEFFYSEAPVSMRSLCSAFSFLALSLGYYVNSLVVSIVAVVTTTSNKGWLPADLNDGHLDYYFWLWTGISAINFVVYAAFAKNYTVKRLAVPHSH

SEQ ID NO: 36836 - protein, 553 aa, Oryza sativa
MQSRTSFSPSRENTMLSQRHNRYEELPDTWYKQYAEKFRTWHGKFRSGDKDIPKRTSEGMSNYLKVCSVHKRKRAVFMDDQGHNISVPMSENGPSSKNAGDYSNLTDDTFIPEIRFPADCVPESAIPRTSETSRIYKIEVHGVLDNLPAPVSRNTAMLERFGMMPEYYKKGNKYRGKDGSRVEGKSLSQEQAMLMTRKLVARYLANAGFESGTAVCIDVLSEIIIKHISKLGRNLKLLTDSYRKQFSSIELLKMFLQTVGYSNIGPLMEITKTTNRGANYPMQQDAQVQNQNALLHAQQLSGQFAPQMGINTQNLTPQQQQQLLQQQWLRRNQLASPRGPLTMADKNQAMVNVKIENTVDSQIDSPYGSLTRQQLQQLRHHQLLQQQQQQFQQQQQVQQQQQQQQQQFQHQQQQQQQQFQQQHQQQQQSQQLQQQHQQQQQPQQLQQQHQQQLAMSGGQNAQLAQQLAMSGGQNAQLAQQLAMSGGQNAQLAQQLAMSGGQNPQLAQQYKQMPSMSAYGMRMPPVKVEAFHELVSGDSSLKPDSDSNKLMSPK

SEQ ID NO: 36837 - protein, 45 aa, Oryza sativa
MGYHFLIYLFLWFASSPQVISSGDFDSHEFLKSFGVEKFVVLLKC

SEQ ID NO: 36838 - protein, 117 aa, Oryza sativa
MDTLHNTPTLKLLAWSLGPAFTSTMKLNTTTTLALLLLLLLASSSLQVSMAGSDFCDGKCKVRCSKASRHDDCLKYCGVCCASCNCVPSGTAGNKDECPCYRDMTTGHGARKRPKCP

SEQ ID NO: 36839 - protein, 425 aa, Oryza sativa
MLDINLFRTEKGGDPELIRRSQRNRSASVELVDEVIALDDQWRQRQFELDKIRQELNKTSKEIGKLKAKKEDASALIQSTLDAKLVTIGNIVHESVPVSDDEANNLIVRTWGERRLEGNLKNHVDLCKMLDIVALEKGADVAGGRGYYLKDEGVLLNLALINFGLAFLRKRGFKPMQTPFFMRKETMGKCAQLAQFDEELYKLTGDGEEKYLIATSEQPLCAYHLGDRIYPAELPIRYAGYSTCFRKEAGSHGRDTAGIFRVHQFEKIEQFCVTSPNDNESWEMHEEMIKNSEDFYKEIGLPYQLVSIVSGALNDAAAKKYDLEAWFPASKTYRELVSCSNCTDFQARRLGIGYGQKKNDEQSKQFVHMLNSTLTATERTLCCILENFQKENGVEVPKALQPYMGGIDFLPFKLDSKQVARLQIK

SEQ ID NO: 36840 - protein, 543 aa, Oryza sativa
MRDLTEIGSKKHSSYVLNGHRDLPLLESASFGYSLSGTNGIKGDPQSHSATKRKRSNIGQAYENSRKKDRRRPLSKLCKDSAVAVPAYSHWDPSGHSSAQYSGGKMSNAFEPSRGKFGFPLDVNNYSYSSGTSSVETLLDASCANHDGVAKVIPVKEAEVSCMPGFLNNDCSDGDEYFDTPLVMEEDALEEDHLHKYESCASVKGQISKPRKQTAEYTELVIPSPHGHRSSKKKSMSFVSQRTQENHKDRTLLAQHGRTVKGQALDTDAVEVDARVSSAFCKPPALKNNMQLAIVPADGCASTLEQQYYGSGPEHDESSETISNRSQSEKGAPSSPYYEPLQVIPPEQKSGLEPSSPHVVKPIKNARTDYKVYDVELAAQGSYKGHRVPLVSLMSKWNGKPIVRYPITVEVLKDSSSAASRDDLRPATSSLNNLLKRSEPAEPRQARSSHSSRPASRPKPSGKKKISEHDTDKSRRPHTKKSATSPRKMRRLSSFASSRRDGASRKPVVGKISGPTIACIPLRLVFSRINEALSFPVRSENPT

SEQ ID NO: 36841 - protein, 394 aa, Oryza sativa
MQLILLLSKPRTLQLFPLLLCLLLLPCLSQPLPSPSPSPSPSPSASPAPPPSLPLSPFNERLEAAYVAFQAWKHAITEDPKNLTEDWCGPFVCNYTGVYCAAAPDDPHVLTVAGVDLNHGDIAGCLPDHLGLLADVALLHLNSNRFRGTLPPSMQHMRLLFELDVSNNLLAGAFPAFLTSLPGLKFLDLRFNAFDGELPAAVFGRRLGLDAIFANDNRFNVSLSSASLTNSTASVIVLANTRLAGCLPPSIGDMADTLVELILLNTSISSCIPPEIGKLKKLRVLDLSHNELAGELPASVGDMESLEVLNVGHNMLAGEVPEAICELPRLRNLTIAGNYFCDEPVSCLHVPLRDDRMNCIPDWPHQRSPEECIAFAHRPPPHCAADGCIVIPPP

SEQ ID NO: 36842 - protein, 387 aa, Oryza sativa
MPSPSSAHWLSLVGSVWLQTINGPNADFPVYSSQLKEVKGISQVQLNFLAFASDAGKLFGWFAGVAALYLPLWLVAVVGASFGLVGYGVQFLFLERPGLAYWHLFLLTSLAGNGICWINTVCYLLCIKNFPSDSRVAVSLATSYLGLSAKLYTTMAEKMPRGATARYSKEKVYLLLNAVVPMLVTLVAAPSLRVVELTSHRRTDPAFLAMFAITLATGACAVVGSIGSKSIGLSTSEHMISLYILLALPVLIPAALKVRESMDKLREAKRENRVHDVAAATDVPETAVSVLEVAEAAENKEEDDAAAGESGGQDEVGGIRLLRRLDFWLYFLSYMFSGTLGLVFLNNLGQIAESRGLSDPSTLVSLSSSFGFFGRLLPAFLDYYTAK

SEQ ID NO: 36843 - protein, 172 aa, Oryza sativa
MVWIMPEEPKKLFPIFRNLKDVYLYNISNDSGLDWTLFVLEGAPSLKSFHVKISHHICGGDGFEHNAGSSNVVWEASSDIIKHKNLRLLDIIGFEAEENLIKYIRLAIQRAIALQRIHLHEKEPCEDCDDIYLNTPSLSRTRFPNNEQEKDLLREQLLQGFSSSIEIIIGCY

SEQ ID NO: 36844 - protein, 570 aa, Oryza sativa
MNMASQQLFLTPGPFNLTWTFALPPPAPGSDSDYLVRLHWCDYSLVSSVVPTGIVFDVYVAQRLASKDLDRNAADAAEQPNEAFYLDYAATAPTTGNLTISIGKSDKSDAGGMLNGLEIMKLRRADNLNSAGSHGRRKKILIGTLSAALGVAVLACALLCLLAVLRRRRQAPTPAPEEKESTQLPWSQHTQDGSSWVDMSNASGAGMTGGLHRMSMQLNISLADITAATENFNERNLIGVGGFGNVYSGVLRDGTRVAVKRAMRASKQGLPEFQTEIEVLSRIRHRHLVSLIGYCNEQSEMILVYEYMEKGTLRSHLYGSEEPPLSWKQRLEICIGAARGLHYLHTGYSENIIHRDVKSTNILLGDAFIAKVADFGLSRIGPSFGETHVSTAVKGSFGYLDPEYFKTQQLTDRSDVYSFGVVLFEVLCARTVIDQSLERDEINLAEWAVSLQQKGELAKITDPRIAGQVNGNSLRKFAETAEKCLADYGLDRPSMGDVLWNLEYCLQLQETHVNRDAFEDSGAVATQFPADVVVPRWVPSSTSFLMDDSVTDSGIANSKAFSQLSSGDGR

SEQ ID NO: 36845 - protein, 445 aa, Oryza sativa
MSSSAATSTYAESVASCRAPAPATPRPPHAAVRRHLDFAAGDGGELDDDEVEDEDEDDFLFRAAEETERSHYEAQRRASAPPPPPSQPPAFFERPCICGRGGCDVEERELGRWAYVCPATPKCKYSVWCGEADICPNPQPAYMSHPKPNPHVFSSPCSPVVFNSPSNHLAGSTTPTPNNLQVFNGPRNPHVSNSPSNHLAGSTTPTPNNLQVFNAPGNLHVSNSPNNHRSGATTPVNANPPGSRSSDKQPICHCRAGKCKVETIKGQKYYVCCIQKGQGACPYQVPVNAFVEESPQAGNSVPLEDNRGNYSPVKVEANNDNGSINPDQPEYDEWPFDIVNNDVVCSGFLPTAEPTLRDGIVAGESPSTQHLSNATTEAKTPTKSPIMPPPHGSGSPFTPRSNPCYRCGEDGHWSRNCPKPASSPLNSPCYNCGKLGHWRGNCPGT

SEQ ID NO: 36846 - protein, 607 aa, Oryza sativa
MENGAGAGDDEYTRDGSVDLRGNPVLRSKRGGWKACSFIVVYELFERMAYYGIASNLVIYLTEKLHQGTVEAANNVTNWSGTVFITPLIGAVVADAWLGRYWTFVAGSAVYLMGMLLLTLAVSVPALKPPPCDGGGGAACPRASALQLGVYFGGLYTIALGHGGTKPNISTIGADQFDDFHPPEKLHKLSFFNWWMFTIFLGILFSTTVLVYLQDNVSWTVGYGIPTLGLMVSVAVFLSGTPLYRHKVPQGSPLATMGRVVAAAVWKWRVPLPADSKELHELELEHYTTRRGFRMDATVSMAFLNKAAVKPGEGGGGSVARLPGWTLCTVTQVEETKQIVKLVPLLATMVVPCTLVAQAGTLFVKQGVTLDRRIGKFHVPPASLGAFVTATMLICIVLYDRFLVPAVRRRTKNPRGITLLQRISLGMLLQIVTMVVTSVVESQRLGYARRHGLVATGGQLPVTIFILLPQFVLLGVADAFLVVGQIEFFYDQAPESMKSLGTAMSLTAYGAGNLLSSAILAAVERVTGGGKGRTPWVTNNLNASRLDYYYAFLATLAAANLLAFVVLSCKYSYRVESTETIDVDVAMDSVAQGGGVVTVKSEAAPMA

SEQ ID NO: 36847 - protein, 330 aa, Oryza sativa
MKHMALAPPPPPNKKSKKKNSNSVWTRPNSRKGKKKAKQPANALAGGSAGANGRLPKPSSGDDELVLTPAPRFAAERNDDAPDLPVLLSRVFKSDKVEVSDDRLTAGSTKGYRMVRATRGVAAGAWYFEVKVLHLGSTGHTRLGWATNNADIHAPVGYDVFGFGYRDMDGTKVHKAWRANYADQGYGEGDVLGFYIHLPDGELYEPKQPFLVHYKGLPFRAEAPKAAEQKTPDPVPGSEICYFKNGVCQGTAFVDIPGGRYYPAASMYTLPDQPNCEVRFNFGPNFEFFPEDFGGRSVPQPMNNVPYRPYQLANEVPAENGTAEKTIKLQ

SEQ ID NO: 36848 - protein, 258 aa, Oryza sativa
MGHHVTVISSSARKRGEAMDDLGADAYLVSSDAAAMAAAGDSLDYIIDTVPVHHPLEPYLALLKLDGKLILMGVINQPLSFISPMVMLGRKAITGSFIGSMAETEEVLNFCVDKGLTSQIEVVKMDYVGVGVIVGCCRECHPCKANVEQYCNKRIWSYNDVYTDGRPTQGGFASAMVVDQKFVVKIPAGLAPEQAAPLLCAGLTVYSPLKHFGLMSPGLRGGVLGLGGVGHMGVKVAKSMGHHVTVISNIDDADAPPA

SEQ ID NO: 36849 - protein, 744 aa, Oryza sativa
MECNRDDAIRSKEIAERKFNENDIAGAKRFALKAKTLFDSLEGIDNMISALDIHIRAQTKIEGENDLYGILDISASDDDEKIKKQYRKLALQTHPDKNKFSGAESAFKLIQDAWDVLSDKDKKRSYDQKRFGGSSRVYQNGFAENANATPGSTMSSMNGFFWQNSGRHPSYATDTFWTYCDSCQMSFQYSREYVNRNLACSFCQTEFVAVETPPPTAPVYYNVTNLMDTSSNMDDPQGTGVPYSSNKIFDPVLQPVFGSVGGAHASRYPVQQTCKPARKEEVAEVNVARREEATKRKHEQASSSLGSSSSAAKVIHRREAVTKEMEAEKRRCINNKSKVSGQKNNTNKVVGKSTSSAADGDSGPQMHPAKRKSASSIGTSGTKRRKMPSDHNSGNARTSFGKVFLQLETEIPGLKMEKMKLQIRDKLEEFKSRRANVENKGNVHVSLEKKKTWKWKKPATLFVYTRRNRKEHRKEPGVDAIGAGSSHKHLDGKYSCLDQVPSSDEGSCVMPVPEADFYTFGDHPETSFQNGQIWAAYDEEDGMPRYYALIQKVLSRHPFKVRLAFLKAKDCSEFVTSNWISYGYSKTCGDFIVGTPKNTDQLNTFSHVVTWEKGPGGIIRIFPRKGDIWALYQNWSPEWNTCTPDDTIYKYDLVQVLDSYNPSAGISVMPIVKVPGFVSVFTPLLDPTKSRTIPKEEMLRFSHQVPFHVLTGEEAKNSPKGCYELDPGSTPKELLQVVPQSDGV

SEQ ID NO: 36850 - protein, 218 aa, Oryza sativa
MVAWIRRRRRRQGWIHRAPSFVRPRSRRSTASRVGSDGRGGSGDLRRLSAPADADPPPLPWIRRRRRREGLIRRPPSSLHPRSRRSARARRRVVCGLLLHVRRLAHHLQAASAVGSDVMGGSSSSLQSQLCLGVQEETGGGEGQNGGGGEGGGGGHIHQPNDEGAPVVQEHGHHRPGHDVAAGRRAGHRPRCRGARLQHTGLATEVWTATPWDSLSAR

SEQ ID NO: 36851 - protein, 529 aa, Oryza sativa
MACAPDPSNNKNSSSILHQQVKKISRIPFSWGAHAWGIGREDPRRAIHALKVGTALTLVSLLYILEPLFKGVGRNAMWAVMTVVVVLEFTAGATICKGLNRGLGTILAGSLAFIIELVAVRSGKVFRALFVGSSVFLIGFAATYLRFFPSIKKNYDYGVVIFLLTFNLITVSSFRQEDVVPLARDRLSTIAIGCAICLFMSLFVLPNWSGEDLHSSTVRKFEGLARSIEACVTEYFQDQDKDDKILDKQASRASIHIGYRAVLDSKSSDETLAHYASWEPRHSMQCYSYPWQKYVKIGSVLRHFAYTVAALHGCLESEIQTPPSVRSLFRNPCTRVAREVVKALQELAVSIRDHHRCAPDVLSDHLHEALQDLNSAIRSQPRLFLGSKHACANSHVLMELNSSKHTATRTTLPSFKTDGTSLLERRNTKADQPSERNERGTLRPTLSKIAMTSLEFSEALPFAAFASLLVEMVVRLEMVIEEVKELERAANFREFTGHDYLTIDLTSNDKMRNPNGVPLDSHTISTAAE

SEQ ID NO: 36852 - protein, 429 aa, Oryza sativa
MPPKPAGPGSAVVGSRLGSRPISASPSFSSSIVTYKGTAKTFSLIEMERATQRFDNSRIIGEGGFGRVYEGILEDGERVAVKILKRDDQQVTREFLAELEMLSRLHHRNLVKLIGICTEEHIRCLVYELVPNGSVESHLHGSDKGTAPLDWDARLKIALGAARALAYLHEDSSPRVIHRDFKSSNILLEHDFTPKVSDFGLARTAIGEGNEHISTRVMGTFGYVAPEYAMTGHLLVKSDVYSYGVVLLELLTGRKPVDILRPPGQENLVAWACPFLTSRDGLETIIDPSLGNSILFDSIAKVAAIASMCVQPEVDQRPFMGEVVQALKLVCDEGSEFNESGSFSQDLHIQDSGIISRASLDVDVEPVVSAELFNASAHYDTLDASGSFRRYSSSGPLRVGRTGHNRERGLSTGSSSEHCGTQRFRIDSE

SEQ ID NO: 36853 - protein, 139 aa, Oryza sativa; identical to SEQ ID NO: 29321

SEQ ID NO: 36854 - protein, 516 aa, Oryza sativa
MASLMEVQVPLLGMGTTMGALALALVVVVVVHVAVNAFGRRRLPPSPASLPVIGHLHLLRPPVHRTFHELAARLGPLMHVRLGSTHCVVASSAEVAAELIRSHEAKISERPLTAVARQFAYGSAGFAFAPYSPHWRFMKRLCMSELLGPRTVEQLRPVRRAGLVSLLRHVLSQPEAEAVDLTRELIRMSNTSIIRMAASTVPSSVTEEAQELVKVVAELVGAFNADDYIALCRGWDLQGLGRRAADVHKRFDALLEEMIRHKEEARMRKKTDTDVGSKDLLDILLDKAEDGAAEVKLTRDNIKAFIIDVVTAGSDTSAAMVEWMVAELMNHPEALRKVREEIEAVVGRDRIAGEGDLPRLPYLQAAYKETLRLRPAAPIAHRQSTEEIQIRGFRVPAQTAVFINVWAIGRDPAYWEEPLEFRPERFLAGGGGEGVEPRGQHFQFMPFGSGRRGCPGMGLALQSVPAVVAALLQCFDWQCMDNKLIDMEEADGLVCARKHRLLLHAHPRLHPFPPLL

SEQ ID NO: 36855 - protein, 417 aa, Oryza sativa
MAASDSDSDADAAAAAAASLLPAPIHLLPPDALHNVLLRLPLRDAVVCRPVSRLFHETLSHNFLALLPSLRLLLLRHPRPEGGGCLHAFDPDRRHWLRLPFSAFLPNQSFPPVASSPSLLYLWLESPSPSPPSLPSSSSSSSTASTAHPPKSLAVCNPFAGTYSFLPPLGSAWARHGTVLAGPGGVVLVLTGLAALSYTPSGSGKWMKHPLSLPSKPRSPILASGAAAVFALCDVGTPWRSQWKLFSCPLSMLTGGWAPVERSAWGDVFEILKRPRLLAGAGGRRVLMIGGLRSSFAIDAPCSTVLILRLDLATMEWDEAGRMPPNMYRCFTGLCEAAAQGNAMPTAVAGGNNKVKVFGGDGKVWFAGKRVRGKLAMWEEDELGNSGGKWDWVDGVPGYSDGVYRGFVFDGGFTAMP

SEQ ID NO: 36856 - protein, 60 aa, Oryza sativa
MLLLVVVLLDCLQEISDLLTCYCVERGDREVTTKWFPRSMVTRASVIISQEGEPETDFSW

SEQ ID NO: 36857 - protein, 465 aa, Oryza sativa
MAPHSPYAPLHLVPKMLNEPSPAALDSRGAFIVHVLSSIYVWVGMKCDQVMEKDARAAAFQVVRYEKVQGHIKVVREGSEVPEFWDAFSSAPVNSDSNTKISKDQIDSASKTGPGNRRVESYDADFELVYKAITGGVVPAFSSSGAGDETHLPARESTWSSLRRKFISRSLARVYSDSALIRDLDPRVDRVQHLAAEASTSPPFLSPSSLSSDSSISSKYSSDSPSLSPSTSSPTSLGLSPASSNFSHTLVPSSRSPLHQSSNEEPSKSGLGSIRSPSKTSSIAERRGGFSSLKLPSFQKDLVLPPRVPTSLRREEEVTDKSNNNSVKQLTGVCCPEKCTGNTSTVHTKTGITERTDSISEACGNLQLLVYRWPSKEKLTTFTRKDLDPKSVLIFVTPEDSRSEAVKTVHIWVGGEYESSKCVDTVDWQQVVGDFFHLKELGNTLPVKVYKEHETENLLEVLNAR

SEQ ID NO: 36858 - protein, 765 aa, Oryza sativa
MMRLLLVAVAVAMAAVVVAAEERATYIVHMAKSAMPAEYGDDHGEWYGASLRSVSGAGKMLYAYDTVLHGFSARLTAREARDMAAMDGVLAVNPEARYELHTTRTPEFLGIAGNDGLFPQSGTAGDVVVGVLDTGVWPESRSYDDAGLGEVPSWWKGECMAGTGFNSSAGNRKLVGARFFNRGYEAAMGPMDTTRESRSPRDDDGHGTHTSSTAAGAAVSGASLLGFASGTARGMAPRARVAVYKVCWLGGCFSSDILAGMDAAVADGCGVLSLSLGGGAADYARDSVAIGAFAAMEQNVLVSCSAGNAGPGTSTLSNVAPWITTVGAGTLDRDFPAYVSLGNGKNYTGVSLYAGKALPSTPLPIVYAANASNSTAGNLCMPGTLTPEKVAGKIVVCDRGVSAQVQKGFVVRDAGGAGMVLSNTATNGEELVADAHLLPAAGVGAKEGAAIKAYVASDPSPTATIVVAGTQVDVRPSPVVAAFSSRGPNMLTPEILKPDIIAPGVNILAAWTGKAGPTGIAADTRRVAFNIISGTSMSCPHVSGLAALLRSAHPEWSPAAVRSALMTTAYSTYAGAGDANPLLDAATGAPATPFDYGAGHVDPASAVDPGLVYDLGTADYVDFLCALNYTSTMIAAVARSKSYGCTEGKAYSVYNLNYPSFAVAYSTASSQAAESSGAAATTVTHRRTLTNVGAAGTYKVSAAAMPGVAVAVEPTELAFTSAGEKKSYTVSFTAKSQPSGTAGFGRLVWSDGKHSVASPMAFTWT

SEQ ID NO: 36859 - protein, 616 aa, Oryza sativa
MAESCYVRVLFLLLLVVTPLPISIASPLKLRLSASEVAALEAHAPPPPPPPPPDTPTTYFEVDRPHRPPPGSFGPCSTLLLSHSFGFTYTLPPVTAPYSPPPCLAAAGGRASAISLAVLEWRATCRGVQFDRIFGVWLGGVELLRSCTAEPRPKGVVWSVSKDVTKYASLLAARNSSTLAVYLANLVNDQYTGVYHANVTLHLYFRHPPQPPQPGLGPADVIVPISQSLPLNGGQWFQINNNEDVESASLAVPANAYRAVLEVYLSYHGSDEFWYTYGNPFNGNGPFREVTVRIDGDVVGAVWPFPVIYTGGISPFLWRPISGIGSFNLPSYDIELTPFLGWLLDGEEHELGFAVTDAQDFWYVDGNLHLWLDPRSAATTAGIISYDAPPLEKVTAVASRGPGNEYYQTTAFRRISAAGWVQTSSYGKITATWTQRFSFVNTNQVREDTEQTVNQTTDAYSGVHVTDHAGVAYSQEAEQSFPLYIYQGQVNQTSNDSFTEETSVQLRFEEERVAAGRPGFWSRSLSNAQDSAVDVRVQEGDAVGTSWRAAQTYRYEATDGCYYRDVASQGYGVVSDHADEVCAKGSPAAGRAIAGGAATELGGDAAAAAGVARLSS

SEQ ID NO: 36860 - protein, 467 aa, Oryza sativa
MEADAGKLFIGGISWDTNEDRLREYFDKYGEVVEAVIMRDRATGRARGFGFIVFADPAVAERVIMEKHMIDGRMVEAKKAVPRDDQHALSKSGGSAHGSPGPSRTKKIFVGGLASTVTEADFRKYFEQFGTITDVVVMYDHNTQRPRGFGFITYDSEDAVDKALFKTFHELNGKMVEVKRAVPKELSPGPSMRSPVGGFNYAVNRANNFLNGYTQGYNPSPVGGYGMRMDARFGLLSGGRSSYPSFGGGYGVGMNFDPGMNPAIGGSSSFNNSLQYGRQLNPYYSGNSGRYNSNVSYGGVNDSTGSVFNSLARNLWGNSGLSYSSNSASSNSFMSSANGGLGGIGNNNVNWGNPPVPAQGANAGPGYGSGNFGYGSSETNFGLGTNAYGRNAGSGVVNTFNQSTNGYGRNFGDSSGGGGGGGGGSIYGDTTWRSGSSELDGTSPFGYGLGNAASDVTAKNSAGYMGH

SEQ ID NO: 36861 - protein, 600 aa, Oryza sativa
MATFFSSSTNQRDLTGGGGDGGDMSFQHYPPPSNPYSDSSAGGLIPLPASIVSHSHIAHGGGDEPAAFREAATADGGEMGLQTQLLMAHGAAARGHQGGLSLSLGTQVPVSLYQYRPAGMAAASLLSPSQSSPMAGRSAQNSIYVQNSRFLRAARELLDEVVNVRDAIKRKGDKNQGKDSGECKGGDAAGDDKAGSNPQEQESNSAPELSPSERQDLQNKVTALMAMLDQVGRRYRHYHHQMQIVMSSFDAVAGGGAARPYTALALQTISRHFRSLRDAIGAQAQAARRGLGEQDASAQGGGGLSRLRYIDQQLRQQRAMQQFGMMQQPQHAWRPQRGLPESAVSVLRAWLFEHFLHPYPKDSEKLMLARQTGLSRGQVSNWFINARVRLWKPMIEEMYKEEFGAEMDSNSSSENGGGGGGKGKDEAISSEDRDEFQSPSSAAAARHAGVAGQLNNPFKSEAMGGAALDVGVGVVGLSSCLGGAMGTYATGLNLNHHVHHPGAGGTSLLHDALHHHHHGGGGDARFVSYGDMADLGGGGGYDGGSVSLTLGLQHCNNAGPVPAEQQGLLYGSAGDFDYINGSDDRQRFGPASQLLHDFVA

SEQ ID NO: 36862 - protein, 658 aa, Oryza sativa
MLYTSFKHHGFVTVSYYDIRAAQNAMRALHSKPLGLMKLDVQFSFPKENVPGKDIDKGMLVVSNIDSSISNDDLLQMLSVYGDVKEISSSPISCTKKFVEFYDVRAAEEALHDLNKGGISGPKFKVELSQHGEAGSCLRQQHSREWKQDSLPHQPKNSSPGTIGKLGTKCQDNSTVHNLFSPVNQQLESPTQCISTTGPQILSSPIRIKSTLQHNNQASVGDLSGPLGQGNFGRGIQTLHPRSLPEHHNRICNNSKSMTVSGRNASSRQDGVDHNIQKVGPAGFCGHSFDQNNEAFGFTEIGSCPLHGYHYTWNHTNVFPQSPSAPILWSNLQHPMHVHSYPGVPPHMLNTGSYPMDQHHLGSAPDNGGSFGNVHSFHPGSLGSIGLHGSPQLYPSELSAFASSRGNFREALFSPVGGGFQSLQQMCNAINGRNPMIHVSTSYDATNDRMRSRRHDGNPAQSENKRQFELDIDRIAKGEDSRTTLMIKNIPNKYNCKLLLAVIDENHRGTYDFIYLPIDFKNKCNVGYAFINMTDPQHIIPFYKTFNGKKWEKFNSEKVASLAYARIQGRSALIAHFQNSSLMNEDKWCRPMLFHKDGPNAGDQEPFPVGNNVRSRAGRNRSLISLDTKDASPSSSPDQESNSVGTANSTCRTTLEQT

SEQ ID NO: 36863 - protein, 760 aa, Oryza sativa
MQNHDIYAQLSGNSKVPNAKSLPSRSVGRARGRGETRFQPKGSSTEENSKEREHSIQEILKAFYIRFVRLNGILFTRTSLETFGELSATVISDLQILLSSGPYEELNFGVEAAENALSVVKLIAILIFTVHNANKDADNQSYAEIVQRRVLLQNAFAAAFEFVGYLLKRCAELHDVASSIYLPAILVFIEWLACHPDFVASSEMDEKQADARSFFWSQCVPFMNKLILTGLAHVDGDNDETCFFDMGTYEEGETGNRLALWEDVELRGFSPLVPAQGILDFSTKQGFGSDGGTKEKKARVERILAAGKALLNFVQIDQLRIYFDASSKKFLMASEPPPPASSVPLVVSSNAQTTNHIQQEPEVSSKIGSVAEDLGVLQSKAQLFLDGDDDEEIVFKPPVSEKLPRVTSEQTSNELLQPVVVSDVNWSNDGAPPPMTFQSNGPVLTPNVYVQSLPISSLGWAANAGQHVILDVGARSTSDIFESLKAPDHNWVSTGAPLVGSLDTVPMASFSNIISDQRTPPSSLGCFSNPDNTAILPGQDSFLLSALNNVNIGASGFLDQRVNGGLSGLQSVGNVPQVSAQATMNSTNPMIGQYKHTEVTIPSAFYSVLPSVVSSDGVSKKNPVSRPGRHVGPPPGFNNAPPKRQDDSILAGNGQHVQTNDGIWLDGYRSSLDYVNNQRFAHSNVTTASSTFTTPFPFPGKQAFSMHPRGSDEKQWQDFHLLGPQSNFQNLIFSKGTSKMVHWRNNYQHNLHGLAITLCD

SEQ ID NO: 36864 - protein, 64 aa, Oryza sativa
MPAHRGARRRTAAPRRRARRRAGQATFDAPREQHWAVRPLARARLVRRWFRRRAVGRLQARDGQ

SEQ ID NO: 36865 - protein, 543 aa, Oryza sativa
MDPRRSHWESSSEDVTRPLLPLHDDDGAAGRRSCAALRSLLANKYLAVASGPVACALICGLVDLGGHRAARNMLGVLAWVFLWWITDAVPLAVASMAPLFLFPVFGISSSDAVAKAYMDDVISLVLGSFILALAIEHYNIHRRLALNITSLFCGDPVKPPLLLLGICGTTMFISMWIHNTPCTVMMMPVATGILQRFPRVDGASSSASSAADAREVQRFSKAVVLGVVYASAIGGMATLTGTGVNIILVGMWSTYFPEQPPITFSSWMSFGLPLALVLFVALWATLCVLYCSKNTGRALSAYLDRSHLRRELSLLGPMAFAEKMVLAVFGGLIVLWMTRSLTDDIPGWGSLFHGEVGDGTVTIMMATLLFIIPSGKNDGEKLMDWGKCRRLQWNIILLLGAGFAIADGFRASGLTDILSEGLGFLRGAPALAIAPVACVFSGAITEFTSDDATATLVLPLLAELGKSIGVHPLLLMVPGAVGAQLSYLLPTGSPGNVVGFSTGYISIKDMVIAGTPLKIVGVAALTILLPTLGSVVFGMDQKL

SEQ ID NO: 36866 - protein, 424 aa, Oryza sativa
MAASSSSSSSAGRRLAGNLSLRPGVASIIPGLPDDVAAVILCLLTFPDQSRLRATSRAWRLLLSAATLLPLRRSLRLPRRHLLCLFPTDPSLASPILLDPAAPTAWWSLPPIPCSPQHYGLANFAAVAVGGQIYVLGGSRFDARSYPLDNPSPSAAAYRLDLALSRHRWERLPDMRVPRGSFACAPAPSGGVIVAGGGSRHPTFPSYGSRTSGVELYDAAARAWRVTAAMPRDRAGCVGFVAHGAGDGREDEFWVMGGYDGYTTVGGVVPSDVYCRDAVALGLWSGKWREIGDMWEEWERERLGPVAVISAEDGRVTEVFMLDGHDIFRYNFSSNSWSKEATLRRKIPSTQSCGLIAMNGELYVLTSAKLPVETSSPWKQSKKRLALEFQVYNPAAKMWRVLTTHPPVNVPIDFRTAALCTVEL

SEQ ID NO: 36867 - protein, 536 aa, Oryza sativa
MKVYITSAAPLAGEATKAMASPPSPPPHQHQQAATRRGCRSAVVTGLLAGVLLFRAALLTIEAGASLCPSTTGCLDWRAGLGDWLYGGSGDAMEEFMKEWRRGRREASLLDPVVVEAAPDSLDGLMAEMDTMLASYDRLDMEAVVLKIMAMLLKMDRKVKSSRIRALFNRHLASLGIPKSMHCLTLRLAEEFAVNSAARSPVPLPEHAPRLADASYLHVTIVTDNVLAAAVAVASAVRSSAEPARLVFHVVTDKKSYVPMHSWFALHPVSPAVVEVKGLHQFDWRDGGAIASVMRTIEEVQRSSMEYHQCDASVVREYRRLEASKPSTFSLLNYLKIHLPEFFPELGRVILLDDDVVVRKDLTGLWEQHLGENIIGAVGGHNPGEDGVVCIEKTLGDHLNFTDPEVSNVLESARCAWSWGVNVVNLDAWRRTNVTDTYQLWLEKNRESGFRLWKMGSLPPALIAFDGRVQAVEPRWHLRGLGWHTPDGEQLQRSAVLHFSGPRKPWLEVAFPELRELWLGHLNRSDSFLQGCGVVE

SEQ ID NO: 36868 - protein, 515 aa, Oryza sativa
MSKEEVLKIQTCVLKVNIHCDGCQKKVKKILHKIEGVYQTSIDAEQGKVTVSGLVDPATIIKKLNKAGKPAELWGSKVGVAAVNNQFQKLHLDGGGGKGQPKDGGGKGQPKDAGGKGQKGGGGGGGGGNGGGGSKDVKMMMPPQMPQPTPQQIQQLQQQLQMKGLKLPQFMDAAKMAPFAAAAPIKDPKSVKFNLPPPEDDFGDDGSEFDDESDEFDDEDDFDDDGLDDDYFDDPKMMKQMAMPPPNAGGGGDKKGGNNGGGAGNGGKKGGGGNEIPVQIKGNANNAAGGGKKDSGAKQNQGGGGKNGGGQPNNAKGGGGAPNGGGNHPAQGKKGGGGQGGGVGGPMGGMPAQQQAMMMRPNMMGGSAGFPGMGQMGGGPMTMPMGHHPHMGAGAVQGMPPAAFYQGGGGMPSGPEMLQAAAAAGNPMAQQQYMAMMQQQQQQQQQMMMNGHGHHGHHGHHGHGGGAAPAGYPAMGYGYGRPPMPYPMHYPMQPHPHADPYNYFSDENPNSCSVM

SEQ ID NO: 36869 - protein, 135 aa, Oryza sativa
MKTEANDPVEEATVEEPAVEAGTIEEIATAEARDEKTMITEETAQDPMVEDEKTMTTEETVQEPMVEDEKTVTTEETVQDPMVVDDKTMTTEKTVQDSMVEEGGTNIAAAEETVEHAAATAEALAGQASSTEQNG

SEQ ID NO: 36870 - protein, 370 aa, Oryza sativa
MAAKSLREIRRAAAAGIGSRRCFSGDAAAAAAAAAGVAEGKVGGGAGKEVNLFTAINQALHIALDTDPRSYVFGEDVGFGGVFRCTTGLADRFGRNRVFNTPLCEQGIAGFAVGLAAMGNRAIAEIQFADYIFPAFDQIVNEAAKFRYRSGNEFNCGGLTIRSPYGAVGHGGHYHSQSPEAFFCHVPGLKVIIPRSPREAKGLLLASIRDPNPVVFFEPKWLYRLAVEEVPEEDYMLPLSEAEVIRKGSDITLIGWGAQLAVLEEACEDAAKDGISCELIDLRTLIPWDKETVEASVSKTGKLLVSHEAPITGGFGAEIAASITERCFQRLEAPVARVCGLDTPFPLVYETFYMPTKNKVLDAIKATVNY

SEQ ID NO: 36871 - protein, 744 aa, Oryza sativa
MATGVAPAPLPHVRVRDGGIGFTRSVDFAKILSVPATLRVGSSRGRVLVAKSSSTGSDTMELEPSSEGSPLLVPRQKYCESIYETRRRKTRTVMVGNVPLGSDHPIRIQTMTTSDTKDVAKTVEEVMRIADKGADFVRITVQGRKEADACFEIKNTLVQKNYNIPLVADIHFAPTVALRVAECFDKIRVNPGNFADRRAQFEQLEYTEDDYQKELEHIEKVFSPLVEKCKQYGRAMRIGTNHGSLSDRIMSYYGDSPRGMVESALEFARICRKLDFHNFVFSMKASNPVIMVQAYHLLVAEMYNLGWDYPLHLGVTEAGEGEDGRMKSAIGIGTLLMDGLGDTIRVSLTEPPEEEIDPCRRLANLGTHAADLQIGVAPFEEKHRRYFDFQRRSGQLPLQKEGEEVDYRGVLHRDGSVLMSVSLDQLKAPELLYRSLAAKLVVGMPFKDLATVDSILLRELPPVEDAQARLALKRLVDISMGVLTPLSEQLTKPLPHAIALVNVDELSSGAHKLLPEGTRLAVTLRGDESYEQLDLLKGVDDITMLLHSVPYGEEKTGRVHAARRLFEYLETNGLNFPVIHHIEFPKSVNRDDLVIGAGANVGALLVDGLGDGVLLEAADQEFEFLRDTSFNLLQGCRMRNTKTEYVSCPSCGRTLFDLQEVSAQIREKTSHLPGVSIAIMGCIVNGPGEMADADFGYVGGAPGKIDLYVGKTVVQRGIAMEGATDALIQLIKDHGRWVDPPVEE

SEQ ID NO: 36872 - protein, 655 aa, Oryza sativa
MNNGFPEIIRRGNPHLMDNSAVVIMGHSVASYTMDSHGRSSSCLDHLGSSMENSSIHGKRGNNRRSGHGVSAQDDGCGLVLGLGPSPEMGSSAARRSKAPAPATLFSQRSFSFTEPGVLSLGLHRGDHGGATIQHLEEAPAGNIISFAAAVDEGSTSARRSSGGYMPSLLFAPRPNASAPEEARHDVVADHTDNTVSGGGARHGHARRRVVRQLSPEPEPEPSATMTETSFGVSSDVVTTVTNPVTTQPAAAAAQSQRRHPKKCRFKGCSKGARGASGLCIAHGGGQRCQKPGCHKGAESRTAYCKAHGGGRRCMQLGCTKSAEGKTDHCIAHGGGRRCGHQGCPKAARGKSGRCIKHGGGKRCSVEGCIRSAEGRVGLCISHGGGRRCQYPDCRKGAQGSTLYCKAHGGGKRCVFDGCLKGAEGSTPLCKAHGGGKRCMFEGGGLCPKSVHGGTSFCVAHGGGKRCTVPGCGKSARGRTDCCVKHGGGKRCRVDGCAKSAQGSTEFCKAHGGGKRCTWATGCEKFARGRSGLCAAHGTLMASQQRRAGGGGSMIGPGLFHGLVGAMNNGYSSSGVSTASEYSDACDGAARRQELIPPQVLVPNSMKSSCSSAPPPSMGRGREGGGFVVPEGRVHGGGLLSLLGGSFRNVDVDEL

SEQ ID NO: 36873 - protein, 238 aa, Oryza sativa
MLRAVARCCGHWPPGAAAADGMLWQTELRPHAAGEFSMAATQANLAMEDQAQVLASPAATLVGVYDGHGGADASRFLRSRLFPHVQRFEKEQGGMSTEVIRRAFGAAEEEFLQQVRQAWRQRPKMAAVGSCCLLGAISGDTLYVANLGDSRAVLGRRVVGGGVAVAERLTDEHNAASEEVRRELTALNPDDAQIVVHARGAWRVKGIIQVSRTIGDVYLKKQEYSMDPVFRNVGPPIP

SEQ ID NO: 36874 - protein, 405 aa, Oryza sativa
MMRFFNWFYFFVSLGALLAVTVLVYVQDNVGRRWGYGICAAGILAGLAVFLSGTRRYRFKKLVGSPLTQVAAVTAAAWSKRSLPLPSDPDMLYDVDDAAAAGHDVKGKQRMPHSKECRFLDHAAIIDRSAAESPATASKWRLCTRTDVEEVKQVVRMLPIWATTIMFWTIHAQMTTFAVAQAELMDRRLAGGFLIPAGSLTVFLIASILLTVPFYDRLVVPVARRATANPHGLTPLQRVFVGLSLSIAGMAVAAAVERHRATASASAAAAAPTVFLLMPQFLLVGAGEAFTYMGQLGFFLRECPKGVKTMSTGLFLSTCAIGFFFSTLLVTIVHKVTGHGARGGGWLADNLDDGRLDYFYWLLAVISAINLVLFTVAARGYVYKEKRLADAGIELADEETIAVGH

SEQ ID NO: 36875 - protein, 79 aa, Oryza sativa; identical to SEQ ID NO: 30991

SEQ ID NO: 36876 - protein, 601 aa, Oryza sativa
MCSGPRKPSTPPLPQQQKEATVMAASLLLELAAADDVAAVRRVVEEEKVSLGVAGLWYGPSASGVARLGMERRTAAMVAALYGSTGVLGYVVAAAPAEAARASETDGATPLHMAAAGGAANAVAATRLLLAAGASVDALSASGLRAGDLLPRATAAEKAIRLLLKSPAVSPSSSPKKSASPPSPPPPQEAKKEYPPDLTLPDLKSGLFSTDEFRMYSFKVKPCSRAYSHDWTECPFVHPGENARRRDPRRYSYSCVPCPEFRKGGSCRKGDACEYAHGVFECWLHPAQYRTRLCKDEVGCARRICFFAHKPDELRAVNPSAVSVGMQPTVSSPRSSPPNGLDMAAAAAAMMSPAWPSSPASRLKTALGARELDFDLEMLALDQYQQKLFDKVSGAPSPRASWGAAANGLATASPARAVPDYTDLLGSVDPAMLSQLHALSLKQAGDMPAYSSMADTTQMHMPTSPMVGGANTAFGLDHSMAKAIMSSRASAFAKRSQSFIDRGGRAPAARSLMSPATTGAPSILSDWGSPDGKLDWGVQGDELHKLRKSASFAFRGQSAMPVATHAAAAEPDVSWVNSLVKDGHAAGDIFAQWPEQEQMVA

SEQ ID NO: 36877 - protein, 480 aa, Oryza sativa
MVKICCIGAGYVGGPTMAVIALKCPAIEVVVVDISKPRIDAWNSEQLPIYEPGLDEVVKECRGRNLFFSTDVEKHVAEANIIFVSVNTPTKTRGLGAGKAADLTYWESAARMIADVSKSDKIVVEKSTVPVKTAEAIEKILTHNSKGINYQILSNPEFLAEGTAIEDLFKPDRVLIGGRETPEGKKAVQALKEVYAHWVPEDRIITTNLWSAELSKLAANAFLAQRISSVNAISALCEATGANVAEVAYSVGKDSRIGPKFLNASVGFGGSCFQKDILNLVYICECNGLPEVANYWKQVIKINDYQKSRFVNRVVSSMFNTVSGKKIAVLGFAFKKDTGDTRETPAIDVCHGLLGDKAQISIYDPQVTEDQIQRDLAMSKFDWDHPMHLQPTSPTAFKQVSVVWDAYEATKGAHGVCILTEWDEFKTLDYQKIFDNMQKPAFVFDGRNVVDAERLREIGFIVYSIGKPLDAWLKDMPAVA

SEQ ID NO: 36878 - protein, 552 aa, Oryza sativa
MGRSPEMEVDARSGYCAATRTFRSRRADVPLPADPEVDVVSFLASRRHSGVVALVDAATGRRITFTELWRAVAGAASALAAHPVSLRKGHVALILSPNSVHFPVAALAAMSLGAVLTTANPLNTPAEIAKQVADARPVLAFTTRELLPKLPRAHDLRVVLLESARLPGDSSDPRIVATIEEISATTPDPARRKDRVTQDDPATLLYSSGTTGPSKGVVATHRSLISMVQIIMTRFRLEGSDKTETFLCTVPMFHVYGLVAFATGLLGCGATVVVLSKYELPEMLRSINAYGVTYLPLVPPILVAMVAHPKPLPLGQMRKVLSGGAPLGKELIEGFREKYPQVEILQGYGLTESTAIGASTDSAEESRRYGTAGLLSPNTEAKIVDPDSGEALPVNRTGELWIRGPYVMKGYFKNAEATQSTLTPDGWLKTGDLCYIDEDGYLFVVDRLKELIKYKGYQVPPAELEALLLTHPEVTDVAVIPFPDREVGQFPMAYIVRKKGSNLSEREVMEFVAKQVAPYKKVRKVAFVTDIPKNASGKILRKDLIKLATSKL

SEQ ID NO: 36879 - protein, 241 aa, Oryza sativa
MQSSVNPSTESIWAQQPFEQLLGVSRAELNMKLLKLEGSGWLFEQNGGCDEKLIDQVAVAERVSQHTTENQLSADLQLHSSDEDLQPLQRNDNRDANCMSLLPKCGDDCVWQAPLIVSFGVWCIRQILNLCLVESRPELWGKYTYVLNRLQGILDPAFSKPQKPMKGCVCLQKVAKPISGTFTTAGMILEMIKDVEQAISSRKGRSGTAAGDVAFPKGKENLASVLKRYKRRLSNKTSAGQ

SEQ ID NO: 36880 - protein, 332 aa, Oryza sativa
MSQCPTHVALRLLALLFLLPAAWSATFTMTNNCGYTVWPGLLSGAGTAPLSTTGFALAHGASATVDAPASWSGRMWARTLCAEDATGKFTCATGDCGSGGIQCNGGGAAPPATLMEFTLDGSGGMDFFDVSLVDGYNLPMIIVPQGGGAAAPAGSGGGSGGKCMATGCLVDLNGACPADLRVMAASTGTGAAAPGGGPVACRSACEAFGSPQYCCSGAYGNPNTCRPSTYSQFFKNACPRAYSYAYDDSTSTFTCTAGTNYAITFCPSTTSGKYSGGENPQAAGVPSTNDTMVVLGAEQLSTASSAAAHAAPQLTLPLLPLVVVAALVAAMI

SEQ ID NO: 36881 - protein, 409 aa, Oryza sativa
MQAFLQGKPKMKDLAVETFPSQVDAEKMNASENNMNYVDDGGNVLSSKLEDITESDWTRLENYASTGEKVEVELINCSSKGFVVSLHSLIGFLPYRNLATKWKFLAFETWLRQKGGDPSLFKQSVGIEESFEVNDRNIESVSSSDSELAVQDQGSMPSKEKFEDLLRTYNTEKSKFLSSFIGQRLRVSVALADRKSKKIFFSMKPKESEELIQKKKSLMAKLNVGDIVECTIKRFVYFGIFVEVEGVPASIQQWEVSWDETLDPSVSYKIGQVVDAKVIQLDYNNNRIFLSLKDVKPNPSVGALEAVIGEELSLGGALEPAEADFEWPEVDALMEEMKNIEEVRDVYKGRFLRSPGLAPTFQVYMAPLVGQKYKLLARYGNNVQEVMVETSLDKEQLKEAVLACTNRVS

SEQ ID NO: 36882 - protein, 520 aa, Oryza sativa
MATDTSWLLLLVALVLPLVVLLARRRRSGGGSRRIPPGPLAVPVLGSLLWLRHSSANLEPLLQRLIARYGPVVSLRVGSRLSIFVADRRVAHAALVERGAALADRPDVTRSLLGETGNTITRSSYGPVWRVLRRNLVAETLHPSRVRLFAPARSWVRRVLVDKLADGARPESEPPRPRVVVETFRYAMFCLLVLMCFGERLDEAAVRAIGAAQRDWLLYVARKTSVFAFYPAVTKHIFRRRLQIGLALRRQQKELFVPLIDARRARKNHIQQAGGPPVPEKETTFEHSYVDTLLDVSLPDTDGDSALTEDELVMLCSEFLNAGTDTTATALQWIMAELVKNPSIQSKLHDEIKSKTSDDEITEEDTHDMPYLKAVILEGLRKHPPAHFVLPHKAAEDVEVGGYLIPKGATVNFMVAEMGRDEREWEKPMEFIPERFLAGGDGEGVDVTGSREVRMMPFGVGRRICAGLGVAMLHLEYFVANLVKEFEWKEVAGDEVDLTEKNEFTTVMAKPLRAQLVKRA

SEQ ID NO: 36883 - protein, 232 aa, Oryza sativa
MAAAVAELWETLKQAIVAYTGLSPAAFFTAVAAAAALYHVVSGIFAGPPPPPPPRPRDEPEAEPLPPPVQLGEVSEEELRQYDGSDPKKPLLMAIKGQIYDVTQSRMFYGPGGPYALFAGKDASRALAKMSFEPQDLTGDISGLGPFELDALQDWEYKFMGKYVKVGTVKKTVPVEDGAPSTSPETTETAAAAEPEKAPATEEKPREVSSEEVKEKEDAVAAAAPDEGAKES

SEQ ID NO: 36884 - protein, 336 aa, Oryza sativa
MGGDWQELAQAAVIGLLFAFLVAKLISTVIAFKEDNLRITRSTPTSPSAADTPAAPAPPPASLDGGHGDTSDGSGSDSDSDWEGVESTELDEEFSAASAFVAASAASGTSVPEQAQLQLYGLYKIATEGPCTAPQPSALKLKARAKWNAWHKLGAMPTEEAMQKYITVVDELFPNWSMGSSTKRKDEDTTVSASSSKGPMGPVFSSLMYEEEDQGNDSELGDIHVSAREGAIDDIAKHLAAGVEVNMRDSEGRTPLHWAVDRGHLNSVEILVNANADVNAQDNEGQTALHYAVLCEREDIAELLVKHHADVQIKDEDGNTVRELCPSSWSFMNLAN

SEQ ID NO: 36885 - protein, 277 aa, Oryza sativa
MLNESMGEGDAAYAKRVLLTAAGDDVSRGIASTLATHGCRLVLVGDEGALAGTAEEARRGGGGGDAVAVVGLDLHGCDEAAVDAAVGTAWRCFDGLDAMVNCYSYEGEVQDCLNISEDEFKKTMKANVMTPWFLVKAIAKRLRDSESSCGGSVVFLTQIIGAERGLYPGAAAYGTSLGAIHQLVRLSAMELGKHKMRVNAVCRGLHLGDRFPVWVGKEKAEKATGEVMPLRRWLDPEKDVASTVLYLVGDESRYMTGSTIFVDGAQSIVRPRMRSFM

SEQ ID NO: 36886 - protein, 401 aa, Oryza sativa
MAAARLWVVAVAVAVAVAVMAAAVEGKSYNITKILAAHPEFSKFNEMLSKTRLAYDINRRQTITVLAVDNSAMASLDHFTLPTIRHILSLHILVDYYGSKKLHALSHGATASSSMFQATGSAPGTTGYVNITSHKGGKIDFISEDADEGAKPSRYVKSVKEIPYDISVLQVSSVLSSSEAEAPVPPPAPVNLTELLSKKYCKSFAGLLAANADVFRAVNETKDNGLTLFCPVDAAVAAFMPSYKNLTAKAKTAILLYHAVPDYFSLQLLKSNNGMVTTLATASESKKDYSYDVQNKGETVTLDTRVVNSAVTATVGDAEPLAVYAVTKFLKPKELYKVVEAPAPAPEPSKKHKSAADDSSDDSSDDSGDVKAHKGAAAPAPLARWVTAAAAAAVAALMLMA

SEQ ID NO: 36887 - protein, 290 aa, Oryza sativa; identical to SEQ ID NO: 32176

SEQ ID NO: 36888 - protein, 266 aa, Oryza sativa; identical to SEQ ID NO: 31013

SEQ ID NO: 36889 - protein, 119 aa, Oryza sativa
MATTASLLPPLLPAPSSSPRHLHPSPRHLRPLPPIRLLRAARRRHPDAVVVVPDARPWVGDLSGAAASYRDGREEDDDDAGEEDDENDDDDEDRSLDLLVRFLHSVFRKVSRRARRAAR

SEQ ID NO: 36890 - protein, 214 aa, Oryza sativa
MMAAAAAAAATSCTGCSCWRRSRRRRRRRRRSGPPLAPTPRMNRMMVRRRWRARRRRRRWRPRRVGGRRRRSAAAAAVARSPASTPSTTRSQSSKHCFFDRIGQLASCISRANGGWVQEGAVQLLLRQVEVVRQPAGRGRRRRNHGEPRQAGEPIQQAPPHPPLLLHPPRLLHLPHRAPALPAAAPPSTAARRRRRRRRQWLRTTTRRRRRRMK

SEQ ID NO: 36891 - protein, 499 aa, Oryza sativa; identical to SEQ ID NO: 36759

SEQ ID NO: 36892 - protein, 497 aa, Oryza sativa
MGSLPAAAEARPHAVMVPYPAQGHVTPMLTLAKLLYSRGFHVTFVNNEFNHRRLLRARGARALDGAPGFRFAAMDDGLPPSDADATQDVPALCHSVRTTWLPRFMSLLAKLDNEAAAAAAADGAARRVTCVVADSNMAFGIHAARELGLRCATLWTASACGFMGYYHYKHLLDRGLFPLKSEADLSNGHLDTTVDWIPGMTGDLRLRDLPSFVRSTDRDDIMFNFFVHVTASMSLAEAVIINTFDELDAPSSPLMGAMAALLPPIYTVGPLHLAARSNVPADSPVAGVGSNLWKEQGEALRWLDGRPPRSVVYVNFGSITVMSAEHLAEFAWGLAGSGYAFLWNLRPDLVKGDGGAAPALPPEFAAATRERSMLTTWCPQAEVLEHEAVGVFLTHSGWNSTLESIAGGVPMVCWPFFAEQQTNCRYKRTEWGIGAEIPDDVRRGEVEALIREAMDGEKGREMRRRVAELRESAVAAAKPGGRSVHNIDRLIDEVLMA

SEQ ID NO: 36893 - protein, 475 aa, Oryza sativa; identical to SEQ ID NO: 32416

SEQ ID NO: 36894 - protein, 496 aa, Oryza sativa
MATLAPALVLLPEWGSGHLMSMLESCKRVLLAGAGGGREFSITLLVMRPPTDEAGSEVEAHVRREAASGLDIRFHRLPAVDPPADAAGVEEFIARYIHLHAPHVRDAVAGMGRPVAALVLDMFAAPMVDVARDLGVPSYVFMSSTGAMLALMLHLPVLHDRVAVEFHEVDGEVDVPGLPPLPPASMPCPVVDKKSPNYTWFVRLGDRFMDATGIIANTADELEPGPLAAIADGRCVPGRAAPPVYPIGPVLSLGGNDKRDSSEPPHECIAWLDGQPPASVVFLCFGSMGWFEAAQVVEITAALERSGHRFLWVLRGPPPAAESGTGAPDGSEHPTDANLDELLPEGFLERTKGRGMVWPTWAPQKEILAHPAIGGFVTHGGWNSVLESLWHGVPMAPWPLYAEQHLNAFELVRDMGVAVPLGVDRERDNFVEAAELERAVRSLMDDASEEGKKAREKAAEMKAVCRSAVAAGGGSSHAALQRLSEALHQGAALPKN

SEQ ID NO: 36895 - protein, 457 aa, Oryza sativa
MKAFTPWAVAALALLVPHSATSCSDFLLNASSPSTVISARTMDFEADLKTVVEVIPRGTTFQELPVLGCVECADLEWQSKYGFVAFQMFGVNAAADGLNERGLSAAWLVLGETQYPTPQNSESNDTNPAKPIVTSVCSYLLGNFATVDEVRAGLQTFDVAEFDERIQVPLLHSTALGRMPLHVSVHDAQGKSLVIEFIKGKTNVYDNLNAVLTNDPPLDEQLKTLEVNGFNSFPGGYGSVERFLRVSVLNHHAPSGYSNAVEGVSSYTVATEEQRGVSDALHILNTVVRPPLSEATEWNVVRDHARRKLYIQSTQNMVLRQIDLTQLDFGNASSRHLIPVTFGDWFVDVTPALKDSENHAKTIDLPPRTELEKLLQQLLHGGGGGAAGDVPPPSTVQLEATREPGAAALPPSGFWSGLASGVSLAVVGMTLFNVITSAHRRRMYQPIADPQEVRYTA

SEQ ID NO: 36896 - protein, 247 aa, Oryza sativa
MATTAATTMVAAVHHPRPCFRVRAAWDMNPSASPKPKAKPPPPPPPPLPTAPAPTHADLFARHSNSEGQVPKKTTSMGFERWWLPPPPEVKKPRSLYNAASLAYLGDCIYELYARRHFFFPPLSINDYNKRVMDVVKCESQDLLLNKLLGEDFLTQEERDILRWGRNIVSSKTRTRKRAGIAVYNRASSLETLIGYLYLTNFKRLEQLMFQLGFTSGASSHHIADELVSGFKKKNSTSVQSQQQAAQ

SEQ ID NO: 36897 - protein, 168 aa, Oryza sativa
MAGPGPLTEIEPDLNEDPIDKWRTNGVSPDDFEYGVYDGHHTYNETQDKKGFWEDVSEWYQEAEPPQGFQALISWLFPPAIILGMAFNVPGEYLYIGAAVFVVVFCVIEMDKPDKPHNFEPEIYMMERSARDKLIADYNTMDIWDFNEKYGELWDFTVDRRDEIVKSS

SEQ ID NO: 36898 - protein, 335 aa, Oryza sativa
MSSSSSSPAPPHVVEDCLGIVQLLSDGTVTRSGDYSSISLMRDVPIDLPVQWKDVVYDAGRGLRLRMYAPANHGGEEGKLPVLVYFHGGGFCIASFELPNFHAGALRLAGELPAVVLSADYRLAPEHRLPAAYEDAVAVLSWLRGQAAAAADPWLAASADFERVFVCGDSCGGNIAHHLTVGCGSGDIALDAARLAGCVMLWPYFGGEERMPSEAPPPPPEGDASPSAMGITLFDQMWRLALPAGATRDHPAANPFGPESPPLDGVAFPPVLIVDPELDVLRDRVADYAARLQAMGKRVELVKFEGQGHGFFVLDPMSEASGELVRVVRRFVHAG

SEQ ID NO: 36899 - protein, 378 aa, Oryza sativa
MNHLRNQILLLRVRSSSTSLSPLSPLHRLFSSSTAAASIAAEPFAVEDYLVTTCGLTGDQARKAAKTLSRLRSPSKPDAAVAFLSGLGLSRSGIAAAVAADPRLLCADVEKNLAKRVAELGELGISRSQIARLIPLARQSFRSSSLATNLGFWLPVLGSFENVLMALKANGAILGSDVEKVVKPNLALLQQCGIHVCDFPHTRLPTVLCRPPNHVQEAVARIGEFGVPQYSPVFRNALVPFAYQNKEKLAAKIGVLEMFGWSEDDLSMTMRKGPVVMNMSVERLRKNVEFLTRDVKLETRYIARRPIMISYSLERRLLPRHRLLRFLSAKGLLDGELDFYSAVALTEKKFLDKFVHSCKCSIADPANAYASSFVGDVL

SEQ ID NO: 36900 - protein, 486 aa, Oryza sativa
MVRDAKWLGYTGVEATAAAMKAGLDLDCGMFWEGVHDFFTTYGVDAVRQGKLKESAVDNALTNLYLTLMRLGFFDGIPELESLGAADVCTEEHKELAADAARQGMVLLKNDAALLPLSPEKVNSVALFGQLQHINATDVMLGDYRGKPCRVVTPYDGVRKVVSSTSVHACDKGSCDTAAAAAKTVDATIVVAGLNMSVERESNDREDLLLPWSQASWINAVAEASPSPIVLVIMSAGGVDVSFAQDNPKIGAVVWAGYPGEEGGTAIADVLFGKYNPGGRLPLTWYKNEYVSKIPMTSMALRPDAEHGYPGRTYKFYGGADVLYPFGHGLSYTNFTYASATAAAPVTVKVGAWEYCKQLTYKAGVSSPPACPAVNVASHACQEEVSFAVTVANTGGRDGTHVVPMYTAPPAEVDGAPRKQLVAFRRVRVATGAAVEVAFALNVCKAFAIVEETAYTVVPSGVSRVLVGDDALSLSFPVQIDLQAAA

SEQ ID NO: 36901 - protein, 435 aa, Oryza sativa
MPFLDKINKLDGNFIYASRTILLLKDDGTLKPLAIELSLPHPDGQQHGAVSKVYTPANTGVESQIWQLAKAYASVNDSAWHQLISHWLNTHAVIEPFVIATNRQLSVVHPVHKLLSPHYRDTMNINALARQTLINADGIFEKTVFPGKYALEMSSVVYKNWKFTEQALPVDLVKRGVAVPDPTSPYNVRLLIKDYPYAVDGLVIWWAIERWVGEYLAIYYPNDGVLRGDEELQAWWKEVREVGHGDLKDQDWWPKMDTVQELTRACTIIIWIASALHAAVNFGQYPYAGFLPNRPTVSRRPMPEPGTEEYAKLERGGDEADLVFIHTITSQFQTILGISLIEILSKHSSDEVYLGQRDTPEWTSDAKALDAFKRFGSRLVDIENRIKDMNGNSALKNRNGPVKMPYMLLYPNTSDVTKEKGQGLTAMGIPNSISI

SEQ ID NO: 36902 - protein, 320 aa, Oryza sativa
MASSTAADGDDEVVREFGPILRAYKSGRLERPLVAPPVGPGHDAATGVHSRDVHLGDYSARLYLPPPAAAAERLPVVVYVHGGGFVAESAASPSYHLFLNRLAAACPALCVSVDYRLAPEHPLPAGYDDCLAALRWVLSAADPWVAARGDLDRVFPAGDSAGGNICHHLAMHHHHDAPPRRRLRGAVLIHPWFWGSEAVGEEAPDPEGRARGAGLWVYACPGTTGMDDPRMNPMAPGAPPLGRMACDRVMVCAAEGDFLRWRAHAYAAAVAAAKGGAAVEVLETAGAGHVFHLFDPDGDKAKELLDRMVTFVNGAGADAA

SEQ ID NO: 36903 - protein, 392 aa, Oryza sativa
MRPLYLRSSGSFKKLLLSISHRGAKNGNGDAAAKERYTPAAAAAAPESPRKPAWRCFSYEEIHRATNAFHEGNLVGKGGSSEVYRGELPDGRAVAVKRLMGAWACERRERDFLAELGTVGHARHPNVCALLGCCVDRDLYLVFHFSGRGSVSANLHDEKKAPAMGWAVRRAIAVGTARGLEYLHKGCQRRIIHRDIKASNVLLTDDFQPQISDFGLAKWLPSEWTHRAIAPIEGTFGCLAPEYYTHGIVDEKTDVFAFGVFLLEIMTGRKPVDGSHKSLLSWARPFLNEGRIESLVDPRIGGDYDGEEARRLAFVASLCIRSSAKWRPSMTEVLELLEGVEIRQERWTMPEAVEDDDDEELWRFDDLDDEDDEDEEEFNTASPSSCSSSLSN

SEQ ID NO: 36904 - protein, 348 aa, Oryza sativa; identical to SEQ ID NO: 30998

SEQ ID NO: 36905 - protein, 353 aa, Oryza sativa
MAAASTGNNGSPPVALLVLMAAAMVAGWFVNAVRPPPPTPCGAEGGPPVTAARVRVRDGRFLAYAESGVRREAARFKVVYSHGFSGGRMDSPRASQALLKELGVYMVAFDRAGYGESDPDPRRSLRSAAMDIQDLADALQLGPKFHLICSSLGCHAAWASFKYIPHRLAGAAMMAPVINYRWPGLPRGLARQLYRRQPVGDQWSLRVAYYAPWLLHWWMNQTWLPTSTVISGSGSFPNALDEKNRLMALSTGLFQKKARMATQQGVQDSFYRDMAVMFGRWPEFEPAELEKPPFPVHLFQGDEDGVVPVQLQRHICRRLGWISYHELAGVGHFLSAVPGLGDRIVTTLLPAAA

SEQ ID NO: 36906 - protein, 167 aa, Oryza sativa
MREEATTPLARSGWRWLRLPTAAMTAVAAVAASTAAAGWRGSGRGGRGVVEAVARPRGWRGLPCRCRGGRRRVAVVEASVVRQREGVMETGGGVESRSATWSSRAATAGAGGCRLRQRTACGDGRGDRGRGCGGGGEDGDGEVAGRSAAAAAVAETTVTGGMAASDG

SEQ ID NO: 36907 - protein, 323 aa, Oryza sativa; identical to SEQ ID NO: 29278

SEQ ID NO: 36908 - protein, 275 aa, Oryza sativa; identical to SEQ ID NO: 30585

SEQ ID NO: 36909 - protein, 432 aa, Oryza sativa
MTGAVSKLAAPRPAAAAPLPPASVRSAFLASAPSPRRFSVSIAAGRARSPIIAMASAKEGNGAPTKRTTLHDLYDLQGQSPWYDNLCRPVTDLLPLIGSGVRGVTSNPSIFQKAISTSNAYDDQFKQLILAGKDAESAYWELVIKDIQDACKLFEPIYDQTDGADGYVSVEVSPRLANDTQGTVEAAKWLHKVVDRPNVYIKIPATAECVPSIKEVIANGISVNVTLIFSIARYEAVIDAYIDGLEASGLSDLSRVTSVASFFVSRVDTLIDKMLEKIGTPEALALRGKAAVAQAKLANQLYQKKFSGPRWEALVKKGAKKQRLLWASTSVKNPAYPDTLYVDPLIGPDTVSTMPDQALLAFIDHGTVSRTIDANVSDAEGVYSALEKLGIDWDEVGKQLELEGVDSFKKAFDSLLGSLEEKGNSLKKTVSL

SEQ ID NO: 36910 - protein, 394 aa, Oryza sativa; identical to SEQ ID NO: 32424

SEQ ID NO: 36911 - protein, 361 aa, Oryza sativa
MTVIDGAVAADAGGAAAAVVQPGNGQTVCVTGAAGYIASWLVKLLLEKGYTVKGTVRNPDDPKNAHLKALDGAGERLVLCKADLLDYDAICRAVAGCHGVFHTASPVTDDPEQMVEPAVRGTEYVINAAAEAGTVRRVVFTSSIGAVTMDPNRGPDVVVDESCWSDLDYCKETRNWYCYGKAVAEQAAWEAARRRGVELVVVNPVLVIGPLLQPTVNASVAHILKYLDGSASKFANAVQAYVDVRDVAAAHLLVFESPSAAGRFLCAESVLHREGVVRILAKLFPEYPVPTRCSDEKNPRKQPYKMSNQKLRDLGLEFRPASQSLYETVKCLQEKGHLPVLAAEKTEEEAGEVQGGIAIRA

SEQ ID NO: 36912 - protein, 376 aa, Oryza sativa
MRGRAAVFAAVLVVFLVACTAAAAAAAITISRKHQHRPASGAAAKAACDVFAAGSWVVDESYPLYDSATCPFIRAEFDCRRYGRPDKEYLKYRWQPSPPCSTPRFDGVALLRMWSGKKVMFVGDSLALNQYESLLCMLHAAAPNARTTVTPASGKVDPLTTARFEEFNVTIVYYLTHYLVDIVNEKAGRVLKLDAIDQARNWLSADVLVFDSWHWWPRSGPTQPWDYIQEGNTVVKDMDRTEAFSKALNTWARWVDANLLQTNTRVFFQGISPSHYRGQDWGDTASATCMGQTRPVNGTAYPGGPIPQQAVLRSALAGMAKPVYLLDFTYLSQLRKDAHPTKYNGGIFGDDCTHWCVAGLPDTWNVLFYAALTGQH

SEQ ID NO: 36913 - protein, 441 aa, Oryza sativa
MHRLVPRAAASFLGAPPLLTTQAGPLLAARSGPPNPSRLRLRLSPWRLLRSRRGLSCSADAAKRCGDDDAEEDGEQSVAGGGGSRPVVDRRQRSRGDAAMGSGELLAIPGVGPRNLRKLVDKGFDGVAQLKQLYRDKFFGKSNEKMVEFLQSSVGIIHKNHAESITLFIKESVGEELKGTDSPNVSKNKRLTFCVEGNISVGKTTFLQRIANETIELRDLVEIVPEPIAKWQDVGPDHFNILDAFYAEPQRYAYTFQNYVFVNLRASPDTCHKRMMVRKRSEEGGVTLDYLRGLHEKHESWLLPSKGQGPGVLSVSQVPVHMEGSLPPDIRERVFYLEGDHMHSSIQKVPALVLDCEHDIDFNKDIEAKRQYARQVAEFFEFVKKKKEDPSAESSGGDKSTNKQIMLPHRGGLWVPEGNPLPGSALNSLDFRRAMSSFLSA

SEQ ID NO: 36914 - protein, 336 aa, Oryza sativa
MSSCTMASLICSQIKLSKAHIRNRRQIHENGQIRLPKSLYWKPLHSGHFENIVLRCTQNLSWEASLPYASAEDGANIIKGTEVVEPIDTEEAPEIPILQSDQDFVEVIKEPSMQLTTFKLPIWLLGPSILLVTSIVPTLWLPLSSVFLGPNIAGLLSLVGLDFIFNMGAMLFFLMADACGRPEANSSELIKQIPTSYRFWNLAASIVGFLVPLALFFASHKGTLQPHIPFIPFAVLLGPYLLLLSVQVLTEMLTWHWKSPVWLVAPVVYEGYRVLQLMRGLQLADEITAPGWMVQSLRGLVSWWVLVLGIQLMRVAWFAGLKFASTSRYGASDDNK

SEQ ID NO: 36915 - protein, 419 aa, Oryza sativa
MPPRNGNLVLAAAAAALLVLLASPPSCSAAAPRRRDPVVVPVTRDPATSLYTIPVRYYDNLVVDLAGPLVWSTCAADHLPASLSCQDPTCVVANAYRAPTCKVTGGGGDCSKNVCTAYPYNPVTGQCAAGNLAHTRFIANTTDGKNPLIQVSVKAVAACAPKRLLARLPRGATGVAGLAASGLALPAQVASSQGVAGRFLLCLPRLGYGQGVAIFGGGPIYLGEGLPDFTTTLDYTPLVAKRDNPGYYVTANAIALDDARLPLPSGALAAGGVALRTAVPFGQLRPDVFRPFVREFEKGLNRSDAKVAAVAPFPLCYRASMLGNTRIGYFVPAVRLMLAGGKNYTMTGTNSMVDVKGGKACLAFVEMKSGDAASSPAVILGGFQMENMLLQFDSEKKRLGFARLPFYTSCSNFNFTKTQ

SEQ ID NO: 36916 - protein, 446 aa, Oryza sativa
MELQKKERARAAEEHKRHIAEYRAFLESCEFIKTSTQWRKVQERLEDDERCSRLEKIDRLEIFQEYIRDLEKEEEEHKRIHKEQVRRQERKNRDEFRKMLEEHVAEGMLTARTRWRDYCAQVKDSSVYLAVASNISGSMPKDLFEDVMEELEKQYQDDKARIKEAVKSGKIPMTTSWTLEDFETAVTEDDTLKGITNINMKLIFDDQVERLREKEVKEAKKRQRLGENFSDLLYSIKEISASSTWDDSKALFEDSQEYKALDSETYSRELFEECVVHLKERLKEKERLREEEKARKEKEREEKERRKEKEKKEKERKEKERDKEKEREKDKGKDRSRKDEMDIDAVDADSHGSKDKKREKDKEKKHKRHHHDTADDVSSERDEKDDSKKSRRHSSDRKKSRKHTHASDSDSENRHKRHKKDRDSSRRNGTRDDLEDGELGEDGEIH

SEQ ID NO: 36917 - protein, 349 aa, Oryza sativa
MLLLVDCRDKLEEKESEETYHGHYTYGDLGEKCFGTIGRCLTEILILVSQAGGSVAYLIFIGQNLHSVFSQLMSPAAFIFAILLPMQIALSFIRSLSSLSPFSIFADVCNVLAMAIVIKEDLQLFDHPFANRSAFNGLWAIPFTFGVAVFCFEGFSMTLALESSMAERRKFRWVLSQAVVGIIIVYACFGVCGYLAYGEATKDIITLNLPNSWSSAAVKVGLCIALVFTFPVMMHPIHEIVEERFQSSGCFPKLSHKVRGAEWVGLHSSRIVMVTILSVVASFIPAFGSFISFVGSTVCALLSFVLPTIFHLSIVGSSMSPWRRWGDYGFLLFGLGFAGYGLIRALFSH

SEQ ID NO: 36918 - protein, 485 aa, Oryza sativa
MTDKILLELDNIRILLQATVELDKVAARAKYSIAYDGTYPDLYLPNFVNGTVSTATGGSISTISSAHLSKKAWKLCMPNAYHPLLLQQHQENLHRAKKDVASATAEIRRRRIYGQDNVEEDQLASDLDLMKIRVSQMEKDRPVPVDFFIAEGTTVLVITGPNTGGKTISLKTVGLASLMAKIGLYILASEPVKIPWFNAVYADIGDEQSLTQSLSTFSGHLKQIGAIRAWSTSQSLVLLDEVGAGTNPLEGAALGMSLLESFAEAGSFLTLATTHHGELKTLKYSNDLFENACMEFDEDNLKPTFRILWGIPGRSNAINIAERLGLPSDIIESSRQLLGTAGAEINALIMDMENFKQQYQHHLQEAQYYVMQSKELHNNLEVAQKNIIDHTSAQRKRKARVISEYAVMARSIIRKKFQQFRESAIAKRVLEEEKAVQNDKPERLKDPEPTSTPAVKKAQNTNISMATTTEGEDNGIPEVGDLLCS

SEQ ID NO: 36919 - protein, 274 aa, Oryza sativa
MAAATSTMSLLPPITQQQRWHAADSLVVLASRCHNSRRRRRCRYVVPRARLFGPAIFEASKLKVLFLGVDEEKHQHPGKLPRTYTLTHSDVTARLTLAVSHTINRAQLQGWYNKLQRDEVVAEWKKVQGHMSLHVHCHISGGHVLLDLIAGLRYYIFRKELPVVLKAFVHGDGNLFSRHPELEEATVWVYFHSNLPRFNRVECWGPLRDAGAPPEEDDAVAAAAAEEAAAEQMPAAGEWPRRCPGQCDCCFPPYSLIPWPHQHDVAAADGQPQQ

SEQ ID NO: 36920 - protein, 380 aa, Oryza sativa
MVAKIKRQIGGLSLLAKLGLLLLALLLLLAAILLLVFLLPRHHRRPLPPGSPPVNASDPDNIVAFDFSPFLILYKSGRVHRMDGTDRVPAGVDEATGVTSKDVVIDRSTGVGARMYLPPAKGAGKKDLAGALPVLVFFHGGAFVIESAFTAKYHDYLNKVTAKARVVAVSVDYRLAPEHPVPTAYDDSWQALNWVAKNGRSGPEPWLRDRGNMSRLFLAGDSAGANITHNMAMRAGKDGGQLEGGVAITGILLLDPYFWGKNPVGAETTDPARRRQYEATWSFICDGKYGIDDPLVDPLSMPAPEWRKLACSRVAVTVSDLDDFKERGKAYAAALRDSGWGGEVEEYETAGEVHVYFLDKPSSPKSAKGLTFVAGYLSHE

SEQ ID NO: 36921 - protein, 311 aa, Oryza sativa
MASSSALASSPFLPPLSTPNPRALSLRLPARRLPVASSAAPSGAAAAASARERRRFLERYGLNPDDFEDDAEAEPREERRRDRRNRRSGRGEAEDAPAKAAAEPRETHKMLQVLGGKVRRRKLLSPKDRNVRPMMEVVRGAAFDILQSAGGFPASLRPGRWLDLYSGTGSVGIEAMSRGCSEAHFVEMDPWVVSEVLKPNLECTGFLDVSHIHMIRVENFLANAEKSSGKYPSFDYISVTPPYLEVNYSTLLDQLARSPLVGEDCFILVEYPLKTDMAESCGSLIKVADRRFGRTNLLIYGPTWAEKKRRS

SEQ ID NO: 36922 - protein, 128 aa, Oryza sativa
MAATATAVAASLSVAGGLGRPLARVSSPAAPMKAASPAAARRAVVVRASSSGEPVRREKASAAAAAAGIAAVAAVAAALAVPEVAEAAPALSPSLKNFLLSIASGGVVLVAIVGAVVAVSNFDPVKRT

SEQ ID NO: 36923 - protein, 113 aa, Oryza sativa; identical to SEQ ID NO: 33968

SEQ ID NO: 36924 - protein, 231 aa, Oryza sativa
MEGGRGVTRVLLVDDSPVDRRVVQLLLSSSACAGSFHVIAVDSAKKAMEFLGLKEEGKEQAIDMVLTDYCMPEMTGYELLKAIKALSPLKPIPVIVMSSENEPQRISRCMNAGAEDFIVKPLQSKDVQRLRNCSPANTQCCDAGSDGKPPLLLLPSDHVVVDATAASPPPPPSRRRAHFAGVAMVLHSSSVELSHYFPFLFKFILLVYAILCLGELLHRWSNGCFLNLWCA

SEQ ID NO: 36925 - protein, 103 aa, Oryza sativa; identical to SEQ ID NO: 29037

SEQ ID NO: 36926 - protein, 311 aa, Oryza sativa
MGGGGGVEADCDRIRGPWSPEEDEALRRLVERHGARNWTAIGREIPGRSGKSCRLRWCNQLSPQVERRPFTAEEDATILRAHARLGNRWAAIARLLQGRTDNAVKNHWNCSLKRKLAVATTTTTTTTGAAAAPGVVADAAELVERPCKRFSPTPDSPSGSGSGSDRSDLSHGGGFGQIFRPVARTGAFEPVDCAISRRQEEDPFTSLSLSLPGTDQRFNHDSAHSHFQELPSSPSPPPPPPPAAAASTTQYPFTPEFAAAMQEMIRAEVHKYMASVGVRAGCGDAGGADLHMPQLVEGVMRAAAERVGRMH

SEQ ID NO: 36927 - protein, 339 aa, Oryza sativa
MPNLECRMYEPRFPEVDAAVMIQVKHIADMGAYVSLLEYNNIEGMILFSELSRRRIRSISSLIKVGRQEPAIVLRVDRDKGYIDLSKRRVSEEEAHACEDRYNKSKLVHSIMRHVAETLGIDLEPLYQRIGWPLYRKYGHAFEAFKLIVADPDAILDSLTYEEKETGADGQEVTKVVPAVTPEVKDALVKNIRRRMTPQPLKIRADVEMKCFQFDGVLHIKQAMRKAEAAGNDNCPVKIKLVAPPLYVLTTQTLDKDQGISVLTDAIKACTAEIEKRKGKLIVKEAPRAVSEREDKLFNEHIETLNEQNAEVDGDADSEEEEDTGMGDIDLTNSGVNAD

SEQ ID NO: 36928 - protein, 330 aa, Oryza sativa
MMLNQVNLSLTEPLFGHPSSVELLRFPGGITVIPEQSGSVWADPLFNFVLNNSIYQILGNITELKDQLKLGLNLRSYEKVYLQFRNEIGSSVDAPATIEASVLDGSSILLPYRLKQLAQLIKEPNARNLGLNHSVFGKVKGVQLSSYLQHSISDLSPSPSPSPSPSPSPSPSPSPFPSSSVPPSFSPSGSIHYPAPPTYMNPSLPPQASPPLPDTNPCFPCFNCDRFSSAGSPTGKPPCFRRDPKLPPFIHSPQPSVAPSPYLSPAFPPIPGHVDPPNHLPGAVPGPTYQMMSIPSPSLPVFRPSMAPWKKRRKTKSPPSIAPSPYSLHS

SEQ ID NO: 36929 - protein, 109 aa, Oryza sativa
MGIRRRSERLLRAMACCRIVLVFFFFFFFFCVCVLVATTTTMDAVKGTSAAAAGGGGGGRWTELTAGSPARYSAGADEFRGSKRRIPKGPDPIHNRRAGKTTVAPRRRD

SEQ ID NO: 36930 - protein, 420 aa, Oryza sativa
MARHPLPRRGPRGLGRARQLRAAVAQAGRQGQGQPSGHPRPEHGRARRRPGRPGALERAGVPLHRRRRGGGVPGEPRRGRGGGAGVRQGPGDRAQHPGRVHPRDPARPRLHLRREPVLPGELVRVARRQGRRGERGGDQRAAPGPEGALPQDREQDRRRRAVRRVRGGADVAGGRAGERLRAGHPGLAAAHHGDDVQGRGRRHPGQGDPRRPHRLPQLLLPRQPRAPPRPRRVQLRANGAPRPRHRLHEGAERPPLHDLRPRQDDDSGRRVHHRGVGEHQPEVDGRRAGHGDRDGRVPAEPPGVGEPAGEGPGARLPPRAVARAPGQGGCGVGRRRTPPAVEPGEREAREPGGAAPLGRVRERRRRRRAADGRPPGPPDGVPGALDGLRRQRRQRRQRRQARRGDGDVPGHQGEGAGCQV

SEQ ID NO: 36931 - protein, 551 aa, Oryza sativa
MEEDQGGKPPAPDAGGGGGGGESKKGSPCEECGEQPWKYRCPGCSRLTCSLPCVQSHKRRTACTGKRPRTDPVPLANFDDHQLLSDYSFLEETKQVAESAHRLIGAFGRNYGGFGGAQLPKWLFYLRKAAQRRGIWLQFLPRGMARREQNRSRHNHRKDCIYWTLEWKFNSTDVVLTDHNIDEHTSLLSSLEKHLSPGPWKNQLTPYRNTDLRDLKLFIQKSAKESTSPYRQLNIEEPLGPQLRSIKIVEYPTINVFLPSDSCDFEVEKFVNKLPASEKPPGSSTDSPDLEGTEFHEEEIEEGELAPETQVIDLKECGASHASNLASAKDTSGSKVDTKRDSSVLSYIRSLGLDGQQKALTERSKMAPNTTSGASKTKNCMKVYPMDMEESGDAGVISERQGIECKNQAASHPGNLTPVEGTTVSKIDSNTDSLVPSSISILASDGFSCPQVEHNQQSRLTPNSTPEALKRKSCMKVYPLDTEKNLGLFSEVPNLGFEQEIGNAYSDLFGDINPDDFLNFDLEMMDEDELAGITSPLKLWDDLEEGEIPTA

SEQ ID NO: 36932 - protein, 393 aa, Oryza sativa
MAYIMDTNEEERLKGKTVEVGRAHFETETTRFTILDAPGHKSYVPNMISGASQADIGVLVISARKGEFETGYEKGGQTREHVLLAKTLGVAKLIVVINKMDEPTVKWSKERYDEIESKMVPFLRSSGYNVKKDVHFLPISGLLGSNMKTRMDKSICSWWDGPCLFEVLDCIEVPLRDPKGPVRMPIIDKYKDMGTVVMGKIESGTIREGDSLLVMPNKTNVKVIGISLDEHKVRRAGPAENVRVKLSGIEDEDIMAGFVLSSIGNPVGAVTEFNAQLQILELLDNAIFTAGYKAVLHIHSVVEECEIVDLIEEIDMKKKKEADPKKKKPKRKPLFVKNGAVVVCRIQVNNLICIENFSDFPQLGRFTLRTEGKTVAVGKVVAIPPAGSPTFSA

SEQ ID NO: 36933 - protein, 378 aa, Oryza sativa
MVVPYGDPNEPHYRKNAFDAGEDGLGKNAHSLKRGCDCLGFIKYFDAHFTNFTGGVETIENCVCLHEEDHGILWKHQDWRTGLAEVRRSRRLTVSFICTVANYEYGFYWHFYQDGKIEAEVKLTGILSLGALMPGESRKYGTTIAPGLYAPVHQHFFVARMDMAVDCKPNEAHNQVVEVNVKVENAGTHNVHNNAFYAEEKLLKSELQAMRDCDPSSARHWIVRNTRAVNRTGQPTGYRLVPGSNCLPLALPEAKFLRRAGFLKHNLWVTQYKSDEVFPGGEFPNQNPRIHEGLATWVKKDRPLEETDIVLWYVFGLTHIPRLEDWPVMPVERIGFMLMPHGFFNCSPAVDVPPGSSDADIKEAESPKAIQNGLISKL

SEQ ID NO: 36934 - protein, 79 aa, Oryza sativa; identical to SEQ ID NO: 30991

SEQ ID NO: 36935 - protein, 486 aa, Oryza sativa
MSTTTTTTVTEPDNAEASPSPSLLYPAAAEASAAVAALLADLRLGHAAHTRVSATRLSGGERRRVSIGLALLRDPGVLLLDEPTSGLDSSSAHVVVGCLRAVAAARGTTVVLSIHQPSSRLLSAVDSLLLLSRGAVVHHGSVDSLDAALLSHGLAVPAQLNPLEFALEVLDQMPHPSASSPEPKTTEELAAVTSSKSSSSSTSPCSRIHEVVVLYKRAWKVVYRSKQLLLTNFLESVVVGTLLGSIYINAGDGEGGAHKRLGLFAFTLTFLLTSTTETLPTFVSERPIVLAETASGLYRLSSHAAAATLVFLPYLLAVALLYSACVYLLVGLCASAAAFAAFVMVVWAVVLTANSFVLFVSSFAPDYIAGMSLVSVSLAGFFLFSGYFLSRGSMPPYWVFMHYVSPYKYALDALLANEYTCAATRCFGVAGPAAGDCSETGADVLAEKGLTAKERWTGVQVLFGFFLLYRVLYWVVLSRRAARAKR

SEQ ID NO: 36936 - protein, 98 aa, Oryza sativa; identical to SEQ ID NO: 34812

SEQ ID NO: 36937 - protein, 163 aa, Oryza sativa
MARGGSFSRLRLRAGVVVAAAAAALLLFAVVAPPAAALNIGLQSAGDGASKAGLCSRTCESDHCTTPPLLRYGKYCGILYSGCPGEQPCDELDACCMHHDNCVQAKNDYLSTACNEELLECLARLREGSSTFQGNKCMIDEVIDVISLVIEAAVVAGRLLHKP

SEQ ID NO: 36938 - protein, 312 aa, Oryza sativa
MPGTATASAVSYAVKRSTQAHQSRNEFVAELSVIACLRHKNLVQLEGWCDDKGELLLVYEYMPNGSLDKALYGEPCTLSWPERYTVASGIASVLSYLHQECEQRVIHRDIKTSNILLDGNLSPRLGDFGLARLMDHNKSPVSTLTAGTMGYLAPEYLQSGKATEQTDVFSYGVVVLEVCCGRRPIDKDDGGGKNVNLVDWVWRLHGEDRLIDAADPRLAGGFYRDEMLRLLLVGLSCANPNCDERPAMRRVVQILNREAEPVPVPRKKPLLVFSSSASIKLQEIAFACGDDVRGGLPAAATSPRSEGGDIER

SEQ ID NO: 36939 - protein, 292 aa, Oryza sativa
MIGNAVLNDATDQMGMVEYAWSHAIISDELYSAVRRECDSFKEEEDGGKPSKGCSPAVRAFLRAYDDIDIYSIYTPTCLSSSSSSPASASPRRSSPGLVAAPRLFSKHVKEAWRRMQRVPAGYDPCTEEYVKGYFNREDVQRALHANRTGLSYPYSPCSEAISKWNDSPSTVLPILKKLMGAGLRIWVYSGDTDGRVPVTSTRYSLNTMKLRPRLMRKTAGDGAGEESEWGGWRAWYDRQQVGGWAVEYEEGLTLVTVRGAGHQVPLFAPRRSLAMLYHFLRGSSLPASRSR

SEQ ID NO: 36940 - protein, 200 aa, Oryza sativa
MNDTRRRLLEMGFKNPILLLHPLGGFTKADDVPLPVRMEQHSKVLEDGVLDPETTIVSIFPSPMHYAGPTEVQWHAKARINAGANFYIVGRDPAGMGHPTEKRDLYNPDHGKKVLSMAPGLEKLNILPFKVAAYDTVAKKMAFFDPSRSKDFLFISGTKMRAFAKSGENPPDGFMCPGGWKVLVDYYNSLQTEEAAVATV

SEQ ID NO: 36941 - protein, 68 aa, Oryza sativa
MLPWAKANINPTGQALIICTAAGMAYFVAADKKILSLARRHSFENAPEHLKNTSFQGTGRPHPAFFRP

SEQ ID NO: 36942 - protein, 334 aa, Oryza sativa; identical to SEQ ID NO: 31147

SEQ ID NO: 36943 - protein, 347 aa, Oryza sativa
MQQHMRRAEDELKVKDKPPVAEPYCKRRASVSACNISSERSVKKSVKQQQQEASSSLQSSASISASSCSSTAGGGGSFRGMQQLSLRRLSGCYECHMVVDPISGVFRDSSSMRATICSCPDCGEIFVRPDSLHLHQSIRHAVSELGAEDTSRNIISIIFQSSWLKKQSPVCAIDRILKVHNAARTLARFDDYRAAVKAKAMAHRHPRCTADGNELLRFHCATLSCDLGLHGATHLCDHLSCAACAIIRHGFRPPAPGAGIRTMATSGRAHDAVVSSGSEGDRRAMLVCRVIAGRVRREEAAAAAAEEEEEEYDSVAGTTPGLYSNLDELDVFNPTAILPCFVVVYRA

SEQ ID NO: 36944 - protein, 491 aa, Oryza sativa
MTITDLTQESLALHEMVASGGGQDPGEHIERMSMLLKKIKDFVQTQNPDMGPPMASRVLDSNGDSRPITIPDEFRCPISLELMKDPVIVSTGQTYERACIEKWIASGHHTCPTTQQKMSTSALTPNYVLRSLISQWCETNGMEPPKRSTQPNKPTPACSSSERANIDALLSKLCSPDTEEQRSAAAELRLLAKRNANNRICIAEAGAIPLLLSLLSSSDLRTQEHAVTALLNLSIHEDNKASIISSGAVPSIVHVLKNGSMEARENAAATLFSLSVIDEYKVTIGGMGAIPALVVLLGEGSQRGKKDAAAALFNLCIYQGNKGRAIRAGLVPLIMGLVTNPTGALMDEAMAILSILSSHPEGKAAIGAAEPVPVLVEMIGSGTPRNRENAAAVMLHLCSGEHHLVHLARAQECGIMVPLRELALNGTDRGKRKAVQLLERMSRFLVQQQEEQESQSQASAQVPPQATPEQVPENDIPEQLDSPASQYPMVV

SEQ ID NO: 36945 - protein, 466 aa, Oryza sativa
MAQPRTHVVGGLRALRTAIVSPSPAPPAGERALPLTFLDAQWLSAHPVERVFFYRLGPGGDDVDAVLSRLVESLARALHAFYPLAGRVRLTPGETNRYELFYQPGDGVAFTVAEHDGVGVGVDELADTDEPREVARIATFVPELPKGGAVLALQATVLPPDRRGLALGVTVHHSACDGVSSTHFLHTWAAACAGDRVLPEPPVIDRTIIRDRNDMYDAFASPASEAKHAFDSPDVAGKLLATFTLSRQQLQNVKDAVAGEAARRGVAPPRCTSLVATLGLTWLCFRRAGPDGEEGPRGDGRAHLVFPVDHRSRLEPRVPEKYLGNCIGPGFATAHETELATTTTTADGLFTACAAVAAGIDEAVRGEPTYWERWVERITEACADDMSLSVAGSTRFGVYDMDFGFGRPAKVDVVSVAKTDAMSVAEDRSGSGGIEVGIALSPARMERFRRWLADAIALLSSSSHCN

SEQ ID NO: 36946 - protein, 252 aa, Oryza sativa
MSSIHFFPATSQAAAPSRRPLTKPSPKPPAATAAYHRGGDNEPVLFPRLFLRRRARPAAAPAEAPPVGPDGSSSGGGGGGGEGGGGGGDDEEDEGTRKGLLPEWLSVTTDDAKTVLAAIAISLAFRSFVAEPRFIPSLSMFPTFDVGDRIVAEKVHKGKLVVNGEVRNEEFILEPPSYDMNPVQVPENSVFVMGDNRNNSYDSHVWGPLPSKNILGRSIFRYWPPGRIGSTTTDCLIPETNPSSLIDVKLAK

SEQ ID NO: 36947 - protein, 161 aa, Oryza sativa
MAARAFVAVVVVVVAALFVGAASSSAAAQAAVDTGAAAGVPSCASKLVPCGGYLNATAAPPPASCCGPLREAAANETACLCAILTNKAALQAFGVAPEQGLLLAKRCGVTTDASACAKSASSSATAAAAAAGNTHNSINFLNVLISLINSSRRRSRRDPCG

SEQ ID NO: 36948 - protein, 333 aa, Oryza sativa
MASRSLFALLVVAAAMCASVASALRSRAATDPNMEVKFDFTPFLIQYRSGRVQRLMGTTVVAPSLDVRTGVVSKDVVVDRSTGLAVRLYRPKHRGGRLPVLIYFHGGAFVVESAFDPVYHNYLNALAAKAGAIAVSVNYRLAPEHPLPAAYDDAWTVLRWVAADMQRGADSWLARRGDASRLFVAGDSAGGNIAHNLAMRAGQHGGGATIRGVALLDPYFLGKYVDPTAQRAWGFICAGRYGMEHPYVNPMALPAASWRRLATSRVLMTVSDLDRLGPWQRAYVDALRGSGWPGEARLYVTPGEGHCYFLNNLESPKEAMHMATLAAFINRDT

SEQ ID NO: 36949 - protein, 331 aa, Oryza sativa
MTGDGVNDAPALKLADIGVAMGITGTEVAKEASDMVLADDNFSTIVAAVGEGRSIYDNMKAFIRYMISSNIGEVASIFLTSALGIPEGLIPVQLLWVNLVTDGPPATALGFNPPDKDIMKKPPRRSDDSLITPWILFRYMVIGMYVGIATVGVFIIWYTHGSFLGIDLAGDGHSLVSYSQLSNWGQCSSWEGFKVSPFTAGARTFNFDVNPCDYFQGGKIKATTLSLSVLVAIEMFNSLNALSEDGSLLSMPPWVNPWLLLAMSVSFGLHFLILYVPFLAQVFGIVPLSFNEWLLVIAVAFPVVLIDEVLKFVGRCLTARARKQSGKQKED

SEQ ID NO: 36950 - protein, 384 aa, Oryza sativa
MDGKKPYVIAIIIQVIYTGLYVVSKAAFDQGMNTFVFIFYRQAAATLLLLPLAIILERRNAPAMSLRLFTKLFMYALLGNTITMNMYNVSLKYTSATVASATSNSVPVVTFFLAVLLRLEVIRLRTLSGVAKAAGVALCLAGVLVIALYAGPAISPLNHHRALSGGVHGAESSVGTGTRARWMKGTFLMLLSNTTWSLWIVLQASLLKEYPNKLLATLIQCALSTLQSLLLAAAVVRADPAAWRLRLDAGLLAVAYTGFVVTGVSFYLQAWCIEKKGPVFLAMSNPLCFVFTIFCSSFFLAEIVHLGSIVGGVLLVAGLYSVLWGKSKEHNINMQLTLAAAASTEQVKQRQEEDHKMEIAGGDEQEEIKQQQQGKMAASPEQQV

SEQ ID NO: 36951 - protein, 307 aa, Oryza sativa
MSEASFPEDLLSLEMADRLEWLVEQKKIADMIFSEHRKVKDILASTDLPHAVLTGELDSQIHWLLNSLYQAKEDAARMQDESSAMLHKLASHESKLNSMHEEVDRLTIALLEEKQEKDILANEHAELMSLYHAASDQLSVVSSRYTELVKAFAEVSDVQLEDHEILDGGKLVEQCLANIQGRAKSSPVECESFEKLQTQVYTLDQELTLCKIILEEDKADRSEMMRLSGELQRMVQETDALKNEKDSLQKELERVEEKSSLLREKLSMAVKKGKGLVQEREGLKQVLDEKKSDIEKLKHALDENRDI

SEQ ID NO: 36952 - protein, 218 aa, Oryza sativa
MAPSAAAAAAAAAAAATASPLSRLLLSLPNPSVKLPVSSPSRNAGAAVAAKNSTPVVALRRREAVAAVLSASILSRVLPAAAEASGGECPLEVAPNGLAFCDRVVGTGAAAEQGQLIKAHYTGRLEDGTVFDSSYKRGKPLTFRVGVGEVIKGWDQGIVGGEGIPPMLAGGKRSLRLPPELAYGARGAGCRGWEPTSCVIPPNSTLLFDVEYVGRAVG

SEQ ID NO: 36953 - protein, 174 aa, Oryza sativa
MLWASDCPKLKFLPYPPRSLTWFIENSNHVLPEHGFGNLTSATYPLHLSIERAPNSREMWRRAQHLSSIESLTLMSIAGLRALPEAIQCFTSLWRLSILGCGELETLPEWLGDYFTCLEEISIDTCPMLSSLPESIRRLTKLKKLRITNCPVLSEKCQGEDRHKIAHILEPIFL

SEQ ID NO: 36954 - protein, 305 aa, Oryza sativa
MALKTLQVPSSFARPINRSFIGSSSSSSSSSQFSLRPKPASARLAASVAGERRLECRGGSSLHGCVDEGAAAASRRRQEQAVEIPIVLFPSVVFPGATVQLQAFEFRYRIMVHTLLQEGVTRFGVVYSGGGVGGGVAAGEVGCVAHVVECERLVDGRFFLTCVGGDRFRVVGAVRTKPYVVARVQPLADAPPSQERGGDGGGDMVRHLVERVEEQLKNVAALSDKLGWSQPPLPFRATCSPSSLSFAVAREVVEDREEQQALLRLDDAAARLAREGRYLERRSRYLAAIAAIKDALGGHLYCNDK

SEQ ID NO: 36955 - protein, 392 aa, Oryza sativa
MSCCPCTTTTSSPLSLPRPACRGRWSGGGGSSANAAAWRARGGGAKRSLVVAASGSKDETAEGKKQEEESEFNPFGFVTDNPSSRGAIQLPESPAQDGNVGQMLYRIEDKGREFGSRVKSGKLRWFVRETGSAGARRGTVVFIHGAPSQSFSYRMVMSQMADAGYHCFAPDWIGFGFSDMPQPGYGFDYTEEEFHKSLDELLSTLNITEPFFLVVQGFLVGSYGLTWALKNSSKVLKVAILNSPLTVSSPVPGLFNQLRLPLFGEFTCQNAVLAERFIEAGSPYVLKSEKADVYRLPYLSSGAPGFALLEAARKANFRDVLSRISAGFASNSWEKPILLAWGISDKYLPLPIAEEFQKGNPAAIKLEPIEGAGHMPQEDWPEKVVTALRSFL

SEQ ID NO: 36956 - protein, 212 aa, Oryza sativa; identical to SEQ ID NO: 32024

SEQ ID NO: 36957 - protein, 175 aa, Oryza sativa
METGHAGERRHGGGLGEGVDEQVRAVVVAPVQEPLAAGAEPAGGGGQPERPRVLREEAAEAAVGEAEARRQRRRRAVFPRGRAPRAARGAEADAVGVGREAAEDLAGDVQREVPPRRRRRRARRRRPRPFARPLHHLVCAQKRTNEGTQVVSLVSDTYIYSLLTISDSFTAYGIW

SEQ ID NO: 36958 - protein, 199 aa, Oryza sativa
MGRVMELLDARSVARCTAVSRAWRGVAADDRLWAPKCAELMAGKAHIPRLTMIPTASKLSTYSMAIADGKRTRITKEDLCDHDWEFRFTIAAPEYWRNLDPSWKHTGPPMRRYFHPDGYHSADPHDAVWGGHECTYTIITSFAGNGCIRDHYVRINRWPPMKVSRKEDWSWELSNHLYRYNSIPDTDKKGCTGPLFPVW

SEQ ID NO: 36959 - protein, 250 aa, Oryza sativa; identical to SEQ ID NO: 29952

SEQ ID NO: 36960 - protein, 481 aa, Oryza sativa
MEMVLPVANATAAALARVSAMFNAPLARAVVFGIHIDGHLVVEGLLIAAILFQLSRKSYKPPKKPLTEREVDELCDEWQPEPLCPPIKEGARIEAPTLESAAGPHTIVDGKEVVNFASANYLGLIGNEKILDSCIGSVEKYGVGSCGPRGFYGTIDVHLDCETKIAKFLGTQDSILYSYGISTIFSVIPAFCKKGDIIVADEGVHWAVQNGLQLSRSTVVYFKHNDMASLASTLEKLTHGNKRTEKIRRYIVVEAIYQNSGQIAPLDEIVRLKEKYRFRVILEESHSFGVLGKSGRGLAEHYGVPIEKIDIITAGMGNALATDGGFCTGSIRVVDHQRLSSSGYVFSASLPPYLASAAISAVDHLEENPSVLANLRSNITLLHKELSDVQGLEIASNILSPIVFLKLKTSTGSAVADLELLEVISEKVLKEDSVFIAATKRSSLDKCRLPVGIRLFVSAGHTESDILKVSESLKRVAASVL

SEQ ID NO: 36961 - protein, 419 aa, Oryza sativa
MAATATMAMPLANRLRCKPNTNSSSPSRTLFGRRVTMISSSRWGSAVSGSAIMSAAADVAAAVWREEDEEMRSYLSPEKLEVLTQMEPWVEEHVLPLLKPVEAAWQPSDLLPDPAVLGGEGFHAACAELRERAAGVPDLLLVCLVANMVTEEALPTYQSSLNRVRAVGDLTGADATAWARWIRGWSAEENRHGDVLNRYMYLSGRFDMAEVERAVHRLIRSGMAVDPPCSPYHAFVYTAFQERATAVAHGNTARLVGARGHGDAALARVCGTVAADEKRHEAAYTRIVSRLLEADPDAGVRAVARMLRRGVAMPTSPISDGRRDDLYACVVSLAEQAGTYTVSDYCSIVEHLVREWRVEELAAGLSGEGRRARDYVCELPQKIRRMKEKAHERAVKAQKKPISIPINWIFDRHVSVMLP

SEQ ID NO: 36962 - protein, 227 aa, Oryza sativa
MKDGVAGGGGERPCMCYFHPREEVVGVCSQCLRERLLLLLASKTSPAAAHLLADRPLHRKNSSISLPKVFALGSSFLQRLDSSRHHLRPAPHDSDANSDADTASIASLDDSFISIKFEDNGKATWDSQKAAAGEKKTDTTTTAVVEHVKRGGVTRWRKQVVGRLLQLARWKRSGNGKAAACHQLGIDGKKTAERSSSKGTTVRGRGRGRSWIRILTITRRPPAMPLS

SEQ ID NO: 36963 - protein, 60 aa, Oryza sativa
MKMLSTTLKLVVSRKWRQAILQQLKWSHSMKISAIRLVELMEYHLMEVLRHLRTTLMFHL

SEQ ID NO: 36964 - protein, 394 aa, Oryza sativa
MASPPAKKVLVPIASGTEPMEAVITVDVLRRAGADVSVASVDPGSAQVGGAWGVKLAADALLDDLADAEFDLISLPGGMPGSSNLRDCKLLENMVKKHAGKGKLYAAICAAPAVALGSWGLLNGLKATCYPSFMDKLPSEVNAVESRVQIDGNCVTSRGPGTAMEYSVVLVEQLYGKEKADEVAGPMVMRPQHGVEFSLKELNSTSWNVGETPQILVPIANGTEEMEATMIIDILRRAKANVVVASLEETLEIVASRKVKMVADVLLDDALKQQYDLILLPGGLGGAQAYAKSDKLIGLIKKQAEANKLYGAICASPAIALEPHGLLKGKKATSFPGMWNKLSDQSECKNRVVVDGNLITSQGPGTSMEFSLAIVEKLFGRERAVELAKTMVFM

SEQ ID NO: 36965 - protein, 286 aa, Oryza sativa
MEVASDLLDRQGPIYREDTAVFVSQSGETADTLLALDYALENGALCVGITNTVGSTLSRRTHCGVHINAGCEIGVASTKAYTSQIVVMVMVALAVGSDQISTQVRRQAIISGLSNLPSNVSEVLKLDTEMKELSSSLIDSESLLVFGRGYNYATALEGALKVKEVALMHSEGMLAGEMKHGPLALVDENLPIIVIATRDACFSKQQSVIQQLLSRKGRLIVMCSKGDASAVCPSGSCRVIEVPEVADCLQPVINIIPLQLLAYHLTVLRGFDVDQPRNLAKSVTTQ

SEQ ID NO: 36966 - protein, 522 aa, Oryza sativa
MDKAMAFIPPRDLVVVLPFLALLLPLYIYLRYSRSAKANPSLPTEWPLVGMLPSLVANIHNLFDYATALLAASGNSFEARGPPMSSLRFFVTCDPDNVRHIFINNFANYPKGEEFASFFDVMGDSFFNADGESWRRQRARVQHVMSNPRLLASMAACCRGKVEKGLLPILDRMASAGAPFDLQRLLTRFAFDVTAMAVFGVDTCRLSIDMPPLDVANAMDAVMEVGFFRHTVPVSCWKLMRSLRIGPERKLTAAQRLLRRFVAEMIEKRRVAGGACKATDDEQGGVPPPADIVSSYINDPEYVDEDGNPREFMYATFINYMVAGRDTVGTALSWLFFNLTEHPRVVARIREELEPIASSKAGGGGMVVFDPEETKPLVYLQAALFESMRLYPPGPIERKATLAEDVLPSGHTVRAGDNILIPVYSMGRMASVWGKDSGEYRPERWVTEDGKLRHVPAHRFMPFNAGPRLCLGKDISVLQMKSVAAAVAWNFDLEVVAGHAVEPKVSIVMQIKNGLMVKVKKR

SEQ ID NO: 36967 - protein, 426 aa, Oryza sativa
MAILRVSVMRLVVAAMAVAAGVLFFSGAGEARVLLTLDDFGAVGDGITNDTQAFLDAWNAACASTEPAVLAVPAGKTYQIWPVRLAGPCKKKLKLMISGTIAAPASPDEWAGRDPTKWLYVFRVDDLSVSGGGTIDGMGAEWWARSCKRKKTKPCSTVSAPKALQFEECRRVSVQGITMQNGPQFHLMFTRCTDVKASFLRVVAPESSPNTDGIHLNDTTHAQIMDNLISTGDDCVSMVGNCSDVRVKDISCGPGHGISIGSLGKNRTTDRIENVRVDTCLLTNTTNGVRIKSWQGGMGYAHNLRFEGIVMKNVSNPIIIDQYYCDQPTPCANQTQAVEVRKIEFAGIRGTSATEQAIKLACSDAVPCRDLELRNVNLTMVGGGAASAFCHRASGKAAGAVVPASCLAKAPHRMLGDATPAARVGS

SEQ ID NO: 36968 - protein, 267 aa, Oryza sativa
MATAMTNLIPAITFLMAASAGQERVNVRERGTMAKISGTIVCVGGATAMAFFKGPKLLNYTLGDLNMLLHPPAISKWVLGALCLVVSSSCWSLRLILQVPICKFYVDPLSLSAWTCFFSTLQCAALAVFLVPDANAWKIHSLFELSSYAFAGVFGSGVCFYLQSWCISVRGPLYSAMFTPVCTVVTTIVAAAVLQEELHIGSLMGAAAVITGLYVVLWGKADDMKRGSEPATAAAAAKPCTDSCRDVERTAAEEPLLLADAVSSEQL

SEQ ID NO: 36969 - protein, 691 aa, Oryza sativa
MIDDPSMHLKPHSIVSFLVLLLLFHAAAAGGDGDQFRYDGFAGAALDLDGMAVVEPDGKLMLTNVTSQMKGHAFHPAPLRFHHPPPANGTAAAARSFSTAFVFAIAADYVTVSGNGLAFFVAPSKNMSTASPSQFLGLFNSENNGNASNRVFAVELDTILNPEFRDINSNHVGVDVNGLVSVAAEPAGYYDDATGGAFKNLTLFSGAAMQVWVDYDGRAAVVNVTLAPVEVAKPRRPLISVAVDLSPVVNGTAYVGLSSSTGPFHTRHYVLGWSFAMDGPAPPLDYAKLPKMPVVSAKRRSKALDVVIPVAAPLLALAVVAGVSFLVWRRLRYAELREDWEVEFGPHRFAYKDLFVATAGFDGKRLLGVGGFGRVYRGVLPASGTEVAVKIVSHDAKQGMRQFVAEVVSIGRLRHRNVVPLLGYCRRRGELLLVYDYMPNGSLDRWLHDHGAPPLGWAQRLHAVRGVAAGLLYLHEDWEQVVVHRDVKASNVLLDGEMNARLGDFGLARLYDRGADPQTTRVVGTMGYLAPELAHTRRVTPATDVFAFGSFVLEVACGRRPIERGGAMTAAADEDGQLVLADWVLDRWHKGDIAAAADARLCGDYDAKEAALVLKLGLLCSHPVAAARPTMRQVVHFLDGDAPLPEPEPTYRSFTTLAMMQNADGFDSCAVSYPSTATSIDGASSVLSGGR

SEQ ID NO: 36970 - protein, 448 aa, Oryza sativa; identical to SEQ ID NO: 28609

SEQ ID NO: 36971 - protein, 468 aa, Oryza sativa
MELHRCSLLALLLAVTCSVAVAYDPLDPKGNITIKWDVISWTPDGYVAMVTMSNYQMYRQILAPGWTVGWSWAKKEVIWSIVGAQATEQGDCSKFKGGIPHSCKRTPAIADLLPGVPYNQQIANCCKAGVVSAYGQDPAGSVSAFQVSVGLAGTTNKTVKLPTNFTLAGPGPGYTCGPATIVPSTVYLTPDRRRRTQALMTWTVTCTYSQQLASRYPTCCVSFSSFYNSTIVPCARCACGCGHDGYRGNGGGGKNARAGDGRSRRNSGGGGGHSGGTECIMGDSKRALSAGVNTPRKDGAPLLQCTSHMCPIRVHWHVKLNYKDYWRAKIAITNFNYRMNYTQWTLVAQHPNLNNVTEVFSFQYKPLLPYGNINDTGMFYGLKFYNDLLMEAGPFGNVQSEVLMRKDYNTFTFSQGWAFPRKIYFNGDECKMPPPDSYPYLPNSAPIGPPRSVAAAASAILVVLLLVA

SEQ ID NO: 36972 - protein, 504 aa, Oryza sativa
MAGEEGEDEAASIELQLEHHLQEQRASLTAVDEALAADPSNADLLEVHEELLAAIKDAEEGLLHLKRSRLVKQIDEIFPNQEPTSEAPEVAVDPPDDVEPEPLEPQEFSVGSKCRFRHKDGRWYNGCVIGLEGSSDARISFLTPTSENMSMCKFFLQQRCRFGSNCRLSHGIVIPILSLKQFTPTRWQQSLVGSSILAASGHHSGLWRRAELESWDDDLKVGQVVFQDDGSSARLPSDSLSISEYADESDEDGEGSSSDEGSDFSEDGDQEDESVHQGLGLLESKNLSGVQTETAIFAKWEHHTRGVASKMMAKMGYREGMGLGVSGQGMLDPIPVKVLPPKQSLDHAVAASEVNDSVGPGKKRSRGGKRKREKKFAEQARAAKAEEEERSVFSFINSQLVGQDVAEGSAVKSKKDSSGEANGHAKKEDRRSLLAYDDEVKELRSRVEKLEEMMKRNRKDKAFYEAASKKLKQTRKALADAEATHASATNAVARKEKEKKWLKF

SEQ ID NO: 36973 - protein, 351 aa, Oryza sativa
MALEARFFLAAVFAVAATCLCLSAVASAFAVPSVAFDEGYSPLFGDDNLVRSSDDKSVRLLLDRRSGSGFISSDYYLHGFFSASIKLPKAYTAGVVVAFYLSNGDVYEKTHDELDFEFLGSRWGGQWRVQTNAYGNGSTARGREERYLLPFDPTLEAHRYSVLWAPTHIIFYIDDTPIREVIRHPGMGGDFPSKPMAVYATIWDGSTWATDGGKYKVNYKYAPFASEFSDLALLGCRADPVLRAPRDGGGAGCAEPDLLGLLTADYAVMTPRKRAAMRAFRARHMTYTVCYDAVRYAAGPFPECDVSDVEKESFSAWGESKNVVMKARGRGRRRGRKAGAGAMSRLDVSSS

SEQ ID NO: 36974 - protein, 396 aa, Oryza sativa; identical to SEQ ID NO: 28700

SEQ ID NO: 36975 - protein, 589 aa, Oryza sativa
MRTMLPLLVILVVGLRLAGASPPPQPVACTKGTTDCTVTNVYGSFPDRTICRAADASFPRTEAELVAAVAAAAAAGRKAKAATRHSHSFPKLACPGGRDGTIISTRFLNRTVAVDAAARRITVESGVVLRDLIRAAAAAGLALPHSPYWYGLTVGGLLATGAHGSSLWGKGSAVHEYVVGLRIVTPAPASQGFAVVRELVAGDPDLDAAKVSLGVLGVISQVTFELQPQFKRSVRFVTRDDSDFAEKVAVWGGAHEFGDMAWLPRQGKVIYREDDRVDVATPGNGLNDYLGFRAQPTLGLITARAAEERLERNGTDIARCLAARLPPSLFELQAYGFTNDGVFFTGWPVVGFQHRIQASGTCISSPEDGLLSSCTWDPRIRGPFLYNSGFSIALPRAAAFVADMMRLRDLNPRAFCDIDAKLGILMRYVKASSAYLGKPEDCVDFDVTYYRSYDDGEPRPHSDVFDELEQMALRKYGAVPHWGKNRNFAFDGAAAKYPNSGEFIKVKERYDPDGIFSSEWSDQVLGISGSPNIVDKRCAIEGLCVCSDDSHCAPELGYFCRPGKLFKEARVCSKDKSAAAGDDDLLDEL

SEQ ID NO: 36976 - protein, 370 aa, Oryza sativa
MATATTTSSSSSNSQNPNPFNLPPWLRSLRCPFTFLCPPPPPPPPPPPPPPPPPPPLEVVSPSPRWRRPGLRVTTEYDSEEAMFAHKVSCKVAGGLAKLRLSFQSDPSGQGLGEEGDPRRQLFVAPVVGLIAKNFSVLYDVEARNALLSGQGSLPGGAIQLRGSHDVKERQGEVSVITRLGDPSYKLELSSLVPYNGLPRATLHFPIGQVSVEERRNEADEKMLSLYGIAKSNFLDGILTAQYSENDINLRYCYKDNELTLIPSVSLPSNAVSLGFKRRFGPSDKLSYRYDFTTDDWNAVYKRTVGKDFKVKAGYDSEVRVGWASVWVGQEDGKAKTAPMKTKLQLMLQVPQDNFRNPTFLFRVKKRWDL

SEQ ID NO: 36977 - protein, 149 aa, Oryza sativa
MLVCGDFNSVPGSSPHGLLAMGKVDQLHPDLAIDPLGILRPASKLTHQLPLVSAYSSFARMVGVGYDLEHQRRRMDPATNEPLFTNCTRDFTGTVDYIFYTADSLSVESLLELLDEESLRKDTALPSPEWSSDHIALLAEFRCKPRIRR

SEQ ID NO: 36978 - protein, 402 aa, Oryza sativa
MASAACSSSASALVRLTGPIHLCSAPPRGSARRRHASVRCSFAPVETARIKVVGVGGGGNNAVNRMIGSGLQGIEFYAINTDSQALLNSQAQYPLQIGEQLTRGLGTGGNPNLGEQAAEESKEAIANALKDSDLVFITAGMGGGTGSGAAPVVAQISKEAGYLTVGVVTYPFSFEGRKRSLQALEALEKLERSVDTLIVIPNDRLLDVVDENTPLQDAFLLADDVLRQGVQGISDIITIPGLVNVDFADVKAVMKNSGTAMLGVGVSSSKNRAQEAAEQATLAPLIGSSIEAATGVVYNITGGKDITLQEVNKVSQIVTSLADPSANIIFGAVVDDRYTGEIHVTIIATGFPQSFQKSLLADPKGARIMEAKEKAANLTYKAVAAATVQPAPAATWSRRLFS

SEQ ID NO: 36979 - protein, 361 aa, Oryza sativa; identical to SEQ ID NO: 36911

SEQ ID NO: 36980 - protein, 173 aa, Oryza sativa
MYIRFAVRRFAFFFRLSRLFDQLKWQSSTHLEFNGFLGLVNFAGGVMPVPPSPSELLREQLDSVNGCDDVGFVQRKPGRGDTTLSMSCFDKITRWSVVGIQGALLSHILEPLYLSTITIGQSPTGASDGFSVENNIKKVLDARLSSLSSKLLLPFKLNKVGVAMLCTDIQIIC

SEQ ID NO: 36981 - protein, 361 aa, Oryza sativa
MADGGGDGAMPDPTVRNLLEQESLKWVFVGGKGGVGKTTCSSILSILLASARQSVLVISTDPAHNLSDAFQQRFTKFPTLVRGFNNLYAMEIDPKVENDDFANEGMEGFLSELTNAIPGVDEAMSFAEMLKLVQTMDYSVVVFDTAPTGHTLRLLQFPATLEKGLEKMMALKNKFGGLLNQATRLFGLGDELNEDAMLGRLEGMKDVIEQVNRQFKDPDLTTFVCVCIPEFLSLYETERLVQELAKFEIDAHNIIINQVLFDEEAVESKLLKARIKMQQKYIDQFHMLYDDFNITKLPLLPEEVCGVQALQNFSRHFLTPYKAALKRGTVEEVEQRVSLLKSALQEAESELDRLRKGKQVA

SEQ ID NO: 36982 - protein, 187 aa, Oryza sativa
MAAACSSAAFLAYPGSLGAGPRPLRLFRAFAAASSSGSGSKKKARKSKGAGNKGEASGGGGGKGKGKALEPPPAVIRRAPAGSASVFQQPEPGFTPGGGGGGKGPTEEERRQRQANENAFLLAWLGLGLIILAEGLALAASGFLPEEWDSFFVKFLYPSFTPTVILFLGGTVGYGVFKYFEGEKSNS

SEQ ID NO: 36983 - protein, 292 aa, Oryza sativa
MQGGVSGFQNAPVTRAVVLASGLLSVVFSAQRRARALVLSHQGIVKNFRLWKLFASGFAFQSTPELLFGVYLLYYFRVFERQIGSNKYSVFSLFTISVSLLLEILSLVLLKDTNYLSTLACGPYGLIFASFIPFFLDIPVTSRFRIFGVNFSDKSFIYLAGLQLLLSSGKRSLIPGICGLIAGSLYRLNVLGIRRMKMPQVIASFFARIFAPSSGGSSRPSRSLVGNMSSRTSRAVQNNQPSGFAPVVEPPESSIAMLVSMGFDGNAARQALMRARNDINTATNILLEAQTR

SEQ ID NO: 36984 - protein, 458 aa, Oryza sativa
MHARSEDMAAKLIGCKSSVHYIEEYSRRRNFNRTFDLWIWSLDLSTIPKATQFTITRPDREARATEIPFPDLEPSQPAPTDTKKGLTYPVIIHIDTVQDLFSRQGRVFMWHYGVPDDVTRMRSMAHPIQACRTLPAPERRSDDEDDHEQRSRRRHRSRSLWNRLGGRSSSKSREPGLDNRSSYNQETRGRQRERAADINRSRSRHLSRSVKPGETRIRRQSATPPHLSDPAPADKVSSPCKPFSHSRDSSPENGHCSAVASPPLEPLSPDILPVSQEQGALLMLKRHLDPMLHEAMVGGSIYSPDTTLPRPASPVFVLSSAAEPQENLVDEAQHDVETFLAEVTTPIQQPLLSAPGTKLRRPCRNKVTTPIQRHSARLALKVRRSTKLELIAQEILAKQFGVLDDNKLLSDQIKKLYLQHYKKPLSPADMKTITTLVENGGCKGVRLRAKKAASMVPI

SEQ ID NO: 36985 - protein, 381 aa, Oryza sativa
MLMATLRPAPASMVVLCAVVVVGAVFVVVAEGGGSEEAAASTGKAAMVPALFVFGDSLIDNGNNNNLASFAKANYYPYGIDFAAGPTGRFCNGYTIVDELAELLGPPLVPPYSQASGHVQQLLQGVNFASAAAGILDESGGNFVGRIPFNQQIDNFEATVEQIAGAVGGKEAAASMVARSILFVGLGSNDYLNNYLMPNYNTRRRYTPRQFADLLADRYAAQLTRLYKAGARKFVVAGVGSMGCIPNVLAQSVESRCSPEVDALVVPFNANVRAMLGRLDGGGLPGASLVFLDNYGVFKAILGDPAAHGFAVVDRGCCGIGRNAGQVTCLPFMPPCDGRDRYVFWDAFHPTAAVNVLIAREAFYGGADVVSPINVRRLAAL

SEQ ID NO: 36986 - protein, 338 aa, Oryza sativa
MAAAIDMYKYNTSTHQIASSDQELMKALEPFIRSASSSSASSPCHHYYSSSPSMSQDSYMPTPSYPTSSITTAAATTTSSFSQLPPLYSSQYHAASPAASATNGPMGLTHLGPAQIQQIQAQFLAQQQQQRALAGAFLRPRGQPMKQSGSPPRAGPFAAVAGAAQSKLYRGVRQRHWGKWVAEIRLPKNRTRLWLGTFDTAEDAALAYDKAAFRLRGDLARLNFPTLRRGGAHLAGPLHASVDAKLTAICQSLATSSSKNTPAESAASAAEPESPKCSASTEGEDSVSAGSPPPPTPLSPPVPEMEKLDFTEAPWDESETFHLRKYPSWEIDWDSILS

SEQ ID NO: 36987 - protein, 342 aa, Oryza sativa
MALSSFSMSLPFAKLPSTSKSTRFLPIRASSAAAAASPSFDLRLYWTSLIADVEAELDAAMPIRTPERIHSAMRYAVLPGAGNEGTAKRAPPVLCVAACELLGAPREAALPAAVALEMLHAASLVHDDLPCFDAAPTRRGRPSTHAAYGTDMAVLAGDALFPLAYTHVIAHTPSPDPVPHAVLLRVLGELARAVGSTGMAAGQFLDLAGATALGEAEVMKVLTKKFGEMAECSAACGAMLGGAGPDEEAALRRYGRTIGVLYQLVDDIRSASGNGKMRSNASVLRALGMDRALGIVEELKAQAKMEADRFGDKYGERVLPLYSFVDYAVERGFELQDAATTP

SEQ ID NO: 36988 - protein, 252 aa, Oryza sativa
MTAAAAAAAVTLLRLPLARLSSHLRSLPPRPIPPPRLRVYTSHRLLSSLLAPSHVPAVSSLAEAVAAPDGEGVEVEEEEDEEEEAEARPTTFVLPRLPRPKLSVKERKELASYAHGLGKRLKSQQVGKGGVTPSVVAAFNDNLESNELLKLKIHLNCPGELPDVILQLEESTGSIAVDQIGRSVILYRPSTSKMKKREESARNRTRFVRSREPSEEQPRSSTSKRFIKSGGAFRPQQKRRPLASKESSYGRR

SEQ ID NO: 36989 - protein, 296 aa, Oryza sativa; identical to SEQ ID NO: 32180

SEQ ID NO: 36990 - protein, 365 aa, Oryza sativa; identical to SEQ ID NO: 29965

SEQ ID NO: 36991 - protein, 233 aa, Oryza sativa; identical to SEQ ID NO: 32888

SEQ ID NO: 36992 - protein, 241 aa, Oryza sativa; identical to SEQ ID NO: 29505

SEQ ID NO: 36993 - protein, 339 aa, Oryza sativa
MDFQGFLMRATMDSIFTIAFGQDLNTLDGSGEGRRFAAAFDDASEFTMLRYLNPFWKLSRLLNVGAEAMLKERIKVVDGFVYKLIRDRSDELSNTKAHDTDSRQDILTRFIQATTSDSGTVDYKYLRDIILNIVIAGKDTTAGSLAWFLYMMCKHPEVQEKICHEAMEATNAGEAASIDEFSQSLTDEALNKMHYLHAALTETLRLYPAVPLDNKQCFSDDVLPNGFNVSKGDIVFYIPYAMGRMESLWGKDAESFRPERWLDENGVFQQESPFKFTAFQAGPRICLGKDFAYRQMKIFAAVLLRFFVLKLRDEKEIISYRTMITLSVDQGLHLTAMAR

SEQ ID NO: 36994 - protein, 435 aa, Oryza sativa; identical to SEQ ID NO: 32896

SEQ ID NO: 36995 - protein, 191 aa, Oryza sativa
MRKEIVIRLQSSEKGHKKAIKVAAAVSGVESVTLAGEDKNLLLVIGFGVDSNDLTEKLRRKVGHAEVVELRTVDADELMRVAAANQYPYRYYPGAPPPAPYYGNGGYPPPHQRGGGGGGSGGGYYTPMTMATGGYYGGGGGGYPQYGQSSSYPQYGQSSSYYPPAAAATTNTHTVVHHQYANNDPDSCAIM

SEQ ID NO: 36996 - protein, 364 aa, Oryza sativa
MARYLLRPPTAAAAAAAAASSHRRNGTTSPRGPVLGLRALASRAGKARPVMAVASEQPAARGKCPKVAAPTTGPIPAAELLGVIQDAARAGAEVIMEAVNKPRNIHYKGVADLVTDTDKLSESVILEVVRKTFPDHLILGEEGGLIGDALSEYLWCIDPLDGTTNFAHGYPSFSVSIGVLFRGKPAASTVVEFCGGPMCWSTRTVSASSGGGAYCNGQKIHVSKTDKVEQSLLVTGFGYEHDDAWVTNINLFKEYTDISRGVRRLGSAAADMSHVALGITEAYWEYRLKPWDMAAGVLIVEEAGGMVSRMDGGEFTVFDRSVLVSNGVVHDQLLDRIGPATEDLKKKGIDFSLWFKPDKYPTDF

SEQ ID NO: 36997 - protein, 258 aa, Oryza sativa
MPIEAVAVASLPMASRSAALCFSSAAAARSRSRSRHGRMAVSCDAGASDLLYSSLAAKLLGPPTSFDAGKLTVEFAHSHGNSSSGFPRAYTLTHCDFTANLTLAVSDTIAADRRLRADDVFAEWKQQQQQEGMALHVHCFVSGANLLHGLAAGFRYYVFSKELPLVLKAVVHGDALLFAEQPELLEAKVWVHFHSSSNAKYNRLECWGPLREAANAETTHKRHALEQLHNAITKGTRRRRRKWSSPDAIFSALLALLL

SEQ ID NO: 36998 - protein, 287 aa, Oryza sativa; identical to SEQ ID NO: 30679

SEQ ID NO: 36999 - protein, 232 aa, Oryza sativa
MAGGELVLLDFWASPFGQRCRIALAEKKLPYDYSEQELLGAKSDLLLRSNPIHAKVPVLLHGDGDGRAVCESLAILEYLDDAFPDATPRLLPSAADDPYARARARFWADYVDKKVYPVGTRLWKVKGEEGVRAAAGARGELVEALRTLDGELGEKEFFGGEFGFVDVALVPMMPWVYSFARYGGFSVEEECPRVAAWARRCMERDSVAGSLRSPEEIYDFIGLLRKHYGIDD

SEQ ID NO: 37000 - protein, 312 aa, Oryza sativa
MDDKNAWTYSAMVSGLALHGDGRKALEVFDAMVREGHRPDAAVYVGVLNACSRAGLLEEGLRCFDRMRLEHKLTPNAQHYGCMVDLMARAGRLDDARALIGSMPTGPTDTAWRSLLNACRIHGNLELAERALQELERLGATNAGDYIILSDMHARAHNRDAAAARRTEAVDRGLAQAPGYSAVEVHGATHRFVSQDRSHPRADDIYEMLHQMEWQLRFEGYTPDTSELALDAGEEEKRRVVAAHSQKLAMAFGLLSTPEGAPVRVVTNLRMSKECHAYSALISEIFGREIVVRDRNRFHRFKRGACSCRNYW

SEQ ID NO: 37001 - protein, 275 aa, Oryza sativa; identical to SEQ ID NO: 32894

SEQ ID NO: 37002 - protein, 48 aa, Oryza sativa
MLQIHLAVCGVKQIRMPVMLGPCSISKLHLAACTCVFFRLLGSNICEL

SEQ ID NO: 37003 - protein, 287 aa, Oryza sativa; identical to SEQ ID NO: 30679

SEQ ID NO: 37004 - protein, 203 aa, Oryza sativa
MTLTIPDDVRAKAEVYVGDEAGQEKTRLLLEETGLPSGLLPLRDIIECGYVEETGFVWLKQRRKVDHFFAKAGRHVSYAAEVSAVAEKGRLRKITGVKAKELLIWVTLHEIAVDDTPTGKLTCKAIGGLSRSFPVDAFEAPPPPPKNPSPAAGDTTKVDEEKKKEEEVAGDAAAAAIDEIEGKMKEMNSKEVQVQAEGVAAKN

SEQ ID NO: 37005 - protein, 358 aa, Oryza sativa; identical to SEQ ID NO: 32907

SEQ ID NO: 37006 - protein, 386 aa, Oryza sativa; identical to SEQ ID NO: 31842

SEQ ID NO: 37007 - protein, 119 aa, Oryza sativa
MTVVLRPDPLAAGVPRLAPHGSTGGERPSPGPARIHRRRGEESSVLNRFSSAAVAPAGFVVRMTVGSLPSFLPQRRLHIREAGDASRLRGSAVGGPGAHGSSHGAASHAGHPHLLLLPQ

SEQ ID NO: 37008 - protein, 325 aa, Oryza sativa
MAMEGPILCRAVMQAKLPVTMISNSLTKSGQLGTAFLGCVCKYRNITRLISPIYQPAQKNFATVCGSFSSSSDGNGYMAGNFSESDEDYVNSTVLEAVEVRSGAEGYVIKMRDGKNLRCVHNNSQGRNIPESAPQPAIVLRIEDGSETLLPIIVLEMPSVLLMAAIRNVHIARPTIYQVVKEMIDKMGYEVKLVRINKRIQEAYCAELFLTKVGDHTESITFDLRPSDAINIAVRCKVPIQVHRSLAYSDGIRSVEPARMAIAAGMSDGLLFTELDRPDGQPCVEAQEFGLIRNMLIAAVEERYKDAATWRDKLMLLRSKRKNWA

SEQ ID NO: 37009 - protein, 254 aa, Oryza sativa
MPTPPRRHRLQVVVIRWLLPRRPHCQRHRHQRPILLPSRRTTPPPPTPPSPPSPPASSRRRTLDRSLPPEVLTTPLPHPAQPPRRLAPLPSPIPRPQITVESTPHKPTTSQVYKPDSSSTSPPQAGCINPPHPGLPLDHRPHPAAAFVVDSASPCAAHVHAKSPSPTPHLATGSAPLRRSPPRSLSRRTGSWPPVLRSSLDAVGRWMQYSPVSPPSLRDIPIYKRSEVKSYHWTQAHSSSGRQVPSSPGYSSLL

SEQ ID NO: 37010 - protein, 304 aa, Oryza sativa
MAMATTSVTSLAMAMAAAASADATQAPHKLSALPFHHLLFSRAPPLLRASRRLPLAPLVASSDAAAAAEAGVEWSETEEADEGSQEEEEEVVEEQAEAEEEVVASVEEEEEEAVEEEFAAEPPEEAKVYVGNLPYDVDSEGLAQLFEQAGVVEVAEVIYNRETGQSRGFGFVTMSTIEEADKAIEMLNRYDINGRLLNVNRAAPRGSRVERPPRQFAPAFRAYVGNLPWQVDDSRLLQLFSEHGEVVNASVVYDRESGRSRGFGFVSMASKEELDDAISALDGQELDGRPLRVNVAAERPQRGF

SEQ ID NO: 37011 - protein, 425 aa, Oryza sativa
MGLHKEASSSSSRLDAAPLLPHHGHGGGGAGHHLSSQPKTFANVFIAVVGSGVLGLPYTFSRTGWVAGSVLLLAVAALTFHCMMLLVACRRRLAYDHPKIASFGDLGAAVCGPAGRHVVDAMLVLSQASFCVGYLIFISNTMAHLYPVGDSSPSSPLLTAKAIFIWVMLPFQLGLNSIKTLTLLAPLSIFADVVDLGAMGVVLGQDVSTWLANKPPVFASAGPTEILYGLGVAVYAFEGIGMVLPLEAEAADKRKFGGTLALSMAFIAVMYGLFGAMGYLAFGAATRDIITTNLGTGWLSVTVQLGLCINLFFTMPVMMNPVYEVAERLLCRKRYAWWLRWLLVMVVGLMAMLVPNFADFLSLVGSSVCVLLGFVLPAAFHLKVFGAEVGWPGLAGDVAVIVVGTALAVSGTWTSLAQIFSSSDV

SEQ ID NO: 37012 - protein, 290 aa, Oryza sativa; identical to SEQ ID NO: 32176

SEQ ID NO: 37013 - protein, 378 aa, Oryza sativa
MAFPSPNSLSAASHPTSSSSSFHLHLQLQQPVPHLPFPRSLPLNLPVLRLARPLLPPAPLASSGSGGIGIGGGGDDDEGRDNAGGGDGGDDDASVNRREALFVLAQLGRKLESLPADLAAAIEGGRVPGEIVQRFADLEKSGLFRWLLQFGGFKERLLADDLFLAKVAMECGVGIFTKTAAEYERRRENFVKELDFVIADVVMAIVADFMLVWLPAPTVSLQPPLAVNAGSIAKFFHNCPDNAFQVALAGTSYSLLQRVGAIMRNGAKLFAVGTSASLIGTGVTNALIKARKAVSKDFEGESEDIPIVSTSVAYGVYMAVSSNLRYQILAGVIEQRMLEPLLHHHKLVLSALCFAVRTGNTFLGSLLWVDYAKWIGIQ

SEQ ID NO: 37014 - protein, 329 aa, Oryza sativa
MAHPVAEADEKSPFGRLTAEEFYARHGVLHTSSTFVNPRGLRIFTQRWVPAGGDAPLLGAIAVVHGFTGESSWTVQLTAVHFAKAGFAVAAVDHQGHGFSEGLQGHIPDIVPVLEDCEAAFAPFRADYPPPLPCFLYGESLGGAIALLLHLRDKERWRDGAVLNGAMCGVSPRFMPPWPLEHLLWAAAAVAPTWRLAFTRGNIPDRSFKVPWKRALAVASPRRTTAPPRAATALELLRVCRELQSRFEEVELPLLVVHGGEDTVCDPGCAEELHRRAGSKDKTLRVYPGMWHQLVGEPEENVDKVFGDVLDWLKSHAAAAAAARGEGQQ

SEQ ID NO: 37015 - protein, 442 aa, Oryza sativa
MAPPLLLVSLLLIGFVSARAITPSAEAAAVFPKEALPTNSGYLPITTTNASLFFAYYEATHPLTPPASTPLLLWLQGGPGCSGLAGNFFELGPYFVNRDALSLSPNPFSWNRRFGLLFIDNPLGTGFSAAPSPAAIPTNQSVVAAHLFAALQSFFALQPGSRSRPFFLTGESYAGKYIPAAGSYILAVNPTLPTRLRVNLHGVAIGNGLTHPVAQVATHADTAYFMGLINAKQKRELEALQARAVELTNAARWSEAADARGLVLSWLENATGLATLFDAAKKRPYETGPVGKFVNRAEVKAALGARGDVEWEECSDAVGAAMHGDVMKSVKPEVEALLRGTRVLLYQGIRDLRDGVVSTEAWMRELEWDGLPAFLDADRAVWRIGEELAGYVQRSGPLSHVVVYGAGHLMPADNGRAAQEMIEDWVLQAGLFGRHGGMKRAA

SEQ ID NO: 37016 - protein, 342 aa, Oryza sativa
MAARKIAMSTSSLLLLLLAAALLLTGDAARILQEAAWPPYDYPKPDQPPPLLPTPDVVPNPNQPPLQPTPGVPPLPNPDVPPMNKPDVPPMPKPDGPPIPPVQPCPDQPPQPKPDGPPLPNPNQPPQPNPNGPPKPDMPPMPKPDGLPNTYEPSRPDQPPQPISDGPPLPNPNVPPKPDQPPQPIPNGPPKPDMLPMPKPDGSPNSYAPSVPDQSTQPNPNGPSIPNQPPQPIPNGPIKPDQPPQPNPDMPPKPDQPPQPCPDGPPKPDQPPQPNPNGPPKPDQPPQPNPNGPSKPDQPPRPNPDMPPKPDQPPQPEYYEQPPKPDAPQMPPLPNGEIPFSP

SEQ ID NO: 37017 - protein, 500 aa, Oryza sativa
MDRRLLLSALLFIALACSSNRVHGALNRHSFPEGFLFGTGTSAYQYEGAVDKRGQNIWDTFSRIPGKIADGSNADIANDFYHRYKEDLNLITAMNMDSFRFSIAWSRILPNGTISGGINKEGVEFYNSLINEVIAKGLKPFVTIFHFDTPQALEDKYGGFLSENIVKDYVDYADLCFSLFGDRVKLWNTFNEPTIFCMNGYATGIMAPGRCSPYASASCAAGGDSGREPYVAGHHLLVAHAEAVRLYRARYRAAHGGEVGITQVSHWFEPYDAGSAADRRARRRALDFMLGWFMHPVAHGEYPPAMRRLVGGRLPAFTAEQSEMLRGSFDFIGLNYYTSNYAVAAPPPNKLHPSYLTDNWVNATGYRNSIPIGPPAYTPIFFNYPPGLRELLLYVKRRYNNPTIYITENGTDEANNSTIPISEALKDETRIGFHYKHLQFVHKAIQEGVKVKGYFTWTFMDCFEFGDGFKDRFGLIYVDRATLARFRKKSSYWFADFLRR

SEQ ID NO: 37018 - protein, 316 aa, Oryza sativa
MAAASAAFLLLLPAVSPAAPTHPRLLFSCPPYRSRPRHRARLAASRSSSDGEGDGGIVTGPAGGGGGVFLSPRALSQRDELAAFRYAHSFPHGRLTVRALTPAGDDDESDALVRLLASSFAENVRWAPAQRYEQLLAFVIRRYLFERRGLAPHAAVLVGYYRPAATGDGDEEEGEGNEDDDDYGEMACTAEVSLDAVGAPGAPPTPTPPLDFPYICNMTVKTSLRRRGIGKQLLKACEDLIIKMDAKRHVYLHCRIIDQVPFNMYRKAGYNIVQTDSILVWLSLQKRKHLMSKELLQTSVSSRSTAKDFDDNKLTS

SEQ ID NO: 37019 - protein, 59 aa, Oryza sativa
MALDAGHQRRRGGRGRRRAAQGCGCPCFQLHHDHLLLLLRQGDRQGGEVRRNRRGGRLP

SEQ ID NO: 37020 - protein, 499 aa, Oryza sativa; identical to SEQ ID NO: 36759

SEQ ID NO: 37021 - protein, 482 aa, Oryza sativa
MAKPTVVVLPVWGAGHFMPMIEAGKRLLRGSGGALSVTVLLMPAPTPDAAVDIAAQVKREEASGADDISFRHLPAVDMPTGHTGVEEWISRILRSHAPNVWAAIAGLDCPVAALVTDIFCTPALEVSRELGVPGYVYFPCSASMLALLLRSPGLDEEVAVEFEEMDGAIRIPGLPPVPPSALPSTMLDRKKSTYDWFVATGRGYMNATGVIVNTAAELEQSVLAAIADGRCTRGVPAPTVYPIGPVLSFPPPPEEQPHECVRWLDAQPPASVLFLCFGSKGLLPPPKVREIAAALERSGGHRFLWVLRGPPKDSRQGQRVPTDAMLDELLPEGFLERTKGRGLVWPTRAPQKEILAHAAVGGFVTHCGWNSILESLWFGVPVLPWPLDAEQHFNAFTLVAHLGVAVPLGMDRRRDNFVEAAELERAVRSLMDDASDEGRKARAKAAETRAVCRKAVEEGGSSSTAFQRLTDDIVRRGAVQIR

SEQ ID NO: 37022 - protein, 499 aa, Oryza sativa
MENSQVWLLWGALSVAVLFYLSTLRRRYAGGKPLPPGPTPLPLIGNLHLAGGTFHHKLRDLARVHGPVMTLKLGLATNVVISSREAAIEAYTKYDRHLAARATPDTFRACGFADRSMVFIPSSDPQWKALRGIQGSHVFTPRGLAAVRPIRERKVGDLIAYLRAHAGEEVLLGQAMYTGLLNLVSFSYFSIDIVDMGSQMARDLREVVDDIISVVGKPNISDFYPFLRPLDLQGLRRWTTKRFNRVFSIMGDIIDRRLAHIRDGKPRHDDFLDSLLELMATGKMERVNVVNMLFEAFVAGVDTMALTLEWVMAELLHNPAIMARVRAELSDVLGGKEAVEEADAARLPYLQAVLKEAMRLHPVGALLLPHFAAEDGVEIGGYAVPRGSTVLFNAWAIMRDPAAWERPDEFVPERFLGRSPPLDFRGKDVEFMPFGSGRRLCPGLPLAERVVPFILASMLHTFEWKLPGGMTAEDVDVSEKFKSANVLAVPLKAVPVLIK

SEQ ID NO: 37023 - protein, 459 aa, Oryza sativa
MDQQLHLQGTSTATTVPLQGDPASDHHPHLSIDIPPAAASMSPAPTQAAADITPTPTTSILSTKASTPAGSCSSRSTSVAPKPQRSSSFMLRQTVKSLLPVGSFKSSVKFFNARISRTSSLPVTDVSQEQADKTSTTHAVDKAGHMYRSQSLPMNMKKLNNGKSFKRMNSLGGVYRVVPSTPSVPVTSSNVIPDIVPSEPGDEDGEDIAEEEAVCRICMVELSEGSDTLKLECSCKGELALAHKHCAMKWFTMKGTRTCEVCKEDVQNLPVTLVRVQSMQQPELQTNPANASRYDRLRMWQGAPILVIVSILAYFCFLEQLLVARDGIAALAISLPFSCILGLFSSLTTTSMVARRYVWIYATIQFLFVVFFTHLFYRYLHLQAVISIILATFAGFGVGMTGNSIIVEIIRWRAARAAAAPPAQTRHRRRRHGRRQQQPPPAQPAASSAAVADVENPPV

SEQ ID NO: 37024 - protein, 566 aa, Oryza sativa
MALTRRLLIDLSSRRRLFNAGKFSTTHKKKPVLHEAVSLAGFLRCSRALVSWMVAERKMQPSPAAPPAAEHRRRALLRYVVFLAVSLLAFSCWALVSSRIDGAVLAATAGGEHDDHDGIIVRSSTQAEMPARGGNATSRGAVEVGVGTPAAMITRQPSSGETTTTAALAATCDAESALLRVYLYDLPPEFHFGMLGWDGKAAGAAWPDVAGDPRAVPRYPGGLNLQHSVEYWLTLDILSSTTSGDHRRRRPCTAVRVTNASLADVFLVPFFASLSYNRQSKSPHGGHGSGGRSDRQLQGELVRYLARREEWRRWGGADHLVVPHHPNSMMDARRRLSAAMFVLSDFGRYPPDVANLRKDVIAPYKHVVPSLGDGDSPGFEQRPVLAYFQGAIHRKNGGRVRQRLYQLIKDEKDVHFTYGSVRQNGIRRATKGMASSKFCLNIAGDTPSSNRLFDAIVSHCVPVIISDDIELPFEDVLDYSAFCVFVRASDAVKRGFLLHLLRGISQEEWTAMWRRLKEVAHHFEYQYPSQPGDAVQMIWGAVARKMHLVKLQLHKRGRYQRTFSES

SEQ ID NO: 37025 - protein, 443 aa, Oryza sativa
MASPSLRDAVGGLDRDPFVSLLGKLIGESRRLQNDPPALVPQEDLVAQHVVDALLPVSMETGGGPLVVRKVSYAEGRSNVIVEYPGTVPGRAISFVGMHMDVVPANPDEWDFDPFSLTFDSEDKDKLRGRGTTDCLGHVALVAQLMRRLGEVKPVLKHSVIAVFIANEENSLITGIGVDGLVKDGLLDKLKNGPLFWIDTADKQPCIGTGGVITWHLKAIGKLFHSGLAHKAINAMELNMEALKEIQTMFYNDFPPHEKEKLYKFATPSTIKPTKWSYPGGGLNQIPGECTISGDIRLTPFYSTTSVVKKLQEYVHDINENIEKLPTRGPVSKYVLPDENLRGRLEITIDEDIMNGVACNLESRGFQALCKATEEIVGHVEPYSITGSLPLIRELQDEGFDVQTAGYGLLKTYHAKNEYCLFSDMAQGFQVFLSIISQLEADV

SEQ ID NO: 37026 - protein, 271 aa, Oryza sativa
MKKTVVLYPGLAVGHLNPMMELADVFLDHGYAVAVALIDPSVMENEANLAAAVARAVSSKSSTISFHTLPGIPDPPSLAFNDQFFKNYFDLVRRHNEHLHDFLRSVRGLHAVVIDASCAHAHEAARKLGVPVLMFYPSNAGHLAVNLQAPLLVDGFKKHLGGDSTSPVEFLGVRPMSASHLAGLFGPISEVNKDFEAMIFAGARMKAEFDGILINTSVSLEERALRALADPRCCPDGVVIPPVYAVGPLVDKAAAAAGDESSRHQCLVWLD

SEQ ID NO: 37027 - protein, 263 aa, Oryza sativa
MVFKKNAMSSSVLFLAALLLLSSSSMSSAARWLEEEYPPHPTVPELPKPEVPPHPAVPELPKHEEPPHPVVPELPKHEEPPHPVVPELPKPELPPHPVVPELPKHEEPPHPAVVPELPKHEEPPHPAVVPEFPKHEEPPHPAVPELPHPAVPEIPHPAVPELPKHEEPPHPVVPELPKPEVPHAAVPELPKPELPPHPAVPELPKHEEPPHPVVPELPKHEEPPHPVVPELPKPEEPHHPEVPEHEQPPKPESHYPEVPMAKP

SEQ ID NO: 37028 - protein, 291 aa, Oryza sativa
MATAFHTIAAARPRLPLAAFACLCPGPRPATRKLSLTSTAVSTIDSAPASSSDAKKTTTVFVAGSTGRTGKRVVEKLLERGFGVVAGTTDVGRARRSLPQDPNLQLVRADVMEGTDKLVDAIRGADAVVCATGFRRSFDPFAPWKVDNFGTVNLVEACRKAGVTRFILVSSILVNGAAMGQLLNPAYTVLNLFGLVLVAKLQAEKHIRSSGINYTIIRPGGLTEQPPTGNIVMEPEDTLYEGSISRQQVAEVAVEALLCREESSYKVVEIVTRAEAHNRPLKDLFASIKQS

SEQ ID NO: 37029 - protein, 236 aa, Oryza sativa
MAPLLLLFLLGGLCALFSLASSSPATKKCGDAKKRREEEGEEVVVVAKKRPEEEPRRPDPDADLGIVFSTFDHDGDGFITAAELEESLKRLGIAVSSAAEAAALVARVDANSDGLIDIHEFRELYDSIPKRRKSHQQHPLPSTAAADEEAAAADEEYEAEEEERDLREAFDVFDGNKDGLISAEELGTVLESLGLRQHGGRPAVAECRDMIRLVDSDGDGMVSFEEFKRMMTVVKA

SEQ ID NO: 37030 - protein, 299 aa, Oryza sativa
MLLVVPQGAHAVRLGNEASIRQRLAVTRGAYYAVTFSAARTCAQAEQLNVSVSPEWGVLPMQTIYGSNGWDSYAWAFKAKMDEVALVIHNPGVEEDPACGPLIDGVAIRALYPPTLAKGNMLKNGGFEEGPYFLPNASWGVLVPPNIEDDHSPLPAWMIMSSKAVKYVDAAHFAVPQGARAVELVGGKESALVQEVRTVPGWTYRLSFAVGDARDGCAGSMVAEAYAARASIKVPYESKGTGGYKRAVLEFAAIANRTRVVFQSTFYHTMTDGSLCGPVIDDASLVGLRKKTAGRRLLL

SEQ ID NO: 37031 - protein, 329 aa, Oryza sativa
MCGGAILAELIPSAPAARRVTAGHVWPGDANKAKKKGARADDFEAAFRDFDNDSDDEEMMVEEAEEEEATSEHKPFVFRAKKAAAAASSRRRKPAQYRGVRRRPWGKWAAEIRDPVKGIRVWLGTFTNAEAAALAYDDAARAIRGDRAKLNFPSATTPDTRKRGRATAAAAPAVKATPVINLVEEEDEEEVAAAMASIKYEPETSESSESNALPDFSWQGMSASDEFAVAAAALSLDSDDDLAKKRPRTEPEDTTDSGSGDDTDALFDALLFADQYNHFNGGAYESLDSLFSADAVQTTAAAAAADQGMGLWSFDDGCCLVDVEASLSF

SEQ ID NO: 37032 - protein, 505 aa, Oryza sativa
MLAAVLRNEIAWFDMEDNSSARIAARLALDAQNVRSAIGDRISIIVQNSALMLVACTAGFVLQWRLALVLLAVFPLVVAATVLQKMFLKGFSGDLERAHARATQIAGEAVANVRTVAAFGSEAKIVGLFEANLAGPLRRCFWKGQIAGSGYGVAQFLLYASYALGLWYAAWLVKHGVSDFSKTIRVFMVLMVSANGAAETLTLAPDFVKGGRAMQAVFEAMDRRTEIEPDDVDAAAVPERPRGEVELKHVDFAYPSRPEVQVFRDLSLRARAGRTLALVGASGCGKSSVLALVQRFYEPNSGRVLLDGRDLRKFNLRSLRRAMALVPQEPFLFAATIHDNIAYGREGATEAEVVEAATAANAHKFISALPEGYGTLVGERGVQLSGGQRQRIAIARALVKQAPILLLDEATSALDAESERSVQEALASSSGSGRTTIVVAHRLATVRNAHTIAVIDDGKVAEQGSHSHLLNHHPDGCYARMLQLQRLSHSHVAPGPSSSTTTHGT

SEQ ID NO: 37033 - protein, 206 aa, Oryza sativa
MQMSTNPNHYPVFPHSFRNQHVVSFQTSTIANGSGAIPVCPASSGGMNSDMTLLNTTPSTIVSTSSPNMLADSNQSLKYAAPMAVDWSYPELQLLNDGLLKYANEPGIMKYIKIAAMLPEKTVRDVAMRCQWMAAKKENTRRRKTDEHYLGKKTRDRKDKMVESSWATNRQVQTTDIRSPSTLACNTVRDNQFQSGGWCVTYEVAV

SEQ ID NO: 37034 - protein, 211 aa, Oryza sativa
MATAMMAATATSCSPRRAPVVASSSVQPPRRQQQQQPRRGLKQLPGLVATAAVAVAAAPLPALAEQMEKAALFDFNLTLPLIATEFLLLMVALDKLYFTPLGKFMDERDAKIRAELGGVKDASEEVRQLEEQAAAVLKAARAEIAAALNKMKKETTQELEAKLDEGRRRVEAELVEALANLEAQKEEAVKALDAQIASLSDEIVKKVLPSA

SEQ ID NO: 37035 - protein, 241 aa, Oryza sativa; identical to SEQ ID NO: 30626

SEQ ID NO: 37036 - protein, 463 aa, Oryza sativa
MASATLLKSSFLPKKSEWGATRQAAAPKPVTVSMVVRAGAYDDELVKTAKTIASPGRGILAMDESNATCGKRLASIGLENTEANRQAYRTLLVTAPGLGQYISGAILFEETLYQSTVDGKKIVDILTEQKIVPGIKVDKGLVPLAGSNNESWCQGLDGLASREAAYYQQGARFAKWRTVVSIPNGPSELAVKEAAWGLARYAAISQDNGLVPIVEPEILLDGEHGIDRTFEVAQKVWAETFFYMAENNVMFEGILLKPSMVTPGAECKDRATPEQVSDYTLKLLHRRIPPAVPGIMFLSGGQSEVEATQNLNAMNQGPNPWHVSFSYARALQNTCLKTWGGQPENVKAAQDALLLRAKANSLAQLGKYTSDGEAAAATSRAPPTAPTRSATRPSSRSSSTCPRSSPSSPSSATTGCSTSTTPTPTRSSASPPSTTSGSCAGSRTWTRRCTASWWRGPRRRGTT

SEQ ID NO: 37037 - protein, 292 aa, Oryza sativa
MAVGDDAAPAATKISISGAALAALLQRCGMADGDCDGLLSGRASTTPAPPPSLSDYDDHAPAQSAPAISLSISGHSSLSRPSSLSDPLGRFHPSASAAAAGPASIGFFSSRRRTALRPSMRELSLAHSLSKSLALAHPLLFLLVSPSSPNLSTHSYDHRAFLLIGSRLVPTSLHVVNVGPVFRDQYHSFAPDSPMPWLPLAQHSSSSSAAAGDAHTIGEQNAVDGVVDGFGLGKLQGILGSVAGQAAEMDGMYAGMLRRLEKLAREVEKSNLLVLKQENRNLLLRFRYAGLE

SEQ ID NO: 37038 - protein, 327 aa, Oryza sativa
MASPSPSSSPLHPQHQHQHPLPPHPQPQYQSPPPPMPPPPPAAPLKAIDLEVTVVSGKHLKNVNWRRGDLRAYVVAYLDPSRRAATRPDDVGGCKPAWNERVVLPLPPHLSPHDPSLLLSLDVFHSKPSDSPKPLVGSARSPLRDLLFSTNPNPSPDSPASALITLPLLRPSGRPQGKLRIRLALRERSPPPPEPQYPPPSSSPYYFPPPPPPAYSAPPPPQYGSEQYYRSGGYYSAPPPPPQYEYTAGPSAPVEYNRQYDPRAGSGSGNGRYGVGTGIAVGTVTGALGGLAIDEGVKYKEEKSADRVEDKVVPAGRDDDSRGYREY

SEQ ID NO: 37039 - protein, 386 aa, Oryza sativa
MFLDRGAPPDAVNRHKQTPLMLAAMHGKIDCVLKLLQADANILMFDSVHARTCLHHAAYYGHVDCLQAILAAAQTTPVADSWGFARFVNVRDDHGATPLHLAARQGRPGCVQVLLENGAIVSALTGSYGFPGSTSLHLAARSGNLDCIRKLLAWGADRLQRDSAGRIPYSVALKRNHGACAALLNPTSAEPMVWPSPLKFISELEPEAKALLEAALMEANREREKKILNGTKYSLPSPSPGDDSADDDACSEVSDTELCCICFDQACTIEVQDCGHQMCAPCTLALCCHNKPNPTTLTPPSPACPFCRGSISRLVVAQTRSACDPDKPSSLQLTRKRSRRSHNLSEGSSSFKGLPSAMGSFSKLGRGSSRMADSDSSNLDKPEHDL

SEQ ID NO: 37040 - protein, 454 aa, Oryza sativa
MAPPCGRVVLFPMPYPGHTIPMFHLAAVLRSRGFSITVLHTELRAPDPAAHPPEYRFVAVADGTPPELVVSEDAAAVLTSLNETCAAPFADRLAALLAEEGGVLCVIADVMWYAPAAAAPELGVPLMLLMTSSASSFRTFMEYPLLLERGFLPVDDAQKDTLVDILPPFRVKDLQRIDTTNLYSFANVLANVVAAARLSSGLILNTFDFIEGDNICRIRDELSIPVFAIGPLNKLIPLVGRSSFLPPDCDCLRWLDTQAPSSVLFVSFGTMATIDAQEFLEVAWGLAGTKLPFLWVVRPSLVRGLRLHSSELPSDLQEEINGRGRIVSWAPQEKVLGHPSVRAFMTHNGWNSTIESISEGVPMICRPCFGDQMGNARYVCAVWRLGVEMEVGSVLQRAKVQTAVEKLVNGEEGQNVKQRMRNLRIEAEKCVSKGGSSDTGLRNLVDSILSFGKC

SEQ ID NO: 37041 - protein, 327 aa, Oryza sativa; identical to SEQ ID NO: 31367

SEQ ID NO: 37042 - protein, 143 aa, Oryza sativa; identical to SEQ ID NO: 33642

SEQ ID NO: 37043 - protein, 288 aa, Oryza sativa
MVSSSNPGRTPPLVAAIVCSVLLLAGGAAGNFYQDVDITWGDGRGKILGNGQLLTLSLDRSSGSGFQSKNQYLYGRFDMQIKLVPGNSAGTVATFYLSSQGSQHDEIDFEFLGNASGEPYTVHTNVYSQGKGGREQQFRMWFDPTKDFHTYSVLWNPSHILFYVDGTPIREYRNTEATTGVAFPRAQAMRVYASLWDAEEWATQGGRVRTDWSRAPFTASYRGLAASGCTSQDATACANPGSPWMYQQQLDSASQDRLRQVQRDYMIYNYCADTYRFPQGLPPECTAK

SEQ ID NO: 37044 - protein, 433 aa, Oryza sativa
MAAIDLSSPARSSPAPLSPRRGSLHLLLRRPRRPTLRCSLDAAPKQAQAQGPPAAVAAEEAPTARKECYGVFCTTYDLRADEKTKSWKSLVNVAVSGAAGMISNHLLFKLASGEVFGPDQPIALKLLGSERSIQALEGVAMELEDSLYPLLREVSIGIDPYVVFEDAEWALLIGAKPRGPGMERSALLDINGQIFAEQGKALNSVASRNVKVIVVGNPCNTNALICLKNAPNIPAKNFHALTRLDENRAKCQLALKAGVFYDKVSNMTIWGNHSTTQVPDFLNAKINGRPVKEVIKDTKWLEDEFTKTVQKRGGVLIQKWGRSSAASTAVSIVDAIRSLVNPTPEGDWFSTGVYTTGNPYGIAEDIVFSMPCRSKGDGDYELVKDVAMDDFLWERIKKSEAELLAEKRCVAHLTGEGNAFCDLPGDTMLPGEM

SEQ ID NO: 37045 - protein, 256 aa, Oryza sativa
MSPPLELDYIGLSPPVPAAADAAADNDLKGTELRLGLPGSHSPDRSPPAATLDLLPAAKGAKRGFSDEARPLPASAAAAAAGKGKKAAAGEEDEDAEEEDKKVAAAPQAPAAKAQVVGWPPIRSYRKNTMATNQLKSSKEDAEAKQGQGFLYVKVSMDGAPYLRKVDLKTYKNYKDLSTALEKMFIGFTTGKDGLSESRKDGEYVLTYEDKDGDWMLVGDVPWEMFANSCRRLRIMKGSDAIGLAPRAVDKSKNRN

SEQ ID NO: 37046 - protein, 256 aa, Oryza sativa
MKRTIIVKVDLECERCYAKIDRVLTRIRDKGEFVIDDIEFDVKHNKVIVSGPFDPDKLADKLCCKACKIIKEIEIVDLPPPPPPPAPEPEPEPPKKEEPQPPPPKEEEKPEPPPAVIIVEPPAPAPEPEPEPPKKEPPPPPPPKQEPCPPPPKVVEVPYPWPYPYPFPSWPSDCCCHHGHGGCHCCSCGKAPEPAPAPAPPPPQYIPCYPPQQPYPCGASAAAVHPLLPAAAALPLRRLQDRLRGGPLLRLRHHVT

SEQ ID NO: 37047 - protein, 280 aa, Oryza sativa; identical to SEQ ID NO: 30549

SEQ ID NO: 37048 - protein, 215 aa, Oryza sativa
MCSRLYSWMRCALTRSCLGYATCTGPTSGARTSTTSCARRSGRCSAATTTRRATGSPTSASTPAGTRPPSGVPPHQLRRRAGGASRRCRGADDQHDHHGHRAGPAAAAAQGGGRRRLVRPGGGAEQPHARQLRGARRRRRRRSRGSLRAGPGRCHVLPALELRRRRRHGVLQERRGCLRSGRHYGFELLITEESWMDTGRVKRSKEDGFHACVQK

SEQ ID NO: 37049 - protein, 303 aa, Oryza sativa
MLLNPASREVAALDSIRHHLLEEEEETPATAPAPTRRPVYCRSSSFGSLVADQWSESLPFRPNDAEDMVVYGALRDAFSSGWLPDGSFAAVKPESQDSYDGSSIGSFLASSSSEAGTPGEVTSTEATVTPGIREGEGEAVAVASRGKHYRGVRQRPWGKFAAEIRDPAKNGARVWLGTFDSAEEAAVAYDRAAYRMRGSRALLNFPLRIGSEIAAAAAAAAAGNKRPYPDPASSGSSSPSSSSSSSSSSSSGSPKRRKRGEAAAASMAMALVPPPPPPAQAPVQLALPAQPWFAAGPIQQLVS

SEQ ID NO: 37050 - protein, 324 aa, Oryza sativa
MEKAAGFLSSLLGGGEEVPPEPAATVRSILIYPIKSCRGISVPQAPITSTGFRWDRQWVVVNSKGRAYTQRVEPKLALVEVEMPPEAFAEEWRPTADSYLVGRAPGMDPLKIPLSAEQAIINDVSVWEWSGSAYDEGAEAAEWFSSYFGNPSRLVRFKEGSEIRPTNPDYAQGYKIMFTDCFPFLMASQGSLDALNEVLKEPVPMNRFRPNILVDGCHPYSEDLWKTIKINKLTFQGVKLCNRCKVPTINQENGILGTEPTETLLTFRSDEVLRPSHKNKRQVYFGQNLVCKESLSAKGKGRIIKVSDPVYVLERFPSSDEAPA

SEQ ID NO: 37051 - protein, 464 aa, Oryza sativa
MAHVMAASELVTATIKRPFQNDDDNSSNGNGNADGKPKARRREADPAAALAAARHEFGEHGGVNMSIEASATFTVMEPDTMRRLFSGELGPERGDLYIYSRHFNPTVLALGRQMAALEGTEAAYCTASGMSAISSVLMQLVGAGGHVVASRCLYGGTHALLSRFLPRASGVRTTFVDADDEAAVRAAVRPGETRVVYVETMSNPTLAVADIPMLARVAHDAGAKLVVDNTFTPMVVSPARLGADVVVHSVSKFISGGADIIAGAICGPASLVNAMMDLQEGALMLLGPTMNAKVAFELSERLPHLPLRMQEHSRRAAEYASRMRRLGLRVAYPGLPDHPHHARLLAIANPGYGAGGMLCVDMGTEDRANRLMHHLQNTTRFGLMAVSLGYYETLMSCSGSSTSSEMPPEDRARAGISPGLVRMSVGYNGTLEQRWAQFERALSLMQQQQQQHPDRDAAAKYCKV

SEQ ID NO: 37052 - protein, 363 aa, Oryza sativa
MAEVCTPGAAEAELWLPDEFLDDDFFTVEEKAAVAAKSESDEEDGLDGLARRMADLLAGEGGKGTGSKVEVMAGSPQSTLCGLAASGEDSPNGGASQFSSPPSSPLEQPPTDPWDVLSEAAGQVARLRMNSIPVPQKPHAHAGHGRFVPPARNPSPPVQAQKTAGAFQFAPNNNMLTQRQVQVAHFHLLKQRQLLKQQREQQLAAAAAAAWGTHRAGVGVGAPLGLNSSGWPPLQKAHQQASSAAGMRAVFLSPPGGKTERTGTGVFIPRQAGAPAEPKKKPSCSTVLLPARVVQALNLNVDDLGARPCFPGGFVLDHDALVSRSNAMLTTQKRVQHHLHAATAAPPTLAAAREVNLPQEWTY

SEQ ID NO: 37053 - protein, 497 aa, Oryza sativa
MVSRRFKPVEECSSDGRSEQTVAADFDGTLVRSRSAFPYYLLVALEAGSVLRAVVLLLSVPFVYVTYIFFSESLAISTLVYISVAGLKVRNIEMVARSVLPKFYAEDVHPESWRVFNSFGKRYIITASPRIMVEHFAKTFLGADKVVGTELEVGKNGKATGFMVKPGVLVGDHKRQAVVKELRDAVPDVGLGDRETDFDFMSICKEAYLVTSRKYSAVPKNQLLSPLILHDGRLVQRPTPLVALVTFLWMPFGFALALLRVYVNLPLPERIVFYTYKLMGIRLIVKGNPPPPPKKGHPGVLFVCNHRTVLDPVEVAVALRRKVSCVTYSISKFSELISPIKAVALSREREKDAENIRRLLEEGDLVICPEGTTCREPFLLRFSALFAELTDRIVPVAINTKESMFHGSTVRGFKLMDPYFFFMNPRPTYEITFLNQLPKELTCSGGKSPIEVANYIQKTLSGQLGFECTAITRKEKYSILAGTDGRVPSKNKEKEKN

SEQ ID NO: 37054 - protein, 247 aa, Oryza sativa
MRRSILSLCFHLALVIALAANVPDIANGRVIEAKSDPKPADPKPKPDPTPKPQPETKPSPQPNPQPNPQPDPKPSPQPDPKPTPQPEPKQDPQPNPQPDPKQSPQPDPKPTPQPNPKQDPQPNPQPDPKPTLQPNPKQDPQPNPQPNPKPTPQLDPKQDPQPNPQPSPKADPKPNPKPKPQPEPSPNPKPEPKPEPKPEPSPNPKPNPNPKPEPQPDPKPEPKPQPEPSQPKLPPLSPAIAIIVPGN

SEQ ID NO: 37055 - protein, 235 aa, Oryza sativa
MDEGADAGARGVRGGGVPGGGRRVGGAVRRQVRGRGGRGGAEAGAGGDGRAELAARRPLHRRTRGARRVVPDVPRVRPRRVARRRGGEVRRADGGVRRRGVRGGRGQGARVPPRDGAGARGRQGEECRDRRRRPGEARGLRVREVGGFGPADRRHAGVHGARGRARGGAEPSRRRLGARLHGHRDGHRPRAVERHGRRARGGAPDWLHGGRPRGPRLAVRRREGLLGQVLATAPH

SEQ ID NO: 37056 - protein, 181 aa, Oryza sativa; identical to SEQ ID NO: 32422

SEQ ID NO: 37057 - protein, 482 aa, Oryza sativa
MGSEVKPAKLGLRRHLNAGFFAGFLLVLLTYVIVSQQFAMETPTAVTSRAPRIDENESVTKARVETEKKREQEWQRPKDTSGAVSAEEFSKRDSTNAKPIENGKVVCGSNGFYSDTCDVDGDVRINGTALSVTLVPASRRSERRREWKIQPYPRRTVSGIAEVTVTRQQDRAAAPACTVTHGVPGVVFALGGLTGNYWHDFSDVLVPLFVASRRYGGEVQFLVSNIQPWWLGKYEAVVRRLSRYDAVDLDRDTEVRCFRRVAVGLRMHKEFSVKPELAPGGQRLTMADFAAFLRDTYALPRAAAAGARRPRLVVIRRAHYRKIVNMDEVVRAAEAAGFEAAVMSPRFDEPVEEVARKVNAFDAMVGVHGAGLTNAVFLPAGAVVIQVVPYGRLERMARADFGEPVADMGLRYMEYSVAADESTLLEMLGPEHQVVKDPEAVHRSGWDKVAEYYLGKQDVRINVARFAATLAAAFDHLRPSHS

SEQ ID NO: 37058 - protein, 384 aa, Oryza sativa
MKAAMADEFKIVLTRKERFLYLAKAVVFLVIFALGVVAGLWTATGPRRCCSTYTNILFPSTTVYRYRGGGGGSFSEFVAPTRLMHDMTDEQLFWRATMAPASSGGAYPFQRVPKVAFMFLAGRGVLPLAPLWERFFRGHEGLFSIYVHAPPGMVLNVSDDSPFYGRQIPSQETSWGSITLMDAEKRLLANALLDFSNDRFVLLSESCIPVQSFPVAYGYLTGSRHSFVEVYYHKGKTCRGRYSRRMEPDITLPQWRKGSQWFELRRDLAVAALTDARYYPLFRRHCRPSCYPDEHYLPTFVAMLHGADNSNRTVTYVDWSRGGAHPATYTAGDVTPELILSIRRSEVPCMYNSRPTTACFLFARKFSADALEPLLNISSTVMQY

SEQ ID NO: 37059 - protein, 451 aa, Oryza sativa
MGSVSPPAPEEDAAAVESAGAAARMFWHETKRLWAIGTPIAIGTITNYAISSVTTMFIGHLGNLPLAAASVGLSVFATFALGFLLGMGSALETLCGQAFGAGQVSMLGVYLQRSWIILLGATVLMVPVYVLAEPLLLLVGQDPEVARAAGRFTLYILPGAFAFAVNFPSGKFLQAQSKVGVLAWIGVAGLAFHVGITYLAVSVLGWGLPGAAAAYDVSQWASSLAQVAYIMGWCREGWRGWSMAAFHDLAAFLRLSIESAVMLCLEIWYLGLITVLTGDLDDAQMAVDSLGICMNINGYEGMIFIGLNAAISVRVSNELGSGRPRAAMHAVVVVVAESLLIGLLCMALVLAFSDKLALVYTSDAHLLRAVSRIAGLLGVTMVLNSVQPVLSGVAVGGGWQGLVAYINLACYYLFGLPVGYLLGYYFNLGVGVPIPIPIPTYLPSLFFFPLI

SEQ ID NO: 37060 - protein, 267 aa, Oryza sativa
MDEGGGAGAAAAAAGNAAGAAVHHNARSAEDVFRDFRARRAGIVKALTTDVEKFYRQCDPEKENLCLYGLPNETWDVTLPAEEVPPELPEPALGINFARDGMIEKDWLSLVAVHSDAWLLSVAFYFGARFGFDKEARRRLFTMINGLPTVYEVVTGIAKKQTKVSNGSSKSNKSNPKPSKQSNSNSKPAKPPQPKDEEDSGPEGTEDEDQAYMCGACGETYANGEFWICCDVCEKWFHGKCVRITPAKAEHIKQYKCPGCSSKRSRE

SEQ ID NO: 37061 - protein, 453 aa, Oryza sativa
MRGVSVVLVLIACWLCGCPVAGEAAFAGDIRVDLTHVDAGKELPKRELIRRAMQRSKARAAALSVVRNGGGFYGSIAQAREREREPGMAVRASGDLEYVLDLAVGTPPQPITALLDTGSDLIWTQCDTCTACLRQPDPLFSPRMSSSYEPMRCAGQLCGDILHHSCVRPDTCTYRYSYGDGTTTLGYYATERFTFASSSGETQSVPLGFGCGTMNVGSLNNASGIVGFGRDPLSLVSQLSIRRFSYCLTPYASSRKSTLQFGSLADVGLYDDATGPVQTTPILQSAQNPTFYYVAFTGVTVGARRLRIPASAFALRPDGSGGVIIDSGTALTLFPVAVLAEVVRAFRSQLRLPFANGSSPDDGVCFAAPAVAAGGGRMARQVAVPRMVFHFQGADLDLPRENYVLEDHRRGHLCVLLGDSGDDGATIGNFVQQDMRVVYDLERETLSFAPVEC

SEQ ID NO: 37062 - protein, 329 aa, Oryza sativa
MASPSGAGKPPAVLLLRPVDQPFAVALRERYRVLDLLSSGQPLPAFLAAAAAAPDPPRAAVVMGGGSIRADAALFDAVPSLRCVVSTAAGVDHIDLAECARRGVVVANSGTVYSGDVADHAVGMVIDVMRRVSAAERYVRRGLWPVQGDYPLGSKVSGKRVGIIGLGNIGSLIAKRLEAFGCVISYNSRNPKRSLPYTYYADVRALAADSDVLVVSCALNSETRHIVGGEVLDALGEGGVVVNVGRGANVDEAALVRALREGRIAGAGLDVFEGEPKVSPELREMENVVLTPHVAVWTAESRSDLRDHTVANLDAFFSGDPLLTPVMLP

SEQ ID NO: 37063 - protein, 470 aa, Oryza sativa
MASTAVSRHVVAVPYPGRGHINPMLAACRLLAAADGELTVTVVVTEEWHGLLASAGVPATLPPAGRVRLATIPNVIPSEHGRGADPAGFFEAVDAKMGVAVEQLLDRLERRPDAIVADTYLAWGVPAGAARGIPVCSLWTMAATFFWALYNIHLWPPVDDREGEQDLSRKSLEQYVPGCSSVRLSDVKIFRSWERSMKLTTEAFVNVRKAQCVLFTSFYELEPCAMDRITQAVPFPVYPVGPSISDMPLDGGAGKIDDEEHRAWLDAQPERSVLYVSFGSVVSMWPSQLEEVAVALRDSAVRFFWVARDSASAGDLRRIAGGNGLVVPWCDQLGVLCHRSVGGFLSHCGWNSLLEAVFAGVPLLALPVVWDQVVDARVVADEWRIGVNLSEQRREEDDGGGVVVGRDAIRAAAARLMDPDDGESREMRRRAALLREACRGAVQDGPDGGSSRRSLNGFVKDLADGRLNFQ

SEQ ID NO: 37064 - protein, 469 aa, Oryza sativa
MVFTKFAPLLAVAALAASDVSAMPRIDSGVHRALRQQATVNLVLTMKTGVDSAVNSIKEADFATRGQKIASLVTALKLNAKTSQSAVDAALAPHEAGGASPLFKSIETIWITNQKIIKGATLELVEKLAGVADIAEIREEKVIPTPKFELASNATEATVLANEWGVAKISAPSVWSAGVTGQNVVIGSLDTGVRATHTSIAANFRSSFNWFDATPANKKAAYDDLGHGTHTIGTMVGSNGLGVAPGAKFISCKAFTEDGGEESWLLNCAQFLTCPTDASGNQDCSQAPNLVSNSWGGGQGDKFFAAAIQAWRAANIIPVFANGNSGPTCKTANSPADDPNVIAVGSTDSSDKLSSFSSKGPSVTGLVKPEVSAPGSSVRSAWSTGDTAFNTISGTSMATPHVSGVVALLLSKKPTLTYDQIKSALTTTTDTSTLKASGSTCGGTTDKQFPNNQYGFGRVNAFNAYKSIA

SEQ ID NO: 37065 - protein, 247 aa, Oryza sativa
MRSILSLCFHLALAIALAANVPDHIANGRVIEAKSDPKPADPNPKPDPTPKPQPETKPSPQPNPQPNPQPDPKPSPQPDPKPTPQPEPKQDPKPNPQPDPKPSPQPDPKPTPQPDPKQDPQPNPQPDPKPTPQPNPKQDPQPNPQPDPKPTPQPDPKQDPQPNPQPSPKADPKPNPKPKPQPEPSPNPKPEPKPEPKPEPSPNPKPNPNPKPEPQPDPKPEPKPQPEPSLPKPPPLSPAIAIIVPGN

SEQ ID NO: 37066 - protein, 308 aa, Oryza sativa
MRVQCDVCAAEPAAVLCCADEAALCSACDRRVHRANRLASKHRRLPLVHPSSSSSGDGGAAAAPLCDVCREKRGLVFCVEDRAILCADCDEPIHSANDLTAKHTRFLLVGAKLSPAALAEQPLPSSDCSSDDDAAAAATEEEYHSSAASTGAAVSAPLDASSNGAGGGGGVGGSSISDYLTTICPGWRVEDLLPDDDAFAAAAAQAGKEKDERVPFLDADLFDVVAGRPEKKGGAWAPHVPHLPAWCLDEVPVVVAASAAPAATPVKAKQGHVRDSHWSDSDAFAVPEFSPPPPPAKRARPSSQFWCF

SEQ ID NO: 37067 - protein, 393 aa, Oryza sativa
MSQIPLIRWKCPPHIVLEQDWHIVAGEESREIEIQNERINGALEAIYPRPSNIPPNPFLSLDVKDAHYDDSKTLLVPLIPLEDDDASDQLEGPTLDLPSHYNITGVSNTPVSAEQQPPCGGAISSGFTIEPQAAVSATVTAIMQTIQSNQNGSMADQNGSTIDQELLFKILSDPSQLQRLMKECGPVRHEQSASSSVVAPLVSIPPPQITASSPAPFSDHVGTFHGMNPTLPPPPPMMNRPPSTIPSVAMNHPPSSSPAMNFGSALPSSSPSVNFGSVPGSGVGYYKTLIHQHGGERLEQPFEQHGMQFGMYRQPGPPQNGGIDAMNGAAAMVSRDGKVRPMKPCAYFNSPKGCRNGASCTFLHDASAPTRKDHQKQKGSKRIKLDNTMGGRN

SEQ ID NO: 37068 - protein, 156 aa, Oryza sativa; identical to SEQ ID NO: 31111

SEQ ID NO: 37069 - protein, 240 aa, Oryza sativa; identical to SEQ ID NO: 29049

SEQ ID NO: 37070 - protein, 486 aa, Oryza sativa
MMLSAILTNEVGWFDEEENNSSLVAARLAVDAADVKSAIAERISVILQNMTSLMTSFIVGFIIEWRVALLILATFPLLVLANFAQQLSMKGFAGDTAKAHAKSSMVAGEGVSNIRTVAAFNAQNKILSLFSYELRIPEQQILRRSQTSGLLFGLSQLCLYSSEALILWYGSHLVRSHGSTFSKVIKVFVVLVVTANSVAETVSLAPEIVRGGESIRSIFGILNRATRIEPDDPESERVTNVRGDIELRHVDFAYPARPDIQIFKDFNLKIQAGRSQALVGASGSGKSTVIALIERFYDPTGGKVTIDGKDIRRLNLKALRLKIGLVQQEPVLFAASILENIAYGKDGATEEEVIQAAKTANVHGFVSQLPNGYKTAVGERGVQLSGGQKQRIAIARAVLKDPAILLLDEATSALDAESECVLQEALERLMKGRTTVLVAHRLSTIRGVDRIAVVQDGRIVEHGSHSDLVSRPEGAYSRLLQLQHHA

SEQ ID NO: 37071 - protein, 389 aa, Oryza sativa
MAKKSKLKKEGSSTTRNPAAELTYDLIVDILSRLPASRSADASAYPGGGAASSPTPTTARSSPKPSPASSTAARTNHAAPKLARHFVNVTGRGRPLICPTISFLPRFDLEGMRMVDCCGGLLLFRCFMSSDEFCYLVCNPSTEEWVAFPDSGYNPEWQFFTHLGFDPAVSSHFHVFEFVMGDCGFVEGVEIYSSETGLWNFMESEWDPETTVYDRTRTFFNGMLHLVEEGIAILSVDVEGEIWQSIGAPRPELENVEDMFALVSCFIGQSQGKLCYLSAYDTVPWNLSIWVLEDYSKDEWTLKHKLTTEQLSEKINCKCKTDFDKAWYYHVVAVHSECNLIYYIAGGDTLMSYDMGHKQSCVIENLGPGNNSGYLPYVPLYSEILSHGC

SEQ ID NO: 37072 - protein, 415 aa, Oryza sativa
MAAAAAAASSAKRALLPWARDAHHALARALQGCGGGGGLGLRGALPTAGGRWSLLQCRWRSSLPQLDSADRSDEESGGEIDWDNLGFGLTPTDYMYVMRCSLEDGVFSRGELSRYGNIELSPSSGVINYGQGLFEGLKAYRAANQQGSYMLFRPEENARRMQHGAERMCMPSPSVEQFVHAVKQTVLANRRWVPPQGKGALYIRPLLIGSGPILGLAPAPEYTFLIYAAPVGTYFKEGLAPINLVVEDSIHRAMPGGTGGVKTITNYAPVLKAQMDAKSRGFTDVLYLDAVHKTYLEEASSCNLFIVKDGVVATPATVGTILPGITRKSVIELARDRGYQVEERLVSIDDLVGADEVFCTGTAVVVAPVSSVTYHGQRYEFRTGHDTLSQTLHTTLTSIQMGLAEDKKGWTVAID

SEQ ID NO: 37073 - protein, 510 aa, Oryza sativa
MAPPRANSGDGNDGAVGGQSKLSPSGLLIREIPGGYGVPFLSPLRDRLDYYYFQGADEFFRSRVARHGGATVLRVNMPPGPFLAGDPRVVALLDARSFRVLLDDSMVDKADTLDGTFMPSLALFGGHRPLAFLDAADPRHAKIKRVVMSLAAARMHHVAPAFRAAFAAMFDEVDAGLVAGGPVEFNKLNMRYMLDFTCAALFGGAPPSKAMGDAAVTKAVKWLIFQLHPLASKVVKPWPLEDLLLHTFRLPPFLVRREYGEITAYFAAAAAAILDDAEKNHPGIPRDELLHNLVFVAVFNAYGGFKIFLPHIVKWLARAGPELHAKLASEVRAAAPAGGGEITISAVEKEMPLVKSVVWEALRMNPPVEFQYGRARRDMVVESHDAAYEVRKGELLFGYQPLATRDEKVFDRAGEFVPDRFVSGAGSAARPLLEHVVWSNGPETGTPSEGNKQCPGKDMVVAVGRLMVAGLFRRYDTFAADVEELPLEPVVTFTSLTRAADGDGAARRGV

SEQ ID NO: 37074 - protein, 310 aa, Oryza sativa
MSRGDSAVGGVTVDVTLSPNAVLPGFAKRPEAMTEASCCGGGFPRCARAAAAAAWAFASEDAGRVAFALKAGLAMLLASLLVLVGEPFRLFGTNIIWSILTVGIMFEYTVGASFNRGFNRAVGSMVAGVVAIAVIWISLRCGSVAEPYVIGLSIFLVGAVTSFVKQLPALAPYEYGFRVILFTYCLIMVSVYRVGEPVAAGLDRLYAIAIGAVLALLVNVLIFPAWAGEQLHRELVASFAAVADSLHDCVRSYLSGDETAVDGGEPAIEKCRAILNASARIESLVRLPYARACLCIYCTPHGHTHYVALT

SEQ ID NO: 37075 - protein, 497 aa, Oryza sativa
MGSLPAAAEARPHAVMVPYPAQGHVTPMLTLAKLLYSRGFHVTFVNNEFNHRRLLRARGARALDGAPGFRFAAMDDGLPPSDADATQDVPALCHSVRTTWLPRFMSLLAKLDDEAAAAAAADGAARRVTCVVADSNMAFGIHAARELGLRCATLWTASACGFMGYYHYKHLLDRGLFPLKSEADLSNGHLDTTVDWIPGMTGDLRLRDLPSFVRSTDRDDIMFNFFVHVTASMSLAEAVIINTFDELDAPSSPLMGAMAALLPPIYTVGPLHLAARSNVPADSPVAGVGSNLWKEQGEALRWLDGRPPRSVVYVNFGSITVMSAEHLAEFAWGLAGSGYAFLWNLRPDLVKGDGGAAPALPPEFAAATRERSMLTTWCPQAEVLEHEAVGVFLTHSGWNSTLESIAGGVPMVCWPFFAEQQTNCRYKRTEWGIGAEIPDDVRRGEVEALIREAMDGEKGREMRRRVAELRESAVAAAKPGGRSVHNIDRLIDEVLMA

SEQ ID NO: 37076 - protein, 469 aa, Oryza sativa
MLLHVPASRATQRRKNETAEMENAPATTTSSTQDGGGGAGGHVFLLAFPEAQGHVNPILQFGRHLAAHHGFLPTLVTTRHVLSTVPPPLAPFRVAAISDGFDSGGMAACGDAREYTRRLADVGSETLGVLLRSEAAAGRPPRVLVYDPHLPWAGRVARGAGVPAAAFFSQPCAVDVIYGEVWAGRVGLPVVDGGALRGLLSVELGPEDVPSFVKAPESYPPFLEAVLGQFDGLEDADDVLVNSFQELEPKEADYLASAWRFKTIGPTVPSFYLDDDRLQPNKNYGFNISDSTSPCLAWLDNQPPCSVVYASYGTVADLDPTQLDELGNGFCNSGKPFLWVVRSCDEHKLSEELRDKCKERGLIVSWCPQLEVLSHKATGCFLTHCGWNSTTEAIVTGVPLLAMPQWTDQPTTAKYIESAWGNGVRVHRDKEGMVRKEEVERCIREVLESERKAEYRKNANRWIRKLRKP

SEQ ID NO: 37077 - protein, 305 aa, Oryza sativa; identical to SEQ ID NO: 28606

SEQ ID NO: 37078 - protein, 439 aa, Oryza sativa
MSDYKVRDISLAEWGRKEIELAENEMPGLMEIRREYSAAQPLAGARIAGCLHMTVQTAVLIETLKALGAEVRWSSCNIFSTNDAAAAAIAKAGIPVFAWKGETEEEYDWCIDQTIRGFTTGGDTHPNMILDDGGDLTNLILNKHPEIAAKIVGISEETTTGVKNLMKRVKAGTLTIPAINVNDSVTKSKFDNLYGCRESLVDGIKRATDVMIAGKTAIVAGYGDVGKGSAAALRNFGARVMVTEIDPINALQACMEGYQVVLMEEKIHEAHIVVTTTGNDDIVRGEHFDQMRDDVIVCNIGHFDTEIQVAWLKANAASVSEIKPQVHRYTMKNGNHVILLAEGRLVNLGCAHGHPSFVMSNSFCNQVLAQIELWTNRTTDKYPRGPQKDVFFIPKELDEKVAALHLGKLGAKLTKLTPKQADYINVSVAGPFKPSHYRY

SEQ ID NO: 37079 - protein, 211 aa, Oryza sativa
MAGAGRTRSTAMAAWSYSSLLLQLLLLSMVAVLDGAATTGGGGAGAPAPAADCTDTLLSLAGCLSYVQEGSTVAKPDAPCCSGLKGVVKKEVACLCQAFQGSQNFGVTLNMTKALQLPAACKVKTPPFSKCHLSIPGVTGGAPAPAPFSGAPFFGGSSPSASPAGTGSDSAAATVRAPAPSPSAAVRPKETKAALFSAAVIAAATLLAHRA

SEQ ID NO: 37080 - protein, 361 aa, Oryza sativa
MMTRSMMKFFSPSSSAIYTTLSSRLARINATRHTPPPPPKSSRAARSLTSFLLIRATMSSSSSSSDAVAAAAAATFEKPRTVVKKLLAESQPEGDGATVRRSIGRYELRNLDPFLMLDEFSVSKPAGFPDHPHRGFETVTYMLEGAFTHQDFAGHKGTIGTGDVQWMTAGRGIVHSEMPAADGVQKGLQLWINLSSKDKMIEPRYQELMSKDISCAEKDGVEVKIIAGEAFGVRSPVYTRTPTMYMDFTMQPGSQLHQPIPEAWNAFVYIIDGEGVFGREKASPATAHHCLVLGPGDGLSVWNKSGEPLRFALVGGQPLNEPVVQHGPFVMNTRAEIQQAMEDYYYGRNGFEKARHWSSTA

SEQ ID NO: 37081 - protein, 332 aa, Oryza sativa
MTTQGFAPVLAVALLLAAFPAAVQSIGVCYGVIGNNLPAASDVVKLYKSKGIDSMRIYFPRSDILQALTGSNIALTMDVANENLAAFAADATAAAAWVKQNVQAYPGVSFRYIAVGNEVTGDDTGNILPAMKNLNAALAAAGLGGVGVSTSVSQGVIANSYPPSNGVFNDDYMFDIVEYLASTGAPLLVNVYPYSAYVGDTKDISLNYATFQPGTTVTDDGSGLIYTSLFDAMVDSVYAALEDAGAPDVGVVVSETGWPSAGGFGASVSNAQTYNQKLISHVQGGTPKRPGVALETYVFAMFNENQKTGAETERHFGLFNPNKSPSYKIRFH

SEQ ID NO: 37082 - protein, 154 aa, Oryza sativa
MSAMAMSSLNPNAAPFIPAAFRRVEDFSPEWWELVKTTAWFRDHWFRQHQMYEDAAAEEDHHRQVFDDDLAALLPDDSLDLLDMVDTDDLFYTPDPPVHHKPTTTPTLDADVLRALSLNSPRLGGAGMVRHAEKPAQFVAAKGGAARHVIHQPR

SEQ ID NO: 37083 - protein, 442 aa, Oryza sativa
MAAASSSRVLLAAVAVLAAALAGCGAGAALDDPAGLLRRAKEAEFAGWMVGLRRRIHENPELGYEEFATSELVRRELDALGIPYRHPFAVTGVVATVGTGGPPFVALRADMDALPMQESVEWEHKSKVPGKMHGCGHDAHVAMLLGSARILQEHRDELKGTVVLVFQPAEEGGGGAKKMIDDGAVENIEAIFGVHVADVVPIGVVASRPGPVMAGSGFFEAVISGKGGHAALPHHTIDPILAASNVIVSLQQLVSREADPLDSQVVTVGKFQGGGAFNVIPDSVTIGGTFRAFLKESFNQLKQRIEEVIVSQASVQRCNAVVDFLDKDRPFFPPTINSAGLHDFFVKVASEMVGPKNVRDKQPLMGAEDFAFYADAIPATYYYFLGMYNETRGPQAPHHSPYFTINEDALPYGAALQASLAARYLLEHQPPTTGKAKAHDEL

SEQ ID NO: 37084 - protein, 268 aa, Oryza sativa; identical to SEQ ID NO: 29606

SEQ ID NO: 37085 - protein, 166 aa, Oryza sativa
MQADSRLLSQGIQPRYTGIFDAFTKIVRAEGFRGLWKGVVPNAQRAFLVNMGELTCYDQAKHFIIRKQICGDNLYAHTLASVASGLSATTLSCPADVIKTRMMNQGKDAKVLYRNSYDCLVKTVKHEGLTALWKGFLPTWARLGPWQFVFWVSYEKLRQASGISSF

SEQ ID NO: 37086 - protein, 282 aa, Oryza sativa; identical to SEQ ID NO: 31183

SEQ ID NO: 37087 - protein, 408 aa, Oryza sativa
MAPKVAVTEATGRQAASFVLGCVATLTVMLLFQYQAPPDYGRAARSPVQFSTSRDQLLLHCGGNGTAPPPPVIARGGEEANITGKPPTTATAVAEEQPPTKPPATSTASSPTHHIPATSTDLEEEGGEFRGLAAAVARAATDDRTVIITCVNHAFAAPDSLLDIFLQGFRVGDGTPELLRHVLVVAMDPTALTRCRAVHPHCYLYTMPGLDVDFTSEKFFASKDYLELVWSKLKLQRRILQLGYNFLFTDVDIVWLRNSFKYVAVYADMAISSDVFFGDPDNIDNFPNTGFFYVKPSARTIAMTKEWHEARSSHPGLNEQPVFNHIKKKLVKKLKLKVQYLDTAYIGGFCSYGKDLSKICTMHANCCIGLQSKISDLKGVLADWKNYTRLPPWAKPNARWTVPGKCIH

SEQ ID NO: 37088 - protein, 367 aa, Oryza sativa
MAMERLISSPLLPRRPPRAAFSRPPPSLAAAPPHHRAGGAASGYGSRPPLASLLLSRHHHHHQPPVLAANPAADVAAGEAVPPATATASRRFLQKVASAAAATLLATIALTLIQPAWAPPALASFHSAAKAGGGIFKSELLSSAWTGFLAGCLHTLSGPDHLAALAPLSIGRSRVESAAVGALWGCGHDAGQVIFGLLFLSLKDRLHIEVIRTWGTRVVGLTLLVIGALGIREATEVPTPCVALENGGGGGGAHRGPLDALPATRKKITFATFATGIVHGLQPDALMMVLPALALPSRVAGAAFLGMFLVGTVVAMGSYTVLIGSCTEALKERVPRITEKLTWAASLVAISMGLGILISQSLGFSLY

SEQ ID NO: 37089 - protein, 286 aa, Oryza sativa
MDQLCTSGGSDSDKSLAAGDEPAVRVRGEVEAEAAAAAAAAEAQGGGCFDCNICLDFATEPVVTLCGHLYCWPCIYEWLHPGGDDDGSNGDASSTRRRPCPVCKAAVSPDTLVPLYGRGRGGSSKRARSGSAIPRRPIVHREPVERQSDRLGDDDGGHRHGSTGSSPPVRSPWHANHHAAAASTPAPAPARLFDVVYPPPPAAVGGVGMFHSTTTTTGGMLGGMALAVLPWVSRGQSPATAAASAYYTSPYHMSPRLRRQHMEVERSLHQIWFFLVVFAVLCLLLF

SEQ ID NO: 37090 - protein, 286 aa, Oryza sativa
MGSLSSLAAAAVFLSLLAVGHCAAADFNATDADADFAGNGVDFNSSDAAVYWGPWTKARATWYGQPNGAGPDDNGGACGFKHTNQYPFMSMTSCGNQPLFKDGKGCGSCYKIRCTKDQSCSGRSETVIITDMNYYPVAPFHFDLSGTAFGRLAKPGLNDKLRHSGIIDIEFTRVPCEFPGLKIGFHVEEYSNPVYFAVLVEYEDGDGDVVQVDLMESKTAHGPPTGRWTPMRESWGSIWRLDTNHRLQAPFSIRIRNESGKTLVANNVIPANWRPNTFYRSFVQYS

SEQ ID NO: 37091 - protein, 258 aa, Oryza sativa; identical to SEQ ID NO: 36997

SEQ ID NO: 37092 - protein, 256 aa, Oryza sativa
MAHISGLVAAQEAANPFEYCDVVTTTTHKSLRGPRAGMIFYRKGPKPPKKGQPEGAVYDYEDKINFAVFPSLQGGPHNHQIAALAVALQQTMTPGFKAYAKQVKANAVAIGKYLMSKGYKMVTDGTENHLVLWDLRPLGLTGNKVEKMCDLCSITLNKNAVFGDSSALAPGGVRIGTPAMTSRGLVEKDFEQIGEFLHQAVTICLNIQKEHGKLLKDFSKGLVNNKDIENLKLEVEKFATSFDMPGFTLDSMKYKE

SEQ ID NO: 37093 - protein, 469 aa, Oryza sativa
MQTPTMSTSMATPAKLPSPPSLPIARQCCCHLLQLGRRGGAGVARASAKKKNPWLDPFDDGPDDEFDYRGAFSGGKQEEDPRPPEDPANPYGFLRFPAGYNPELDSLASKVRRDVRRACCVVSGGVYENVLFFPVVQLLRDRYPGVVVDVVASARGKQVYEMCKNVRYADVYDPDDDWPEPAEYTHQLGVLKNRYYDLIISTKLAGIGHALFLFMSSARDKVGYVYPNVNSAGAGLFLTEMFRPPTTNLADSGYNMYQDMLEWIGRPAKGVPEHPVPPLRVSISKKLRAFVEDKYSRAGVEKGKFVVVHGIASDSFANMRSRGDDDCLLPLEHWAEIAKEISSEDNGLKPLFVIPHQKHREEVEETVGKDTNILFITTPGQLTCPINDSVGVVATNTAAVQLANARDKPCVALFSSKEKARLFLPYLEEKKGCTVVASETGKLIDIDVEAVKKAVKEFKAAPSVALAQT

SEQ ID NO: 37094 - protein, 523 aa, Oryza sativa
MAAILLLLLVFLVSVALVVRTWSASRRSHEKARYATAELRPYPLVGHLPQFLANRHRILDWMTEVLSRQPTRTFVLRRPGGVRGVITANPANVERFLRSGFDNYPKGERFASLLHDFLGRGIFNADGEAWRSQRKAASYEFNTRSLRAFVARCVHGELHGRLLPLLRRAAAEGRAIDLQDALERFAFDNICRVAFDHDPGQLPDASGGGALAEADDGSTASGRFADAFRDAANLSAGRFRYAVPWFWRVKKALHIGSERRLRESIAIVHDFADRIIRSRREEIRAGLEKHDLLSRFMASHDESYTEVALRDVVISFLLAGRETTSSALTWFFWLLSSRPDVERRIREEVATVRARRGDGDVDRVGFDLDELREMQYVHAAITESMRLYPPVPVDSLHAQEDDVLPDGTAVEAGWFVAYNSYAMGRMESVWGKDAAEFRAERWLEDAAAATFRPESPFRYVSFHGGPRVCLGKEMAYIQMKSIIACVLQELELAVDGAYRPRQVTSLTLRMADGLPTRVKVRGN

SEQ ID NO: 37095 - protein, 77 aa, Oryza sativa
MRISEPADTSRHRRPQAAVHLKMPPPQAAVPEPDTCSRTSGSRSTSRRSTRRRRAERRQEQVQGLRPRRPPDRPPLF

SEQ ID NO: 37096 - protein, 126 aa, Oryza sativa
MARGMREGWTGSCAVAGGRMYIVAEYGEWRLKRYDEPRDEWRMVAGSGVPPEVRRPHVVSGEVEEVGSGGRRRIYVVGAGLDVAIGTVSPSPAIHGGDDERVDWEVVKGPAEFAGLAPCNAQVLYA

SEQ ID NO: 37097 - protein, 338 aa, Oryza sativa
MFVIWSHRTGFIMSHQLTFADSEFSSKRRQTRKEIFLSRMEQILPWQNMVEVIEPFYPKAGNGRRPYPLETMLRIHCMQHWYNLSDGAMEDALYEIASMRLFARLSLDSALPDRTTIMNFRHLLEQHQLARQLFKTINRWLAEAGVMMTQGTLVDATIIEAPSSTKNKEQQRDPEMHQTKKGNQWHFGMKAHIGVDAKSGLTHSLVTTAANEHDLNQLGNLLHGEEQFVSADAGYQGAPQREELAEVDVDWLIAERPGKVRTLKQHPRKNKTAINIEYMKASIRARVEHPFRIIKRQFGFVKARYKGLLKNDNQLAMLFTLANLFRADQMIRQWERSH

SEQ ID NO: 37098 - protein, 463 aa, Oryza sativa
MASVSPLLLLLLCSYHSVVAHAGDGQSYKVLELNSEAVCSERNAISSSLSGTTVALNHRHGPCSPVPSSKKRPTEEELLKRDQLRAEHIQRKFAMNAAVDGAGDLQQSKVSSSVPTKLGSSLDTLEYVISVGLGTPAVTQTVTIDTGSDVSWVQCNPCPNPPCYAQTGALFDPAKSSTYRAVSCAAAECAQLEQQGNGCGATNYECQYGVQYGDGSTTNGTYSRDTLTLSGASDAVKGFQFGCSHVESGFSDQTDGLMGLGGGAQSLVSQTAAAYGNSFSYCLPPTSGSSGFLTLGGGGGVSGFVTTRMLRSRQIPTFYGARLQDIAVGGKQLGLSPSVFAAGSVVDSGTIITRLPPTAYSALSSAFKAGMKQYRSAPARSILDTCFDFAGQTQISIPTVALVFSGGAAIDLDPNGIMYGNCLAFAATGDDGTTGIIGNVQQRTFEVLYDVGSSTLGFRSGAC

SEQ ID NO: 37099 - protein, 288 aa, Oryza sativa
MAAAAAACVESPDEGVEIREVWAGNLEAEIAAIRDEVDRYPYVAMDTEFPGIVCRPVGNFRTTDEFNYANLEANVNMLKLIQLGLTLSDEGGDLPRRGTGGRRCIWQFNFRGFDPRTDPSNADSIQMLRTCGIDFDRFAAEGADPIRFAELLMSSGVVLNADVQWITFHSGYDFGYLLRLLTGRNLPDNMPAFFDLIRIYFPVLYDIKHLMRFCSNLHGGLSRLGELLDVKRVGTCHQAGSDSLLTLGCYNKIKEVYFKGSTEKHAGVLYGLVIEDGVNRPPPTQPNE

SEQ ID NO: 37100 - protein, 338 aa, Oryza sativa; identical to SEQ ID NO: 36986

SEQ ID NO: 37101 - protein, 202 aa, Oryza sativa; identical to SEQ ID NO: 30856

SEQ ID NO: 37102 - protein, 518 aa, Oryza sativa
MEEGVVGGGGAAVLVALLVTVVLAVMRSAGSRSSKRGRLPPSPMALPIIGHLHLIRPPPHRAFDRILARHGPLVYLRLGPSTHCVVIGSADVARDFLKFEASIPERPPTAVTRQLAYGKAGFAFAPYGAYWRFVKRLCMSELLGPRTVELLRPVRAAELADVLRAAQSAAERGEGVDMSHELVRMANNSIMRMVASALPGEMAEAARDCAKQVAELVGAFNAEDFVAVCRGWDLQGIGRRTNEVHARFDALLETIIEAKEEARRRSLRLGRRESSSKDLLDMLMDAAEDDTAEVKLTRDNIKAFVLDIFTAGSDTTATTVEWMLAELVNHPECMAKLRGELDAVVGRSRLVGEQDVARLPYLQAVLKETLRLRPPAVFAQRVTVEPVQVRGYTIPTDTQVFFNIFSIGRDATYWDQPLHFRPDRFLPDGAGATVDPKGQHPQLMPFGSGRRACPGMGLAMQAVPAFLAALVQCFDWAPPPSQPLPLDMEEAAGLVSARKHPLLLLPTPRIQPLPSFYS

SEQ ID NO: 37103 - protein, 447 aa, Oryza sativa
MEASLVLLCLCVFLASGGEGRSPAGTVLPLQVRVQEVELEAPAANRLRFRHNVSLTVPVAVGTPPQNVTMVLDTGSELSWLLCNGSYAPPLTPAFNASGSSSYGAVPCPSTACEWRGRDLPVPPFCDTPPSNACRVSLSYADASSADGVLATDTFLLTGGAPPVAVGAYFGCITSYSSTTATNSNGTGTDVSEAATGLLGMNRGTLSFVTQTGTRRFAYCIAPGEGPGVLLLGDDGGVAPPLNYTPLIEISQPLPYFDRVAYSVQLEGIRVGCALLPIPKSVLTPDHTGAGQTMVDSGTQFTFLLADAYAALKAEFTSQARLLLAPLGEPGFVFQGAFDACFRGPEARVAAASGLLPEVGLVLRGAEVAVSGEKLLYMVPGERRGEGGAEAVWCLTFGNSDMAGMSAYVIGHHHQQNVWVEYDLQNGRVGFAPARCDLATQRLGAGA

SEQ ID NO: 37104 - protein, 209 aa, Oryza sativa; identical to SEQ ID NO: 30770

SEQ ID NO: 37105 - protein, 384 aa, Oryza sativa
MAVAPVRLVACIVALAAVAPGGVAGHTRGVRPGRAAGKQQPSFPENATRVEAIERQFMEWVRYMGGLEHSTVHHALARAFPSYSLVVDKNPAFGDFTTIQAAVDSLPIINLVRVVIKVNAGTYTEKVNISPMRAFITLEGAGADKTIVQWGDTADSPSGRAGRPLGTYSSASFAVNAQYFLARNITFKNTSPVPKPGASGKQAVALRVSADNAAFVGCRFLGAQDTLYDHSGRHYYKECYIEGSVDFIFGNALSLFEDCHVHAIARDYGALTAQNRQSMLEDTGFSFVNCRVTGSGALYLGRAWGTFSRVVFAYTYMDDIIIPRGWYNWGDPNRELTVFYGQYKCTGPGASFSGRVSWSRELTDEEAKPFISLTFIDGTEWVRL

SEQ ID NO: 37106 - protein, 213 aa, Oryza sativa
MNMCEKDQNFHWGYDLFRDPFAPIGYYGPPHGYGDGNYCDLHYARDASHLDETHLHSSALTYDLYNPSVGIYHPGNAGEHDHDTVYIEPTSSNSCPDTDDSFPMDEEVGKRFYPMVPVPHVPKINGEIPSVDEATMDHERLTERLRLYELVEHKVKGDGNCQFRALSDQLYQSPDHHEFVRQQIMSQLKSNRDAYDGYVPMAYDDYLEKVSHA

SEQ ID NO: 37107 - protein, 426 aa, Oryza sativa
MTELSAAMTNQYTCLDGFDYKDGERVRHYMESSIHHVSRMVSNSLAMAKKLPGAGGGGMTPSSSSPDTATQSESSETTQRQPFMGYGQMANGFPKWVRPGDRRLLQAPASSITPDAVVAKDGSGGYTTVSAAVAAAPANSNKRYVIHIKAGAYMENVEVGKSKKNLMFIGDGIGKTVIKASRNVVDGSTTFRSATVAVVGNNFLARDLTIENSAGPSKHQAVALRVGADLSAFYRCSFVGYQDTLYVHSLRQFFRECDIYGTIDFIFGNSAVVFQSCNLYARRPLPNQSNVYTAQGREDPNQNTGISIQKCKVAAASDLLAVQSSFKTYLGRPWKQYSRTVFMQSELDSVVNPAGWLEWSGNFALDTLYYGEYQNTGPGASTSNRVKWKGYRVITSASEASTFTVGNFIDGDVWLAGTSVPFTVGL

SEQ ID NO: 37108 - protein, 445 aa, Oryza sativa; identical to SEQ ID NO: 36845

SEQ ID NO: 37109 - protein, 323 aa, Oryza sativa
MDSPPPPSLPPASPLPLPPWRPDPSPAVLPWPDLLAGAAAATRRLIAAHSRHFLALSSLLLLPLSLLLLSLPAPFLPPVSPSVSLRSTTTPQPALPLPLLALVAAAALLYLAAFAAAAASAHAGFFGRPVKLLASLLSVPASLLRLLLTALPAAPLLLLPLLPLPFPLTAALAVLGLLLLVPFWSLAGAAAVVESSACVSPLRQSCRLLNGARLAALSAFLVFGAGIGVTLWGFGGVAAETYDASAGWAGMAPVVVKAVVGTAVLVVLMLYGMVINVVLYMHCRALHGELTGEIYNEFANSYVFLPFDEGKDRHVVSVVTVWP

SEQ ID NO: 37110 - protein, 545 aa, Oryza sativa
MEAGTWAVVVAAVAAYMAWFWRMSRGLSGPRVWPVVGSLPGLVRHAEDMHEWIAANLRRTRGTYQTCIFAVPGLARRGGLVTVTCDPRNLEHVLKSRFDNYPKGPFWHGVFGDLLGDGIFNSDGETWVAQRKTAALEFTTRTLRTAMSRWVSRSIHSRLLPILSDAAAAGGGGGGATVDLQDLLLRLTFDNICGLAFGKDPETLARGLPENDFASAFDRATEATLNRFIFPECVWRFKKWMGLGMETTLARSVQHVDRYLSAVIKARKLELAAGNGKGDASSATPHDDLLSRFMRKGTYSDESLQHVALNFILAGRDTSSVALSWFFWLVSTHPAVERKIVRELCTVLAASRGADDPALWLAAPLNFEELDQLVYLKAALSETLRLYPSVPEDSKHVVADDVLPDGTFVPAGSSVTYSIYSAGRMKTVWGDDCLEFRPERWLSADGTKFEPHDSFRFVAFNAGPRICLGKDLAYLQMRNIAGSVLLRHRLAVAPGHRVEQKMSLTLFMKHGLRMEVRPRDLAPIVDELRGAGEYAAAARATAACA

SEQ ID NO: 37111 - protein, 337 aa, Oryza sativa; identical to SEQ ID NO: 32145

SEQ ID NO: 37112 - protein, 334 aa, Oryza sativa
MDDDASSYTYCCHSCDSFVHPHPHLDAAVLCPHCNAAGFLHDHEMPPAADHSPFNPPVIVLRRSASPDDATTFDLLYDDGASSALRPLFDRLLLRIPSASDNPNPPASKAAVDSMPTILIGACHLAADSHCAVCKEPFHLAAEAREMPCAHIYHHNCILPWLALHNSCPVCRHRMPTDDHDSTNAAAAQAAAGSSDEDATTVGTLTIWRLPGGGYAVGRFAAAGGTRAGERELPVLYTQMDDGGFNGGGGSGSPTMIGWSSRGSRSSQRQRSIIPRLFRNMFACFRHHDATADSGDYSSRAGRRSSSSVFTRSLRSQITSWRSEDGHPDAIATR

SEQ ID NO: 37113 - protein, 330 aa, Oryza sativa; identical to SEQ ID NO: 32175

SEQ ID NO: 37114 - protein, 496 aa, Oryza sativa; identical to SEQ ID NO: 36894

SEQ ID NO: 37115 - protein, 480 aa, Oryza sativa
MGAAAAHVLVFPMPLQGHINVMLHLATALAAAAGVHVTFLHTDHNLHRLGNAAAATTAGSPRRLRFLSVPDGLPDDHPRSASDVPVMVDSLLGAGQAAYRALLGSLLVGSGGAGGFPPVTSVVADALLTFAIDVAEELGVPALAFRTASASSLLAYMSVPRLFELGELPFPPGGDLDEPVRGVPGMEGFLRRRDLPSTFRRHGNDHDVHPKLQMLVDLTTGSCKARAVILNTAASLEAPALAHIAPRVRDVFAVGPLHAMSPAPAAATSLWREDDGCMAWLDGQADRSVVYVSLGSLTVISPEQFTEFLSGLVAAGHPFLWVLRPDMVTARLQHADLQEAVAAAAGHSKARVVRWAPQRDVLRHRAVGCFLTHAGWNSTLEAAVEGVPTVCWPFFVDQQINSRFVGGVWGTGLDMKDACDAAVVARMVREAMESGEIRATAQALAEKVRRDVADGGSSATEFKRLVGFLQELATRIQHAN

SEQ ID NO: 37116 - protein, 396 aa, Oryza sativa
MASASRFLLLSRLPAAAASSTSRLLRPLSAAGSLLPAALAPSAPRAAAAAARCFATQPATSSLRDSSPNWSNRPPKETILLDGCDFEHWLVVVEPPPGDPSNPEPTRDEIIDGYIKTLAQVVGSEEEARHKIYSVSTRHYFAFGALVSEELSYKLKELPKVRWVLPDSYLDVRNKDYGGEPFINGEAVPYDPKYHEEWVRNNARANERSRRNDRPRNFDRSRNFERRRENMQNFQNRDVPPGQGFNSPPPPGQGPVPPRDAPPMHHAQGNVPPPPPPNAGPPNYQPHAPNPQGYTNYQQGGAPGYQGGPPGYQGSNQGYQGPPPPPPSAYQGNNPGYQGGGPGYQGGNPPPYQGGNPGYAPGYHGQGGNPSYQQGGDNYNAGVPAYERDGQGRNYQ

SEQ ID NO: 37117 - protein, 328 aa, Oryza sativa; identical to SEQ ID NO: 32519

SEQ ID NO: 37118 - protein, 340 aa, Oryza sativa
MLTLLDPALPSRFIIGSSHGWIITADERSELHLVNPITGKQIALAPVTTIEQVKPIFDDSGAVHKYKYSWYTGQMTVSDSPSILAPDELRNFLFSKAIVSSDPSGGNFIVVLIHNPHLQLSIARPGDDKWTWLPPHKDYEDCIFRDGLLYALTSAGEIHEYDLSGPAIARKIVLNKVKGFACENMYIVRTPCGDLLQVWRSYDPLDDEDEDASDDLEADHDDESYVWNTTMIKVHKVDLVARMLVEACDLGENVLILGHNQSLCLRADEYPLLKANHVYFSDDRELYIKGCKNGCRDIGVFNLENNCAEEIVSLQLWSNWPPPVWMTPNARKISLETHSL

SEQ ID NO: 37119 - protein, 208 aa, Oryza sativa
MSSSVLLFLVALLLSCSTMGNAARRLEVEYPAAHPAVPELPKPELPPHPVVPELPKHEEPPPHPHPAVPELPKPELPPPHPAVPELPKHEEPPHPVVPELPKPEVPHPAVPELPKHEEPPHPVVPELPKHEEPPHPVVPELPKPEVPHPAVPELPKHEEPPHPVVPELPKPEVPHPVVPELPKPEVPHPTVPEHEQPPKPESHYPEKP

SEQ ID NO: 37120 - protein, 365 aa, Oryza sativa; identical to SEQ ID NO: 29965

SEQ ID NO: 37121 - protein, 589 aa, Oryza sativa
MSRRRPPHALATLLSRLRACSSASHALQCHALLLTSGHLAASPARLSNLLLLALASASASPSAADHADSVFAHLAEEASRHAFPWNTLVRLHAAASPRRSLLYFSRMRRAAVAPDAYTFPAVLKACGCAPGCRVGLVVHGEAVRTGLDADLFTRNALISFYCRIGDCRSGRKVFDHGVRDLVSWNSMVAGYVGCGEVDLAQDLFDEMRQRDAFSWATMIDGYGEMAGGVDRARELFDQMPDRDLVCWNSMIDGYARHGRMDEARVLFEEMPERNVISWSIVIDGYVRFGEPNEALEFFQRMLRCGIKPDRVAAVGAVAACAQLGALEQGRWLHSYLEKKKVLFDVVVQTALIDMYVKCGRLDLAKLIFESMPKKSVVTWNVMIVGLGTHGYGLDAIKLFNQMETERAPMDDLSILAVLTSCTHAGLVSEGLGIFYRMEKDLGLEPKVEHYGALIDLLGRAGRVDQARNTIETMPMEPTPELWGSLLASCRSHRCVELAELSVERLASLGADDSGVYVLLSNIYADEGMWDDVFRIRKLMSAEGMKKNIGRSVIEVDGQIHEFVNGGSSHPHKEEIYLTLWNLSNIAASI

SEQ ID NO: 37122 - protein, 272 aa, Oryza sativa
MAVLLRTTTSATTATSGGSSSATALLATTFRRGGRRLLLLPATRGSAPRRAALLTARASAEPLEVCAKASLTVPDRLGDCPFTQRVLLTIEEKHLPYDIKLVDLANKPDWFLKISPEGKVPIVKLEEQWVADSDVITQAIEEKYPEPSLATPPEKASVGSKIFSTFIGFLKSKDPNDGTEQALLSELTSFDSYLKDNGPFINGETISAADLSLAPKLYHMEIALGHYKNWSVPDSLSHVKKYMKTIFSMDSFVKTIALQEDVIAGWRPKVMG

SEQ ID NO: 37123 - protein, 446 aa, Oryza sativa
MGHGLSCSRDTDEYDLFRAAQLGDIHALSALLAADPALARRATVYDRFTALHIAAANGRLQVLSMLLDRDGDVDVLSRKKQTPLMVAAMRGNTECVVRLLRGGANVLTFDSPRARTCLHHAAYYGHAECLQAILGAAAQAQGPVAASWGFARFVNVRDERGATPLHLAARHARASCVRLLLDKGAIVSAPTAVYGFPGSTALHLAARAGSMECIRELLAWGADRLQRDSAGRIAYAVAMRRGHRACAALLNPAAAEPIVWPSPLKFIGELEADAKALLEAALMEANREREKRILHGSDINIKGGDEEEESEDEEEACNICFEQACSMEVKECGHQMCAACTLAICCHSKPNPKTLLLHPPACPFCRTTISRLVVATTNSNKTNSRRRSRSRSSSFKGGLSSAMGSFSRIGRGSGRLVVDGSSVGELADKPDHDFSSVAAAAAICDT

SEQ ID NO: 37124 - protein, 437 aa, Oryza sativa
MASPSSRAVAVGGALLLLLVFAVPTTFLYLTSAPAASSPSLLLNLKPFGARCAPAAAAAPPLRVFMYDLPRRFHVGMMDASASGFPAWPPSAGGIRRQHSVEYWMMASLQGGGGGGNGSSSEEGREAVRVTDPDAAEAFFVPFFSSLSFNVHGRNMTDPETEADRLLQVELMEILWKSKYWQRSAGRDHVIPMHHPNAFRFLRDMVNASILIVADFGRYTKELASLRKDVVAPYVHVVDSFLNDDPPDPFDDRPTLLFFRGRTVRKDEGKIRAKLAKILKGKDGVRFEDSLATGEGIKTSTEGMRSSKFCLHPAGDTPSSCRLFDAIVSHCVPVIVSSRIELPFEDEIDYSEFSLFFSVEEALRPDYLLNQLRQIQKTKWVEIWSKLKNVSHHYEFQNPPRKGDAVNMIWRQVKHKVPAVNLAIHRNRRLKIPDWWG

SEQ ID NO: 37125 - protein, 420 aa, Oryza sativa
MARPAATAAAPKAPPPKHLIALAVVAILGLVLVADFLWASSSPAAPAWSSRIDLPGRPAALVPPSGKKQTKEKISIGSTDINATFADLPAPELQWEEMAEAPVPRLDGAAMQIKNLLYVFAGYGTINHVHSHVDIYNFSDNTWGGRFDMPKEMAHSHLGMVTDGRYVYVVTGQYGPQCRGPTARNFVLDTETKEWHDLPPLPVPRYAPATQLWRGRLHVMGGSKEDRHEPGLEHWSIAVKDGKALENEWRSEVPIPRGGPHRACVVANDKLLVIGGQEGDFMAKPGSPIFKCVRRSEVVYSNVYMLDDGMKWKEFPPMPKPDSHIEFAWVNVNNSLIIAGGTTEKHPITKKMVLVGEVFRFNLNTLEWTVIGRLPFRIKTTLVGYWDGWLYFTSGQRDKGPKDPSPKKVVGCMWRTKLHL

SEQ ID NO: 37126 - protein, 379 aa, Oryza sativa
MDTAAKLHSPTTPLLAHAHHDDRLLLCSPPAAVEFPVLKSRAARGALLLAANYAALFVGSLSSSLLSRFYFAHGGADRWLATLVQSAGFPALLLPLMCARRPASRPFAGFTPRLVMYCVLLGLVMGLNNLLYSCGTSYLPVSTTALLLSMQLAFTLALAAALVRVPLSFANFNAVVLLTLSSLLLALRHGAGGGGGGADATSPDYLVGVAATLGAALLFALYLPAAELVYRHGGVTGFRMVVEAQVIMEAVATAVGAAGMVSSAGGKWPWDGVEATWDLSPAAYYAVVGAAVLSWQLCFLGTAGTVFLTTSLHGGICMTALLAVNVAGGVVVFGDEFGPEKAVAMLLCLWAFSSYVYGEYKKGDKAMANEEDQGILDRV

SEQ ID NO: 37127 - protein, 90 aa, Oryza sativa
MLGKSMATASSVVNQSSLRRSSLLPAATIPGVGVAVHGACGGVDGEVRLLSAVSLRPSRALARRTSRGPLPPGTEREDRDNRYSKRGEIG

SEQ ID NO: 37128 - protein, 41 aa, Oryza sativa
MNQFRFFDVSIWNSVYATKNTDALSKVYLLKGQGCRQSGDS

SEQ ID NO: 37129 - protein, 396 aa, Oryza sativa
MTSAMAMSFLSTTAASSSQPPLPARRLPRRNPSLPFPLRPPHRLSPFSAPPPEPHRLTYRTHSTSSSSRTPTAAGLLSPVISTSRTLIFLLVASLLSLSGVRPLPSLASPPPPTQQPQETEEQEQQQESEEKQQQQQEEEGVEAEVEEAWLRQDEEEEVEEKEEEEEEADDEVQMYMEILSRDPGDVDALKCALFAKMRRAEWGGALGFARRLREAEPGEVEWRLMEALLHELKGDLAEAERLFNEVLAEKPLLVRALHGLALCMHKRSEGPTVFEMLEKALQLAISGERVPEERNIKLLIAQMHVVKGQLDVASEKLQNLINEDPRDFRPHLCQGIVYALLDKKEEADELFDTYRSLVPDEFPDKSFISDVIQAARVESKDRLQKDFGSEFLSKK

SEQ ID NO: 37130 - protein, 306 aa, Oryza sativa; identical to SEQ ID NO: 32236

SEQ ID NO: 37131 - protein, 204 aa, Oryza sativa
MQGRMVTWSMASVIVAAACIFLSCSASVAHGRRFVRSSSYDKPCKEMRLYLHDILYDYSNSTSNSTSAAATKPTALATAVPSTGGTFFGQVVVFNDPMTEGRALPPSLEETAVRAQGVYLYNSKEAFNAWFAFSIVFNSTGRRGTLNLMGADIIAEKTRDISVVGGTGDFFMSRGVATLRTDAFEGFTYFRLQMDIKLYECYVV

SEQ ID NO: 37132 - protein, 329 aa, Oryza sativa
MELATHDLAALGAADLVRVSASIPRAAPRTFALLTAGLVFPLSAAVLVHSLFTHPIILRLQGANGDYSSSDSAQWLKLFAYQFLYLILLFTLSLLSTAAAVFTVASLYAAKPASIASSLAALPPILPRLLRTFLWVSLLMLAYHLVFALTVLLLLLLFAPSSSPPSLPFVLILVVVVFVFLAIHVYISALWHLASVISVLEPLCGLAAMTKSKQLLQGRTRTAGVLVVSYFAACGVTAVLFRAAVVKGRGEEGSLGLSLPGRVLAGAVLVSVLVCVNLLGLLVQSVFYYACKAFHNQQIDRSALYEHLGGYLGEYVPLKSNIQMENLDA

SEQ ID NO: 37133 - protein, 238 aa, Oryza sativa; identical to SEQ ID NO: 30553

SEQ ID NO: 37134 - protein, 515 aa, Oryza sativa
MALPATVSHTTCAIQRRRRSTAPARRRGPPSRRHPHSGAALTLRAAPPPATQPTLDRVLSDLGSHPRLLTPDLLDSLLAALPLHPSPRRNLARLRRLLSVSLLRRYPALARRLLHLHASLGLVSYAHHLFDHLLPARAREDAFPWNCLIAGYARLGRHEDALALYLQMEEETVPRDRFTFTSALQACAGVGSVELGHAIHRDVVRAGLASDVPVCDALVDLYATFGDVRRALQVFDAMPDRDGVSWNIMLAGCLRHGLSQQALELWRRMLREEHEPDSITLSTMLSILPLVCDNGKWGLEIRAWAIRHGLETELSVANALIRMYSDKNEQSHALLVFESMTMRDLQSWNAIISAHLQDYRILMIFRRMVDSGMRPDETTFALVFSACDNLGLVEGGMRLFSEMENEYRIPPTMEQYTCMVNMLGKAGMIHEAYEFMSKRKPLDNEQTVLRALLQACLMHRNARVGEIIAKRLIELEPDNEHNFVKLMEIYQNVGRLVEAEKVKKTMRDRGLSCQS

SEQ ID NO: 37135 - protein, 201 aa, Oryza sativa
MLPPRVAPAAAAAPTYLAAAASTPASVWLPVPRGAGPGAVCRAAGKGKEVLSGVVFQPFEELKGELSLVPQAKDQSLARQKFVDECEAAINEQINVEYNASYAYHSLFAYFDRDNVALKGFAKFFKESSDEERDHAEKLIKYQNMRGGRVRLQSIVTPLTEFDHPEKGDALYAMELALALEKLVNEKLHNLHSVRYSPVMQ

SEQ ID NO: 37136 - protein, 405 aa, Oryza sativa
MDFSGGSGGGGVASGRVQAERWLEIAGKLLAARDLVGCKRFAERAVEADPLLPGADELLAVTDVLLASQSVLPSGQADPLAVLQLPPSTNPADHAAVSRAYRRLALLLRQDTNPHPGADVALSLVHDAYAILSDPNRRPPPPVAVAVPHAHPGAASHPAAPAAAESPEFWTACPFCSYVHQYQRELVGRALKCPNESCRKGFVAIEISTPPTIVPGTEMYHCAWGFFPLGYPTSADLNGNWKPFYKMFPWNNAPAGGAGSGGRGGYGGRGGGSAGRQPQNGSARGGSSRGRVKKTTARKKVGAGLKRRSFGGVESGIEPMDGQDGWGEGEEGGDGQAEEVRGININEEAQSTDGATRGHVHARGNVSGGVVDMGTFHLDVDPSEDILGNLQNLPFLRVDNLGRML

SEQ ID NO: 37137 - protein, 298 aa, Oryza sativa
MAMAGGGRGDYGAFMERFVLPPPPSQQLPLHGLTFAIKDIFDIAGRVTGFGNPDWARTHAPAAATSPVVLAALAAGATSLGTTIMDEMAYSINGENTHYGTPTNPCAPGRVPGGSSSGSAVAVAANLVDFSLGTDTGGSVRVPAAYCGIFGLRPSHGLVSAENVIPMAQMFDTVGWFSRDLSTLSRVTKVLLPLPDDIVKQPTQVTIPMDCFQILGSLDDRTYQIINASVAKRFDSQILDNRNLGDFISDNVPSIGKFITDFSESELPSVPALSVISHVMRGLQGLSSKQTMQSGSTL

SEQ ID NO: 37138 - protein, 316 aa, Oryza sativa
MFSASKLCVLAVCAITLFSSAHAHPTESPEYDQRRLRGEGYGGGGGGYGGGAGNNNPVSLPAAPAGVPAMPTPGAAVPVPAPGGGANVPAPAGGSNNCAGGGGNGGMGNGCQPAPAPAPAGGSNNCAGGAGNGGAGGNGGMGKGCGPTPAAPQPAPAPAPAPAPAPAPAPAPAPAPAPAPAPAPVPAPAPAPAPAPAPAPAMKPAPAPAPAPAPAPAPAPAPLPLAPAGATNLWCKDAAGNNIDPSNCFSGPIPAPAPPQPAPAPAPAPAPAPAPAPAPVPAPAPAPAPAPAPAPASGNTGGKPGKPTSSGDPTQQ

SEQ ID NO: 37139 - protein, 224 aa, Oryza sativa; identical to SEQ ID NO: 32413

SEQ ID NO: 37140 - protein, 378 aa, Oryza sativa
MKASIKFRDDDRPLLRARVPIRVLGLPLHSGLSAGGDPRELRLDLSTAFSFGPAIRLSYRPNDPALPFSVSVRAGVGPLGSPARAPFSLAAEFNLLSGNPGSPAFFLLLKPRLGDFSLSHTLRSSPHPGNKVGEVSDGDGHGREVNYKAFSFAAAGKSGGGVGALLSGMRLTTRSVLPLWGRASLRFNWGLRAPPELQAALAADDAMVGASRSRKGGARVPVSKMPLLVIDKISIEQSPRAADKTRGNADSSPPAPAIAAAADADAADGTGRGGEGFSLVRRQLEALNAESGMLRRAVEDLRAEVGSRRAAVSTAGAPDTWRTPPAPPQPAQPYHYSSPVKPDRRGSGKDMAAAENATKPSSDELGDELKRALEARLR

SEQ ID NO: 37141 - protein, 142 aa, Oryza sativa; identical to SEQ ID NO: 30885

SEQ ID NO: 37142 - protein, 442 aa, Oryza sativa
MSSSPFSRRTTDSSSGSASPAPLPVFTAAFGHDDLHDENVDEQLAYGLSLDSPPAYVFSNDLAFEPSELDDDVETGMDAHEGKAAAMRSMPTQRDTSAFVFEPLITPRSFEGGFVETNIFESTSGKAPVFVLDQALSSPLNVNGAKNFDLFTPTILKSDAKKITPSSPLCPAGFFEIPEKERSDFFLSVNPTFTSCASPSTIMDSLKAALATLRCEFATATSCQWTLDVRCLLVAEEISFAIHLLQLRGAETKYEIEFVRRSGDELMFVDLAEHIRAQCTDVDDDGALALFNKTLDAWMDETQEVTARRYVIQETEVVALLDELNCEFLHAESLYQVARSVKNHCRHKTNRKLFVQQSHNAKSLLKGLKWMLADSDELARFALFVLLQFAGDADLCGSFFPTPFEKSSVSLLLDSLDARKDESPSKFTTEMVAAVRQSALFA

SEQ ID NO: 37143 - protein, 291 aa, Oryza sativa
MMGTEATATTTVSGGSGRAAPAALCLQAARGAWSRTSKVLDVDAASPTAAPSLGSSVGVPFLWEEAPGRPKVVVVAPEHFAPPPPLAPAADERAPVSHGGEAAPASGGDRGDGDKARHVVVPLKLPPRLQAAAAAAAAADSSLSPNTVLHGPYGGNKPPRPLTRSGSTASHRRKPSAVGVSLWRKATAAARGKKHDYDAAALDASCRSPASSSSSSSSSSSSSMSYFADDDHRRKADGHGDPEPEADGEECGAKSTVRITRFKRNKSLPSVNTSHLWASIRRSVKQITPWS

SEQ ID NO: 37144 - protein, 106 aa, Oryza sativa
MAGGRLSCTGWSPAAGGASAHFFLPAAVIVVVLHQLAVWPPPSPHTAADGRRLRLGRRGQAHPDGPRGLGLTAGFIFKDTTQSKSCEAARVKFKEATGLTRRAALH

SEQ ID NO: 37145 - protein, 336 aa, Oryza sativa
MAAPPPPANQFVYIDAAALHSVLPFPSLISHLGAGLPAFAAGIHCPHRVSFPLPTAPSASLLLMPSWSAHPSLPYLALKAVTSFPANSPRLPSVHAAVSLFDSASGVPLASLDGSALTLLRTAAVSALAASLLASPTRPPSTLALAGAGALAPYLAEAHLSALPSISRILIWNRTKAKSAALAARLRDAHPGVAVEEADSMDEAVSAADVVSCATGSQEPIVRGELLKPGAHLDLVGSFTPAMRECDDEALRRGRVFIDFEAAMQEAGELVGALQRGVLRREDVAGTLAELAAGSVAGRRCDDEITVFKSVGTAVVDLLAAQLAYETYIATTTKKT

SEQ ID NO: 37146 - protein, 266 aa, Oryza sativa; identical to SEQ ID NO: 32418

SEQ ID NO: 37147 - protein, 485 aa, Oryza sativa
MAAAAAAAADHDAAPRAHALILPYPAQGHVIPLMELAYCLIDRGFAVTFVNTEHNHRRVVAAAAGAGGVQAPGSRARRLRLVAVADGMGDGDDRDNLVRLNAVMEEAIPPQLEPILDGAGGEGQLGKVTCVVVDVGMSWALDAVKRRGLPGAALWAASAAVLAVLLGAQKLIRDGVIDDDGAPLKLENNSFRLSEFTPPMDATFLAWNFMGNRDAERMVFHYLTSSARAAAAKADILLCNSFVELEPAIFTLKSPATILPIGPLRTGQRFAHQVEVVGHFWQTNDDTCLSFLDEQPYGSVVYVAFGSLTIMSPGQLKELALGLEASGHPFLWVVRPGLAGNLPTSFLDATMGQGKGIVVEWAPQEQVLAHPAVGCFVTHCGWNSTVESIRNGVPMLCWPYFTDQFTNQIYICDIWRIGLKMVQTCGEGIVTKEIMVERLKELLLDEGIKERVQRLKEFAETNMSEEGESTSNLNAVVELMTRPMS

SEQ ID NO: 37148 - protein, 285 aa, Oryza sativa
MGRQPCCDKLGVKRGPWTAEEDKKLMSFILTNGHCCWRAVPKLAGLLRCGKSCRLRWTNYLRPDLKRGLLTDAEEQLVIDLHAKLGNRWSKIAAKLPGRTDNEIKNHWNTHIKKKLIKMGIDPVTHEPLDRKQESPATTSQSTVTAESSKSGEATRQQSRQLDDAVVRDMSVSAGGDSPPESSTNTASTAGGSSSSSSSHHQDPLVKWLLEEDLLPTGDEPWLNFTASNDVDEFSSIAATGATPALPWDVGMTTDWLLDYQDFGMGDSSLVVDASMVNSSNGSNF

SEQ ID NO: 37149 - protein, 38 aa, Oryza sativa
MDGFVCLPRGQEATVVFINLLTPLLFAIAELVVFHPHA

SEQ ID NO: 37150 - protein, 224 aa, Oryza sativa; identical to SEQ ID NO: 31216

SEQ ID NO: 37151 - protein, 401 aa, Oryza sativa; identical to SEQ ID NO: 29911

SEQ ID NO: 37152 - protein, 429 aa, Oryza sativa
MDRLLACLLGFLLIASVGSHAARTPEQYWKSALPNSPIPSSLSQLLSTAGGGTSVNVGGGGVHVDAGHGKPGGTTVDVGKGGVGVNVKPGYGKPGGTTVGVGKGGVGVNVKPGYGKPGGTSVGVGKGGVGVNVQPGYGKPGGTTVGVGKGGVGVNVQPGYGKPGGTTVGVGKGGVGVNVKPRGKPVHVNVAPFIYNYAATETQLHDDPNVALFFLEKDLHPGKTMAVHFTATTAGEKFLPRSEADAMPFSSEKVPEILSRFSVKPGSVEAAEMAQTLRDCEAPPAQGERKACATSLESMVDFATSSLGTSHVRAASTVVGKEGSPEQEYTVTAVKRAAAGGDQDQLVACHAEPYAYAVFACHLTRATRAYAVSMAGRDGTGVEAVAVCHADTAGWNPKHVAFQVLKVKPGTVPVCHFLPQDHVVWTRSG

SEQ ID NO: 37153 - protein, 331 aa, Oryza sativa
MPLLQAISLVLERHPHLKLQGIDDQVLQWCVCRLEAWFAADADEISLKNWDQEHVLTGGHGLMVNGYYPIIQALAQGLDIRLNQRVTKIARQFNGVTVTTEDGTSYSADACIITVPLGVLKANIIKFEPELPSWKSSAIADLGVGIENKIAMHFDTVFWPNVEVLGMVGPTPKACGYFLNLHKATGNPVLVYMAAGRFAQEVEKLSDKEAVDLVMSHLKKMLPDATEPTKYLVSRWGSDPNSLGSYSCDLVGKPADVSARFAAPVENLYFAGEAASADHSGSVHGAYSSGIAAADECRKRILMQKGIPDLVQVKAYEEMAGVIAPLQICRT

SEQ ID NO: 37154 - protein, 343 aa, Oryza sativa
MVSSPLVLGLDKDLLVELGGVVPAEVLRHAAHLEPPPALLVLAVRLEAVAERLDELVRLGAVERPPEAGVLERVERRHGVPQPADGVHDGDGAVRHGVELVEAARLEPRRHDQHVGARRDPVRHLHREPHPPAHLAVVLRLEPLQHHLQVAAAGAQQHQLHVLPGDPRHRVADDVHTFLPVEPPDEPDQRHVVAHLQPQLALQRRLAPRLAGVQRGHGVVGVAVGLQVHVHLRVPLPVVDAVHDAVHLPVVLPYDVVEAPAALRRLQLPEVAGAHGHHPVRHLQARAEDVGVLAADGVVQLEVIQVVLRQFHVGEFIYWATALQTLHEPFSTQKKYSPARFIL

SEQ ID NO: 37155 - protein, 200 aa, Oryza sativa
MSTPTVQMVAPAAAVVEDPSKHWTRHGPVLTACLVGINLLMVLLVFFYFWRFFSGKRGPPTSSTSTMASGGDDDEEEGASSSSSSADTSPGRHHQDREDIASSLPVFVYSSSAAAPDVGDAGGNGKAAAAAECAVCIVEFRDGDRARLLPRCGHRFHADCIGAWLQLHSTCPLCRAAVLLHPAAAEPAKNDQPKDDDCPV

SEQ ID NO: 37156 - protein, 451 aa, Oryza sativa
MREVLSIHIGQAGVQVGNACWELFCLEHGIQPDGAMPSDKTIGVEDDAFNTFFSETGAGKHVPRAVFLDLEPTVVDEVRTGTYRQLFHPEQLISGKEDAANNYARGHYTIGKEIVDLCLDRIRKLADNCTGLQGFCIYHAVGGGTGSGLGALLLERLSVDYGKKSKLGYTVYPSPQVSTAVVEPYNSVLSTHSLLEHTDVAAMLDNEAMYDLCRRNLDIERPTYTNLNRLVGQVVSSLTASLRFDGALNVDITEFQTNLVPYPRIHFVLTSFAPVISAEKAYHEQLSVAEITNAAFEPASMLTKCDPRHGKYMACCLMYRGDVVPKDVNAAVATIKTKRTIQFVDWCPTGFKCGINYQPPTVVPGGDLAKVQRAVCMIANSTAIAEVFARIDHKFDLMYSKRAFVHWYVGEGMEEGEFSEAREDLAALEKDYEEVGAESADVEGEEDHEEY

SEQ ID NO: 37157 - protein, 423 aa, Oryza sativa
MDRKRPRPPQPSPPPPVASSAASSSSSSVLDDGDLLREILLRLAHPTFLVRAALVCRRWLRHASDRAFLRRFAVLHPPRLLGFYVDSASLPRPRFVPLPHPPELAAVVRRGSFDLGTAADLHFHLGTGIYCCRNGRLLVCHRGGGESTLQLRRPLHPASDGAVISTFRTPPRPLPPNQRHTRYILLPEDGGDGDGDAVACTVVTLVSSEREVFAKVEKILRAGVWDVAQTSAPIELPAHWRRSLSRGFLVNGKLYMLGTTGYILGLELVSMSLFFIEVPDAVRDDCPESFQLSVKLSQAEKSGLYLIHVEGFKIHVWLHGTDGNSSADWNLVNTICLREVFGHLVKPSWESGDSRISLPGSGDNAEFVFLEVDGEVFCMDIISRTVEKVYEMAMKDDFLFEIYPFMMVWPPIFPALIKTHEPE

SEQ ID NO: 37158 - protein, 408 aa, Oryza sativa
MAILRVSVMRLVVAAMAVAAGVLFFSGAGEARVLLTLDDFGAVGDGITNDTQAFLDAWNAACASTEPAVLAVPAGKTYQIWPVRLAGPCKKKLKLMISGTIAAPASPDEWAGRDPTKWLYVFRVDDLSVSGGGTIDGMGAEWWARSCKRKKTKPCSTVSAPKALQFEECRRVSVQGITMQNGPQFHLMFTRCTDVKASFLRVVAPESSPNTDGIHLNDTTHAQIMDNLISTGDDCVSMVGNCSDVRVKDISCGPGHGISIGSLGKNRTTDRIENVRVDTCLLTNTTNGVRIKSWQGGMGYAHNLRFEGIVMKNVSNPIIIDQYYCDQPTPCANQTQAVEVRKIEFAGIRGTSATEQAIKLACSDAVPCRDLELRNVNLTMVGVVPASCLAKAPHRMLGDATPAARVGS

SEQ ID NO: 37159 - protein, 256 aa, Oryza sativa
MAAIRRFRPALLLAAILLLAAGAVEGKKGGKVDVALYYESLCPYSAMFVVGSLAKVFRDGLLDAVDLSLVPYGNARVKDGKISCQHGSEECFLNTVEACAIDAWPDLRVHFRFIYCVEDLVVNHKQREWESCFGKLNLDPKPVTDCYKGERGHQLSLKYGRQTDALQPPHKYVPWVVVDGQPLYEDYENFEAYICKAYKGHPPKVCEGLARPPTPTVLEVAEAVNRVSYYDSGDIRLKPDEDGHAKIKKVVPDDDD

SEQ ID NO: 37160 - protein, 491 aa, Oryza sativa
MASKLPDLGGGGVEDGGGKKWPGFVQFFFVLSVVLCVLLYAPRFIVLTPTYGLDFFPQPPPNVTTSPARVVGDHNAGEVVVLDNQLRSPCSSLAGDTICCDRSDFNTDVCFMAGDVRTDPSSLSLLLFPKQPPAANATVEERIRPYTRKWEALIMSRVEEVRLRMAPPEEEPGHRCDVRHDAPLLVMTAGGYTGNLFHAFSDGFVPAWLTVQHLRRRVVLGVLSYNPWWAGTYGEIISGLSDYHVVDLLHDKRTHCFPGAIVGTRFHGILSVDPARLRDNKTIVDFHDLLAGVYETAGDTVVVDDVTQPAPRRPRLGIVSRRGTRVIENQAAVARLARSVGFDVDILETANGLPLPASYASVSACDVLVGVHGADLTKLLFLRPGAALVQIAPLGVAPIARGCYAEASARMGLHYEQYDAEGHESSLSRKYGLRDVVVSDPEAAKRDKGWGFVARVYLGGQNVTLDLSRFRHTLTRLHARALRVRSLHPAP

SEQ ID NO: 37161 - protein, 157 aa, Oryza sativa
MVRSLDSYPSIKDVTYSCGYCGYALNLSSSTRNTANIGSKYGKQIKKGVVSFFAVDESRFTQADEVTCVPYFHSRRSWGLFRRRSRLLCRKCGGRIGSAYEEDEPAAAALPACDGPDDLRTTSSGSSGSASSQKNYVIKINALQPSSDDSDAVAFTL

SEQ ID NO: 37162 - protein, 381 aa, Oryza sativa
MATGYYRGGGGARDHADEPDDFDEYDPTPYGGGYDLFITFGRPLPPSDETCYPCSAPSTSYDAPHYSADEPSPYAHHSKPQPAYGFRPQHEQQQQPSYASSGYRPQHEQQQSYGSSGYGSKPQPAYGFRPQAEEENTYGSGYGSGYGGGGRKQQEEESYGSGYGRKPQVEESYGSGYGTKPQQEESYGSGYGSGYGTKPQQEESYGSGYGRKPQQEESYGSEYGSGYGRKPQAESYGSGYGSRPQQGGEEYGSGGYGRKAQEESYGSAGYGGRKTEEESYGGGSGYGYGKKAQEESEGTYGSGGYPKPKPYSQEETQGSYGYGYGEKPAYESGGYNKPSYGGGDEYQGGYGRKKHDDNDSDDEKKQRYQKHHHHRRQEYDD

SEQ ID NO: 37163 - protein, 330 aa, Oryza sativa
MGDVTAAAAPSTDKSNNLFMQIVVHPDGTITRPFVPDAPPSATGPVLSRDVPLDASLATSLRLYLPNPASPPPPPTSKLPVILYFHGGGFVLFSTGSVFYHASCEAMAAAVPAIVVSLDYRLAPEHRLPAAYDDAASAVLWLRDAAAGDPWIAAHGDLSRCFVMGSSSGGNMALNAGVRACRGLDLGPAAVRGLVLHQPYLGGVARTPSEEKSGDDAVLPLEANDKLWSLALPAGADQDHEFSNPAKSMAAAAAALTGLPRCLVTGSDGDPLIDRQRELVAWLRGHGVEVVAKTDFAGSHAAELFVKETADELFAAVCAFVSGAGDVVHS

SEQ ID NO: 37164 - protein, 301 aa, Oryza sativa; identical to SEQ ID NO: 31663

SEQ ID NO: 37165 - protein, 517 aa, Oryza sativa
MDATKKRVAIVGAGASGLTACKHALAKGFRPVVFEAAGDGVGGVWRRTLASTRLQTPAFAYRFSDFPWPADVSGAEVFPRHDQVVEYLAAYARRHGVTECVRFGCKVLAAEYAGVPDEEAAAWERWSGNGEAFGDGSGEWLLTVQHPGSEATQIHRVDFLILCTGRFSGVAHTPTFPPNRGPEVFHGQVLHSMDYSNMDHAAADELIRGKRVAVVGSGKSAFDTVAECAAANGGRYPCAMICRSGRWMVNGGFVWGVSLGHLFCNRLAELTVHKPGEGLALALLAILLTPLRWLLSKLAETYFKMQIPMEKHGMVPEESFAGSMSGCRLGVLPDKFYDRVEEGSILIKRARSFSFCTDGLVLDDDDTGERVDADVVVLATGFRGDQKLTDMFVSATFKQQIVAAPLYRQCVHPRIPQMAVIGYTENLTSIYTFEMMAKWVAHLLAGAFRLPSVVRMEASAAEWDEHLAMRRHGEGGGGKPCLGGVSTWYNDEMCRDMGYEPRRKKGILAATLVSSEV

SEQ ID NO: 37166 - protein, 250 aa, Oryza sativa
MCGGALIPNDYGDKPPPPPSESSEWDATTKMKKKKKRGGGGDDDWEAAFREFIAGDDDDDDGGVSMFPSGAGTMETTTEVAPAAAVVERPRRRRRVRRSYPYRGVRQRPWGRWASEIRDPVKGARVWLGTFDTAVEAARAYDAEARRIHGHKARTNFPPDEPPLPAPSQAPFCFLLDDDDDDDGVARGNSPASSSAPDRASACTTSSTVASGERGDELILLECCSDDVMDSLLAGFDVSSEPRSVLGMVN

SEQ ID NO: 37167 - protein, 362 aa, Oryza sativa
MAGARLSLAFLCFVVVVVASALAGGAGARKTVGEYVLRKGDFSVKITNWGATMMSVVLPDSKGNLADVVLGLDTIAEYNDTNYFGPVTGRVGQRIARGRFVLDGKVYHTYINDGRNAIHGGHRGFSKVIWTVKEYVGGGDSPYITLYYRSFDGEQGFPGDLDAYVTYQLSSPYVLALRMNATALNKATPVNFLQHTYWNLGGQGRGDVLGHTLQLSASRYTPLDEELLPSSGVVAPVAGTPYDFRHPTPIGARIRQVMGGRIAGYDINYVIDGEGMRKVAAARDGASGRALELWANQPAMQLYTGNWLNNIKGKGGKVYQQYGGFCLETQGYVDAVNHPEFPSMTVRPGQVYRHDMAFKFSF

SEQ ID NO: 37168 - protein, 290 aa, Oryza sativa
MAARVLPLLLVVVVAAAMARAPTAHAWGKEGHYMVCKIAEGFLTKEAATAVKELLPGWAGGELAETCSWADTERFRYRWSSPLHFADTPGDCQFNYARDCHNTNGEKDMCVVGAINNYTNALEDSSSPYDPTESLMFLAHFVGDVHQPLHCGHVKDLGGNTIIVHWYTRKSNLHHVWDVNVIETALKEFYNEDVSTMIKAIKMNITDEWSTEEKQWETCRSRTKTCADKYAEESAKLACKAYEGVEQESTLEDDYFFAALPVVQKRIAQGGVRLAAILNRIFSGNKVQSS

SEQ ID NO: 37169 - protein, 321 aa, Oryza sativa
MDREWGSKPGSGGAASAQNEAIDRRERLRRLALETIDLAKDPYFMRNHLGSYECKLCLTLHNNEGNYLAHTQGKRHQTNLAKRAAREAKDAPAQPQPNKRKFAPRKSVKIGRPGYQVTKQYDPDMKQHSFLFEIGYPEIEENSKPRHRFMASYEQKVESWDKKYQYLLFAAEPYEIIGFKIPSAEIDKSADKFFNYWDPDKKQYILQLYFKTRQPEANKPPAAPGTLPNGSGGPPRPPPPQVPPPPPQAPPPPPPNAPMGMPPRIPPPPVGGTQPPPPPPPLANGPPRSIPPPPMTGGAMANFTPGAPPRPPMQGFPGPQQ

SEQ ID NO: 37170 - protein, 246 aa, Oryza sativa
MWCQSCKEEYEEEDAGTCKECYEEASETEEELKREIDDLRSRLHFLRLPSPSLDASSLSHSDLLLHAIPADAPARPDTPAVPAHRVILASRSPVFRAMLENEMEESRSGIIKIYDVSYDVLRAFVHYMYTAEALLDEQMASDLLVLAEKYEVKNLKAYCEKFLTSKVSNDNAITHYAFAHRHSAKQLLETSLAAIMDNMSTLADREEYKELVEKDPRLVVEIYEAYLNRQVNTAAGKETDSSSRKG

SEQ ID NO: 37171 - protein, 229 aa, Oryza sativa
MAPTSRSPAALFLLLALACAAPPLLRAADTHLHFFMHDVVSGSGQTAVQVIKGPTSANGGVSTGFGDTTVVDDALTETSSATSPEVGRAQGFYMMSSLSSPTLMMCVNLYFTAGENNGSTIAVIGHDDTTATVRELSVVGGTGKFRMATGYVVWKTASMSASTGVFELDVYVTTPNATTIDASAPVSPLDGGGSSGSTSTAKSGAAGRQVGWVSACVVGLVVALVGRGW

SEQ ID NO: 37172 - protein, 204 aa, Oryza sativa; identical to SEQ ID NO: 36119

SEQ ID NO: 37173 - protein, 309 aa, Oryza sativa
MPGLLEYSAGGLGLLALAALESLPLRPLLLPAAAASHLPRRLGLATPLHLRHLLAGIVSALFLLSALFSARHHLSLPTLAATALFLLYALAPLAPLRAPLPLPLLDLVLAAAFAQELLLFAHRRPSTAAGIENRYFDLFLVPVAVCLVATLLAAHDPEAVPPRLARAAGLALQGTWMVQMGFSFFTSAVAQGCALHAQSRVDYTIKCRTHDDYHRARSAATLQFNGHLALLVLAGAAAYGAAVSRRNQPPSGYRMLSKEVQMEGMPLHSQFTLDSDEEKEDERITNSAMPVANGSGSHHEITVQTSDSK

SEQ ID NO: 37174 - protein, 232 aa, Oryza sativa
MSSAAAAQEVADQKRALRSEVRRALRALTPEQRASEDQAIQNAILNSSWFKESKRLCAYISCAQLREVDTSKVLSEVLSPNSEHGHAKDLYVPRVEDKNRNMRMLKITTMDDLVKNSMNILEPSPLDASGNAREEVLSTSSPVDLFLLPGQAFDRTGRRLGRGGGYYDTFLMRYQELAKEKGWDQPLLVALSYSVQILEEGIIPVNSTDVPIDALVSSSGIIPISPAALARI

SEQ ID NO: 37175 - protein, 198 aa, Oryza sativa
MVAPKEAGKGDAGGGKGGAAATRVASPDPGWGSGRRRGGAETGRQRQRHGGQATTAAARSRRGRGAAVGVCQALVLASVMLRRRALAGHPLYLAGSGRPRPDPSPPRRMAAGRRDGCVWTASAAAARWRPASCSAGGFCRWWVLSLLMGGDVRMWKWQDDGLCWREAGMGLDVRDGDFLIVGRVFSLSSVSPLGRTLF

SEQ ID NO: 37176 - protein, 318 aa, Oryza sativa
MGAGGRWVEEYGRSSSPSSNLQCFLDCTTPAVDTHLLPKANGRFSSDSWHHAEMDSVEYFNLADLWEQYYEWSAYGAGTTVQLYGGERVVQYYVPYLSGIQLYTNKAQTASRSFGEDNGMDYWSDDEDNEKMSRSWSSTSEDSLFNCDAISGNRKRHGHMYFEFFEVCSPYGRIPLIDKVYELSQSYPGLTSLRSVDLSPASWMSVAWYPIYHIPYQRNVKDLSACFLTYHTISSSFQDYALESMANGKRNDETEKKVSKTHLAPFGLAAHKLQGSLWTNPRTGDRDRMVSLFGAADSWLKQLGVQHHDYNYFITHPM

SEQ ID NO: 37177 - protein, 528 aa, Oryza sativa; identical to SEQ ID NO: 31148

SEQ ID NO: 37178 - protein, 258 aa, Oryza sativa; identical to SEQ ID NO: 32596

SEQ ID NO: 37179 - protein, 328 aa, Oryza sativa
MKGYMEDREHEKSLQAEKEELKEVSVSYGHEVKLSNLFPTRFGHKNYQHTFEGMDHGRHVHAHGNKMQQLADVFFFRDALRPGSVITPTIPPTTSLPAFLPRHVADAIPFSADRFADVLAMFAPASLAMAREIRWALDTCGQRAAALLPGEKAGCATSLESLADLAASLLGTRDVRAFSAADLPTDAATTPARRGRYNVTSVRELSAMAGSGSSSSSEPAPAAVVACHDLTYPYAVFYCHSTKPTAAYAVTLVAATTGDGDGEGEAASPAKMEALAVCHLDTSRWRADNPFFVAHGVKPGEVSVCHFLTKLSIVWVPRHEQGGPRAAA

SEQ ID NO: 37180 - protein, 322 aa, Oryza sativa; identical to SEQ ID NO: 30975

SEQ ID NO: 37181 - protein, 5 aa, Oryza sativa
MSAMV

SEQ ID NO: 37182 - protein, 240 aa, Oryza sativa
MLAAAAALRPPFRRARLSTSHGGGGGVTHPLRPRLQRRALACRADLQQDAPFAAAIGACLLASLVLPTSRGRRDDDEEEGEFGATDTRMGVMGIISLLPYFNWLSWIFAWLDSGKRRYLFYAAAYLAPYLRTNLSLSPEESWLPIASIFACILHVQLEASIRTGDIETFRFVQRAWRLIFPSALKEDVQHRNKGKSIRMGSGNRRIPSAHESREKLRNSDIFKRRLDEPNDEKQNKSDWN

SEQ ID NO: 37183 - protein, 366 aa, Oryza sativa
MPPKKAAPSKADLAKKQKVVEDKTFGLKNKNKSKNVQKYVQSLHQAVQPKPDPTKTAAKKKKEEEKAREKELNDLFKVAVSQPKVPVGVDPKSIVCEFFKVGQCQKGFKCKFSHDLNVQRKGEKIDIYTDKRDAETMEDWDQETLEKVVASKGAEYQQNKPTDIVCKYFLDAVEKKQYGWFWVCPNGGKDCHYRHALPPGYVLKSQMKALLEEESEKIAIEDEIEDQRKKVKTTTPMTTDLFMEWKRKKAEEREAGLAALRAERAKNDRMSGRELFMADSSVFVDDAEAYDVYERQEESEANEEPSNKNQDEGPSSSTSNGKEVEESDDEDINIDDDLDIDELNELEASLSRTSIQIREPGEGTSS

SEQ ID NO: 37184 - protein, 360 aa, Oryza sativa
MADAHGHRRRVALPCAVRLRLCLLEAAIDATQRRDGAINRPLFSLYDRRAPADPRPDAAGVSSTDVTVDASRGLWARVFTPTAPEHEHSSSSSTTTPRPVIVYFHGGGFAMFSAASRPFDTHCRTLCAGVGAVVVSVDYRLAPEHRFPAAYDDGEAVLRYLATTGLRDEHGVPVDLSACFLAGDSAGGNIAHHVAQRWTTTSAATPPPPSDNPVHLAGVILLEPYFGGEERTKAERALEGVAPVVNIRRSDRWWRAFLPEGADRNHPAAHVTGDAGPEPELQEAFPPAMVVVGGLDPLQDWDRRYAGMLRRKGKAVRVVEFPEAIHAFYFFPEFAGDIRKLVGEIRAFVEDSIMSKQSIA

SEQ ID NO: 37185 - protein, 466 aa, Oryza sativa
MASVLAVPLLLCLLASASAARFAPADNHLLACGATAPAVLPDGRRFVPDSGCASTRLRSPAPTLPSAASSAAPQPTPLHAAARVFSCRASYDLAVRRRGYHVLRLHFYPFEPALASARFHVGAAGFLLLHNFSASAPVVKEFILPVHSDVLVLTFVPESGSNAFVNAIELVSAPDELVGDIGTLVTSSGTDQTNGLSSQVYEMLYRINVAGRKVTPFNDTLWRTWVNDERFLVSTESSNSGVWSFGGRIAYPKGSRLMTREVAPDNVYNSARSVSSQGKVTWGFPVPASSRYLVRMHFCDIVSKALNELYFDIYVNGQLAVKDFDISGATGFLAYPYYIDFVVDVEDEGALKLAIGGSKNSRSDEVSGILNAVEIMRMNKTNGGIDGDFAVSLGMEYVASKGIGEFTRSLLCGFIFAGLLLVLLMLVVRLRTELRNNGTTWSWQPNDSGDGKLARAYQLVSAKTDY

SEQ ID NO: 37186 - protein, 287 aa, Oryza sativa; identical to SEQ ID NO: 30679

SEQ ID NO: 37187 - protein, 206 aa, Oryza sativa
MVSGSGVCAPRVVVDARHHMLGRLASIIAKELLNGQRVVVVRCEEICMSGGLVRQKMKYLRFLRKRMNTKPSHGPIHFRSPAKILWRTVRGMIPHKTKRGEAALARLKAYEGVPPPYDRTKRMVIPDALKVLRLQPGHKYCLLGQLSKEVGWNYYDTIRELEEKRKEKAKVAYDRRKQLAKLRVKAEKAAEEKLGPQLEILAPIKY

SEQ ID NO: 37188 - protein, 227 aa, Oryza sativa; identical to SEQ ID NO: 32833

SEQ ID NO: 37189 - protein, 179 aa, Oryza sativa
MAAASVLLLLPSPFLRPSSPAHRARCGIATTTTTSTSGRRGLFLFASRCRPGPRRRAASAAVPPEHGLSQPQPQARAVGSYEAALGDAKDALYAALEGMNRGIFGMTSEKRSEIHALVELLESKNPTPEPTDKLQDKVDGCWRLVYSTISILGKKRTKLGLRDFISLGDFFQMIDVKEI

SEQ ID NO: 37190 - protein, 517 aa, Oryza sativa
MGNLGWMVAAAVAAVVASWAFDAVVKLVWRPRAITRRLRAQGVGGPGYRFFSGNLGEIRRLRDEGAGVVLDVSSHDFVPIVQPHFRKWIPLYGKTFMYWFGARPTICLADVSMVRQVLSDRTGMYPKNVSNPYFARLLGKGLVLTDGDEWKRHRKVVHPAFNMDKLKMMTVTMSDCAQSMISEWESELGTKGDIVEIELSRRFEELTADVISHTAFGSSYKEGKQVFLAQRELQFLAFSTFLSIQIPGSSYLPTKKNLKTWSVDKKVRSMLTDIIKSRLNNKDVAGYGNDLLGLMLEACAPEHGESQPQLSMDEIIAECKTFFFAGHDTTSHLLTWTMFLLSTHPEWQEKLREEVATECDGKVPTGDMLNKLKLVNMFLLETLRLYGPVAFIQRRVNAELELGGITVPEGTVLSIPIATIHRDKEVWGEDADIFKPERFKNGVSKAGKYPNALLSFSSGPRACIGQNFAMIEAKAVIAMILQRFSFTLSPKYVHVPTDVITLRPKYGLPMILKSLKV

SEQ ID NO: 37191 - protein, 218 aa, Oryza sativa; identical to SEQ ID NO: 30346

SEQ ID NO: 37192 - protein, 404 aa, Oryza sativa; identical to SEQ ID NO: 30010

SEQ ID NO: 37193 - protein, 369 aa, Oryza sativa; identical to SEQ ID NO: 30873

SEQ ID NO: 37194 - protein, 269 aa, Oryza sativa
MAAQALLSGRQLLGRPLQSSVSRSSSPRKAPFMVRAEATPPAKQGADRQLWFASKQSLSYLDGTLPGDFGFDPLGLSDPEGTGGFIEPRWLAYGEVFNGRTAMMGVVGMVAPELLGKLGLVPAETAIPWFQTGVIPPAGTYTYWADPYTLFVFELALVGFAEHRRFQDWYTPGSMGKQYFLGLEKYLAGSGEPAYPGGPLFNPLGFGTKSEAEMKELKLKEIKNGRLAMLAFLGFSVQALFTGVGPVQNLLDHLADPVHNNILTSLKFH

SEQ ID NO: 37195 - protein, 287 aa, Oryza sativa; identical to SEQ ID NO: 30679

SEQ ID NO: 37196 - protein, 274 aa, Oryza sativa
MAAGSSHVSADARKLVGKVAVITGGASGIGACTARLFVKHGARVVVADIQDELGASLVAELGPDASSYVHCDVTNEGDVAAAVDHAVARFGKLDVMFNNAGVSGPPCFRMSECTKEDFERVLAVNLVGPFLGTKHAARVMAPARRGSIISTASLSSSVSGAASHAYTTSKHALVGFTENAAGELGRHGIRVNCVSPAGVATPLARAAMGMDDEAIEAIMANSANLKGAGALKADDIAAAALFLASDDGRYVSGQNLRVDGGLSVVNSSFGFFRD

SEQ ID NO: 37197 - protein, 167 aa, Oryza sativa
MREAALARSLSKTLVLAHPLVFLLVAPSSSAAGLSVHSFDYRAFLLVDSRLVPASLSVVNAGPGFREQYHAFAPESPLPSLPEQPVKQGYSIGEQKALDGMVEGFGLERVGAMVTSASALTSEMEEMYSGMLRKLEGLARQVERTNERVLDQEKQNTLLRKKVAGLK

SEQ ID NO: 37198 - protein, 341 aa, Oryza sativa
MVSCRVCVTGASGYIATCLVKKLLERGCIVHGTLRNLGDEKKAAPLRELPGAAERLVLFEADMYDADTFEPAIAGCEFVFLLATPFQHEPSSKYKNTAEAAVDAMRIILKQCERSKTVKRVIHTASVTAASPLREDGGEGYKDFINESCWTPLGQSHPYSSDMSAINQVYASSKTLSEKALLRYNESESRAFEVVTLACALVGGDADTTRLYHLLSVPAIVAPLIGQESYHGGLKYLQALLGSVPLAHIDDVCDAHVFCMEQPSIAGRFLCAAGYPNMKDFVDHFSAKYPEITIKLREVVGEGVRVGADTNKLTDLGFRYKYGVEETLEGSVECAKRMGLL

SEQ ID NO: 37199 - protein, 475 aa, Oryza sativa; identical to SEQ ID NO: 32381

SEQ ID NO: 37200 - protein, 210 aa, Oryza sativa; identical to SEQ ID NO: 30650

SEQ ID NO: 37201 - protein, 326 aa, Oryza sativa; identical to SEQ ID NO: 30661

SEQ ID NO: 37202 - protein, 275 aa, Oryza sativa
MGSGEDTGAGVAGGGGGGGAGGVVRGAVLKALVVVGGVLLLRRLRRSTTRWDHARAVVDALSGEKFSREQARKDPDNYFNLRMLTCPATEMVDGSRVLYFEQAFWRSPEKPFRQRFYMVKPCPKDMKCDVELSSYAIRDVEEYKNFCDRPKDQRPQPEEVIADIAEHLTTIHLSRCERGKRCLYKGSTPPEGFPNSWSGATYCTSDLSIHKNGEVHIWDKGFDDDGNQVWGTKAGPYEFKPAPKSNYDDMFSPLNFSAPLTLEKKIESSFAIDDQ

SEQ ID NO: 37203 - protein, 261 aa, Oryza sativa
MYWKIALPTSPMPGAIRDLISPASSAASASKDKEDTVGSVFFLEKDLFPGSKMTLHFTRATAGAALLPRGRADSVPFASEKLPEILSQLSIPAGSPTADAMRSTLAVCEAARIASETAPKHKHYCATSLESMVELVASSLGTRDVHAVSTEVVNRAGPTPRQAYRVEAVRPVPVPGGDMVACHRMPYAYAVFGVHGIKGAAYTVTLAGADGTMAEAVAACHGDVDGHGVAVAEAYKRLGVAPGKVAVCHFLPQDDMLWVRN

SEQ ID NO: 37204 - protein, 392 aa, Oryza sativa; identical to SEQ ID NO: 31584

SEQ ID NO: 37205 - protein, 320 aa, Oryza sativa
MVGWLKALCYGAGGMAVVGLAALVALQERLVYVPVLPGIARAYPITPDRLRLIYEDVWLRAADGVRLHSWFIRHSPTCRGPTILFFQENAGNIAHRLDFVRLMMQRLQCNVFMLSYRGYGESDGYPSQKGIINDAQAALDHLVQRKDIDTSRIVVFGRSLGGAVGAVLAKNNPGKVSALILENTFTSILDMAGIMLPFLRWFIGGSSSKGPKLLNCVVRSPWSTLDIIAEVKQPIIFLSGLQDELVPPSHMRLLYEKAFEHNKNCRFVDFPNGMHMDTWNSGGDRYWRTIQLFLDQYAPEVQSCNTSCKSEIANDDEAEE

SEQ ID NO: 37206 - protein, 287 aa, Oryza sativa; identical to SEQ ID NO: 30679

SEQ ID NO: 37207 - protein, 310 aa, Oryza sativa
MSSTGEQSQAKAEAEEAVELVLFQVAECYVYLIPPRKTAASYRADEWNVNKWAWEGTLKVVSKGEECIIKLEDKNTGELYARAFLREDEPHPVEPVIDSSRYFVLRVEENIDGRQRHAFIGLGFRERPQAYDFQAALHDHMKYLNKKKTAEEMVQHYEKSSSVDYSLKEGETLVLQLKNKESGAKIKSAFFEQGLNKLSFNEKANSKEAPVSLKLPPPPPSPVSPTDSGIAASPFKAEFPSQDQPAADTGADTTPFKAEFPSSHEQPAADNVASSPPPKAEAAPQEQPTAAEKAPQESVDDDFGDFQAAG

SEQ ID NO: 37208 - protein, 237 aa, Oryza sativa; identical to SEQ ID NO: 31570

SEQ ID NO: 37209 - protein, 133 aa, Oryza sativa; identical to SEQ ID NO: 30708

SEQ ID NO: 37210 - protein, 527 aa, Oryza sativa
MASAAAAYGVGAPLKLAARRHGALALAGSHRCSGWKSSVSCPVPQAWMGSCSSVAMRRVASGSRLIVQASNSGGSSLKASLADASLLTEERITVLVIGGGGREHALCYALNRSPSCDAVLCAPGNAGIAQSGDATCISDLDVSDSDAVIAFCCKRGVGMVVVGPEAPLVAGLVNDLVKAEIPAFGPSSEAAALEGSKDFMKKLCDKYNIPTAKYRTFTDPAEAKQYVKDQGAPIVVKADGLAAGKGVVVAMTLDEAFEAIDSMLVQGSFGSAGSRVIIEEYLEGEEASFFALVDGENALPLESAQDHKRVGDGDVGPNTGGMGAYSPAPIVTEELKHTIMDSIIIPTVQGMAAEGCKFVGVLYAGLMIEKKSGLPKLIEYNVRFGDPECQVLMMRLESDLAQVLMSACRGELGDVSLTWSPEMAMVVVMASEGYPGSYKKGTVIRNLEKAEQVSPAVKIFHAGTALDGDGNLVAVGGRVLGITAKGKDIEEARARAYDAVDVVDWPEGFFRRDIGWRALKHKQVANY

SEQ ID NO: 37211 - protein, 53 aa, Oryza sativa
MDRGGGGGDASVAALLLPSAPMAYAVVTDPGTVDTPDMPSYQPYVYGRLDPLR

SEQ ID NO: 37212 - protein, 92 aa, Oryza sativa
MGRANQRKPARSLNAAIASASASASAAAVATDIPPPLSTPPHVARLRVSTAVAARPVPAPARHHARRPPAPLDLDPRLPPREREREREGRGG

SEQ ID NO: 37213 - protein, 323 aa, Oryza sativa; identical to SEQ ID NO: 37109

SEQ ID NO: 37214 - protein, 396 aa, Oryza sativa
MSWWWAGAIGAVKKRQEENAAATEPSFQSVALVVGSTGIVGTSLLDILPLQDTPGGPWKVYAVSRRPLPPWSPPASPAVTHLHLDLADSAAVAEVLTPLTDITHVFYVAWSAHPTEAQNREVNSAMLRNILSVVVPNCPALVHVCLQTGRKHYIGPFEVIGKIAAPDPPFTEDMLRLDCPNFYYDLEDVLFNEVSRRDGAVSWSVHRPTVVFGFSPRSAMNVVGSLCVYAAICRKEGAVLRWPGSRVAWEGFSDASDADLIAEHEIWAAVEPFAKNEAFNCSNGDLYKWKLLWPMLADQFGVEWSGYEGEESSFKLADAMSGKEAVWAEIVKENDLMDTELEEITNWWFVDAVFGVRSEHLDSMNKSKEHGFLGFRNTVNSFNTWIEKMKVFKIVP

SEQ ID NO: 37215 - protein, 567 aa, Oryza sativa
MESIKSPPLSSKHIGSVLDDPSSLLNVLQLLDARIRELKREIEFKDVKDDGQTTSHRAESPPHTAPLDAFDDDPDFSDLPRHDHHALRSSYRAVSDSAAPGESEQLDSYDRVGDTLADADKAGVKIQDEEPGLTSPRPPTTGTARYPPHIFVLVGLPARGKSYVSRRITRYWRWRGVPCQTFHYAATRRRLFGPFDRTKESRTEELESTSRAIAAEAVKFANEAGGIAVIDGTNTTSQRRKLLLDMLVEEGMATSRVIFIEIVRDDPGIIQANVARSYEAKVASGALENSPEARARYIDEYNSVIKQYERHATSLCEVHDPDMSFIRIKNHFHVTLHRIEGVIATRLVSLLHNMWFEPHVLYLTRCGEWDDLVEGRLGGNSKLTANGEAFATALANYIESERKKRNDSTPLLVMSSAQLRARQTCAKLAGLPNVAIRYLPTLDDLNYGDCDGQTLNEVMLTLPNTLRTLLEHPYKNAWPNGESIEQLFESRLEQHILELQATDRDVLVVAHEHIIQGLRLFFDDSLDQNPEEALKIKIPLHHVFKLAPSGSTRKLEVIELMNVQPQH

SEQ ID NO: 37216 - protein, 257 aa, Oryza sativa; identical to SEQ ID NO: 32544

SEQ ID NO: 37217 - protein, 198 aa, Oryza sativa; identical to SEQ ID NO: 37175

SEQ ID NO: 37218 - protein, 320 aa, Oryza sativa; identical to SEQ ID NO: 30442

SEQ ID NO: 37219 - protein, 487 aa, Oryza sativa
MGMERPQEKVATTTTAAFNLAESGYADRPDLDDDGREKRTGTLVTASAHIITAVIGSGVLSLAWAIAQLGWVIGPAVLVAFSVITWFCSSLLADCYRSPDPVHGKRNYTYGQAVRANLGVAKYRLCSVAQYVNLVGVTIGYTITTAISMGAIKRSNWFHRNGHDAACLASDTTNMIIFAGIQILLSQLPNFHKIWWLSIVAAVMSLAYSTIGLGLSIAKIAGGAHPEATLTGVTVGVDVSASEKIWRTFQSLGDIAFAYSYSNVLIEIQDTLRSSPAENEVMKKASFIGVSTTTTFYMLCGVLGYAAFGNRAPGNFLTGFGFYEPFWLVDVGNVCIVVHLVGAYQVFCQPIYQFAEAWARSRWPDSAFVNGERVLRLPLGAGDFPVSALRLVWRTAYVVLTAVAAMAFPFFNDFLGLIGAVSFWPLTVYFPVQMYMSQAKVRRFSPTWTWMNVLSLACLVVSLLAAAGSIQGLIKSVAHYKPFSVSS

SEQ ID NO: 37220 - protein, 485 aa, Oryza sativa; identical to SEQ ID NO: 31400

SEQ ID NO: 37221 - protein, 243 aa, Oryza sativa; identical to SEQ ID NO: 30535

SEQ ID NO: 37222 - protein, 186 aa, Oryza sativa
MAALGGGGGGGGGGEGGSASRVGDWGVDLGEGWDWRSIPKLLSSACLFICSGGCFGCCDKAVRHVGQLSKSLITPDQNYTIGDELWSTTTIEVEQSWALDQQGVGSSQGPTEFVNHGLVLWKEIRKDWTAKTRQIPETKQIREPILSWNAAYESLLGSNKPFHQPIPLHEMVDFLVDIWEQEGLYD

SEQ ID NO: 37223 - protein, 474 aa, Oryza sativa
MGAPVRGALVFLLLLAGAAAETAPEEPTLPSAAADGAASSGTTSGAGAGTGINSNSVLVALLDSHYTELAELVEKALLLQTLEDAVGKHNVTIFAPRNEALERDLDPEFKRFLLEPRNLKSLQSLLLFHVLPARLPSGSWSAVSHPTLSGEEVELAAAANDGAMRVAHAAVTRPDAVLRPDGVIHGIERLLVPRSVQEDFNRRRSLADISAVLPTGAPEVDPRTHRLKKPAPPVPPGAPPVLPIWDAMAPGPSIAPAPAPGPGSGKHHFDGHSQVKDFIQTLLLYGGYNELADILVNLTSLATEMGRLVSEGYVLTVLAPNDEAMARLTTDQLSEPGSPENILYYHMIPEYQTEESMYNAVRRFGKVRYDTLRLPHKVVAREADGSVKFGHGEGSAYLFDPDIYTDGRIAVQGIDAVLFPPDDTKTAPDTAPVRRAPAVTGTRKKNKLRRGKLLEATCQMAGILGQRLRFASCQ

SEQ ID NO: 37224 - protein, 334 aa, Oryza sativa; identical to SEQ ID NO: 31672

SEQ ID NO: 37225 - protein, 311 aa, Oryza sativa
MEPAAMDRIAGRLAAVDGLYYPTTFLLADPPPSAPDRKAALLALLSRDAPLFLERYGGSLSRDELAAFDALAGDYEVGWHLRRLRAASEGGPSASRVRNRRRAYLDRLVREGEYFSEEAMREREPYLHHEYLGRFQDPTGRAMARPGERWSETLMRRAEEAVIVEKIRGEQIRRGVDPSEWVGGGAEEAMEEQEEEEEEEEEEEEEEEESEEEQGMDMEEKGRGADNSSENPSVTEVVDSNKTAGASKQTLSAEDMEDQLEQFTSLMQQKFLSGEDSEHMDYSRIDNDEMLDDHWSKEANYDAEEKYFEED

SEQ ID NO: 37226 - protein, 344 aa, Oryza sativa
MRSWGTILAVAAIASTAAAENVLSDLFYTTATPCAALRALPTYQDLRAQLLSHDEPFQGSVTLSKSDTKTGCALHLAVRGELDTSDKAHDAFALARHVDASFGELLDAHAPLRGASKQLNDLTFQRVRVKLGNRDFSVDAAAVGGGATGDVTLNGDECGDFASKELLKDLLVAGTGDVAVVTGQVDVAKCAIGLDITGRAPTVGSTHEAVAFLKTVDKSLDEWFGASATKQSTATLRNARMAFSPSKSAVLKAAKPAELATYTQINAPTKQTTMGILMGLVMLTAMLVGIAYQKKRHEQSQQQRHDNASRAAQFRRVSYRLGYGPVPNKETELSPTEEEKSGLL

SEQ ID NO: 37227 - protein, 506 aa, Oryza sativa
MEAAVAAAAAAAGAVTTAVAPPPGAAVSNGVATAPPPFLMKTYEMVDDPATDAVVSWGPGNNSFVVWNTPEFARDLLPKYFKHSNFSSFVRQLNTYGFRKVDPDRWEFANEGFLRGQKHLLKTINRRKPTHGNNQVQQPQLPAAPVPACVEVGKFGMEEEIEMLKRDKNVLMQELVRLRQQQQTTDHQLQTLGKRLQGMEQRQQQMMSFLAKAMHSPGFLAQFVQQNENSRRRIVASNKKRRLPKQDGSLDSESASLDGQIVKYQPMINEAAKAMLRKILKLDSSHRFESMGNSDNFLLENYMPNGQGLDSSSSTRNSGVTLAEVPANSGLPYVATSSGLSAICSTSTPQIQCPVVLDNGIPKEVPNMSAVPSVPKAVAPGPTDINILEFPDLQDIVAEENVDIPGGGFEMPGPEGVFSLPEEGDDSVPIETDEILYNDDTQKLPAIIDSFWEQFLVASPLSVDNDEVDSGVLDQKETQQGNGWTKAENMANLTEQMGLLSSHHTG

SEQ ID NO: 37228 - protein, 393 aa, Oryza sativa
METFGWAGGGQLMHHDDIYLPRSVGCGRPFELDDAFLGACFGAQLQCDGGVGGGDGGGCLQGTSGFGAVAGDPLGLLCSGDVFASVAEGAGGAHDDGLLDAALAFSRNQLGGAACDGSDGGAVSNGAMLSSYSGTTGGNISSGESNNYSGGGGGYDAEVVSPTSTMSAATQSLHPKRKLYDDHHHPAGIAAAAAAPPLAPCPRPTTGAVAAKRRASTSATSITFGHQPHHHHAGATTAGYEPDMEAMAQVKEMIYRAAAMRPVHLGTEAAADKPRRKNVRISSDPQTVAARLRRERVSDRLRVLQKLVPGGNKMDTASMLDEAASYLKFLKSQVQKLETLGTTTTTSKLPQQYYSGNINSSNNHHGFLGFAANNNTISAGYANSNAGNATKLL

SEQ ID NO: 37229 - protein, 287 aa, Oryza sativa; identical to SEQ ID NO: 30679

SEQ ID NO: 37230 - protein, 271 aa, Oryza sativa
MSPPLEPHDYIGLSAAAASPTPSSSSCSSSPNPGGEARGPRLTLRLGLPGSESPEREVVAAGLTLGPLPPTTTKAASKRAFPDSSPRHGASSGSVAAAAACQDKAAPAAAPPAAKAQVVGWPPVRNYRKNTLAASASKGKGEDKGTAEGGPLYVKVSMDGAPYLRKVDLKMYSSYEDLSMALEKMFSCFITGQSGLRKSSNRDRLTNGSKADALQDQEYVLTYEDKDADWMLVGDLPWDLFTTICRKLKIMRGSDAAGIAPRSIEQSGQSR

SEQ ID NO: 37231 - protein, 156 aa, Oryza sativa
MVTAAIRRKLDAMAAAADSMRRGGGRGGLDAMQRRQQRTRCDATVAAADSMRRDGGSGGLDATRRRQRRTRWHGDVAKLWRIREIHSFMARRRRVSCRPRRHERVLAGRRCRCRGARQSPPRLLPCSSCRRRRRTWLGPFEPPRASKQNAIKRVRD

SEQ ID NO: 37232 - protein, 491 aa, Oryza sativa
MGKEASAMVARRSTSRRDWRRWWWWLLPLACCFVCWVASSAATVAPAAGVAVTSLPGFDGPLPFSLETGYVEVNESTGVRLFYYFVQSEKDPDVDPLLLWLSGGPGCSSLSGLTHEIGPFQFAAKRYYSGGLPKIIYQPETWTKVSNIIFVDSPVGAGFSYAATQEGSKTSDTKTVKQLVIFLRKWLHDHPQFLLNPLYIGGDSYSGYIVPTLALAIDESNDSGDKPILNLMGYVAGNPRTERQFDEGGKIPFLHGMGLISNELYEHAKETCRGKYNAPGNARCEQSMKVIHDCTKDINMLHVLEPFCEDVGSPGIHNNEATDGMIRLMLESASAANDDIIEFKCRKASYVVLQIWANDKTVRESLGVHKGTVGEWIRCNFDVDYIADVYSTVEYHLTLMRKGYRALIYSGDHDCQVPFTGTQAWIRFLNLSVIDDWRPWYAAGQVAGFTRSYANNNLIYATVKGAGHTAPEYKPKECLEMFARWISGNTL

SEQ ID NO: 37233 - protein, 438 aa, Oryza sativa; identical to SEQ ID NO: 28597

SEQ ID NO: 37234 - protein, 261 aa, Oryza sativa; identical to SEQ ID NO: 30971

SEQ ID NO: 37235 - protein, 326 aa, Oryza sativa
MHFPACVQCLQQNTMARCFVLNTGAKIPSVGLGTWQAEPGVVGNAVYAAVKAGYRHIDCAQAYFNEKEIGVALKKVFDEGIVKREDIFITSKLWCTNHAPEDVPVALDSTLQDLQTDYVDLYLIHWPVRMKKGAGFGGQNVLPTDIPATWAAMEKLHDSGKARAIGVSNFSSKKLEDLLAVARVPPAVDQVECHPVWQQTKLRKFCTSKGIHLSAYSPLGSPGTASVKAVGNVLAHPVVVSTAEKLGKTPAQVALRWGIQMGHSVLPKSTHEERIKENIDVYDWSIPEDLFIKLSEIEQMKLIRGEFWTHPEGVYKSIEELWDGEI

SEQ ID NO: 37236 - protein, 307 aa, Oryza sativa
MAGGFLSMANPAVTLSGVAGNIISFLVFLAPVATFLQVYKKKSTGGYSSVPYVVALFSSVLWIFYALVKTNSRPLLTINAFGCGVEAAYIVLYLVYAPRRARLRTLAFFLLLDVAAFALIVVTTLYLVPKPHQVKFLGSVCLAFSMAVFVAPLSIIFKVIKTKSVEFMPIGLSVCLTLSAVAWFCYGLFTKDPYVMYPNVGGFFFSCVQMGLYFWYRKPRNTAVLPTTSDSMSPISAAAAATQRVIELPAGTHAFTILSVSPIPILGVHKVEVVAAEQAADGVAAAAAADKELLQNKPEVIEITAAV

SEQ ID NO: 37237 - protein, 164 aa, Oryza sativa; identical to SEQ ID NO: 31847

SEQ ID NO: 37238 - protein, 465 aa, Oryza sativa; identical to SEQ ID NO: 31629

SEQ ID NO: 37239 - protein, 277 aa, Oryza sativa; identical to SEQ ID NO: 30724

SEQ ID NO: 37240 - protein, 240 aa, Oryza sativa
MSSFGGTSSVASGGGKRLEYGRTHVVRPKGAHKATIVWLHGLGDNGASWSQLLETLPLPNIKWICPTAPTRPVAVFGGFPSTAWFDVADLSEDAPDDVEGLDASAAHVANLLSTEPADIKLGVGGFSMGAATALYSATCYAHGKYGNGNPYPVNLSVSVGLSGWLPCARSLKNKIESSQEAAQKASSIPLLLCHGKADDVVLYKHGEKSADALKTTGFSNVVFKSYNRLGHYTVPNKIER

SEQ ID NO: 37241 - protein, 278 aa, Oryza sativa; identical to SEQ ID NO: 29983

SEQ ID NO: 37242 - protein, 258 aa, Oryza sativa; identical to SEQ ID NO: 30725

SEQ ID NO: 37243 - protein, 85 aa, Oryza sativa
MMGSQDVVYSAAARHGASGSAVMFDDKVIGVLYSMSTNSQVAYARSSTTVHMALKNWLHPNDAAITTEKMIELVVKPLNDSELDD

SEQ ID NO: 37244 - protein, 391 aa, Oryza sativa
MLMQVESGSEAAAATAAAVLTAPLSLEGGLAAELRPANLVQRVLSLFRNVRPGSDLSHFQLPATFNLPKSQLQLYGEGVYCVGKDYLRRCAKGSDAVERFAAVVGWSISTTRPPIFGFAPYNPVLGETHHVSSGSLHVLLEQVSHRPPVSALHATDDDGEIELVWCQNPIPKFHGTSVEATVKGMRHVKLLKFSENYEIDCPNLLIRLLPAPSAEWSGTVRIVCKESELEAELIYYRSNAFLGLGGDPRCVKGKIFSSRSGEIICEIDGHWDRIVSAKDAKTGKVSVLYDAESAIADLKTPVVRNQEGVSPSESVVVWGEVSDAILKKDWERSSQAKRRVEDTARRLDRERNDKGEVWIPKHFSLSQDKNGSWECSPLEKSVPPAPIIVPS

SEQ ID NO: 37245 - protein, 218 aa, Oryza sativa
MSNGGMQSHPVSNGQFGGMPSLPTPSNQMGGMQPLHPQMNQMGGPQAHQMYNNQQPGAMQPSQPAVTQMQSGFANQFGSMPPHSMPGMQFPGMQPSPMPGAQPVMMYAQPMMMPGMQFAAMPQPRMYGPQMSQYRLVQQQAAQYYSNSQGRPTYYAGMNDLSQKMYGLSMQDSSYMGMNSSPYSTTPSSSSSMGQPSKPEDKLFGDLLSIAKTKQNKA

SEQ ID NO: 37246 - protein, 98 aa, Oryza sativa; identical to SEQ ID NO: 29960

SEQ ID NO: 37247 - protein, 294 aa, Oryza sativa
MDRSSSSSSNSNPHLGVNKLGRNIRKATPPPPQPQPPSRPPQPQPQVYNISKNQFRDIVQQLTAGTPSPPPPPQPQHQHHPHRPLPPQHQQPKPPSMRLQKIRPPPISTPVARPPPVHNHQIPNPNHNPAFHRPPPPQPMPMPMPGPPVWADSPVTAYMRILENSLFSATPPGAAAAAAAAAAAATGQQAPPHHPHPPPPPPVPSPGILPSPSGFLNLLSPTPRSPYPLLSPGFQHPGPLTPNFPALSPLPGTGILGPGPMAPPSPGLWFPQSPSGLLSPSGFLPILSPRWREM

SEQ ID NO: 37248 - protein, 209 aa, Oryza sativa
MASALSSLRYGDSLSVVAISGATAVLCEAISWLLIYRTATYNSLRATIECHSRKLDAMKAGASNSSSSSSAGAGASGSSQPAGSSSSRAKKMDRVETSLKDAARELSLSKLKSGAVVAAVLFVVFGLLNSLFEGRAVAKLPFAPVPLVQRMSHRGVPGNDPTDCSMVFLYFLCSISIRTNLQKLLGFAPPRAAAAAGGGLFPMPDPKVN

SEQ ID NO: 37249 - protein, 283 aa, Oryza sativa; identical to SEQ ID NO: 31698

SEQ ID NO: 37250 - protein, 501 aa, Oryza sativa; identical to SEQ ID NO: 31654

SEQ ID NO: 37251 - protein, 328 aa, Oryza sativa; identical to SEQ ID NO: 32519

SEQ ID NO: 37252 - protein, 489 aa, Oryza sativa; identical to SEQ ID NO: 31638

SEQ ID NO: 37253 - protein, 327 aa, Oryza sativa; identical to SEQ ID NO: 37038

SEQ ID NO: 37254 - protein, 449 aa, Oryza sativa; identical to SEQ ID NO: 32786

SEQ ID NO: 37255 - protein, 253 aa, Oryza sativa
MAIARTGVYVDDYLEYSSTLAGDLQRILSTMRELDERAHGIMGQTKEQIKYLLGVPSHGFDRSNMDDDESASERMKKDIEASQDNALSLCTEKVLLARQAYDLIESHIKRLDEDLGQFAEDLKQEGKIPPDEPSILPAISAFSRDDKRRPGFSTPQATKKFREREWDRERGMDFDLMPPPGSNKKTTAPMDVDQTIDPNEPTYCICHQISYGDMIACDNDNCEGGEWFHYTCVGLTPETRFKGKWFCPTCRNL

SEQ ID NO: 37256 - protein, 301 aa, Oryza sativa; identical to SEQ ID NO: 32788

SEQ ID NO: 37257 - protein, 287 aa, Oryza sativa; identical to SEQ ID NO: 30679

SEQ ID NO: 37258 - protein, 255 aa, Oryza sativa; identical to SEQ ID NO: 30542

SEQ ID NO: 37259 - protein, 494 aa, Oryza sativa; identical to SEQ ID NO: 32783

SEQ ID NO: 37260 - protein, 352 aa, Oryza sativa
MEGYDREFYQFSDQLRLQTASFSGLSLGDSIWSSPSDRRNEPAFDGEYHHFSSPSPAKNAIANINGVAGNLDGPGLIGSGKLAFGATKADRYNSVNLPVDNNNNNKSYGGAAKINNNNVNAFGFNKMGGYNNSSNGGGNYGGNGGDVKSYFNKSVGRPASNNNNNNSNGGGGYYGKKGGDGAGGKKKHAKNSDSGAQASDKRFKTLPASEALPRDEAIGGYIFVCNNDTMEENLKRQLFGLPSRYRDSVRAIRPGLPLFLYNYSTHQLHGIFEAASFGGTNIDPTAWEDKKCPGESRFPAQVKVATRKIYDPLEEDAFRPILHHYDGPKFRLELSVAEALSLLDIFADKDDA

SEQ ID NO: 37261 - protein, 433 aa, Oryza sativa; identical to SEQ ID NO: 32780

SEQ ID NO: 37262 - protein, 210 aa, Oryza sativa
MGILVILVDLQCCRCDAKIRKVLGCLEEEYCIEKVEYDVKNNRVIVRGKFDPEKLCKKIWCKAGKIIKEILIVDVWPPPLPQPPPPCKPPPCEKPPEDCKPKPCHCCSCEKPKPKPKPCHCEKPKPCHCEKPKPCEKPPPCKPEEPPKPPPEKPPPKPECKLVPYPYPVPYPYAGQWCCPKPEPPKPPPPVCPPPPWCYTEDNANACSIM

SEQ ID NO: 37263 - protein, 544 aa, Oryza sativa; identical to SEQ ID NO: 32938

SEQ ID NO: 37264 - protein, 231 aa, Oryza sativa
MAAALRSSCAAARRLLRISPAALSTLTAASSRPAAVAPLARPIAAAAVSGGNNAFSWNLRRLFSSNEKHLPAISDPEVESAFKDLMAASWTGLPDSLVIEAKKAASKATDDKAGKEALLNVFRAAEACEEFGGVLVTLRMALDDLCGITGENVGPLPGYIEDAVKSAYKRYMKYLESFGPEENYLRKKVENELGTKMIHLKMRCSGVGSEWGKITLIGTSGISGSYVELRA

SEQ ID NO: 37265 - protein, 372 aa, Oryza sativa
MVVHVVYRRRESSWRGGETSARLHQGAAAMSNPAGGKHLVRLAGSSSLRGGAALSPAVSISSGSRPATRAGARALRAASPPPACSIASVGCWESRALRLDGDEDWEVVVAQGDDAVGADSGAFDAVQEAADEHAEAFGAPPTDQEVRAAVASIQEVFENHPGLDSDAPAQALALSPISGLPPSGMFVNYFSEGSTPSDIKIEDSTPSDVKIDQLASLEHSTPDTASEECIEPAMLVLNSTALLTREHRNVLDAFHLLQVDSSVQKMVMALSTDKSVWDAVMKNEVVQEFRKSFQDAKEADPNGSSSASPGVMKWVMETTQAKIKEFLESILKLVNMLFQAQSEDYDLYDDTVRMSFMLAVFVFIVVTVARIK

SEQ ID NO: 37266 - protein, 431 aa, Oryza sativa
MSPSPDLARILPRVLIVSRRTVRKNKFVDFVGEYHLDLIVGYGAVPVIVPRVAGVHTLLDSFEPIHGVLLCEGEDVDPSLYGGGGAGSGGLSAEQLDAVRSLHPSDAAIDHEKDSIELRLARRCLERNIPFLGICRGSQVLNVARGGTLYQDVDHELPAAAAAVRHINYDNYDGHRHPVRVLPGTPLHEWFAESLDGEDSRLTVNSYHHQGVRRLAERFVPMAFAPDGLVEGFYDPDAYNPGEGKFIMGLQFHPERMRKAGSDEFDYPGCPMAYQAFVRAVVAYQEKLAAAAAAMPASPKLNQEMEKQRKVLVRSFSLAKNLYVSGAEAGTPRPAEQRDLDAGAEFLEQSNTAALSVQQEKRLKQMGATVRNASGYINRLKLNEEREAAARALMAKMSIDQLSDLASFYHIMGTICSEVLDRKLHSAAPAP

SEQ ID NO: 37267 - protein, 276 aa, Oryza sativa
MAFRLSNSLLGILNAVTFLLSVPVLGGGIWLATRADGTECERYFSAPVIAFGVFLLLVSLAGLVGACCRVNCLLWFYLVAMFVLIVVLFCFTVFAFVVTNKGAGEAVSGRGYKEYRLGDYSNWLQKRMENSKNWNRIRSCLQDSKVCKKLQDKNWDRTQFFKADLSPLESGCCKPPSSCNFLYVSGTNWTKVPTNSSDPDCNTWVDDGTQLCYNCQSCKAGAVATLKRDWKRVAVVCIVFLVFIVIVYSLGCCAFRNNRRDNRGAYRGAAWKGGYA

SEQ ID NO: 37268 - protein, 270 aa, Oryza sativa
MAAAVASSCCASTSARPLVRRAGSRNGKLWWAGGVRKARLLSISATAAAPSGVDYAAGTGAAADDDAVAALKVKLLSAVSGLNRGLAASQEDLDRADAAARELEAAAGGGPVDLERDVDKLQGRWRLVYSSAFSSRTLGGSRPGPPTGRLLPITLGQVFQRIDVVSKDFDNIVDVELGAPWPLPPVELTATLAHKFEIIGTSSIKITFDKTTVKTKGNLSQLPPLEVPRIPDNLRPPSNTGSGEFEVTYLDGDTRITRGDRGELRVFVIS

SEQ ID NO: 37269 - protein, 332 aa, Oryza sativa
MFSPSKLLAATVGLALLALSSTTSEVSAQCALPNTYRWTPSPNAALAQPKNGWISLKDFTHVPYNGKHLVYASTVVGSGYKSMNFGLFSNWNEMGSVSQNLMPFNAVAPTLFLFRPKNIWVLAYQWGASSFSYRTSSDPTNVNSWSGEQPLFSGKITGADYGPIDQTVIGDSKNMYLFFAGDNGKIYRASMPIGNFPGNFGTASTIIMSDTRDNLFEAVQVYTLKGQNKYLMIVEAMANGGVRYFRSFTATDLGGSWTPQATSLNAPFASKGNSGVTWSDDVSHGDLIRSDPDEKMTVDPCNLQLLFQGLQPRWNGDYDKKPYRPGLLTLQK

SEQ ID NO: 37270 - protein, 463 aa, Oryza sativa; identical to SEQ ID NO: 32812

SEQ ID NO: 37271 - protein, 446 aa, Oryza sativa
MIRSSKRRRLTPIPSDAGKMSPDWASLDQDLVGLIGGRVLAGDDMRDYVRFRAVCSHWSASTVRPLGRGVTDRRFHPRRWMMLPEGHGLYPGHPDLRGYVRFFNLSTAALVRVHLPLLRDHVIIDSVDGLLLLHRDHDTAIRLLHPFTGDVADLPPLASLLPQMESESRDRSQRSKHSRLMKVCASVTVTSTGTITVMLALEILHRVAYATPGDQRWTLSAWTLKPFVKPVSFQGKLYALQLSSYDIHKVYIYQFNPPCQDNDKGLLHLPLPVKIAECPMDKFLYLLNFAECGSELLLVAYNGVSRSKLLVYRLADLVSGRIEPVTTIGDHALFLDERCLCVSLSNNKEGSKILPSDLSNSIICMHSLQVDPSSLDIFRFEQYDLGTGTWAPASDGDIFHKPPPSPHTLIHHIFTCCNRRYWNKGIMYCSKRQPIWLVKQELRFGA

SEQ ID NO: 37272 - protein, 329 aa, Oryza sativa; identical to SEQ ID NO: 37031

SEQ ID NO: 37273 - protein, 326 aa, Oryza sativa
MSLKSIVRELREMRDGIGSMSRRAADGRAGGGRGGSRHSWPVLWSEQQQPPQQQQLQRQEHQQQQGRWANLPPELLLDVIQRVEASEATWPARRQVVACAAVCRSWREVTKEVVKTLEECGRITFPISLKQPGPREHPVQCFVRRDRATSTYLLYLGLSPSLHGENDKFLLAARKIRRATRTSFVISLVSNDFSLSSSTYVGKLKPNFLGTKFTIFDSQPPCDAVVLPNNRPSKRHFKQVSPRLPLGNYNVATVSYELTVLRNRGPRRMQCTMHSIPALCIQEGGKAPTPTGIIHSLDEQVPALSTSKGKEPAIEFLLLYYCSWNV

SEQ ID NO: 37274 - protein, 225 aa, Oryza sativa
MLHAASLVHDDLPCFDAAPTRRGRPSTHAAYGTDMAVLAGDALFPLAYTHVIAHTPSPDPVPHAVLLRVLGELARAVGSTGMAAGQFLDLAGATALGEAEVMKVLTKKFGEMAECSAACGAMLGGAGPDEEAALRRYGRTIGVLYQLVDDIRSASGNGKMRSNASVLRALGMDRALGIVEELKAQAKMEADRFGDKYGERVLPLYSFVDYAVERGFELQDAATTP

SEQ ID NO: 37275 - protein, 318 aa, Oryza sativa
MAVEEASSSSGGGRGGGGGGGGEEGLSGCGGGWTREQEKAFENALATVGDDEEEGDGLWEKLAEAVEGKTADEVRRHYELLVEDVDGIEAGRVPLLVYAGDGGVEEGSAGGGKKGGGGGGGGGGGGHGEKGSAKSSEQERRKGIAWTEDEHRLFLLGLEKYGKGDWRSISRNFVISRTPTQVASHAQKYFIRLNSMNRERRRSSIHDITSVNNGDTSAAQGPITGQPNGPSANPGKSSKQSLQPANAPPGVDAYGTTIGQPVGGPLVSAVGTPVTLPVPAAPHIAYGMHAPVPGAVVPGAPVNMPPMPYPMPPPTSHG

SEQ ID NO: 37276 - protein, 278 aa, Oryza sativa
MEEKRQRLVISLSALCLAVAVMSGALLPPRASAAGGVGRKRRWAGFDYYVLALQWPGTVCRQTSHCCSSNGCCRSHPLKFFTIHGLWPQYSYGGWPSCCRPTTFDGNKISRLKTILEEYWPSLYCGSFSTCFGGKRPFWVHEWETHGTCGYPEIQDEYDYFSTALYLYSKYNVTKALKKAHIYPRGGRKYLVGHIVSAIEFSFGAMPSIVCKNGSVQELRLCFHKDYQPRDCLVEGENSVRRNHCPRYVTLPSYKPHAFGNSTEGISNQVNVEHQSYQ

SEQ ID NO: 37277 - protein, 364 aa, Oryza sativa
MAAAVGRGGGRRLWVKERDSEWWDMVSSPDYPDSEFRKAFRMSKATFEVVCDELAAAVAKEDTMLRAAIPVRKRVAVCVWRLATGEPLRLVSKRFGLGISTCHKLVLEVCAALKAMVMPKVVRWPEAGDAAAIAAHFEAISGISGVVGAIYTTHIPIIAPKSNVASYYNRRHTERNQKTSYSMTVQCVVDSTGAFTDVCIGWPGSNSDEEVLEKSALYLHRGVPGLIQGQWVVGGGSFPLMDWMLVPYTHQNLTWAQHMLNEKVAAVRGVARDAFERLKRRWGCLQKRTEVKLLDLPTVLGACCVLHNICERSGDAVVDADDCAFDLFDDDMVAENAVRSSAAAQARDAIAHNLLHSGGGASFF

SEQ ID NO: 37278 - protein, 266 aa, Oryza sativa
MLRAEKSENPMRIVYCFGISHEHPGTFILSYIRSTNPHHEYIGLYPKGFRFRKRDFDNIDRLVSYFQKHIDKPPPDAGPSMRNVAAMVPMKSSGWGNGGGTGGGNDGWRGDGNNDRDRPFSGRSGGRFDSRNSSGGRGRGRGRGRGNFGSDDGGGGGWSGGGGGGGNSGGWTDNIGSGGGGWGTGGGSSWAGGGDGGSGGGDSNRGGGGGWGTPAGGSDGGGGGWGAAPGGSNDAPGWGSGKKAVPAQDGGSGWGASAGGGSGGWN

SEQ ID NO: 37279 - protein, 162 aa, Oryza sativa
MEAAVPSRVALSASRLSNHHHHAVGGERYAIYRGRCPNPAIPMALAAAAAPGKGGGVLDRPIEKVTPGRQSEFDVRKSRKMTPPYRVLLHNDNYNRREYVVQVLMKVIPGMTVDNAVNIMQEAHVNGLSVVIICSQSEAEEHCTSLRGNGLRSSIEPASGGC

SEQ ID NO: 37280 - protein, 288 aa, Oryza sativa
MASAMASSQSHLDLVQLLIVVVMTMTMLVGGGEALSLDYYAKSCPKAEAAVAAAVKQAMAKDRTVPAGLLRLHFHDCFVRGCDGSVLLDSSGNMSAEKDGPPNASLHAFYVIDNAKAAVEALCPGVVSCADILALAARDAVAMSGGPSWQVPVGRRDGRVSLASETTTALPGPTASFDQLKQAFHGRGMSTKDLVVLSGGHTLGFAHCSSLDPTSSAFDNFYYRMLLSGRGLLSSDEALLTHPKTRAQVTLYAASQPAFFRDFVDSMLRMSSLNNVAGEVRANCRRVN

SEQ ID NO: 37281 - protein, 198 aa, Oryza sativa
MGWRWHDDGDDGGRGLGDIPDLAGGGGGGDGERCATRRVVQSRCHTEEVEPGRFVRKCEKTEQLLRDCVGRPSELVESKTENTEEDVTDEMKSGSLSLGFPTNEPFAFPGLRSDIEALEKGLFGSIGSFLDDAERMTNDFLKSFGVPSINERESSSFDGQPTGRHIGGQPAGRHIEEGTAKDTKQNDYAEFSSKITDV

SEQ ID NO: 37282 - protein, 236 aa, Oryza sativa
MAVAAVRAAAADAAVTFLWVLCVSTLGASTAAVTSYLRIHEGIHYALLVTVSLLSVLLFAFNLLCDALAAFHAAGLSSPRHSSLFPLALRFPAQAAGAVGGAMAISELMPEQYKHMLGGPSLKVDLHTGAAAELVLTFVITLAVLWIIVKGPRNPIVKTWMLSISTVCLVLTGAAYTGPSMNPANAFGWAYVNNRHNTWEQFYVYWICPFVGAVLAAWVFRAVFPPPAPKPKAKKA

SEQ ID NO: 37283 - protein, 414 aa, Oryza sativa; identical to SEQ ID NO: 32815

SEQ ID NO: 37284 - protein, 220 aa, Oryza sativa
MASSAPTPPPLLPVTNPAAAGSSPAATAVGSDAPIATPAFRLFLSKLSDSARRSLSDRRPWTELVDRSAFSRPDSLSDATSRFRRNLAYFRVNYAAVVAFALGASLLAHPFSLLVLLGLLAAWCFLYLFRGSDQPVVLFGRTFSDRETLLGLVVASFVAFFFTSVASLIISGLLVGGAIVAVHGACRMPEDLFLDDADAASGNSAAQGLLSFLGAPGSRV

SEQ ID NO: 37285 - protein, 296 aa, Oryza sativa
MSRRWSRTIYVGNLPGDIREREVEDLFYKYGRIVDIDLKIPPRPPGFAFVEFEDPRDAEDAIRGRDGYNFDGNRLRVELAHGGRGNSSSFNNSGGGGRRGGVSRHTEYRVLVTGLPSSASWQDLKDHMRNAGDVCYSEVYREGGGTIGIVDYTNYDDMKYAIRKLDDSEFKNAFSKAYIRVKEYDGKRSRSYSRSRSRSRGRSYSRSRSPSKSPKGKSSRRSASRSRSRSASSRSRSESKGRSPSRSPARSQSPNTSPANGDAASPKKRSPSRSPPKKRSPSRSPSRSRSPDAKSE

SEQ ID NO: 37286 - protein, 273 aa, Oryza sativa; identical to SEQ ID NO: 32167

SEQ ID NO: 37287 - protein, 302 aa, Oryza sativa
MAPRLCCSSQFLLAVSFLAAFAAVSNAGKVAVYWGQGAGNGDGTLAETCATGLYDFVNIAFLNVYGSGLTPVLNLAAHCNPDAGTCKSLSSEISSCQQSGVKVLLSLGGERGQYSLSSADDARGVADYLWNTFLGGSSDSRPLGDAVLDGIDFDIEKDGDHYDELAMALSSKCNGACVLTAAPQCPYPDAHLDAAIKTGVFSHVWVQFYNNRQCQYASGDASALQAAWAQWTSGVPAPADVFLGLPTAPAAAPSGGYIDADTLLSQVLPAVEGAAANYGGVMLWNRWRDVTAGYGAKLKGKV

SEQ ID NO: 37288 - protein, 368 aa, Oryza sativa; identical to SEQ ID NO: 30253

SEQ ID NO: 37289 - protein, 44 aa, Oryza sativa
MDSWVFFLFVRRDSDKAGVHGELRWRRRGAAVCQVREAEAAGVF

SEQ ID NO: 37290 - protein, 281 aa, Oryza sativa; identical to SEQ ID NO: 29271

SEQ ID NO: 37291 - protein, 206 aa, Oryza sativa; identical to SEQ ID NO: 28623

SEQ ID NO: 37292 - protein, 211 aa, Oryza sativa
MGWAARFLTAVSFLAAGVLFAPDALLGGSGRSGAGVAAARLAHVLCFATAWGAALWVTFIGGIVMFKYLPRHQFGSLQGKMFPAYFMLISVCSAISVAAFAYLHPWKTASTIERYQLGFLISALGFDLSNLLVFTPMTTEMMMRRHKIEKDLGIGSEVGFSKNAEVARTNPTLAAMNKKFGMIHGLSSLANIMAFGSLAMHSWYLASKLQI

SEQ ID NO: 37293 - protein, 69 aa, Oryza sativa
MQMASKSSSTAQNCVLLPSSATATVVDNTKVSAVPAPASALPVAQANAPKPVRPNAAGNYSNLGCYCLL

SEQ ID NO: 37294 - protein, 246 aa, Oryza sativa
MAVAAVRAAAADAAVTFLWVLCVSTLGASTAAVTSYLRIHEGIHYALLVTVSLLSVLLFAFNLLCDALGGASFNPTALAAFHAAGLSSPRHSSLFPLALRFPAQAAGAVGGAMAISELMPEQYKHMLGGPSLKVDLHTGAAAELVLTFVITLAVLWIIVKGPRNPIVKTWMLSISTVCLVLTGAAYTGPSMNPANAFGWAYVNNRHNTWEQFYVYWICPFVGAVLAAWVFRAVFPPPAPKPKAKKA

SEQ ID NO: 37295 - protein, 327 aa, Oryza sativa; identical to SEQ ID NO: 37038

SEQ ID NO: 37296 - protein, 287 aa, Oryza sativa; identical to SEQ ID NO: 30679

SEQ ID NO: 37297 - protein, 252 aa, Oryza sativa; identical to SEQ ID NO: 30561

SEQ ID NO: 37298 - protein, 340 aa, Oryza sativa
MHVGLTLVLLVYLPIAFACRALGRLLVRPFVSGEDLRGKVVLVTGASSGIGEHLVYEYAKKGACVALTARTEIALRAVAKTARDLGAPDVLVVPADITKVDDAKRAVEETVAHFGKLNHLVANAGIWSSCFFEEITNITAFHNVIDLNFWGAVYPTYFALPYLKASRGNIVVTSSVAGRVPTARMSFYNASKGAVIRFYETLRAELGSHVRVTILTPGYVVSNLTMGKGIQKDGHVGIDEEARDINVGPLPVGKTETLAKVVVAAVRRGDYYVTWPGWYWPFHMVMCTAPELVDWFSRTFYVSKSSDHDGDALSKKILEAVGGKKFLYPKTIRSHAIAAS

SEQ ID NO: 37299 - protein, 316 aa, Oryza sativa; identical to SEQ ID NO: 30651

SEQ ID NO: 37300 - protein, 287 aa, Oryza sativa; identical to SEQ ID NO: 30679

SEQ ID NO: 37301 - protein, 257 aa, Oryza sativa
MSPPLELDYIGLSPPVPAAADAAADNDLKGTELRLGLPGSHSPDRSPPAATLDLLPAAKGAKRGFSDEARPLPASAAAAAAAGKGKKAAAGEEDEDAEEEDKKVAAAPQAPAAKAQVVGWPPIRSYRKNTMATNQLKSSKEDAEAKQGQGFLYVKVSMDGAPYLRKVDLKTYKNYKDLSTALEKMFIGFTTGKDGLSESRKDGEYVLTYEDKDGDWMLVGDVPWEMFANSCRRLRIMKGSDAIGLAPRAVDKSKNRN

SEQ ID NO: 37302 - protein, 183 aa, Oryza sativa
MASIILVVVVFVLDALAFVLAIGAEKRRSTATFSEDTSGRQYCVYSSDAATGYGIGALLLLLAGQAVVMVVTRCFCCGRALSPGRWRAFSGFCFIVCWFTFVIAELCLLAGSVRNAYHTKYSTLVISGPPRCAMLRKGVFAAGAAFTFLTALFAELHYLFFAKARHAAAVPPPIVGGIGMTRM

SEQ ID NO: 37303 - protein, 443 aa, Oryza sativa
MAALHGHGFAVTVLLVVLLVQCDAAEATTCAGAVPARPRPETVSIAEFGGVGDGRTVNTWAFHKAVYRIQHQRRRGGTTLLVPAGTWLTGSFNLTSHMTLFLARGAVLKATRETRSWPLAEPLPSYGRGRELPGARYTSFIHGDGLRDIVITGDKGIIDGQGDVWWNMWRQRTLQHTRPNLLEFMHSSGIHISNIVLKNSPFWNIHPVYCDNVVITNMMIIAPHDSPNTDGVDPDSSTNVCIEDSYISTGDDLVAIKSGWDEYGIAYGRPSSGITIRRVRGSSPFSGIAIGSEASGGVSNVLVEDCSIFNSGYGIHIKTNIGRGGFIRNITVDNVRMNSVRNGLRIAGDVGDHPDEHFSQLALPTVDAVSIKNVWGVNVQQPGSIEGIRNSPFTRICLANVKLFGWRNNAAWKCRDVHGAALGVQPGPCAELTTSLSSGFCSY

SEQ ID NO: 37304 - protein, 227 aa, Oryza sativa
MAARRSPAAAHHRLFLLLLLFSALLAPLASAYRPGDIVPMLRSGQYHGSRSVWFDVVGRHCPSFAVNHEVMMPIPKPTGFTGADPYKITFQIGHEKFHLPWLYVINRKSSEVPMIDFHLKYSGNDLLGVTAKVVDMPHIYVEHHPDIRKNFWDQQNWPKYVLVRYTWEEQSEIDVPGGFYVLFGSGLVLSFILAIYVLQSSQEKLTRFVREAVNDSSLPEGGFAKVE

SEQ ID NO: 37305 - protein, 315 aa, Oryza sativa
MIRAYSQSAATLNLLRAFATGGYAAMQRVTQWNLDFTEHSEQGDRYMELAHRVDEALGFMAAAGLTMDHPIMTTTEFWTSHECLLLPYEQALTREDSTSGLYYDCSAHFLWVGERTRQLDCAHVEFLRGIANPLGIKVSDKMDPKELVKLIDILNPQNKPGRITIITRMGPENMRVKLPHLIRAVRGAGQIVTWVTDPMHGNTMKAPCGLKTRSFDRILAEVRAFFDVHEQEGSHPGGVHLEMTGQNVTECIGGSRTVTFDDLGSRYHTHCDPRLNASQSLELAFIIAERLRKRRIASWQLNKNSHLGNIPSLGL

SEQ ID NO: 37306 - protein, 281 aa, Oryza sativa
MHHDPNPFDEGADDNPFSNGGGGGARRGGGGGGGGGGGGGKSQFSFGFGGLGGGSKGGATVDIPLDNMSDSKGKGKELLQWEADLKRREADIRRREEALKSAGVPMEEKNWPPFFPIIHHDIANEIPANAQKLQYLAFASWLGIVLCLFWNFIAVIVCWIRGGDSKLFFLATIYGMLGMPLSYLMWYRPLYRAMRTDSAFSFGWFFLCYMLHIAFCVFAAIAPPVIFRGKSLTGILAAIDTFSDHAIVGIFYFVGFALFCLETLVSIWVLQKVYMYFRGHK

SEQ ID NO: 37307 - protein, 287 aa, Oryza sativa; identical to SEQ ID NO: 30679

SEQ ID NO: 37308 - protein, 347 aa, Oryza sativa
MYNNLSTSDYATPSAVQPDSSAHIYLQEHRQLQNISPLSSFMQGNIPNGLLPPALPPLRDFDPAFSLLLTNPPLATMVHGTTSSSMGNATTVSTQPQEIVNPGASSNPQLNQSQPSTSTSIASGPPLPQHLTLHPYAQATLPLGYASMIGYPSLAPSYTYLPPPAFQQPYMNSGLFHQAAAAVPNSSVKYPLPQYKGNVSLASLPQQASLLSSYVGGFGAASSMPGNFALNQSTPSATAAPGFDGTVPAQYKEGNQFVSLQQSENAAMWMHGASSRTMPPLAANALYYQGQQGHQGGLRQGQLPSQFGAPLAPTQPGLGHEHRNPSDGNLSSAAAAAQANQMWPNSY

SEQ ID NO: 37309 - protein, 344 aa, Oryza sativa; identical to SEQ ID NO: 30654

SEQ ID NO: 37310 - protein, 45 aa, Oryza sativa
MDNVVLTAHEAVFTTESNWDLADLMIANLEAFFSGGPLLTPVLPK

SEQ ID NO: 37311 - protein, 455 aa, Oryza sativa
MAIGGAAPPHPPRGGGGGSPEDSSTARRPDFEQPLLQAHAAVPARGKQEPVERDHEAQCSPEADGDGATFVRTCFNGLNALSGVGLLSIPYALSEGGWLSLVLLLAVAMVCCYTGLLLRRCMAASPAVRGYPDIGALAFGAKGRLAVSAFLYAELYLVAIGFLILEGDNLDKLFPGTSLAVGGLVVSGKQLFVVVVAVVILPTTWLRSLAVLAYVSASGVLASVVVVFCVLWAAVFDGVGFHGKGRMLNVSGLPTALGLYTFCYCGHAIFPTLCNSMQEKDKFSRVLVICFVACTVNYGSMAILGYLMYGDDVKSQVTLNLPEGKISSKLAIYTTLINPFSKYALMVTPVATAIEEKLLAGNKRSVNVLIRTLIVVSTVVIALTVPFFGHLMALVGSLLSVMASMLLPCICYLKIFGLTRCGRGETLLIAAIIVLGSLVAATGTYSSLKKIFYEF

SEQ ID NO: 37312 - protein, 402 aa, Oryza sativa
MISATATAAFLAAAPASSSSCTTHRRRSGLPAISASLATASSTEEPLLVRAARGEDGLPRPPAWMMRQAGRYMAEYQALAKRHPSFRERSETTELIVEITLQPWRAFAPDGVILFSDILTPLPAIGVPFDISDSKGPVIQSPVRSEEQVRELTPIDFEKLRFVGESLKILRTEIDGQAALLGFVGAPWTIATYVVEGGMTNTYTNIKSMCHTAPNVLRGLLSHLADAISEYIIYQVNSGAQCIQIFDSWGGQLPPHVWEQWSKPYIKQIVNKIKIECPNVPLVLYINGNGGLLERMTDTGVDVIGLDWTVDMADGRRRLGNKISVQGNVDPAFLFSPLPVLTDEIHRVVKSAGPKGHILNLGHGVLVKTPEEAVAHFFDVTRSLRYDTLFQGCVTEVLEPVA

SEQ ID NO: 37313 - protein, 438 aa, Oryza sativa
MACHLRLFPFTQLLVLVLYKIAAVGADPANAELSTKITQHSPLYNLQPQDFPNEELYRNYLVIQRFKKTITSDPKNITATWTGHDICGNTTYLGFYCAALPGRTKKPTVTVVIFNGYGLRAPKLEGFIDHLPDLALFHAASNDFGGDIPYLTGLAYNYKINVDSNLQIQDDFSRDMVGSHVTTKVHGYCVNLDLDITFHLRPGKDDKKGRSIPGATDSKALLLNYNHLSGPLPVNIGFSKLSYLALANNRLTGAIPPSILHLQDSLLEVLLLNNQLSGCLPHELGMLTKAAVFDAGMNQLTGPIPSSFSCLTSVEQLNLGGNRLYGEIPDALCKLAAVPAGRLANLTLSSNYFTSVGPACLSLIKDGVLNVRNNCIPGFANQRRPAECASFHSQPKACPAASATHVACPAGAANAAAAPADRVVKDYSSYVTYATLHE

SEQ ID NO: 37314 - protein, 287 aa, Oryza sativa; identical to SEQ ID NO: 30679

SEQ ID NO: 37315 - protein, 172 aa, Oryza sativa
MAAAAARLLLLAVVAAVFLLSPAAAGRPCGHAQTLLISFSSVSRPNPDPNNPTPLTTTVVTVLRVRRLGPHHPLQIPRPDPLPAASDAASSVQERAKDILVVVSGLLFGFGCGALTAATMYLVWSLLASTCAPSYDEVYGEDDDDELSDSESPKKAGYVIIHDAEQYVGGKN

SEQ ID NO: 37316 - protein, 92 aa, Oryza sativa; identical to SEQ ID NO: 29861

SEQ ID NO: 37317 - protein, 281 aa, Oryza sativa
MATPQLLLRRAFSSSFLSSPFRRPPLHPARSFVPPRAAMASSAAPFHMVQIQRDDTTFDAYVVGKENAPGIVVLQEWWGVDYEIKNHAVHISQIGEGYRALIPDLYRGKVALDVAEAQHLMEGLDWPGAVKDIQASVKWLKANGSPKVGVTGYCMGGALSIASGVSVPEVDAVVAFYGTPPSELADASKAQAPIQAHFGELDSFVGFADVTAAKSLEEKLKSSGVPHEVHIYPGCSHAFMNTSPEAVKRRKEMGLTDENQAAIDLAWSRFSTWMGRFLGSA

SEQ ID NO: 37318 - protein, 275 aa, Oryza sativa
MVVLVVATASDPASIGPAAAFLAMPGWSPGPPIPEGMESFTNGDVRLLKHERSIIAEDDLDNRWKAATGEAVSEVIFLSKHTAVSNRPALTVHPIGVPHLREDETPPQGGRPGWAALPNPRIGPWLRLMQKIAVDQGLVPEFEITLEATHHGPVTNTPTMFVEIGSTEEYWCRHYAAQAIALVLWKGLGLDEGNTVGSWQGNSEKVLLGIGGGHYAPRHMDIVIKDGIWVGHLLSGYSLPMEVSPQGNGKSYSDVGGMWKHSIKRASRAGKRMLS

SEQ ID NO: 37319 - protein, 235 aa, Oryza sativa; identical to SEQ ID NO: 30252

SEQ ID NO: 37320 - protein, 89 aa, Oryza sativa
MANELMSLRMLDKHFGDDEAVMSADELVKLYRGLFAWFDRDGSGAVELEEFRAEMKEVLLAVASGLGFLLVQMVVEDGRSVAKHLGGRL

SEQ ID NO: 37321 - protein, 243 aa, Oryza sativa; identical to SEQ ID NO: 30383

SEQ ID NO: 37322 - protein, 350 aa, Oryza sativa
MAAVNTVSSLPCSKAGAAVAGGAPRPSTCSVFYPPRCWSKRSSGNGVRAQASTTETTAAPAAEVTTKVEKVSKKQVDGVVTNKYRPKEPYTGRCLLNTRITGDDAPGETWHMVFSTDGEIPYREGQSIGVIPDGIDKNGKPHKLRLYSIASSAIGDFADSKTVSLCVKRLVYTNDQGEIVKGVCSNFLCDLKPGSDVKITGPVGKEMLMPKDPNATIIMLGTGTGIAPFRSFLWKMFFEEHDDYKFNGLAWLFLGVPTSSTLLYREEFERMKETNAAGEKMYIQTRMAEYKDELWELLKKDNTYVYMCGLKGMEKGIDDIMIDLAAKDGIDWLDYKKQLKKSEQWNVEVY

SEQ ID NO: 37323 - protein, 263 aa, Oryza sativa; identical to SEQ ID NO: 37027

SEQ ID NO: 37324 - protein, 180 aa, Oryza sativa; identical to SEQ ID NO: 29288

SEQ ID NO: 37325 - protein, 158 aa, Oryza sativa; identical to SEQ ID NO: 32884

SEQ ID NO: 37326 - protein, 424 aa, Oryza sativa; identical to SEQ ID NO: 32887

SEQ ID NO: 37327 - protein, 206 aa, Oryza sativa
MADEYGRGGYGRSGAGAGDDYESGGYNRSSSGGADEYGRRPGGGAGGYNKPGGTDDYDSGYNKSAGGDDDDYGRTGGGGYNKSGTDDDYDSGYNNRSGANEKYGRNKSGDDEYSGGGGAEADEEYVDGLSSRDDPEKYRKEEKEHKNKERLGEVGALAAGAFAMYERHQAKKEAKQAAKDAEEEAEEESGSGARGGEGKKKHHLFG

SEQ ID NO: 37328 - protein, 410 aa, Oryza sativa
MYIIEDKGGAIALMLASLFFLGTWPAVLTLLERRGRLPQHTYLDYSITNLLAAVLIALTFGQLGDSKPNMPNFFTQLSQDNWPSVLFAMAGGVVLSIGNLSTQYAWAYVGLSVTEVISSSMVVVIGTTLNYFLDNRINRAEILFPGVACFLVAVILGSAVHASNAADNEEKLNGSTNIYKLGENGSVEPNKEVIEKDAPKDLENGASATKYVAKAEAGTAEYLIELEERRSIKVFGSSTFIGLGIVFFSGVCFSLFSPAFNLATNDQWHTLKQGVPHLVVYTAFFYFSISCFVIGIGLNILFLYRPMAGVPKSSFKAYLNDWEGRQWALLAGFLCGFGNGFQFMGGQAAGYAAADAVQALPLVSTFWGILLFGEYRKSSRKTYILLGFMLFMFIVAVAVLMASSGHRSTK

SEQ ID NO: 37329 - protein, 311 aa, Oryza sativa; identical to SEQ ID NO: 37225

SEQ ID NO: 37330 - protein, 238 aa, Oryza sativa; identical to SEQ ID NO: 30553

SEQ ID NO: 37331 - protein, 105 aa, Oryza sativa
MSVLGQRRPSAAPLAPWSSSPHGSLRLSAPLARIRRRRLDSTVSPPFSRADPTGGVDPVASPTVTTTMGGRYLHRSICQRRTSLIRRQPQPLPPSILREGFIFAK

SEQ ID NO: 37332 - protein, 30 aa, Oryza sativa
MERGKEEEGLQRRLLPARRSAASFCCAEGR

SEQ ID NO: 37333 - protein, 189 aa, Oryza sativa
MESMDFNWIHPQIADDVVSDTEALHHHRPRPPRPRRAAAFGCPAAALGSPSESFRRRRPPPSGRWRRRGRGGGSGGNSCCTARMAPTSSPSTPSPNHVAKLSANSAAYRQHDEQSGAKKAAWVVSPNGQVKREKAVEAARGEGAAAGAGEEEEKRIDLAVLRCPICLLPSCSSNPSDILLLVVVLSFDS

SEQ ID NO: 37334 - protein, 119 aa, Oryza sativa
MQPQHKGIPRFPPTQLPSPSLPFPSLLSSPLLFSPPNSPPPPLPLSSYPSPRRRREAARCVPSPPPHSAGAGAGLPLGEAGDPPGPGVPFPPPARSQPVVILSITSNEYPRKETTVLYF

SEQ ID NO: 37335 - protein, 270 aa, Oryza sativa
MAMEPLPLGFGDGLDATLLSSLWAFQDDLQPQESMEELKQSLMATTLELDAAKEELKKKEQSIAKLADLVRHVAKERDDARDQLQRLLAAAAAKPPPLVTSSVTDSDGGSLVSSPAADNPFFDPVTSSDKRCCAIASPPPAAKQQHAAAAGADAVLDMLAMKKPLPQRGRLLQSVMEAGPLLQNLLVAGLLPRWRNPPPVALDTLPVGVRAGGAVYPGASLSPGITSSAAVIGYGGGANACGKRPMAAAAAAVAASCSPAAFSAKRHRLH

SEQ ID NO: 37336 - protein, 47 aa, Oryza sativa
MKPFSCFRNSRRRTPARTIYYSRRCAPLAASRMRTNCLMKWHRRQML

SEQ ID NO: 37337 - protein, 79 aa, Oryza sativa
MSGRSAEHAAGALVAVVGGSEPLQVEAVRAGAMSQLLLMVQGGCSERAKRKAQHLLKLLRSAWPAADSIANSDDFLQPY

SEQ ID NO: 37338 - protein, 507 aa, Oryza sativa
MGNACRLAPLLPLPDQPPPGLPTAPVAAWPPAAPTPRQPPGPAWRQPPPHARAPRPRPWRPRHAPPAGPLPGRGHLLAGRRKGGVHRARPAPRRPRRAGRQPRAGLLRPVHDLAPQRGPDVADPARRRGGARLLAARARRGARRPRAQGEGPRGVPPRARRAGGGRQGRRVRRRAEPGVQRALLRRRGGRGRRVGAGVPGARGGADRVHSQAQRVRPLPVPPSVRPARVASLDIRAPGQNLQGPGRHNRPPDGRGRRRHGQARRLPRRAAGAHVHGQDRAGVPDEHPVRRLHRRERHHVADGGVGDGRAAPQPGRHGEGTGGDRRRTRRQGSGRGGRRGADAVRPGRAEGGDAAAPGGPRDAAAQGRGGRRRDRRIRGAQGLRRDLQHVGDHARPGGMGAARRVRAGAVRGPQPRYGGDGLQGEGLRVPPVRVGAEAVPRRADGGAGAAPHHGVAAARVRVAAAGRHVGGAARREREVHHRQRPGRPSQSRSGRDRLLAIFFYMHSL

SEQ ID NO: 37339 - protein, 635 aa, Oryza sativa
MVLKTELCRFSGQKIYPGKGIRFIRADSQVFLFANSKCKRYFHNRLKPAKLTWTAMYRKQHKKDIQTTDLPPPKPLPPAPLRQLFSFVKGGRAMQAVFEAMDRRTEIEPDDVDAAAVPERPRGEVELKHVDFAYPSRPEVQVFRDLSLRARAGRTLALVGASGCGKSSVLALVQRFYEPNSGRVLLDGRDLRKFNLRSLRRAMALVPQEPFLFAATIHGCSLPVFLRFFADLVDSFGSHAAHPDTMLRLVVKYAFYFLVVGAAIWASSWAEISCWMWTGERQSTRMRIRYLHAALHQDVSFFDTDVRTSDVIHAINADAVVVQDAISEKLGNLIHYLATFVSGFVVGFTAAWQLALVTLAVVPLIAVIGGLSAAALAKLSSRSQDALSDASGIAEQALAQIRIVQSFVGEERVMRAYSAALAVAQRIGYRSGFAKGIGLGGTYFTVFCCYALLLWYGGHLVRRAHTNGGLAIATMFSVMIGGLALGQSAPSMAAFAKARVAAAKIFRMMEHKPSMEREGGVELEAVTGRVELRDVEFSYPSRPDVGILRGLSLSVPAGKTIALVGSSGSGKSTVVSLIERFYEPNAGTILLDGHDLRDLNLRWLRRQIGLVSQEPALFATTIRENLLLLDVLRMN

SEQ ID NO: 37340 - protein, 529 aa, Oryza sativa
MTSFGDSSKAADKKSKAEKGDTSTPLAEYDDTDALEVARLVAIEVEREVIDYRGPFCGSPDINSRRSDSPDLEARRQPEPPMDEPDNDNKSSTTGEDSGSSSSMKEDGSGITDDSGTFSRKHTRSMKLGGIDLNENQCTEEVDCHTKSTLSNSINLSTPIAVAASRTSSVFPARLHFEGELGWKGSAATSAFRPASPRCTPDGEKSVSASSQRTGNALFDLNVSESDNATAGEPLSAAILPLSSDIVRKDASATVGLNSLELDLNCPCDDEEAAITTSNVPSFWNRQQCNGDWSHPSSSSSSRQPAVRNFDLNDNTPIVDGFLRGADESSVKTSGRDVSDHSAVTILGKRIVLGQKEHSHQNEHNFLGPSVESRDPARSMQSYGHTPPDYSVVSYSSHSALSFPSPFYAPGTVPYMVDAKGTPVIPPLPGFGVPTVPNLGVGTSHPSLGSRAIPPSSELSFFHPSMDLNYGRSYEGARREGASYWPVSFQGQTMFVDERMGNMSQGGSSGVPVLKRKEPDLGWDLYPRR

SEQ ID NO: 37341 - protein, 45 aa, Oryza sativa
MHISFISREHTRCLFCADCFCRRCKRRRIVLSKAANLPSEQWYHN

SEQ ID NO: 37342 - protein, 414 aa, Oryza sativa
MAAMAGGSKPLRLKDLLELDCESCSAAGFRCYPRRLCVAGGAAEAAAPPMRHRLVADRSSSAMRRPKLSSLSKSLSRRLRGGFWRRREEEDEEAAAAAAAPPATASSTAPAVASCCSSSSDSETSESSNSTGGRKSRSHSDYSEISSASSDDSLHAAGEPSTTGADHEVMKRGSKEEDEEEEADDKEQLSPVGVMDFPFDEDDDDAAAVDEDERVAAGACSFSFSDSLAQLQRRKMQLQPKIRRLGSMAELSGVDLEARFAASESDRLAGIVPVQHQCITDDVAAAPPRHDDHRNDGVSQKDPDDDEDSLLDLLADTVSVGVVDDVTERLLLDFFVEAKCSSRNIELHAPTSLLRERRRRENGETMRLAKAWLEGTGTPWTLNDVLYHGEDGMAEMERSRRWRPWRWTSCCTSW

SEQ ID NO: 37343 - protein, 273 aa, Oryza sativa
MEQFHDGHHVWLRSRAQGTYLRADDDGRGVSMGQGRASVHAAWTVHTHHLNAGDVDILMLHSAANGRYLATGLGWTRRRLLSGNRASIILRDLDQEVFPPACWFAIRSGWGDDVLLRHCSWRFLRADDRKWNWNRNGTGVIADMIDGRRLARWQWVVEAIPPRNSIPRPPNPSPSFGFFARRIIFRRLTHNDLQWVWIWFTGRSALHLWNQLSRRMGFEPDPNSTMCVRAGTYGRLTPLVTDLPRNNATMVIFVLPPESLAGLGLTCPNVHAA

SEQ ID NO: 37344 - protein, 331 aa, Oryza sativa
MPPSAVPFSRRPSDGPRGARPILVVILIAAAATLLALAYSSFPSASRATTASSSMAVAPTDDGCCRGPEGLELWGPAVKWGSDHRLLSAAACCESCKAMCKANDCRCDSWVFCGDKKRCGQRFGECWLKKQKDVMAPSVVAKGDDVMWTSGLVFAKGEGIVGLETNLGTIRIQLLPGCAPHSVDYFIEVLGLRNCAGCRFYRAEGRGNLWDAKGDHIKNAAYGPPYALLQGTLEVDGLPFKERAKEACPALRRGSVAWVGSGPEFLISLANHGEWKGAYTVFGSVVPEDMAIAEEMALLSTSTDVWSNVTVKVLRDPVYFKVKRSTSSGVP

SEQ ID NO: 37345 - protein, 331 aa, Oryza sativa
MCELLALDHGGEDGRVVGEVADHEGQEDGGGVVAGGEADDGVVDDLLLGEQRPAAAAVAVSEADEVADEVVRWRRLALLQVGLLLPHRRREQPASPRARPEAPAERGERQVERHRPQALQHVGERGGEPLPDGAAREPEQQGGDDVERQQLHQRQHRDGAAPGPPPGEVAPDLAVDPAHVPPQHLRPQELRQRAAHAAVVVADELQHVPPPDDRREAPRLLGRQRLAEEHRLVRRRAGEEHRRRAEQRQLRHGPVPVDPALQPPLGGVATHGTQQGQALADQRQAEGSRRQVAPRRRLRPRRSSGQVDGQRREEGDEERDDDDGECHCSDG

SEQ ID NO: 37346 - protein, 425 aa, Oryza sativa
MSGEAESREASRQRRRRERAAAVERFVGVPLADVVRENSLVHLPPAAAARLRVVHPSWASHMSSPLFAVAHAAAPRRVSGVFVPSAGFLPFDGDDDAVPSPSLSFVPASSELVVLSSSRGVACCISPADDAYAVCNPATASWTAVPSPPWRSWPRPAIVVLFDTSAYNFRGDFTLVCPFESEPGSSGAYCFQVFTSGTGAWWVTDAMSPAEGLVAASGVAAGATAWWRTSIGTAVGYTPVTGRVDLVTCPGDSDQWEIGLAAGMLHCAVIDGGDVVVFRLHEHGIWEVTTRVAVAEILQPSQPPPPARATTSTEIVASQQHDESGAEEEEGSRAVVAAANAPLRLDDGVRLLGFQGAEVEVVVLAGRRLVAFDARTRRRREVAVPDEVDAAWDGAEHAAHINTLALIAPAALAAEPPLAKPPADP

SEQ ID NO: 37347 - protein, 425 aa, Oryza sativa
MAYGLDHSEWLEVKYINNHALFVGYLSMAVKGVGFLVGLWTTVVLLGGFVSMLEKKDFWSLTIITLVQTAGVFDVLLNEKLRHAVNSVDGFLVTMDMVFRCEDEEFDSGIQLWRSRAGRLVTFIQAVVFAIILCPLAVLYLSGLVISTSLSLWRLIQHDYGDGDGSANLTPALNVLYSLALFQGVLFFYQWVSYFAGKRLIEKVASKYWQNSKEAGGAGARAGAWRKLVKVYMKKTKIRCEKDPSFLEEWNLVTFAVELMKPESKSSDYVSGAMILDTILGQKDLTAQHALIRKLVGSASSRKVMKKLLRSLRSASQYNRNIRVHAARIVSRLAGEISLASFPEALSCISSLLDTTTTETVRRPLTTGISWCWAASSFRSSPPPTSTTFFSSAKSRALSPRPCCPSEKTCSTSTTTAMSTHGRTS

SEQ ID NO: 37348 - protein, 285 aa, Oryza sativa
MHPRAGLRHRHGRAVGVADAGARAAPPGRRAQGDRIGVPGVAPPARAAAHPREPLRLRRRARRLLPLHRLQHRHPGPRRAPRQRHRGRRRGRAPPRRPRPRRRDAGRAPPREAPRRQGGGLRRPRLRPLRPPLRGAPLPLLPLRRLPPRVHRRRGHGPGHRVQDRAVPHPPRHRAVRRGQPPRRLRHGQGAAAAVARGVRGGGVRAGAGDDVRGVAGGVAAEQGARQGVPRREARRLALPLLAARRARVRLGVEVLESPRRRRRLRRAAQPWSRRIKEPRILVRD

SEQ ID NO: 37349 - protein, 416 aa, Oryza sativa
MNPIRSALARALLSPKPRPPRARHYATSSTGGATQPESVAAEMVRYALGGARPGSSPDEAMRILEQGASNLQGGGEGCGEAVGMLMLAMSTLLYRSGRRQEAMEKLKATNQVASAAFRVAAWEATMGLCMEAGQVINTSVSPDDLVDLSIKDDNIKWSDQGHLKCRVNAIKGLIALLNGETESAQLFFDGCKDLCAGVGNKQTENAVLSYCEYLHCVGDFPLATQMYERVLEALTMEDMSGNFLATCNMVPEEVSLGATCSYGQLLSHSGKFSEAEDYLTRALKKAEDQFGANHPKVGIVLTCVARMYKLKAKAEGSSSIMVQEGLYRKALEVLRAPAINSEGVSKQMDWRDIISLARGEYAELLLIQSNRRAEGERMKEWAEHAWRNSRLTLAEALEFSGPSKPTVVDTRIGRVM

SEQ ID NO: 37350 - protein, 554 aa, Oryza sativa
MQAMDEHKTAFKTHHGHFEFRVMPFGLTSAPATFQGCMNSILSPLLRKFVLVFVNDILIYNRTLSDHVQHLQSVFQILTEHHLKVKRSKCSFAQQRLAYLGHVISPNGASTDEDKILVVKNWPTPTNVKELRGFLGLTGYYRKFVRYYGVLSKPLTNLLRKGQSYIWTATTEQAFQSLKQALMTTPVLAMPDFTEPFVVETDASDKGIGAILMQKQHPIAFLSRALGPRHQGLSTYEKESLAIILAIDHWHPYLQHSEFFIHTDHRSLCFLDDQRLTTPWQHKALTKLLGLRYKIIYKKGSENGATDALSRFPSVSELTAISSMVPDWIQEIIAGYANDSDALSKLQTLCISANVVPDFTLKECVLYFKGRMWIGTNSFVQQKILANLHSSPVGGHSGITITYQRVKSLFASPHLRTIVVQFANACSICQRAKSEHVKYPGLLQTLPVPEHAWQFVSLNFIEGLPKSATFNCILVVIDKFSKYSHFVPLAHPFTAFDVAEAYMQNIHKLHGLPQSLISNRDRIFTSTLWTTLFRLAGTQLRMSSSYHPMGKRKG

SEQ ID NO: 37351 - protein, 133 aa, Oryza sativa
MERISPKTQKPGPRALDTNPVGCEADGPDGGQRCQCVGHACLCANLISREAPLHFPSRVTQTIQSLHLPFPCPHFPPLPRLAPIPHRRGAAADDLHTSSTRAADEVPFSLSLSSPPFLPSSRVPSSTAPRPNP

SEQ ID NO: 37352 - protein, 427 aa, Oryza sativa
MAAVQLLPLPPAAPPQPRRGKPGCWNTPPAPPKVCHYWKSGRCSRNPCRFLHTDAPDPAPPIAAVNTRSNTWVNPSCVAANSDGKGRAPPVQPAKRQVEAPPETPAKRRCGGGAWCVGDGFCGVARLKGHAKAVTGFALPEGSDKLFSGSLDSTVRAWDCSTGQCVRVEEMQEGEVHKLIAMGPWVLAGVRGAVKAIHTGTGKELRLRGPASQITAMLAEDEDHLFAGAEDGAVFMWRMNQEQQSFDEVAALTGHYKAVVSLAQGKGALYSGSTDGSIRVWDLDTHRCIYSFAGHSSTVTALLCWERFLLSSSDDGTVKVWQWKPDHDDLDLEVHYTHKEDERVVSMDGTYDADEKPVLLVSRGDGVVRVYDLPSLKKRGDIICDDEVRTISVRSRGVVFTGDASGEVRVVKWTSLSDAAESYLAMA

SEQ ID NO: 37353 - protein, 462 aa, Oryza sativa
MDPCPFVRVLVGNLSLKMPVAPRPAGAGAGVHPSTSPCYCKIRLNKLPYQTADAPLLLPPSPEASAAPAPAPATGALAAAFHLSKADLDRLTAKPSLFGSRTARLKIVVYAGRRGTTCGVGGGSGRLLGKVVIPLDLKGASAKPVVYHSSWICIGKRGRKPSSVSAANAQLNITVRAEPDPRFVFEFDGEPECSPQVLQVQGSMKQPMFTCKFSCRSNSDLRSRSMPADMGSGGRNWLTAFGSDRERAGKERKGWSVTVHDLSGSPVALASMVTPFVASPGTDRVSKSNPGAWLVLRPGDGTWKPWGRLECWRERGAGAAAGDSLGYRFELVLPDPTGMGVGVSVAESTIPASKGGRFAIDLTATQQFGRSGSPACSPCGSGDYGMWPFGSCRGFVMSAAVQGEGKCSRPAVEVGVQNVGCAEDAAAFVALAAAVDLSMDACRLFSHRLRRELSASRSDLLR

SEQ ID NO: 37354 - protein, 684 aa, Oryza sativa
MDAAAGGGGEPSPAPGVGGRKHLSSIANHVLRQCSLTLDRSVDELVADFELGLKTAAVDNYSRRLVEFCILQALQVVTSVDLGDKIHDGSLSRFTFDMMLAWETPTPSDQQVTMESIAKEREDKKEPLGANEAVMGDETSLFYSDIMPLLVNEEPTVGEDAYVWFGSVFPLACDVINARFTFEALTATTANRLHYPAYDKFLKEMDKSSEFLQKVSTPTGTELAEDEFILHIEGTAGTQRVVRHIGTTSWPGRLTLTNKALYFEASGKISYEPAFKVELTGSEIGKQVKTTSTGPFGAPLFDKGIEFELPEPLVLEFPEMTSSTRRNMWLTLIREVIFLHRFISMYSIDSPIHKWEVHSRIILGVIRLHAAREMLRMSPPPPSSFLVFSLYDELPKGDFVLEQLANNLKETSTITPLSASHVFKGLSKSHRVALSAEIAKEHDKDSNSHEQPLASLENTIGQVRDEAREVTVANVAIEGMKEEGITDSLLVLVGLVSPMSKLFPVIQKIISWEKPLVTISVLAMMVLTIYREWVGFALAASLILAAGFMVWARQRKIGALCSEVIIDTSSDKTTMESLVEAQQSLKRVHEYIKTANVVILRVSSIALARSPKHTETVIWMLTGLALALAVIPFKYVLIGVMAGGFMSNTRIARAMSNPQGSRRWREWWESIPAVPVRAVDGGGL

SEQ ID NO: 37355 - protein, 411 aa, Oryza sativa
MELAEAVRDETAMAMRLLGHLARAPRGGGGDKNLAVSPLSLHAALALLGAGARGETLDQIIAFLGPAGGPAHAALASHVALCSLADDSGPGDDRGGPKVRFANGVWVDAALRLKAAYARVVADKYRAEARPVSFRDKLEEARREINEWFESATAGRIKDFLPKDAVDRATPAVLGNALYFKGDWKSKFDARSTSDDVFYLPDGGHVSAPFMSSGKWQYIACRAGYKVLRLPYARGGRGRGRDTGRLFSMYIYLPDERHGLPDMLRKLCSDPAALIESSAALTEKVPVGAFMVPRFTLSYKTNAAETLRQLGLRLPFEYPGADLSEMVESSPEAEKIVVSAVYHESFVEVNEEGTEAAAATAVVMTLGCAAPSAPVHVVDFVADHPFMFLIKEGLTGVVVFAGQVTNPSSST

SEQ ID NO: 37356 - protein, 876 aa, Oryza sativa
MESQRMTWLYDRHHSLKHNKAERQAILSTYRLAKRPNLSSEGMIGESCIVRTNCFSVHLESLDDQTIYEYDVCVTPEVGINRAVIRELVKQQKDSGLGGRLPAYDGRKRLYTSGPLPFDSHRFLVLLDSIEDSPEESRHLRVRDFVVTLKFAAKISLWTLRKFRGGKPNRESRAALRALDVVLKELPTARYTQFAGSFYSPNLGECRQLCKVLESWRGFHQRIQATQMGLQLNIDVSSSVFIKPVPVVDYVAQLLNEDILLDRPLCSTEFLKIKEALEGLKVQINGILFNTYHVQDLVHQAASFPVNFSIQYPSLPCLKVAHFGETIFLPLEVCKIAEGQCHQKQLNAKHMAALLQVARQPPNERDYNILQTVHQNKYQEDPHAKEFGIKIEEKLVSIKSRILPAPWLKFHDSGETTEFLPQLGIWNMMHKKMINGGRVKSWACVNFCWSVREYAARNFCYDLGFMCRESGMVFSVKPVLPLVIAKPGCVESALRTLHDDVMDILRPQGRKLDLLIVILPNNNGSLYGDVKRICETDIGLISQCCLAKHVLKMNKWYLASVALKINAKMGGRNTVLVDALEMRLPHVRDTPTIVFGAHVTHPHPGKANSSSIAAVVASQDWPEVTKYAGLISVQACHQESIQGLFKVQDDPERGTTTSGMIKEHLMSFYRATKRKPGRIIFYRDGVSKGQLPQALMHELGAIKMACASMGPDYNPLVTYVVLQKCRHTRLFADYYNANTHDSTANIRAGTVVDSNICQPNQFDFYLCSHRSTQGTKRPRYYHVLWDENDFLAGSFQELTNYLCYTSATCTQSISVVAPVHYARLLSSRARCYIKPRSIGDSTSHTSLPSEEDSSAASETGSLLPIKDNLKGAMFFC

SEQ ID NO: 37357 - protein, 295 aa, Oryza sativa
MDKLPAASSAMQWSIDLDRALRSRHPATRLRAVDAVAPRLRELGASPPAAVPPAVASALGVLPSEPRLFAHTILLRLATHFATADNAVRARILRALLLLGLDGSLPMTMACVAAEPQHQVAVLARVKAAYDAGCPRARALALRMFGCLAHLAHHSLHLRSLILSTFSSSNALQVKAALFAAACFSRLSVDFSYITLESLRRLISSPTSQPQIIMAAIKIFPKLDCTLAVIHRVHEVFMDIRVSCLTSFFNLFLFTLKLPNIYIAFSLLRIHCFNNTPYAYQSCAHTPRNHQGKKI

SEQ ID NO: 37358 - protein, 485 aa, Oryza sativa
MSSLVRVLAVSHVLPDEVAAGGAWPPPPPHVVELSFLDNLQVSKAAIQRLFFYDGGSLPPFESVDRSLQSSLAAVLAIFLPLAGKLAYLPEPGDVVIDYSPDAVSPGVKFVEAEYSGSVDDMRRLASDDEHHTEAFLQLVPELEVSMLPAPLLAVQVTRPRDDHAGGGGGAVAVGVAIHHGVADGQSVWQFIKAWAAAARGGSPAGQGLVPPTFDRSRIRHPTADSHELAHTILHKMSPALPMVTPRSKPADMAQQRRRTFLLSAGEIQSLKQRISESETGGELLHNRLSTYVTISSLAWTSIVRAKCGALDAAADDVYFMVSADCRRRLRPPADEGYFGNCIAIAIARASAGELLDDDGLAGLARAAAAIQAAIRDELELEDPVGGAERWAERLAAIPRGRLTAAGSSHRFMAYETDFGWGAPSRVELVTVYGNELVAMLGGAADGGVQVSVVLGRALMDAFADNFRRQVVACPNSTVSRSRHH

SEQ ID NO: 37359 - protein, 485 aa, Oryza sativa
MCSAATPNSGDVRATPGSSRPHVVLLPSAGMGHLVPFTRLAAALCSGHGCDVSLVAAVPTVSSAEARHLAAHFTAFPAVRRLELDLASLDVSEFAGADPFYVRYEAIRRSASLLAPLLAGGASAAASALVADIALASVVIPVAKDLRLPCYVFFTASATMFSFLAYLPTYLNANAGGGHAIGDVDVPGVCRVPTSSVPQALHDPDDIFTRQFIANARSLANADGLVVNAFDALEPEAVAALRQGTVAAGLPPVFAVGPLSPAPIPAKDSGSYLPWLDAQPARSVVYVSFGSRKALPRDQLSELAAGLEASGHRFLWVVKGAVVDRDDAGELTDLLGEAFLQRIHGRGLVTMAWVRQEEVLNHPSVGLFISHCGWSSVTEAAASGVPVVAWPRFADQRVNAGVVARAGIGVWVDTWSWEGEDDGVVSAEDIAGKVRSAMADEGVRKAAASVREAAARAVAAGGSSYRSLAELVRRCRDGLVITNGM

SEQ ID NO: 37360 - protein, 72 aa, Oryza sativa
MKSLLWMPTNQQHGTKLMSITVDMHSWSTTISELRFLNIYPARYEPSVLENVLKCNFPEKHSLKPVTYVYWT

SEQ ID NO: 37361 - protein, 112 aa, Oryza sativa
MTRNAGVRDRMSPWHASTTSSDAVGRPPQQPLRHCPQPPAHPSHHAQRPRSQFSAQNTNSSTFSSMIRGGPRRRSVGRRRGGHRRRRVGSRRRPKCRNDGRRGVAGGLLLYL

SEQ ID NO: 37362 - protein, 365 aa, Oryza sativa
MPPPSLLLLHPRTPLPHHHRSSFRTSSPRPSRMVCAAAEGFISAAPILLPDGPWKQVEGGVTAAKGFKAAGIYGGLRAKGEKPDLALVACDVDATVAGAFTTNVVAAAPVLYCKRVLNSSKTARAVLINAGQANAATGDAGYQDTVDSADAVAKLLNVSTNDILIQSTGVIGQRIKKEALVNSLHRLVGSLSSSIEGANSAAVAITTTDLVSKSIAVQTEIGGVPIKIGGMAKGSGMIHPNMATMLGVLTTDAQVSSDVWREMVRTSVSRSFNQITVDGDTSTNDCVIALASGLSGLSSILTHDSTEAQQFQACLDAVMQGLAKSIAWDGEGATCLIEVTVAGANNEAEAAKIARSVASSSLVKV

SEQ ID NO: 37363 - protein, 341 aa, Oryza sativa
MEQWLPLFRYLLASPAPNAAAFSSSSSSSGDDDVHCPTAPPPAAALLCLLLSPAPTLPASDPPAILFQTLPPLAQSQALSFLASSAGLLDPALVRSLATRVLSEPSGRYGLWARRGVRHLLDGLPQGGGIDAPGEFLDGFHEPPQWLKEAAARTRPALPWLPLDRHSVKVGVCSGRYGFDRVGLDSLVLEKDEDSEMQEAKCVPSPSQPAALGTLSVQRALALQKEILMAESILVAQRVAKDLQQLCVESGNAEAVLSIVQPWKADDDTVRVLLSSLVLDGDGMHRKGPALMLCSLFLPKLLEIQRPVSSVLLSAALISASATQLLHWRLSFYRWFLERKG

SEQ ID NO: 37364 - protein, 285 aa, Oryza sativa
MLLTRRFSSALARSPLLPRSLPPPRAVPATPPAPRPPPRRLMSSSSSGWHHSSRPPPPPPSGADKDQLFRGLEAALGTTFSSEPLAPPPQPMILVISGPSGVGKDAVIQRLQEEREGMHFVVTATSRAKRPGEVDGKDYYFVTKEEFLTMIERKELLEYALVYGEYKGIPKQQIRDYMAKGYDIVLRVDIQGAATLREILGESAIFIFLVAESEEALVKRLIHRKTETSDMLLVRVATAREEVKRMNNFDYVVVNSEGNLEGAVKQVESIIDAEKAKVHKRTVNI

SEQ ID NO: 37365 - protein, 394 aa, Oryza sativa
MATRVLSQNLRKLASFSLLNLSQGAPISPSPEPLRPAIASFGKCLNPFYQFSPPWMVRWASHSSVNLVLSDDGKPKFEIEEVEPSKKRGYLTKKRLKLQRKREKKKRKEANKNDPRRIRPKGKKIKQKFPTPEARLKYKIEKAKLKEAMLVEKLKKYEIAKAQGPMAKQDDLDGEERFYLKKVSQKKSNYVPVGRRGVFGGVILNMHLHWKKHETVKVICKPCKPGQIQEYASEIARLSGGIPINTIGNDTIVFYRGKNYVQPDVMSPVDTLSKKKALEKSKYEQSLETVRRFIAVSEKELELYYRHIALYGNPQSQNVDPVYCDDRRAASLKMEEPSQGKDLSHMDNDGFSDITDASESDEEANPSEYDDNDDETGDNIGTVLYDHGGFKVTG

SEQ ID NO: 37366 - protein, 87 aa, Oryza sativa
MRFREVVEKRRSIEIPHPYPIENRSESLPASACSLCSRHTHAPAIMPPWFGTKPSEAYDRRRKRPPSRRAKTCSFEVANSSFEAGVL

SEQ ID NO: 37367 - protein, 297 aa, Oryza sativa
MGSLGGKSDYESVRDARISENLARMEMLGLRRCAGEFSAIASASASASAAASRRAGIGGTTPRRNPKPPRVLTPLRRSGRLVAIAAAAPAGSASGPRRSARLNGQTTEHKALPLKGSLSKFAAEEAEEEEEEEEQEEKKAMVVIDKERVRILQERRCDSKGRGAVYDPVLGICCHFCRQKKLCGEEGCKRCGEGDLNQPCIGKTDCSSCHSSYGILCRACLKVRYGEDMDEVRKNKNWMCPHCIEEKGTKKFWICNSSICLKKRKLSPTGIAIYDAREQGYESVAHLLMDKLKCRAF

SEQ ID NO: 37368 - protein, 100 aa, Oryza sativa
MQCSNKLGRFKSDDKHAVPAAVCAQNGTVSMAGTDSFVGLDAHCRPACTIAVPCVTGTRTSPAVAVTGPPVSGTRWGCSCYSGKLEECWQENSEAGCCWL

SEQ ID NO: 37369 - protein, 456 aa, Oryza sativa
MEEEIKGRVVVLGADAAADPELEAFHLPSADQPPHSHLLHHHHSPQSHPQPDAPAAAAPPPPAPLTPPPPKSPPPPPHIQTTDLPPPKPLPPAPLRQLFSFADGLDYVLMTLGTLGALVHGCSLPVFLRFFADLVDSFGSHAAHPDTMLRLVVKYAFYFLVVGAAIWASSWAEISCWMWTGERQSTRMRIRYLHAALHQDVSFFDTDVRTSDVIHAINADAVVVQDAISEKLGNLIHYLATFVSGFVVGFTAAWQLALVTLAVVPLIAVIGGLSAAALAKLSSRSQDALSDASGIAEQALAQIRIVQSFVGEERVMRAYSAALAVAQRIGYRSGFAKGIGLGGTYFTVFCCYALLLWYGGHLVRRAHTNGGLAIATMFSVMIGGLALGQSAPSMAAFAKARVAAAKIFRMMEHKPTRSSRPSISPPPTSPRTRTSSTTTILHNPILNLLPDVLRMN

SEQ ID NO: 37370 - protein, 143 aa, Oryza sativa
MLLRSAPRRLHHLRPHHLSTAAALAAAPPTSSPPTSPPASSSPSASPPRPTRSSSPSPPPLPRRASRPPSISSLSDSPAPPPRASATCAPATSSTSAAASSAADSRSAGSLTRAMSSSSPPDPGSVQFGHSSSQVLAKMRTLM

SEQ ID NO: 37371 - protein, 317 aa, Oryza sativa
MGNSCSSVDESAAAIATLAESAAAGARETVADEFARAAGSGAGGRGDVAGSAAAGVASGAGGRDDAAGDEVVIAGVLSLADGQKAAAAGAISGVESMQSYMRGTRFFCFGERVCSDQMAALKMAAACGSAAGMRAVAMVAARARHAARIAANPDVENPLHDIPEDRPDYMLSAAATGARAGVLCARMKIQAAGGDSTSHAKYVPFLAPFIGGALPGSYAAYHLVKHSPEWVMGVVFGSISLGFFAACTGTVSGLLGTSSATFQYSRFAAITTFTAVWFLFSFAMTSVFSKTWRKILCGFICGVPGVTFVGAWLYSGW

SEQ ID NO: 37372 - protein, 136 aa, Oryza sativa
MATARTACRASTPARRERGRRMVPERSPRYHSMGVRGIRSLSTAVLTLDDVSLRSHFVSAAPPAPATAPPSSFLSAAPSMEAVPPNSFISPAPWTAAATPNSFISTAPSTMPNSFISFGPSMAVAPPNSGEMSIRW

SEQ ID NO: 37373 - protein, 190 aa, Oryza sativa
MVDVLEARPHGRLMSFDPSTRRTTVLARGLYFANGVAVSPDQDSLVFCETVMRRCSRYHINGDKAGTVDKFIGDLPGFPDNIRYDGEGRYWIAISAGRTLQWDVLTRSPFVRKLVYMVDRFVVAVPHNLKNAGAMSVTLAGEPVSMYSDPGLALTTGWLKVGDYLYYGSLTKPYLSRIDLAKSPAEKAQE

SEQ ID NO: 37374 - protein, 380 aa, Oryza sativa
MGNCWFRGSLIVNRVSSNAKPETPKIQSPSERDRSDESKLPSNAKEVEAMRLDSSARNPLVAFSFEELRAVTSNFRQDSLIGGGGFGRVYKGAVAASAAGDGDGAEPQPVAVKVHDGDNSFQGHREWLAEVIFLGHLSHPNLVRLVGYCCEGDHRLLVYEYMPRGSVESHLFSRVMAPLSWATRMKIALGAARGLAFLHEAEKPVIYRDFKTSNILLDEEFNAKLSDFGLAKDGPVGDKSHVSTRIMGTYGYAAPEYVMTGHLTAMSDVYSYGVVLLELLTGRKSLDKSRPPREQTLADWALPLLTHKRKVMSIVDPRLSAAAAAAGAGGELPARAVHKAAMLAYHCLNRNPKARPLMRDIVASLEPLQADDEARDAAGA

SEQ ID NO: 37375 - protein, 330 aa, Oryza sativa
MAAERVVVDECRGVLFVYSDGAVERRAAPGFATPVRDDGSVEWKDAVFDAARGLGVRLYRPRERGGGRLPVFFYYHGGGFCIGSRTWPNCQNYCLRLAAELGAVVVAPDYRLAPEHRLPAAFEDAENALLWLASQARPGGDTWVAEAADFGRVFVSGDSAGGTIAHHLAVRFGSASGRAELAPARVAGYVQLMPFFGGVERTPSEAACPDDAFLNRDLNDRYWRLSLPAGGATADHPFSNPFGPASPDLAAAEFAPTLVVVGGRDLLRDRALDYAARLAAMGKPVEALEFEGQQHGFFTIDPWSAASGDLMHAVKLFVDTDGGGGARLDG

SEQ ID NO: 37376 - protein, 351 aa, Oryza sativa
MRRGGFHGAAAASPTTVARAGRVMRAAVAAFFHGYHCYTSVAGLLVLPFSAAVLASGAMASPSSGALAAVSARIRRMFDAAGFPPSSFFALFNAKLSQTVFTFAAALPFTLTFLLLAKACVAAMLRPDDDGEGVARRGRGVARATRLPPCGSVAGAYPAMVATHLFGAFVMLSANAAVFSLMFLAFNGADLLGLTTTSHAAATLALSAAGAIAYSVAVGIATVVCNLAVVVSAMERRAGHAAVLRACVVIRGRVPTALALALPTNLGMAAAEALFQLRVVSQAQRHRLAGAGDGKRLAAGVAGEAFSIAYIHALCVVLEIIVSCMFYRSCRRSEVDELRELEPEEKGDLQA

SEQ ID NO: 37377 - protein, 21 aa, Oryza sativa
MSALPIIVKQNSPSVGLFTHQ

SEQ ID NO: 37378 - protein, 384 aa, Oryza sativa
MAETKIEGPTIAVKLFVDKERSRVLFAESDKDFVDVLFGFLTLPLGTVVRLLGRQSQVGCLDELYKSVEDLSADYFHTKACKAMLMKPHDTAAEQCCLLKVKVDDTDQSAVYVCRDANCSANGDCGVTSVAGSVCKCGKVMEYIGEWPQDGGSTAAAGSDGGVFVKGCYKFIVTDDLHVAPAATSLMMSIFDKYGVRDPANLEQKILQLNAEKITCLLKRSLTSKQTLTGYYFDVPNPNDEANLYVLPESLYSEQDAEVDHKLNNMKIKVLQRKNNTSLLYAEVGEDFVDLLFGLLSIPLGSILKTYGKWSSNGCVDNIYMSIDGSAKGCMNPERQMLLASPNVASFFGCSATNMLIQLGEAAPKQRNISGCFKCFKIAGFWPL

SEQ ID NO: 37379 - protein, 327 aa, Oryza sativa
MKHMALAPPAPPSKKSKKKNSNSVWTRPNSRKGKKKAKQPANALAGGSGGANGRLPKPSSGEDELVLTPAPRFAAERNDDAPDRPVLLSRVFKSDKVEVSDDRLTAGSTKGYRMVRATRGVAAGAWYFEVKVLHLGSTGHTRLGWATNNADIHAPVGYDVFGFGYRDMDGTKVHKAWRANYAEQGYGDGDVLGFYIHLPDGELYEPKQPFLVHYKGLPFRAEAPKAAEQKTPDPVPGSEICYFKNGICQGTAFVDIPGGRYYPAASMYTLPDQPNCQVRFNFGPNFEFFPEDFGGRLIPRPMSDVPYRPFELANGGPAENGTAEKNI

SEQ ID NO: 37380 - protein, 694 aa, Oryza sativa
MYNELTVCQEEKNAALLQVQQLEANLKNLESELEQKQSQVSALEQANEELREKISSLERQLEEARSKLQDEIIKLQGEKERALDNLQQSNTSIKTFEEELEKQREHNSILQLANDDLHKSIANLEKELEDTKVSSHAEILALQEQKNKALSDLQQSEISIENFRMELEQGREKISILDLSNEEMKDNNYRLNQQLEEIRTSLHAEIAALHEEKDAAQLELQQSLASARNLETVLEKQTENLSTLQHANDNLKKNNCTLTEQFEVIKIELQEEVKMAHEEKDATLTQLEKSEDSIKNLESELAQLKEELSVQMESNSSLNKQLEEAILKVSNLTEELETVQAETASKINDMETNTKDLVNTIVLLSSQKNKVEEHMKIITEACMEKMSFMKDFEDQVKQKITDREIAIACLQQSLRGIIGSCQRLQYAYGEVSTKASHLEVLRRNHLVQIDTLENKHTEIMEKHRHLGEENTSANKENRKLQNHVQELEAQLQLARQKLRVTEAESKSKEDSYVMAVEKSHREIQYLEQKIQKYSGQINSLEETLVQIKGNAESGTSTLVDQLDQLESHFNKSFSHFSARSFACSEELKLLRNRLQHHLAEQKELVKKNDVLGMRLREKENVLSEMVRSASEAKKKMAHLEKTIDEKEEEISARVQEKREAIKQLSNAIIYHKNNSDDLIRYIRNHNRRRLPFCL

SEQ ID NO: 37381 - protein, 446 aa, Oryza sativa
MIVVRHEGEERQFMPEEISSMVLAKMRETAEVYLGKTVTNAVITVPVYFNNAQRQATMDAGAIAGLNVMRIINEPTAAALAYGLEKMPVSNKGRMVLVFDLGGGTFDISLLNIDPGVNIDMGLFEVKATAGDTHLGGADFDNELVKHSLREFNRKHGSMDIESNQKALRRLRTACERAKRMLSSTMQTTIEVDSLHQGIDFRVTLTRSRFEELNKDLFSKCMEAMENCLRDAKVDKWSVDDVVLVGGSTRIPKVQKMLSEFFDGKELCRSINPDEAVAYGAAIQASILCGGTDDKRLVDMLLREVTPLSLGVETEDNCTMSVVIPRNTAIPTKKVKNFTTLYDNQINVSFPVYEGESANTKDNNLLGEFTLYGIPPAPKRVPSIDVTFDIDANGVLNVSAEHKVTGQKNSITITNRSGRLNKEEIDRMALEAERHRMKRIKQNEVV

SEQ ID NO: 37382 - protein, 181 aa, Oryza sativa
MPPPSPHPPHRNGNHVPAPSGESFAKFFECWISEQSRDLAALRSAASAATNPAAPPDDAELHRLVNRVLGHYEHYYRTKSAAASTDVLRMFSPSWTSTTENLYLWCSGWRPTAALHLLYSKSGAQLETQLPVFLAGGGLGAGDLGDLSAEQLQAADQLQRITVSKEREIENAAASAQVSDG

SEQ ID NO: 37383 - protein, 335 aa, Oryza sativa; identical to SEQ ID NO: 36898

SEQ ID NO: 37384 - protein, 95 aa, Oryza sativa
MTEKRDEPFKSIDIDGLICSDRSKGNLSIIRVDLFLSIDDTRYLSILDPSERNRYVSDGVYIVCRAPKRFFGQLSSIIHRSNALAHLMGGKSKCS

SEQ ID NO: 37385 - protein, 297 aa, Oryza sativa
MGAGVSDLAAGMEAVGKVAGGAGLGELPELCAAEVLLHLDAPEICRLARLNRAFRGAAAADFVWEAKLPENYGYLLDFVDGAMEGGGGGRERSVMGKKEVYARLAKAVPFDGGKKELWLEKSKGGVCIALSSKSLVITGIDDRRYWSHMPTTESRFHSVAYLQQIWWFEVVGELEFCFPAGTYSLYFRLHLGKASTRFGRRVCSSEQIHGWDKKPVRFQLSTSDGQHALSQCYLDEPGSWILYHVGDFVASTTEQPIKLKFSLAQIDCTHTKGGLCVDSVLIYPKGFQQEKVISSQK

SEQ ID NO: 37386 - protein, 294 aa, Oryza sativa
MATTRSGVGGAISDPFATPGFRFYPTEEELLGFYLRHRLAGTRPDVERVIPVVDVYGYHPSQLAALAGEASARDTEQWFFFCPRAERELHGGRPARTTPSGYWKATGSPSCVISSATNRVIGVKRTMVFYQGRAPTGTKTRWKMNEYKAVADDADAAAAAMLHPMAPPRLRNELGVCRVYISTGTLRSFDRRPLDNQAAAPTKQQVMPSLTAAAAVNTNLCGGGGGVVFAGAQGDSSRDCSSSSGSRELAGGADGSEDDAIDWNSLISSATADDLGFNTVVGFDPSIVGSWPQV

SEQ ID NO: 37387 - protein, 389 aa, Oryza sativa
MALLSPRVPRLPLASASAAGAGLRCCVSGGRAGSAAWCHASAASSVASSSSELEAIRWGTAKLQGARDEMEDEVVLRPGSLLDGFSFAAVFDGHAGFSAVEFLRDELYKECAAALDGGAVLSTKNLDAITDSIQRAFATVDANLSTWLEQMDKEDESGATATAMFLRNDVLVVSHIGDSCLQVVSRGGRPQAVTNFHRPYGNKKASLEEVKRIRAAGGWIVDGRICGEISVSRAFGDIRFKTRKNEMLVKGVKEGRWTEKFISRINFKGDLIVSSPDVSLVELGPDVEFVLLATDGLWDYIKSSEAVALVRDQLRQHGDVQVACEALGQIALDRRSQDNISIVIADLGRTNWKELPAQRPNLFLELTQAVATVGAVSLGIYISSLLALQ

SEQ ID NO: 37388 - protein, 551 aa, Oryza sativa
MHKLLALNQRQKMVLQRKTEEAAMATKRLKESLEAKKSTRDTYGSASGSGIQALMRAIDDELEVTVRAYELRSHYERQMQERAAISKEIAKLKECPQAMSPSARSSRISALENMLSSSSSAMVSMASQLSEAEERERAFNGKGRWNHVRSLPDAKNTMNYLFQLASSSRCQQFDKEVMCKEKEHLICDLKEKVVALNGRIRQLETQVKDLNNQNMLLFTAISEAKNPVGTSRKGTVGSEDGQHYAMRKSIRASHSLHYSKNSFLWSDDMDISDSEKSEGSDADWEASDADYGASDADWECSKKVRRRRQTVSSHLNPNPGSGTTQKSAKSEMASQEKSTSLDLAPQCCSCSKYSSCKTQKCECRASGSHCGGDCGCITSRCSNRVDMKEEKEGGGVVEVSSSDDVDDAKVQEIVKEGVMLLENSMSEKEAQETKSRKPLADIGKGVVKQTGAKPKQRKNWRKSTVQLVPSAPPLPPTAPQNTEPVPRNRDIPLRLPRAMSSPAVDSIPLTDRNAAKPDESMSSNKENVTAVRARSPARPRKNANEKENHLR

SEQ ID NO: 37389 - protein, 435 aa, Oryza sativa
MARFSVAKPFAATATAAAPRLSPRRRRRRLLAANATTARGALPLPALRKPTKPPPPPPLHPRPSLPVPTTSSDDDGDIRRKPATGARASLCSSGAGDVLRLLDALRLPPDEDVYVSLLRDCADAAEVASVHAHIAGKFAVSGLPLPLANRLVLAYAACGDIGAARQVFDEMPVKNGITWATMVSAYSDGCFHHDALQLFVQMCHQVRGITGDHYTHAIVAVLRSCARVNELQFGEQVHAFVVKKNGVCGDVGSSLLQLYCDSGQLSSARHVLEMMRFSCQEPVPEAAWTSLITAYHRDGILDDAIDVFRGMASSGIARSSFSLSSILAVCAEAKNKGCYGQQVHADAIKRGLDMNQFVGSGLLHMYAKEGQLADAARAFEAIDGKPDAVCWNAMAMAYARGGMYREATRVVYQMKAAGMNPSKLTMNEVKLACFR

SEQ ID NO: 37390 - protein, 298 aa, Oryza sativa
MDDAVETAAEILVSFQNRRLVRWPEWVPRPDEKGAAAEEKKLPGWKDRRKRTSKSKPPPAILVCGLELRDSGGEKAASIPAPLPPPARKKMLFKMKVKDEPTAARGPETPPEYGAGAGSGANFSRDGVARPLPPRAVVKAEPTPAARMPESPPYYVAAAGSAPSTAGGDRRPRPRPVERAHVKTVLAAAKEAMEASSPETPLDYAATTGSGASSSGDESSRKRKAAPGAGGSGGASSSGDEGCSSPEKRPCLVAGGGAQTAAAAKAEVSPPHFFPHLFLALLLLFPFGFRTLELFLVP

SEQ ID NO: 37391 - protein, 337 aa, Oryza sativa
MDSWIEQTSLSLDLNVGLPSTARRSSAPAAPIKVLVEENFLSFKKDHEVEALEAELRRASEENKKLTEMLRAVVAKYTELQGQVNDMMSAAAAAAVNAGNHQSSTSEGGSVSPSRKRIRSVDSLDDAAHHRKPSPPFVAAAAAAAYASPDQMECTSAAAAAAAKRVVREDCKPKVSKRFVHADPSDLSLVVKDGYQWRKYGQKVTKDNPCPRAYFRCSFAPACPVKKKVQRSADDNTVLVATYEGEHNHAQPPHHDAGSKTAAAAKHSQHQPPPSAAAAVDRQQQEQAAAAGPSTEVAARKNLAEQMAATLTRDPGFKAALVTALSGRILELSPTKN

SEQ ID NO: 37392 - protein, 52 aa, Oryza sativa
MCSYFMMSLFRVGVDKLTILHLFTPVSWTALLVSWIHEHHFFYKDAIVLCRS

SEQ ID NO: 37393 - protein, 81 aa, Oryza sativa
MSIMIFPMSPVLLVRIVSDPSVRNGDCCVTVPFSGLPVDAVGGSALFWLVSSEVDGLLASVDWQIALPSGPENNIESFEFP

SEQ ID NO: 37394 - protein, 422 aa, Oryza sativa
MGVSKAILENVIFVHQDESNWPLQDPSTLKKKFDDIFSATRYTKALEVIKKLHKDQAQEIKTFRLKLENLQTLKDQAYRLRDNIAQDQEKSDALKIQMEELRTNVQGVEDKIRRTEKSLADLRRLQQEINSSTSARTTYFTLQQQQYAALSEENEDTDDELKEWQTKFEERMALLQNKISKLERDVDDENTTSSFLSKAINDLMRETGRLQAEADAHMSVKHERDSAIRKIFTKHNLGPIPDAPLTDAAAMHLTNITKAKLSNLNDDLQDKKKSNEAQKQFLWGRYLEVNTRYSEVVGQIESKVASKKGISRRMKDKESERDAAEMDLSKYNLPRIDEKERHLQIEVERKALALGERNYDSIVNQKRTEIFSLDQKIKTLQWEKDSIISDSNDRVLLDVKKDELEESKKKLKKMHVSSSLLL

SEQ ID NO: 37395 - protein, 406 aa, Oryza sativa
MEARLDGGGQPARRVRHLLVEGAHEHPRPQPGEPVADVPERRGGGRDHHVGEAQQHHLGERLLVVQLLAGALPVQVRRLEHAHGLPARRAVLVVQVLDPLGVGAVQRHHEHRLAPPRPRRRLRLVSGGGEVGPLLRHAGEDVLAVRARHDLAVELVGGDARPVEGAHLDADALVGAGHVRGVVPRHHPPHRVARVEQVAAEVVERGVAARQHPRQRALEPRDQEQPGHEVVVGEEHHPADAPQRVLPVVAEEARVVGVAVVVVPQVHAHPRRRRRRVVLGGALAAPQRVPEALAGARVEALHAGEREVPLRERPRGARERLAEEVPEAFAGGVVEEEDAVGEERIEESRREREHAVAEPLERRPHEVPALGVGGVRRRRGAEALHGALVGGGAGAAAAVDGLVASE

SEQ ID NO: 37396 - protein, 110 aa, Oryza sativa
MPGTRRTGSPGARTAGKKAWTPAWRRLSSLGPEATDAGASLPLPRSAATGSRWGLPRGGRRATSSSSRTTSGGTVVVDRSHATLSSSQSRVERRPERRRRRRWAERPDPA

SEQ ID NO: 37397 - protein, 109 aa, Oryza sativa
MVAGRGGVTVGGQRRLARAGRGVGVGVRPRGVTAVAIEAVAAWWLRRRRSCSGADVEPACAALAGSGRPRPVPSPPRRRACLCRYGRGMNACETSWTILWPSLWGCLCG

SEQ ID NO: 37398 - protein, 473 aa, Oryza sativa
MSGPLPLRITSGRRRRRFVAGLAHSEMAEMGAAAAAAVPVIPEDVVIEILARVPDPTSLFRCAAACKRWLRLIADQALLRRRWPPGTRVPSLLGFFAQRHQIQANARRKLTKLFPTRAPPLVAAPSRGTGDPPVSTGRRRRLFLTDFVRNAAGAGLFDQAKPLAARGGLLLVRVLPSPSPAPQNALHLCVCNLLTGSHDVLPPLPMDCFEKDGARGYAILTAADHRVSRNPSGGYNTFFQVLLLSIHHGNHQVYLHRFSSAAASAAAAAVIFEISWSTPRNCSEQIRGYVWGPSGNRVAAVSHGGAHWLFSWGEESLYTLDVSIDTDNIGATNIPIDPPPTVFHQSWLYVSVDERLSLLYLCDNKLHIWTKLETQESGRLLWNCTQSICVGVKMGLFGTESLSTVCIGEESGTMLTLYLSDPNSAYVLDLPSGSITSVDDWKRWFNYMTAVSFEINWHSFFLTRLGDFCGRFC

SEQ ID NO: 37399 - protein, 484 aa, Oryza sativa
MVAAVRAPVKPEMVELSPAAMERYSSDADTTAPNSSLSSAASSTGSLARCSSLSRLSFDCSPSAAVAAAATSCSPPRASVLLRPHRSGDVAWAAIRAASTTSAAPLGPRDFKLVRRIGGGDIGTVYLCRLRSSPERESPCMYAMKVVDRRAVARKQKLGRAAAEKRILRQLDHPFLPTLFADFDATPHFSCAVMEFCPGGDLHSLRHRMPSRRFPLPSARFYAAEVLLAIEYLHMMGIVYRDLKPENVLIRADGHIMLTDFDLSLQSTTSPSLDGDTDTDDEASGGASCFPDHLLRFKRRRNAVAAPRPRFVAEPVDARSCSFVGTHEYVAPEVASGGAHGAAVDWWAYGVFLYELIYGRTPFAGATNEATLRNIVRRPLAFPSGSGSCGPADADARDLIARLLAKDPAARLGSRRGAADVKSHPFFKSLNLALLRSSRPPVVPGAGAGAAPLHRSQSCKAAPTTPPPPTTTKPANATARFDLF

SEQ ID NO: 37400 - protein, 375 aa, Oryza sativa
MILQQKPARARRPPPPFHARRRRLGLRPSERGIGNATPPRAAPPPSPAGSAGCARFRSTRRLGIAPSCSSLTAILAQGRVVGLGGCKVVFFPLLAAAAGDSRGRQNAGVLHRPVGGHPRGLLPHDDDMIKIARVAGRMTGRAVGRLMLFRRQMDEILEQTAAKQVNKELKDAMTQLDSIRYEVQNLSRFTPGQFMRQHNPVGVDHEAEKNDAVDGSALNLEELRHQIRSMVHDEIESFYKTNPDKFSGRLDNADTVNRSGPVEGKEADVAVIPTMLASKDMKLANTGSTDLHSKATMYSRLTESPEMSGSSGHQFKESDGLLNILPISAESAGLLPSRSDKPQGSDLLLEATLEAEVAEHAKSFAQQHHDELHKE

SEQ ID NO: 37401 - protein, 162 aa, Oryza sativa
MDKATLLARVVDQVKDLKRKASEITQRTPLPPETNEVSIECFTGDAATAATTVAGNHKTLYIKASISCDDRPDLIAGITHAFHGLRLRTVRAEMTSLGGRVQHVFILCREEGIAGGVSLKSLKEAVRQALAKVASPELVYGSSHFQSKRQRILESHCSIMSI

SEQ ID NO: 37402 - protein, 519 aa, Oryza sativa
MNGEEAPAGSGGGGGGRAEIDTSAPFESVREAVDHFGGGAAAVWSSCLVNRMLTPPKEHDQMNGQTLQLEKELIIKESQTLDVLKELESSKRIISDLKLKVQNDSAITGHPGQTEAPGAGPEERRSSENVETDGELGGLDSQNLQPPSSVLMQLEQAKAYLTRTTADLAEIRASVESLCNEIAKEKILVERSREKVCSNTSLISSLEGELDRTTHKLQTLNDRQRRREDSSHILMEIKKVTSEIEQLKSASNASKSEATMLAAEIEQTKASIATAEVRCLAAKKMEDAARAAEALALAEIKALLSGEASAGDLQGTDGVNLSLEKYFELASKAQECDVSSRKKIEAAMLQVEEANRSKSNSLNKLEEAKLEFEKCKIALQDALKRAHAANRGKLAVEESVRRWLSESGYKRHSFHDSSKLKNAADITDVSKSFLKPTLSIGQILNLKLMGPDGYDKSVWDDTTEASNVSLGQILNRRNAVFCNSDITSQKILSGKRKKFAFTGLSVLLAKQAKRQEQEK

SEQ ID NO: 37403 - protein, 491 aa, Oryza sativa
MAVAQASLLQSFPFRAAVFAACVLLLPLVPSPQAPAAGGDGGGGGGRGEAFLAKVWELLHLLVVGIAVSYGLFSRRNNAGRRGDEKDAAAQAKADSAGYVSQMIHDSLVFDDGGGDVALDSPGGNRVRSWSAMHHPDEPVVVVATGGAGGGRSHAVEAAQQAPPLSLPVRTLKPQGESSSSAGYGDGGEPWAARPRRISQDTPGGGGGGHETVLPSPIPWRSRSGRFDASAPSPPSPSPKRLSPASSLSKETLAKASEDYSSRRRSPYKSSPPAPPPPPPPFLVHGYHPPAAERRTAAKSFKEELQEQTSHSFTTSEFSRSSSNSSSAKPRISIDSSSSSSSYYPVAKSVRTIRGGRESLQSQSQEQPDVAVAGDAPALLHGSDSDDPYGGYRAYQSIPRFQYERGSSDPVLGNVTVSSESSDDDDSDVDGDGELSTRGNSPRRESSPEVDENEVDKKAEEFIARFREQIRLQRIESIKKSAGPRGVKHGK

SEQ ID NO: 37404 - protein, 312 aa, Oryza sativa
MARHEAAAGVVDFHLPDEILAVIPTDPYEQLDVARKITSMAIASRVSRLEADAARLRRDLADRDRAEADLRARLADSDARLLAALDENAKLAKERDSLASTAKKMARNLAKLEAFKKQLMKSLSEDNLLQLSEIGDDRDFDANNNLTARVPSWEDEVSSSRTSADSSSRSTMTESAQEHQFSVTPYTAPKLTPGSTPKFLSGPTSPTKSLSEVHSTFSSWHGSSSHQYSAPTSPPQHRSFAGRPRIDGKEFFRQARTRLSYEQFGAFLANIKEFNAQKQSREDTLSKAEEIFGTEHKGLYISFQNMLNRNHS

SEQ ID NO: 37405 - protein, 120 aa, Oryza sativa
MAAAAADYEYRAYGAPADHDRPYHGREVVPYGDRRIDVVVKPPGTTTTTTTRSPPPPLPVTKVGGGGGGMGSAWCFSDPEMKRRRRVASYKAYSVEGKVKSSLRRGFRWIKAKCSELIHG

SEQ ID NO: 37406 - protein, 428 aa, Oryza sativa
MQAAGLTKPGSGEPSSTLLTSDGPVTGSILEDGEVFGRDKEREQLVSWLIGSTPEAEGEDRSAAADDTIPVAAILGLGGIGKTTLARVLCHDHEVKEAFDLIMWVCPAGNYSKLDLAKQILQSAELPDDTNSFDRLQRRLKEAVSSRRFLLILDNVWNKDENENSYRDMWADVLAPLRFGRAGSKIVVTTRKRIVADLLNASKFVWLNGLEFADVWLLFKKFAFDNNDVDRHPELKEIGEQIAVKLKGLPLAAKVVGGMLKRKPSLTEWKRILKMEIYDNVSSTLELCYQNLQEHIQPCFAICSIFPKNWRFNRDKLIKIWMALGFIQFRPDDTKNQLEEDVGKEYFNQLVAQSFFHERKEGRRTYYYIHDLMHDLADNVSRIDCARVESVEFEKKDIRIPEICFVFFPTLAGALHLRMFKYCLASVY

SEQ ID NO: 37407 - protein, 147 aa, Oryza sativa
MADGGGGGEAGSGGSAPVCSFVRKPPKNIRKRPTAPAGSDDDEDGSGAIAAARAKKAPSSTSKLFFSSADGSSEPRRFQYESSRTIQASTDSRATATLETETEFDRDARAIRERQLKQAEESLKKNPSAPASSSGSGSGEVYKGIHG

SEQ ID NO: 37408 - protein, 611 aa, Oryza sativa
MSMSTAASSSASAVRPPPTWGAPSQRRLVEQHLASLPRGLPRAAHVRELHAQVLKQGLHLNPRAAARLVSAYALLRLLPSSRRVFDAIRDPHADAFLANTMLRAYALGGAPRDALAAFSAMPRRDSFTYSFLIKALSAAGVAPVRAVHSHVVKLGSVEDTFVGNALIDAYSKNGGFSDARKVFDEMPERDVVSWNTAMAAMVREGELAGVRKLFDEMPEKDTVSWNTILDGYTKAGEVEAAFELFQRMPERNVVSWSTMVSGYCKKGDLEMARVIFDKMPSKNLVTWTIMVSACAQKGLVDEAGKLFAQMKEASVELDVAAVVSILAACAESGSLSLGKRIHRYVRKRNLGRSTHVCNALIDMFCKCGCVNRADYVFDTETVQKDSVSWNSIIGGFAMHGHGDKALELFAQMKQQGFNPDAVTIINVLSACTHMGFVDEGRRHFSNMERDYGIMPQIEHYGCMIDLLGRGGLIKEAVDLIKSMPWEPNEVIWGSLLSACRLHKNVEYAEIAVNELSKLQPSNAGNYAVLSNIYAEAGQWSDMAKARMQMKGTGSQKTAGSSWVELNETFHEFTVGDRKHQDSDQISEMVDRLSSHVKHVGCVPAGHELLVQ

SEQ ID NO: 37409 - protein, 266 aa, Oryza sativa
MSWWKKSSGKSSSSSSQYYAGSDSSSFAGGGGDDRYGRAGSGNGRSPWTTSEEYPRYTSDDDNRSGSGSDDDDDHGDRNRRRGKKSNKKKSSSSSSSYKYDDDGGERDRSYSNYGGYGNNEGYSSSAPSGYNPYNNGGGYGGPSYGNGGGYGGSTYGNGGGYGGSSYGNGGAIVAGGGGGSAPASYGYGSNSGWGAPAPPRQEGGSGSAPTYLNVIYMTQPGSSSSQNENSGERRDNGGGGGGRNGLFGPTFQAVGGYMDRRFGFD

SEQ ID NO: 37410 - protein, 683 aa, Oryza sativa
MSSSSSSTTAASPAAAAADGGGTGEKPVAAPYGSWRSPITADVVSGADKRLGGIALAGDGRLLWIEGRPEEKGRMVIVKEDDKPVDIIPQEFAARTLAQEYGGGAFSVKDNVVVFSNYKDQRLYKQSTKTGVPVPLTPDYGGPDVSYADGVFDPHFSRYVTVIEDRRKSSLNPTTTIAAISLSNGVVQEPKVLISGNDFYAFPRIDHNNKRMAWIEWSHPNMPWDKSELWVGYFSESGDLTKRVCVAGSNPMLVESPTEPKWSPKGELFFLTDRGSGFWNIYKWVEHTNEVISVYTLDAEFTRPLWVFGISSYGFLGESNHIVFSYRQHGRSYLGVLDSDIGSVSLLDTPFTDLSNVVTGNDYFYIEGASATVPMSIAKVALDEDRTKVVSFSIIWSSSLDVVQYSSFFSAPEFVEFSTSSTGQKAYAYFYPPSNPNFQGLPDEKPPLLVKTHGGPTAETRGILDLSVQYWTSRGWAYLDVNYGGSTGFGREYRERLLGKWGIVDVDDCCSCARVLVESGKVDERRLCITGRSAGGYTTLASLAFRDTFKAGASLYGIGDLSLLRAETHKFESHYTDNLVGNENAYYERSPINFVDKFTCPVILFQGLDDKVVPPDQARKIYKALKEKGLPVALVEYEGEQHGFRKAENIKFTLEQQMVFFARLVGNFKVADDITPIKIENFD

SEQ ID NO: 37411 - protein, 466 aa, Oryza sativa
MGSMSTPAASANGGQVLLLPFPAAQGHTNPMLQFGRRLAYHGLRPTLVTTRYVLSTTPPPGDPFRVAAISDGFDDASGMAALPDPGEYLRTLEAHGARTLAELLLSEARAGRPARVLVYDPHLPWARRVARAAGVATAAFLSQPCAVDLIYGEVCARRLALPVTPTDARGLYARGVLGVELGPDDVPPFVAAPELTPAFCEQSIEQFAGLEDDDDVLVNSFSDLEPKEAAYMESTWRAKTIGPSLPSFYLDDGRLRSNTAYGFNLFRSTVPCMEWLDKQPPRSVVLVSYGTVSTFDVAKLEELGNGLCNSGKPFLWVVRSNEEHKLSVQLRKKCEKRGLIVPFCPQLEVLAHKATGCFLSHCGWNSTLEAIVNGVPLVAMPHWADQPTISKYVESLWGMGVRVQLDKSGILQREEVERCIREVMDGDRKEDYRRNATRLMKKAKESMQEGGSSDKNIAEFAAKYSN

SEQ ID NO: 37412 - protein, 182 aa, Oryza sativa; identical to SEQ ID NO: 34986

SEQ ID NO: 37413 - protein, 1172 aa, Oryza sativa
MLQRAASNAYSWWWASHIRTTQSKWLDANLQEMETRVKIMLKLLGEEADTFGKRAEMYYRRRPEVINHVEEVYRAYRALVERYDHLSKELHKANHTIATACPQHDVSLLQEQDDAEFTPIRIQESTTTVQEVLNPKGHARPCAPHFTKQNAQQEIDTLQKAILVLQTEKEFVKSSYETGITKYREIEKQIADMQDQVCHIQNEFDAHASIEDDEARALMTITALRSCQGTVANLVKIFEELVRVAAGESEKVNYLRQKLYAMNYIIDPSKGEVGTTNIAVKNRVYPNTQEILELQPIYEKIEKFFELNSESVVQEMAERVDELVDKVMNLELKFPKQSAQIKQLKEDNDSLKDRLDDLQDEIALRDDPSDLSEQLKLAEDELNRVNALERSVIEEEVLVSTVFSEVVSCITNISKAFGSIDPEDMTSLSAAVENDGEITSDDISTSLPEEEFRGTEEATTDDNLGRDRCRKEDASGVEGHDSLDGTDGIDDCKNGNEENFQSENRLIQEDLMDKRSIQASNNIDRIVIPGKENGFNNACEGKIDCSPSGNTKKYRDIGNDVIDNSVQGESLKGEHPPTVISQTHLPHSECLDTLTNKSDSDEKGSSVVVTVNSFGGSKRIQGLRIGGDENSMSGNSLIQEELRDDKSLKTPGYVNLVGSTNQHSLSDGSTTEEISLPKVSNSCFSDADMRLELCHTEEAISVEEWPKQDGQLIAPETMKSLNGGSKVDSSEKGGRTSLEHMNSIQDLKTSELVDAHSSRVYQQVPKVTTKSNNIASCIPHGELEMRSSDGREHTRQASTLSKPGSMSLRVNSSLVAERDAPSWQEFLLDGIEGREALLLDDYTLILRNYKETKRRLAELEKKNEQHPKETKTVIRELRNANSMKYVEIQSLRDLLDPSEDISSTHSKMGFNRSNHPLDTEISVLEGIDVRHTGVRKNTSPFEVKFRSEIDALVEENLQFLVRFSMACHRMQDFDSKYQELQKGMGDFEVKKTGEPDAAAESDPAEKKLRELRTELDVWFEQNALLDQDLQLKTMSLCRLQEEIAEALRASAETDGGRFTPYEAAKFQGEVLNMQQSSGKIERELQSALKRMRELEGKVNDGLQKLRESFDLSCRRSSLVEEESSSTSYHSQFKHFPTRTRVPLRNFLFGTKPKKKSIFACINPTLQKQFSDL

SEQ ID NO: 37414 - protein, 385 aa, Oryza sativa
MDENDDTCGFCGDGGELLCCDNCPSTYHQTCLSDQELPEGSWYCHNCTCRSCGNPLSEKEVSTFSAILKCLQCGDSYHDTCIDQEMLPCGDKQSNIWFCGRYCKEIFIGLHNHVGIENFLDNELSWSILKCNTDGQKLHSSKKIAHMTECNTKLAVALTILEECFVRMVDPRTGVDMIPHVLYNKGSNFARLDYQGFYTVILEKGDEILCVASIRVHGTKAAELPFIATSVDYRRQGMCRRLMDTIEMMLRSFHVETLVLSAIPELVNTWVSGFGFKPIEDNEKKQLRNVNLMLFPGTSLLTKRLDGITAAKSEEDKDAYNVSGLPNGKCLPSRKGNGHLELHDLDLLEAELNTEDATNASFRALKHECGPATWFNHAKLAVGEV

SEQ ID NO: 37415 - protein, 642 aa, Oryza sativa
MASGGGSSNWLGFSLSPHMPAMEVPSSSEPSTAAHHHHHHHPPAAAAAAGAMSSPPDSATTCNFLFSPPAAQMVAPSPGYYYVGGAYGDGTSTAGVYYSHLPVMPIKSDGSLCIMEGMMPSSSPKLEDFLGCGNGSGHDPATYYSQGQEAEDASRAAYQHHQLVPYNYQPLTEAEMLQEAAAAPMEDAMAAAKNFLVTSYGACYGNQEMPQPLSLSMSPGSQSSSCVSAAPQQHQQMAVVAAAAAAGDGQGSNSNDGGEQRVGKKRGTGKGGQKQPVHRKSIDTFGQRTSQYRGVTRHRWTGRYEAHLWDNSCKKDGQTRKGRQVYLGGYDTEDKAARAYDLAALKYWGLSTHINFPLENYRDEIEEMERMTRQEYVAHLRRRSSGFSRGASIYRGVTRHHQHGRWQARIGRVAGNKDLYLGTFSTQEEAAEAYDIAAIKFRGLNAVTNFDITRYDVDKIMESSSLLPGEAARKVKAIEAAPDHVPIGRELGATEEASAATVTGTDWRMVLHGSQQQQAAACTEATADLQKGFMGDAHSALHGIVGFDVESAAADEIDVPGGKISGINFSNSSSLVTSLSNSREGSPERLGLAMLYAKHHPTAVSLAAMNPWMPMPAPAAAHVMRPPSAIAHLPVFAAWTDA

SEQ ID NO: 37416 - protein, 333 aa, Oryza sativa
MGYARTVKAATAAAAAVLVAFGVRMAAPAAAGFVADELPRAQAAAATWLTPPYLYLVINAIILSIAASSRFQPNRPQAASADASLVRPAPVPVPVPVVAVPAPAVTMPMEVPVVPVPEAMAPEPIPVEVTVPEVVKTAPEAEEAEENFTISRSAWTPRRRSTAEAEAEHEALSPFADLTNSREKPLVSTRFGRKPVKASPEGSSRALGVSRPRKEQTLESTWKAITEGRAPPLARHLKKSDTWETRPGRRQSGSGGGEDAPPPATAMRKAETFNEAAGGGGGGKKVRREPSLGQDELNRRVEAFINKFNMEMRLQRQESLKHYNEMISRGSVY

SEQ ID NO: 37417 - protein, 104 aa, Oryza sativa
MSAPWWDNDYNGRTGSDSKGQESRVYVGNLPYRADERSLKDSFSNYGAVSSEIAVDRETGRSRGFGFVSFQDSKSASDAIKGMNGQDIGGRNVIVQEAQPRSRR

SEQ ID NO: 37418 - protein, 406 aa, Oryza sativa
MKLLQRVNPTAAASLTALAVVVLLTASASRPSFLRRFEPSIASLPRAARRAAPADCDIFRGEWVPATAADDGAAPYYTNATCGEIQEHQNCMKYGRPDLGFLRWRWRPERCELPRFDAAAFLDLLRGKSMAFVGDSLSRNHMQSLLCLLSKVENPREVPKTADPEFRAVRYESHNFTVAVFRSPYLVTANQSDPAGGMWDLYLDEPDAAWATAVAGFDYVVVSTGIWFNRPTMFYERGRLVGCYSCRLPGVPDLTLRYSLPLAFRTALRALTAASVFNGTVIVRTLSPTSHFEGGEWDKGGDCRRTRPTAASEARMSGLDVDFHAAQVEEFRRAEAAAAASGSAVRMLLMDATAAMVARADGHPSRYGHWAHENVTLYNDCVHWCLPGPVDVWNEMLLQMLLRHQS

SEQ ID NO: 37419 - protein, 270 aa, Oryza sativa
MDVVFVHGLRGGPFNSWRIADDKSSTTKAGLVESIDEDAGKEGTCWPREWLSADFPQARFLTVKYKTNLTQWTGASLPLQEVSSMLLRKLIAAGIGSRPVVFVTHSMGGLVVKQMLYQAKLNNYDKFLNNTNGLVFYSCPHFGSRLADMPWRMGLVFRPAPSIGELRSGSPRLVELNDFVRQRHSKGLLNVLSFSETQVTPIVEGYGGWALRMEIVPIESAYPGYGELVVLASTDHINSCKPVNKNDPSYADTLAFLEKILKSRLKESES

SEQ ID NO: 37420 - protein, 49 aa, Oryza sativa
MHLLISRINKHNNAMKGTLAMPYIWHHLKRGLFHCYTMTIRLDGFAWLF

SEQ ID NO: 37421 - protein, 477 aa, Oryza sativa
MPSSPSHPHVAVVAFPFSSHAPKLLAVARALATAAPSATFSFLSTADSLARLPATAVVPAGNNNLRFVEVPTDGDQEETWPVWRRMEMFVEAAEGGGLRRVMEAAGDAAGGVAVSCVVGDAFMSMAAEVGVPWVAVWTGGPCALLAHIVGDAIREDIGDDDDLHGARGDELLTSYPGLGSYRVRDLPFGGGGVGGDMHRVMTMLLGRVARRLPRAATAVAINAFPGLFPPDVSAALADALPNCLPIGPYHLLPGAAATQANDDDPHGCLAWLARRPVGSVAYVSFGTVAAPPPDELRELAAGLEASGAPFLWSLREDSWPLLPPEFLDRATKAGDSAAGLVVAWTPQAAVLRHPAVGAFVTHSGWGAVLEAMSGGVPMACRPFFGDQHMNARAVARLWCFGMAFDDDNDGGGKPSMMTRGRVAEAVASLLAGEEEGARMMRARARELQAMVVSAFEPDGESTKNLHKFVEIVCARRV

SEQ ID NO: 37422 - protein, 341 aa, Oryza sativa
MVIMESCVPPGFRFHPTDEELVGYYLRKKVASQKIDLDVIRDVDLYRIEPWDLQEHCRIGYEEQSEWYFFSYKDRKYPTGTRTNRATMTGFWKATGRDKAVRERSRLIGMRKTLVFYKGRAPNGHKTDWIVHEYRLESDENAPPQEEGWVVCRAFKKRTMQPPRSSIGAWEASYSYHDPAVFVGGGEHFKQEAAAELDGVAAAAGANAFLRYSTRLAELPQLESPPLPSQGSQAASAVVDGEEDNADSSRRPGGGGGAAAAVTTDWRAFDKFVASQLSPEEQHTCRATDDDDMAALLLLDGGGQEDDAGRWLGSAGLLSAVAADATTDCGLGTSCVPGDIN

SEQ ID NO: 37423 - protein, 467 aa, Oryza sativa
MGAGGVSEPQARRRRRLQQAIRAGGLHHLQQPRPQPRAGEEPRPVAGRAGHHRRRCRPQPAVLQPRHDQPRLAEPHVAVDGEREQAGDHHRRAPEAEVHRLRPLPAVLERRRLLRLHPVHQLLEPVPGHRRRDRRAHHARHGVQRRAEHLLHARLAGGVGHHVPHVPVQRAALAAAHRRRLEPLPAVDDPRHPAVGVGVADGTGEELPHVRAERHEAGGAPAAAAAGRRLLPETLEVGGLDAVQAPLDGRRHEGIDHGGRREPRELLVQRRAEPRRRPRHEQGSIEQRLAGEPPLSDHLPQGVEQHDERPPVGEEVIRRHRQREPAAREPDQLQRQREARVERHAHQPDRAVDLREVNGREGHGGVGHDELGTGVVAGDLGDVRRRVPHDAAGEGEEVGEVRRERGADGGHHGGDAARRGSVDGDEVDGEGAEDEVKVGDGEDGREAWRRARRPDKLPGGDLEVEAP

SEQ ID NO: 37424 - protein, 22 aa, Oryza sativa
MLLSAVVTKEETKACIQVSLFT

SEQ ID NO: 37425 - protein, 310 aa, Oryza sativa
MTKHGAVVVPVAAAAADAEHDEWMEKHPSALGKFEALAAAAKGKRIVVFLDYDGTLSPIVEDPDRAVMTDEMRDAVRGVAARFPTAIVSGRCRDKVLSFVGLEELYYAGSHGMDIQGPTNAAASKGGDEEEESVLCQPAREFLPMIGEAYAALVEKVEGVIPGAKVENNKFCLSVHFRRVDERRWGAVADQVRAVLRGYPRLRLTQGRKVLEVRPAIKWDKGEALRFLLSALGFSAAGDVEDDGDDDDAFPIYIGDDRTDEDAFRVLRARGHGAGILVSRFPKDTCASFSLRDPGEVKDFLRKLVTCAAA

SEQ ID NO: 37426 - protein, 175 aa, Oryza sativa
MKERVRRRRIPAFGEWNYDGDGDLGGGGGCYGYGYRDGDWPVTQYFDSAMQARGLVISLPPSPKPPKKAVKWIDSGALGEEEVVDEKQRQRQHKVVVGLAVAGGEHGAARKQGKQSRVADGGAHAAMGYKGCRPAVVKAVDRDLYEIPPDMLCNKPRKRVTRSLWMGCLGLSCVA

SEQ ID NO: 37427 - protein, 874 aa, Oryza sativa
MAPIMSGAAAAAGGTGGAVPLIKNATSASQMSRGKAGTGAGAVVCYSPMMVTAYGIWQGASPLDFSLPLFLLQVAIIVATTRLLVILLKPFRQPRVIAEILAGVILGPSVMGQVSTWAVKVFPERSLLTLETVAHLGLLYFLFLVGLEMDVNTIRRSGKKALIIAVAGMALPFCIGTATSFIFRHQVSKNVHQASFLLFLGVALSVTAFPVLARILAEVKLLNSDLGRIAMSAAIVNDMCAWILLALAIAISEVNSSAFSSLWVLIAGVAFVLACFYVVRPLMWWIVRRVPEGEAIGDVHITLILTGVMVAGVCTDAIGIHSVFGAFVYGLVMPSGPLGVVLIEKLEDFVTGLLLPLFFAISGLRTNVTKVRDPITVGLLVLVFVMASFAKIMGTILIAVSYTMTFRDGVALGFLMNTRGLVEMIVLNIGRDKEVLDDESFAVMVLVSVAMTALVTPVVTTVYRPARRLVGYKRRNLQRSKHDAELRMLACVHTTRNVPSIISLLELSNPTKRSPIFIYALHLVELTGRASNMLAAHHSASNPGGASDHIFNAFESYEEMVGGVSVQALTAVSPYQTMHEDVCVLAEDKHVSLIVLPFHKQQTVDGGMEPINASLRGFNESILASAPCSVGILVDRGLSAAAARMAAVHHVALLFFGGPDDREGLAYAWRMVENPGVCLTIVRLIPPGYTAPATSPPQPPMPAAHSRAINVVPEVAKSERQMDEEYLNEFRSRNLGNDAILYVEQVVANSEETVAAIRSQLDNAHELYIVGRHPGEASSPLTSALAEWMESPELGPIGDLLVSSEFSKMASVLVMQQYVITAPLPPPVALAGPPTDDPVRQYLTNANQRPSVAIGGNQMGAAGRGGWSGGAGGY

SEQ ID NO: 37428 - protein, 289 aa, Oryza sativa
MAFRRRSCIPAALAVFFLLLAGQSTAGEDQTAVIWGRHGDEGTLREACDTGHYNTVIISFLSVFGHGRYSLDLSGHDLRRVGNDIKHCQRKGIVVLLSIGGQGGDYSLPSSRSAADVADNLWNAFLAGRRKGVLRPFGNAAVDGIDFFIDRGSGDHYDELARKLYSYRNNKGKGVMLTATPRCRFPDRRLEKALATGVFARIHVRMFGDDVNCTAAPRESWEKWAAAYPASQVYLGLVASSEQDPGYLSPKPLYYTLVMYIRDRLNYGGKMIWDRYYDKKTDYSIGKLI

SEQ ID NO: 37429 - protein, 523 aa, Oryza sativa
MATVSAGDFFFGIISAGDFAVQFCVRRWKGKGMGEGDELDEVLGDGPGGDAAEESPDAGHGDEEGDVGVAHGDAHLPQVVHHGEPRADAHQERREHEPEVQRHERLRDRVLLPEHRLLAGAARLRRRRRRRLRHEERGGRALLRLLDVGVRELPRLHPGLPRHVRRHRGGGREEHKEDGHEDGRHDPAASPDAGEVGGEEVQRDGDGERVDCGEAPPILLLLLPPVRAAAANLPLAEEHHGDRAHRGRHDGEHDEERGRVVGEERGADVGEDRRAEPHIALEQPGHRPPAPAEVADAGDEHGGVHPRRAVPAEAEEDAHLPVGQRRDGPGHDEPLRAVAEEALEGADGEEKPGGDAVGGEAGEEAERLADVLGDGEAVELQLGEAHERLDGVGVVGEGVVVAGDALHPHRRHEPQPPPPPRPRHRVQRRRHHRAGEVFVGVVAVAVAWTRPRRRDGREAGSWGGETCPFPRDCWCCVSYSAGCGGVAWEFASWLNKKGFSRRGGVYGSFFACKQRKGGDEEGW

SEQ ID NO: 37430 - protein, 92 aa, Oryza sativa
MDVQLRQCFHSLQKIHHPVTIQHTMMEMRGKTLRKALMRTVLEKQLRGSLMRGTGSITQGSPRRTQIRLLTVASICSLLETINVRSFQSYLL

SEQ ID NO: 37431 - protein, 293 aa, Oryza sativa
MAGGPAAVSFLTNIAKAAAGLGAAASLLSASLYTVDGGERAVIFDRFRGVLPETVGEGTHFLVPWLQKPFVFDIRTRPHNFSSNSGTKDLQMVNLTLRLLSRPDVVHLPTIFTSLGLEYDDKVLPSIGNEVLKAVVAQFNADQLLTERPHVSALVRDALIRRAREFNIILDDVAITHLSYGIEFSQAVEKKQVAQQEAERSKFLVAKAEQERRAAIVRAEGESESARLISEATAAAGTGLIELRRIEAAREIAAELARSPNVAYVPAGDNGRMLLGLNAAGGVSLVTDVALLN

SEQ ID NO: 37432 - protein, 400 aa, Oryza sativa
MNFRGRTPVVSSTQGPAPGKGTIDFTPNFTSKFDGGGWESGEFDSEHGDRQYNHRVPKLDFPKFDGSDSQEWRMKCEHYFDVNNTFPGLWVRIATIYFLGRAASWLRSSRAHLRFPMWEDFCAAVSAKFDRDQHENLIRQMDSIKQNGTVWEFYERFDELMNQLLVYDPTLSSKYLTHRFTKGLRREIRNAVLLQRPKDLESALAVALLQEEVMENSPPTTVREFKKSDGSSSLKINGKGAWPLPLPPGKGGGVPVSNRADERRSSDTVRSPTSLTEKVSALKSYRRAQGLCYVCAEKWSPNHKCASSVQLNVVQELLCLFLEEDSHVESENAGQNGSLTRELMAISLQAVQGTEPDGTMRMLGQLQGKELLVLVDSGSSVSFISSQIAEGCSMLLATSC

SEQ ID NO: 37433 - protein, 189 aa, Oryza sativa
MAATHPLLLLLLAAAAVVVLVVAATPAAASGSGTSTPTAYEMLERYDFPRGSCRWGWRGTSSGRTGASRCTSRGTASSCWRGRGWSGTAPASPAPPPPAGSRRSRASTSRCSSSGSPSARSTAPATLSASTSAPSPPPSPSPTSPTARTAAVTTTSPPPPPPPLPPCDWVEMGSSLINLGDLAGVITCN

SEQ ID NO: 37434 - protein, 295 aa, Oryza sativa
MTRPSTRSQSHDAPEGSRSRGDEPPPPPTMAEVLMAVERNREAENAVLQQIAASAAATATHIAQGAGGGGHHAAGGLAEFQRTQPPVFTRSDDPLDADDWLRTIERKLTLIRCPDAEKTNLAAEQLQAAAGDWWENFLAMQPDGRVVTWAQFRDAFRAAHVPKGIMDLKQCEFLSLTQGNKSVMEYLCEFNHLARYAPDDVKTDTRKQNRFMNGLSAEMQLELAAHSFLDFQDLVNRSVVVESKMKNLEAERKRKKAAQISAAGGSQKPRGWQPPPPRFQAPPPPRPQRFVPRPP

SEQ ID NO: 37435 - protein, 99 aa, Oryza sativa
MVVIANLTTPCHHCTQPKTPLYSCTENMHKLYFISSACALLLYFRQGEMSDLWREAQCLETVICTVLSNLEIVVCYCLLPLLVVLYCFRVLDHKYLTSL

SEQ ID NO: 37436 - protein, 112 aa, Oryza sativa
MIPKNRGWRIREGARGRTTPVTAVLQLLPTPGGVRQVCTLTSTVSASSSSRSPPAGATCLSHARAGRLAFCSPRRGGQATRSRWILLPPGRLPCQQLQVEKRLVKLKQSHIF

SEQ ID NO: 37437 - protein, 80 aa, Oryza sativa
MGENARARAKLGFRVVSRRRRGRNPSCSPILRSPRRPRGARRSDQPGFRPPAPLRREVYSYPLPLPSRLCISARFDFAVA

SEQ ID NO: 37438 - protein, 221 aa, Oryza sativa
MALSAARRLSSAAGGDAARPGTLSSLFAPRSSPKPRAPRPEPGDGPPQERRKPRARPRPRSRQPWGEEAAALLRRFYDGGYLPGPDLSVAPHVLSPDVVKGAAERFGHDHQVVAKWLSGSDLKKVALFGCPSVERRTVFASKRLRAFFKIQEAKICGSCKMRNSCQFVNQEVSRHDKVILSDTMRILTLFVLDTCPQQLKVTPELKASICKLVKDTINLSQ

SEQ ID NO: 37439 - protein, 81 aa, Oryza sativa
MTRISRRRSKPSPPSTVYTPFLTKFSILSSRFPLVLCFFTAKYPPSASSFFSSSSLTVLTKKSIFCSPLDGCCDLRCPYAE

SEQ ID NO: 37440 - protein, 226 aa, Oryza sativa
MLSKPIHLSETEESGISCVGVKSVDLRRNAKSEGSSLGPYRRWGAKAWGANRTPTQVASHAQKYFLRQTNPNKKKRRSSLFDMMATDMSPAPNCPVLPPSMGKLHDMVAMTKQLQNSSLEGVSSSSTVNLAPQVARDLPPPIPSFKATNVDSSLSKMNHMDGFLRAPMLFRPIPRIAEGASSSTPATASIADLEFQANLTACSNALFASPRRSQRRQILQQRRIWI

SEQ ID NO: 37441 - protein, 495 aa, Oryza sativa
MAIDQPIKKRGRPPGSKNTKNKMEQKMELVHQRLALLDSSSGSDRDDDIGPRAIIIDCDEDDTDDVMEVVPLKMLMPKEVENEQRTVPGIPQTCNTQNTSNGRTNTTEVPVKGQNKCASYLPKKSSVQAFCGSAMKRAQEIQTKLPAEHPSFVKHMLHSHVVSGFWLGLPAGFCNKYLPKHDTDIVLEDENGNNHNTNYLGGKQGLSAGWRGFAINHDIKVGDVVVFELVSTTKFKVHIIRDKNISPTDRAPGLKSFYACKKRKISKEATDNATKPKEDPETTRVSSKVAHDDTQNLVHEAIDGIRFSDSEMSFDDVMSYSNFNIVVDGLVIDCKFPDHQRRTYYELCCAQKSFLHRHLLRQLSLTLVVGVIMETINIAEGIRACGAGTSSQEDFLIWKKTLQSFDLLGMNVAFLLKRVDDILGLPEQPRDPSECSKYNELKLERSRAGEKVEALESMMLTVKDVLKKIDAEMEEMESSVRNHDIALRKIATAPW

SEQ ID NO: 37442 - protein, 454 aa, Oryza sativa
MDEVWCSLDSMPADIAAGIHQPPPPDLHDPSFWPAFADCAASFIAGGGGDNACFDELMAGGSSGDTRMVAMDDGDDGSGFLVGDAEAEHLMLSSSSPSSLSSGRSLSIDSAGSMSSFSLDAAAALAMSTLAVPHPYPPPVAHGMFASGDGGGGGGGAVDDHEDAIMRAMMAVISSASASPSSSGGSASSPTPFSRDSGAHHQPAGQPAMAAPQQPRGGNGGHVVVKSSSSSGGLAVPMDQKPGGGGRGRQQEEAAAASATNSSQLYHMMSERKRREKLNDSFHTLRSLLPPCSKKDKTTVLINAAKYLKSLETEITELEGTNTKLEKHIAGGGGAADAAMRARRAQQRAKVQISKAADSQSQQLVSLTVMVMVECDVVELVLHILECLRWMKEISVLSVYADTYSPQLLLKAIANIKLQIVGGDWNEASFHEAMTKAANDATISCAPLAITAAQ

SEQ ID NO: 37443 - protein, 269 aa, Oryza sativa
MPPPSPHPPHRNGNHVPAPSGESFAKFFECWISEQSRDLAALRSAASAATNPAAPPDDAELHRLVNRVLGHYEHYYRTKSAAASTDVLRMFSPSWTSTTENLYLWCGGWRPTAALHLLYSKSGAQLETQLPVFLAGGGLGAGDLGDLSAEQLQAADQLQRITVSKEREVENAAASAQESLATVKMVELAGGGGMDAEGMEMEMRSKADGMRRVLEMADGLRLETMREVVALLRPSQAVHFLIAAAELHLAVHEFGRRKDGDGAASPPPA

SEQ ID NO: 37444 - protein, 349 aa, Oryza sativa
MEEEKAAAYYDELSRKGEGARRFKQGLGFSSSDPQSTSFPSKPPSTSSSFLSGFVRAGATPAPAQPTKQPPPPPPPPHEPSRTGRHSRSPSPSRRHRTRSSSPSRSRRHRSRSRERRRRSRSREREREDRRASRRRSRSRSRSRSPSRRSGRSSYSENRHGDRRRDDGGGRRGSSKGRGGREGGKVDYSRLIEGYDRMTPAERVKAKMKLQLSETASKDSTLGNATVGWERFEFNKDAPLDEDDNDVEVANDDASLVKHIGKSFRLSAVQSKHEDTVRDAHENAIFGVPAYPIVDTETTEAEPETNDESEKAKDVEAEPSSSLISDKVLATQSGSWRERAQKLRQNPNA

SEQ ID NO: 37445 - protein, 513 aa, Oryza sativa
MQQRNNADSHRCAPRAPGYLRTAAALAAVVRSLLDEPRPRPRPGSQTLHAQLLESGLRPTDDLSVKLLLLHLRCGSHHNARAVFDGMPAPTHAAHNYLAAGYSRLGLPEEALGIVRRLARCTGRLNVFVLSMALKLSAALALPRAVREVHARVVRSVVESDDVLFAALVDAYVKNASLRYARRVFDVMPVRTVVSSTALIVGCMNEGLYEDAEEIFNTMDEKDVVVYNAMVEGYSKTEETAESSMEVFKSMHRARFRPTVSTFVCVLGACSLLSSPEIGEQVHCQVIKSSLSSDIKAGSALLDMYSKCGRVDDGRRIFDRMAERNVITWTSMIDGYGKNGLSDEALQLFEQMLRRHDDAIRPNHATFLSALSACARAGLLSRGQEVFQSMEREHALRPRMEHYACMVDLLGRFGSVRRAHDFIRGMPARPSSDVWAALLGAATLHGDVETAGLAAREVFELSRAAGRQRPGAYMAMSNTLAAAGKWDGVRQVREMMRRRGVLKDAACSWVGSE

SEQ ID NO: 37446 - protein, 337 aa, Oryza sativa
MHLHAKTDSEVTSSMAASSPPRAAYYVQSPSHDDGENKTAASSFHSSPAASPPRSLGNHSRESSSSRFSAAKSGSSRRTAAAGGDGGKGGVAAGRGGGGGGGGGRRSPWMKEAAIEEEGLLMEDDDADGGGGGGGGFSSLPRRWRYALGFVGAFFALFFFFALILWGASHNQKPVVSINSITFHNFVIQAGTDASLVPTELSTVNATVRMTFRNTGSFFGVHVTAEPLTLYYYQLLMASGNVKYFYQSRKSSRHVAVAVVGDKVPLYGGGSGLSSTPVKGAPPAPVPLQLAVRFRSRAFVLGKLVKPKFLTNVQCSVRLDVAKLGKPVSLNKACSLV

SEQ ID NO: 37447 - protein, 176 aa, Oryza sativa
MAAASSSTSSAGSAAPAHAPAAGGAGGGGSSGVPNHRTRFGDTTLTKVFVGGLAWETPSKGLQDHFQQYGEILEAVVITDRETSRSKGYGFVTFREPESAREAVRNPNPTIGGRRANCNIASMGPPRPSPSRGRAPRGSLFPDQPHMGPQPYMGGRLPPQHMTAPPQQMYYHPQFG

SEQ ID NO: 37448 - protein, 279 aa, Oryza sativa
MNQERNTNNDVGHEKQLNLQMSLNYFPVENLDRLARIGNPSAVSTGLRLSYENNEHTSITSGSGNMSSLPIMASFVDEVMAELDKENKEFNCYFGLQVEQLVKCMKDVKQRQMVEFLASLERGVGKKLKEKELEVEAMNRKSKELNEQIRQVALEVQSWQSVALHNQSVANSMKSKLMQMVAHSSNLTREGSGDSEVDNTASSQNVNAVPGVFFQSGLLGINSMADGGLGACRLCRMKEAAVLVMPCRHLCLCADCEKNADVCPVCRFPKSCSVEINMS

SEQ ID NO: 37449 - protein, 130 aa, Oryza sativa
MARGDWVAAERGGAAGRLGVASTSCGGMAMGAVEKWCIGGWGSRGGTTRRRPTRSRRRGRWGDRTSALGPAPWWLGSGGDGDAAHMAWVTARPLGGEAKTSARQRPGVSAQATARRQPDSAARRRGRGRP

SEQ ID NO: 37450 - protein, 440 aa, Oryza sativa
MDELDYYRLQQQIEKGEGCSAAAANYPEASYASSSTPFSPYQLLHSARSQITVWASYCRKRKQGEGDTTHCTMLPLEIRLDISKRINGIVNDLQKAGNSVRGILLPGVSHPALTSNQRQSKIRNTRLTTSVPIELKVYGRDADRDRIIEILLNEESSDLRVLPIVGIGGIGKTTLTRFIYSDRRIIDHFDLRIWICVSTYFNEVDITREILEHIFEDKQDKQEFKDVSNFNVLQEILLKNIRDKRFLLVLDDMWKEKDMSGWDKLLAPLKHSQVTGCMVLATTRKNSVAEMIGTVNAFQISGLDEKEFWQFFKACAFGKENYEGDPSLQSIGRQIAKALKGCPLAARSVGALLNRNVSYEHWRTIRDKWKSLQIKDDDFIPILKLSYDYLPSHLQRCFSYCSLFPEDHPFSAATLVQVWISQNFVQCEDIGKGLEETGLQ

SEQ ID NO: 37451 - protein, 286 aa, Oryza sativa
MGIPRALLLLLLHVAVVVVLRSLPVSSADLYALVYKGCSNQSFPGGAVPPTVAALSSSLSDQSASAKLYKTSSSSSASSTSVFGLFQCRGDLSGSDCAACVSRAMSSWSEVCGASVAARVQLTGCLALYEISGFPQVSGTQMLFKTCGTGGGGGTDFEMRRDTAFAQMEASVGGGNGGFYATSYQQVYAMAQCEGDLSSGDCGQCVTQAVQHVEVECGGAPSGQVYLEKCYISYSYYPHGIPHGGGIGGQQTAKTVAIVLGGAVGLGFVVICLLFARSLVKKKEDY

SEQ ID NO: 37452 - protein, 447 aa, Oryza sativa
MLSSKHQDYITCFMASPAVYVIATIIFVVAFAALLVKVYRGAESCGAAVAAEMKATAHYAVVPDAAMRSATVERFLWEMAHEKPIRFTPRQLAGFTRGYSARLGAGVFGTVYGGALPNGLAVAVKVLRGGMDRRRSEEQFMAEVGTIGRTHHINLVRLFGFCYDAAVRALVYEYMGNGALDAYLFDLSRDVGVPARRAIAIGVARGLRYLHEECEHKIVHYDIKPGNVLLDGGMTPKVADFGLARLVNRGDTHVSVSGMRGTPGYAAPETLMQSGVTEKCDVYSFGMLLLKIVGRRRNFDEAAPESQQWWPMEAWARYERGELMMVDDAAAAINHPSDEICSGSDGEAVVTVAEADDERRCKEAVVRMYQVAFWCVQQRPEARPPMGAVVKMLEGEMDVAPPVNPFLHLMAAPAPVPNPWATTTASSGNAVSENVVVSHGSDGIVSL

SEQ ID NO: 37453 - protein, 312 aa, Oryza sativa
MLEARSLSYVDGPVPIPNDDPFLLANVKRIQICDTDEWTENHKVLLFWQVRPVVHVFQLSEDGPGEEPGEDDTLSSFNEWALPAKEFDGLWESLLYEVGLKQRLLRYAASALLFTEKGVDPCLVSWNRIVLLHGPPGTGKTSLCKALAQKLSIRFKSRYSMCQLIEVNAHSLFSKWFSESGKLVAKLFQKIQEMVEEESNLVFVLIDEVESLAAARQAAISGSEPSDSIRVVNALLTQMDKLKSWPNVIILTTSNITTAIDIAFVDRADIKAYVGPPTLQARYEILRSCLQELLRVGILTHTQGGNSLWPTP

SEQ ID NO: 37454 - protein, 64 aa, Oryza sativa
MVEKRRRSPHPLLSPLPLPPGRFASRRCHRSRPPSLPSHGLQEPPAGVILTSTSALAASMVAWG

SEQ ID NO: 37455 - protein, 794 aa, Oryza sativa
MPSNLHACHWHLHSMSSSMAISLLLLLLLLGAGHMTQPTAAALNQDGVLLLSFKFSLLADPLASLAGWGYSDDTPCAWNGVVCMAFPSSSASEAARVVSVVLPNAQLVGPIARELGLIEHLRHLDLSGNALNGTVPVELLRAPELRVLSLAGNGINGALPDQVGQLRSLRALNLAGNALSGPIPANLTLLPNLTAVSLANNFFSGALPVGGFPALQVLDVSSNLLNGTLPPDFGGAALRYVNLSSNRLAGAIPPEMASRLPPNVTIDLSYNNLTGAIPTLAPFTVQRPTAFAGNAELCGRPLDSLCASAADPPINGTARSPPAIAAIPKNPTEALPGDDTGAPASGSGQQGRMRMATIIAIAAGDVAGIAVLVVVFMYVYQVRKKRQREEAAKQRMGVVFKKPEPDESPDGIGRSLSCCLRKKAGDESDSTEEVTDTSASKEGVVAAKAKTDDKKGKDGGGGAVLVTVDGEVELEMETLLKASAYILGAAGSSIVYKAVLADGAVLAVRRIGSDDAGVRRFSEFDAHMRAIARLRHANILRLRGFYWGPDEMLLIHDFAANGSLANISVKRKTGSSPISLSWSSRLRIARGVARGLAFLHDKKFVHGNVRPSNILLDADMEPLLADLGIHRLIRGGDTLKPAAAAGAGRFGSKRSAKSLPDLSPPPGASPLAGPSGSGDTAVAQYQAPEGVKNPKANAKWDVYSLGMVLLELVAGRALTSLELCQWSSAEESGQQVFRLADAALRGEMAGREEALASCLRLGFACCAMAPHKRPSMKEVVAAMDRIPSPSSSAQ

SEQ ID NO: 37456 - protein, 165 aa, Oryza sativa
MAPNSGNIVGTYSTGDIVIPSPKYIFNKSSTCNSVRLDMTPSGIVFMLVPCRYKNLSLMRNPRHLGTSDIEKLYDKLRYSKFVKEHSSSGIFSSLFQLKSRGNGMPASFGSRISLRSSTNRRKLLFSRNFEILVTSFASRSSWFIPSLLAICSLMFLEAVTKMTN

SEQ ID NO: 37457 - protein, 106 aa, Oryza sativa
MVNTAAVAAAKGSRGSGLPLASLNHISIVCRSLQESLTFYTDVLGFSPVRRPGSFDFDGAWLKILTACQGKQRSILKIITSPSRYVWYTRFGSYHYKYCNTSHSPS

SEQ ID NO: 37458 - protein, 202 aa, Oryza sativa
MWALTPNSGGSSCLPARRTPPPLAAAGEAGSLAAGPGRWCSWRRRQPAERWPKLAVSASGRKSKGGRDEGGGDEPKKNKAASSSSSGKGGASAPSGDVSNNELQSNDTMYVPGNLSYWRDVRASFVVPKVQTVDAHTLPQAATDAPVHCLPRKWAHSIPMPESGCVLVAAEELDGNGTFERTVILLLRLVQEMPMTAHLASS

SEQ ID NO: 37459 - protein, 439 aa, Oryza sativa
MAHPHPRPLEDDDLLAEILLRLPPRPSSLPRAAAVCARWRRLVTADPAFLRRFRAHHRRGAPLLGFFHSHRVSPSFVSTMDPPDRVPAAVGAGGRFSLRFDDFRCRILGCRDGLVLAVNPVMPRLRGCFLVWDPVSGDQRSVAFPPECDQGQTEVRNGAVFRLPGGGGGFRFQIVLVGTRHQYEAIGCIYSSETGKWGDLIATPLPHNLTRISLAVPGVRIGDSLYWLISGIPGGILEFDLNEQRLAVIDDVPMAVSDGYRRFCVVPAADGGLGFVFMSDLGSQFWRRKNDWDDDVSESGWVLEKTVQLGELLSLSPTERKGSPIVMGFSEDYNVIFLKTINGLFMVHLESMEFKRILKDCAALFIYPFASVYTAGMSIGDGHDEDGQSPAMPVYNPLNPTFSIAHLLFCSYQINPLYPFVARLGHGLVVRGLSVTLIF

SEQ ID NO: 37460 - protein, 214 aa, Oryza sativa
MSDHGDEMTCRRQRRRRRTSPAAPAPPPVLPPDNDDLIQEILLRLPSHPSSLPRASLVCKQWRRLVSDPAFLRRFRARHRDPPLLGVFKDELHHPVFRSVLDPPDLIPPDRLALRLDDYRAASLLGCRHGLVLIFNYNTCEFLVWDPVSGDRRRVAVPQELDGGERSVMNGAVLCAAGDDGHVHGGGFRSCHFKVVLIGASKMDGRIFASITHR

SEQ ID NO: 37461 - protein, 384 aa, Oryza sativa
MDPHAGAVASGESAGDEDDGSGEHETHPTSPAPSANSRPRKRSRLTAAADESTTVDDCSAGGSGSGSGDGGGGGGESVGAWPYDESAARDELVTLIVSQDLPVGIAGSASFEAMVLQAFCPQFERIDNAVTIRDILVFHEDHVAGLKEEFTGGDLSFALSCEIWGTSYHRMSYLCVAAHYVDGDHILNKRVISFKLIDGAPTAEAMARRILDVAMEYGIENRIVSVTLGDGLADAETMDALAPLLGWYTGGFVFLQRCIFSILNDIVRAGLTEMAEPLDAIRSAIAYVSSSEANFAEFEKCCVERGQKARKLWPDSKVRWDSTYDMLKEVLPYKEVLTDFVNGSMQQGFFPSTIGRSSVYFTSSSRSFIRLLPSCLLFTVRHLP

SEQ ID NO: 37462 - protein, 742 aa, Oryza sativa
MSVQEDGAARPEPDVLRRHDSLYGDAEKVSNNKRHGAGGSWARTLQLAFQSIGVVYGDVGTSPLYVYSSTFPNGIKHPDDLVGVLSLILYTLILIPMVKYVFIVLYANDNGDGGTFALYSLISRHAKIRMIPNDQTEDANVSNYSIEAPSSQLRRAEWVKQKLESSNAAKIALFTITILGTSMVMGDGTLTPAISVLSAVSGIREKAPNLTQSQVVWISVAILFVLFSMQRFGTDKVGYTFAPVISVWFLLIAGIGMYNLTVHEITILRAFNPKYIVDYFRRNGKEAWVSLGGVVLCITGTEAMFADLGHFNIRAIQLSFTCVLFPSVALCYMGQAAYLRKFPENVGDTFYRSIPAPLFWPVFVVAIMGAIIASQAMLSGAFAILSKALSLGCFPRVEVVHTSNKYEGQVYIPEVNFLIGAASVAVTLAFQTTANIGNAYGICVVTVFSITTHLMTVVMLLIWKVRLPFIAAFYAAFGLAEFLYLSSILSKFAEGGYLPFCFSLVLMALMATWHYVHVKRYWYELDRVVPAAETTALLARRDVRRVPGVGLLYSELVQGIPPVFPRLVDKIPSVHAVFVFMSIKHLPVPRVAPAERFIFRRVVGADAGAGHRLFRCVARYGYTDQLEGAKEFAAFLLDRLKVFVHEESVFACSRGDNDDDDAMRRAQAMAEEEKRVIDAEAERGVVYLMGEANVTAAAGSSVMKRIVVNYVYTLLRKNLREGHKALSVPKDQLLKVGITYEI

SEQ ID NO: 37463 - protein, 343 aa, Oryza sativa
MQEALLPPAHPGRFYSDFGPKPFGSGDQRLSSPNLLTNGGDLFYGCYSPFSPTRVLSPPPPRRAASFSHCSSSSDSVVDDGDGAGAAAATEHRLHLAHLALQYQEMANRFELCLSHLADAADEAAALRQENAELRVANNDLACRIAKFGGRQSSAIALAGDLRRLRLPKEQTVPALPPPPQSPPAALMNPVAVPEKQAVLPKSISIRSTGYQKLNQGGKHRVSKPVNVGSQRVFVGIDGAEGGEHKVGVKKEEPPMGGLEFEVYNQGMFKTELCNKWEETGACPYGDQCQFAHGVAELRPVIRHPRYKTQVCRMVLAGGVCPYGHRCHFRHSITPADRFSFGH

SEQ ID NO: 37464 - protein, 327 aa, Oryza sativa
MATNDRFSDLLWMPHCQHKVSKIWDSPTNCINIRLHRVGIPYHSLCQTALENLGFFQIARMKEINNDKYLISALVERWRPKTNTFHLPVGEMTITLQDVSCLWGLPIHGRPITGQADGSWVDMIERLLGIPMEEQHMKQKKRKKEDDMTMVSYSRYSISLSKLRDRFRVMPKNATEREINWYTRALVLDIIGSMVFTDTSGDGVPAMYLQFMMNLSEQTEYNWGAAALSMLYRQLSIASEKERAEISRPLLLLQLWSWSRLPLGRPVKAMKITKEREEEDEQEELDYCLVFGAKWCLSHEFRAPHNAGTEYYRSQINLIREGVIVWQ

SEQ ID NO: 37465 - protein, 378 aa, Oryza sativa
MYATKPLSLFKSHPEAATQPPPDGRNSGYFVVKGPDDDGGGGDDETCCWGTCGGSRVRDLPFPQNRVLTVRYTEQHGESSTTYADAVVFVPVPDLPLASNRYYAVVAAGKHKGLVRACSREEDMTTLCFCRCINDAKPRVFDPADVYQQVEIVQRRRGRFTARSVAADGFPYFLYRKKYWRVYASKPKHFDLGEAPGLNAALRSRQLALDAFPVTTTAAVGKWYAPFFLVKESGVSPPEQMDRATLYEVSLEQRWEAAAHGHGDGYAGKLDSKRVLIGGSVEGRQEGGGRHGDDGYVWFRAAAAAGGGGQRVGLCASLWERMRWEEYRGGWVDEHEGAGEVAGGGSVLVERFVVKRMDGSVAVAVDFVHFNKAREKLV

SEQ ID NO: 37466 - protein, 318 aa, Oryza sativa
MAAAALYKDAAAPVEARVRDLLGRMTLREKAAQMAQIERTVASPRAIAELGAGSVLNGGGSAPLPRASAADWARMVDGMQRHALSSRLAVPILYGTDAVHGHNNVYGATVFPHNVGLGATRDAELARKIGEATALEVRATGIHWTFAPCVAVCRDPRWGRCYECYSEDTEVVRSLTTIVSGLQGQPPADHPHGYPFLSSPRVNVLACAKHFVGDGGTDKGINEGNTICSLEDLEGIHIRPYPDCISQGVATVMASYTQWNGEPLHASRYLLTDVLKGKLGFKGFVVSDWEGIDRLCEPRGSDYRYCIAQSVNAGMDMI

SEQ ID NO: 37467 - protein, 406 aa, Oryza sativa
MEGSGVEGIVIAGAGLAGLATALGLHRKGVRSLVLESSATLRASGFAFTTWTNAFRALDALGVGDKIREHHLLYERLLAFSASTGEPAAKLSLKMQGKSGPHEIRCVKRNFLLETLENELPEGTIRFSSKIVSIEEDGNVKLLHLSDGSTIRAKVLIGCDGVNSVVAKWLGLPKPILSGRSATRGLAEYPAGHGFGPEILQFIGQGFRSGVLPCSDTSVYWNYTWYPSPDDGDAEESVAKMRSYVVAKLRAARIPAEALDVIERSEMSDVVSSPLRFRSPLALVRGSISRGNVCVAGDAFHPTTPELGQGGCAALEDGVVLARCLSEAFLADGAEHDPGYEAVKAALEKYAEERRWRGIRLTTAAYVVGFIQQSTNPVIKFLREKFLSGLLAKTMIAMADYDCGKL

SEQ ID NO: 37468 - protein, 607 aa, Oryza sativa
MLPLHSILKKYTKHTSVKMVKEKHGDPKGTEVIEVCRKSVKRVKFSEVNDVLGINKQNICKLFSDALASSSSSSTDMSSEGDKHIAAESCSSHMPETATKEASKSTDHEDSLELTSTQLSSNLFDLNEALPESTDLNYPYVSNPEEPNHEPRQHEPLDSDVQVIDEGGQNQQDLSLDSHGLQCQSVPESGLERARSSISPGTFLHGEFMEVSDTFFVGSSRKLTELAESHGDCSSGSVKDAMTKGKSPCALPNHTVQDSFQQHQRYYAFNLNLGGSQPSNEGEVPPQDCNASAGAASSSHAEMGVQQGCRPAPGQTVRLMGKDLAVSTTRGEYVSGTHSYTEDHPTKLFLELPRQGRPYLSLQAQSVPNVSANSASPSQSHIRYTAPQNLSHSFPMANALSGDRLQYDDRFSYLSGSQHHGNVLLGSPSLTSHGSAALRQNLPYVWSRYSDPSSSSTASPSAPILPTTAQHVTPSSVYHANLPRSYGVVSAGSSVHPHNSPSFTFTRPRRIVEEASGSRRDAACPSRNAENVAARAAIPEMPSSSSGGRHARRTGPMKLTPGAKHILMPSDTTGDGTSMPVYSCVSFGSKSGNASATRNMGAGLYKL

SEQ ID NO: 37469 - protein, 410 aa, Oryza sativa
MPPPLSFLHLAANPTPLHASPLRRARLRHRLSLRTDHPSRRAVASASASAGENPSTPGGPIADVEMVRGKDGVWTARPPTVVVLWDLDNKPPRGPPFPAATALRDAASLFGRVVSVSAFANRHAFSHVPAWVADERRERRAMDRAERAGAASPPVPYSCAVCGRRFPTRPDLTRHFRQLHQRERNKKLSRLRSLKGKKRQKFRERFISGNTKYDDAARELLTPKVGYGLAAELRRAGVHVRTVSDKPQAADHALKRQVKHSVACGVDWLVLVSDDSDFTDTVRKARAADLRTVVVGDGCRALGSVADIWLPWDRVENGEVDEDMLRNGTHMGFRDEEEDEQDDDEFIVDWDTSDLDGVVDDIVATRTKLFGATTMSAFADEEIMDGISGVGINGGDMLWSSDDEDEDGYF

SEQ ID NO: 37470 - protein, 79 aa, Oryza sativa
MSGFLGSYYSFPTPSVSVATVPSSTSSAPGNYYSSHGGSHQSMSAAEEWNWENALVYPATAASWSESSYHHHPPPPHTQ

SEQ ID NO: 37471 - protein, 231 aa, Oryza sativa
MADEVAFETARKIIMHPLYTPRSSPWLDLKVFYVRVSNCEVDESAPDRLTLNHIPLSPDTVIEVNGQRSSMHTEFISSSLRRDRVDKMTEEATFVSTDSIRMTGSVRFQVFDKNDLLLTGDLELCSANGVVGESKNSSKRWNMKCQPASSCNGFLKGKPSTASESVHPVIEVYLAGTFCGTPIILTKTVQHISRRKSQMKLKLDSIPENEATEQQKEELNEDSLQVPAKHV

SEQ ID NO: 37472 - protein, 366 aa, Oryza sativa
MASAAATSSSASLRLLTKPPKPLLSKPHLLTLCAPVSFQRLVARSSASPTPSPSAAAAAAAASGSGVDPAQVPPALRDIVALFQSVPDPRTRYKQLLAYAARLPPMDPALKTDANRVRGCVSQVWVHAAPEEGGAPGRVSFQADSDAQLTKGLAALLVLGLSGAPARDVAMVPVEFIELLGIRQSLSPSRNSGLLNMLSLMKRKALEVATGEVTTEEIGSQEVVQEVAERPAAKEKEPEFAAFGAREEEGSEVHSPQEEQLEEMPADVMEGNGGLGGGRQERIKESLERGLSPVQLQIEDISHLHKGHAGVSGSNGETHFNVRVVSEAFQGKSLLKRHRAVYDLLQDELKNGLHALSIDAKTPSEV

SEQ ID NO: 37473 - protein, 101 aa, Oryza sativa
MATLLLSSNKKPCSSSSSLLLLVLLLLLVFFAHHGSCSRPLLLPSPTTPMQPQLKHESETASADTTTRTEEQVVQQQQLSWLRSMKPRGRPQPSSPSKRTN

SEQ ID NO: 37474 - protein, 298 aa, Oryza sativa
MDDAVETAAEILVSFQNRRLVRWPEWVPRPDEKGAAAEEKKLPGWKDRRKRTSKSKPPPAILVCGLELRDSGGEKAASIPAPLPPPARKKMLFKMKVKDEPTAARGPETPPEYGAGAGSGANFSRDGVARPLPPRAVVKAEPTPAARMPESPPYYVAAAGSAPSTAGGDRRPRPRPVERAHVKTVLAAAKEAMEASSPETPLDYAATTGSGASSSGDESSRKRKAAPGAGGSGGASSSGDEGCSSPEKRPCLVAGGGAQTAAAAKAEGEKFADSMNRNDDGVLLFDLNECVDNCEDWS

SEQ ID NO: 37475 - protein, 148 aa, Oryza sativa
MRPSATRQVTGGDPDAGSLSLDSSARRWPRQFVMVDWHSAGMSCVASSSSPDIAGSPSGMAAKTKPGTPSSAAAPREARRRRWLNSVLTKVTWKPRAWSSLARCSVGVMSPCDGYGTHTACGGLSPVAPIADAILCPLISLQQRKRDR

SEQ ID NO: 37476 - protein, 311 aa, Oryza sativa
MESITPIVRPASAAAGGGEVQESGGRSLAAVEKEHMFDKVVTPSDVGKLNRLVIPKQHAEKHFPLDAASNEKGLLLSFEDRTGKPWRFRYSYWNSSQSYVMTKGWSRFVKEKRLDAGDTVSFGRGVGEAARGRLFIDWRRRPDVVAALQPPTHRFAHHLPSSIPFAPWAHHHGHGAAAAAAAAAGARFLLPPSSTPIYDHHRRHAHAVGYDAYAAATSRQVLFYRPLPPQQQHHPAVVLESVPVRMTAGHAEPPSAPSKRVRLFGVNLDCANSEQDHAGVVGKTAPPPLPSPPSSSSSSSGKARCSLNLDL

SEQ ID NO: 37477 - protein, 301 aa, Oryza sativa
MRLYSKLAALLRRSRGPAAGARVHHRERAGGAHGGGLRGARRAQARALRGLPRQRHRRGRAAHHHHRRRELPGLPRRHPRRRPHGPLPRPVRALRDQDPHRDRHRRRPLVPPLPRRLRRHRRARRRGRRGHGRRRAPPPFRRLRRILEPRHLRLRRLRRRRAHLPEQAHCRRRRRGLRHGGGQLPHQVRLPRLHHPPPQRLPRVQDHAGPGPLQPQDPGRLGLRGRRGVRRRRRRSVGRRQGQERGERRGLRPPGRRALLRHWTRAGDKVSRRAARAGLRWLCRDQARLHSHQRQGSLRRR

SEQ ID NO: 37478 - protein, 399 aa, Oryza sativa
MQVFLIIRRSLNRCSALTKNETLFNLFQVFQRVLKAYASKLYARLPKGGTGIVAAATGTDGQIRTSDRDEKMICYIVNTAEYCHQTSGELAENVAKMINPHFADKVDIPEVQDEFSAVIMKALMTLVHGLETKFDAEMVAMTRVPWSTLESVGDQSEYVNGVSSILSSSIPVLGNLLSPTYFQYFLDKLAASLGPRFYLNIYKCKHISETGAQQMLLDTQAVKTILLDIPSLGKQSTAAASYSKFVSREMSKAEALLKVILSPVDSVANTYRALLPEGTPLEFQRILDLKGLKKADQQTILEDFNKHSPAIKHPAVAPTVAPPVATSSAHHIAPVTTPTVSTTPSMATLTGALANREDVLARAAALGRGAATTGFKRFLALTEAAKDRKDGPFRKLFNA

SEQ ID NO: 37479 - protein, 296 aa, Oryza sativa
MDGGDRLSALPNDVLHLILLRLRSAEAAARTSVLARRWRHVWATLPELRFRMDVSLAAHAAPALRRLEVSTDADDPAASTAALRLAAPRVAGELSFCIWPRWDDAPEEDDGPAPVRRPGVVKLPCFEKATELWLILGLLGVSLPKSGVFAQLTALAFRDVRFTGRCDLGAVVSSKRCPVLQKLQVHDSQDLYNLTIFSESLLHIELSDLHGGMGRLMIVAPLLRVLDVRHCFYWRTYRSHSLVRDQPYAAVFTPALEDLIWVDAYDPTTVQFGGVKRLRKLVTQLQCMDSLAALIT

SEQ ID NO: 37480 - protein, 560 aa, Oryza sativa
MGFLPGDDDGPAVGIDLGTTYSCVAVWRRGRVEVIPNDQGNLTTPSCVAFTDTWRLIGDAALNQAAMNPLNTIFDAKRLIGRRFSDVSVQGDIKLWPFKVTSGKDDRPMIVVQYRGEEKEFSAEEISAMVLFKMKETAEAYLDKTVEKAVITVPVYFNDSQRQATMDAGAVAGLDVLRIINEPTAAAVAYGLDKVVGSSDKKKRVLIFDLGGGTLDVSVLNIDPGVDIDIGIFEVKATAGDTHLGGEDFNGRMVKHLVREFLRKYKRPEIRGDQRALRRLRTACEKAKRMLSSTAQTTIEIDSLHGGVDFHATVTRAKFEELNMDLFLECMDTVKQCLRDAGTDKGTVDDVVLVGGSTRIPKVRSLLQDLFDGKALCRSINPDEAVAHGAAVKAALLNGDANEKDLRDVVLLDVTPLSLGIEVFGGGMSVLIPRNTTIPVSRQKMYTTHYDNETAVLINVNEGEGRRTKDNNPLGKFVLTGIPPAPRGVPQINVTFSIDYNGIMNVSAEDKTTGRSNSITIKSDKGRLSKEEIERMVKKAEKYKAEDEEEMKKAEGYVAP

SEQ ID NO: 37481 - protein, 257 aa, Oryza sativa
MHKSELERDRLAMELDEERRLRETLEHRLAEQQKMLDGISNTSISPDQFTDSIQFESLKTPTSKERPAEFVASRANYSKDVEFSPIPENLGTVADEDLWMQLNKGCVTDLEMLEMTPGFKCAPSLADDKASVATPDEEPIDARCQRLEKDCTADRQQLEDSKAWRAALEEERDTLKRENSSLLDALAKARQDADHLVADRLEALRELDMEKSRMDELKQEIKLFSQAFSLRQGQLTSLYTKSKAIVENCKTSQLALP

SEQ ID NO: 37482 - protein, 281 aa, Oryza sativa
MSRVIRNIIVVAMGAGALGGPDALRLLLAFAGKSPLVDILIAVFVIAAVTAPALGTMLLARFFRKPRAVPGAARAGRGAAGAAVADDPFAQMTLVVSLAVAFLVSASLLVLPLFQSGHLVPLAFAGVALVVGACASRVRGVLLPNAHGGAGAGATPAATATERGIKPTLSVSLAAICLVLVAPWRLAVGILDAPSQRPLAPPATVPVVGVAAATVVGTTILVLRFRKAKHAAATPDAATTPATERSHKMVMVTALAVAFFLAVPLVVVVDACPRRVFGCAC

SEQ ID NO: 37483 - protein, 426 aa, Oryza sativa
MSRRFLHLLVKKPTPWGSEEFGLRRIDMSRFFPPRKPTGGGDGSAAADRPRLAPVAAAMVDAQLPRAGEAIYRPQGHGWGRCGAMILGGGKDKVVGVDGEYRSFLLILFKCGAHAVRLLPHMRATKRCPIAFTVGDGVYVMEAAAPEPARMRGAEHCFEALVHGLPPAPPRGGATIIEDWHWRSLTAPPYVLDPDGDDGPARVAAHAVVRDSQIWVSTERHGTFTFDTASGAWSKAGDWALPFRGRAEHVPEHSLWFGFSPHHDGHLCASDLTATPPSLRHTWRYRPPHKDWPAPVASYLVQLGGGRLCVAELFETTRVEVGGRPLDTNKKASLKTTTRRWGFNAAATAGEEEEEETEVRERFAVVTGVEVEASASGKAPLRMARRAVRRYVLSTETVVTREARRRSSWRRGRPRKDDDETLHWVF

SEQ ID NO: 37484 - protein, 349 aa, Oryza sativa
MLAAPGEGADRDGRRRRRPMFAAADITPFYLEHGPRIFPQRWSTLAAKIAAARGPKYDGRYLRGVVRRMLGETTVGDTLTNVVVPTFDVRLLQPVIFSTYEAKNSPLKNALLSDVCIGTSSAPTYLPAHCFRTHDGASGETREYNLIDGGVAANNPTMVAMTMITEEIMAKEKAAALYLLKPPPEEEEEHGRFLVLSIGTGLTSDEGLYTAEKCSRWGALSWLRHGGMAPIIDIFMAASSDLVDIHVAVKFQLLHSERNYLRVQANSLRGAAAAVDAATPENMGSLVGVGERLLAQRVSRVNVETGRYEEVPGEGSNADALARIAGNLSEERTARIKRRNTVQAGVTGF

SEQ ID NO: 37485 - protein, 410 aa, Oryza sativa
MELLPRVGVAAPGPGRGGASPSPTRRHRAPSHPILKRSAAVCGAVAVCRGGAVARRSRWSTLVTAAYYTGTAELVDFNWETLGFQPVPTDFMYVMRCSEEGVFTKGELVPYGPIELNPAAGVLNYGQGLLEGLRAHRKEDGSVLLFRPDENALRMRVGADRLCMPAPSVEQFLEAIKLTILANKRWVPPTGKGSLYIRPLLIGSGAILGVAPAPEYTFVVFACPVGHYFKDGLSPISLLTEEEYQCAAPGGTGDIKTIGNYASAVYAKERAKERGHSDVLYLDPVHKKFVEELSSCNIFMVKDNIISTPLLTGTVLPGITRRSIIEYARSLGFQVEECLITIDELLDADEVFCTGTSVVLSSVGCIVYQGRRVEYGNQKFRTVSQQLYSALTAIQKGLVEDSMGWTVQLN

SEQ ID NO: 37486 - protein, 309 aa, Oryza sativa
MGSFKGHVLPGTLFLAVGAWHVWAAAARFAADPRGFRLRAWNPVDVGGGGAPAWLPAHLELYAIAGGAFLDMCVEVLYSTHLHIFADGGINPAHLNDLEHGGMLLMFFLFGILALLSQKTRYLPLPEGALCLVASTAFMAELLLFYFHSTTHQGLEGYYHYLLVVVVALCVATTVLGALLPASFPVDIASGAAIALQGLWFYQTAFTLYGPSLPAGCRRDADGHIDCHTHAAQERGEQLANFQLFGLVFLVCAYALGCFAVAAARHGHPDLATMHAKHVAAMEAQLAGAGAGEGDRFVGSALPLEDTAI

SEQ ID NO: 37487 - protein, 25 aa, Oryza sativa
MALCKINPIRPFPCFSLCIIVAFLV

SEQ ID NO: 37488 - protein, 215 aa, Oryza sativa
MAGVGFVEDMLREQSLLEATCGDLFDHIDDLLDFPKEESAADVLLLDAPAPGSPLSSRIIGGHATMAAAPPPPPQMMALPPPPAPAKDDASALFDAAGALGAEVFDRKDAHIGPCDELDMDMAQLEWLSGLFDDGTIPHEPSFPGVNCAAPIKASALTANAGVVLLDKAEEALFRSSSPISVLEHSGFNVATSGGSSSSSSSSSPSPWTWTWTAV

SEQ ID NO: 37489 - protein, 266 aa, Oryza sativa
MAAAAADPLVAGATVSSDSDSDSDDLHLLLPNLLPSAATAASDAQLHHFHLPALPSPITVRTLPSLGLTFQLWPSASTLLRVLPASPLLLSRAPTPESPLGILELGSGTGAAGLALAAALPAHAVLSDLPAALPNLRHNASLNAPLLDARGGSVSVVPLPWGDAAAMEAVAAPPPASRFDLVVASDVVYYEALVDPLIETMRFFVKGEVVFVMAHMRRWKRTDKKFFAKARKLFDVEVVHEDPPLEGWRHGPVVYLFTEKKRRDKK

SEQ ID NO: 37490 - protein, 265 aa, Oryza sativa
MARTKFVALSFVVLLSIGLSNALPRKYASAGGGGGGGGGGGGSGNGSGWGSGSGSGYGQASGPGGYASGGGGGGGGGGGGGNGGSGYGSGSGSGYGQAGGYGPYGGYAQGGGGGGGGGGGQNGGSGYGSGSGSGYGQAGGYGPYGGGAYAQGGGGGGGDGGGQNGGSGYGSGSGYGQAGGYGPYGGGYAQGGGGGGGGGGGQNGGSGYGSGSGSGYGQAGGYGPYGGYAQAGGQGGGGGGGQSGPGGSGSGSGSGSGSGSAGWHP

SEQ ID NO: 37491 - protein, 181 aa, Oryza sativa
MGGATSPAAPCLSVCLLPLLFPFLHGCWSCVAIERERTLAMIKPDGLSGNYTERIKEVILESGFDIVKEAVVQLDAERASLFYAEHSGRSFFDSLVKYMTSGPVLVMILERPDAISHWRVLIGPTDARKAKISNPNSIRAMCGVDSEKNCVHGSDSPQSAAREISFFFGDVRSDTVEHDEL

SEQ ID NO: 37492 - protein, 269 aa, Oryza sativa
MSPNVIVASSSTACQSPTPDASANPGGRCTTSPATATRRYQRGSLARERHQGICTYHAAGDEAEEEGGDDGAEELGEPVEEGADEGEAAAEERAEGDGRVDVAAGDVDGHRHRHRQRQRVRQRHRHQPSRRAHVLVQLPCTHTSPCHMSLPRAAAAAMDGRNYQETSVYVVRTEGEDGALGGEDEDGGGEELGDGGADGVRVRRVLAQPHREPPPWPRRRRAHLHTDHSLSLLTNSRRRPVRPPPPPPKPRLILASLVSITKCAVQLGV

SEQ ID NO: 37493 - protein, 284 aa, Oryza sativa
MEPSPDAPRAGAAEEQPGPSSSASAPAPAASSNEEEGRHQSQAQQQVQEAQPQPLAQQAPAAAGLSRYESQKRRDWNTFLQYLRNHKPPLTLPRCSGAHVIEFLKYLDQFGKTKVHADGCAYFGEPNPPAPCACPLRQAWGSLDALIGRLRAAYEESGGRPESNPFAARAVRIYLREVREAQAKARGIPYEKKRKRGAAAAAAAPPVVVAPPPVVTAPDDATGTSGGAGEDDDDDEATHSGEQQDTTPAASPTTPPATSVGTTTAAATAAAAKGSAAKGSATSS

SEQ ID NO: 37494 - protein, 365 aa, Oryza sativa
MSAKVPRRLEANSVGMADWAGLQTDILGVIVKKLAVPDYLRFRAVCTSWNHLCRDVFNCPRIDPWLMLPTNALNDSKFLCVPERKNQTIRLPSTVTIFGSTWIPVGSSHGWLIFYSPFHGTMQLVNPISGMRFNLPPIGRRAFSKAMLLDMNDTNFTVAVILRDQKGYKVTRKGSNSWSSVESKHDLVDIFKHRRQLYTVDIYGTVQLWAEPPRSWPDEDAPQVNDPYHNLIHYPHQHGKLNCLVESPAGDLMRVKRQSNDKFVVWILDKGTFSWEKVDNIGDFALFVSYYSSVCYRAKDHLNLKSNCVYFIDSYSNLCAFNLENRTKELVEALEPAHAHGHPEPHAVRRRPEGQRYMWLIPSLR

SEQ ID NO: 37495 - protein, 422 aa, Oryza sativa
MQMEDEATRPSSPPPAASAASSVLADDDLLREILLRLAFPTTLVRAALVSSRWLGLASDSSFLRRFRARNPPRLLGFYHTARRDEQPAFVPLPQPPELAPVLRRLGGFALGGADVSAVVFDCRNGRLLRAEFPPPPDELRFGVVSPLLPPARKPPDLPPNLHSQLHQVPNDARVLRPGWMLLPEEEEDDGGDDLSYTLVVLIRRGRGLFARAVLVRGESDDQIRTSDSIELPNHYWPNKKMNRGLLFHGSLYMLGREHVLGLNLASMSLFLIKLPDGVEQLEHMGNLELLRDGDSGLYLAHLKGFQIHVWHRATDGGGNGGDWEMVDTMSLHQSFGQVARPDWESGDPSLGDALVSLRRVEDNAELFLTIDRVIFHIHIASRTANKVFEMAPKEDIGFEIFPFMMIWPPTFPALNYDDDDDQ

SEQ ID NO: 37496 - protein, 542 aa, Oryza sativa
MELARMIILHEYPLSIMEHYGFQRFVRALQPLFQLVPNSSLKKDVISIYETERVRTREILWEAKGRIAITADIWTSDDQNRGYVAVRAHFIDQSWTFQCRLLSFIHVPWPHTAQAISETLSSCLNEWNLGRRVSMVMADDCSTDDTVTGLLKQRLDTEQLLLGGSLLNMRCCAYVLSRIANSCLGVMGGAVDRIRASVDFWTATTERDVVFADVARGLNVNLDKKLTLDCNNRWYSTLSMLNVAISYKQVFDHLRQIEEQYICAPDDDDWKLAKEVCSKLKLFSDIAELISEAKYVTANMYFPKICGIRMAMRRWPGCEDELIGRMRNEIAELFEKYCVEVHDLMAVATVLDPRYKLELLQFYFPSIFGDEAYNEINRVRQLCYDLIKQYQGPQSKVGAMQPCGGEEEGPDQLSSFDLYIAFKFSSADVKSELDKYLDEPVIPRAVDFDIIDWWKIMGKRFPTLQMLARDILAVPVSRVVSESAFSIAGRVLSPQRSKLLPDTLEALMCSQDWLHAENRGAGSSGLLSCLTCLEDADVTTKE

SEQ ID NO: 37497 - protein, 159 aa, Oryza sativa
MPPRVSVRLANRGRGRGGGRGRGRGHHNEEVENTQDNEEVGNNSVAESPIPNRGGRGRGRAGGRGRGRGRGRHNEAASSNQMEDEHMEEEEGGSHSAAVSDDAPRAAQGMTLTRWTSMRLDTFDGSGTPVNAADWLRKMEKYMRGSRMTPEEKVTFMPF

SEQ ID NO: 37498 - protein, 556 aa, Oryza sativa
MGLHQHAWGEVGIEIFSPRSKHIAMVNKISPWDQQEKMALRSNGALVKSLSFKEWEGGEQTKTNSVNHKNRPSLINVVVDNRRNSDIFMAESSPIVSSSPKCELDAAAVKVQKVYKSYRTRRNLADCAVVVEELWWKALDFASLKHSSISFFNGEKPETAASRWARARTRAAKVGKGLSKNGKAQKLALQHWLEAIDPRHRYGHNLHIYYGVWSRSESTEPFFYWLDIGEGKEVNLDRCPRNKLQSQCVKYLGPKERQEYEVVVESGRLVYKQSGVFVHTSDDSKWIFVLSTTKALYVGQKKKGSFQHSSFLAGGAITSAGRLVVKDGILKAIWPYSGHYLPTEENFREFISYLQENGVDLADVKRCPMDKDDEYPLLTKPDVTAASIAATKNVEKVAAATAAAAERLTETVSDDTDHAAVDEDGSMSEGEDEDADVPTATKEDEHKATSSSAASTTAAAAAAENHLPCRWSTGTGPRIRCVRDYPQDLQSRALEHVNLSPRLAAAGVAPATRKRDPVPSPRPSPGMILSPRLASVGFRPPVVALTLPDFKRSRLQ

SEQ ID NO: 37499 - protein, 149 aa, Oryza sativa
MEMVLLAASDCPSDWGWNAELRCNLVPVAAKSAVQNAEGNTVSRSETMDVGTPWRRTMSVKNARTTVSAVYRCARAMKWAYLEILSTTVSMTVLPATRGKPSTKSMAISDHTAAGTGSGSSNPAGCKCSVLLRWQTRQPRTKSLTRRRS

SEQ ID NO: 37500 - protein, 88 aa, Oryza sativa
MIFLSTCHFTPQITSVVVLCIWCVAANPGDPGIFKSAEHPKLNKDGRRSQKNSDHGLSQGGKMSSDGFNAVYNSEKLSNMLELKDSHS

SEQ ID NO: 37501 - protein, 402 aa, Oryza sativa
MMMMGEGAHAPPWQQHVASPVSGVEGGGGRESEVVAAPYHLLDTLRHYLPSNEAAAAEDEEEAAAVAAAVDAYACDEFRMYEFKVRRCARGRSHDWTECPFAHPGEKARRRDPRRYCYSGTACPDFRKGGCKRGDACEFAHGVFECWLHPARYRTQPCKDGTACRRRVCFFAHTPDQLRVLPPSQQQGSNSPRGCGGGGAGAAASPLAESYDGSPLRRQAFESYLTKSIMSSSPTSTLVSPPRSPPSESPPLSPDAAGALRRGAWAGVGSPVNDVHVSLRQLRLGSPRSAPSCASFLPAGYQYGSPKSPAAAAAAALYSLPSTPTRLSPVTVTTASGATVTVEPLDLGLIEEEQPMERVESGRALREKVFERLSKEATVSTDAAAAAAGVAPDVGWVSDLIN

SEQ ID NO: 37502 - protein, 123 aa, Oryza sativa
MPSHADLDRQISQLRECKFLGEAEVRALCEQAKAILMEEWNVQPVRCPVTVCGDIHGQFYDLIELFRIGGDSPDTNYLFMGDYVDRGYYSVETVTLLVALKVRYRDRITILRGNHESRQITQV

SEQ ID NO: 37503 - protein, 304 aa, Oryza sativa
MCGLCFRSPAGTITRPETRLGTKPAPFMAAFSSQGPNTVTPGILKPDITAPGVSVVAAWTRASAPTDLAFDKRRVAFNSESGTSMSCPHVAGVVGLLRTLRPDWSPAAIRSALMTTAVEVDNERHAILNSSFAAANPFGFGAGHVSPARAMNPGLVYDLAAVDYLNFLCSLSYNATVMAMFAGGGGAAPFRCPASPPKVQDLNYPSITVVNLTSSATVRRTVKNVGKPGVYKAYVTSPAGVRVTVSPDTLPFLLKGEKKTFQVRFEVTNASLAMDYSFGALVWTNGKQFVRSPLVVKTTTPTMA

SEQ ID NO: 37504 - protein, 180 aa, Oryza sativa
MPHLVRERLFFGDINDAIAALTTTAADTGGFTHLLSVVSSASISFITDCRPGLSIPTEEVRRVVAGEEGAPPVSAVAPGRLLRVVERAGVGLRVTRMAVPLRDTEEENLLDHLEPCLDFIDEGRKEGNVLVHCFAGVSRSATIIVAYLMRTEQKSLEGSTIPTKWVIFQSLLWLLLQMNT

SEQ ID NO: 37505 - protein, 270 aa, Oryza sativa
MSMLLYRKFKKGSKSEVDEMLRAEKSENPMRIVYCFGISHEHPGTFILSYIRSTNPHHEYIGLYPKGFRFRKRDFDNIDRLVSYFQKHIDKPPPDAGPSMRNVAAMVPMKSSGWGNGGGTGGGNDGWRGDGNNDRDRPFSGRSGGRFDSRNSSGGRGRGRGRGRGNFGSDDGGGGGWSGGGGGGGNSGGWTDNIGSGGGGWGTGGGSSWAGGGDGGSGGGGSDGGGGGWGAAPGGSNDAPGWGSGKKAVPAQDGGSGWGASAGGGSGGWN

SEQ ID NO: 37506 - protein, 363 aa, Oryza sativa
MAEAGVAAASLFGADRRLCSADILPPAPAISALPLISRGAANRGLRRALLRDDVSSVYLSYASCKRSLTRANDAKAFVRVWKVMEMCYKILGEGKLVTLRELFYTLLSESPTYFTCQRHVNQTVQDVVSLLRCTRQSLGIMASSRGALIGRLVVQGPEEEHVDCSILGPSGHAITGDLNVLSKLIFSSDARYIIVVEKDAIFQRLAEDRIYSHLPCILITAKGYPDLATRFILHRLSQTYPNMPIFALVDWNPAGLAILCTYKYGSISMGLESYRYACNVKWLGLRGDDLQLIPQSAYQELKPRDLQIAKSLLSSKFLQDKHRAELTLMLETGKRAEIEALYSHGFDFLGKYVARKIVQGDYI

SEQ ID NO: 37507 - protein, 354 aa, Oryza sativa
MLSFKQSHEGFGHVAAAGAGPQQQQQPWWAGSQLLYGEASPEEAALRDGGQFQVVPGGRAALDPAAPEPEKTAVPAMPKRGGGGGAPEVLKFSVFSGNLEPGDTGEKNREHSATIAMQSPLPEYNGHFELGLGQSMVSPNYPCIDQCYGLMTTYAMKSMSGGRMLLPLNAPADAPIYVNAKQYEGILRRRRARAKAQRENRLVKGRKPYLHESRHRHAMRRARGSGGRFLNTKKEATAAGCGGSSKTPLASLVSPADVAHRPGSGGRASSLSGSDVSSPGGVMYDHHRHDDADAADHYNSIDHHLRTPFFTPLPIIMDSGGGGGDHASHSAAAVAAPFRWATAAGDGCCELLKA

SEQ ID NO: 37508 - protein, 705 aa, Oryza sativa
MILEQKELISVLETHREEHVLRDELLERITEKRINLINMVFSLREKNIQDKQGNETTLLDMHKQKEVAKLQETCNLAVEHLRKGHIDSEDRDATVKLIIEWFTLLLYAFLNHMRCQHNKLKMQQSTSWNKELQLKEIFLQQAKSGHLDRSFDQQIPLPDSCFTLEEFSHFKEIVGNFPVGAATSANCQHSLASTMEIALVRSVSPSEVGNSEAAINGAVEVPVHTEKRPTSEVGLSQNRMDNDSDGIDSQGGPPLAVQHSLSSNPAIDNSNNLESSVASHRSEHLGDIAVEVNADNCGTTLADSPHLEAPTVAALPSQSALPMAMEVDIQTDHVVQSAQQNIVTGRVPQEEEREGSTTVTSAQPLQPEMRPSSPVSGILRERTNPDQRRESRQPEAAPSSVDPTQLFPVASLMFNHPPLGNEPLKNELHRLQVHMDSLNKIYELKKSQLQTECSQEIEKIKQKYDLLIKEQDSAHHQHRKTLDDLYGKVLLNQSLADDFRVKFVSTSAAQARAVSPPLCQTTRQTAGVSQQVPTRPSVAGSIALPVGSSSASRPSLQRHCAQPSHVDRSSSSGGSHSSSPSSQVVRPPPAILGSVVRATSTPFSHSPAARGNYGVGSEVARAPAPHLQFRLPRAHPTAPVNQQQRQLPVRLESTCSRTQLTPVSTPVNARQLSPQSVSPVSNSSSSSSSHPGPAHLALAWIVIVQ

SEQ ID NO: 37509 - protein, 132 aa, Oryza sativa
MRIEAQGRYLKEILEKAQKNISLDVNGSANLSSTRSQITDINLALSGFMDNATQVQEENNELMKPISDDNLKVNNLGFQLYHLGSQESKDVKCTPKTEELLLLDLNIQGGYELSSRGMQGCELDLKINQQRR

SEQ ID NO: 37510 - protein, 418 aa, Oryza sativa
MRRSPPRSTLPSSSPARSTVPSLSPRRTLSCTVSGSLKYGKGIHAHLIKMNDLPSISIENSLMGMYARFEQVDAAYVVFKGMQIKDIVSWNTMISCLVKSDHVDEALELFSILHGGDGLVPDFVTVLSVVQACSNAGLLQQGQMLHGYIIKSGSLYDVSICNALISMYAKLGRIDFSEQIFEQMDIKDIVSWNSMINAYGIHGDGLSSLRIFNELQDDGTCSPNAITFVSLISACSHSGLVSEGYRCFQSMKNDYRIEPSMDHYASVVDLLGRSGRFAEAEQFIRNMPVHPNSSIWGPLLAACSLYGNIDLAEKAAIELSILEPESDIWRVSLSNVYAVVGRWKDSAKIRTEMKRVGLKKEAGWSFVDVGGVEGFKFVAADTRHGDSEQIYAVLRSMNKHMADVAGDVHQSSLVSVIS

SEQ ID NO: 37511 - protein, 68 aa, Oryza sativa
MGGGATRRPAGTAHGGRATRRPAGAGDIVAALGGGGGRNGCPGAWRRTPPARTPGRRRRGDGGRAPAS

SEQ ID NO: 37512 - protein, 351 aa, Oryza sativa
MRFSAFFVLFSMGGAIAAAVLRRLGAPLDAATALVLLFNASAVGVLSVFASAVPIVVRQGYMVALAVIVAAWLSRLPEWTTWVMLIALALYDLVAVLAPRGPLRMLVELASSRDDELPALVYESRPTVGPASGSSSYASAMGSVEMQPVADPGRSGGNQYDRVEQEDDSSRAVVEMRDVGGSRSSIRERNLEREAPMAVSVSGHSSNQGGSSQHAVIQIEQHEEGETVPLVSAASANNAAPNEEHRENSSSDSGMEFEMFESTRGIKLGLGDFIFYSVLVGRAAMYDLMTVYACYLAIIAGLGCTLILLSICKHALPALPISILLGVTFYFLTRLLMEPFVVGSSTNLVMF

SEQ ID NO: 37513 - protein, 520 aa, Oryza sativa
MDATTTVSMEMELPWGARCAGLAFFAFSVCLAALGVVLLVARRWPWYSCHVCRAYLTGSWAREFTNLGDWYAHLLRRSPTGTVHVHVLGCTVTANPANVEHMLRTRFDNFPKGRPFAALLGDLLGDGIFNVDGHAWRHQRKMASLELGSVAVRSYAYKIIAQEVEARLMPVLADAADRGAVLDLQDVFRRFAFDNICKISFGLDPGCLDREMPVSELADAFDAASRLSAMRGAAASPLLWRAKRFLNVGSERELRKAIKVVDELAAAMIRERQKLGVGSSHDLLSRFMASTGVDDAAADDKFLRDIVVSFLLAGRDTVSTALTTLFMLLSKNPEVAAAMRAEAEAGDGGETGAAITYEHLKGLHYTHAVLHENMRLFPPVQFDSKFCAAADVLPDGTYVGGDARVMYHPYAMGRMPHIWGADYAAFRPARWLTGPGASFVPANPYKYPVFQAGQRVCLGKELAVTEMKAASVAVVRAFDVEVVGENGRSGGAAAAPRFVPGLTASISGGLQVRVRRRVHT

SEQ ID NO: 37514 - protein, 434 aa, Oryza sativa
MDAAVQEAKLLRQVNALIVAHLRDHNLTQAAAAVAAATMTPLAPPEPDGDDSVPANQLLRLVAKGLAVEREETGRGGGAFDSAAAAAGYGGLLPPLGTNAVDFSTQDVKGSSKSFPKHEARHVSDHKNVVRCAKFSPDGKYFASGSGDTSIKFFEVAKIKQMMLGDSKDGPVRPVIRTFYDHTQPINDLDFHPESPILISAAKDNTVRFFDFSKTVARKAFRVIQDTHNVRSVCFHPCGDYLLAGTDHPVAHLYDINTFTCYLSANSHDSNAAINQVRYSSTGSLYVTASKDGSLRIWDGISAECVRPIIGAHASAEVTSAIFTKDERYVLSCGKDSCIKLWEVGSGRLVKQYVGAVHRQFRCQAVFNQTEEFVVSTDEQNSEVVVWDALTAENVARLPSGHTGAPRWLGHSPAEPAFVTCGNDRSVRFWKQTV

SEQ ID NO: 37515 - protein, 396 aa, Oryza sativa
MQMATANAALFKEKVLELIASCESFEISEMVQKEVLKEEITRRNSYVNALKDKLNAVEIENSRLKVDLNGDFTLLGALQTEVSALEKQTMSLAKDCLPSNKLRMEEFSVSPQLSKIAVKPIHGEPNATKMVKDMELEKLHGTIKALQKVVTDTGVVLEQERLDFNANLLDARRQIDLLRLRDDMAAAVDDSDAASDPAAAAYDRRLLKDIQLDLVQTTTPTNRSRAATATATAAASSQRHHRRRNGGSTEAPPLGLWSVVRASRRRQQEEGGDGDDDDLQPQPAQDPRACPQDVGEDRAARAGDAALPARAAPPRGGARHPPRRRRRGDGGGEQRQVVRRRAAAIVEGAAGGVPLRAPARQPPAAARAVVLHESQGHRRLTLIKNLHGWMDKARSV

SEQ ID NO: 37516 - protein, 333 aa, Oryza sativa
MLVLFVALSQYLKHVQVRHFPILERFSVLISIALVWVYAHILTASGTYKHTSLLTQINCRTDRANLITSADWIDIPYPLQWGPPTFSADHAFGMMAAVVVSLIESAGAFKAAARLASATPPPPYVLSRGIGWQGIGLLFDGLFGTGTGSTVSVENIGLLGSTRIGSRRVIQISAGFMIFFSILGRFGALFASIPFTMFAAIYCVMFGYVGAVGLSFMQFTNMNSMRSLFIIGVSLFLGISIPEYFFRYTMSVLHGPAHTRAGWFNDYINTVFSSPPTVGLIVAVILDNTLEVRDAARDRGMPWWARFRTFRGDSRNEEFYTLPFNLNRFFPPS

SEQ ID NO: 37517 - protein, 115 aa, Oryza sativa
MQAEPLPFPPPPATPRRRDRPRPVVLPPPSAPPRSTAPRRPLLFAEDPPESQPPRILVSPTLGLPSSCAARRQIVVVVLARGTPPPPRLPPSTASPRRRLLACRIRRFGSSRSRG

SEQ ID NO: 37518 - protein, 406 aa, Oryza sativa
MGVFQKGEDQKGESANMKPIPLLSSYDMGKFNLSHRVVLAPLTRSRSYDNLPQSHAMEYYSQRATKGGLLIAEATGVSSDAQGMSVIPHTPGIWTKEQVEAWKPIVDAVHAKGGIFFCQIWHVGRASDMEERPISSTDKPIEKTEENYFLGFSTPRSLTVEEIPDVIKHFTLAAKNALEAGFDGVEVHAANGFLLDQFMKDGVNARADEYGGGVAGRCRFALEVVDAVAAEAGAGRTGVRLSPYSRCLDCADSDPDALAAHMARELGSRGVLYCNVVEPEMVATPAEGGSGGETMRIPHRLRAVREAFAGTLMVGGGYDREEGNWAVAGGYADLVVYGRLFLANPDLPRRFRLGAPLNGYDRATFYTADPVAGYTDYPFLDDDGDDGLAASAASASSNKSGDQDGV

SEQ ID NO: 37519 - protein, 519 aa, Oryza sativa
MDTRVPPVPMGRAMAAEFRRRGDDPDDVQGTVARVLSYIHYALPDPPVSAAARLYALAPHDAVDRISALPDALLRRVVSRLPVKDAARTAALSRRWRPLWRSTPLVLVDAHLLSSSSAAPGAPDDSSKKAREAARGVTHAVSRVMGAHPGPFRCVHLTSSCMEEFQGMLANWLQVLAMKGIQELVLVNRPWPLDLGLPATFFGMATLTRLYLGLWKFPATADLPRGVSFPNLRELGLCSVVMDTQDMDLVLARSPVLETLCIKGNLFRMRIRLASRSLRCAQIIGSSYEEIAVVDTPCLERLIVSGTWRHDGASSGSVKIGNAPALRVFGYLDPAANVLVVGKTAIKSATKVSPSNMVPNVKILALEVRFGVRNDAKMIPNVLRCFPNIERLHIKSGKTDETTGKLNFKFWQESGPIECIRSSIQMIVFHDFHGTRSEVNFLKFFFETTRVLKIVVILFDTGSFSSMDEVRSKVEVLRAAKRPTGCLVLVTPSTEPEECNIWSFKRGSDFSRFDPFTDY

SEQ ID NO: 37520 - protein, 476 aa, Oryza sativa
MSAYSRAGRHGEVLRLFRSLPFAPTAPLFTTLISSLAASGRPLAARAAFASLLKSGVPPTASAFTALLRSSSDALDFVDSVFRAMEALGCSPDAAVYNWVISMLCDFQLVQEALGFLDHMLENGPRPTARSFTAILRAYCEQGRFFDAGRLVDTMIQNGCPPDVVSYTVLIEGLCRVGEFSTVEMILGESESQGWMPTAVTYNIYMSGLCRMGFLDEAFRQVDIMRGRGLSVTAETVHILFDCLCRNAMFSEAVCLLEHSEELGWDVDVFCYNTLMSRLCDVDDFARVLKLLVDLLKKGIGPDKFSFTIAIRSLCRAGKLRLAKCLIENKGIKYDVVAFNTLIHGFCIAGDLDRVQQTRTDMINRDVIPNNFTDAMLIDSLCKERKFGEAKRFVLDSLVNGLVPDHLIRLNNWLVKAKKMTLLLKLLYEIRCKGIVVDTSIISPLVRVFCWEGYCRRDNFYQISPILDIIVTYVEQ

SEQ ID NO: 37521 - protein, 329 aa, Oryza sativa
MVRHGQLADAVRLFDNANAWDIVSWNTLLTAFAHRSSLRLCTLWRRMAIEGVSADGFSFSTVLSGLSGSANVAATGLQVHAQLVKSGFVDDVCVGNSLLEMYMKNKQLESGIRAFTEMRHRDVVSWTELAAGLLHCGEPAESLRVVSDMILDGIRPNNYTIVAAANACANLANLNQGRKIHGYVIKLGGDSNVGVNNALIDMYAKCRSVTGAHKVFQSMQRQSVVSWTAMIMAFAQNGQAREAVKVFDDMLLEGMAPNHAAFYSVLYACSQGGFVDEGWIYFDAMADKFGVEPGEDHFACMVDLLTKAGRIEEAEELISRMPFRPGVVA

SEQ ID NO: 37522 - protein, 318 aa, Oryza sativa
MHHRLLLRRGAMPVPPPLPPRTPPPGVARPFASLPPPPPLQSRREVHVWYVCPDELNDHSHLDMYMELLSPSERKNALSMNGPRLQKDAMLSRALLRTTLSRYTNSKIDPRSFEFKKNKFGKPEILWRSDDSNMEWPWHFNISHTSSLIACGIAMDAPIGIDVEEKKRKTTKSILSLARRYFTPSEVDSLAKIADSDAQQKEFIKLWTLKEAYVKALGRGFSGAPFNRFSIQLKTNSRIQITKAPKVCNDSDSGDYLSENWRFALTELNSSYYMAVCIEDNSRGSENGSVPLGLKVWKTVPFIEDTLVSGTDAVKLIT

SEQ ID NO: 37523 - protein, 236 aa, Oryza sativa
MEDDKTTQESSAAAAPPLRSLADYAVGPIPTLLYVPGFISDAEQSQLLHHIYQAPAPKWKSLKNRRLQNWGGVVHEKGLLPQALPSWLTKITDRICQWTGLFPSAINHVLINEYHPNQGIMPHQDGPAYFPVVAIISLASPVVIDFTPHQRLKGEDFTDPQNAHSGESQATTTESNGSHNLEGANETDPASSSLLLMPCSLLIFKDQAYTDYRRTARRVSLTCRLVLKVHKKLFKM

SEQ ID NO: 37524 - protein, 357 aa, Oryza sativa
MELFARAQVVRLKSHHDKFLYADEDEVHVTQDRNGAATNARWTVERVPHSPGVVRLRSRYGRYLSASNEPFLLGMTGRKVLQAPPPGGRATDSSLEWEPVKDGFQAKLKTRYGHYLRANGGLPPWRNSVTHDVPHRTATQDWVLWDVEIVQVLTPGHDRAPTSAAPPSPAHAPELKKPPPPPEAHHRPTKSYTGHPPPPPLEKDAPPQPPRPQEVHHRPTKSYTGNPPQPLEKDASPQPPPPKPAPSRLESSLSFSAPLHKVEGRAIYYHIADDKGDVDEDDETRSFTFNGSNLEELTHKLQEETGLHDIIICTRSPITGKLAPLRLQLPPNNAAMHIVLVQESSKVAKTFPWPYGP

SEQ ID NO: 37525 - protein, 355 aa, Oryza sativa
MCKSRSDAVPVSSVASRSRRSSATTSSSSSSSRRPGPASSSISGSTASAASSSSSSLAAARASLPDPPVLYPFQEVAGATNNFLAKRAPASTYWPCTLRGRHAALFQLRRAPPPRDTVTGKLLAATARYHHTSLAPLLGGCVAGAHLYIAYELPPGAATLSACLRSPRNPSFTALRTWLSRVQVAADVAQGLDYIHHHAAAVHGRVSSSTVLVSDPGLRARLTHMGAAQLAELEDEEEPSREADVRAFGLLLLELLSGEQATTYRVREAVVETAAAARANGRVRSWVDRRLGDSFPQAVAERLLDVGLRCASASPPPEMTWVAGKISKAYLDSRAWDHSLQRPQAHLSSVSLAPR

SEQ ID NO: 37526 - protein, 214 aa, Oryza sativa
MAAARRLSELLQEQQEPFLIEAAKIRRLRRGGGRGGGGGGACCPVAACRRLLRLCNHGFKKRRGCGGVGGGGGVGGGGVRGLRSALSKALCGKAVRRVLRWDSLGCFPGGVDREFRRLRRSTGDSGECDPRAMDFSGHSNDERPPGRWKAPGIGMDMDVDESSRQLSPVSVLDLHSDDGDSPVHCRCKFSDLYSALCTLHYYALPFYQPVSTFD

SEQ ID NO: 37527 - protein, 235 aa, Oryza sativa
MLAPSPLPDEPPQPPLRERSPKIIRIINDRRNNLRGWYKILLQLANAALRKYAQQTGEEYELHTIYGEAFLKDRNERAEYIHINFMASPSSCQCLQASPVCFFAEVLRPPRFKYHEADITLCCIVRPSPNDADSCHGCLIENHRIDHPEAGMRFCGKKHSKMDPNGYGHGWDWPSIADVEYRFFDPDKDVGLVEYLDGVITDIKARIRDLSIRDEDDSDEDSSDDDISGYSMRFV

SEQ ID NO: 37528 - protein, 1166 aa, Oryza sativa
MQGFPGGAPDPQQLQSTMLAIEQACSLIQMHMSPADAEKVISSLHSSPMPYQACRFILETSHMPNARFQAAGAIGDAAIREWGILSDDNKKSLIVYCLNYVMEHASSPEGYVQAKVSAVAARLLKRGWVEFSDQEKAAIFFEIEQCVRGIHGPNRQFATINFLEALVSEFSPGAASAMCLPKEFHEQCQWSLEVKFLKDFYCWAQAAVFNSADRILNVNASVAEEKACSAAFRLMFQILSWSFKHNVEHANSEAKINSGLRSDAINLKKFERSLVKPGSVWSDVLISSGHVQWVLNFYTAARQKFSYDTLWVDSPIATSCRQLIVQLCSLTGSVFPNDNADGQIQYLVRILSAVVHWIEPPDVIAASIRSGASESEFVDGCHALLSMASLTTCSLFDNLLKSTRNYGTINLLSALTSEAVKSFLDNQNEEETWGSESLDILLETWNVILGDVDSEKSPMSVDGAIAASSLFKIIVESHLKAAADSAFEDTDDAEYFHVSVSKRDEQLALYAQIARSAADTTIPFLAQLFSERFARLSQRNGENDPTQTLEELYWLLLITSHVLTDSGEGETLLIPEALQVGFPYVVEVAQHPVVALSWSIINFSRQCLDPGIRARYFSPRLMEAVIWFLARWVATYLVPLDVSRGQVNRAEIDSVDKHMLQHSRKMLNSFAWENNQGERVLDFVVLISMVALTTYQGEIELQTLTCQKLLATVVRRKHTCTYVVQLDSWRDLTRAFASGRSLFSLTGRLQRSLAETLACAASCIKDPEASVQYLRDLMGPVAGCLVENANRSDLKSVAQQADVVYMVCCLLERLRGAARATQPRTQKVLFEMGHTVMNSLLTLLEVYKNQSAVIYMILKFVVDFVDGQAVFLDAKETSVLVSFCLKLLQIYSSHNIGKVMLSLSSSLRSESQAEKYKDLRALLRLLTNICSKDLVGFLSDSSIEGSQDIAEVIYVGVDIVTPLISLDLLKYPKLSRDYFALISHLLEVYPEKVANLNKVAFARIIGSLEFGLRNQDCDIVDRCLTAINALASYHFKERLGGRGGLSSQLMESEGSNGKLQESISSHFLRLLLQLLLFEDFRMELAGSAADALLPLILCEQPLYQRLLQELVEKQQNPTVKSRLGMAFHNLTSSNNLSNSLDRPNRQRFRKNLRTFLGDVSGFMQIK

SEQ ID NO: 37529 - protein, 349 aa, Oryza sativa
MQQKEAGEEAVVVVGAGIAGLAVALGLHRKGVKCSVLKSSPELRASGFAFATWTNAWQALDNLGVGDKIRKLHLHLQELHVFSSSTGEITRRADLTVQGKRGPNELRCVRRDWLLRALEEELPKGTIRYSSKIVAIEEDGNAKIIHLADAAILRAKVLIGCDGVNSVVAKWLGLTKPSSSGRLATRGLAHYPDGHGLDPRFKMFVGHGFRAGVIPCNETDAYWFFTWSPSEHESNGVEESAEKMKQFVLTKLRSSKIPTEVLEVVERSNINDVVASPLRFRPPLSLLLASISKGNACVAGDALHPMTPDLGQGGCAALEDGVVLARCLGDALLGRRRRRREREDRGEST

SEQ ID NO: 37530 - protein, 351 aa, Oryza sativa
MGNCVGSSKCASASAPLESKVTRSSNSTTTTDNTSKASQRSSSAFSSGQFSRASSDESSAAPSLSSLKSFNMGDLRAATKNFGSNSFLGEGGFGCVYKGWIDELTLAPTKPGVGKMVAIKKLKKESFQGHKEWLAEVTYLGQLHHENLVKLVGYCSDSDSNKLLVYEYMLRGSLENHLFRRGTQPLSWAMRVNIAVDVARGLSFLHGLENPIIFRDLKSSNVLLAGDYRAKLSDFGLARNGPTGDKSHVSTRVVGTRGYAAPEYVATGHLSVKSDVYSFGVVLLELLTGRRALDAARGATAEMLVDWARPHLGDRRKVNRIMDTRLGGSRTPSHPPRRPRRRRTGRGHSKR

SEQ ID NO: 37531 - protein, 121 aa, Oryza sativa
MTSSVDSATILLLPCGDDLIGFFPLVTLTSFFFLASPPPAAMVVFSGGSGVDSYATMSFHTTTPASPFFPVSSTAVAAAFFPAFTGLVRSPTRLRDDADRSLAIAVAAASGGGGGVFRGLG

SEQ ID NO: 37532 - protein, 246 aa, Oryza sativa
MAAAAAAEAAIRRGLLVSGAVSVAAALGALWLACALRIASAVNHCLAVKAAGVSVWADARCDATIELAAPADVVLLILNAVAARREAKAEAEADAQIREAAGAAARNVVPDPGDLQQPLVTLALPASTPSPRPERLRLRGSDAVLMFVVAFIYVCCAVLIVVGELLPVVGDLIPVDCQRQCQVQRRCLAWFFKNIGYLWLAVGHCCLIIPYAVLRLRRLARKKVASFFVSVPCMVHPQRYKEHDLF

SEQ ID NO: 37533 - protein, 516 aa, Oryza sativa
MDNLYLILGAILAAAVVPFILFRGNGGKRGRRLPPGPPAVPLLGSVVLLTKALTDVEPELLLQRLIARYGPIVSLRMGTRVSVFVADRRLAHAALVEGGAALADRPGVPASRLLGENDNIITRAGYGPVWRLLRRNLVSETLHPSRARLFAPARYWVHRVIVNKLAASGQAPHDVVDTLQYAMFCLLVNMCFGERLDEATVRAVEDAQRDLLIYITSQMAVFAYFPAITKHLFRGRLEKIYALRRRQRELFMPLINARREYKKHGGETTKTTNKETTLEHSYVDTLLDIKLPEDGNRALTDDEIIKLCSEFLNAGTDTTSTALQWIMAELVKNPSIQSKLHDEIKSKTGDDQPEVTEEDVHGMPYLRAVVLEGLRKHPPGHFVLPHRAAEDVEVGGYLIPKGATVNFMVAEIGRDEREWAKPMEFIPERFLPGGDGEGVDVTGSKGIRMMPFGVGRRICAGLSFAMHHLEYFVANMVREFEWKEVAGDEVEFAEKREFATVMAKPLRARLVPRRTT

SEQ ID NO: 37534 - protein, 344 aa, Oryza sativa
MNPGRPAPASFRDRTNEFRAAVESAARYASSSAAAAPSSSSGGGVGGPLDVSRGAASAHSEFNRRASKIGLGIHQTSQKLARLAKLAKRTSVFDDPTVEIQELTAVIKKDITALNSAVVDLQVLCNSQNESGNLSKDTTNHSTTVVDNLKNRLMSATKEFKEVLTMRTENLKVHENRRQMFSSSAANNASNPFVRQRPLVTRDGPESSVPPAPWASDSATTPLFQRKKTNGDHGASSSSSQPFMQQQLVQQDSYMQSRAEALQNVESTIHELSNIFTQLATMVSQQGELAIRIDENMDDTLANVEGAQGQLLKYLNSISSNRWLMMKIFFVLMVFLMIFIFFVA

SEQ ID NO: 37535 - protein, 134 aa, Oryza sativa
MATCRSRGVERGGAPHVLAVDDSSVDRAVISGILRSSQFRVTAVDSGKRALELLGSEPNVSMIITDYWMPEMTGYELLKKVKESSRLKEIPVVIMSSENVSTRINRCLEEGAEDFLLKPVQPSDVSRLCSRVLR

SEQ ID NO: 37536 - protein, 459 aa, Oryza sativa
MGGDPTADPSSAYFIDADHPYAAAAASALTSHRSRSKWSHLSSLAVPDPLPASAVAAVPLLLRRRPHVALSFHLFATRRLLPSGSPPPLLLSVSAAHVAAASRLRRAAISLLSSAARHYPHSQIFAALAATYRRFASAPFVFDLLLLAYLRSRRDALAAASVARRILAAGAHPLPSTSAALLRSLPSAAAALDMYREIYTRPSSRINSQLLPTVHTFNSLLLAFYREGKCDVFKVVLQEMDRYSCVHNVCTYNIRMAAYCDSKEVEKARGLWDEMVEGGIQPDVPAYNTMISGYCGVGEVGMAEEMFKDMEMGGIDPSVTTFEWLVRGHCRVGDIDAAMLVRADMSRRGFQMAAEVVEEVVNVLCQKKRVKEALGVLKEEMRKEEFVPSRECYEVLIRELCEQGEVEVAMRLQAEMAGMGFKVGSEVYCAFVCAYEKAEDYEMAEKLRKELSVISIQDG

SEQ ID NO: 37537 - protein, 349 aa, Oryza sativa
MLEDVMDKLVDIVHFLHVEIQESFGTYDGALQLNQPSESRQTLGSAGLSLHYANIISQIDNIVSRSTVPPQSTRDALYQGLPPTIKSALRKKLHNCPQPQEVPITEIRSSMERTLQWIIPIANNTARAHHGFGWVGEWANTGNDAMRRAAGQPDVIKIETFYHADKAKTEACILDLVLWLHHLISYSRPSNGGRSRSPSRSPVRSPPLTPPHQVPTTTSSSSPPPPAVARPSGGTGGGLTREDRAMLQDVYAGRRRRAPCHSRSQELSSARGGGGAGGDSSSAVAAAAQLSKNDRLSKSSNDAPARSGGGGGGGKLFPLSRRPSSAVVSPAVDFDIDGIKALADAQKRQ

SEQ ID NO: 37538 - protein, 166 aa, Oryza sativa
MGPETEEVKHLSMKAAGTVGYMDPEYYGLHHLTVKSDVYGFGVVMLEALTGKRAIFKEAEGGSPVSVVDYAVPSIVAGELSKVLDARAPEPSAHEAEAVELVAYTAVHCVRLEGKDRPAMADIVANLETAVALCEDSATGGGAAGHGNSSSSASLSITSMELSRMD

SEQ ID NO: 37539 - protein, 783 aa, Oryza sativa
MEEEQSPRLAAGEPERKLEDGVTDAEDPGCTGNAAMSSLEQPLLKRSNTLTASHLAMVGAKVSHIESLDYEIIENDLFKHDWRRRSNVEVLQYIFLKWAMAFLVGLLTGVIASLINLAIENISGLKMLHMVQLVRKKRYWAGFLYFAGVNFGLTFIAAMLCVVFAPTAAGPGIPEIKAYLNGVDTPNMFGAPQLIVKIIGSICAVSSGLDLGKEGPLVHIGACLANLLSQGGSGRHRLRLRWLRYFDNDRDRRDLITCGASSGVCAAFRAPVGGVLFALEEVATWWRSALLWRTFFSTATVVVVLRGFIEVCRNGRCGLFGEGGLILFDVGDVAVRYHAGDLLPVTIVGVLGGVLGALYNHVLHKVLRVYNLINEKGRAAKLALALAVCALTSALLYVTPFAVPCTPCDPAFGGACPTLGKSGNFKRFNCPEGHYNDLATLLHATNVDATRNIFSTGTAGEFRLDSLLIFFAVYCVLGLFTFGIAVPSGLFLPIILMGSAYGRVTALVLSRFARIDHGLYAVLGAAALMSGSMRMTVSLVVIFLELTNNLLLLPITMFVLLIAKTVGDAFNPSIYEIILDLKGLPFLEAKPEPWMKDLTVGELAAAKPRAVALQVVERVSTVVEALRATRHNGFPVLDRPRPGVSELHGLVLRSHLVAALRKRWFLPERRRTEEWEAREMFSSAELADKCGGVDELEISPEEMGMYVDLHPLTNTTPYTVVETMSVAKAVVLFRSVALRHMLIMPKFQGPEISPIVGILTRQDLIAHNILGAFPHLASKRKTH

SEQ ID NO: 37540 - protein, 98 aa, Oryza sativa; identical to SEQ ID NO: 28718

SEQ ID NO: 37541 - protein, 196 aa, Oryza sativa
MNCADRTVPRTVPQPNDHEDCRVSGFAEATNFNDQAGRHQGFRPFSFGTTNHCQGQIIDHAVAASKHAEVNNSMKSRDVNLNSRLNTISFPIATANNETSTALNDVNRSCITGKGFSGSFSNNDGAASIVLPSSGLNNKISSSLGVADRSSIAARSFNAGYVYENGASEANNIGNKNNTMVYQTSLAMRPLSPPFF

SEQ ID NO: 37542 - protein, 392 aa, Oryza sativa
MCLLTTSMAGKERSHVHLCLTDYRDGTYTYTVHHIDVAPFFLRSDDPDVPDPGAMEEAVLPPPATRLATRPETNGLEFHHLLRAADGGDMIVATDDQRRTLIYDVAARAVGPGHMLLSDKRVPVSAAVADRLYVLDTSHAARRATCFEALVYDGVEDPLRADWYWRRLPGPPYADDGIGRPLPGSRVTALAVVGAGIWTTTAPAEDGVASVRPCSRLDPRRGVWTTPKGAGAGPGTYSFDTERQAWRREGDWELPFAGKAELVPGCNLWFGFSRADGSSSLCAADLAAAPHRACGVWEDFRPPKEWFSCGRHLVSLGSGKLCVVRFFATDPLDKWRRRDPVAIITAMEVRTMPACDGDDDGGRGGERRIKVVKHMSRCIKLPNYNKGRNWVL

SEQ ID NO: 37543 - protein, 350 aa, Oryza sativa
MGSIGGDEAAVLRAEESASGGVDVWSDAVSSHDPDHLLVMVHGILGSNADWQYAANEFVKQLPDDVIVHCSEKNINTLTLEGVDVMGERLADEVIDVIIRKPELTKISFLAHSVGGLAARYAIAKLCRHPSDTSKSETKGTIGGLEAMNFITVATPHLGSRGNNQVPLLFGSIAMENFASRVVHWIFRRTGKHLFLTDDDEGEPPLLQRMAEDYGDLYFISALHAFRRRVAYANADCDHIVGWRTSSIRRKTELPKWEESISEKYPHIVHEEYSEELGDETCQNSATVCDSDILEEKMVTGLRRVSWEKVDVSFHTSMQRFAAHSIIQVKYQFMNEGADVIQHIIDHFQV

SEQ ID NO: 37544 - protein, 98 aa, Oryza sativa
MGHGPRRLVSGAYAMPPWVPIEVKIDQKWKRAFVLRQADHRGLCLVRVTGTPDAEPVMVPLSTIRLPSRVHRAKRRPETAMQIQVKKARIEQSSDDEE

SEQ ID NO: 37545 - protein, 649 aa, Oryza sativa
MSTENYDPCYPDQPVVHRYLPVWAKLPAFAAKPAFVWADDGDTAMSYATLTYSQLDAAVERMSSGLLGALRRADTVLVLASPGLRLVKLLFACQRAVLTAVPIIPPDPSRPGAGGAAHSHLLRAVSQTRPRAAVADARYIDAIKKSNAVVDVAGEPDRLAAMLRSLRWLSVDELEQGGANGAAPVTPFVGGEPEDAYLIQYTSGATGAQKPVVITAGAAAHNARAARRAYELHPGSVVVSWLPQYHDCGLMFLLLTVVAGATCVLASPDAFVRRPRLWLELVTEFRATCTPVPSFALPLVLRRGRSPDGRRRRPLELGSLENLILINEPIYKSCVDEFVAEFRGDGLLPASISPSYGLAENCTFVSTAWRSRRCVDLPSYKKLLPSARLSFHMADEEPEIEIIMVDEETGEPVEDGVEGEIWVSSPSNASGYLGHPSATREVFCATLPGKGSCYVRTGDRGVVVVRGAERYLYVVGRSADVLALDVDGGQRSVCAHYIETAAFGGAPDRLRGGCIAAFATSPVPSTSLVVVVAELLKGSGGGGGGGDHKDICEGIKRAVWEEEGVRVGWIVLVDSGVVPKTTSGKLRRGAAREKLLAGKLPILLEARYDGDESSSSVPWDGGEEEMEKCPGMDAAYGSASRRLRLQSFL

SEQ ID NO: 37546 - protein, 426 aa, Oryza sativa
MASFQICAQQPSRVMKEWRTGDANIRPESGRCTISWTPRMVETEAIFEQKVLLATVLGNQPALSPRDLVAVIVDCGILPAHFRVEVTTPEDYLIVFRSAREKDWVLGKSKQVFFQGAPIAFKSWNRRLLASSTRFQFFTKLSLEGLPQHAWDEEAMAQLIRELGGELVELVPPADARVLTMFAWLKNPSAVPTTLEVEIPERAGGGPPCWERMAGSIRIPRAPLHKCTLTYNIIVHIEEIIDPTPLHVPLSTASNDEDDDDVPRQVTFSCWAGRIDGTGPWTSKQGGGRPFGGASGFAGGLPGRTWSTSSVQRVSEMIPTNPGALRDTARDDEHTEHAGSGLHVSDRDTIEEHSSGEPGNRMAGRGDDAACNVVPRVLATSTALVAGRDVLATGKDVLATENGVLAAGKDVLATGGEVALVARSDA

SEQ ID NO: 37547 - protein, 363 aa, Oryza sativa
MVVQKMWMPVDLRLAPAGSQGAEDQGASPQGGVPLEPELREGRRPHGARRVRRVQPHLYHLRRVRPRPPAAAAVGRHRQRPDKAVQAAQPAGGQGEGVVRADHAARRAVASPPAGDQQLVPDHRAEAVRAEGRHRLAQAPGRAGQHGGRRGAGPAVRERDRVRGAAAADGGRRAAGGSERGARRDVRDAAGEAQGGGAVQAARLVAGPGAAGRRAGAGVEGRGGPDHGVAGADGARHGAVAGGAEHGPDAAVRRRGAGVRAADAPVGGQGEGRGGARRGARRAQLRLLVRGAAARLRPPPLNPSIEPFNHSTRGKLLPKDSTFGFSPSSFFLFLFLASFVNALIERVDFFCFLFGREGVGRSG

SEQ ID NO: 37548 - protein, 342 aa, Oryza sativa
MGVEKTTANGGSGAAAVSGGGRTVCVTGAGGFIASWLVKLLLEKGYAVRGTVRNPDDAAKNAHLMALAGAAERLTLVRAELLDKESLAAAFAGCEGVFHTASPITDDPEKMIEPAVSGARNVITAAADAGGVRRVVMTSSIGAVYMGGGGGEEVDETCWSDLDHCRDTGNWYCYAKTVAEQAAWELAKERRLDLVVVNPSLVLGPLLQRGVNASTWHVLKYLDGSARTYADAAQAYVHVRDVADAHARAYESPAARGRYLCAGRTLHRGEVCRILAALFPGYPVPTRCKGDAGETAEGCRFSSRKLAELGVAVMPASQCLYDTVVSLQDKGLLPFVPAAAMP

SEQ ID NO: 37549 - protein, 434 aa, Oryza sativa
MQNLAFVIVTLLAALAISRCNAAATVRMQLTHADAGRGLAARELMQRMALRSKARAARRLSSSASAPVSPGTYDNGVPTTEYLVHLAIGTPPQPVQLTLDTGSDLIWTQCQPCPACFDQALPYFDPSTSSTLSLTSCDSTLCQGLPVASCGSPKFWPNQTCVYTYSYGDKSVTTGFLEVDKFTFVGAGASVPGVAFGCGLFNNGVFKSNETGIAGFGRGPLSLPSQLKVGNFSHCFTAVNGLKPSTVLLDLPADLYKSGRGAVQSTPLIQNPANPTFYYLSLKGITVGSTRLPVPESEFALKNGTGGTIIDSGTAMTSLPTRVYRLVRDAFAAQVKLPVVSGNTTDPYFCLSAPLRAKPYVPKMVLHFEGATMDLPRENYVFEVEDAGSSILCLAIIEGGEVTTIGNFQQQNMHVLYDLQNSKLSFVPAQCDKL

SEQ ID NO: 37550 - protein, 632 aa, Oryza sativa
MMSFLPKGKTTQTAFKWPWRGESQLSAHLLIDIPPEIELSDYRRLPSPGNESPSGLLHGEDFKEEVIPDLDIFFERLYEYFCAKGLRCIITKWIIEILNVTFMVCCIGFFFLFVDWPALGDLKCGVEALESGAKPCDLMKLIKYRPLDPFTFTKFITIGSMVILSTYGIINFVKFFVKLRSTLKVRDFYCNSLKVTDLEIQTISWPRVVEKVVLLQKSQRLCVVKDLTEHDIIMRIMRKQNYLIGMVNKGIIALPIPSWLPGVGPTVSSRMHGKKSYLMLPKALEWTLNWCIFQTMFDRKFCVRKDILTSPSLLKKRLVFMGIAMFLLSPCLVIFPLVYLFLRYAEEFYNHPSTASSRKWSNLSKWILREYNEVDHFFKHRLNNSSVNSLNYLKQFPTPLVSIIAKFISFVSGGLAGILLILGFLGESILEGHVFGRNLLWYTIVFGTIATVSRNVVVDELQVIDPEGAMSFVLQQTHYMPKRWRGKEGSELVRRDFESLFQYTITMLLEEMASIFITPYLLIFVVPKRVDDILRFISDFTVYVDGVGDVCSLSMFDLRRHGNRNYGSPHNAVKSMRSSQGKMEKSLLSSKAPTHHGSQTQMARNLFATSRNSRRNKSVNIPFKQRNHHSLG

SEQ ID NO: 37551 - protein, 183 aa, Oryza sativa
MATVEGRRGWIPWARRAMGEDAEMGSLRRAAAAGEDDEKGVPESETAAKGDGAASYGYIPVPQDADGDKCVVLVPTANAADWSVAEMKDGGGGGGGGEDATATTKMIQMRPVGLGIARTRPGGDRLDGIEDGIEDDIDEVKDPGEDQAVHQPMLPVLVRGSAPEKSDLVRLLVLFWEDLGWVY

SEQ ID NO: 37552 - protein, 682 aa, Oryza sativa
MGMSSPVTEAEMATVKTSSNGVWQGDDPLHFAFPLLILQALLILLLSRLLALLLRPLRQPKVIAEIVAGILLGPSALGRNKAYLRALFPPWSAPVLESVASLGLLFFLFLVGLELDLRSVRRSGRRAFAIAAAGISLPFACGVGVAFVLRGELPGAARAGYAPFLVFMGVALSITAFPVLARILAELKLLTTPIGETALAAAAFNDVAAWVLLALAVAISGSGDHRSPIVSLWVLLSGAAFVTIWMVFVKPAMAWVARRSDGQGGGEVWVAATLAGVLASGLATDMIGIHAIFGAFVFGLTVPKEGEFARRVTERVEDLVSELLLPLYFASSGLKTDVATIRGGGAWGMLALVIGTACAGKIVGTFAVAMACGMSAREALVLGVVMNTKGLVELIVLNIGRGRKVLDEETFAILVLMALVTTFITTPTVMAIYKPARNAGRRRLHHRKLHGPSAPSSPSAAATAGAKELRVLACIHGGHDVPALINLIETIRGHTQPRRLVKLYILRMVELTERTSSILMARAARRNGVPFLRPRRGGGDQVDVAFDTYAQLGHVHVRPMTAVSALHTIHDDVAAVAEDKRVSLVVLPFQAPPGPRPWRRPRPRVARRQPEDPARGALLGRRPRRPRLRRRRAGQLGAGRARRLRRLLRRAGRPRGARARREDGRAPRRAGHRRAVRRRQGR

SEQ ID NO: 37553 - protein, 739 aa, Oryza sativa
MSTQKPKHVSDLTQNKASYVLGSVLKCGDDEDFPTDCCIVQLSSSIPVEADPETKMPKGAIFAVFLINMKTYNRIWKCLRLGANDGNLANLQNKSSTNMVNLVRQYKPKVVEDNSSQVSQCLKHGSMDFLGLEKLNLNASQLNAVADCVSVMENQLSSLKLIWGPPGTGKTKTISTILWAMLIKGRKTLTCAPTNTSILEVASRIVRLVRGCSDGSACFLSDIVLFGNKKRMKIDDGHELSVIFLDSRAERLLPCFVPNTGWRHCLCSLIDLLENSVTKYKYYIEDVLEKRKDIEKETAEKDKGENVPWRMQFGNGSCEKKCGRPEDKEEASRLLPFKYYLKDGYNNLSQNLSYCIEILYNNHPRNSGTERSFQCMLEVLELIKILHGMINCYKGNADIWSDELLETMIEEDSDPVLWSEQLVSVQTSTCIKSKFRLARLLCVQELKYLVKNLELPNYYSIQPIKLYLLQRTKCILCTVSSSFRLYNVPMDVSPSGICGPFKQPEKANLLEMLIVDEAAQLKECETLIPLQLPGITQAVLIGDEYQLPALVKSKIADNAFFGRSVFERLSLLGYSKHLLNVQYRMHPEISRFPVATFYDGKISDGSNVTTEKNGRSLKNTIEVATVLRIVQRLFKEAVSTQSKLSVGVVSPYNAQVRAIQEKVGKFIKNGLDAYKPAKVSETKAKLPFMRSLKLARFSLSGRLKYRMASVSRLVCSVVTRVCRRKKTMCVTVSIVLLTM

SEQ ID NO: 37554 - protein, 444 aa, Oryza sativa
MPEGGIPACFRGAPGGGAGGGGGGGVGVAGQSSGGVGTSLATSVYETRLGVAALSWSRAALGLSLRVVLRVAGGAGAGAWAAASSSAASDYGCYDEGAECYGGEEEEEEEEATVAVRVRPWLLWRRRGSKRFRVRDRRVDLAWDLTRARFACPGSPEPSSGYFVAVVVDGEMALVAGDMAEEAYRKTKARRGPGPDAVLISRREHVSMRDAGHGRGHKTFVNVRGKEREISVDLVSRGHGKDRDKDKDKERDKADVGMSVTVDGERVLHIRRLRWKFRGTEKVDLGGGDGVQVSWDLHHWLFPNRDTAPADASAVTPPPQPAHAVFIFRFELADIAGDDRDSAEVKDEHLLENAGSGGGGGAWAGYLGRWGRGDWSESSSNGENRRKRGQARRLAKASSSSSASVASSSASWASGSTVMDWASPEEAELQRGHGFSLLVYAWKC

SEQ ID NO: 37555 - protein, 509 aa, Oryza sativa
MEFSPRAAELTTLLESRMTNFYTNFQVDEIGRVVSVGDGIARVYGLNEIQAGEMVEFASGVKGIALNLENENVGIVVFGSDTAIKEGDLVKRTGSIVDVPAGKAMLGRVVDALGVPIDGKGALSDHERRRVEVKAPGIIERKSVHEPMQTGLKAVDSLVPIGRGQRELIIGDRQTGKTAIAIDTILNQKQMNSRGTNESETLYCVYVAIGQKRSTVAQLVQILSEANALEYSILVAATASDPAPLQFLAPYSGCAMGEYFRDNGMHALIIYDDLSKQAVAYRQMSLLLRRPPGREAFPGDVFYLHSRLLERAAKRSDQTGAGSLTALPVIETQAGDVSAYIPTNVISITDGQICLETELFYRGIRPAINVGLSVSRVGSAAQLKAMKQVCGSLKLELAQYREVAAFAQFGSDLDAATQALLNRGARLTEVLKQPQYEPLPIEKQIVVIYAAVNGFCDRMPLDRISQYEKAILSTINPELLKSFNEKGGLTNERKIELDAFLKQTAKEIN

SEQ ID NO: 37556 - protein, 513 aa, Oryza sativa
MAGSTLFRWLFLLLAIVSLAAADSGSGEAETTVPGQIRLSCGASASATDGDGRAWDGDAVSTFAPSVTGVAADASYQDPSLPSPVPYMTARVFSSSYTYSFPVKPGRVFLRLYFYPSAYGNLGAAAAAADALFGVTAGGITLLRDFNASQTALAVGYAYIVREFSLNVSSGATSLNVTFAPSPRGAPGHGSHHYAFVNGIEVVPTPDMFTTPVPAFANGGRPNPMPLRADTAFQTMYRLNVGGEAITPRDDAGGFYRTWDNDAPYIFGAAFGVTFAKDSNVSVRYNPPSVPKYAAPEDVYATARSMGPNAQINLNYNLTWILPVDAGFYYLLRFHFCEIQYPITKVNQRSFFIYINNQTAQSQMDVIVWSGGIGRAVYTDYLVVTAGSGQMDLLVALHPDLSSRPEYFDAILNGLEVFKLHKYGTHSLAGPNPPIPLKQVFSTVDGSRSESRKKSVVCAAVGGVAAGCFLAVLVAFAVAWAVRRRQRKAAAEKPADGLLGPTKGSALYDPVQK

SEQ ID NO: 37557 - protein, 328 aa, Oryza sativa; identical to SEQ ID NO: 35594

SEQ ID NO: 37558 - protein, 551 aa, Oryza sativa
MLAGCSFSSSRHQMSTAQRFDILPCGFSKRGSRGDGAAPRVAGDARSGATTCSFRTHPAPPVTQSVSWGAKPEPGGNGNGAHRAVKRAHDEDAVEEYGPIVRAKRTRMGGDGDEVWFHQSIAGTMQATAAGEGEEAEEEKVFLVPSAAAFPHGMAAAGPSLAAAKKEEYSKSPSDSSSSSGTDGGSSAMMPPPQPPEFDARNGVPAPGQAEREALELVRALTACADSLSAGNHEAANYYLARLGEMASPAGPTPMHRVAAYFTEALALRVVRMWPHMFDIGPPRELTDDAFGGGDDDAMALRILNAITPIPRFLHFTLNERLLREFEGHERVHVIDFDIKQGLQWPGLLQSLAARAVPPAHVRITGVGESRQELQETGARLARVAAALGLAFEFHAVVDRLEDVRLWMLHVKRGECVAVNCVLAMHRLLRDDAALTDFLGLARSTGATILLLGEHEGGGLNSGRWEARFARALRYYAAAFDAVDAAGLPEASPARAKAEEMFAREIRNAVAFEGPERFERHESFAGWRRRMEDGGGFKNAGIGEREAMRGA

SEQ ID NO: 37559 - protein, 254 aa, Oryza sativa
MGEEKKDKASGKDAGEKKDAAGGGEKAAAAAPGPIVLKVELHCAGCASKVKKAIKRAPGVETVVTDTAGNKVVVTGAADAAELKERIEARTKKAVQIVSAGAGPPPKKDKEEKKDKDKKGGGDDKKAAAAFVGQAPPTPLPLAPPGTLPPRGGRRLPPPRARLVRLLLLFRRRRRGGGGGGGRPGEELEEDASVPARRGRGDGRRLLRRRPALPPLLPGHRLWRHRPAPRECGGEDLTTCSRRNNNFKRDNCPI

SEQ ID NO: 37560 - protein, 356 aa, Oryza sativa
MAAAAGKAAMERHQSIDAQLRLLAPGKVSEDDKLVEYDALLVDRFLDILQDLHGPHLREFVQECYELSAEYENDRDEARLDELGRKLTSLSPGDSIVVSSSFSHMLNLANLAEEVQIAHRRRIKLKRGDFADEASAPTESDIEETLKRLVTQLGKSREEVFDALKNQTVDLVFTAHPTQSVRRSLLQKHGRIRNCLRQLYAKDITADDKQELDEALQREIQAAFRTDEIRRTPPTPQDEMRAGMSYFHETIWKGVPKFLRRIDTALKNIGINERLPYNAPLIQFSSWMGGDRDGNPRVTPEVTRDVCLLARMMAANLYFSQIEDLMFELSMWRCSDELRILQMICIAPPEKLQSTI

SEQ ID NO: 37561 - protein, 359 aa, Oryza sativa
MSSSPLVLTVLLFASLTWLVVLAPRSSSPPATATPSPPVVGDGVGGGGEDGDLALFRRATLDGGEGAAAMAVAEPKVAFLFLTNSELTFAPLWERFFEGHGERLNVYVHADPAARLMMPPTRSFKGRFVAAGPTKRADATLIAAARRLLAAALVDDAANAYFALLSQHCIPVHSFRHLHATLFPPPAAAAAAARRQRRLPSYIEVLDGEPQMASRYAARGEGAMLPEVPFDRFRVGSQFFTLARRHAALVVGERRLWDKFRQPCLDQNACYPEEHYFPTLLDMADPAGVARYTLTHVNWAGSVHGHPHTYTAAEVSAELVADLRRPKKNTTHDYMFARKFSPDCLAPLMDIADAILFND

SEQ ID NO: 37562 - protein, 454 aa, Oryza sativa
MNSQVSKADASQSRIRASTHAHYLFDETPLRRARLPARAMEAPPVKSGWRVMAPAHAGGREDRLSDLPEGVLHRVMSFLDSRQAVRTCVLSRRWRDVWRTVPRVHADFCDFTLNWTSDDDEVDEAAVAEDEVVFNRFVNRLLELRDPNASIRSFFLRFCRSDGGDDGSAEGNRWISYALQKNVRILEVSVLSYALELDHSVFSSRYLRTMDFSNVVMNQGFFKQLGMGCPELEELFLDECFIVDDEISSQTLKVLTLDATHFCCGFKTSISSPSITSLALHYPMSGKPVLNDMEALVSTSMLLCHVKDDDFAANDLRDYLWSLYNVEILDFSYHGKKLTMENNLQLCPKFINLVSLTLGPWCLDANFYGLIVFLQNSPILEKLTLELAMYRTGKLQRIIGQIEERSFTCEHLTSVEVICLEDDPLVNDVVNFFVNSGMSSVQIHIKQWSQSEYE

SEQ ID NO: 37563 - protein, 666 aa, Oryza sativa
MTELQSPTDPRIFCLTKIVEIAHYNVNRIRLVWSRIWKVLSEFFVSVGLLENLSVAIFVMDSLRQLAMKFLEREELANYNFQNEFLRPFVIVMQKSNAPEVRELIVRCVSQMVLSRVNNIKSGWKGVFMVFTSAAADDTKSIVLLAFETMEKIVRDYFPYITETENTTFTDCVNCLIAFTSSQFNSDANLNAIAFLRFCAVKLADEGFGCQEKCTDEPRNLGMSDGNATVDKDDSISLWIPLLAGLAKLTSDSRSTIKRSAVGVLFDILKDHGQLFSESFWTNILESVIYPLFSSERSSSNDPTSTPSIPEDDFSNLETQTLAVKCLVGLFINFFDVMRPELARVASIVTYFIRSPYKHSASIGVSALMRLIEGVGGELSKEEWKDILLRFKESVAHTFLVFSKIVRMMQDIEIPDRFESYSENDQYSDHENYGNEEEEANMETTSYAIVKLKNHMALLLLVVQGIIKLYEEHRKYLSSDHINILLEMISAIATHASEVSSESSLLLKFHKACSLMEVSEPAIVHFENESYQTYLKLLQALFRDYPSMSEEMDIESQILRVCEKILRIYLQCAQREPSNEALHRNASIHCIVPLGAAKKEELAARTSLVLLVMQLLGNLEEDSFRRVLPWFFPLLVDLIRCEHSSGEVQHALYKIFQSSIGPMLTV

SEQ ID NO: 37564 - protein, 267 aa, Oryza sativa
MRLHYADLSDSSSLRRALDHILPDEVYNLAAQSHVAVSFEVPDYTADVTATGALRLLEAVRLASKRIRYYQAGSSEMFGSTPPPQSESSPFHPRSPYGLFACNGVLFNHESPRRGENFVTRKITRAVGRIKIGLQTKVFLGNLSAARDWGFAGDYVEAMWRMLQQDKPGDYVVATEESHTVEEFLQAAFGYAGLNWKDHVVIDKKYFRPAEVDSLQGDATKARKELGWKPKVGFQQLVEMMVDNDIELAKKEKVLVDAGYRDPKQQP

SEQ ID NO: 37565 - protein, 196 aa, Oryza sativa
MRLAPSPRLAGDTSSAAFFPAHDGQPNQSNQTTPSDHSLSPWTRTERAPRRLAINRLAAHHLRRRSLRLNLNLHVLGGGVLLGGRAAGAVSGEAKATPEAAAAATPMEDARQQRPRRGDLACGSGSHRGLREERTDGGGRRRRRRRGRDARRRVSLHRHGRRELDREGELRFTRNIAKVLEVFAPEFDGGVSCRRA

SEQ ID NO: 37566 - protein, 226 aa, Oryza sativa
MLETGQEFTFTIKRGVGTETCVSVNYDDFVNDVEVGDMLLVDGGMMSLLVKSKTEDSVKCEVIDGGELKSRRHLNVRGKSATLPSITDKDWDDIKFGVENQVDYYAVSFVKDAQVVHELKDYLRSSNADIHVIVKIESADSIPNLHSIITASDGAMVARGDLGAELPIEEVPLLQEEIIRMCRSMGKAVIVATNMLESMIVHPTPTRAEVSDIAIAVRDRIYGYPT

SEQ ID NO: 37567 - protein, 182 aa, Oryza sativa
MPPKRKGLTSKKMAEAREEGGIDVLPDALLQHILSFLSADEAVKTSASYPVAGATPPLEIHAHPAYCQNGGQMGLGELRGFQQVCQHPTTLQISKDTKSMIETEENYNVLVKPVVTSKHLKVVKVHCTEVDEGVYKIVKFLTTLNIEVIMKRMDRSTKRKLTIDTFVLSIFLKFATPYFFYL

SEQ ID NO: 37568 - protein, 645 aa, Oryza sativa
MAGLVSKQMQEEDYDDEEGDQSGVTMDISRPCVAAYLPSGIRELKQVEDTLSPSYDNLPCELRLLSLYMSTFPQGYVIDKHLLIRKWKAEGLIAVHTLQSGFEERAEECFSQLVQRCIIRPARTRRRACDCECNPCSYQVNHFMFQLLASKSADKNFVTTSCCDTGTLRGSSGLQIRRVFLHHGQQQQQPADQEVPAQMEEMFSFTRSLTVSGEVDGISLEMFPHLVVLDLQGWEKLKDDDLPRIFSSGKLFLLRYLSLRNTRISELPPEIGMLSSLETLDASHTRIAKLPPEVCTLRSLEELDLRSTRIQRLPERIDDLVALRHLRAGDGAASTRIPKGIDWGMLRDTLETLAAVDLRECSADVVRKLSLLRCLEVLSVSLSLRQCTDKEYQDNLSFLVQRLKCLRSLTIRCELGCSMEFLDFSPEDAPQNLRHVAMHARFLTVPRWIAGLNHLSSLHIRVCKLAPEGVKILGRLHRLECLELGLDFLPREAIVIQGQGFMSSSQNRSNRAPLNSKIHEEEEDGDDEKNGIIIYPFRELLRLSVDCRVPWLVFKEGAMPKLTDLELKLSTGPASHESPPSGIANLLSLEQVAVQYDAWYINSRSVRATVDAIRRQVAELRYTVKLVNNGVEEDVEAVINPRRDS

SEQ ID NO: 37569 - protein, 53 aa, Oryza sativa
MKHVLDIKLRNHVHIEAIYLQHIITCKTHKKFIITPKVVKPNVLVLENTSLHP

SEQ ID NO: 37570 - protein, 232 aa, Oryza sativa
MAEVITDAPLSVKTKAVDMLECYLIDADVKRMDDDLKYCQGSIRYGFDISSSIKTTFLLFEDNRSAQDTVDKLNLMNHPSIMRSLGDVICFDQHLPNHVLPFPYFDTTYADYLDKKSNKTFEFKRFTPEFIQLTSQVVHGMSALQEKGFCCPNLEGKDIFKENNCISAKIWHFCICTGCTGDKHTDWRRLGQLLKKTAVDHKCLTIEIEDLCTKINKGILEGYALILSLFEC

SEQ ID NO: 37571 - protein, 398 aa, Oryza sativa
MFCNSCSNNKVSRAALAPDRSKRYRVCDACFSQMQKVEEHRKLDPQQKIQKDEVCPIEIRSYTPKLARIFKEANAIMEKMASAQSPHQRSQNLAVPDHVRTLRWGLVECPSQFRCVRESIPYCSTLNKQTVSGSIVRVMNETMAPKPASSLLKSANDSKAELDLMENILLEEVKQLQEQVTTLAKQCRQRSLKVQLYKRKVEETWLIAKDEAAKCKAAKDVIKVLIDQLDFLSKNLLAGEKLDNSRIMPSHIASAKSLKAELPDPPDKNVFTSEFQQSKSNRDHHNSRQVDRECTQPSIASMANYSVTHQNCRRTSNGSTRCTEGTDATTAPTDSNGAIEQIERGVYATVVTSPGGKKCIKRIRFSRKHFGEDQAQKWWEANESMIFGKYSSMEQTVG

SEQ ID NO: 37572 - protein, 238 aa, Oryza sativa
MDDPYIDEDGEPLMDPYDTRDPSPEPQQQPYDDLEDDLGDDWNRGRSPTPVHGDDGAGSSSKPRKRLLKKGGGGGGGGGGHGMPSDGLDDWGEEAAGLADDDVDPEADAAKKRKGSSALRDLARGGGKEKKEKKRRKEDGREREGGRGMGMAREKRGGSGGKGFGGGGGGGHGDQDEGEREIQELWDTIAGGDSEVIIDHVLLNLIMLALFQCISDVCYGVLTISCVFAARNLSLQLC

SEQ ID NO: 37573 - protein, 131 aa, Oryza sativa
MAAAARVFRGCRFLMAAAGGKRPASASASASAAGAKVTKTEAAQAKEKRGIMQPVPVSDALSRFAGGAPEMSRAGAVKLIWNHIKANGLQNPANKREINCDDKLKSLFAGKDKVGMMEIAKLLSPHFIKAN

SEQ ID NO: 37574 - protein, 486 aa, Oryza sativa
MIEIYNEQVRDLLVNDGLNKRLEIRNNSQNGLNVPDASLVCVASTMDVMELMNVGQKNRAVGATALNDRSSRSHSCLTVHVQGRDLTSGTILRGCMHLVDLAGSERVDKSEVTGERLKEAQHINKSLSALGDVIASLAQKNAHVPYRNSKLTQLLQDSLGGQAKTLMFVHISPESDALGESISTLKFAERVSTVELGAARLNKESGEVKELKEQIARLKSSLAMKDSGSEQNINRDPEAFNMKMPSPGFSNRRQGSCELVSSQTNFRQPMEDVGNIEVRANPTLRQKKPSFDLQDLLASNDSPSWPDSISRANFQMGEERVTIGGEWIDKVVVNNNNSVGDWEGDSAALPDFFYQRYHSGTRDKQYLRNNSRKKDGNEFEQQRPRFYSTNTDDSDDIDIATSDSSESDALWQFNVQSINSSISENGSKIKKPQTKLRESSDTRTPLHSQIPSASRKTSNGNRSGRQPLSGSDSRRLSSNGRHAGTK

SEQ ID NO: 37575 - protein, 107 aa, Oryza sativa
MPNSLSSQSAVSFCMTNRICSRDRFLSFSKTAPHCFSLLGKSPLSANIVEEKRREEEKRREDRREEGRDLHVGPTIFYFFILLSRMPRQQTRYPYCHGTEIAWFCKV

SEQ ID NO: 37576 - protein, 396 aa, Oryza sativa
MRFAVTKVCGGGAKARAGMLQIAGSNIETPALLLSTRKGLPAFVSRDLLASLSLPDSLLLHVCPTHFMEGPPSKTISNISGLHHMLGLPDHILIAAAGDSIESLPTSEASNKFGASFETPAGRRLVKPSDYMELISCMKPNLWASLADEVPAWVTEKRNKVSVERTLRWLDACIALDEDSGANTLGVVVGGSSIELRKLCATEVSKRNVSGFWIGGLGFGDSPEERCSILDAAVGCLPPEKPRVVSRLGLPEEVLEGVAAGIDLFDSTYIYQLTMGGFALIFPIDMVGEKMQNGSLNSSDGDFTKINLRATTYRKDTSRIVDSCSCFTCQNHTRAYLNHLLNVHEMLAQILLEIHNTHHYLCFFRLIRDTIKTGQFDRFRQQFVQDRRAYLAAAVI

SEQ ID NO: 37577 - protein, 102 aa, Oryza sativa
MSTHGLSPASPWLTYPNVEAADVSATSEKLSSIISASAFWLCIRSSDRCPPSDTTSTALRLAGRCCCCRPEPGMAVALSEPELDSRTRGRMFSPCAHETIWP

SEQ ID NO: 37578 - protein, 122 aa, Oryza sativa
MLGGGKMKGGETMGGGGGSGSSSISPLVSFVLGAAMATVCILFVMSASPGRRLADISAWSNADDAPPLPLPLQDAAVDSNDSLAAAAAANVTVVAAPAPAPVQVCTYLPFFLLLQYAMNKTN

SEQ ID NO: 37579 - protein, 211 aa, Oryza sativa
MAPSLLASAASQILAAPRRGGRGRRRLVIACSAGAGAPPKLVTFLGKGGSGKTTAAAVAAQYYASEGLKTCLVIQSQDPTAEQLMGCKIGNSLTECAANLSTMKLETSKMLLEPLDRLKKVDSQINLTQGVLEAVVGEELGVLPGMDSVCSVLALQKLLNFFSTQRNSSQEEFDVVVYDCNNTEEILRLIGATERARQVLLEVCEGSSRKD

SEQ ID NO: 37580 - protein, 576 aa, Oryza sativa
MAAATPASGGGGGGYSCETAEQTREWMEAISAFLHLHRPLLEAHVVNFFKDRLWEMVDAEWMECLRREPVESLLMLPSGCVQEHWPSSLRDFVLTAKSLVLPREQKSPRSLLPDLHVASINTVLAQGMNSKKKHEIETLAGLVHAITKSCGAKTVIDVGSGQGYLAQALSFEYQLPVVAIDASSHHASVTNTRAERIKKYYTAKCVGKQQLRVPRTVTCHVLSSDTLAAVTLEACQDDHAEHIPESKNFNESSPQIEKPNDSIPPLVLAGLHACGDLSVNMLRLFVSCEQVKALISIGCCYNLLSEECHEDTNTCPGFPMSKAAKLSNLVLRKSTRDLGCQSAERWRSLTKDIALQNFDIHAFRAAFQMFLEKHFPEVSRSSPSIGRQGKALRRQRLRKVMESPMAMAETDALSYSTQKEQIMTKDDPLPTGPNNFKEVHVDFLPELSTGFVDSAVSGAAVVPDDIYLDKSQKFTLFKDFTVSGLGRLGCDFVENVSLLEIWKDVQPFTEFIGPFWCLRVALGPLVETYILLDRLLFLQEQGSVIEASLFPLFNPTMSPRNMAIIAWKLSANPSKV

SEQ ID NO: 37581 - protein, 341 aa, Oryza sativa
MQPPVAKKVAARVDTMEIKSQIAKKLGAERSEHYFHSLKKFLGGQLGKEEFDKICVATMGRDNIKYHNFLIRSILSNAYLATAPPPPPPPSRQATTGNSQTSTVSVSNGAVANHGVMAGVMRGPALATREARFERPSPLGKSPLGHQGTGEFVSAGSKAPLEVVSVEDGEEVNQAGGSPVYAQSRSPIRAPLGVSFGDPKAQNSRPSIPHPSLICYKNGELPEAQRLLKLLENKLQAEGLSLTQECADVLNSGLNAYLSRLLKSCMGVAKSRGKRVMMNYPNVTTVAVINGVQYQRSTGSADYSYQASLLDLETAVVCNPQLLGGNSSRVRDKISAHLLNG

SEQ ID NO: 37582 - protein, 37 aa, Oryza sativa
MFSRLIVLAVVSSYIRQTAMEVGFACLLAGALGNEKK

SEQ ID NO: 37583 - protein, 478 aa, Oryza sativa
MACAQTGSGKTAAFCLPVVSGLVAAGGSGIGHRERSSFNRAAAKPRALVLAPTRELAAQINEEAKKFSFQTGLRVVVAYGGTPMYNQLRDLERGADILVATPGRLVDMVERSKVSLEAIKYLVMDEADRMLDMGFEPQIRKIVERMNMPRKSVRQTMLFSATFPPEIQRLASDFLSNYIFITVGRVGSSTDLIMQKVELLSDGEKRGYLLDLLQRQSVGVANSKLQQPLTLVFVETKREADSLRYWLYSKGFPATAIHGDRTQQERESALRSFKTGLTPIMVATDVASRGLDVPNVAHVINYDLPKSIEDYVHRIGRTGRAGKAGSATAFFTESDHSLAKGLLELMTEAKQDVPDWLVQYAERPYYGGSSYGGRNRRSGGGGNRFAGRDFRQGSGGGYSGGGGGGGYSGGGGGGGYSGGGGGYSGGGRGGGYSRGGRGGYSGGGGGGGGDPYRASAPPPRYYPSYPMGTADINASGWD

SEQ ID NO: 37584 - protein, 322 aa, Oryza sativa
MSSAMASSMAKNSSPFKVVLGSSSPARREILADMGYEFTVMCADIDERAIRREKPEELVKALAEAKAEAIKLKLHGEDSAQERDQPTILITSDQVMVSKGMIRERPKGQEEAREFIKGISISNLCLGIVPVNLLYLAKKFWLCVSLLLVGYSGDKAFAVNYVLVTNLSNGASKGGWDIPEIYFHHIPEDFIQSVVKEGHMTCVAGGLKLTHPSVLPFIKQLVSNSFETTTIASITTLRTANLYWTVSLQRLNNNNIESIALILRFLPMLHRSAQWIAFEDSRGSSLRGLFKKFLEPNDLHLECHLQLARRALLNGPYDALVL

SEQ ID NO: 37585 - protein, 185 aa, Oryza sativa
MARLMSSALIRGLVRSSCSPTVAAVAQPTIHQFRNYSSGLGGDSTATGDSSSTRVAADPDTHQDFQPTTKSSNMSFDDIVSQDIKENPVLIYMKGYPDAPRCGFSALAVRVLKQYDVPISARDILGDLKLKESVKAHTNWPTFPQIFIKGEFVGGSDIILDMHQKGQLKDVLGDIAQKREQNESS

SEQ ID NO: 37586 - protein, 406 aa, Oryza sativa
MKSSACGDVSMSGDDDIELEKSNILLIGPTGSGKTLLAKTLARFADVPFVIADATAITQAGYSGEDVESIICNLLAAAKFNVEATERGIVYIDEVDKLIKKVECNEDRRDVSGEGVQHALLKIFEGTVINVPRKRNQDSISDGYVEVNTKNILFICGGSFSGLEKIVSERHRNCHMGFGLPTSGDLRNCGWTNAIGESCCVEAIESDDLIAYGLIPEFIGRLPITVGLNDLSEAQLVQVLMEPKNAIGKQYKKLFKMNDVKLHFTENALRLIAKKAASRETGARELRSIMEDILTEAMFEIPDARGGKEKIIAVLVDEESVGSVHSRGCGAKIFRDDGALELYVYQNNIRLPGLIPGNPKRTRIVSFCLLVALSATKLWVYHTFHCFSSIYEWVVSILCKANIFTQ

SEQ ID NO: 37587 - protein, 243 aa, Oryza sativa
MFRRAAASTFFRHALSTSPYSSSAAAAAAAASSSAVNSIILRSLKEHFLEVSKMTPPPKISPPKPYTIVKGALDQASGPVLRRGYGDAGEEISISVARLANIMPPGADYDSDDDDGGGGGVSESISQLFLHVDISRPGSSKSLQFLCGLYPDAVGIHSVCLRPKTAESGTAGLAGKGGDGYQGRIFQELDENVRDAFHHYIEARGINEKLFPFLQAWLYVKDHRNLIRWFKSVGTLISEPKSE

SEQ ID NO: 37588 - protein, 116 aa, Oryza sativa
MEQRRPRRMKTVAAPAVAASTMAPRWPPPPPSSPSLLLSGGERRLRLALDAWVGDRGERGGRGNQRSGASPQEPLPTQWAASPSPPAKSERGTRSPAEGRVPSRGGGADGKANGRS

SEQ ID NO: 37589 - protein, 127 aa, Oryza sativa
MAAFHGRRPPFPPPFPAPPLLGSLPSAIKWNPLFAFYRFSLLPSLPVAAPPLPASSLSLMCRRPPPAISPSSPVRQQAVPSLSSASQPPPLPRSALRFTGKPLEVRPHRQPVASPPLHRLPPAVRRA

SEQ ID NO: 37590 - protein, 82 aa, Oryza sativa
MHTRLLSVVPVFSSMNDFTTQQQSCCHLPALSQVCFSASFSPYQFLYVPLVRLHLLSPSPFCYQIGSMNCSVNADHIMRIFP

SEQ ID NO: 37591 - protein, 98 aa, Oryza sativa
MSAKAVALPYTRIRFLAPSRVSTITRSRFLAGADTDFSLKAKTQKWANTRPSGRTCRLRLRAPADTFRSTFTCEPKSSCRTPSFLISVLAFFIFRRGL

SEQ ID NO: 37592 - protein, 292 aa, Oryza sativa
MADHPPNHRGEGMDDFVAELARMTLVVGYPNAPEYSTVPPLSGEFPHRVRLEVHGYVHTCLANMVVEASGGTADHACQEAAYLMMARLRERHNYIFCNTAYRFHPRQASGDDVSTFRSTAGENDTTFGHMCAVMRGMDRMHSDLRKASRALNDGKLVRIIALKDEIARLKKDEIARLKKENAQLKNPQHAPQVDDGTRAHSACAQEPTSARSSRSSCSSSSSPSSCPSDSSRVRSLLRSSISRQGSSQWQRGLVACYSQWQPRPQQQQFQWLGAGQRRDVSAKLQEPLRGTW

SEQ ID NO: 37593 - protein, 281 aa, Oryza sativa
MYVDILQPEEYLGVAEKAARFIKEELYDSSSNRLNHSYRNGPAKAPGFLDDYAFLINGLLDLYEYGGKIEWLMWAAHLQVIQDELFLDKQGGGYFNTPGEDPSVLLRVKEDYDGAEPSGNSVAAINLIRLSSIFDAAKSDGYKCNVEHLLAVFQTRLRELGIALPLMCCAADMLSVPSRKQVVLVGNKESTEFRDMVAAAFSTYDPNRTVIQIDPRNTEEMGFWESNNAIIAQMARSSPPEKPAVAHVCQDFKCSPPVTSADALRVLLNKTVAAATSSAAA

SEQ ID NO: 37594 - protein, 391 aa, Oryza sativa
MAMAAATGGVDVLGDDLLREILLRLPSPAALAGRSFLRAARDAGFLRRFRARHHPSPPRLLGFLFVVPGTTPPVLLSVASASGNPPAGDFSLSFLPGGGWGSAEWELLDCRDGLLLLLHNHGADMKLAVADPSRRACYPFDLPTADIPVLYGLAAAKSASFRVVCIARSLDSTTLRALVLSSDEPYHWEEVNAIPCEEEASIVYAARPMKAKTSLYWKLDDGTRMAAFDAAPGKMKLSILDLPPFPATLAFDVIDTEDDDDGLRVLAMSDDFCLETWKLSSAATAAAIDDDEEEETPWTLEDTSVRFYRALESMLGERKLSDRHRRRRRRGYEFEIVGVVDGFFFFRQSGVLLSIDLKTMELTRLSEQDCSPATIYPYTMAWPPSFLNPTD

SEQ ID NO: 37595 - protein, 823 aa, Oryza sativa
MAKATTGICLVDVILFSFFLVAPRAFAAAAAVTDTLRGGRNITDGETLVSADGTFTLGFFSPGVSAKRYLGIWFTVSPDAVCWVANRDSPLNVTSGVLAISGAGILVLLDGSGGGHVAWSSNSPYAASVEARLSNSGNLVVRDASGSTTTLWQSFDHPSNTLLPGMKMGKNLWTGAEWDLTSWRSPDDPSPGAYRRVLDTSGIPDVVLWQDGVERYRSGPWNGRWFSGNPEAATYTTNLITFQVTVSPGEISYGYVSKPGAPLTRSVVLDTGVVKRLVWEATSRTWQTYFQGPRDVCDAYAKCGAFGLCDANAPSTSFCGCLRGFSPTSPAAWAMKDASGGCRRNVPLRCGNTTTTDGFALVQGVKLPDTHNASVDTGITVEECRARCVANCSCLAYAAADIRGGGGGSGCVIWTGGIVDPRYVDQGQGLFLRLAESELDEGRSRKFMLWKTVIAAPISATIIMLVLLLAIWCRRKHKISEGIPHNPATTVPSVDLQKVKAATGNFSQSHVIGQGGFGIVYKGQLPDGRMVAVKRLHQSTLTKKGKKDFTREVEVMARLRHGNLLRLLAYCSEGSERVLIYDYMSNRSLDLYIFGDSGLRLMLNWRKRLGIIHGIANGIAYLHEGSGECVIHRDLKPPNVLLDDSFRPKIADFGTAKLFTADQPEPSNLTVVVSPGYASPEYAWRGEMTLKCDVYSFGVVLLETLSGQRNGPMYSLLPHAWELWEQGRVMSLLDAMIGLPLSVSGPDHTEMEDELARCVRIGLLCVQDAPEERPAMSAVVAMLTSKSSRVDRPKRPGVHGGRSRPPLRESELLGATDIDDDLT

SEQ ID NO: 37596 - protein, 384 aa, Oryza sativa
MSFPDEEEDEAFLLAVAATEEAALASSDSSKRRRLSMTSSTSSSPTSATPPPAAVPEGPYLAALKGSHSSAWKQQQETLSQARKRPGGSQTLATPGSGSGSGGAQVARGGACFKCGDSCHWARECPQSVPATGGGGGGGAFGGSGGGGGGYGDAGGAVEEKACPCGAGSCLVLTSNTPRNPGRKFYRCPMRDNGGCNYFEWCDNPSPGPANVSGNTVFQSDTSVAHMLCPCGAGACLILTTKTGKNVGRQFYRCPANQGGSSCGYFKWCDEQQLRTAAPLQASTQYHTDVASSGQIPSKRSSSACFKCGQENHWAKDCPNQSSDPYPDKGGRTFTSASSPDACFKCGKSGHWSRDCPTANCGSSTVSSHVKSSSTLGSWNSHRY

SEQ ID NO: 37597 - protein, 298 aa, Oryza sativa
MTTTTAEGGGGVAPFVAKTYRMVDDPATDGVIAWGRDSNSFVVADPFAFSQTLLPAHFKHSNFSSFVRQLNTYGFRKVDPDRWEFAHVSFLRGQTHLLRRIVRRSSGGGGAKRKEEAGGCGGGGEAAAGDVDEESAVVALEVARLRREQREIEGRVAAMWRRVQETERRPKQMLAFLVKVVGDPQVLRRLVDRDNTNAAASNADDSAVHHQVKRPRLLLDSSSTTTTHGDRHLVTAAADGFYAGGCGPEAAAAAAFVPDDAVDFTGLYTGGDGFGNAVVDAGVDYPPAYAFPVVDSGY

SEQ ID NO: 37598 - protein, 439 aa, Oryza sativa
MKRLSIRGLLAGARRTRHAVAAKATASVPALVALLFFFAAATFSVFSLGSFRWPGAADDGGAAACDAALARGRGEWMRDAGAAPYYTNATCGFIQNYQNCMKHGRPSMEFLRWRWRPGDGGEGCEPLGPFDAARFFRLVRGRSMLFVGDSLASSHVTSLVCALSQVEAPARSRDAAAGFEHWRFPAHGFAVAYFWTPFQVRWRLTRGPPEAVGPERQGEVFAGPSDLHLDEPDERWTSAAKSHDYVVLSASHWFARPAVYYQHGRVVGCHDCGDSNATATAIVKQPEHAQRAAFRAVLGALARLDGFNGTAILRTVAPTHYENGGWFDGGECTATRPASESEDGAAPEMAATEAEFYRAQVEEFAAAAAAAAARNGGKRARLRLMDVTRMMLLRPDGHPDRHGHGGGEHDGFEIDCLHWCLPGAIDVWNDLLLQIIASS

SEQ ID NO: 37599 - protein, 60 aa, Oryza sativa
MSSLLCSSVVIDTGCRLAASYAPVLSSQHATSTKKAGGAEQAAAREDDRRSRAGGGARSL

SEQ ID NO: 37600 - protein, 510 aa, Oryza sativa
MYTKCVEMDEAVKVFESLPSVTIVSWNILITGFGQEGSCAKAVEVLSLMQEAGFEPNEVTYSNLLASCIKARDVHSARAMFDKISRPSVTTWNTLLSGYCQEEQHQDTIELFRRMQHQNVQPDRTTLAVILSSCSKLGILDFGRQVHSASVRFLLHNDMFVASGLVDMYSKCGQIGIARSIFNKMTERDVVCWNSIISGLTIHSLNKEAFDFFKQMRENGIMPTESSYASMINSCSRLSSIPHGRQIHAQVMKDGYDQNVYVGSALIDMYAKCGNMDDARLFFDTMMMKNIVAWNEMIHGYAQNGLGDKAVELFEYMLTTEQKPDAVTFIAVLTGCSHSGLVDKAMAFFNSMENSYGIIPLAEHYTCLIDALGRAGRFVEVEALIHKMPCKDDPIIWEVLLAACVVHHNAELGKCAAEHLFRIDPKNPSPYVLLSNIYASLGRHGDASAVRALMSNRGVVKGRGYSWIDQKDGVRAFMVADDLGADGGELTMFSNEDSIPQVHQDENCVG

SEQ ID NO: 37601 - protein, 303 aa, Oryza sativa
MHHGYASFSDYLYNSPLTHLSSSPAAYSSPVPYHAPPPPPMAAAAQAQLGHGDLLPLPAQPLGLNLSFHGFTSVVADVCDGDGGKQGSSTGCLEPYHPLLHQPSPASSYSVYSSPSVTTTAAAGGGQDMSPSALITTAENTSSQSQLAAAEIADPSLHRVLDDEEMAAIYSIGEQHDIEWSDTVNLVTSAWWSKLLDTVEGGAGAAASAVAAGGAVNASAAAAAAEEEEELTAARMAPDWFGGDGGHLVEHHQSSKESGSDVLGMHFGEYYHHGHGIGSYGEDVSLPRMDLGEIEGWNAEWFS

SEQ ID NO: 37602 - protein, 116 aa, Oryza sativa
MAPTASMLFLSYHQLHRPASAAEAAPASRRKEAEEEGSNGGAAGGRVRVSLSSALSLLARRREAAPTPTPQAAAAKEVTRRGGGGGDGVAGEGEPEEAASLERRFEEAVRLSCWSS

SEQ ID NO: 37603 - protein, 975 aa, Oryza sativa
MYQSALDKLNGTKLESPVDSYDKLKTTCIICSKYGKEPLAANDGVLPSCTVCANFSQASGDHSNEFTALKFLKHKDSECCPPLDVKVKRTTRNSSRLAKEQNVEAHVKTRTRSSKRTAHMKGEKASTELHCKNGLSCSDNLSTDTLVRGKANCILDGVDQSIDYTCSIFGCWNCLFVNTLNSGSIQNILQFRWDCVWHHNHVSILLKIAKALGAHGGLHGAHKIHNIYWQCISLLYFRSLPQDCYRTYEHNLFGLIMDQSTGDFLISERAEILYSMSLFLLKGFLSEQSRDICCRFCSVQMSDVVPWLLKAFVLSRENPSLFQEVCRLLACIFLLATIDSTAQLPLYSSGSLSLNHWAAYFHQNSVGTYLDCQYFAGLKSLLRKNDSKAALEDFSNASDESLSKFFRFSSADIGHLEIHIKEFFHKLPDVPIVCISMLEGDFVNVLGEILLLPSYFPAWMMLSRFDSTNKPITMLLPVDAISKETQYEDSCTKELDNLMRATDKNWQCPWGYTIIDYVAPTFRKILEENFISLSSATLTLNDGQANHVKWWSHRMKLNNHLDKMLKDMEESWLGPWKCLLLGYDLTDQHIEEALTNLIAGLESEFKFEVNPVLIKVILGGAMSVDEVQDCVSQLISYKGYFGRGGCCGKDRLRALSSCCIESEALETVECLIKSTVNELIEPVDRDPVIFVLDTNVQMLPWENLPALRNQEIYRMPSIGSVFLALTRSNNYWKDARVIAPPFPVIDPFNAFYLLNPSGDLSSTQEEFDQMFKNYEWKGKAGYAPTAEELVLALRNHDLFLYFGHGSGTQYVSGKEIEKLDNCAAALLMGCSSGTLRCKGCYAPQGAPLSYLSAGSPAVIANLWDVSDKDIDRFSKALLGSWLQENFVAAKNCSKCCQLTREFESMTIAVEGNGRPRRRGTRGKKSERMNNCSKRCTCGNRRVASYLSEARRACRLPLMIGGSPVCYGVPTIIRKK

SEQ ID NO: 37604 - protein, 248 aa, Oryza sativa
MNSQIERLARTDSDFAPFLHHAGIPCMDLYYGKEFPGYHTALDSYHWMEKHGDPLFLRHVAIVEIWGLLALRLADDPVLPFDYQTYASQLQEHANAFSSMMENSKWVHLLNRSIEDLSDAGLEFLKEAKKLQDQNISDGYSLMRRRLLNDRLLLAERSFLQADGLQGRGWFKHLMYSPPEDYESKLSFFPGVADAISRSSNRSAKEQQAAVRHEVRKISRAIQRAADVLRGEFSNRNESLYSSLSVAP

SEQ ID NO: 37605 - protein, 424 aa, Oryza sativa
MRWWKRSVSPSPSPSSSSASASTPASPARASTSRVGGGVPSRRRDVVGFGWGGGSDPQPRLTRQRRLRHVDDIEVGVSALGLDSSPSPAAPSSCPSSRDSVGFGLLTASSTPISRTASNMEVAPPRSSSSPVLLPHPLPLPDEGDSPCRGSGRSLPSPKLFEGDCNGSAVESNLLGVSEIGSDRASLFPRVMAKTVQKNPEHGDLRSNGTNGINCGQRRKAFKEKLQDKSSAETLTFRLNIPAKSAPSSGFSSPVQSPRRLSSVDFLSTATSTQGANLSSAQSVWSPDLYGSSPRCASPEKIMGSQERSPRSSPLRSPVLRSKNPSAPPSPMHPKLFPENHVSRPEGNGSVNFHPLPLPPASVSPKQTNFSHQPVPKVDAPSMAGQWQKGKLIGSGTFGCVYEAANRYANAFYIALCLLDHLKV

SEQ ID NO: 37606 - protein, 382 aa, Oryza sativa
MAEQSHAGDGGGGGAGSGEPTNWRKEADDRLRRLHSLQFGADVALKGKDPAGAQVLALRLLGFLDSQALPGDGGAAGHEASFVAPIRAAASSSVAAAIRARAGRSDSAVFKLAEKEVGCVFAKTGEVNIEKIKCSKYFQALLQKSKGHAAEQMKTTDCQESTIEEGPHVEENSTDMENEKLSIRASKLVMQRKLTSLRSHKPLKANVVQDGNMFKSVSNISNESVAVENGVRTNHTDNKYTAYMDLEDDDRPRGLLQNAKRKHAGFRSPICEHANSPLSNDEADAPANEFVTARTKLEMDSVQKYGHNGTQGASVSPQCDNNPNNRNYGVRPTWNSRRGLRGNFVPPIRNNGGSTSNMTSRVIGKNDDSMGDSTRKWSVFPS

SEQ ID NO: 37607 - protein, 392 aa, Oryza sativa
MIRSSGDVVQWTKRISALARSGRAAEAVAAFARMDAAPNALTLASVLPACARLGDLALGRAIHGLWLRRGGGHGANPIVDNAVLDVYAKCGALASARRLFDEMPERDVFAWTTMVWGLARNGSPQDAVAMFRGMLSDGDAAPNDATVVSALHAVATSGSLVSCKLLHSYAVKQGLGGELVVGNALIDAYAKCGDAWLAFKVFVELPETDMVSWGTITRAMAVHGRCREALQLFSLMLRRGVRPDGAVFLALLTACCHAGRVDQALLFLGAMARVYGISPRREHYTCVLDACGRAGQLDRAGEIFRQMPAEYDAEKALGVYCSYAVSNGVAGVAGERLPELFLDGEVDAGGGTYAVVSKSLADAGRWEDACAVRERMAERRIEKEAACTWIEV

SEQ ID NO: 37608 - protein, 106 aa, Oryza sativa
MASPPAARARWSPSRKQIGIDLVFDVAFLLVLALHHLRVRADLLLPLGQLRVDLREAILLLLGDARHGLQRGRVERHEQVDLRLRHPHRRRPIHLVSGTGSRSRRR

SEQ ID NO: 37609 - protein, 330 aa, Oryza sativa
MSDSCKMPLPLFHRNISLLPLAANFSVIKSGVQPRCTHCSSAHPHSPRPHCLTAAAAATMPLLSSWLFHKLRRRRSAARGEPDVVEAASKKQQPPMAAAAAAAPCSPSPNRASYYFASRERCLPPARAATDNHKLRDTRFPRSPQPNDDIVFDVVAVSASPARGQFDGMKAMPELKLRPILTKRATAKNDGDEGDALDSGTSAAASPTSRVRRFVHHAKPSSGRRKGRVAALPADATSRRRRRRRRCRWLYESLVVVKESADPEEDFLESMAEMIAANDVRSPRDLEELLACYLALNAAEHHRAIVGAFRRAWLHAAAATAAPPSPSPIK

SEQ ID NO: 37610 - protein, 175 aa, Oryza sativa
MLLFVQHPTPNRWWWNQSNQSIVQEKGRRESKSILFFFFLLFEGRGGGRSTWCEHRQGQIHHHSSKHAWTWPPPPPPLPSLNLTLSLRRRRTRWRRRSTPPTHPPHPVTPPPSTTSSRSRCGLARMPITTTSSPGSSSAGCSPSPRFLIMLPLRLPSNSRNCLSTTACLMFLRVT

SEQ ID NO: 37611 - protein, 158 aa, Oryza sativa
MLVSNKIEDNDFVLLLLKHLTSLRLTAKIALIMPWDLAESEGQIYKAFGTVQVCNINQEWSFASSKVYLISTCGQVEFQGEGIVRIRGLYVGQFSCYAYKGPIMSMRLIQKRQQQQASKIDQSVGKTANGDSVLVLGLEPWRSPSPPLLLPPNPLLSF

SEQ ID NO: 37612 - protein, 232 aa, Oryza sativa
MPRPPPPPPPGRGAPGARRPMREFFAAWLSTLRSPLLPLLRRALSSSSSSSSGGWDDPLSSAAAAVEAHFQAHWSALDAAARQDPAQAVSAGDWRSPLELPFLWVGDLHPSLVTSLLRSLSPSPRLLAATDRVDRRIRAAVPSISDRLRRVQEAFISAEVSGAADVEAFLEELKDVALDANRLRRGVLSELVAAAGGYQAALFLEALSRFVLSMHDPEVLRRFDQCRASPGS

SEQ ID NO: 37613 - protein, 360 aa, Oryza sativa
MKKASSLSELGFDADGPSFFRHLTLTDGDDGTLPRRRLIKISVIGAGNVGMAIAQTILTQDLADEIVLIDAVADKVRGEMLDLQHAAAFLPRVNIVSGTEVSLTRSSDLVIVTAGARQIPGETRLNLLQRNVSLFRKIVPAAAEASPESVLVIVSNPVDVLTYVAWKLSGFPASRVIGSGTNLDSSRFRFLLAEHLEVSAQDVQAYMVGEHGDSSVALWSSISVGGMPVLAHLQKNHRSAATAKKFDEAALEGIRRAVVGSAYEVIKLKGYTSWAIGYSVASIAWSLLRDQRRIHPVSVLAKGLVRGVPADRELFLSLPARLGRAGVLGVAAELVLTDEEERRLRISAETLWGYCHALGL

SEQ ID NO: 37614 - protein, 194 aa, Oryza sativa
MAPKQKEAANKKKKKKEVAVLVKTKTKVVQLTTTTAELELEPTVTVQVDDNKMGAAADETPPVVPLQSQETQDPNEPKAAAAKKKKRAGHGRKRSRRRRGGALEYGGYKRYVWRVLKQVHPDLGASAQTMDVLDMMMADMFERLADEASRLSKLSGRLTLTSREVQSAVRLVLPADLANHAISEGTKAISNYLS

SEQ ID NO: 37615 - protein, 112 aa, Oryza sativa
MSGILAWAADVVGGAGAANDDEADDARAVASAAMTPEQRLRAADLDAKAASLRRSIHDLRLRVPPPHVAQRLPHLHAHSLASSAALALQLNAHSSTKEQVNRRFFFFLLPSY

SEQ ID NO: 37616 - protein, 608 aa, Oryza sativa
MEAPPSLPYRHLPQHLAGLLKTRPLHDLLSDASTSRAARHLFDAVPRPTPALCGTLISALSRLCSHQELLDAFSSLHRRGSDVPPGCVPLVVKSCAILAASRQGKQVHCHAIVRGLLGDIFVQTALVDFYAKNGDMDCAVKVFDEMPVKDPIPMNCLITGYSKSGDVVKARRLFDGMVRRTSASWNSMIARYAHGGEYQEALRLFRRMLSEGARPNAITIATMFSICAKTGDLETGKWARSLIAEQDLQNMIVHTALMEMYVKCRAIDEARREFDRMQQRDVVAWSTMIAGYAQNGRPHESLELFERMKATSCKPNEVTLVGVLSACAQLGSDELGGQIGSHVESQNLALTSYLGSALIDMYTKCGHVGRARSVFNRMEHKVVITWNSMMRGLALNGFAQDAITLYKEMTEEDVQPNEITFVALLTAGTHAGLVDQGMSFFKEMKTIHHVSPQVEHCACIVDLLCKSGRLREAYKFICDMEVEPNAVIWSTLLSACRAHADVELAKLAASKLLVLEPDNSSIYVLLSNIYADAGLWGDVREIRDLMRSKNVQKLSAYSWIELDGEVHKFLVQDTYHPKSAEIFNVVDGMGLHLDDVDSDPDLFVLEHY

SEQ ID NO: 37617 - protein, 358 aa, Oryza sativa
METKVTVGVVLLLLCLCGGAACAAGRSGGEFSIVGYSEEDLASHDRLIELFEKWVAKYRKAYASFEEKVRRFEVFKDSLNHIDVINKKVTSYWLGLNEFADLTHDEFKATYLGLTPPPTRSNSKHYSSEEFRYGKMSNGEVPKEMDWRKKNAVTEVKNQGQCGSCWAFSTVAAVEGINAIVTGNLTSLSEQELIDCSTDGNNGCNGGLMDYAFSYIASTGGLRTEEAYPYAMEEGDCDEGKGAAVVTISGYEDVPANDEQALVKALAHQPVSVAIEASGRHFQFYSGGVFDGPCGEQLDHGVTAVGYGTSKGQDYIIVKNSWGPHWGEKGYIRMKRGTGKGEGLCGINKMASYPTKDN

SEQ ID NO: 37618 - protein, 353 aa, Oryza sativa
MPLPATPAYGAVHLPRHTGVSMDTSAEAIFVGPSPPVTADIEESLSDYTSMMEGWTKEHVLAARGLRNKVAPIRVEAMRLGIAADSAGITCFLDAFDECMKRVDLHLVTQKNSFQEFLGSPLQQTVPDTCAIVSSTKCVEVQHRREYETMHGTGSFPCNAAAPRKLRRACFCQKVWKPKEGARVGDVIDMIQRLGGARTTSAPAPAPYMLPVRSWQRHRWDVGGGLTADRIAELLDTRGPFIGTIWVCPWYDLFNSVEDEDLVYRSGCARSKMLQRLSKFCFGKDLVGLHSVLCFEYRICDGQLHIHILDNHETTGPQRWIHHSELEEVHTITVERINHLGDRHIRYPHSGVS

SEQ ID NO: 37619 - protein, 363 aa, Oryza sativa
MANKLVSEMRLPPHLAHILAARRLTTAKDVLSLPEVELMGVLDAGIHTARAAVAHVSEIACPPYQTALALLEAFRARGDGRLATTLRGLDEALHGGIPAGKLTEVVGPSGIGKTQFCLKLALLATLPECYGGLNGRVLYIDTESKFSSRRMIEIGEKSFPQIFRQEGLAQKMAGRILVLRPTSLSEFTKSLEQMKVTLLQHDVKLLVVDSMAALMSSEIEKSATGLRQHPLRWALSFLKSIAEFSQIPVVVTNQVRSQSNDDGYRYSFEVEKKYDSNNAEGFESHLVAALGIQWAHAVTIRLVFEAHSGHRYIKVAKSPMTPAVAFPFTVESSGIILLSDEGIDVPSPEITSIRCQGENVLAQ

SEQ ID NO: 37620 - protein, 315 aa, Oryza sativa
MATTTAPEDAPSAAKGAKGEAKRKQSNWRGGGGGGGGRGDGGQGQKRKRKEVFVYGNYRNYYGYRIDRNVDEDPRLKIFKREWFESKDCLDIGCNQGLVTIGLAAKFKCQSILGVDIDSGLIETANWNLRRMSRLDKVVVENTKAHKSSDSPSESCPEKVAPEISNGDISNGSHHDIFKVVSFRRENFVDSMCTSSEQYDTIVCLSVTKWIHLNWGDDGIITLFVKIWRLLRPGGVFIMEPQPWTSYRRNRLVSEVAKENFNTILIHPDKFREILLDKIGFRSVEVVTDKLEGAVTGFDRPIEVYHKVMGTGSSS

SEQ ID NO: 37621 - protein, 261 aa, Oryza sativa
MAMAMDAFGSVFGEAKPPVTIRMRPVLFHAHAHAHTDDVSQLCLLATDLHSHAWDRSLFLSDIDDLRDDVGIGGSCSDFLDYLKSCLSSGEVNLLFPHNGLDRVHLVATKAKGLPRITISLNTLTHSALNDVIANFSLSLYAAFRTTQDHASREQERASKLMETLSSEKEKNEIMQKQLEALSFLDKRKATKPKLVANQVPSVSDVTQGSDQVIVPAQQQTPVVSPIKVPPAKATKRIASVSRRARVRGALLQDTEEDVEE

SEQ ID NO: 37622 - protein, 164 aa, Oryza sativa
MAGVVYHQPISSSVASLPIPFYHRLCLTPVIPFFLFPLSFSHFHKPPTAPPKPAGAELLLPLFQPSSFPPMLSTDLPGCAASGNTLGRRRRGRSTTEAPAPCPFSSLLLLGRRNRRKERNGRKKRHMTSRPRCTVTFLFYLILIQFQSLDTHIFPTTNPIPMRL

SEQ ID NO: 37623 - protein, 684 aa, Oryza sativa
MSDSASMAAAIEARFSGRDLIGRGSFGDVYKGFDKELHKEVAIKVIDLEEAEDDIEDIQKEISVLSQCRCPYITDYYGSYLHQTKLWIVMEYMAGGSVADLLQTGPPLDELSIACILRDLLHAVEYLHSEGKIHRDIKAANILLTESGDVKVADFGVSAQLTKTMSRRKTFVGTPFWMAPEVIQNSDGYNEKADIWSLGITAIEMAKGEPPLADIHPMRVLFMIPRENPPQLDEHFSKPMKEFVSLCLKKNPAERLSAKDLLKHRFVRNARKSPKLLDRIRERPKFPVKSSADATQNGRTHVEEDDGTGTIKVERATRDVVSPSSQGTVRKAAGWNLPDRSEGTGTVRGGLKPSQVTSTKDSRSDASHSPNTPKRTADRENQWRTSWTGSEESISTNPSQRDAQSEYGRLESSTEDNDQSISGSGTVVLRSPRASQVYPAATNHSSKPPSRFSSYEDTSISGTVVRNQIEEPETPRSSRSRLGIQEKSPNASLEDSATNLAEAKAALQAAFKKGNARERHVISKHEKESHEPRISAVNSHDAPSENADMEKGRKPRQVHDGQSAPQASGSVSSPALSSLIIPSLKEATGDKFNGPVVHTFLDSLMHLEKELPGSCEVLIGRMLHRLGSSKESSLQSLQETATSVFAKKSEPPSEPPSNKKMANTPSLAAPTVSPLARFLLTRFV

SEQ ID NO: 37624 - protein, 685 aa, Oryza sativa
MCRICGEYVPTHYVENHSAICASADRCDQKGVSVDERLIRVAEALEKLAESYTQKDLPNAVGSPDVAKVSNSSINEESDGPSPKLSDWSRRGSADMLDYLQEADSTISLDDIKNLPSMTCKTRFGPKSDHGMATSSAGSMTPRSPLTTPRSNHIDMLLAGRSAINESDDLPQIVELADIARCIATTPLDEERALSLLVTCIEDLQEIVNRRKHEALTVQTFGTRIEKLHREKYLLLCDSVDMDKVDSASTVMDEEDDVVRSLRASPVHPVKDRTSIDDFEIIKPISRGAFGRVFLAKKRTTGDLFAIKVLRKADMIRKNAVESILAERDILITVRNPFVVRFFYSFTSRENLYLVMEYLNGGDLYSLLRNLGCLDEDVARIYLAEVVLALEYLHSMHIVHRDLKPDNLLIAHDGHIKVGLINSTDDLSGPAVSGSSLYGDDEPQMSEFEEMDHRARRQKRSAVGTPDYLAPEILLGTGHGTSADWWSVGVILFELIVGIPPFNAEHPQTIFDNILNRKIPWPHVPEEMSSEAQGLIDKLLTEDPHQRLGANGASEVKQHQFFKDISWDTLARQKAAFVPSSDSAFDTSYFTSRYSWNPSDENIYEAYEFEDSSDNGSLSGSSSCVSNHQDDMGDESSGFTEFESSSNVNYSFSNFSFKNLSQLVSINYDLLTKGLKDDPPTKSET

SEQ ID NO: 37625 - protein, 295 aa, Oryza sativa
MKSSVSPSCLWDWQAAEHCESNAASHDVSRFMWDCLNQDDDDLLGLLGNQTPLRDCRGFFDIDDFTCKETLDLEESRESKRRRILEYPSESNQSEDGNREISSTLGTSEVSEISLLCTDEPQSFNWDSQNNSNNFDSLSTGAFYQSSHSHSKNCSDENQMHFRHDQMHSSQESVTYTNDQSGISGTTENDSVTESLVMQETRKLSTLKVSKGASLVKAKQNLTTTIAYPFTLIKPSWEEGDVITLKDINQRIRAPPKKAPETLGTSAFSGKPVVGKTRIRTDGGRGSITILRTKG

SEQ ID NO: 37626 - protein, 380 aa, Oryza sativa
MMMWPLEMEEGFVALKRTEHVEVTSLAVAVEATPSAKGGKGKVVVGGGGAGGGVGPTRVRVFCDDFDATDSSSDEDEEEVTARRRVKRYVQEIRLQRAAAVAVPPVKVKGEEVFPAAVSAKMAEAAKARVVLAAGRKRKAGGVDGAEPRFRGVRRRPWGKYAAEIRDPWRRVRVWLGTFDTAEEAAKVYDTAAIQLRGRDATTNFNQSGDSASLDVPPEVAERVPQPPGASKNASPATSYDSGEESHAAAASPTSVLRSFPPSAVVATADTANKKQPPPPPLVVRETDESVDVFGCSFSDDGGFAGELPPLYTDFDLLADFPEPPLDFLSNLPVEPFSLAPFSSNNGSPDLHLDDAPSPAAAQVDDFFQDITDLFQIPVV

SEQ ID NO: 37627 - protein, 653 aa, Oryza sativa
MSSPVHGVQEHRQSGGGEKKAEQGEKEAAAKVEKVPFLKLFSFADRWDYVLMAVGSLGACAHGASVPVFFIFFGKLINIIGLAYLFPTTVSGRVAKYSLFALGVTQALVSYYMGWETTKREVRKIAVLFCCGAVLTVVFHAIEHLSFGIMGERLTLRVRERMFAAILRNEIGWFDDTSHTSSMLSSRLETDATLVRTIVVDRSTILLQNIGMIVTSLIIAFIINWRITLVVLATYPLMVSGHISEKMFMKGYGGNLGKSYLKANMLAAEAVSNIRTVAAFCAEEKVIKLYADELKEPAKQSFRRGQGAGLFYGVSQFFLFSSYALALWYGSELMSKEMASFKSVMKSFMVLIVTALAMGETLAMAPDIIKGNQMVSSVFEILDRKTDVLIDAGNDVKRVEGVIELRGVEFRYPARPEVVVFKGLDLLMKAGKSMALVGMSGSGKSTVLSLILRFYDPIAGKVLIDGKDIRKVKLKSLRKHIGLVQQEPALFATTIYDNILYGKDGATEAEVVDAAKLANAHSFISALPEGYRTRVGERGVQLSGGQRQRIAIARAIVKDPAILLLDEATSALDVESERVVQQALDRVMRNRTTVMVAHRLSTIKNADVISVLQDGKIIEQGAHHQLIENRNGAYHKLVSLQQQQQQQDQMQRH

SEQ ID NO: 37628 - protein, 693 aa, Oryza sativa
MDQSRRAVESYWRSRMVDGVTADDDKVAPVYKLEEICELLRASDASVVKEVADFVLKRLDNKSPVVKQKALRLIKYAVGKSGTDFKREMQRHSAAMRQLVHYKGHPDPLKGDSLNKAVRETANDAIAAIFSTEEPKPAVATEGLGKRIQGFGNTNFEPSRDDKKSFLSELSEVVGIGSASIKQGLSNFAASHSSMITNDNGGPYKSPNLRRSLTTEMDKYGRYDPSEIQGESRSSSGASKNVSSGSWGPSPSSSAPTDDTGSSQTGVKTREERLLDTIATSSGVRLQPTRDALQIFLTEAAKLDAVALSRALENKLNSPLWQVRMKAICVLEAIVRKQDTDPYSIITSYFCENSASVVRCCELPHVSLREKASKVLNLLVGEQPTGSNNFSETKTTVPAAQMPDLIDTGDQDDPGAQNSAQEGSERIMGNSMFTSSVDDLLGGEPIADISTTTSNGNGGDPFADVSFHETADTKDTNDLFSGMTVEEKATAALHDSSSINKNELSDIFGSSPEPFFQERVGDKGTVNDLMAGLNLNGTAQAQPGIKTESNNTVNVSQLFDMNSQTTNVANSAAMTGILGQSFYQQQQVPLQYNLPSQMLLNPAFAGQQLNYGAMSVLLAQQQQLLQNLGNFNAGLGHSSLNAMNSGNASVLPDIFNSSNQPQHVAVMSNSKKDETKAFDFVSDHLAAARGSKK

SEQ ID NO: 37629 - protein, 693 aa, Oryza sativa
MCRICEEYVPTHYVENHSAICASADRCDQKGVSVDERLIRVAEALEKLVESYTQKDLPNAVGSPDVAKVSNSSINEESDGPSPKLSDWSRRGSADMLDYLQEADSTISLDDIKSLPSMTCKTRFGPKSDHGMATSSAGSMTPRSPLTTPRSNHIDMLLAGRSAINESDDLPQIVELADIARCIATTPLDEERALSLLVTCIEDLQEIVNRRKHEALTVQTFGTRIEKLHREKYLLLCDSVDMDKVDSASTVMDEEDDVVRSLRASPVHPVKDRTSIDDFEIIKPISRGAFGRVFLAKKRTTGDLFAIKVLRKADMIRKNAVESILAERDILITVRNPFVVRFFYSFTSRENLYLVMEYLNGGDLYSLLRNLGCLDEDVARIYLAEVVLALEYLHSMHIVHRDLKPDNLLIAHDGHIKLTDFGLSKVGLINSTDDLSGPAVSGSSLYGDDEPQMSEFEEMDHRARRQKRSAVGTPDYLAPEILLGTGHGTSADWWSVGVILFELIVGIPPFNAEHPQTIFDNILNRKIPWPHVPEEMSSEAQDLIDKLLTEDPHQRLGANGVSEVKQHQFFKDISWDTLARQKAAFVPSSDSAFDTSYFTSRYSWNPSDENIYEAYEFEDSSDNGSLSGSSSCVSNHQDDMGDESSGFTEFESSSNVNYSFSNFSFKNLSQLVSINYDLLTKGLKDDPPTKSET

SEQ ID NO: 37630 - protein, 245 aa, Oryza sativa
MEDDDECPPLAVELSPEKPYSPPPLGPSAASPVGVTVITGYLGAGKSTLVNYILSAQHGKRIAVILNEFGEEIGVERAMINEGQGGALVEEWVELANGCVCCTVKHSLVQALEQLVQRKERMDHILLETTGLADPAPLVSILWLDDQLESSIKLDSIITVIDAKNFRLQIDEHNKSSSFPEAFHQIAFADVVILNKIDLVEGSLEDLERQIHEVNALVTVVQSVRCQVDLNKIFDQQAYGAKVNT

SEQ ID NO: 37631 - protein, 458 aa, Oryza sativa
MKHPDDPARFADSEIALHAETDRLRLLAGAPDLLPDLVPLGLASSLSSLLTHDNADLAAAAASLLADLTDSDDPDDLAGLHSLADALVEANALDLLVHNLSRFSEADPDEAEAVHHTLSVVENLLELRPQLADIVCDRTKLLRWLLARLKAREFDANKQYASEILAILLQDSPANQKRLGNINGVDGLLQAVAMYKSRDPKTSDEEEMLENLFDCLCCVLMPMENKERFVKAEGVELMIIIMKQKKLAYSSAIRTLDFAMTRFPPACERFVDVLGLKTAFAAFMGKIPVNKKNKKESYQEALEERVISLIASLFGGITKGSRRIRLLGKFVENECEKIDRLMEFYTRYSERVKAETERLDSLDLDDLEMDEDERYNRKLEAGLYTLQLIALILGHIWHSGNSQMRTRIELLLRQNKLTKDDVKDILEEYHDNIGDLDGPEEKERAQGRTKEIIASLSL

SEQ ID NO: 37632 - protein, 212 aa, Oryza sativa
MSPAADSAASKRQAELLKQEGNAFFKKDRISAAIDAYTGAIALCPKVAVYWTNRALCYKRRNEWVRAEEDCRTAIQLDSHSVKAHYMLGLALLNKDELAEGIKELEKSLELGRGAHPASYMVEEIWQELSKAKYIEWENLSSERVRQLHKLKEACKEALRNYNSLDNPPAYVPEEQLNELEEVFRNARKSDIPTEVQPAFDTAYFRALTGLI

SEQ ID NO: 37633 - protein, 395 aa, Oryza sativa
MAANDRLYPPIDPYALEPPQFGDDAACGGGGGGGEVRVRDPSAVMWDEEPEASPSSPEEPVTEGTHTFEQGPKVHLAENNVVGSAGVGDVYEYSREMTTMQELVENTYYDCALRDQTGMWVPPSVPPMTKHDHEEWQKGFGANGGYFAEEDLWDIDEENKEMTMWDVLAAMVSAGKDKVLSVVSYDFGRQGMSLISHLLLEEACKDKADTLEDASVGLEHALLEAEPTVWLPDSAAPSCMLCGARFHPIICSRHHCRFCGGLFCGGCSKGRSLMPPKFSTSEPQRVCDVCGVRLECIQPYLMNKISRACQIPTNDLTDLSTLRSWLNLPWARTMEYEIYKAVNSIYGYFKVWPSYNSNTCPCYNLVALHSSNFCLELCILMYIAPKCMLLCLFAF

SEQ ID NO: 37634 - protein, 414 aa, Oryza sativa
MAEQGAGEADAGGGEPPPAAVMTAAAEALAGQRSLPTPFLTKTYQLVEDPAVDDVISWNEDGSTFVLWRPAEFARDLLPKYFKHNNFSSFVRQLNTYGFRKIVPDRWEFANDCFRRGEKRLLCDIHRRKVVAAAAAAPPPPSPGMATAAAAVASGAVTVAAAPIPMALPVTRAGSPAHSSEEQVLSSNSGSGEEHRQASGSGSAPGGGGGGSASGGDMGEENERLRRENARLTRELGHMKKLCNNILLLMSKYAATQHVEGSAGISSIANCSGESSEAVPPPPPLPPAILDLMPSCPALATAAAAAGLAIDGEPDPSARLFGVSIGLKRTRDDAAAAADEDGGGEDQAEHGGADVKPEAADPHPAGGGGGSSTEASPESHPWPIYRPTPMYHAVRPTCNGPDRAGSDQDGSSSR

SEQ ID NO: 37635 - protein, 437 aa, Oryza sativa
MGKHHVTLCCVVFAVLCLASSLAQAQVLFQGFNWESWRKQGGWYNFLHEKVEEIASTGATHVWLPPPSHSVSPQGYMPGRLFDLDASKYGTEAELKSLIEAFHDKNVECLADIVINHRCADYKDSRGVYCVFEGGTPDGRLDWGPDMICSDDTQYSNGRGHRDTGAGFGAAPDIDHLNPRVQRELTDWLNWLRTDLGFDGWRLDFAKGYSAPLARIYVDNTNPTFVVGEIWSSLIYNGDGKPSTNQDADRQELVNWVEGVGKPATAFDFTTKGILQAAVQGELWRLHDGNGKAPGLMGWMPDQAVTFVDNHDTGSTQSLWPFPSDKVMQGYAYILTHPGIPCIFYDHVFDWNLQHEIATLAEIRSRNGIHAESTLDILKAEGDIYVAMIDGKVITKLGPRYDAGGIIPSDFHVVAHGNDYCVWEKEGLRVPAGRKHY

SEQ ID NO: 37636 - protein, 529 aa, Oryza sativa
MSPAAHIAAYKICWKSGCYDSDILAAMDEAVADGVDVISLSVGAGGYAPSFFRDSIAIGSFHAVSKGIVVSASAGNSGPGEYTATNIAPWILTVGASTIDREFPADVVLGNGQVYGGVSLYSGEPLNSTLLPVVYAGDCGSRLCIIGELDPAKVSGKIVLCERGSNARVAKGGAVKVAGGAGMILVNTAESGEELVADSHLVPATMVGQKFGDKIKYYVQSDPSPMATIVFRGTVIGKSPSAPRVAAFSSRGPNYRAPEILKPDVIAPGVNILAAWTGESAPTDLDIDPRRVEFNIISGTSMSCPHVSGLAALLRQAQPDWSPAAIKSALMTTAYNVDNSSAVIKDLATGTESTPFVRGAGHVDPNRALDPGLVYDAGTEDYVSFLCTLGYSPSIISLFTTDGSVANCSTKFPRTGDLNYPAFAVVLSSYKDSVTYHRVVRNVGSNANAVYEAKIDSPSGVDVTVSPSKLVFDESHQSLSYDITIAASGNPVIVDTEYTFGSVTWSDGVHDVTSPIAVTWPSNGRAASM

SEQ ID NO: 37637 - protein, 480 aa, Oryza sativa
MVGGELVLAALVILLALLLTLVLSHFLPLLLNPKAPKGSFGWPLLGETLRFLSPHASNTLGSFLEDHCSRYGRVFKSHLFCTPTIVSCDQELNHFILQNEERLFQCSYPRPIHGILGKSSMLVVLGEDHKRLRNLALALVTSTKLKPSYLGDIEKIALHIVGSWHGKSKDKGMVNVIAFCEEARKFAFSVIVKQVLGLSPEEPVTAMILEDFLAFMKGLISFPLYIPGTPYAKAVQARARISSTVKGIIEERRNAGSSNKGDFLDVLLSSNELSDEEKVSFVLDSLLGGYETTSLLISMVVYFLGQSAQDLELVKREHEGIRSKKEKDEFLSSEDYKKMEYTQHVINEALRCGNIVKFVHRKALKDVRYKEYLIPSGWKVLPVFSAVHLNPLLHGNAQQFQPCRWEGASQGTSKKFTPFGGGPRLCPGSELAKVEAAFFLHHLVLNYRWRIDGDDIPMAYPYVEFQRGLPIEIEPLCSES

SEQ ID NO: 37638 - protein, 408 aa, Oryza sativa
MEQEAATALAAKQEEVAQLGEGILHHFEQILHQDSLIDEVGFLHPTQFQSLEHSQTSNWTFEVPECPQRYLWCKDHKLAISTEILPKLYRAAQHAYSNSAAAKDGSFMETDLMRHSKALLILCPDMLTAWNSRKIVLSVNYDFTKLKDELQLCALILSYSPKNESTWSHRRWVIKKVSEHNQDVSELIEMESVLVKQIAEKSKMNYRAWRHRCWLIPYMTREQVLNELKKSTRWNELHVADNCCFHYRRSLLLALLDSCHVEDTEDSLDRKSEVHLLWKEELTWNEKLIRRYQGRESLWIHRRFLSQWWMKFLLSSEETECAAGTSLVDLFLVQEIYLLSDCLNAPADEFGEACVQSELAALYILWISKQVPAVKLKLEERLHSLGSLEDVLARACPERSRLWTHLIA

SEQ ID NO: 37639 - protein, 697 aa, Oryza sativa
MDCLVAGANFLLKSIRHEAFTHMDGQKEYVQIDQNDLFPFLLVNVGSGVSIIKVDGHGKFQRVSGTNVGGGTYWGLGRLMTKCKSFDELLELSRRGDNSTIDMLVGDIYGGLDYSKIGLSASTIASSFGKTISDDKELSDYRPEDISLSLLRMISYNIGQISYLNALRYGLKRIFFGGFFIRGHAYTMDTISFAVNFWSKGEAKAMFLRHEGFLGALGAFMSYEKHGLDDLRIHHLVERFPMGAPYVGGKIHGPPLGDLNEKISWMEKFVQKGTQITAPVPVGFPVTTGMGGFERPTAKGDILRSDASAALNVGVLHLVPTLDVFPLLEDPKMYEPNTIDLDLNEYKYWFKILSDHLPDLVDKAVASEGGTDDAKRRGDAFAHAFSAHLARLMEEPAAYGKFGLANLLELREECLREFQFVDAYVSIKQRENEASLAVLPDLLMELDSMNEEARLLALIEGVLAANIFDWGSRACVDLYHKGTIIEIYRMSRKKMQRPWRIDDFDMFKKRMLADKKGQPYKRALLFVDNSGADVVLGMIPLARELLRNGTEVVLVANSLPALNDVTANELPGIVAEAAKHCGILRKAAEAGGLIFDAMAGIQDDLKDEPVSVPLMVVENGCGSPCIDFRQVSSELAAAAKDADLLILEGMGRSLHTNLNARFKCDTLKLAMVKNQRLAEKLFNGNIYDCICKFEPVP

SEQ ID NO: 37640 - protein, 432 aa, Oryza sativa
MESAAGEEGKAAPSLPLATLIGRELRGGGSERPLVRYGHFGFAKRGEDYFLVKPDCLRVPGDPSSAFSVFAVFDGHNGVSAAVFSKEHLLEHVMSAVPQGIGRDDWLQALPRALVAGFVKTDIDFQRKGEASGTTATLVVVDGFTVTVASVGDSRCILDTQGGVISLLTVDHRLEENVEERERVTASGGEVSRLNLCGGQEVGPLRCWPGGLCLSRSIGDTDVGEFIVPIPHVKQVKLSNAGGRLIIASDGIWDALSSEAAAQACRGLPAELAAKLVVKQALKTSGLKDDTTCVVVDIIPSDHSSTPPSLSPKKNQNKLRSLLFGRRSHSSVGKLGNKSASFDSVEELFEEGSAMLDERLGRNFPSKANSSPSRCAICQVDQAPFEDLVTDNGGGCCSAPSTPWVGPYLCSDCRKKKDAMEGKRSSRSTACR

SEQ ID NO: 37641 - protein, 426 aa, Oryza sativa
MPAALVACSGKRRRRTATTHAARDSSSWASLAEDLVSLIGWRVLAGDVRDYICFRAACHHWRSCTASPCGRGVVDPRFHPRRWMMLPEGNGLYPGHGMLRGFVRFFNLSTGAFVRLKLPIVRDHRILDSVDGILLLQRNRDTAVRLLHPFTGDIVDFPPLDTLLPYMGRRSEEYLRDVAAASITSSADDQAVLLMIWLFRTVRVAFAASGDKQWRVSSWSMYQAYTPLPFQGKLYILDQATAYGGPEVLQIDPPLQLQLEGTTELSLPPPKSIAKCPARTPDSFFLYHLVECDSDILLVTFGVSVYAQISVYRLADLISGTTVPVTCIGSNSLFLGNRNLCVSSKAFPTIVGDAIVFYHQKENYLAQYHLRSGTLSPTSDGCIFATNMPSPSSIIHHIYTCCFRTQWTKGHLLFQRENRAWQMKRK

SEQ ID NO: 37642 - protein, 630 aa, Oryza sativa
MAMPLGGILLLFLVLLAAAAAGGGGGVWAFSSSSSSSSYSRIGEQPLSLIGIHRATVGIDAAASVQASPRLLGVKGEDTAWVTVDFAAPHASDGDWIGVFSPSNFNASTCPGPSGSDSGPVICSAPITYQLANYSSDYGKTGKGTLKFQLINQRQDFSFALFTGGLSNPKLIAVSNKIAFANPKAPVYPRLAQGKSWNEMTVTWTSGYDIKEAYPFVEWGMKWSPPTRTAAGTVTFDRESLCGEPARTVGWRDPGFIHTAFLTDLWPNKEYYYKIGHMLPDGKIVWGKFYSFKAPPFPGQKSLQRVVIFGDMGKAERDGSNEYSNYQPGSLNTTDTLIKDLDNIDIVFHIGDITYANGYISQWDQFTQQVEPITARVPYMIASGNHERDWPNSGSFFNGTDSGGECGVLAETMYYTPTENRANYWYKTDYGMFRFCVADSEHDWREGTEQYAFIESCLATVDRKKQPWLVFIAHRVLGYSSGFFYGAGGAFAEPTARQSLQRLWQRHRVDLAFYGHVHNYERTCPVYDGRCASPERSRYSGAVGGTIHAVVGGGGSHLSNFTAEAPPWSVYREMDYGFVKLTAFNYTSLLYEYRRSSDGEVHDSFTVHREYRDVLACVADSCPPTIPPAT

SEQ ID NO: 37643 - protein, 334 aa, Oryza sativa
MLHNILKQNKSDFHRIPIIRKLVKVLEFLASKGILTSEHINGGPRCAGTESFRESMLGLLRHNDMQVQQIARNFRDRWIQWAPRNISRNEPTEYSRASISAHDIHVISTAGGSFPTSANTMDWKSIRRKRKSRWDYQPDDHYKMGGLKIQKVCPVQSEFRTGSVGNKLHGNWGTNSSHNDVPVVGSSADGADDEAPPGFESQQESRPGQACLESGVSPGLYLERYQHNLTISYGIPIAFVEHFGTPEVEGGPCRKNWKVAPGVPFQPFPPLPPYPRGSPCPSTQMSQHEHNSLGHCGRAANRDGRIHRNWRNGARTKFPYNHQGRRFPNNNQRF

SEQ ID NO: 37644 - protein, 264 aa, Oryza sativa
MAEHDLTARMAGHLDCHLVLPLLEFLQERHLYPEEEILEAKIRLLRGTNMVDYAMDIHKSRYGTDDVPEAIDNIHQNQQIGPDQIETLYQYAKFQFDCGNYSFAAQYLHQYRALCTNIERSLSALWGKLAAEILMQNWDVALEELNRLKEIIDSKNFSSPLNQLQNRIWLMHWSIFIFYNHENGRNGIIDLFFQERYLNAIQTNAPHLLRYLATAVVVNKRRRNMLKELIKVIQQGQHSYKDPITEFLECLFVNYDLMAHNRNS

SEQ ID NO: 37645 - protein, 663 aa, Oryza sativa
MAGGDRERDVEEETRNQMMQNLFGDQSEEEEEDDDEAVDFVDEDDHPHPHQQQQQLRHQVVDDDDDDDAHARSGYHSEEVEGEADNGGEGEAEGEGESEGQVGMEEESEAEAHRADLDQGESDGEKVQSSPGELSDRVMQNDAAGMDSEDEAYQQRPVASRRRGVVASESEGSEDDYYAGRAHEDEEPRQTRKASSSPVEEERDQEVVRDVFGESDEDEPAPYRDQQEIDEDSHRSPMEDEGHYEKDLQPDDVVADEDMRYESDENRELKPKEKPVGPPLNLVVPLKQPPAQPERMNVIKVSNIMGIDPKPFDPKTYVEEDVFVTDESGTKKRIRLEDNIVRWRTVKNANGTTSCESNARIVKWKDGTMQLLIGNEVLDISVHEAHHDQSHLFLRNGKGVLQSQGRLLRKMRFMPSSLSSKSHRLLTALVDSQNKKTVKMQKWIESKDPERVKQEKERALGQNIRAHSILQRKREKVSRKYTQPARQRRQLSPGFLEDALDEDEEPDHQYGSRRMPARSRFGDELEAEALAERRIVSAKKSSMGRNIPRKPSFPARPPRRQENEYSESEREESEYETEGEDIEHSPTQGREDELDEEDEYEEDVEEEAAMSDEEIEEPKRRRESGGASASQRRKEIDSDDDSPPRKQQAVHRRKAVVFDSDDE

SEQ ID NO: 37646 - protein, 64 aa, Oryza sativa
MAGAATAAAADCSTVRCIQGGYITCKNYPGKKLDGCVCLCAPTDGERCVLHLHDGSSYKCRAPN

SEQ ID NO: 37647 - protein, 488 aa, Oryza sativa
MAATAWGIRSSGIRGASPVMSACVSPAEVILGADHQQQMYCHLLCGLRRWDAVDCIRAPYAAALARALRLLQSKWRQLCDDLECGTVCADVVTDAAMRGAVQDGVLAGPCPELAGRVRRICERDDWRGVLRQLWPDARYISCVTTGTMEQYFPAIKHFAGEALPVLGTDYLASECAIGINLERTSPPEETTYVLLPRAAYFEFIPFDMDAAGRGAAAAEPVDIAGVEAGKTYELVATTFRGLYRYKVGDVVKIAGFHHSSPRLQFVTRAPPPQEHGEVLTERDVMAAMDTFQLMLKDGGEVIEFAAFIIDGDGGQRRRRCATIAVEVSNGSKLLDHERSAAFLRRCTAPLEGCLGGAYRLSRATGDVAPLEVAVVRPGTFDRLAEAAIRGGAPANQYKPPRSSGTGTSSMCCNPPWCAAAAQSLNQLLTSICLIVSLNQRQFLDRESNSGTDKVFISDSILNFQHWGGFSLRFDLQEESLTLYKDHPS

SEQ ID NO: 37648 - protein, 185 aa, Oryza sativa
MVGTDASQSSAHAGLWNFPSGSADMARHSASISGRVPAGPNRSDVAGADIHQGSMSQKSGRSSGMESPASLQIEDTRSMNSHDSLKSDEKTSKKSSSKRKRVDPKAAGDLHSEDNSKSDAMSTGQNIRKGHSLAKLVLRVNFPGQSNTIHHIHYKLVMLRCHRYPVVHLSLGLTRKDHQLLLQGL

SEQ ID NO: 37649 - protein, 493 aa, Oryza sativa
MTVKVKGRSAVHESSGLQDTGHILEDGKSIYNTTLNMSDLTRGVNSYYILQVIEEDNGSDCYVFRKWGRVGNEKIGGTKLEEMSKIHAIQEFRRLFLEKTGNPWEAWEQKTNFQKQPGKFYPLDIDYGVRQGPKRKDIDKMKSSLPPQLLELMNMLFNIETYRAAMLEFKINMSEMPLGKLSKENIQKGVEALTEIQNLLGNTNNQELAVRESLIVAASNRFFTLIPSIHPHIIQDEDDLMVKVKMLEALQDIEIASKLVGFDSDNDESLDDKYKKLRCAITPLPHDCEDYKLVEKYLLNTHAPTHKEWSLELEEVFSLDRDGEFSKYSRYKNNLHNKMLLWHGSRLTNYVGIFSQGLRIAPPEAPVTGYMFGKGLYFADLVSKSAQYCYVDRKNPVGLMLLSEVALGDMYELKKATSMDKPPRGKHSTKGLGKTVPLESEFAKWRDDVVVPCGKPVPASIKTSELMYNEYIVYNTSQVKMQYLLKVRFHHKR

SEQ ID NO: 37650 - protein, 972 aa, Oryza sativa
MAACGAAAAEYSALLSLSCGPITRRRFAVSCRARPPGNLSAQQKKKRGKNIAPKQRSSNAKLLLTTEENGQLPSTSLRTSMERPQKSTSSEDDTNGAISQIDEKIAAIGNEQQERSKDKHFESDFQLEDFGEMIQNMEKNILLLNQARLQAIEDVDKILTEKEALQKKVDTLEMNLSKALATKGNINTDIPGDHLEKFTKEILIESALSGGNPAHLCESPLFMELTVLKEENMLLKADAQFLKAKIVEFAGTEEFLFKLEKERSLLDATVRELEARFLVAQTDIWKVVPLQYDVWMEKVENLQHMLGCLKNHVEKYAALLDQHDDLHDKIDELEASLKEGKTSEFSPYVVELLQQKLKAAKSHHQAGHQETNTHIQVYQQLTEEFQDNLGKLIEESGRLEHSANSMPSEFWSHILLMIDGWFLERKIPNTDARMLREMAWKRDDRICEAYFACKGAEESDVMETFLKLSLSGNSSGLHIVHIAAEMAPVAKVGGLADVVAGLGKALQTKGHLVEIVLPKYDCMQLDQITNLKVLDVVIQSYFDGNLFSNNVWTGTVEGLPVYFIEPQHPSKFFWRAQYYGEHDDFKRYSYFSRAALELLYQSGKKIDIIHCHDWQTAFVAPLYWDIYATRGFSSARICFTCHNFEYQGTAPAPDLSYCGLDVEQLDRPDRMQDNAHGRINVAKGGIVYSNIVTTVSPTYALEVRSEGGRGLQDTLKMHSRKFVGILNGIDTGTWNPSTDRFLAVQYSATDLQGKAANKAFLRKQLGLYSEDASQPLVACITRLVPQKGLHLIRHAIYKTAELGGQFVLLGSSPVPHIQREFEGVADQFQKNNNIRLILKYDEALSHCIYAASDMFIIPSMFEPCGLTQMIAMRYGSVPIVRQTGGLCDSVFDFDDETIPVELRNGFTFARTDEQDLSSCLERAFSYYSRKPMVWKQLVQKDMQIDFSWDSPASQYENLYQSAVAQARGAAQT

SEQ ID NO: 37651 - protein, 360 aa, Oryza sativa
MVVCKCRKATRVYCFVHKVPVCGECICFPEHQLCVVKNYAEWVVNPDYDWPQHCSSCNSVLEAGSEETTRLGCLHVMHTRCLISHIQSYSTQTAPAGYVCPSCSTPIWPPSTIKDTGSRLHSKLKEAIAQTGLEKNVFGNHFVTMPKADTRTPPAFASDPLKRVSISGDRESNGANIINSAIDANVQSGGMYSSATVGSGTPSHVEPEIVEIDGPSPITTQFPEQESNFIRSPSPHGPSAMTRKGANYVERQNSEISYYADDEDANRKKYTKRGTFRHKFLRMLLPFWSSALPTLPVTAPPRKESDAPEGRSRHQKSSRMDPTKILLALAIMACIATMGILYYRLTQRSLSENFIEDEPQ

SEQ ID NO: 37652 - protein, 435 aa, Oryza sativa
MKNDGRNTLKFSFKSNSTKPALDSSEQEKNAIKSSGSNKKHSMKKGNQNNKTVSEQDEIFLEKRNETKSLGSLGDQIADVTRDKSSFKNDADAFVLSSAQSAEKALKLQSAKAAAHNADMIPKVKIKGTKVPSLHFKDVGEENAAKSDTGKGTKLVIHIGSRHKSRSGSPKSEMSNSQKEQELVSMHGGKVDVTSQFKSSRSEIKEKSVMKLVRETGVQQNSLLGDLGASKKHATGKRSNAIVSAMENASESGTRSRSFGQKQSVNHLTENQGNASFSVNNSPDSLKPSLLKLKFKRPIFEQPSTQSSQPEEPGTWASPQEELNVAKGQRSKRKRPSLDKMDGSESKAPAAKRHEQSTGEEAMDANWILRKLGKDAIGKRIEVQLASDGKWHQGVVSNVINGTLCLQLDNGRSENIELGKRAIRLIAQRSKSGKR

SEQ ID NO: 37653 - protein, 354 aa, Oryza sativa
MRVHEEASEDKEREVEEAPDLMPLSPPLTAAATAAVVAVAGQRLVVGYALTKKKVKSFLQPKLLSLARKKSIHFVSIDETRPLSEQGPFDIILHKLTDKEWQQVLEDYREEHPEVTVLDPPNAIQHLHNRQSMLQEVADLNLSNAYGEVCTPRQLVIMKDPLSIPSAVAKAGLTLPLVAKPLVVDGTSKSHELSLAYVETSLSMLDPPLVLQEFVNHGGILFKVYVVGETIRVVRRFSLPDVNIYDLENNDGIFRFPRVSCATNTAEDAEVDPSIAELPPKPLLEKLGRELRRRLGLRLFNFDMIREHGRKDRYYVIDINYFPGYGKMPGYEHIFIDFLLSLVQNKYKRRLSGS

SEQ ID NO: 37654 - protein, 310 aa, Oryza sativa
MATAAAAVASGAVTVAAAPIPMALPVTRAGSPAHSSEEQVLSSNSGSGEEHRQASGSGSAPGGGGGGSASGGDMGEENERLRRENARLTRELGHMKKLCNNILLLMSKYAATQHVEGSAGISSIANCSGESSEAVPPPPPLPPAILDLMPSCPALATAAAAAGLAIDGEPDPSARLFGVSIGLKRTRDDAAAAADEDGGGEDQAEHGGADVKPEAADPHPAGGGGGSSTEASPESHPWPIYRPTPMYHAVRLTCNGPDRAGSDQDGSSSSQTMGPGEFDDLQKMMVVQQSNFVMHWGRSECGSGVRGFGW

SEQ ID NO: 37655 - protein, 544 aa, Oryza sativa
MAAAAASSESADAAAAGPSTLSIYKAARRIKRRESTLYNALRSVADDAAFVAEIAALWPALPLVANLRCGLWYLPPRAVAATCYFKSTDGHAGNWAFSTARLNLHLALLAGERGGCIIVDSTRRGKRFPDSMSKTIPIWCCVLNRAIERYRLQTNNKSAAVANKDAEKISESSNWDNSVHLPVWVLETEKNAIEGRIEEWTTQFESCGADIRSLALSLKKPLRPLWISQRTRIWLNEVPELESWDFTPIILVSASASGAVATQRMTSEFSWHYIPGAGDDEESWARGLTPTLFWKHSYDLLDGGPDLCNQLVADIVEKDRVYRAQRGEYSPQITAKPLKCSSHDGPFSNGDHTSIVQPMDSDPPTVTAMDKQNSSDGHILFWIGTSNLAVASTLQVGDSLAEVDCILNCDSTSNLPLTSSENSYLELPMVGSKDDRFSLMKNLPKAVSFANRNLIAGKKLLICCQNGEDISICVALAIITRLFDCDGFFDHGNSFLKGDVTKLEMRKRLVFVCKYAVNARPSRGNLKQVYGFLCSEKEQFSCLT

SEQ ID NO: 37656 - protein, 455 aa, Oryza sativa
MAGVGVVVDPEAVGGGGDGGGDGRMKEGLARRAVENLRFRSVWGEVNGAMGDLGTYIPIVLSLALSRQLDLGTTLVFTGIYNAITGLLYGVPMPVQPMKSIAAAALADPSFAIPEIMAAGILTAAFVLFLGLTRLMDLVYRFVPLSVVRGIQLAQGLNFAMAAVKYIRYEQDLGKGKSLGRRPWVGFDGLVLAIAAVCFIVLVNGAGEEQEQRQQQQQQQQWWRRRLGSVPSAVVVFVVGVAFAVARHPAAVRELRAGPSRMRVVHISREAWKQGFIKGALPQIPLSVLNSVVAVCKLTRDLFPERKESPTSVSVTMGAMNLVGCWFGAMPCCHGAGGLAGQYKFGGRSGGCVAALGVLKLALGLLLGGSMLRVLVQFPVGLLGALLLFAGVELAAAARDMSTRAEAFVMLLCTAVSLVGSSAALGFLCGMLAHALLYLRACALRERIVSSQTDL

SEQ ID NO: 37657 - protein, 313 aa, Oryza sativa
MQASARLYTAAASKRVIAGVSSTISRSCHRTCRWKSHAAPLSAQEAPKGPKRMTKQERRVKIEKFVEEYKASNDGKFPTMTTVRQHVGGGHYTVREIVQELEYNQRMLQLDQSKAAELPETAEHSEHLKPKDVHGNAQFNSESFSGNQNTDDLHLSQKVAATSTEIIDKTETWRLEESQMTSGTSHYTGETEAVKQDLHTADSLQGANESIKSCQTESDSIKNEDSISLGLDTKSDPTDLELGESKSDKIELNSTARFKNVSEPPVSDPIEGDKTVKANVLDREENPEVEPKTGLFGSLKSFASGIRNFWRKL

SEQ ID NO: 37658 - protein, 551 aa, Oryza sativa
MARAPSFLLLPLLLLVSSSLTPAAVRAHLDSSAAPFHAAALSSVPYSVVDDLVAEDYRALVDTGSAPSVYIYLLNLGPQPRPYAYTAASSPADAHSPGFSRCLAPVWAGKERYIWIDLGAGPVDYGPALSGEGVLPRGEFHPLAALHGRPRSEKALVADLASLVLSAYKSLLVPSLRIPVHYESSLLVQVFHIHGHERDTSGLDWGSIEQSIRDGNLAYEGQRLKFDLNRIRFSDCPICSFAVARSTTSFTSRFLFDNYTLIVSEYLDSKRMRQVLSDSLEELHKVAGVHDNDDYDKVVPVFVFDLDYDKLLLLDRYHQAVAFRDMVISVRTRSSQTVSDYSCNGRHVITMTRNLDRPIIASVLQSMWGVSPTHQSWSPEHNATVVDYTWSTGHTPFGPFSETKSLSFVQKDAARRNVLLTTLNYTITSAIDVLESMAAHGGESILLRRKRRVEFIQRWNLLTYKLEKVVSAMSRLDYNKAMYFLRSSDHDLFAVHTLVYQASQELEASLVCFKDPPFPWLSVSMSGIFVFGFFYVYSKRDKLFRSKRKQF

SEQ ID NO: 37659 - protein, 356 aa, Oryza sativa
MGFVSKSHRQAKLGQQNKFYYDEKLKRWVEEGAEIPAEEPPLPPPPSKPSFQNGVVDYKLNGPMSASHTPNGFMEGKSSTSSEHGSGMPPIPPSQNQFSARGRMGVRSRYVDTFNKGGGGGAVPSYNKPAVASVTPPSGAKFFVPTAAVVAAEQMPNQTAETHGETFRPDERSSPAETSFSSPPPATQFSAPLMVPTIQRYPSMDNITTPNNGSGLSSGSNSSSFSRSRAASWSGTYSEQINAVAGARSPDQQTMPSPLMPGKQSHSRSNSNSSVQFNSLTEDLLRLSSDMLRLLSMTHDFIETTWVKYLDPLSKPPRGGREGGREKERKCFTVNEGNATSEMDISCLAQSCGMGK

SEQ ID NO: 37660 - protein, 463 aa, Oryza sativa
MARRGHHHHLAEVALLASASEDLAAVGAGEREGWLDDPAVLPSLAPRARALAVASAARSVLAVVPVAGVGGGVTVRPALGPDDGRISAVEWVPLVGEDAEEAGGEGVAVAVGTDAGWLLFYSLAGDLLHKQSIYPSKILKLNFRERKENAWEDSGSDELSVVFPGVIARFDGADLQNMLQKSLHEVKSHLWKDKSEQEDAEEDSSFGRIPFQIWNVSKFSSCADAAIVGLMPPPLLELQSSQRHYCAITVGEDAVVSAYRLSEDRSRSIVGAILSRGVAATFSTISSLSKIIWRSEPSPTKKSRPKPQSFAKTSPLTCLKDSPRKGERLTLSPSGTLAAITDSLGRILLLDTHALVAVRLWKGYRDASCLFVEMLLNKDKASSSLHTEYTKSDYCLCLAIHAPRKGIIEIWQMRTGARLLTIPCPKGSRILQPSTRFMSSPFSSLYSPLEVYLFNGDSGQLLY

SEQ ID NO: 37661 - protein, 107 aa, Oryza sativa
MVMAAPAMNPTMAAWDKNSMINPSLQQSTISLYGSHSPEESERCLGDPSEERCSEGQPGVLFLILLGIKLILEESAKQQRNDGHWTNGYIPGTSHHRVYQRRYEAAV

SEQ ID NO: 37662 - protein, 231 aa, Oryza sativa
MEDWDSEDFQPAVPSAKAEPLKSKWADEDVEEDDVKESWEEEEEEKPKPPPVEKTAPKPSGKGAAKKGKQQASTSSEVVQDEALDDPALEKLRQQRLVEEADFKSTTELFGKKDGSEKSLDTFIPKSESDFAEYAELIANKLRPYEKSFHYMGLLKNVMRLSMASLKGADAKDISSSIAAIANEKIKAEKEAAAGKKKQGAKKKQLHIENKDDDFIPGKGNFDDPDEYDFM

SEQ ID NO: 37663 - protein, 378 aa, Oryza sativa
MGRESLPTLAMVMVQLGFAGMNVVSKLALDTGMSPYVLIAYRNIIAAVFLAPFAYYFERKSGMVITKKVLVQIFFSSIFGATLNQVLYFVGLKSTTPTVACALSNTLPALTFAMAAAFRMESVRLSAAAGQAKVFGTVVCVGGSMIMPFYKGPLLRLWASPIHWRFAESAASGAAAPAAGGAAVLGDVLIILSCAAWAVWFIIQTKMSERFSAPYTSTTIMCLMAGVQCAGVSAAMDRSVAVWKLGFDIRLYSVLYIGVVGSGIAFALMSWCIQVRGPLFVSMFSPLMLVVVAIVGWAILDEKIHVGSAIGSVLIVAGLYMVLWGKAREMGSPSDLDGGGGGGGVVELNGKGADAATTLPVFCTTTNKHETTRNGCSN

SEQ ID NO: 37664 - protein, 314 aa, Oryza sativa
MSMGHYSEQRPGFEVTKDWNGADQVMIRSPRGASVLVSLHGGQVVSWRNDRGEELLFTSSKAIFKPPKAMRGGIPICFPQFGNCGTLEQHGFARNRLWAIDDEAPPLNHNDNNGKVSVDLLLKPSEDDLKCWPHCFEFRLRVSLSTDGDLSLVSRVRNVNGKPFSFSFAYHTYLSVSDISEVRIEGLETLDYLDNLSQRERFTEQGDAITFESEVDRVYVGSPSVIAVLDHEKKRTFIVRKEGLPDVVVWNPWDKKSKTMADFGDEEYKQMLCVDAAAVERAITLKPGEEWTGKLELSAVASTNCSDHLDYPCS

SEQ ID NO: 37665 - protein, 577 aa, Oryza sativa
MLDDWQENLAIITANRTKGDDLVITHLGDCLWKEKNEVAAAHSCYLAAELNIESYSESSRMCLIGADHLRCPRTFTSPEAIQRTEVYEYAKVLGNSQYILLPFQPYKLIYAYMLVEVGKVSDSLRYCQACLKVLKASGRAPELEAWKQLFSSLEERIRTYQQGGYGTNLAPAKLVGKLFTSLDKSLSRMMGTQPSALSPVPQGSLTERDSYSAPAATNFVNNQPVMAMSSLMSSVSEQSMSEMSGNTGPDRKVTHNRSVSEPDFGRTPNQGAGLDNAQSTSGSGSSRFGWLLQKTMGLVSRSHHQAKLGEQNKFYYDEKLKRWVEEGADIPAEEPPLPPPPTKALFQNGIPDQSSNGPGSVSYTANGFSEARPLNPSGPSSGMPPMPPSQNQFSARGRMGVRSRYVDTFNKGGASATGPSYNKPATPSMNPLSGATFFVPTPATVASEQIPDPTVNVHQDQPSSTIALRESSASPPPSVQSIPVQSNIQRYPSMDNIMTPSGSGNGSSFSRSRAASWSGAYSEQLSGNAVSRSPDGQRTMMQSPLIPGQKQSHSRSSSNSSLQFNNGLGEDLHEVEL

SEQ ID NO: 37666 - protein, 824 aa, Oryza sativa
MENFSPRTLLNSILRITVLTSDGSTARPKPIQKYCQNVCDISSIVSPLIEDLCESPEEQLNEVLRELGTAINRASGLIGNWQQTTSKIYFIWQIESVISDIQGCSLQLCQLVNSLLPSLTGRACTCIEKLQDINYENMFDLVKESSLELVETDTTSPENLSRLSSTLSLSTNLEFYMEAVSLENLRARAMRSENREEMDLADKMIPLVNYMHDHLLRETQLLSINGVPIPADFCCPLSLELMSDPVIVASGQTYERVYIKLWLDEGFTICPKTRQRLGHSNLIPNYTVKALIANWCESHNIRLPDPMKSLKLNFPLAASALQDSSTTGSSPLHPTVAAKGNIPGSPEADLYMRSLNRASPPHSVVHQNSHAHVNRAGHEASIKQSSENANGSASDVSRLSLAGSETRESSLEERNAGSIGQTSEQSIEEAFQASNLDRDSHDHVGSSSVNGSLPNSGQLDAECDNGPSERTNYSSDASGEVTDGPSASSAPQREHLIPSRLADVRSRGQFVRRPSERGFPRIISSSSMDTRSDLSAIENQVRKLVDDLRSDSVDVQRSATSDIRLLAKHNMENRIIIANCGAINLLVGLLHSPDSKTQEHAVTALLNLSINDNNKIAIANADAVDPLIHVLETGNPEAKENSAATLFSLSVIEENKVRIGRSGAIKPLVDLLGNGTPRGKKDAATALFNLSILHENKARIVQADAVKYLVELMDPAAGMVDKAVAVLANLATIPEGRTAIGQARGIPALVEVVELGSARGKENAAAALLQLCTNSSRFCSIVLQEGAVPPLVALSQSGTPRAREKAQALLSYFRSQRHGNSARR

SEQ ID NO: 37667 - protein, 60 aa, Oryza sativa
MILVLVPCLPLRLLPDTQGPSAKTCEGAAGESGYRRGATVVKQQLYSGRISAVVRWLYGC

SEQ ID NO: 37668 - protein, 359 aa, Oryza sativa
MDPVAGAASTRRFAKELGNLRELRVLRASIYAVDESTERDLMESLLGNLQKIQSVDIFGSPLERGVTWDAGFASRWRLRHLNLECFELSRLPASVNSSLLPNLSHLDMKVQVMQEQDMETLGRLPELRCLVLDSRYTKVVRIKNTGSDCYFKKLRFFTMGSSSILFDVQGSECAIMPSLESLAFSVHVRFLKDADLLCFKKLGLVNLPSSLQRVTVEINSWDAHDTEVEEAEAMLEHAAIVHPNHPIFQTTRPFGKYIMLLPDQEPSSTNPKVDRCDVNLRKNDGDHLDFRWLLMNPRVEKFCVSINCENASLEEVEEAEAAARYAVDVHPNCPTLELVRYGEDKMVLPNPQQQVGYLS

SEQ ID NO: 37669 - protein, 448 aa, Oryza sativa
MATFAKPENALKRAEELIHVGQKQAALQALHDLITSKRYRSWQKPLERIMMKYVELCVDLRKGRFAKDGLIQYRIVCQQVNVSSLEEVIKHFMQLSNEKAEQARNQAQALEDALDVEDLEADKRPEDLMLSYVSGEKGKDRSDREHVTPWFKFLWETYRTVLEILRNNSKLEALYAMTAHKAFQFCKQYKRTTEFRRLCEIIRNHLANLNKYRDQRDRPDLTAPESLQLYLDTRVEQLKIATELSLWQEAFRSVEDIHGLMSMVKKTPKPSVLVVYYAKLTEIFWISDCHLYHAYAWLKLFYLQKSYNKNLSQKDLQLIASSVLLAALAVSPYDHKYGASHLELENEKDRNLRIANLVNFSLDSKRENREVPSRASLFSELAAKGVIACASQDVKDLYNLLEHDFLPWISYPKHSHCYLRFQRLEGSFHQLPWFQKFFCHSTFLLWRS

SEQ ID NO: 37670 - protein, 517 aa, Oryza sativa
MRTFSLHWSSHEVIAENVSDLVLDYLQPHSDLEELDIIGFSGTRLPFWITDSYLVNIVSLNIINCCKIEHVPSLASLCSLKNLFLQDLSLLASMGCMLHECDKIPVGCSHSFQECPSSIDMSEGMVDVESEGVSFPPHLSTLTIRGCPQLMKLPTLPSMLKQLKIEKSGLMLLPKMYQKHNDTEGSFPCPNESQLTNVLIEYCPNLNSLLHCFLGQNVTLTSLRELRINQCEKLEYLPLNGLMELVNLQILEVSDCSMLKKSGMEVKLLPSSLEQLSIKSCGELANILIDLLAGLEALTFLELANCSHLISLPTVKTFETLTALKELRLYGCPELSSLGGLQCLKSLRLLIIRGCCSLTKISSLPPPLQCWSSQDDSTENSLKLGTLFIDDHSLLFVEPLRSVRFTRRLSLLDDPIMTSLPEQWLLQNRTTLSILWLWNVKSLQCLPSSIKDLCHLQSFTLFNAPLVNSLPDMPASLKDLIIDCCQIALAERCRKGGCDWSKIAHVTLLKINGNEPL

SEQ ID NO: 37671 - protein, 60 aa, Oryza sativa
MYRRALLTINVGCGSKPDAAVGDIYLDTQDSRPYISSLGHTYIICIPVAKTYFSFLQITS

SEQ ID NO: 37672 - protein, 411 aa, Oryza sativa
MEKNCACPPPSKGNMITILSIDGGGVKGIIPAVILSFLESKLQELDGKDARIANYFDAIAGTSTGGLIAGMLAAPSLGDANQPCYAKDIVPFYLKHSPHIFPHRTGFFGWFFNILGIIKMAIGPKYDGKYLHRLINDLLGETRMKETLTNVVIPTFDVKCVKPIIFSTFKARRKPLKNACLADVCIGTSAAPTFLPAHYFETVDHTGASQSFNIIDGGMAANNPTLVTMGEITKQIKRKSEEFPKAEPLDYRKYLVISLGTGLPEHDIMFDARNVAKWGIFRWLVDKDTMPLLNMFFHASSDMADTLVADLFQAIGCSHQLLRIQDHNIPIGAISNDLSTKDHLQLLVKIGENLLKKPLSKEECEKNNIEPEPNLHGDHVTTYADMLTRFAKLLSDERKLRLHNMKLDAKP

SEQ ID NO: 37673 - protein, 291 aa, Oryza sativa
MSRRHRHYPDPEVEDHFEDSTQDEPSNSLVTSTKESKGGRGPNVLMAPVPEKDRAVITPLNKDAWITNPMKKNVSSTITCLIKAHYPGTYRPLDKHGKQVPEDEAVVIAHYHNFSAHTRITILKEFLLCFKFADGREEDCARLFYRKAVERFSQALSHEKSEAKRSLEKHIENMRATELQQDGDAPSHDDFDVDEPQLWKAFPPYWIEQKWWDMLCDLWSDENVKKVSAQNSKNRMEGGGVHHTCGSRSVAMHKQAMIIENAGTDVDDIDVFERTHRHAKGKGQYANKKAE

SEQ ID NO: 37674 - protein, 167 aa, Oryza sativa
MDEVAEIADAMGTVGIDNGASRKLLSNESLEERGEEHDVQADGAHSGESEVINPAEEVGGEATSQPEDVKPRVSKGSQSHSPKVTTKSQRQSPRSGDKSQARKNSPGSTYPKAPIARVSDPDLVDSSSCNDGADIKKVKVFSIMLYYIVLKCLDPAMCSVRRHLYAQ

SEQ ID NO: 37675 - protein, 66 aa, Oryza sativa
MHAEDQSIYTTTSLKTDEAERRGRAKPTLRLRHQHRRTDRRGRGSLPAPTFTSPSQPCMLNAKQRQ

SEQ ID NO: 37676 - protein, 49 aa, Oryza sativa
MVMTPASLALHFGFRIKTIKYHKFSLNIWDVGGQKTIRSYLSRLTAWFG

SEQ ID NO: 37677 - protein, 40 aa, Oryza sativa
MWEAWCKYRIWSQLFLYSPRLGLQLFLLLQRKNQKEHLHL

SEQ ID NO: 37678 - protein, 64 aa, Oryza sativa
MLLSLFKPSFIVLMVEEGEEIVAFRLCSCSSTLVSLDRGLDGALADLRWNAIIFFSCFLFSGDG

SEQ ID NO: 37679 - protein, 237 aa, Oryza sativa
MACLVDEGHATSFLCPLVKASERGCLQVVQWFVNRHVSDIEMCLAVTTAASCGHFAVATYLLAHIPRHVLEALSPQILKAARGQGSGSFEGVSFLLRSNFLNDAAATYAVADSIATTSTMDIPQDLVDFLKEQWSQAAFAEGVVAGEDHFVNITRVLRRGASPIRLHDLPEPMALAIAYLPLYRACASARGQLLPQRLRGELVEAVGRLGVPVNMENNRRDFLAVLEHYFPSFITGA

SEQ ID NO: 37680 - protein, 188 aa, Oryza sativa
MLNLVVISETSRTDDDDDDEKAMLIGTPLDATQESKLIHILVVRSIQAAYKHALISSDCQSKAEFKHPLIILANELKLVAEKECTIFSPTLCKRYPEAGRVALVLLHLLYGQQLELFLERMDNSESLKEILAATNNFELCVAKKLYLMNEGAVGSLLSKYLKPYMVRHDLYLIFLVVFFYHKDIIHCW

SEQ ID NO: 37681 - protein, 249 aa, Oryza sativa
MSKTIGNFKLTVMEGEFTDSQIFVMLGENGTGKTTFIKMLAGVEKPDTVDGIDIEVPEFCVSYKPQKLASTYQGTVRQFLHEKIRDSYTHPQFVSDVMKPLKMQQLMDQEVQHLSCGQLQRVALCICLGKPADIYLIDEPSASLDSEQRLVASKVIKRFIMHAKKTAFIVEHDFIMATYLADRVIVYEGQPAVDCTANAPQSLLSGMNKFLSHLEITFRRDPTNFRPRINKLDSAKDREQKSAGSYYYL

SEQ ID NO: 37682 - protein, 142 aa, Oryza sativa
MASGCPTVAMNGHPDKTNVRGHSRTSSGNRSFQEPKKKKESRQYNKSRIEVKNRSLQEFVMRKTRGESMKGKGKKKEHAKIEMLTQLLYLCLSVSCFSPLLCFSRLDGFFVNEGGWLHEYLYICKSFSLSLSLSVCKCFTVQ

SEQ ID NO: 37683 - protein, 358 aa, Oryza sativa
MFRTRFRMNRRLFLRIVNALGQCSPYFTYRVDCTGRIGLSPLQKCTAAMRMLAYGTPADALDEYLKIGKCTSLECLDRFTRGVIEVFGGEYLRRPTSSDVERLLQVNESRGFSGMLGSIDCMHWRWEKCPLAWRGQFTRGDYGVPTIVLEAVASQDLHIWHAFFGVAGSNNDLNVLNQSPLFFDALKGEAPQVQFSVNGNEYGTGYYLADGIYPEWAAFMKTIPLPQTEKHKLFAKHQEGARKDVERAFGVLQSRFTIVRRPARLWRRKSVGRIMLACVILHNMIVEDEREEATIHIDLNENPGASFALPPEVNIGGNLCFADVMRKKATVRSRPQHTQLKNDLVEHIWHKFGDNHHN

SEQ ID NO: 37684 - protein, 45 aa, Oryza sativa
MSIKVEFTFWTTSLECYREYGIHVFICVIRSRFLESNTYLNMCQL

SEQ ID NO: 37685 - protein, 391 aa, Oryza sativa
MFCTKSLLAKMMKCRTTKGYFETCMAPSTDIDLGYAGHSARCFIYLSVKDLLGSKRMIVEWVQNTSTPTSSYVPILLRLVITLYLVTVNQDDGDLYEVTAFLEKNHVFTDLPPEFSEKIRNALRMKSRTVKNFMRVFADALAAIGTRTVVMGDIKKAMAHKCQPDLNADMISSVDLSDAKKVMALLSTEKSSSLKQEPQLPEIKSVCNKICNATSGHFPLTSVGGSQKSTSNFNLSDVDHPLLEKFEAFQVNMPQKKNGSLISQILRSPLSWIEQRAPPVQMLELRHICKQVEEQHVREKRALSVKDLHSNREHGDGEKNIGKIVDVQGSQSNPDRASEWSGCSDDEQETGGSNVVQSTKEAPAAASSGPSSKNKPQKKKKSKKSKRSGRK

SEQ ID NO: 37686 - protein, 59 aa, Oryza sativa
MLTKQVKRALGHVEYMENVVESEEVFSYSRCLKQKGIKVNYENCDNLSREMLTVKFCKI

SEQ ID NO: 37687 - protein, 40 aa, Oryza sativa
MLPLGCKHGYLCAYWEWQNRAVRALHSKASLKVPLIRVEV

SEQ ID NO: 37688 - protein, 425 aa, Oryza sativa
MNNMDGCKPPGLSLERTSPLFMEQSVENDLFDILGPQFHHLCHNAGADLVPWTDAKPESSDRDVPESSIHADSAPLFSSRDNELYSGIFSLTDTDQLLDAVISNVNPAGKQSSDDSASCKTSLTDIPATSYLCSKEMKQCGSSGVPSVLIKNESAQFIKQPCLAENAEDGCLSQNNGMHKSQIRLWIESGQSMKCESASASNSKGLDTPSKANRKRSRPGESPKPRPKDRQLIQDRIKELREMVPNGAKCSIDALLEKTVKHMLFLQSVTKHADKLKDSTESKILGNENGPVWKDYFEGGATWAFDVGSQSMTCPIIVEDLDRPRQMLVEMICEDRGIFLEIADFIKGLGLTILRGAMEARKSKIWARFTVEANRDVTRMEIFLSLVRLLEPNCDSSGAAENANNVNMPLGLVHQPVIPATGRIQ

SEQ ID NO: 37689 - protein, 43 aa, Oryza sativa
MIVFIYCLFLLSIKAHYLKVIFWQKKRLLFGLITSYWLLQYLL

SEQ ID NO: 37690 - protein, 656 aa, Oryza sativa
MPWMKERKKNNLSYAKGMRQMYEPFENLARELHMCPCCQRAFTPDEEDEFVKKQRTTCESTADRMNKISLECSNAEDFFQQLNKLNATYEEFVKLGKEAIPLAEKNLKQLLADESEKAQTFDDFVSVLAQVKMDKDAVQVLLQPVETIDRHVQEIQQLGPQVENLEYKLDVRGQGVKSLEQIQLELNSVQRTRDTLNNEVDDLRDQQRTLTDGLTNAQMRWHDIREEKLKASGAVHKFQKAEEDLGHLAEEKEKLTLEEKHLEESLGPLSKERESLLQEHEALKEKLDQEYHQLAERKREFQQEIDALETHNERIKGYLNSKKGEKLNELQEKHTQLQSDLQKSKERKEEKSAELSKNKELLKSQDQLKRNIDDNLNYRRTKDEVERLTHEIELLEDKILSIGSLSTIEADLKQHSQEKDRLLSEYNRCQGTQSVYQSNISKHKLELKQTQYKDIEKRYFNQLLQLKTTEMANKDLDRYYAALDKALMRFHTMKMEEINKIIKELWQQTYRGQDIDYISINSDSEGAGTRSYSYRVVMQTGDAELEMRGRCSAGQKVLASLIIRLALAETFCLNCGILALDEPTTNLDGPNAESLAGALLRIMESRKGQENFQLIVITHDERFAQLIGQRQLAEKYYRVSKDEHQHSKIEAQEIFD

SEQ ID NO: 37691 - protein, 414 aa, Oryza sativa
MTTAIFSTIKQATALGCFPRLKIIHTSRSFMGQIYIPMMNWFLLVSCLAFVTMFGSINEIGNAYGIAELGVMMMTTVLVTIIMLLIWQINIIVVLCFLTLSLGLELIFFSSVLGSVADGSWVLLVFAAVLYLIMYIWNYGTKLKYETEVKQKLSMDLLMELGCNLGTVRVPGIGLLYNELARGVPGIFGQFLATMPAIHSMIIFVCIKWVPVPVVPQNGRFLFRRVCPKSYHMFRCIARYGYKDIRKEDYISFQQLLIESLEKFMRREAQERSLESDQYDGTDSEEEAASASSRALVGPNGSINSLGVPPAEAAGTTEHPTIGSSMSFDGSLDEAIDGRGSLDDELSFIHKAKESGVVYLLGHGDIRARKESFFVKKLVINYFYAFLRRNCRRGIAALSIPPSRMMQVAMQYMV

SEQ ID NO: 37692 - protein, 627 aa, Oryza sativa
MHLFYDLLAADVGDSEFAAIVELRSPDECLKALSPLRARVFLNALLDCEIPVTMRDDGTYALEPGCAEASTKNDVKFPERLIEILNVLQPAKFHWQWVELRLLLDEQSLIEKPKNVPYVKALRSLSPNAENFTLSEREKGLTEVILSRLLVRPDAAPLYSELIHLLGKLQESFVMGIKWFLQGQDVLLGNNSVRQQLVNLTQRKGFPMKTQFWKPWGWSKLVGYANANKSSKRKLEVTSIEEREVDGLIDSIKSSNRKSLNVGTSPEGHGSTQKYFTQEALAELVLPCIDRSSSEFRSVFAGDLIKHMGVISEHIKAAVWNGINKLNSSNPSGNEGLSKPNGRKGIFSGSPNIRKHSPVPNDSTTPSASALRSSIWLRLQFIIRLLPVIIADSNMRQTLASSLLSLVGTRVVYEDADSLEPYMDDVLLDCPSESLFDRLLCVLQALLGNSQPSWLKTKPSSKPAVKFLRDLSAIDKEVTKSLQCALDRMELPATIRRRIQVAMPILPTSRLSSITCGPPLLSSAALSPFQCSTSAAGPHQQFPLNWIPTNLSRRCKAALPSQDPNMEIDPWTLLEDGTSCPNTNSGSNSANGVTGDHANLKACSFLKDSVRVRRTDLTYIGSLDEDS

SEQ ID NO: 37693 - protein, 114 aa, Oryza sativa
MAPCDLAVLERVGSDVVRTSEMQQQEGSPEGDEPVAALRGAEGEPAEGVRRGDVGELVRQPEDSPPFVSALAPPDAGEEEREELLDEAEDYKDLGCPFAPKAQQQPGDFSRLHH

SEQ ID NO: 37694 - protein, 54 aa, Oryza sativa
MAFSFKMLNEEGQGDFVLLFAIDWPLVDISEFMYSTGKKKKKGNIHICKIISLL

SEQ ID NO: 37695 - protein, 72 aa, Oryza sativa
MLHCVVLPPFHNVSHSSISHIHIDVNESRHIYLSRFININMNVENARMTYIVKRRKYLGLRSYFCVLFLRIG

SEQ ID NO: 37696 - protein, 367 aa, Oryza sativa
MPSKGSSQMTMTNQRNLSDRRAQQPLSQVYVDVDSEHGTAERQEIGTTKRARWSHQMKMFLIELLTDHDVPGFRTQNAWSKEAWTNIVCRLNTKFGTSFTTNQVKQKEQDLKKDYRSVKDLLDQSGFGWDSDRMMVSAPQSVWDTFADRKNKDAIHWRDKSFPYFDDLAPLYDGRYAEGRTRHGMDHYARKTKNAPAHSTQEANAVDTYQSPSPNSNAPGESGLQFPFGEEVETANLDFSQHSPTPVHLTKVPPSSAQTPSEVPESRPGKKQKIKSVSPDDGFHERYLKLKKEEIDRFAAIEEKKLEDPYSINKCITVLEGLHGLQIGDILVAADIFKGKDNREVFLSFSSDALRLAWIRKEIAALE

SEQ ID NO: 37697 - protein, 369 aa, Oryza sativa
MDKADDKLSTPSEEQNESGGGTSVGGINDSQENKGVNGLCQGEVIDPLATANGDELSMGLSRSASGRESIEQEDTVMCASDDQKVENHCQFDDKHKEAEISQIELAVDNHIMLTDCTNQKKGIDSPVNETKGDSTPDIVFIRRKSITRKTCEAKQVKSEDEVRFEKRVTRSATVRQREVSASMCVGATNDANLESKERKEDVHHYTRKVGSTVRSKVHHTGVAECDTDTKKKLKGTVTTRRNSDAIANDDPPSITQNKESKTQMKIDIKSQPLTRRGSIVNKTEDAVSGLDQNICSSAITDKNDIELTDSEGVKSENKAAVRKSILSVGAKIVASKKRILESGLDKASGESPVAIPSLRRQEIHPQTLS

SEQ ID NO: 37698 - protein, 88 aa, Oryza sativa
MLTLPSNKVRTLPAISSLSVRTNTLQTETMIVRLLIIHSSWYILSSASIGAGVHCCAEAHELLHDEAAARVVDSIMDNLVDRCYVACW

SEQ ID NO: 37699 - protein, 472 aa, Oryza sativa
MSTQLVFPSASNGGCPLGVSRNNFRKVVLGVGAGHLQGKKCFSGGSSRPSKLECSANSRRVGPRRTKDALYDLHPEISMLYGEDNGAVAAPGKEQDIVKTTERLEDVSASHRYSEPRIKVIGVGGGGSNAVNRMIESDMKGVEFWIVNTDFQAMRMSPIDPDNKLQIGQELTRGLGAGGNPEIGMNAAKESQELVEQAVSGADMIFVTAGMGGGTGTGGAPVIAGIAKSMGILTVGIVTTPFAFEGRRRALQAQEGIASLRSNVDTLIVIPNDKLLTAVSPNTPVTEAFNLADDILRQGVRGISDIITVPGLVNVDFADVRSVMSDAGSSLMGIGTATGKTRARDAALNAIQSPLLDIGIERATGIVWNITGGNDLTLTEVNAAAEVIYDLVDPGANLIFGSVIDPSYTGQVSITLIATGFKRQEEAESRQAGGDNSRSHSSWFSSSSQEEGPTLQIPEFLQRKGRSGFSRG

SEQ ID NO: 37700 - protein, 661 aa, Oryza sativa
MILLMRQLHARRRKGNSQELKSIIQPHSSHVAALTQACPNNLSGGALTPLDLCDAVSSNLDASTPGSGYQSSYTIGLTPPNHHGSNGPTTPNSTLNSRLSGSPGTVLSNNFLPPSTFSASSRDAQKYGVPRCTSLQSDEQQKIHYNQILSGRNLQQTGGSVPGAFPPGVDRGARVMPGTHGMGMVSGLNRANSGQGAPNAVNVHPGAMSAPGNPTLRPHNPMQALHVSQGNTQAISSMNHSLSNAASSSPVQSFPIQQHQQKHQISPPSHMFGNPQHPQIQGMSHSNPQQQTYAMRLAKERNIQQRMVPQQQNDLPGASAVPSVQNGSHGQQQKQSPAALSAPSSQPQHQRQQAAQNPPDSCAHPNQPTNATQHKPKKSQQQPRQNQQQRNQGSQQAKLMKSLGRGNMLIPQTTVDTTPTNAVSASSKKQITENKLIQHGQGTLPGNKASNPSIPHPGNQHKLYSSPLPQSPKQLPDIGNQGVLQGSPSQALLTSQQLPLHPKSSLTTQQQQQHVHSSQNSIQRMMMHQNLQSNSDCRPDSQVVQVQNNQIVPTPPIPQSTEKGSAGLSSISQQKHEVSNDSNAVNSTSMMLSSPQDTFAGGERLLPSSSHDVLERQMPGGLPMYGGQWHQEQSKQQLQSPNQQRPVVQGSVYAPLNPGPG

SEQ ID NO: 37701 - protein, 445 aa, Oryza sativa
MKLLGSIIGILKSLKSLTVVPVCFSEDSNDNENSSIAIFLDFLDKVPPPCSLLQRLELFPRVCVFHRLPSWIITIEKLCILKVAVMELLRKDIETLSMLNALTVFSLYVRTTPAEPIIFDKSGFHVLKYFKFKCSTVSSLRFDEGAMPNLQRLKMEFNGSTVEQYNLENVGFKHLSGVKVSAKICIAGTSEANRMAIASVLNNAIRQNTRISSVIIRFINRVIKDLPIVPTPHTDHMHENLRLDKSVRSWPTQCDGCKELGAGHRFKCEQCNSKVYYDMCCATAPHTLKHPLFPGSVFRFLRKPLASECGRACDACGDLMHGFVYHCFERGLDLHPRCARLPVRTANVKGYVMELRRVSACSRCCICMCGKEGYRNKFWSYRSSQEGQDINVHMACLKDLASKSHETLTKLYEILMGESQWTPTEVLGEDTSDQLVVSRMVIVRH

SEQ ID NO: 37702 - protein, 423 aa, Oryza sativa
MSLEYLHIQGFGDVCIKSGLWYIKNLKNILIIDCSTVVTDSNEESAQEDKQSPTQIDRTMHSLTHLTLGGDTMQKVGLEFVIPQTPSLRNLRLDIVQGHTSITKKWLQYLTSLQELEIYSCHALPSSLSSLSSLRRCTLKYCHWMYSIPPNSLPGNLKELQIEECSFELEARCQNPTGDARPEGRKIELWQKRKMGEWRERKLEHGRTKLIEMQQKNESLGIPMSWREKSPKSSKGESLYQSDKYWSRGQRMQEGHEWPRKQHMEEQSFIEKEKSSSLNEQAEEDESKKEPLEEWLQQSEGDQWPEREWELYSWVERKLKKELDRNKDDPSSLMKEREEWLKEEERKFHSETLGKDWPNICHVPYLCGGRDCTESLYLKLQILQTWTHFLFHDSHALVKEILHLNQESRQCFCFRHHLSAQRT

SEQ ID NO: 37703 - protein, 366 aa, Oryza sativa
MFTKWIQSYRDLPLMINQWANVTRWEMRTKPFIRTLEFLWQEGHTAHATLEEAEKEAMQMIDVYTKFAYEQAAIPVIPGRKSRVETFAGANRTYTIEAMMGDRKALQAGTSHNLGQNFSRAFGTQFMDENSQIEHVWQTSWAISTRFVGGIIMTHGDDAGLMLPPNIAPIQVVIVPIWKKGDEKSAVMEAVSSVQNTLKEAGIRVKVDDSELRTPGWKFNFYEMKGVPIRLEIGPRDVTNKSVVISRRDIPGKQGKEFGVSMDPSILVDHIKGRLVEIQASLLQKAIAFRDSNIVDVSSYGELKEAIAEGKWARGPWSASDADELKVKEETSATIRCFPFEQPEGAKKCFMTGNPAEEVAIFAKSY

SEQ ID NO: 37704 - protein, 241 aa, Oryza sativa
MAAIRLSMKLLIDTKAQKVCFAEAGSDVIEFISCLLCLPMSTIINMLTKERMVGSMGNVLDSVEKLDSKYVISSQSKERFLSPTVAPTVLCPLQQLLLDAKLNVNASFFTCEGKSTVVSYSTTKVPCGYFSVSKGAVCPVCSTQMHRAIPHVKTVGFVVGTATYTVRDDLSMTPASSVSSVSLLAQCGVKDLSALQERTVKIGKEEVLEILLASLKSKTVLTDVFLPKRKVSCKREASGLL

SEQ ID NO: 37705 - protein, 141 aa, Oryza sativa
MLSKPLKKGHTENFGEVLERRNPLAFGHFANHPPKGSTPNVMICPYDFPLTEKDMRVYIPNITFGGEEEPVTMKRFGSFWFKSGRSGNQEGESPVLKTLVLVSTRSICDEELFLNYRYSNSKKRPEWYIPVDEEEDKRRWS

SEQ ID NO: 37706 - protein, 373 aa, Oryza sativa
MVLGCYNSKDYPRESCSSAFMLELESVRPEPQAPLEDYRLHLEILPLQLHLDQGQLNFLISFFQNDLCNNPNLACENENIDAQSTMYRSDTIADEALLPFFQKFDVKPLVLHINYIPRHFDPVALSKGNYAELLNIFPWKGIDLKLKQVSAMGVYGFNNICEIVAAEWLEDISKNQVHKLLKGLPPIKSLVAVSSGTKKLVSLPIKSYKKDRKLLKGMQRGAVAFIRSVSIEAVGLGVHLAAGAHDMLLKTESALTAIPPPLASREAKRTKDNVRANQPESAQEGLKKAYESLTDGFGRTASALIGNPIKVYNRGAGAGSALATAICGAPGAAVAPLSASFRAAHYTLLGIRNSLDPERKKESMYKYHGPPQL

SEQ ID NO: 37707 - protein, 62 aa, Oryza sativa
MCSCEGSYDFLLLNGDVQVSSQLLHFGQAHFQFGGLNAVLAVKKKKKKKTSNPFSQQQFHKQ

SEQ ID NO: 37708 - protein, 169 aa, Oryza sativa
MADCTTMRLASSVTIILLLLVASQALVVSGESSSSAMQSKTLNMNKLLNISEDHSPNGGRHWMQRMQPDSCSEQNVVVYQNNAEHLPSGIPTYSVEIINVCTACTVYDVHISCGEFASAELVDPSQFQRIGFNDCLVKGGGRLGPSEAVSFQYSNSFAYPLAVANVACE

SEQ ID NO: 37709 - protein, 77 aa, Oryza sativa
MKVAHLVVTCLSAAASMMGMVGGWCILHRTVLARSAKMVVLMARSSRATLSLLSDVIFRFGLVIATGNDVRKIRSAQ

SEQ ID NO: 37710 - protein, 58 aa, Oryza sativa
MGVTQWVRQETYVDPHIHKWPISCTRLLFYIIIDHPYEIHPNLSTFYNVNVSLKNLGT

SEQ ID NO: 37711 - protein, 268 aa, Oryza sativa
MAADSSTAMTLYQGVPFHQQQNQIEIESMLSFQSSSIPPPPTPATMLLAPSSSSSDFRNYKFVTCSPADWPHHDLAILNDGLLRYAHEPNIIKYTKIAAMLPTRTIRDVALRCRWTKDNESRRGKLDQVYTGKMIRGLKDNMVSSTLAANIQIQNPNNMVPFSISMHYQGQNSLLHKEVPVLDSATQHLLEENNQLLSQIAENIETFKTVENMDLFLRTNNNIRTVLKRMSETPGIMGQMPPLPVPVNEGSLNTLLQMDRMVGAYGIP

SEQ ID NO: 37712 - protein, 588 aa, Oryza sativa
MPEAMTAQGVTEERLLLLKGVSGSFRPGVLTALMGVSGAGKTTLMDVLAGRKTGGYIEGDITISGYPKKQETFARISGYCEQNDIHSPHVTVYESLVFSAWMRLPSEVDSETRKMFIEEVMELVELTSLRGALVGLPGVNGLSTEQRKRLTVAVELVANPSIIFMDEPTSGLDARAAAIVMRTVRKTVDTGRTVVCTIHQPSIDIFEAFDELFLMKRGGEEIYVGPLGQNSSKLIEYFEGIEGISKIKDGYNPATWMLEVTSTTQEEMLGIDFSEIYKRSELYQRNKELIQDLSTPTPGSTDLHFPTQYSRSFFTQCIACLWKHKLSYWRNPSYTAVRLLFTIIIALLFGTMFWDLGRKTKKEQDLFNAVGSMYAAVLYIGIQNSGCVQPVVVVERTVFYRERAAGMYSGFPYAFGQVAIELPYILVQTLVYGVLVYSMIGFEWTVAKFIWYLFFMYFTLLYFTFFGMMAVGLTPNESIAAIISPAIYNAWNLFSGYLIPRPKIPVWWRWYCWICPVAWTLYGLVASQFGNIQTKLDGKDQTVAQFITEYYGFHHDLLWLVAVVHVVFTVMFAFLFSFAIMKFNFQRR

SEQ ID NO: 37713 - protein, 85 aa, Oryza sativa
MMEESANCCSPHLVHGFDESYLQLSGLLSSFGNIEFTIGVNHMVVFRLRMMLGTLCAVVGILVVFRDHHPKFVIALIDLLILADD

SEQ ID NO: 37714 - protein, 268 aa, Oryza sativa
MQSVDEHKTAFKTHHGHFEFRVMPFGLTSAPATFQSCMNSILSPLLRRFVLVFVDDILIYSKTLPEHVKHLQIVLQILTTHQLKVKKSKCSFAQQRLAYLGHIMSPNGVSTDEDKIQAVSNWPTPTSVKELRGFLGLAGYYQKFVRHYGLLSKPLTNLLRKGQLYIWTAETEQAFQALKHALITAPVLSMPDFNEPFIVETDASDKGIGAVLMQKNHPVAFLSRALGPRHQGLSTYEKESLAIMLAVDHWRPCRVFYQNRSSQSIFFG

SEQ ID NO: 37715 - protein, 224 aa, Oryza sativa
MPQLDKLTYFSQFFWFCLLLVSSSRGMGGQIPSISRYERIVSKFIGKFFFSGLWTDRPYLIFIFISLIFLGLYIVRRRREAFSSTLIGSFSGLFSFFFVEGPEVASAMENPPGPGPSEAGPSGSAAGKSAEASTPSSSFFNGLSGQIPAPDSPGEEVPQGEQPRFDPYSIPEVPLEHVFGAVPDRGEPSTSHTPPNPEPQLGEENAGPSNHQIQHDVIRSRLET

SEQ ID NO: 37716 - protein, 815 aa, Oryza sativa
MNDCENANVAYSNAITLFKHLLKAWISWGNYCDMVFKETKDEIWLEYAVSCFFQGIKYGVSNSRSHLARILYLLSFDTQNEPAGRALDKYLEQLPHWVWLSWIPQLLLSLQRSEAQHCKLVLLKIAQVYPQALYYWLRTYLMERRDVATKTEMGRIAQQRMQQAMLANNAANNLSEGNARTSNLGGGNMTSDNQVHQATQSGGAAVSHDGGNLQGQESDRSNVEGGTSAGHDQGQPSSTGADGSQMPARRNNGLGWVTSAASAFDAAKDIMEALRSKHTNLANELEVLLSEIGSRFVTLPEERLLAVVNALLHRCYKYPTATTGEVPQSLKKELSGVCRACFSQDAVNKHVDFVKEYKQDFERDLDPESATTFPATLAELTERLKHWKNVLQSNVEDRFPAILKLEEESKILRDFHVVDIELPGQYFTDQEVAPDHTVKLDRVGPDIPIVRRHGSSFRRLTLIGSDGSQRHFIVQTSLTPNARSDERMLQLFRVLNKMFDKHKESRHRHLAIHTPIIIPVWSQVRMVEDDLMYSTFLEVYEINCARHNREADSPITIFKEQLNQAISGQVSPEAVVELRLQAYNEITKNIVNDNIFSQYMHKILPTGNHLWTFKKQFAIQVALSCFMSYMLQIGGRAPNKILFAKNTGKIFQNDFHPAYDPNGMIEFNELVPFRLTRNMQAFFSNFGVEGLIVSAMCSAAQSVVSPKQSQHIWHHLAMFFRDELLSWSWRRPLGIPSVPVAAGMINPLDFQQKVINNVEHVITRIKLISPHYLADEEENSSEPPQSVQRGVTDLVEAALSSRNLCMMDPTWHPWF

SEQ ID NO: 37717 - protein, 743 aa, Oryza sativa
MAVIGTIDGCGKIVLIDSAAMEHAKINGLPPPTPVEDLELEKVLGDMPQKTFEFKRVSLVSEPLDIAPGVTIMDALKRVLSLPSICSKRFLTTKVDRCVTGLVAQQQTVGPLQLPLADVAVIAQTYTDLTGGACAIGEQPAKGLLNPKAMARLAVGEALTNLVWAKVSSLSDVKASGNWMYAAKLDGEGADMYDAAVALADCMIQLGIAIDGGKDSLSMAAQCDGEVVKAPGNLVISAYVTCPDITLTVTPDLKLGNDGVLLHIDLGKGKRRLGGSALAQAFDQIGNDCPDIDDVPYLKKAFEAVQELLSQRLISAGHDISDGGLIVSVLEMAFAGNCGVKLNIDSEDSGLLQALFAEELGLLLEAHLKDLSVVKQKLEAGGISANVIGQVTASPDIELVVDGRLHLKEKTSDLRDIWEETSFQLEGLQRLKSCVRLEKEGLKHRTSPSWSLSFTPKFTDEKLLTASSKPKVAIIREEGSNGDREMAAAFYAAGFEPWDITMSDLLAGKSSLEEYRGIAFVGGFSYADVLDSAKGWAASIRFNQPLIQQFQNFYNRPDTFSLGVCNGCQLMALLGWVPGSDVGSSLGSGGDMSQPRFIHNESGRFECRFTSVSIGTSPAIMFKGMEGSTLGIWSAHGEGRAFFPDENVLASVVNSNLAPVRYCDDANNITEVYPFNPNGSPLGIAALCSPDGRHLAMMPHPERCFMMWQYPWYPKEWQLEKCGPSPWLRMFQNARNGVCSAGT

SEQ ID NO: 37718 - protein, 384 aa, Oryza sativa
MEKEVEEEEEEEEAEASRKKGERGLGEGECGAPSSKKRDPELELRMKQKAAEWHRKAREETLKEIAKEMAKYPNEDWSDTPGVKAREYREDWEYRWSAIFGPYDTISPIPPMRYTHRKDDSMPRHISVRHTLQIISVKIKGIRGGLQWPINVFGLIAARDTIDRNRIMIFNRTRGNCQTITKEDRYLLLTGPTRAVVVSDPVYFEAPLKVKGSVESEDKDLSFLAVPLTGASDRGETRLVNREYTSRLSTLELTFGFVVESLEASISVRIIDGSWKDGFRGAFTAHTPSLKDNKVLLLDSGYCEMVPVTADRMIKLSRHVVSVEGEGDLTVSVLALGTDNVIEDEKDFTPKEAGMSQSSLDVGFCKLEVTVNWSLLSLLPDGYT

SEQ ID NO: 37719 - protein, 328 aa, Oryza sativa
MLRKRNVLKFVKDSSILRPGYYIAIDPRTKLVILGIRGTHTVYDLVTDLIALSDKKVSPKGFSTHFGTYEAARWYLRHELGLIRKCLEKHKDYKLRLVGHSLGGASAALLAIMLRKKSKEELGFSPDVISAVGYGTPPCVSREIAQSCASYVSTVVLQDDIIPRLSAASLARLRAEILKTDWVSVLEKEDWKHIVDIVTNAKLVVSSIQDVARKLADYAKIVTVSTSSDAIKDQDRPLSTSEVLSPDSKEDVFVPEDLFLPGTLYYLKRDIEDINGVEDESYTLWRGDAGENFQRILLSGNLISDHKCESIYYALRDVLKTLPPQESG

SEQ ID NO: 37720 - protein, 710 aa, Oryza sativa
MRQELVKRSFREDASMAGAIFMSNTATRELCFRSNIFGLPIEYQPFVRNIRQGMPLFLFDHTERKLYGVFEATSDGGFNIIRSAFSSIGCSYPAQVCFKIIWKCRPLTEDEFSPAIKENYYMPWKFYFDLSYQQVVCLYQLFDEKRVEHPIHNHSKSANLENDPFRKGTQERKSLSPNIPHFPADQPGLFMPASTPRFSTVEASYCASTSMHQAPHPNMSMPLGTNPFGVQIAPVHNSHHDQAELPYNNNMLFPGYLPSGHVARDTTQELGLSANHSYPPSMGYAYGCLPPPGHRPQDAIAGDVNYAPPYPQFPLPNEQGSATNRRDYYDVHCKQCQFEDIYESEHQHFSKAKVLAPPILNQQDVPVYPAIAESAFDQRKECFTEEDSENARQKQSFNHTDMVFSGLGNSNRAYMPDHLNKNPDIRSESNTIAVGQHAQSSVFSRLSRIPPPLHQEIPGPSLNKLVLSLSQRAEHWGNQDKIITNDVCEQLVSEQVMDTPYPLAELNQQSGLIEEEIEGLAFMNFKRRSETRNLDANLGKEIRGQVKRRKLVRPSFGEVNNAGSSGKELEAKVLEGEKHSNDEHDENKFSIDLNKPAAIDGDVAKEDDTTTALPHPSVAIKMHKEKPSEENMSKPNSPNTTEEMKKQDPSLDSATHTEKISLELDVADLNTIDQSKLQAILSSSLLQALDKLRREKLNNSEEAEEVKIAT

SEQ ID NO: 37721 - protein, 681 aa, Oryza sativa
MQNGQPVAYFSEKLGGAQLNYSVYDKELYALVRALETWQHYLWPKEFVIHSDHEALKYLKGQAKLNRRHAKWVEFIETFPYVVKYKKGKENIVADALSRKNVLLNQLEVKVPGIESIKELYPADLDFSEPYAKCTAGKGWEKYHIHDGFLFRANKLCVPHCSVRLLLLQETHAGGLMGHFGWRKTYDMLADHFYWPKMRRDVQRLVQRCVTCHKAKSKLNPHGLYTPLPVPSAPWEDISMDFVLGLPRTKRGRDSIFVVVDRFSKMAHFIPCHKSDDASHIASLFFSEIVRLHGMPKTIVSDRDTKFLSYFWKTLWAKLGTRLLFSTTCHPQTDGQTEVVNRTLSMLLRALIKKNLKEWEECLPHMEFAYNRAVHSTTNMCPFEVVYGFKPLAPIDLLPLPLQERSDMEASKHATYVKKIHEKTKEAIEKRSKYYAAWANKDRKKVTFEPGDLVWVHLRKDRFPQKRKSKLMPRGDGPFRVLSKINDNAYKIELPEDYGVSPTFNVADLTPFFGLEDSESSRSTPFQEGEDDEDIPTVHATSSTKQPSSNTKDTIQGPLTRSRAKKLQVQVNSFLTDFNFSTSENVILPKCSTLVVLRNIQHEEDESGSVDSITGVQNGPVKQNGPTAVQNGPVQRTTHNSQFTEAMEVNEDSLESLSSQLSNATNTKYFGLHTNENQVRL

SEQ ID NO: 37722 - protein, 310 aa, Oryza sativa
MNCESPDESRAKKRTNEVLQGNGQSYKEVFFDNLDYSRPENYIRPNCVTPNSLPVDATSPFGSAIATQDQSVPFGSAIVSGHPILDGNFSTSGTIQRPMNVELPSLQYPNYDFNNNNAWSYHDPLGHPIDQVDFGSLRSEYLSPNNNGLLDALVHGGHGQGELANSQGSFDACFPRVQCNQVIQSNAFSLSSSFPIIGDDLLENSCHAFVGINNNASSLFLDSQPPPLVDPTFWRHDVSLEPNLPVYCQFNEELPPSNEQFAKDADDAFGHGGLSDETNLAAAGQGDEHDLEDPWASMPGACDIPDFPSE

SEQ ID NO: 37723 - protein, 773 aa, Oryza sativa
MTIHTKTALLCLLGAVATTAWLSFAVAQPQPPPACRRRCGDVDIPYPFGLNGDAPGCALGHGTYGFNISCNDTGNGVYKPFIWDVELLGVLLPEGQARILMSISSYCYNPATGAMDGPENNTWALDFTSSPYRFSHTGNVFTAIGCRTLAYIGGDNVDADVGSLTTGCVATCRLQAGNLTVTDDDVGACSGIGCCRTSIPVGLQYYYVWFDDRFNTTAIHNVSRCSYAALMEKSSASWFRFTPAYVTSSAFNDTFNGQVPLLLDWAIGNETCEQARRASPESYACRSRNSECFDSPSGLGYICNCSKGFRGNPYLHPEDPSSCQDIDECTDQNMNNNCHGICRNTLGGFECICPAGTRGNASVGQCQKVLTHGVLLAIGICSSTVVGLLIFLGIEWIKYKRRLVRQDLMNKRDAYFRQHGGQLLLDMMKLENQVSFKLYDREEIELATNNFRESAILGQGGQGTVYKGFDLDPENNPVAIKRCKGIDANRRMEFGQELLILSRVRHEYIVKLLGCCLQFEVPVLVYEFVPNKTLHYLIHGQSDASTRTLDIRLEIAAQSAEALAYLHSLDHPIFHGDVKSANILIGDKFTAKVSDFGCSIFRAAADENINVVKGTIGYLDPEYLMTFQLTDKSDVYSFGILLLELLTRRKPLSNEVSLASLFQDAMKKGNIDHHIDKEILHEDNMELLYEFACLASQCLVMDSENRPAMSHVADILRQLADTASQQHTGTLQGIRSLRLLGNSSGSISEPCYSPVKTMEYDSRKTSMGIEFAR

SEQ ID NO: 37724 - protein, 558 aa, Oryza sativa
MDKLGANPANSCALTPLGFLERAATVFGDCPSVVYHDTVFTWSQTHRRCLRLASALVSSLGISRGDVVSVLLPNVPAMYEMHFAVPMSGAVLNSINTRLDARTVSVLLRHSGSKLIFVDPALLPVLRDALRLLPAGHTAPRVVLVEDPHEKEFPPAPAAALTYERLVEKGDPEFAWVRPASEWDPMILNYTSGTTSAPKGVVHCHRGIFLITVDSLVDWAVPPRPTYLWTLPMFHANGWSFPWGMAVVGGTNVCLRRVDAAEVFDTIARRGVNHLCGAPVVLNMLANAPEGVRKPLPGKVRILTAGAPPPAAVLYRTEAIGFEVSHGYGLTETAGLVLSCAWKGEWDKLPASERARLKARQGVRTPGMAEVDVVDGETGRSVPRDGSTMGEIVLRGGCITLGYLNDEAATKAAIRDNGWFYTGDVGVMHPDGYVEIRDRSKDVIISGGENISSVEVESVLYGHPAVNEAAVVARPDEFWGETPCAFVSLKQGGGAVTAADVVAWSRERMPRYMVPKTVIFRDELPKTSTGKIQKYVLRNIAKEMGPTTGTNTKRNSKM

SEQ ID NO: 37725 - protein, 203 aa, Oryza sativa
MVSTYRVAVLGARGVGKSAIVRQFLYNEFSEVCVPTTTRRLYLPAVVMNGHVHDLQILDFPPISAFPVNTLQEWADACCWGLRSVHAYILVYDICCFDSFEYVKTIRQQILETRVIGTSETPIIIVGNKRDLQRGRVIPRWNVSHLVRKTWKCGYVECSAKYNWHILLLFSELLKSVGCARCKHVHAALRFQGALRRNRCTIM

SEQ ID NO: 37726 - protein, 423 aa, Oryza sativa
MGISDWSSLPKDIVIVVMGKLEIPDLLSAGAVCASWRAACTAVRRVRFPITDRSPCLLYSCEADDPDLATFYSPSNNATFKVRLPGPPFRRRYTVGSDHGWIVTADELSNLQVINPLSGVQIDLPPVTELYNVESFTDEQGSLMYNNYEDSMHRDDPLGFPVPYPPQRLRLFLYFRVILSCSPSAGSECVVLLLHSPDGQLSFARIGDHSWTRLTDIENLWDRGYRCAVYNKNDGLFYLLHFQGSIHTLNLNGPSPVVNEILKGVTAWDNPTKSIVMTPRGDMLQVWRCRELCWNDAPVQFPSEDSEDVHDPCQELYTDEMLLYKVDFDDQKLDKIDSLKDYVLFLGFNSSICLSAKEFPNLRPGCAYLADDSYEEIGINKHTLREVGIWNFKSETLESLGDPQSVLPWLNWPPPIWITSSIL

SEQ ID NO: 37727 - protein, 297 aa, Oryza sativa
MASPSAAATARKLGSHLPRLRDIIDHDDEDDDFVEEEEEEEEEWEDMSKRMSRLSVEGSDGGDADDEDDGYLRGEEEEEEEDGDEVRSDVNGEYGDGGGGGGQWHPYGDDDPRNPQAPSSASLPGTPDRGAPAPSPWMYSKEYASETEAARWPGGDKRRMRHRRERMMREVWLDRAWQMRKQRRQMLMQGQGLGADAVTVVVSAAAAGGESPARGVAMDMEEMRACRDLGLDLPCDWTVEIPCYALSGVDTASSGGNSPASGSWRISSPGDDPKDVKARLKVWAQAVALASASRLGS

SEQ ID NO: 37728 - protein, 51 aa, Oryza sativa
MRRRPLFPVRAAPPFSPPHRVPFSGRQRASPAPPPEWIEAAPSPAATVGAD

SEQ ID NO: 37729 - protein, 199 aa, Oryza sativa
MDSCNNYLFSEFFLFFASNLFSEFHNRNDNLYLLICVYCCVVFLSGQVVTATLDKKLMFWDSQTRNVNPNSIKNLDSDVASLSVCEMYILAAIEREVYIYDMRNLIGPVKVKDSPVEYHLRSLHSSPEWKGYAAGSVDGVVAVKYFDRGTDGDMGYVFRCHPKSRDGRSSMVPINSIGIHPLYVLYFFLCIFQLSCSSK

SEQ ID NO: 37730 - protein, 47 aa, Oryza sativa
MSLNLVFLFPIDPAVSLSEDLQIPFLLSSQGWSCCCSLNCQEKCSEN

SEQ ID NO: 37731 - protein, 251 aa, Oryza sativa
MAHFLATVERDAVSVVAGNSVLSSANIARLSAMLAPSPLPDDPPQPPLRERRPKIIRIINDRRNNIRRCYKGLLEMADAALRKYAHQTGEQYELHTIYGETFRKDYEEFHVYVHMNFMASSSSYKALQAPQPVCFFAEALRPPRPGYHEDDITLCSIVQPSPTDIDSCHGSLANNHRIDHPEAGMHFVGKHNKMDGSDYDWDWPHTADVYYRFFDPDRDVGLVEHLYKVITRFSALYGGSTDEDDNEDITR

SEQ ID NO: 37732 - protein, 156 aa, Oryza sativa
MATDHRRFPVFLAAALLTLLLLPASAAATDVEYCRQGRDYPVKVSGVEIVPDPVVSGQPATFKISASTDKSITKGKLVIDVKYFFFHVHSESHNLCEETSCPVTGEFVLAQEQTLPSITPPGSYTLTMRLLDDGNKELTCISFGFSIGFISPLALI

SEQ ID NO: 37733 - protein, 253 aa, Oryza sativa
MADLAVCDPVSRRYVILPPIPDDLITSGEQEGLLVFETFLAPAAKEEEEMVGTTSFRVVARANYESKVVIFVFSSLTEEWHSSRSVSWSLLTADPWLSSTAQAHLWFFPRYYAHFVYWVMHLVDMLLVLDTSKMAFFTINFQWDRDFAILETEEDMIGAFCLKGDLSGRTHLCYGTRRIDADFADSPPLNLDKTIPLPLPLDHCYHIINATQDTCSCKGGDYTRPDALRRRMIQICYISHWSPKQCFSRRFAE

SEQ ID NO: 37734 - protein, 48 aa, Oryza sativa
MLDPGLPILIPNATATQSCSTLVGWRASRLHYNIRPSKMDPAVKRRIC

SEQ ID NO: 37735 - protein, 71 aa, Oryza sativa
MAALPHVRRQAASCRCAISAPSAILSSASATAAVGRRQASARARSTAPSPPGLHGEQVGLVSTPNLVCATR

SEQ ID NO: 37736 - protein, 518 aa, Oryza sativa
MMLAGYGILAVVLVLLPPSATPAGIADCDLGVGNTYVGNSTFEANLNHLAAELPGNVSTAHTGGFAVATVGADPDQVFALALCRGDVNATACRACVAAAFVDGKNACPGINGVTVYEDACVVRFSGQRFMDFLSPDQWQVTEMIWVPEQASESVNAPAVGWFNAAIAKILAALVDHAVATATGNNSTTKKYFATGEEDVDPNIYGFAQCVPDLTQEQCKECLNTFLFQAKQVYFGKSLSWVGMNSVWCRLMYSVRPFYGGRAMLQLSAPPPPAAEAPVLSLEPGAGKKKSAAGIAAVVASSVVVLLILSFFAVVLFRRRSKVTETDHQLRKITRAQCLIFDLPALQEATDNFSDNNKLGEGGYGIVYKGVLSDGQEVAVKKLLGTSEHGLDQLQNEVLLLAELQHKNLVKLQGFCLHQGETLLVYEYVKNGSLDNFLFDTSRGNTPNWEQLYNIIFGIAKGILYLHEDSSLRIIHRDLKSNNILLGEDMEPKIADFGLARLLEEGHTNTRTTRIVGTL

SEQ ID NO: 37737 - protein, 205 aa, Oryza sativa
MLKQWEGTCNRYGTFLPHIGQVQFSERNGPVPVVIDRTTTVSRGVGCTLLHLGMALGSGGEVVRRVGVACTAASMLNDTPGLLALLDARSQEQPLKILLKSVEDAKDFISNWKINKDVVEVDVCPALTLDEVGAIRRLFQVEKADKFLTGDVVKVKLGQYEAIQAARNLPELPVSAVCAILAAAEKGKNKGAADVGAQGQQKPSA

SEQ ID NO: 37738 - protein, 362 aa, Oryza sativa
MERPPRRPSAARPRPRSLQRAAAALFLAIFVALPFAVLYRGPVSRSLHDSWEWDPLPSLDASEEDGAARDDDLDSQDLKLEQVLQKASMGDNTVILTTLNSAWASPGSVIDLFIDSFRSGVRTSSLINHLVIIAFDWNAYKQCLKIHPYCFALGTDGVDFSEEKRFLTSGYLEMMWKRIDFLRLVLESGFSFIFSDADIMWFRSPFPYFYPDGDFQIACDHYFGNATDLRNIANGGFNYVKSNERSIEFYSFWYSSRLRYPGLHDQDVFNVIKHDPYVSDIGLKIKFLSTSYFGGFCEPSRDLNKVCTMHANCCIGLQSKVHDLRVMMEDWRSYLSLPPSLKRLSALAWRVPQNCSLSWSHQ

SEQ ID NO: 37739 - protein, 53 aa, Oryza sativa
MRVAREHVSPPTSPPSGHRRADAPLTLSSLFSRLTVRQRKEETEEEEAKEKGS

SEQ ID NO: 37740 - protein, 186 aa, Oryza sativa
MHIFRLLAARRRAVSTITAAAAAAPAASSDAGRDSEDEGPFFDLDFSSVRGASSSGSMSGSDDSDDDCTDLDFIISLHRSRSASPSYDTLFFAAAASEPSTKASFQPSHHFCAKRRGGGGLRTLSFGAKKAAFYGGRHSFARSSCSARSLRLFMESLHRASVSECDSSLSRSRSDPGKREADQSCH

SEQ ID NO: 37741 - protein, 467 aa, Oryza sativa
MRAATRGDVLDRRCHDIVPRVMPHYRAWMSRYGKVFVSWSGATPALCVGDYAMVKQILSDRTGLYGKPEPEPSILALIGNGLIFIGGDDWARHRRVVHPAFAMDKLKMMAKTMADCAREVIREWEARATADGERRVQVEVGGQLQELTADVISHTAFGSSYREGKEVFVAQRELQSIAFSAINSTRFPGSQYIPTKTNLRRRHLAKKVRGTLMAIIRERQAAAAKEDSGHGNDLLGLMLEANATDACGSGGEKSMTMDEIVDECKTFFFAGHDTTSHLLTWAMFLLGTHPEWQHRLREEVLRECGGGGDTEALPNGDALNKLKLMTMVLYETLRLYGPVSLMARTATADAELGGVRVPKGTMTMIPMAILHRDADVWGAGAGEFDPLRFRGGVNKAAAHAGALLAFSLGQRSCIGQDFAMMEAKTTLAMILRRFAFEVSPEYVHAPLDLLTLQPKCGLPMVLKLLDQ

SEQ ID NO: 37742 - protein, 349 aa, Oryza sativa
MSLGFRRCDFEHAVYARGEGTHRLLVGVYVDDLIITGSDAVEIDRFKAEMKSLFRMSDLGLLCFYLGIEVEQVAGSTRMTQSAFARRILEKAGMQDCNACATPMEQRLKLSNHSDAPPVDSTGYRSIVGSLRYLVHTRSDIAFAVGYVSRFMEAPTAEHEAAVKRILRYIAGTIDYGIIYQRSETPATLVGFFDADMAGDVDTRKSTSGVMFFLGSNPVSWQSQKQKVVALSSCEAEYIAARTAACQGVWMAQLLGEINQAQPDVFKLMVDNKSAIALSKNPVFHDCSKHIATRYHYIRECVEEGRVQLEFTGTADQVADILTKSLGRVRFEELRSRIGVSEVSRGHKV

SEQ ID NO: 37743 - protein, 405 aa, Oryza sativa
MGKAGDAEQAVHSTAPAAGHGSAVRRYAATIGGAVDAKCVLVLFLSIGVFVLVLFMLLPLHDHASETIPDDDPGVLPGEIQASFFLLKKRQQLIPHVRRLQKDIYREIGIPNTTVSVSMHTSKYKDSTYVKFGILPNPRNSSISAQSIIALRKNLIQLTLEQSNLSLTSSVFGDPHCLEILGFPGGITVPPPPDGNICPTALFNVTLNMTIQQLRVHLKELESELRIILQLTPYEDLIVEITNENGSTINLPVTVHILIAPNYPSNYLETYRLKQLAQIIIKLIPKNLDLNPIFGMIENLWLSPCLQSYIPSCAPNPAPAPAPSLSPSNPEHPQPTTTKPYGSFSCPALERRKTVSVHRRLSTISPMMVPPEIPTRFDSWSVHTDRKNRSPLAKPMSLVPASPSK

SEQ ID NO: 37744 - protein, 413 aa, Oryza sativa
MELGKLSLLQKLVAFNNRFSGQIPAQIGSLKQLSFLHLEQNALEGSIPPDIGMCNSLVDLNLADNSLTGTIPDTLASLFTLNSLNLSHNMISGEIPEGLQYLKLSYVDFSHNNLSGPVPPALLMIAGDDAFSENDGLCIAGVSEGWRQNATNLRYCPWNDNHQNFSQRRLFVVLIIVTSLVVLLSGLACLRYENYKLEQFHSKGDIESGDDSDSKWVLESFHPPELDPEEICNLDVDNLIGCGGTGKVYRLELSKGRGVVAVKQLWKRDDAKVMRTEINTLGKIRHRNILKLHAFLTGGESNFLVYEYVVNGNLYDAIRREFKAGQPELDWEKRYRIAVGTAKGIMYLHHDCSPAIIHRDIKSTNILLDEEYEAKLADFGIAKLVEGSPLSCFAGTHGYMAPALTHSSQPSRG

SEQ ID NO: 37745 - protein, 149 aa, Oryza sativa; identical to SEQ ID NO: 37499

SEQ ID NO: 37746 - protein, 119 aa, Oryza sativa
MAGTISRIRLENFMCHSSLHIELGQHVNFITGQNGSGKSAVLTALCIAFGSRAKSTQRAAALKDFIKTDCSYAAIIVDINNQGEDAFKPEVYGDLVRLERRITESSSSMFLKDQHGNKT

SEQ ID NO: 37747 - protein, 138 aa, Oryza sativa
MSLCHLLCGYLNLSWRQWAIGILALFLPIKIKLCQRQLRKYFQIHAIASLAGTYKRMLLLVLVHLIVPKHLISCSPSVCRDVTQKLSLRKHGLGCSESLSWRITNGLRNFINSSRSGVVLSTNTLLMVGLNMSHNVTV

SEQ ID NO: 37748 - protein, 482 aa, Oryza sativa
MSSCEARRAHAVLIPQPAQGHVTPMLHLAKALHARGFFVTYVNSEYNHRRLLRSSGPGALAGAAGFRFEAVPDGMPESGNDDVTQDIAALCVSTTRHSAEPFRELLVRLNSTPGTPPVSCVIADGVMSFAQRVAEEMGILALVFWTTSACGFMGYLHFAELIRRGYVPLKDESDLTNGYLDTPIDWIPGMRGIRLKDVPSFIRTTDPDDVMLNFDGGEAQNARKARGLILNTYDALEQDVVDALRREFPRVYTVGPLPAFAKAAAGEVGAIGGNLWKEDTGCLRWLDAQQPGSVVYVNFGSITVMSPAHLAEFAWGLACCGRPFLWVIRPDPVSGEKAMLPEEFVGETKERGVLASWCPQELVLSHPSVGLFLTHCGWNSTLESICAGVPMICWPFFAEQPTNCRYVCDKWGVGMEIDSNVSRTEVARLVREAMEGERGKAMRVNAMVWKEKAKEATEEGGSSSRNLDRLIEFLHSSGSDAR

SEQ ID NO: 37749 - protein, 184 aa, Oryza sativa
MQKEEGMCPVKLLLLALIATRLLIFSHVVDGNAPVNRLLEIFSTWSGQSDDDESTSCSSPPRRLKLTSRTTMLPENISSGGSPPESELYDRLSRDKLVSSLRDDEMRPSRPLEASKILVTAPSTSQMIPSQVQQSVLFLHDAARPLSCGGDSSARNRRRVSLSCSMHEPTGGQMKLSGSSTSAR

SEQ ID NO: 37750 - protein, 96 aa, Oryza sativa
MAIGSASVQAGVAHGRDDAKPDAGGAAVEAAPRPRLGGAHWPEEGGEEVGEGRRCRRQLGDGAEPRRRWCLPLGCLLKKAHRGILTLGKFLVKVQF

SEQ ID NO: 37751 - protein, 286 aa, Oryza sativa
MLPPSAASSPPAPPPSPWDDVSWAESTSSTVLQHYNSLPKKGKPQGRESTVLAAFLLSTPQQDPRNLTVLSLATGTKCLGAARLNHHGDLVHDAHAEVVARRALLRLIYTEIGRSGASDWLVASGEKWKLRDGYHLHLYITQIPCGVMPVPPSPSELLREQLDSVNGCDDVGFVQRKPGRGDTTLSMSCFDKITRWSVVGIQGALLSHILEPLYLSTITIGQSPTGASDGFSVENNIKKVLDARLSSLSSKLLLPFKLNKPLFYEAPIPPKEFQQTSGDLQPLTCG

SEQ ID NO: 37752 - protein, 95 aa, Oryza sativa
MIVLLLSTTVAISPVDEGKCSTKPQRLPAAIGLLWVRKQHQGFWVFQIRKQRKRLALRIRKRPLVCAFGIQIRYMRRRHLLHRVYALLLLQHCCS

SEQ ID NO: 37753 - protein, 124 aa, Oryza sativa
MTQGAVFLTTCGAGPKFVAAYTTVIPFWTACSAPNEFSRVPRDSDSTSTPSWIASSMAASTVAEFPDPAPPLPQTDLYTAMRARGAPPRAVPAASPWKLTASTTEPAAVDAVCVPWPFTSRGER

SEQ ID NO: 37754 - protein, 78 aa, Oryza sativa
MAITPVDSPSPPSPISRANLHFSRLLALPAGDGELALGVNTATPHPSILLCVRPPCEQVWSGGARGRPPISVLESNRR

SEQ ID NO: 37755 - protein, 227 aa, Oryza sativa
MATFPSSMSLRNSANAVHDDPPSFHAAAALSFIAMTRSRTPCCASDSMIRLKMASTMSAWTSAPGLYPLTSMPIFISSTMNTLFIHCSASSGQHTIGTPAATASSVEFHPQCVTNAPVDACCSTATCGTQDAVTTTPLSAVRAKNPSGRRDIAASGFVPAGARSAHKNLCSDLSRPVAISLTCSGESAPRLPKQRNTTLRSGCASSQARHGCLSSSAPPLVINGPTQ

SEQ ID NO: 37756 - protein, 336 aa, Oryza sativa
MYMTDLFPDIIPKTIDSSPPRQSNSGVQYAPGLIPNGGGPSPPVIGYHAPKTSTLLQGLIREPTDVSKKRKTRSSAMGTLALVPKRKVKSKKTKPTDDLLALDPSIERALDEEDIEDDVDQAVAEVSDTEKTPSALPKQTPLTPSAPTHFLRKKKTAVKKKSTTTIVKPVPPPPPPPSPPVLQSSSDWTPSAVGSHHIGEEEQPAAPTIPVLADQISFDIRDYLDEAEEDTSSKALAPLSDDVKKTLEDISCRLEASSLDSLVVDYGSIRTRLHEVQALILEELAAVLTPAAYLEQNQFKLEKANQRLAERRECKEIEATIQVNRQLVHEEKVKLD

SEQ ID NO: 37757 - protein, 421 aa, Oryza sativa
MRFAPILRNPRRRRLLRSVNPSLAAMSPPAAAHLATASDPDEDLCFTTESVAPAEETAPPLPAPPPPVSAEERVERAWAHWRRLGSPKMVVAPMVDNSELPFRMLCRRYGATGAYTPMLHSRIFSENEKHKAMEFTTCKEDRPLFVQFCANDPDILLQAAKIVEPYCDYVDINFGCPQRIARRGYYGAFLMNNLPLVKSLVQNLSANLHVPVSCKIRIFPRLEDTLAYAKMLEEAGASLVAVHGRTRDEKDGKKFRADWDAIKAVKDALRIPVLANGNIRHLDDVKDCLEHTGADGVLSAETLLENPALFAGFRTKEWKENGDEDEASGLDQADLVIEYLKLCEQYPVPWRMVRSHVHKMLGDWFRVHPQVREELNAQSKLTFEWLHDMVKRLKDLGGGIPLYRNNNALQTTSNGLAASNA

SEQ ID NO: 37758 - protein, 409 aa, Oryza sativa
MGAHGDHRHHHHHQEAGVLVDEEEEEVIEQACGGPTSGVVEQEVGGDGGGVCQDAAGMVFEATSSVGSVSATMGPPPIMCWPPPAQSVHGAIHHHHNLGGGGGQQSPFFPLLPPLPPQPPPPPPFFADFYARRALQYAYDHSGGASSSSDPLGLGGLYMGHHGSHVAGMMMPPPFAPSPFGDLGRMTAQEIMDAKALAASKSHSEAERRRRERINAHLARLRSLLPNTTKTDKASLLAEVIQHVKELKRQTSEITEEACPLPTESDELTVDASSDEDGRLVVRASLCCDDRTDLLPDLIRALKALRLRALKAEITTLGGRVKNVLVVTGDDSAAAAACAGTDGDGEQQEEAMQAPMSPQHTVASIQDALRAVMERTASATEESGGSGAGGGLKRQRTTSLSAILENRSI

SEQ ID NO: 37759 - protein, 237 aa, Oryza sativa
MSPKSKKAAVEGGGGGDHIGALPDALLWHVLSFLQSKEVVRTCVLARRWRHLWKSVPVLRVTGADEAIHKFMDHLQLLRDRSPLEACVFAFCLYSKHDAPFANLWIRYVLSCQVRVLTLDIIGLRLIDLPVVSGFLTTLELGGMSVHGKFLDFSSCPALEELKMTKCTISADKISSQSLKRLSICECKLKSDGRTVISVPSLLFLQLIAFKGRTPFLEDMPLLVTAKVILSGYHCKD

SEQ ID NO: 37760 - protein, 463 aa, Oryza sativa
MPPPLPWRRLVVPLLAVVSMPFVLPLALPFLLRSSSSRQPLSVHRLDWLPPLSPLPRTPDPSTPPPPPLTLPLAPLTTPPPPPPSTLPMAPPTRSSPAASPPPPEKGEGGGTTCDLYDGEWARDEAARPLYAPGTCPYVDEAYACASNGRPDAAYTRWRWAPRRCRLPRFNATDFLATLRGKRLMLVGDSMNRNQFESLLCILREAIPDKTRMFETHGYRISKGRGYFVFKFVDYDCTVEFVRSHFLVREGVRYNRQKNSNPILQIDRIDKSASRWRKVDVLVFNTGHWWTHGKTARGINYYKEGDTLYPQFDSTEAYRRALKTWARWIDKNMDPAKSVVFYRGYSTAHFRGGEWDSGGSCSGEREPTLRGAVIGSYPRKMRIVEEVIGRMRFPVRLLNVTKLTNFRRDGHPSVYGKAAAGKKVSRRKQDCSHWCLPGVPDAWNELIYASLVLEPKPRSWKHH

SEQ ID NO: 37761 - protein, 259 aa, Oryza sativa
MQQLKYLEVTKCQMLQVIEIDAPKLSTFIYGDVGVKISLGDPLQVKDIRLMGYNEADTVCYARTKLPSILPNIESLVVSSPNEMTSTPVVPSKFLHLKFLEIYLKELFASLPSYDFFSLVSFLDASPALETFILHVEQQFERHDSILDGEPTDLRRILHDGHANLQNVTITGFNSTKSMIELTTHILENAPSLKCITLDTANFSGKNHLAMGECSPMMRGGILEARRAFEAARRHIAGKIPSFVEYKFLEPCRHCHFGY

SEQ ID NO: 37762 - protein, 490 aa, Oryza sativa
MAGRKENPVLTACQAPSGRITRAQAAANRGRFGFAPSVSLPARTERKQTAKGKTKRGALDEITSASTATSAPQPKRRTVLKDVTNIGCANSSKNCTTTSKLQQKSKPTQRVKQIPSKKQCAMKVPKLPPPAVAGTSFVIDSKSSEETQKVELLAKAEEPTNLFENEGLLSLQNIERDRDSNCHEAFFEARNAMDKHELADSKPGDSSGLGFIDIDNDNGNPQMCASYASEIYTNLMASELIRRPRSNYMEVLQRDITKGMRGILIDWLVEVSEEYKLVPDTLYLTINLIDRFLSQHYIERQKLQLLGITSMLIASKYEEICAPRVEEFCFITDNTYTKAEVLKMEGLVLNDMGFHLSVPTTKTFLRRFLRAAQASRNVPSITLGYLANYLAELTLIDYSFLKFLPSVVAASAVFLARWTLDQSDIPWNHTLEHYTSYKSSDIQICVCALRELQHNTSNCPLNAIREKYRQQKFECVANLTSPELGQSLFS

SEQ ID NO: 37763 - protein, 292 aa, Oryza sativa
MYIFMTRKFTLFSVLKSEDLFHPPSYFFFLIMERVMECDYPASKKNKVVHPMDCEMKEEPTNAASMNQHSLWSQWQLLDSILPTGGFAHSYGLEAAMQSRMVNNPEELRSFVVQVLENTGSLLLPFVCCANKSPDAATWVKLDQLLEAMLTNEVSRKASMSQGSALLRVAASVFTEIQSLQDLRQTFLGSKIVSFHHAPIFGLICGLVGFDSETTQRAYMFVTMRDVISAATRLNLIGPLAASVLQHQVAEDAERMVQKWKDRGVEEATQTSPLLDALQGCHAYMFSRLFCT

SEQ ID NO: 37764 - protein, 48 aa, Oryza sativa
MRLGRPHAKRVIFADPSPPCGCPNRIQRCLLPVCKKPFCTSVFRTRWS

SEQ ID NO: 37765 - protein, 63 aa, Oryza sativa
MDDVTVLSWGMFGCLGVVVGFSFSVHLSCLKLLGAVCQGLESVTVCLIRIPAGFLSMLRMNGS

SEQ ID NO: 37766 - protein, 141 aa, Oryza sativa
MVDCLSHLPQVPLLRIFGSPDRHARRPVSPSAAARRLSSPSAASRPGTPSPRRSSPVDDVPAPLPIRRPPQLRASASPAAARSHAASAVRRSTPLAVRSSAPYPSASLQEKSARERGEEGREEEGKGELTWQAHMWVPRAT

SEQ ID NO: 37767 - protein, 515 aa, Oryza sativa
MGIVRAAEDVEGAVVAGAAGGGGGGGGGEVTAPLLLRQHKQGRGDEEKIQNDAGGDGGGRRGGGGGGSMSMLMLSTAVAVCGSFEFGTCVGYSAPTQSGIVDEVGLSISQFALFGSVLTIGAMIGDVTSGRLADFLGRKMTMRISATICIFGWLSLHLAKGVIMLYFGRILLGFSTGILSYVVPVFIAEIAPKNLRGGLATSNQLLICSGSSATYIIGALVAWRNLVLVGIVPCVLLLTGLLFIPESPRWLANVGREKEFHASLQMLRGEDADVSEEAVEIKEYIESLHRFPKARVQDLFLRKNIYAVTVGVGLMIFQQLGGINGVGFYASSIFTSAGFSGKLGTILIGIIQIPITLFGAILMDKSGRRVLLMVSASGTFLGCFLTGISFYLKAQGLFSEWVPELALTGILVYIGAYSIGMGPVPWVVMSEIFSIDMKAIGGSLVTLVSWLGSFAISYSFSFLMDWSSAGTFFMFSAASLITILFVVMVVPETKGRTLEEIQDSLIDSRSRLRDP

SEQ ID NO: 37768 - protein, 103 aa, Oryza sativa
MKILGRGRTIPIRGRYLCNVKMVAWRGRTMLRDFSKVRVQETEEKQGLGIGYWVDALQQKLHFSIPLVREGDGSIEVVADNNGWSFMGEDVVARSGISRKSRM

SEQ ID NO: 37769 - protein, 545 aa, Oryza sativa
MVMEIPSSKRDMARGAEDDGEEEEEEEYDRVFYEDIEAPKFVDLTAPDAARPSDDPSWFCLRIGCDQNHEHVDPEALHRSFFMRVMAARSPNVRLQKAIRRRNQSSMLKCPHSAPPKPPRSRIARLSTATEAAAKPRLKTHRICTLRASPTRTKAAKVEASGARKKALTTPRSKPVRPRQDPFLSVKHQKQEPVAAAARKGTVAKALFMATPKKDASKTPAKAQAAPPLSEVCSKMRKLNLACREVPSRYLCQSSNPKSSKKCDQTAVKSVKAAQNSRPDERKKKKILGCSLQHASSEAGRENRNGRENTAADENACPEAASSSEEPKEVMQESRIEVETSQADNCDDDKENLSYVDQPTEQMVIISHSDGENLQQLENNENVPRKVAKMQSKLNAEQGGKLKKTTNPKPFRLRTDERGVLREANPERHQTLTENNSTAAVQQIGRCRDGKGRDKPTCGEKQKKQIRNVATGQVDEAKRVLNSIRCNKVKPAMTNGKTVGKSQGASRVASSTRSTKITSGSMAPSKVGKEKSTSVKLSRLQAAAA

SEQ ID NO: 37770 - protein, 322 aa, Oryza sativa
MARLHHLLFAVMVDMEGLQQWRRLDEEAWPRCVPGWRHVGDEEPPQLGHRGERARRQEQDPHVRPGEAQDEIGDAIGVLEELPDAGDQEAQPPALYGREQLVPLQGANGVLEAHALEVRRGVGVRQKHGVSIAGEALQHGERPDLDRHVAAVDDELPDPRHRRVQGERAPEFPGPAGAEMQGLQLRARGDHAVHGGPRRARQSLQDESGERAKPLQRRGQAVAKLEPPQPRRAGVAADAAKGEAVDRRRVHDRPRRHGGHLEVRDAPGIDGGDDQLVDAGGGVEVEHLQRQPGRTPASRQEGPDGAGHGAHGAALVPPGGGV

SEQ ID NO: 37771 - protein, 96 aa, Oryza sativa
MRRTAASLLRHSGIGGGGGGSGGGIPQALADALVCPLSKKPLRYCEDSGSLVSDAVGVSFPIVDGIPYLVPKDGKLLDHDQDKSEDCGAKDSSHRH

SEQ ID NO: 37772 - protein, 365 aa, Oryza sativa
MMSPRPSASAAPEGGGGASTSRSVPTARSTPLQVIHILGNFARIWSVYSLYNYLSSSGDSMVGFIFSCLVPASVIFLALQKPWKGRPLPNTQVVPTVINGGILALYFVLWGKGLLACGPLVALLAEYAGAVLGVLSAALYGRKVNIWKKIGGLAAMLVAYYLLGNGWATRTHSPLYSFGSESLEKGTQVIGMKEMVVPLTAGILSALRRVLARRVSLKNQLKRRLHAINVASATCFLFPFAMWDTILGSASDSIVKLQFPSWAYLSTVLFGMVLIFYVDNVAEEKLHLVFSSPRHLMVSTGCIIVLEILYKMDFSLLGFLLCSVILGFGIFEATSLERSKKSPLEAHELSNGSFHNQLPISALPS

SEQ ID NO: 37773 - protein, 263 aa, Oryza sativa
MEGTPEMNRCTARVVQATGHCGAAIPTAPRDLTLAFRMLGLALYTVPPLLSQPLRPMDFCPSPLTSPSLPALALAPSPIPTPIIAPPPVSSPAPPLPPLWRRRPRRLPPIWRPTPPSLPVDTMPPPPPPPPPQPQGSACTFDKWADVGLHGCNWKVVTPNTTVAMAFGPAAAQRYGPDMTLREALDGRGDMYRTLLREATAALLNAYYNPSGSGFLYPTTASVIDHINAALLTPTLHKLLLEGARFRRANSDSNLPCHLTPCN

SEQ ID NO: 37774 - protein, 122 aa, Oryza sativa
MAAVGVSFVSLLNAVAWHCRLPSVSYLWELDGNDALPSDESPSKTAKYGFAVHDYNLQTLLSYRQIAASAVDAALTASTHLARFRARYGPMDLSCECILRQCIALWSNFVKEDHFFYSTYRP

SEQ ID NO: 37775 - protein, 108 aa, Oryza sativa
MFKRRNCKPFHVFHAHCGIAPWIWLCEMSRLNILSRCFKILGKVDMLQDAKLKNSKLGNDTSDEIFSPSTTTSLLFERFRTDRFFSFENEVSSIVPSKLFEWSTRVSK

SEQ ID NO: 37776 - protein, 460 aa, Oryza sativa
MHLCTEAAVTRRRLLLLLLLLVTCSCLSARERSNSSSSSSRRVVRHLPGFDGALPFELETGYVEVDRIAGVRLFYYFIRSESSPADDPLLLWLTGGPGCSAFSGLVYEVGPLTFDVHGHGHGQLPRLLYKPESWTKRTNVIFLDSPVGTGFSYADTDAGFRTGDTIAVHHIHVFLNNWFQEVHPDFLSNPLYIAGDSYSGMIVPAVTFGIATSSPKPSLNLKGYLLGNPVTDHNFDAPSKIPFAHGMGLISDQLYQAYKKSCSVKHNTQQQSVQCTNTLDAIDECVKDIYGNHILEPYCTFASPHNPRIDKPFTSGTAEYTMSRIWANNDTVREALGIHQGTVPSWQRCNYDILYTYDIKSSVRYHLDLTTRGYRSLIYSGDHDMIIPFIGTQAWIRSLNFSVVDEWRPWFVDGQVAGYIRSYSNNLTFATVKGGGHTAPEYMPKQCLAMLARWVSGNPL

SEQ ID NO: 37777 - protein, 346 aa, Oryza sativa
MGSGGSIPVESSSNSVMERPNSKIPAMKASSSNAAAPQMIMNRSQSRRDRKIALQQDVDKLRKKLRHEENVHRALERAFTRPLGALPRLPPYLPSQTLELLAEVAVLEEEVVRLEEQVVSFRQGLYEEAVTISMAKSAYFSDTDRCTPARHGQVPDQAASASWSSLKRVTNVKQTPRRTIPSMNHGGDRPGKENQSCTTNSFRDHSRFPLKTVPKCSNPEEEKCADFQTVSAVKDQKGTEDTTVIDSENISTEANKVSEELLTCLLNIFSQMRSSSDQDEDRSSSPSVSGSCESSDGAACAGDPYGVLELGSRDIGPYKQFRAVDATSFDQNVFDNSNSLLDRRLK

SEQ ID NO: 37778 - protein, 355 aa, Oryza sativa
MATTTTSTVTTIAAQAYHVLKINGYSNTLKAGRHHPLSSCPFSAGGHTWHVSYYPHGCRDSNKDCISIFLVLEDIVTDEDVMAKATFSLLDRYGNPVPSCTYHTKLRNFSTSSGRARGFENFIRRDELERSEYLNDDYFAVAAHVIIPKKKPSVVVPPSNMHLYFGDLLVSKEGTDVKFLVGGEMFAAHRLVLAARSPVFKAELFGPTKKGTIDAIQIDNMEARVFKALLEFIYTDIWSEIGHGKDNVAMAQQLLAAADRYGLQRLKFVYEDKLCNHIDTCSVSTMLVLAEKHHCCKLKEACSTFLSFMSPPIVEDLNSSIFGSELEKTVSSSENHGSQINRTDIRIQPWQNADV

SEQ ID NO: 37779 - protein, 215 aa, Oryza sativa
MALARAVPRRRGERGGGRARAWRRRLGFAVASSPSARSAAAATTTTTRARAPPPPPLSRGEEDEEEDEREHCAAAGHRRWLRGYGESGSSRLHHGRRVPQPTPFRAAARRRGGGRCGGDRRAGEEEGVAVTWRRPARALDADARRCTGTASARSPRRTPRRQARRTPSRQRCHHRRALRLSSIVTRTRAPLWRRAQEASCRVPTPPTRPWGRCWW

SEQ ID NO: 37780 - protein, 98 aa, Oryza sativa
MIPITNIPFQLCKGLGFASSKNAESSSSATFQVYFNITISFVIIFILLFMLSFLNRLFNTLSWTMTEFSMSIHEMQDKHLVDFFFVLYFPWCRTSTLC

SEQ ID NO: 37781 - protein, 538 aa, Oryza sativa
MMEAVAVAAAVLLLLHVAARVADAVWWRPRRLEAHFAGQGVRGPPYRFLVGCVREMVALMAEATAKPMPPAAPHNALPRVLAFYHYWRKIYGPTFLIWFGPTPRLTVADPEMVREIFLTRAEAFDRYEAHPVVRQLEGDGLVSLHGDKWAHHRRVLTPGFYPDNLNRLVPHVGRSVAALAERWRAMACAGGGEVEVDVAEWFQAVAEEAITRATFGRSYDSGRVVFRLQARLMAFASEAFRKVLVPGYRFLPTKKNRMSWGLDREIRRGLVRLIGRRSGGDGGEEDETTTELKDKQDSGFNDLLGLMINAGVDRTMPVEDMVEECKTFFFAGKQTTTNLLTWATVLLAMHPGWQDRARREVLAVCGDAAGELPTKDHLPKLKTLGMILNETLRLYPPAVATIRRAKFDVTLGGGGDGDAGGIHIPRDTELLVPIMAIHHDARLWGPDAAQFNPARFASGAARAAKHPLAFIPFGLGSRMCIGQSLAILEAKLTMAVLLQRFDLALSPTYVHAPTVLMLLHPQYGAPLIFRPRQSQPSN

SEQ ID NO: 37782 - protein, 348 aa, Oryza sativa
MISRVSAIFSVPRESACVLLRHYKWSISKLSDDWFADEENVRRSVGLPSNVVHVPDCPELTCGICFEGCAANAMSCAGCSHFYCHECWEGYISAAVNDGPGCLVLQCPEPSCDAIVLEDMINSLTKDEDKVKYARFVLWSYIGVNNKIKWCPAPDCTCAVEFLGDGNYDVSCKCKFSFCWNCAEEAHRPVSCDTVSKWILKNSAESENMNWILAYSKPCPKCKRPIEKNQGCMHMTCTPPCKFEFCWLCLGAWSDHGDGTGGFYACNRYQSAKMGGMYDEAEARRERAKNSLERYMHYYERWASNQTSRQKAQADLQKVENEDLTKLSDVVGIPETQLKFIPEAWSQS

SEQ ID NO: 37783 - protein, 499 aa, Oryza sativa
MPPHEDALDAGAVDVLTFRLHPLAVLKLSHRIREFVHLHDDQYQQARMSGCVIGVRRGGTVDISDTFDILHDPDPGTFDRALLEKDQEIYKKAFPDLSVLGWYSIGTNVHATDTGIHHGDYTDMQIHQTLMDANGTAFYLLLNPAINFSHKDIPVTIYERVLCNSDGSPPVSFVQGNYTVEIVGAERISLDHADFLYPSPCVVFDVLAPPLGEKKNAFRTMLFETPSGFAMFRVSDVLFRYPEDIWSSFTDPHTAHQVVRTIGFIEVGDKSVVWDNDIGPGEDIEHFILKFPIKSLVVPDAQLKFIIEKNLNISCWFNGRIVPGLIWGLNYALDEFVPREKGNLSNERHFPLSKQLHEQLKAYGFSISPQLINREFITSFGYLNYLERTSNCISGDLHQKFDRFFCGLEMSEGEFVRGVAHRLHSMEEVASTPGRREALSNAEFLLAVPKKKCNTISRLKRMEAEDRGTGLGHPWVCAAAVAVGFGVMAGLCIAMKRAN

SEQ ID NO: 37784 - protein, 163 aa, Oryza sativa
MSIVERFLEEVELEQGQREEIVAIIKGMGFKNEVSKKSVVEPTLEFAIVQDADRLDAIGAIGKYCITEVSLSALLKQSFLQQLGCSKCCTGYAKSFPCTILFFPLLPLDSDGINLSSVCHFASSFSFSILTSAHISLFLPLLIEVRHNLFLGFNRTVTYVLLS

SEQ ID NO: 37785 - protein, 530 aa, Oryza sativa
MGLEESQKHLLGLNYHELQSLCKQYNLPANKSHSQLASSLALFLEKGRINPSPEKKAAASLVALPSLLSNAKEVSTRCQGSHKRGPQSERDDGDRPLLHVKHHKGPQTPTDETLKKNDSGTRVSSTPVSINNGKVDCFSHSPPRQVIASNVHSQSADGIGKNLGTQEHPIHLDSTAKVDDEISPETSYQAPNVVETVTDIGSGSSHKISENAKSSFEFFVMSDEGLDLVVDLNSTPSMLLDSLKKEVFIPSSTCRSEPGNFSHFISSLTTKDDSNNSISSSGNITVDIQNKGDDSIAPCTNSSLGSTGGDNSHSEPYLPDATAVNSMSFASTLPGTSLEISGSQEGVPVVSSSCLTSMTANALNNEVLPQESVVLSKCPERNHAPLAYDSTHPTGNKDTVNPVKIGCTQNVVADTDRAGAFSSGGVVRSASNENFCPTSEEKHETLNVPGAQLTPNGNTHEVILENEPVEAVPVDEDRGCHDRLSMSCQLARQTVTKLPVTDAQSEASSADHCIAGSFKPTSPTPSPAAS

SEQ ID NO: 37786 - protein, 174 aa, Oryza sativa
MSGFARRLGGIPWREIAGEAFSRVFLVAQAVCAVHVVNAHVCSFALVMGPSMLPAMNLAGDVVAVDLVSARLGRVASGDAVLLVSPENPRKAVVKRVVGMEGDAVTFLVDPGNSDASKTVVVPKGHVWVQGDNIYASRDSRQFGPVPYGLITGKIFCRVWPLKDFGPIDPMSAE

SEQ ID NO: 37787 - protein, 124 aa, Oryza sativa
MAAAAEVGVPEVVGDVLGRPGRREGVLVAVAADGEEHGDVLGVLAVLDVGADAGDGVAGEVGPVAAVAEDGEEGDDDGVVDAGVAGLPERALVLVPAPEDGELAGLVAGDRPGAGEDEEHYNNK

SEQ ID NO: 37788 - protein, 67 aa, Oryza sativa
MAGPLKSVMTEAPATQSSVPATLARPSREERRTRSMRSAAAMAKVMAGTEFWMAEANVGEVFSSPSR

SEQ ID NO: 37789 - protein, 837 aa, Oryza sativa
MRLGGWMLRPLNRGLLLPTLSCPVAPHRRGFAAYAAALQWLEDELTSLAILPSVPGVDSFACARQLQGCIARGDARGGRAVHGHVVRRGGVGRLDLFCANVLLNMYGKLGPLASARRLFDRMPERNMVSFVTLVQAHAQRGDFEAAAALFRRLRWVGHEVNQFVLTTMLKLAIAMDAAGLAGGVHSCAWKLGHDHNAFVGSGLIDAYSLCSLVSDAEHVFNGIVRKDAVVWTAMVSCYSENDCPENAFRVFSKMRVSGCKPNPFALTSVLKAAVCLPSVVLGKGIHGCAIKTLNDTEPHVGGALLDMYAKCGDIKDARLAFEMIPYDDVILLSFMISRYAQSNQNEQAFELFLRLMRSSVLPNEYSLSSVLQACTNMVQLDFGKQIHNHAIKIGHESDLFVGNALMDFYAKCNDMDSSLKIFSSLRDANEVSWNTIVVGFSQSGLGEEALSVFCEMQAAQMPCTQVTYSSVLRACASTASIRHAGQIHCSIEKSTFNNDTVIGNSLIDTYAKCGYIRDALKVFQHLMERDIISWNAIISGYALHGQAADALELFDRMNKSNVESNDITFVALLSVCSSTGLVNHGLSLFDSMRIDHGIKPSMEHYTCIVRLLGRAGRLNDALQFIGDIPSAPSAMVWRALLSSCIIHKNVALGRFSAEKILEIEPQDETTYVLLSNMYAAAGSLDQVALLRKSMRNIGVRKVPGLSWVEIKGEIHAFSVGSVDHPDMRVINAMLEWLNLKTSREGYIPDINVVLHDVDKEQKTRMLWVHSERLALAYGLVMTPPGHPIRILKNLRSCLDCHTAFTVISKIVKREIIVRDINRFHHFEDGKCSCGDYW

SEQ ID NO: 37790 - protein, 107 aa, Oryza sativa
MSGHGRHHPISLTGASQAKPSRHRVRLDEVIPFFLFPPSPPPHSNHHRHLSLPPKISSSTRRSGHLPHSLRQPPPSPGASCSGTCVAADVAAFRPPESRRPLSPSPL

SEQ ID NO: 37791 - protein, 219 aa, Oryza sativa
MALARQCLSKRLAAGCALARPLHAASPVAAAAANSHGPLNFRALFSSAGADAAATTGGCAPAKGDGHSREVAVVDRSRRRWPWRDLRDFVPLRLVDGIGSALSQVAETLTRPLTGKVREDEERYRLRFEVPGLGKDDVRVYVDDGVLAIHGEKRDVVEEDRGRDGDGECWAAATYHAGLLLPEDAVAEGITAEVRDGVLHVTVPRSPERKRSVTEVKVR

SEQ ID NO: 37792 - protein, 504 aa, Oryza sativa
MPEEQQEAEEGIAGGGGGWASTALQPVRWLRMLCRELGATFVAGVVLVYGLSQGFAGSFFRVASDYYWKDVQRVQPATVQLLSAVFFIPWVLKPLWGIMTDVFPVRGYRRRPYFLFAGVLGTASAAIVTMVNGLPMTSAILSFVGISTAVAIADVTIDACIAKNGIDKPSLVPDMQSLCAFSSSLGALIGYATSGMFVHHLGAQGALGVMALPPATLVFLGFFIYELKMYQHNVKEKVLNKVHMAVKGMAQTIKYPVVWKPSLYMSLSLALSISTHEGQFYWYTSKEPPNPGFSQEFVGMVHAIGAVASMVGVLVYHKYLKDYPFRSILFYAQLLYGVSGLLDLTFVLRWNLLLGVPDAAFVTLEECCARVVGRVRLMPMMVLSTKLCPPGAEGTFFALLMCIDSAGMLAAKAGGAAVLRALRVTRTDFARLWLAVLVRNLLRLSTLAAISLVPTADQTDVLLPRDLLAVAGDGSPPAAGDGDDEERLQLAKFADHVDDDDDDD

SEQ ID NO: 37793 - protein, 363 aa, Oryza sativa
MDSAVDGPRQPPARAGSRLCTRCGERKAALKRPKTLEQICRECFYVVFEDEIHQTIVDNNLFKPGDRVAIGASGGKDSTVLAYVLSELNRRHKYCLDLFLLSVDEGITGYRDDSLETVKRNEIQYGLPLKIVSYKDLYGWTMDDIVKAIGLKNNCTFCGVFRRQALDRGAALLKVDKIVTGHNADDIAETVLLNILRGDIARLSRCTFITTGEDGPIPRCKPFKYTYEKEIVMYAYFKKLDYFSTECIYSPNAYRGFAREFIKDLERMRPRAILDIIKSGENFRISTTTRMPEQGTCERCGYISSQKLCKACVLLDGLNRGLPKLGIGRTKGIAGGDGDCEQQATRSERNRSSLQGKHGNFDF

SEQ ID NO: 37794 - protein, 424 aa, Oryza sativa
MVTIYWCSRQKVAWSATGCTLLISLLFFFSGSPHRILLNKKPLNFKTAPSRLLREISISSSRVQRVNNSSAEFVANLNDRNVEIVQHMEDNDHNIINATANVTSDWSIVKEEFTFPAGSAPFNSCHASTIVETEKDSFLVAYFGGSKEGAPDVKIWLQRYSDGCWHTPQVADEQDEVPMWNPVLFQLPSHELLLFYKIGQEVQKWSGAMKRSLDGGKTWSAREQLPPGILGPIKNKPFLVEDGRLLCGSSVESWNSWGAWLEVTKDAGQTWRKYGPIYIEGETLGVIQPVPYMTANGTIRVLLRSFETIGRVCMADSADGGVTWSYVHETDLPNPNSGIDGVKMKDGRVLLAYNTFSRGTLKVAVSMDDGDSWNDVMTLEDTEGMEFSYPAVIQTMDDLIHITYTYNRTQIKHVVLQPSGKVRW

SEQ ID NO: 37795 - protein, 168 aa, Oryza sativa
MSALEKITRGVAWGNLDILVVDMPPGTGDAQLSMSQRLRLSGALIVSTPQDIALIDARRGANMFRKVQVPILGLVENMSCFKCPKCGEKSYIFGEGGGQRTAEEMDMKLIGEIPLEIDIRTGSDEGTPIVISSPDSASAQAYIQVAEKVIHRLKELAEERQMGPEILL

SEQ ID NO: 37796 - protein, 347 aa, Oryza sativa
MDPPQRIFGAASSPPIGIPPTSIAAPVDPPHPIFGAASSSPIAHRSLLPTPSVATAVAVQVDPPPPHSESELVQALSDKYRLPVRFLLSSIPPTYLSAWELSDGKAQGLVWSHSDALDITHHYQSLGLHEIRFLYSEFISLRCVQDMEYMIARTPFSMRVLNPDVAKEKSRMLSKLNGYCCSLREALRQVQAGGNLVEMFNLRSKFAQEHELCTCRTELLRQMKVDALNRVLVLGLGEGASSAHSADMIWILKHHRPDEYAVAVNDDGTVSWPIIHGLVQNIRNMMGNKLTSNDTLANSRTSLLGVIGRFQFEHKVQEVLEKTRSHSTVHDRSYFKIPGCHGYQVSA

SEQ ID NO: 37797 - protein, 409 aa, Oryza sativa
MGCHRPAATAGGRAALPSLSFFLRRPLRLHLSFPTSPAAVASLSFQAARGDDATSVFLQTPSVAGASFQVLGSAEGHKTAVPAIFVFGDGMLDVGNNNYLPSDAPQADYPYYGIDFPGSEPTGRFSNGYNMADFIAKDMGFKMSPPAYLSLNSSIKMETNFTGVNYASAGAGIQIIMNDEATIPFVYQVKNFNDTVSQMEANLGHQKLSKLLAKSLFLISIGTMDLSVNIWRVLRYSRKPSPFNIPYTLSSYKAIIMQLYGLGARKFGIINIQPLGCQPWMRKNLENNVDCNDSMNSLAREFNDGLKPLFSNLSSQLSGLSYSIADFYAFSNATFMNPRAYGFVNINSTCCIPPCTPEHEPPCQNRKQYWFWDLSYTTERAAKLAASAFYDGPARFTAPVNFKRLIKMK

SEQ ID NO: 37798 - protein, 181 aa, Oryza sativa
MEARRPTPTRRSRSAEFHNFSERRRRDRINEKLKALQELLPNCTKTDKVSMLDEAIDYLKSLQLQLQMLVIGKGMAPVVPPELQQYMHYITADPSQIPPIRPSEPRPFQITHATQQRQSNVESDFLSQMQNLHPSEPPQNFLRPPKLQLYTPEQQRRGLASSSGHNSGWITERNSSYNFLE

SEQ ID NO: 37799 - protein, 122 aa, Oryza sativa
MPARASLGSSSMPTMAVSMASWFSTRDALAVRRITSSLATPWTNTSMRPLSTLSLFSVSVPVLSLQSTSMAAISSIAVIRLVMAPWSERRCEPMAMVTDSTVGMAMGMPPMSSTRRLSMPSR

SEQ ID NO: 37800 - protein, 147 aa, Oryza sativa
MRGGLVASARLLPRPLVRWFLQRRAQQDINENMLGGKKVKIIFVLGGPGSGKGTQCSNIVEHFGFIHLSAGELLRAEINSGSENGTMIDTIITEGKIVPSEITIKLLQEAIIKGGNDKYIIDGFPRNEENRVVFESVVSLLSLHCFE

SEQ ID NO: 37801 - protein, 51 aa, Oryza sativa
MASVVINFRNLRFLLTKFLLQVEHGDFRHLSMMDYLLAYSFCYISCGMFFC

SEQ ID NO: 37802 - protein, 37 aa, Oryza sativa
MTVWCVRRMRARRESRSWRRLQPSCVFLVQHLYIRSF

SEQ ID NO: 37803 - protein, 541 aa, Oryza sativa
MGRQDQQLQVLNALDAAKTQWYHFTAIIVAGMGFFTDAYDLFCISLVTKLLGRIYYTDPASPTPGSLPPNIAAAVNGVALCGTLSGQLFFGWLGDKLGRKSVYGMTLLLMVICSIASGLSFSHTPTSVMATLCFFRFWLGFGIGGDYPLSATIMSEYANKKTRGAFIAAVFAMQGFGILAGGVVTLAMSAGFQAAFPAPAYEVNAAASTVPQADYVWRIILMLGALPAILTYYWRMKMPETARYTALVAKDAKQASSDMAKVLQVEIEVEEEKLQDITRGRDYGLFSARFAKRHGAHLLGTAATWFLVDVAYYSQNLFQKDIFTSIHWIPKARTMGELEEVFRISRAQTLIALCGTVPGYWFTVFLIDIIGRFKIQLLGFAGMTAFMLGLAIPYHHWTMPGNQVIFVFLYGFTFFFANFGPNATTFIVPAEIFPARLRSTCHGISAASGKAGAIIGAFGFLYAAQPQDKAHVDAGYKPGIGVRNALFVLAGCNLVGFLMTWMLVPESKGKSLEEMSGEADDEEASANGGATAVNSSGVEMV

SEQ ID NO: 37804 - protein, 46 aa, Oryza sativa
MLLLERIRAHQDRFARNMMISQAIGNLVGYGIFWYLVNDVSKNLAN

SEQ ID NO: 37805 - protein, 687 aa, Oryza sativa
MARPRRASTATTMQLGLLLAALLLFTSSLAGSVAAAAPPPPAGAKGGGAKSGGGGGTVIGIDLGTTYSCVGVYRNDRVEIIANDQGNRITPSWVAFTDGGERLIGEAAKNQAAANPERTIYDAKRLIGRQFSDAEVQRDMKLLPFAVVDRNGKPHVRVEVKDGDVRVFSPEEVSAMVLTRMKETAEAYLGEKVTRAVVTVPAYFNDAQRQATKDAGVIAGLTVDRIINEPTAAAIAYGIDKKGAEKNVLVFDLGGGTFDVSILAIDNGVFEVLATNGDTHLGGEDFDQRLMDHFVKVIRRKHGRDIAGDARALGKLRRECERAKRALSNQHQVRVEIESLFDGVDFSEPLSRARFEELNGDLFKKTMVPVRKAMADAGLGKGDIDEIVLVGGSTRIPKVQRLLKDYFGGKEPNRGVNPDEAVAYGAAVQASIISGHVDENTESMILLDVAPLTLGLETAGGVMTKLIPRNTVVPTKKTQVFTTYKDRQTTVTIQVFEGERSMTRDNRLLGKFDLTGIAPAPRGAPQIAVTFEVDANGILSVLAADKATGRSEKITISGDDRKISQEEIDRMEREAEEFADEDRRHREQVDARNSLEAYVYNVKSTLGGKMADAMEGEEKEKVEEAVREAHEWLDGNPDAGKEEYEEKLRELEDVCNPVMSAVYQRSGGGGGAPEDGNVDDEDDHDEL

SEQ ID NO: 37806 - protein, 111 aa, Oryza sativa
MVAIRAPKSHRAKRELLKHAPKLVETGKKTLVLHGTKTSAVLNSVLADLFHLKRDNAVRYSKKNENIRPFESGGETSLEFFSLKTDCSLIVVSSIYSICNYRLLLLFLAIW

SEQ ID NO: 37807 - protein, 401 aa, Oryza sativa
MIIRSDSGSRSINVKPRSQSTSFRRSITKGSSFGHSGRHPIPAPLDFPDPMEFKDDLGMEETTDKVPRGQKKASISRLFYLNKPEAFVLVLGSVTAAMHGLMFPIFGILISSAIKMFYEPPSELLKDSRFWASMFVVVGASAFVLIPTEYFLFGLAGGKLVERIRSLTFRSVMHQEINWFDKPEHSSGSIGARLSVDALNVKRLVGDNLALNVQTVSTVISGFTIAMVANWKLALIITVVVPLVGFQAYAQMKFLKGFNKNAKLKYEEASQVATDAVGGIRTVASFCAEQKVIEAYEKKCESPVRQGIREGVVGGLGFGFSFLVFYFTYALCFYVGAKFVHQGVATFPEVFRFWLPVESHEQVQQAQTAPRLMNQLFLSSKSLTGNPRLIPAARRVWSLQV

SEQ ID NO: 37808 - protein, 407 aa, Oryza sativa
MSSSPMLGGIADRWRELHGQDSWNGLLDPLDLDLRSSILSYGELVQATYDSFNRERRSPHAGACVYGHGDLLAAAGASAAGSYAVTKFVYATSGLPVPEAFLLLPLPSLLPPAWSRESNWMGYVAVATDEAVAALGRRDIVVAWRGTVESLEWVNDFDFTPVPAAPVLGAAAAANPRAIVHRGFLSVYTSSNKDSKYNKASARDQVLEEVRRLMELYKDEVSSITVVGHSLGASLATLNAVDIVANGANCPPASSSSSQPPCPVTAIVFASPRVGDGFFKAAFASFPDLRALHVKNAGDVVPMYPPLGYVDVAVKLRISTSRSPYLRSPGTIETLHNLECYLHGVAGEQGSAGGFKLEVDRDVALANKGVDALKDKYPVPPRWWVSKNRCMVKDADGHWALHDFEQI

SEQ ID NO: 37809 - protein, 663 aa, Oryza sativa
MEVMDSVAVMEVSPVPKPPLEAALALRRSVRCLNRTRRPTYVEQEEPKESAGRRRGGKRKREEEKKEPVAQHAMKPVRMGDAASERKPSSEGKPMPAIAAEPVSCAGFARPAAEDDVLGNGKSAKLRVKETLRAFTSHYLHLVQEEQKRAQAVLQEGQKRPSKRPDLKAITKMQESNAVLYPEKIIGELPGVDVGDQFYSRAEMVVLGIHSHWLNGIDYMGMKYQGKEEYANLTFPLATCIVMSGIYEDDLDKADEIIYTGQGGNDLLGNHRQIGSQQLQRGNLALKYSKDNGNPIRVIRGHISKNSYTGKVYTYDGLYKVVDDWVQNGVQGHVVFKYKLKRLEGQPSLTTSEVRFTRAEAPTTISELPGLVCDDISGGQENLPIPATNLVDDPPVPPTGFVYSKSLKIPKGIKIPSYCNGCDCEGDCANNKNCSCAQRNGSDLPYVSHKNIGRLVEPKAIVFECGANCSCNNNCVNRTSQKGLQYRLEVFKTASKGWGVRTWDTILPGAPICEYTGVLRRTEEVDGLLQNNYIFDIDCLQTMKGLDGREKRAGSDMHLPSLHAENDSDPPAPEYCIDAGSIGNFARFINHSCEPNLFVQCVLSSHNDVKLAKVTLFAADTILPLQELSYDYGYVLDSVVGPDGNIVKLPCFCGAPYCRKRLY

SEQ ID NO: 37810 - protein, 451 aa, Oryza sativa
MMRQSQATVLQKTQQVRAAQQPQSRHHQQPSGGSRPAVTATRPAAAPNAERFENRLKKPTTFLCKHKFRNELPDPSSQLKWLPLNKDKDRYTKYRITSLEKNYIPKMIVPEDLGISLDLLDMSVYNTPPVQPPMAPEDEELLRDDEVLTPVKKDGIRKKERPTDKGMSWLVKTQYISPLSTDAAKMSITEKQAKERRESREGRNTFLENINDREKQIKAIEDSFRAAKSRPVHQTKRGMEAEWVLPLLPDFDRYDDQFVMVNFDGDPTADSEQYNKLERSERDECESRAVMKSFLVNGSDPAKQEKFLAYMVPSPHELSKDLDDETEDIQYSWLREYHWEVRGDDKDDPTTYLVTFDDDGAKYLPLPTKLVLQKKKAKEGRSGDEIEHFPVPSRITVSRTAHGGMMEHGESSSMHENLKRQRSSVDDDLYDHPKHSRVEDMDQYSGDEYSD

SEQ ID NO: 37811 - protein, 377 aa, Oryza sativa
MFSSSSKKPSMAPPPPLDGGVPVAEFSIDGGGDARGDKLMENARRRIAAGDGRPGTTCWSEAYRSLFASCGDIMADKELQARLAWRLSGCFQEDSGRPPLPPCDAAAAHGHGHADMVHCRERLSDSESKVFLAFFLETNTLCHQLQAEAFKRSTERLVNDLTRSARSAREKLEAIEERSEKIMRESDHLRRSLSSIMSQTEHLATASEDVRARIGDVLDRSAAIFERSREIAAAQAELRGGQAAMREELAAGMAQVEASYRSIGEEMGRLRQEAMGIEREVRAVGDAMAARMVDLQSAADDIGAAAGRSLENQMLLLDGQAKAMEGLNHLYSFQAQALQESSKIAGKPFRSWRNSGSNSRRSSCLGKNRSGTLTMTS

SEQ ID NO: 37812 - protein, 69 aa, Oryza sativa
MELQLRILQVLQLMYMSTKRPECVKITTALRLKMSIQIIPDLNELSGIRSTVLEHQYLRSFTGGLLFHV

SEQ ID NO: 37813 - protein, 108 aa, Oryza sativa
MPETTRRNERDGEEEERSLNTEEEERGRQRRGTHLDRIVAVRCGARVGSDGGRCDAAGVGPAQTESSPPPNFLLLPDNLPPVSTHAWTGTDTDRWGHLCFLFFLFVVR

SEQ ID NO: 37814 - protein, 332 aa, Oryza sativa
MDFIEGLPKSEGYDTILVVVDKFSKFAKFIPLSHPFTALQVATAFIKNVYDIFGMPQVIISDRDKIFTSALWQELFKLADVKLNMSSSYHPQTDGQTERLNQCLEAYLRCAVHSCPKHWSKWLSQVQHWYNTAYHSALDKSPYEVLFARKPTPFGLIDVGDSMVPDVHVWLQERAHMNEVLHQQLTRAQQRMKYQADKHRSKRVFNVGDMVYLKLQPYVQMSVAKRSCQKLCFRYFGPYKILERIGEVAYKLDLPPQSQVHPVVHVSLLKKAIRPDAQVQADLPASCMAEDAAIFPEEILHRQLIKRGNAAVPYGLVRWTGLPAALATWENL

SEQ ID NO: 37815 - protein, 336 aa, Oryza sativa
MFGTESSSTGGSSSTSTGDSPHCWSPGTNVQPGAGVGLNSICFASSGDGPARLGVAPFENGQCVRLLNRGRGGYLFADESGVRVRTDCRRGLINTVWCVQILGGDTPHILLRGAYGRYVAGTPLGADEGHIGILVTQRVLETMDTNVMWRTVPGPRGGGVVLINASSFNGGLRALRTNGKYQRWNTGVSLQCIDRFNARFSSMMEWEVQVIPTRVQRPPFQVGGAAWLCGLQRRGSGEIQVGVRVADDDGNFNIPGPQNLSVPGRSLIELGSVLEDRLGSNFRFRNMSIFIRAGSLGQPFPLLTDLPSELDYFEVVVFMVGTPGYRRLRFPDIDAA

SEQ ID NO: 37816 - protein, 79 aa, Oryza sativa
MRHCVSAGTPHLKSDCSDEGHLRELSLFEICCRGVGLFKAKCILTASVDKVIRWILCSDLEVSRFFLPLIISMTTMPKL

SEQ ID NO: 37817 - protein, 70 aa, Oryza sativa
MAAWMQRVQARQPSVASAHRGILVYYCYSIQVAVHLSPPPYQVMLSSCGAGFGVGSLFQLLPLVEFGAQV

SEQ ID NO: 37818 - protein, 40 aa, Oryza sativa
MEGKMQGHAWRRPAHASSSPSMGTARNGVGMIELQDVPAH

SEQ ID NO: 37819 - protein, 384 aa, Oryza sativa
MQVATKSLEMGTNLMLGVEACSTILLAVDHNIDDNMKHDCLCTRAGLYLKRRWKNDVYMAIRDCNSARCIDSRSFQAHLYMAEALLQLGRLKEASEYVDALNTIVPPYSQSVKQVENIKEQLFAAELEKNKKDQVGNTYTDARHGRLRSLSDLLFRSDASGSSSQEGREDSDYDDEMELDFETSASGDESRDSDPGLVRGSLSLRFHRRDSQTDEHSGENGSAESTQNGDSAYQPEVAVDMKQRYVAHCNVGTDIKQASFLGEQGEFIASGSDDGRWFIWEKRTGRLIKMLAGDGAVVNCIQSHPYDCAVATSGIDNTIKLWTPDANATSMIAGPEIDVSSVIENNQRKLSRNREILLPFEFLERFRMHEFGEGSLHPLECAQS

SEQ ID NO: 37820 - protein, 135 aa, Oryza sativa
MHCDRSPDLRTVGAKLKDILGVQNTSLKTRRLVVDVCDIVAKRAAHLAAAGIHGILKKLGRDVPNTDKQRTVIAVDGGLYEHYTIFAECVESTLRDMLGEDVSSTIVIKLAKDGSGIGAALLAAAHSQYREAEEL

SEQ ID NO: 37821 - protein, 96 aa, Oryza sativa
MTPSLSEQSSEQLDEASSHPISTIVTPLPVLPLAPSASRTKSPRLVLDHLAKAYRVLETTAQEAPFELNHLYVEMGSAGDKVKKMEYGEIRQQQTL

SEQ ID NO: 37822 - protein, 67 aa, Oryza sativa
MVEMMQRNLLQKGVEQSTRREREATRRNASCCVHIPAALEKKFIRYTKEVRKGDRFIVFVSRGRQDS

SEQ ID NO: 37823 - protein, 133 aa, Oryza sativa
MGKGGGLSKLRCMIRRWHSSSRIARAPPSAGELEEGSAAAAGRAASFHGADEVPKGLHPVYVGKSRRRYLIAEELVGHPLFQNLVDRTGGGGGGGAATVVGCEVVLFEHLLWMLENADPQPESLDELVEYYAC

SEQ ID NO: 37824 - protein, 384 aa, Oryza sativa
MLPVLRELKLVKMWNLVELSIPSLEKLILIELPKLEKCFGTYGTELTSRLRVLKIKDCPQLNEFTPFQSFSSFRTEQKSWFPSLNKLTIGCCPHISKWEILPLREMQSLKELELVHLHAVKELLVLPLEKLVLIKMASLEYCSGLTSPSLQISTSLGDRNESLSGLHDLTIHDCPRLVVSHPLPFSAQMRRFSISGIPTLPTMELTYDLKIKSEELVMLDDKIISFHNFARIRSFCLVDCPNLVSLSTEGLNQCTVLEKLHIKNCPNLIIPSSFVVPSLQFISIQACGISGHCLTEMLSHVQSLHSLELHEIPQLKFVSFSHQAAEKEGMSSLEATAARPLARDDKQLLEIPSNIIHSLRWLDISNCPTGVCCRGESTPRIHLS

SEQ ID NO: 37825 - protein, 62 aa, Oryza sativa
MLALAHSSPPYLAPLPIAPTRPSAVSPPRAISAGRRCTASSGRRSHRRPLSIGTSSNRRRAA

SEQ ID NO: 37826 - protein, 128 aa, Oryza sativa; identical to SEQ ID NO: 33438

SEQ ID NO: 37827 - protein, 331 aa, Oryza sativa
MASKQMEEIQRKLAVLAYPRANAPAQSLLFAGVERYRLLEWLFFRLLGDRSPFTQQNWQGDSLDRDEENSRIQHLAEIANFLGITPSVDTEAIQGRGSYDERVELLCLIVDLVEASCYADNPEWSVDEQLAKDVLLVDSIAEKQAQIFSEECKLFPADVQIQSIYPLPDITELELKLSEYTKKMSNLQLMVQELASKYDYNPNEDYAETELKLREHLQSFLETVKSFNMIYTKEIHPWTHMMEVPQLHGFGPAANRLLEAYNTLLKFLSNLRSLRDSYAAMAAGSLSASNEPSSVTKIISDCESALTFLNNSLSILSTSVAREQGETLNSQ

SEQ ID NO: 37828 - protein, 69 aa, Oryza sativa
MNVEAAVQVGAGHAVEGRQQGVAADIDGGLDVVVIAAVIVLQRWRRRRRGVGLHEAVEQLGDVVHAGGV

SEQ ID NO: 37829 - protein, 436 aa, Oryza sativa
MLMDPPVMQVDCQLQNDLEKTTPITYNMTHALSHDDHGWQGSDAHPASETVSCKPVEVNNCSRTSIYENLDGSSEKSHANLSDLPQKMHAEPPKEMNGSDAYFNDVRFQLSLSTENDAPQSTSVDVNQQSVSNQDAPHSREETHPPANIVTVLRPCQSNGDAQPSQDKDITEEQVKGNKEVGSDMVSNKAGTDTLECHAVQKELQCTLQDLSEIACSIDPVRKISSPQEENETSVSPKNNMDQLVLNNSCNGNTHYRSGHPNTGNVGAEDQTVALWVKWRGKWQTGIQCFRVDCPLSTLKAKPTHGRKSYIIVFFPRTRTYSWVDMLLVRPIEEYPLPLVNGTHRKWRKLVKDLSIPRRFIMQKLAISMLNFSDELHTEAVVENARMATTWKEFAREASCCRDYTDLGKMLVKLQNVNLSTLFLKDISWNLLSIFL

SEQ ID NO: 37830 - protein, 320 aa, Oryza sativa
MGGEVVRHWNADVNGISLHVAEQGPADGPPVLLIHGFPELWLSWRHQMAALAARGFRALAPDLRGYGDSTVPDDPAAYTVFHIVGDLVALLDHLALPKVMVVGHDLGAQVAWHLCLFRPDMLLAVVNLGVPFFPRGPSSLSEAFAGRDGLYIMQFQEPGRAERAFARYDVATVLKKFFSIEIDDLTAPPGVEIIDFLEARSTPLPWISEEELGQYAEKFQKSGFTGPINYYRMMDTNWRPTAPWQNAKIMVPTKFICGDKDTGLKSFGTEHFVKSGAFKSVVPNLEVVIIEGHHFIQQEQAERVNSEILSYFDKFTGEKA

SEQ ID NO: 37831 - protein, 465 aa, Oryza sativa
MEGARGRRGGGVARSAAEDGVRHHQARARFFSKVGDADRGAQPRRRRGGGVAPLASLSISESHREVCIPSSSAAVEGTAGETSPPVSDAALEVWRRWLRASTRRSLSSFMDQASSETHAPPPTPRPSPPRVLPPPPLSAARRAKGCRTAALSASLSRNYSTSSTNSQSPPEPRDSCRDDRSLDIWYTAKEFVKKYPVVLFAQPTDTHSQFHRWVYQEWFKPTVRSLLKCVSDHHASNLEFQEITTENVKIFCNADAPQFIPRIKIYCETRKATYEGRKQNFVQTGELITELIKSSVDNPTEVLDLLSEDMKDKLSMLKNPDLSHDADPRQCGVYILVNHPSMLRREMQSPFYLACYDLLMSVDKRIANRAFRKLPYKNWQSRALQHPLLKDHLINRRSSYGRDKYHQARYHRNVASHKTSWKSKYKAEEVDEIIHHRFPMILTRLMKVLSKMKLLIRLTLHNFFG

SEQ ID NO: 37832 - protein, 200 aa, Oryza sativa
MVSLRLPLILLSLLAISFSCSAAPPPVYDTEGHELSADGSYYVLPASPGHGGGLTMAPRVLPCPLLVAQETDERRKGFPVRFTPWGGAAAPEDRTIRVSTDVRIRFNAATICVQSTEWHVGDEPLTGARRVVTGPLIGPSPSGRENAFRVEKYGGGYKLVSCRDSCQDLGVSRDGARAWLGASQPPHVVVFKKARPSPPE

SEQ ID NO: 37833 - protein, 72 aa, Oryza sativa
MRLTRPHRFQMAPTPKEQTTIAGPPLIRADHLLAPHHGGRAPPSSITYASDPPTVGAHRHGAVSPPCRDRFQ

SEQ ID NO: 37834 - protein, 567 aa, Oryza sativa
MEGIEDARGVNYRTLEELFRITKERQGLFQYEITVSVLEVYNEQIHDLLLTGTQPGATAKRLEVRQVAEGVHHVPGLVEARVTNMNEAWEVLQTGSKARVVGSTNANEHSSRSHCMHCVMVKGENLMNGEQTKSKLWLIDLAGSERVAKTDAQGERLKEAQNINKSLSALGDVISALATKSQHIPFRNSKLTHLLQDSLSGDSKTLMFVQISPNENDVGETLCSLNFASRVRGIELGQARKQVDVGELSRYKLMAGRAKQDSKNKDAQIKSMEETIQSLEAKNKAKDLLTMNLQEKIKELEAQLLVERKIARQHVDNKIAQDHLHQQQQSKKPENSPCPTRSPMAERNLNSTAEKPVTLLKDLGIARQMFSDSNTDTYSINHLMSMSSEKENNPAGGAQPTKARRVSLCGGAHQQPAAPPRRGSLIPLPRRNSLMLPLPLPKPATPAAAASPLDMITEQCSSPLVIAPNDIRGGGGGGGRNKRIINSILRRSLQKKVIIRPPLMAAHQSGRRAGAGVAGTTTHGGGGGGVMRARRVPVSGGRGGGGVQHNREKERGWNNGTSLRQLN

SEQ ID NO: 37835 - protein, 503 aa, Oryza sativa
MSRACLLLVVAAVCLAGREAAAFNYADALDKAILFFEARRSGKLPPGQRVAWRADSGLSDGSADGVDLAGGYYDAGDNVKFGLPMAFTVTMLSWSVIEFGDMMPARRSSFLGGIFGGGGVAQLDNARAAVRWGADYLLKAATATPDTLYVQVADPYQDHRCWERPEDMDTPRSVYKVTPQSPGSDVAGETAAALAAASIVFRVSDPSYSAKLLDAAQLVFDFADKYRGSYSDSLSSVVCPFYCSHSYHDELLWAASWLHLASPEKKDVYLSYIGSNGHALGAEQDDFTFSWDDKRVATKGFLQSRADGLQLYKAHTDNYICSLVPGANGFQSQYTPGGLLFKEGDSNMQYVTSTAFLLLTYAKYLSSSAATVSCGSTAVSPSTLISLAKKQVDYILGANPAGMSYMVGFGARYPRHVHHRGASMPSVRDHPARIGCDEGFRYLHSPEPDRNLLAGAVVGGPDAGDAFADGRDNYAQAEPSTYTNAPLVGALAFFAGAHKIFTP

SEQ ID NO: 37836 - protein, 147 aa, Oryza sativa
MDLEIVGRHALLFDDDPTAEVVNSGGSLVPWAAVGADDLLLDRHDVRHLLDRVPPRPRRSYSAALLSAPSLDGVSEAELDRERFLDLTADDFGGEGSQDAVSSGIRLFPLLLTCLCTLSLSSILYCNYSAYPSAALSPLVAIGRCEL

SEQ ID NO: 37837 - protein, 378 aa, Oryza sativa
MQPKRRSPCRYGRYVRRRISSASALLASYSLSCADLLLLLLPVAAPLPPLALAAAGAGDGDGDGDGLLFGGGGGGAVSWWWFLPPSDLLRWRRSFKNAHRREPREEVDEAEEAVDEDDDERDAAGVATASTSSAVSGAGEGALQRVRNGDIDRAFRRTDRLRMRPRSSASAPSSSTAAASSSARCDAWPSPSTSGARGCGWRSIAERRTARIWPLWKSSSADDIAAAEGDGNRDEKSKSKSPRHPPPPPPRVGLAGALKKHGAPWGEAKWCSRSRSRVGLDGALTNGVEQALSARGSPGMAMAVAAWSAAAAMAGWGWWFGAASEVVGVRRSGTVGVFNCSGFFRFSPLVLHKFWGFSVLVELRGSKVIRGEFRGVRW

SEQ ID NO: 37838 - protein, 251 aa, Oryza sativa
MMRLRRGHITQLLLLILAPVRLLQEITIEEAATTLAPPPPQTISSMIGSLRGRGRRLLAAASALALLLLLLLSRSPRRRPHGYGVVIDAGSTRSRVHVIAYRSPAASAAAAALPWIDWARTASMKAAPGCCPSPPIRAAWVGRWRCSWSSLMVGGGEARHGRVRQGGKSRGRRVRLMVGGGGEGRHGRVRRGGKSRGRRVRRAAWLVWRAAEIILFGVRSFFRSFWRAVSFSGARRSVNPVLIATAGLIRR

SEQ ID NO: 37839 - protein, 382 aa, Oryza sativa
MEMEMEMVVAVPSPEVPAEEERALIRDITVAAEAHAKEGDTFFLITHRWWQSWIDYVIQDLANSTNNGSHHHEHGSNVLRRPGAIDNTDLIDDTASEVSNMEIELHDTLVEGRDYILLPQQVWEKLHGWYGGGPTLPRKAINTGLSQTDLAIEVYPLRLQLLLAPKGEQAVIRISKKDTVGELHKKACEVFDLIPDEVCIWDYYGRTRHSLMDNLEKTLDDANIQMDQDILVEVTTDANGSLDGGCIGSIQENEYLERESTSLIADASKSGLSNENFASNNYTSRSYSSSLTQSQYLRSSNGDLDNMHGTSAMITRGSPLGLTGLLNLGNTCFMNSAIQCLVHTPEFARYFREDYHREINWQNPLGMVVSTLSTSMALEPYV

SEQ ID NO: 37840 - protein, 260 aa, Oryza sativa
MNAGKYLYCCMSRYCYSYNCQFVIWLSVNRDKGYDGVVLESWSRWAVYGVLDDSELRNRALQFVKHLGKTLPLTSSNLSTHHHLKLIYVVPAPRMKELNNQEFRPEDLLQLADSVDGFSLMTYDFSGPQNPGPSAPLSWIQYSLKTLLAAKGSASHGHSHMIFLGINFYGNDFLLSKGDGGNAITGRDFIYLLDKYKPSLQWDEKSSEHFFVYSDKGLRHAVFYPTLMSLSLRLDEAQDWGTGLSIWEIGQGLDYFFDVL

SEQ ID NO: 37841 - protein, 87 aa, Oryza sativa
MTISSVPPLRVSSNCHPIPSLTIQPRRPTIPLSATRSHPSHHHLLPTSPAIRPHPSPRHVLPTSSAIRTSPPARRRSTAAGSTNHRN

SEQ ID NO: 37842 - protein, 572 aa, Oryza sativa
MLARREPIDVFSAIQHRLQKIDTMVEEMQMDLRTLHRYGGDGDDDGHGDGEDEDDVLDLDHIELCSFMEQIKSAVQLVRAALQEKVMRMTTNTRGGEDDDGGGDEAFPSGSGHLKSVLESLDPQLKQCALCLAVFPSGKAIKRRLLIHWWIGEGIVRSAAAGKACFQDLLSRGLLQPAMLRPHCHTAHYCRVHPSVRDLLVAAARSFSYFAFDRDGEPTDECLPGTTRRVTLCRTRGSSRHGGGGGEYVTVYNLSQRYLEMDEAWLGEQRGMGTLQLGRWQTSPEHHVEMVRPDGVLGAAAAAACRNLRYLSLRGISLVESLPESIGDLRDLVVLDLRACHNLETLPASMASLGKLEYLDASECYLLDQMPHGVCKLHRLQVLKGFVVASAAGGKKIPPCRLADLAALPLLRKLSVSTGRQLPVAPDDELPRLHGFAALESLSVRWGAAAAHAGGGGRMDLSLLPRLAKLDLRRVPAEELQEVVHPARGGGLRKLCVRGGRLRAFGDDVTWDVVETLRVRFLERLDCEWRQLRSTFGKLRFVDKRRCPKLSSWRCDAQGIWRREEDDGGDRN

SEQ ID NO: 37843 - protein, 120 aa, Oryza sativa
MRRCSSPTPSSPPSPAPPSPASPSRSSATSSSPPRSSPSAPTPSPSRRSSAATPSPREHSCTPTSASAASATPTGRSTKCATGTCPPGTPCCQGSAATRARPRRWACSGGWSWRASPGTR

SEQ ID NO: 37844 - protein, 234 aa, Oryza sativa
MATYRPGSNTLLKSDSILEYVLDTTVYPREHERLRELRLITQNHPKSFMGSSPDQMQFFSVLLKMIGARNAVEVGVFTGYSLLATALALPDDGKVVAIDVSREYYELGRPVIEDAGVAHKVDFRHGDGLAVLDQLLAGGEGKFDFAYADADKEQYRGYHERLVRLLRVGGVVAYDNTLWGGSVAMPRDTPGSSAYDRVVRDYMVGFNAMVAADDRVEACLLPVADGVTLCRRLK

SEQ ID NO: 37845 - protein, 645 aa, Oryza sativa
MVGGGGYRQKLIQVWNDWQVSVLVLLSLTLQLLFLSTAGARRRAQPSWGKKTYFWALYIGSRFITTYSLGILSRASTGDANADIQAFWASLLLFHLGGPDDFTALSLEDNKLWDRRCLELFIQVSTTLYVFSRYVLDPGFRRFIVPFALIFSAGVVKYVEQVVALHHATMEALIKSVLGKPDAGPDYADTINRLDGIMRSGALPSLDIKNERVDRPNSDPEANMQVKDYSEDERVAIKTIRSAHSLFSRFSVLFADGIFSFEDRQESQAMFLRKDARWAFKIVEIELGFAYDRLYTKASVSRGARLAVRVCSLSLTLAAGLWAALAILRASQYRQRHRCVTYALLAGAALNDAAILAAHAFSVWSLVHGDWLSWCSVMLVKRRRWSASMAQSNLVTFCLRKLPSNNDSDPAPLSSSFLLRRLLLGGGRGGGVQQQDASPAPALSTTLASMDEFQKLFERRSLLDQVRSGSFWSKYKHTKYVPVSEKLKDFIYAQLEEKVRRLSEYDKRMERERERERKRVRAPSPSPSPSPSPSPSASATTPTQTGTSTTTTTSSMYSILTDCRGDQVMKKERISNLSWSLEKKEFDESLLIWHIATDLRFREEAQAAGAAASAASAATVDQRETRKHMEIARELSNYLYYIMVV

SEQ ID NO: 37846 - protein, 418 aa, Oryza sativa
MEMMSLEEEETMASPTTSSCGTCKCGANDDKAKKMKTKTKKCELVGYEELPEWLKDNELIHGYYRCEWPMKETILSIFSIHNETLNVWTHLIGFLLFLCLAIFTAMVIPSGDNLHSNSSRSRSNATAMDYYYIHGDLMVMSNMTRVLRHEALAAAACLLLHDPADLSQHEQISTSCPTNTSSCYTSSSSFSHLHNVRQHAIQDAGKVTAATAAAIAEPITRWPVFAYLGGAMACLLASTACHLLLCHSERANYVTLRLDYAGIAALIVASFLPIVHYSFLCDPWLRRAYTAAIACAGAATVTASLVPAFQSPRLRPLRAALFSGLAASGVVPVAHKMVLYGGTVREAATSARCEAAMGALYALGVAVYAARVPERWFPGRFDLVGHSHQLFHLLVVAGAYAHYLGALEYLKWRDAVKC

SEQ ID NO: 37847 - protein, 494 aa, Oryza sativa
MSRLRRAALAAALAGTAAVAAKLSGISVRVSHPPQDGAATTTRGHLGLVRAHPGLRDLNAALAGSSSGRDALFLDAAHALAAGALRAPTFTGRYLREYAKKLAAAESTVVYRVEMGLALVHARDGRFDQALADVARLVADRPGDPHLRITSAALRLLHGRMGTPAEWLNGLPEDAGWRVAFEVVFAMPGSSPLYTQGAADRVVMLLAAKLAEAVLVKNFEQGEWSVADKLAISLLLTALRLFVSKYSRFPYFTRPKSTPPPPSSGGREIKPVNLQPVFLVECSQAMLASLLRARPLCGERLREARATAERALADAEAEGDDLAAVDVNLLLAFLAARDGDFDDALRRYKAAVQKDPSDSQPYELAAALCAINGDAAESEAWRRDGKQHGRATVAVAVAELELPALLDELVVAAALGSGILTTLDLERGGRRRLVLVAAWREVDARLAAAVLDDDLTLPERVQLRLLRRLLRGETQLLLDTASHGLMKNSARESD

SEQ ID NO: 37848 - protein, 225 aa, Oryza sativa
MQALLPQPQSHRAALREDGHRPQPQPSSVLVLIIIMELLVLLLIPLLTSALSFSTAAPLRPGKSIQEAQHHSITVAVRVSSSAGERLSRPAFTAEVTRDLSAPADSANSAQTVATSAAAEASTVLSFLSAPAPPELLLSSQADTTPAIAAASWATETAAWACAVCSRSSSRLFLRLPAMGMLSIKYPLRIALMCPMFSCSFSVETKSFRQFTSLCQIRQSMMALS

SEQ ID NO: 37849 - protein, 131 aa, Oryza sativa
MAASCTLGPPLGSTSTPSTHGTRFLRSLVALATCSSALERKQEDASEPGAARIASWLLSRRKSSGSISRCRSSTSASSFQTRSRIQQSLAAASQFLASIRLFRRVRSCEAAHSQDSSIWWIVNSASFSLLR

SEQ ID NO: 37850 - protein, 495 aa, Oryza sativa
MADADADACPAVFASRHPTEQELISSYLHPRLLLTTTKPAAAVAAGGVPSFIHHADAYAADPADLTARHLPARAADGSRAWYFFSPVRTTTERGTRRARAVESGDGCWHSESGVRAVVDAAGRRVGHRQFFSFVKKREEDGKRVRTGWLMVELGVDNDAASASSSNELVLCKIYMTPRMPPPSPPSAVTSSAAATMELMPRAPPPSAPSAVTSPAATTMELMAGGVHKRRKISDEIAAAATPPHPQQQRRQRCVPDNDGSKESSGESSSVVILDDDDDDADAPEDGGAVRSKLRSDDGVMLADARDDEQHAATSDSMAGTSGGAVTGGGHGKLLPDLNVVATVAHDDEGRHARGAPRPQDGGTSTTTTMVASAGAERGSTTGHLPAATAGYRRTLMLFLEEEDDDAVEDEQQQQQAPPLPPATSTATTTTRTAAEANVQRQRQPPCCTFVVHPCAVHAKMRHGAAYGCGCRVTGAVRRGGYHLPRRAVHTTTTGQ

SEQ ID NO: 37851 - protein, 430 aa, Oryza sativa
MPHVRSAAERDNGSGGDVTPGTPSPTHGARVRQRKRSSDAPSDVNKTNGANLLLNDQNKYKSMLIRTYSSLWMMAGFVFLIYMGHLYIWAMVVVIQIFMASELFNLLRKANEDRQLPGFRLLNWHFFFTAMLFAYGRFLSRQLVNTVTSDKLLYKLVSGLIKYQMFICYFLYIAGFVWFILTLKKKAYKYQFSQYAWTHMILLMVFAQSSFTVANIYEGMFWFLLPASLIAINDVAAYFFGFFFGKTPLIKLSPKKTWEGFLGASVTTMLSAFVLANFMGHFQWLTCPRKDLSTGWLHCDPGSIFTPESYDLPGWIPWREVAIMPIQWHALALGLFASIIAPFGGFFASGFKRAFKFKDFGDSIPGHGGFTDRMDCQMVMAVFAYIYYQSFVMVQDLSVETIMEQILRNLTFEEQHDLYEQLGKLLTRGN

SEQ ID NO: 37852 - protein, 276 aa, Oryza sativa
MSQEQPRRPSEKAAGGGGGEQGIRYGDVFPVTGSLAAKPIAPRDAATMQSAENLVLGKTVKGGPAAAMESAASRNEEMGVVGHDQATDAAAEQGVNVSDTLVPGGGRIVTEFVAGQAVGHYVEQDDGAAVVAGVVGAAPGAVRVEEPAKITIGEALEAAALAAGGTPVERSDAAAIQAAEAKATGTDTYMPGGLAAQAQSAAVANLWTARDADKTKLGDVLSNATAKLAADKEVESGDAARVAGAEMRNKPGAAARPGGVAASMAAAARLNRGPTT

SEQ ID NO: 37853 - protein, 437 aa, Oryza sativa
MMGRSVLEMVVAAAQGGGGAAGESVLGMFRYAVLPIAKVFVVCFMGFLMASKRVGVLKPSGRKLLNALVFSLLLPCLIFAQLGRSITIDKIMEWWFIPANIALGAVSASLVGLIVALIVRPPYPYFKFTITHIGIGNIGNIPLVLISALCRDQLNPFGDSNKCTQDGNAYLSFGQWVGAIIVYTYVFKMLAPPPGQTFDSCDEERDKLPIKAPNTMSSVAKYPSSAHGNTHEEEPLLSIEEEEEEEGQDVHSLGSKIMIPIKGMVRFLQKKQLLQPPIIASVLAITLGVVPFLKNLILTDDAPLFFLTDSCLILGEAMIPCILLAVGGNLVDGPGEGSRRLGVRTTVAIIFARLILVPIAGIGIVSFADKLGFIPKGDKMFKFVLLLQHSMPTSVLSGAVANLRGCGKESAAILFWVHIFAVFSMAGWIILYLTMLF

SEQ ID NO: 37854 - protein, 476 aa, Oryza sativa
MAHAGDATAPLLSSPAKPGDEPRRNMYAFGCATLASMTTILMGYNLALMSGAQLFVREDVGLSDAQIEVLAGSMNVFMLVSILAAGWAADVLGRRGTLVLANAYLMAGALAMSLGATYAALMAARFVTSVGVGFSLVVAPVYNAEISPASARGVLSSLLDMFVNVGILLSYVSNYALAGLPVHVGWRVMYGIGVLPPVFLAAGVLAMPESPRWLAMRGRHADARAVLVRTSDSVEEAELRLEEIKRAVEAPQESAGVGVWRELLLRPSAMVRRIVTCVVGLHFFQQASGIDAIVLYSPLVFKKAGMASNTSVLGATVAVGVVKTCFILVATLLSDRLGRRPLLLASTGGVAVTLTSLALALRVASPSTASAAACVASVMAFVAAFSVGFGPMTATYTAEIMPLRLRAQGVSLGMAVNRLTCGVVSMTFISLAGGITMAGCFFLYAGVAAVACVFVYVRLPETRGRSLEDMDVLFAK

SEQ ID NO: 37855 - protein, 93 aa, Oryza sativa
MAISQEEQHAGGGRDYAEPAPQPFLGSSELRRWSLYRAAIAEFVATLLFLYVTVATVIGHKRRQDEGGDGEACGGVGLLGVAWAFGGTIFLLV

SEQ ID NO: 37856 - protein, 486 aa, Oryza sativa
MYAYVGLVGGAAALVLLLLLRHQARRWRNPRCGDQLPPGSMGLPLVGETFQFFSSDASLDIPPFIRHRLARYGPIFKTSLVGHPVVVSADEELNHMVFQQEGQLFQSWYPDSFVEILGKDNVGEQQGAMFRYLKNMVLRYFGPESLKEGIIRDVERAVSSSLCTWSTLPAVELKEAVSTMVFDLAASKLLGLEPSRSKILRKSFFDFVRGLISFPLYLPGTAYYSCMQGRRRAMVVLEQVLEERKQSTGLQRGGEAQQHGDFLDYVIQEITKEKPVMTEKMALDLMFVLLFASFHTTSLALTLAVKLLADHPLVLEELTVEHETILKDREAGSELDRITWKEYKSMAFTSQVINETVRLANIAPVIFRKALKDIRFNGYTIPAGWGVMVCPPAVHLNPYIYPDPLTFIPSRFKDKPEINRGSKHFMAFGGGLRFCVGADFSKLQLAIFLHFLVTKYRWIPLGASRVVRTPGLEFPDGYRIKVIQRH

SEQ ID NO: 37857 - protein, 298 aa, Oryza sativa
MTSGAAAAGRTPTWKERENNKRRERRRRAIAAKIFTGLRALGNYNLPKHCDNNEVLKALCREAGWVVEDDGTTYRKGCKPPPSSAGGASVGMSPCSSTQLLSAPSSSFPSPVPSYHASPASSSFPSPSRIDNPSASCLLPFLRGLPNLPPLRVSSSAPVTPPLSSPTASRPPKIRKPDWDVDPFRHPFFAVSAPASPTRGRRLEHPDTIPECDESDVSTVDSGRWISFQMATTAPTSPTYNLVNPGASTSNSMEIEGTAGRGGAEFEFDKGRVTPWEGERIHEVAAEELELTLGVGAK

SEQ ID NO: 37858 - protein, 113 aa, Oryza sativa
MLLWTSLNATTTDVTYAGGIFTTFFHVFSSSGTGCRAPTACWSRLQAKVSLCFSMQLLKVSGSTSCSIWTAWNSARWRCSGWLSGVRLITCHSSVVPDIGVSVGGSSSRSPLM

SEQ ID NO: 37859 - protein, 305 aa, Oryza sativa; identical to SEQ ID NO: 29332

SEQ ID NO: 37860 - protein, 36 aa, Oryza sativa
MWIMELVSLLCMSSWLVQAVRTCAYDLGSRRSRMCM

SEQ ID NO: 37861 - protein, 281 aa, Oryza sativa
MEGLLHERFVFVPTALGTALDINLSNASLVFISVTFATMCKSASPIFLLMFAFAFRLESPSIKLLGIIVVISTGVLLTVSKETEFDFWGFIFVTLAAVMSGFRWSMTQILLQKDSYGLKNPITLMSHVTPVMAIATMVLSLLMDPWSDFQKNTYFDSPWHVMRSFLLMLVGGTLAFFMVLTEYVLVSATSAITVTIAGVVKEAVTILVAVFYFHDGFTWLKGLGLATIMVGVSLFNWYKYEKYKKGHINEDEVNSPSFDGDAKYIILDDLEDQDEFQDEDT

SEQ ID NO: 37862 - protein, 383 aa, Oryza sativa
MEIALAPPAAASPDGEALASDNLAQIKTALGGVCIETNHQDDKIRRFSVDKNGTRCCLDSSSESGPWYSKKLNNKKGVTGILSQWHKQTEQKAHEVVIYKRCTASGSAVTLFLIMMSLVCTVRGSNHGTDCDIGEYSTSIAQVCQYGAPPAVCCDLLQSAVHTCGNASVLCEIGRSVPITSRGFNVHDVMDWHRECTGQPESSSVDASSICYVSGERHKEGTKEEGHQVNILIETGNKECNARKSTSTNPMFIGLGIGFGSAMLFAFALVVIWLFVRRRSQGGPLVPQISLLAIAPHFSQGLPALPFQEHPALTLPCGPVPVPTPQEVTTVQPATSAYGQPAPVQPATTAYGQPVQPATNPMAYLASVVSYAIVDRLTSRRRR

SEQ ID NO: 37863 - protein, 408 aa, Oryza sativa
MMTLSTSERQPQPEKKPPRTRPPLPGKAVAALCVASFVVGLLLSGRVVVPLLPPGSSSPASNYKTSFSTGCENKRAKLGESNPTDIMNEVSRTHHAIQSLDKAVSSLEMELAVERARSSAAVGAGTAVSSLGPQKAFVVIGINTAFSSKKRRDSLRDTWVPRGDKLRRLEKEKGIVIRFVIGRSGAAAAGDGPLDRAVDAEDAENKDFLRLDHVEGYHELSSKTRVYFTTAVATWDADFYVKVDDDVHVNLGMLTSRLAKYRTRPRVYVGCMKSGPVLSQKGVKYHEPEYWKFGDEGNKYFRHATGQIYAVSKDLAAYISINQPILHRFANEDVSLGAWLIGLEVEHVDDRSMCCATPPDCEWKKRAGNVCVASFDWSCSGVCKSVDRMKHIHRACGEGQGAVWSVAT

SEQ ID NO: 37864 - protein, 258 aa, Oryza sativa
MTSPVNLPHHHHLRCRLHAAAALLHLLVLLGGGGGAAMARAQAIPTSCCGMFEGLDLAPCLQDAVAGAGAGIGIAGGNISGACCSSLNQALDAGHRCLCSLLLPSNGGGAGVRVLASLAAALPTLPLALPLPGCLLYAPPVLSCQVPVQEQTDAPPAATEAATATETTVDSPPPQAVVMPPSKKSKRSADGENADDDQGMNGNYGNGYGSGNGKGNGGAKKKTASRSEARRRTNVDEGIRTHLLTFVVVMAAFWFSII

SEQ ID NO: 37865 - protein, 473 aa, Oryza sativa
MVKKHGSKKWSVIARSLNGRIGKQCRERWHNHLDPQIRKEAWTVEEERVLARAHCMYGNKWAEIAKLLPGRTDNSIKNHWNSSLRKKIDDYNTRDILPVHPPVVGDGLKQLPKRPPADNHFDLNKEPIICSRDRLGVVHSDPTSHQRASNLKDFKGCADYLSLGQPVTSCEASAADDSAFDLATQGMRMDSVHDKGTGNNFVCGKVQGINFLGDKGLKINQISDKMGCSRQAKREGEAAINGGGSSLQSEAHSVGSLCYQISKMEDIAPAQSPVFTANYVPEHSRNVMHSPNGYTTPPTHGKGSDQLSVESILRSAAEKFHGTPSILRRRKRDKPTPAEDNDLKIGRLSSDDFHTPIGKCTTDSPQSFKTAALLSLGPMDEQGSLDVSPPYRLRSKRLAVLKTVQNHLDFSSDEMSICDTTMKSACGNSDCANASSGVSSIQGKKLDEHMIGLETLTMNFAHTTKLDATQPNL

SEQ ID NO: 37866 - protein, 122 aa, Oryza sativa
MAAISTTTTAAAAAASWASTPSCAGAPARSGRPSSSRASSRGRGGGEDEEPDGGGPGGAQGLPRPRVRVRLPRDPRAVRDAPGAGALLLHDAEVPRRAEGARAGAGVARHAAAPQLENLWPR

SEQ ID NO: 37867 - protein, 502 aa, Oryza sativa
MAPARGFVERLSTVEGRLLRLEVVVLASAVVLAALVLYGATRRRSSDKLLRGVMWMAYSLSYVVVSYAVGLIQDGPFRGETFVLWAAALLLIQASAYAAPVHSRREFSQRKKLLLQHVLQTALVLWLIANATGRNASYRAAIWAFWCLNVLKTVAKIVEMIKASIPDQSVKLIADYMDVEESLAGVGDGEPPDPTTMKGYRYIFHGEDTMVPATRDDMVRQSDGKSVVTIDRVYRWIDDEPGYSGVEKDMARDFCLALALFKLLKRRFYGFVPAEAGSPRARDLVCGGLIRPAVTGPDAAFRVVEAELAFLYDEFYTRNVVLVGARTYVCIAAAVAGITMWTAFFGTLGPGYHRLRIGVRGLDRSVTVLIVVITAGLELCQAVAGFSSNWRYVKTVYRCVRDDQPWTNRRHGHLWWKESITPPATRYWDDKVGQYVLLKRFGHRPWNILSWLTLYLVEPRRQGQKRGRRKRCRRRSGERCSCRSRRATATSPMASPRCGGTA

SEQ ID NO: 37868 - protein, 228 aa, Oryza sativa
MSGRSSRRGSFSLRQPPVVDIGCNCRRPKLFSIFSSSSSSSFRRGGSKPKSPNASSTSTTTAFTATTGGAGTATSTDSSWGPASFTTNSLFEEPAAAQQEQEQLETRRRRRQQRRRRRRAGATSFARGGDVGGHDDEQQQLQEQAPYRRVAKESVAVAVESAEPYEDFRESMVQMVVEKEIYAWDDLNDLLHQFLSLNSPRHHPLILHAFADLWTRNGLFSPPSPCQF

SEQ ID NO: 37869 - protein, 367 aa, Oryza sativa
MDQLLALAVAVPLFALASALAAASATPVNKSCLNGSTGAAVSIGYGGASASAGAGAGVSLGTDAYWLACPLAEEIVRDVVERAVAADPRMAASLLRLHFHDCFVNGCDGSVLLDDKPLFIGEKTAGPNANSLRGFEVIDAIKAELENACPETVSCADVLAIAARDSVVASGGPSWQVEVGRKDSRTASLQGANTNLPAPTSGVATLVQKFRNVGLSAKDMVALSGAHTIGKARCTTFSARLAGVGASAGGGATPGDLSFLESLHQLCAVSAGSALAHLDLVTPATFDNQYYVNLLSGEGLLPSDQALASAGAAAAGAEDVAGLIAAYAFDALLFFDDFASSMLRMGRLAPGAGTASGEVRRNCRVVN

SEQ ID NO: 37870 - protein, 552 aa, Oryza sativa
MGRGDHLLMKNSNAAAAAAAVNGGGTSLDAALRPLVGSDGWDYCIYWRLSPDQRFLEMTGFCCSSELEAQVSALLDLPSSIPLDSSSIGMHAQALLSNQPIWQSSSEEEEADGGGGAKTWLLVPVAGGLVELFASRYMAEEQQMAELVMAQCGGGGAGDDGGGQAWPPPETPSFQWDGGADAQRLMYGGSSLNLFDAAAADDDPFLGGGGGDAVGDEAAAAGAWPYAGMAVSEPSVAVAQEQMQHAAGGGVAESGSEGRKLHGGDPEDDGDGEGRSGGAKRQQCKNLEAEGKRRKKLNGHLYKLRSLVPNITKMDRASILGDAIDYIVGLQKQVKELQDELEDNHVHHKPPDVLIDHPPPASLVGLDNDDASPPNSHQQQPPLAVSGSSSRRSNKDPAMTDDKVGGGGGGGHRMEPQLEVRQVQGNELFVQVLWEHKPGGFVRLMDAMNALGLEVINVNVTTYKTLVLNVFRVMVRDSEVAVQADRVRDSLLEVTRETYPGVWPSPQEEDDAKFDGGDGGQAAAAAAAAGGEHYHDEVGGGYHQHLHYLAFD

SEQ ID NO: 37871 - protein, 484 aa, Oryza sativa
MASVDLELGRPLSAAAAAYPPPLRRSINDDDVDDDGKPKRTGTEWTASAHIVTAVVGSGVLSLAWSTAQLGWVAGPATLVVFAVITYYTSVLLADCYRAGGDQVSGKRNYTYMDAVESYLGGRQVWFCGLCQYVNLVGTAIGYTITASISAAAVYKSNCFHKNGHSADCSVFTTSYMVVFGVVQVFFSQLQSLHEVAWLSVLAAVMSFSYSAIAVGLSLAQTISGPTGMTTMSGTVIGIDVDLSHKIWQALQALGNIAFAYSYSLVLIEIQDTIRSPPAESKTMRKANALAMPVITAFYTLCGCLGYAAFGNAAPGNMLTGFGFYDPYWLVGLANACIVVHLVGAYQVMSQPVFTAVESWASSRWPRCGFFVTGGGGTRLISVNAFRLAWRTAYVVACTAVAAVVPFFNDVLGLLGAVGFWPLTVYFPVEMYIRRRKLERSSKRWVALQSLNAVCFVVTLASAVASVQGIAESMAHYVPFKSKL

SEQ ID NO: 37872 - protein, 594 aa, Oryza sativa
MDVGDVDVEHGGDDEGEGPPDEHHHRRLAVLPEDALGEGVEVEEDPEVEEHAAGDLEPVRPLAVEHLGEGDGGADDVDEDDDDGGDHEPRPPHHVQVGVGVLLLVAGGELGGELERDVPPEHHLGDHLQHGGEVGGAAGRHPELPVPEPLEHGDPRPLHLQHGEDEQRPEHDGEVDVEHGGRPLHDEVPRHERQRRHGGVEDEEQRRERVGGDVDVRHALQRVQERAPEQRVVPREEDLQRTRRPPEHLEQPLRQVDRRRPDERVRVDGAVARPPPLDVHPVAGHHVLRHRAVHPPDVAPPPGLLLVRRRRHHHGLRDRRLVGRHRRLRRVRRRVRRARDGVGERVRLAVRLLGHRQEPVLPLRHRRRRRRRHRLGTRLGHLEPRLLVPVLGEHPTEPREARSADVDPRRLEPVQRDAAEETPGADVDRPLQPVEGTERAVEEDTVVVSIEVGGVDALEALRELDERDGVAVAAEHEADAGAERLGVVDVVVAVEVEDEGGVGEHGGGAGQRVHGAGLLLVVAPGALLTCDVHQHRQPHVHAAEVQRVVGARRRPQLPCVARVVQQHLHIFTIIYHISKKKSSSTNYYSYIYHY

SEQ ID NO: 37873 - protein, 424 aa, Oryza sativa
MEALLKLEKVQRVLSLMGSRGLSGSGSDSGASDGGGGDRFLAHFLLFLVQPFDSLSMEKKALLVSDLLRKVNVDTLEEVCHLGSIECTSGEGRIIPASTSDQDISLGDPLQPNKKLKLHAEKLTVQEAPMVGFHAMRRANSTIEDFVRTVRSYFMFHGLDVNKAQSIFKFLPVLCFTESYIYQLDDLNEYNLQMVPGNDASLTVLERENRTSNEASLTGMLNVLDDLLQRQGLMTDQLRNELKSGIQYWSLERKLCQALSRNDKISIEDVMEAIHLKSFDYRVLNLLMYRLTGQQVNEVHMEFLSISEFLVEISDDLYDYEDDVMNNTFNILRMFAAIYGPSEAPKMLAKCIGEAEEKYERFSKKLDPTLSGSYWRRCEEATKEGGKMSGHAYGTWNIPPLIRDEEFFRLERSNKRDASAITIT

SEQ ID NO: 37874 - protein, 75 aa, Oryza sativa
MCDLVARTGRHQQRYEDGRRLVAGCIPFRYRTSNDETSDDEPKKIVEVLMINSQSGPGLLFPKVMFPSELESRNT

SEQ ID NO: 37875 - protein, 294 aa, Oryza sativa
MEKPQREQMALMVPELLLVVATSEGALASIELACNLLDSIEFDVLVDIAHGVPFNTTGGGEQPLYMGGGCGGGGGGWRGASRSFGVPMDSTGGGEGSFSVDALAYEPFTFGVPMDTSGGGVEHTGGDGAATNVAADHKGRKAGIDYWANTLASAFATDGPLNAAHREITRLITLHGVAAHLLIRCLELHDFPHGDEAAWQRWWEHHDAFVPRAHDALLRLSSATSASAAAEDFLRLRSALSPGRNDWPSEAKQLVRDARRDIGEARDAVILMRDDAVREFFETWMILKRSQASR

SEQ ID NO: 37876 - protein, 614 aa, Oryza sativa
MAPGAAGAEEASGSVKTRSSARRRRSVNRDGGSGVVASLASQSAARAERSERRSAKRSATLADQSSEGERAAKKMDLGVHEEEEGVKVAPPSASASVAEEQQGGKGGEDDGFGGSAGGGEGGALALPSASGVEEGIPVEDEASSCCSSPLRKPYIPRVVIGHNAMGREIYKPIGGEDFRALDPWEAKYQAKRDCQMKLPTLLPCVPDTCLTDRNLLHIRESSTKTVLYAAKFVVGLSSTIDGKSLSKSSGFMIDWDEKSKTGTILTSALLICKQSPSLDDWKSANQYASNAKVAVRFVDGTTVEGHFLYCQEHYNLAFYKIVVDRSIHLPSFNEGVKWAEEVFILGRDENSYLRTSYGRVQYLNPHMNERRHYVYIDGFSAPPEYYNGGPVIDLRGDVVGMSIRSTRGSFIPSNIILKCLQMWRKFQCIPRPHLQMKFWGMKFLNPAHLEVISCKCNIDEGLIVKEVSEGSIAEKLGVRVGDVIKFFNGKHISSTVELELLLLQISEDHFYNGNGLDSKIDIVIGVFHTRSGVWRSRKLTVHVSDKGEVVIRGEFPVTRETIYARCPLDQADSDPDNSQISLTDRTSSSSSSSSSSSDSGSLHAPTSTEGRTPT

SEQ ID NO: 37877 - protein, 37 aa, Oryza sativa
MESSVWWTGLLGLGLERPRQRPRRASCRCCSGRRCRR

SEQ ID NO: 37878 - protein, 419 aa, Oryza sativa
MAKRRSNGETAAASSDDSSSGVCGGGGGGEVEPRRRQKRPRRSAPRDCPSQRSSAFRGVTRHRWTGRFEAHLWDKNTWNESQSKKGRQVYLGAYDGEEAAARAYDLAALKYWGHDTVLNFPLSTYDEELKEMEGQSREEYIGSLRRKSSGFSRGVSKYRGVARHHHNGKWEARIGRVFGNKYLYLGTYATQEEAAVAYDIAAIEHRGLNAVTNFDINLYIRWYHGSCRSSSAAAATTIEDDDFAEAIAAALQGVDEQPSSSPATTRQLQTADDDDDDLVAQLPPQLRPLARAASTSPIGLLLRSPKFKEIIEQAAAAAASSSGSSSSSSTDSPSSSSSSSLSPSPLPSPPPQQQPTVPKDDQYNVDMSSVAAARCSFPDDVQTYFGLDDDGFGYPEVDTFLFGDLGAYAAPMFQFELDV

SEQ ID NO: 37879 - protein, 833 aa, Oryza sativa
MSSSARGITLLCLLLIVSSTVLHFSIGGGSNGEKRRDDGDGDGDDEKVRLLLGANALGERDRRHGHGHGGGVSSAPAPAPAPARAHLPPPLLHKNARLPDPVPGRVGLGHRRGNATAAHRRRSEREGKKSTPLVVVAAGAALSGAAAVLLVVLVVFLACRRFQRRAMPGADQSGTNKVSFDPGPDVFYLDAVKPYVEADHGGGGGVVKTAPELAGPKEEPRCEEEDSGVALSDDGADSVHSSCCFHSSHFSYSELRDTKPGSNGVSPSPSGRSRRRSSAPVTPSEKNKAASPYSPQCPRTPSNRERSSRAHSPSSSVSDLTSVSTSVVKDHEVRRAVHSLMFPEAQSGGAGHVKEDEAESGNMRPPPPPPPPPPPPPPAVTQQQDVKTSCGPAVPPPPPPTPPPPPPLLAPKQQSSGGPILPPAPAPPPLFRPWAPAVGKNGAPLPKLKPLHWDKVRAAPNRRMVWDRIRSSSFELDEKMIESLFGYNARCSTKHEEVQSRSPSLGHHVLDTKRLQNFTILMKAVSATAEQIFAALLHGNGLSAQQLEALIKMAPAKDEADKLSAYDGDVDGLVPAERLLKVVLTIPCAFARVEAMLYRETFADEVGHIRKSFEMLEEACRELMSSKLFLKLLEAVLKTGNRMNVGTARGGAMAFKLDALLKLADVKGTDGKTTLLHFVVQEMTRSRAAEAADIAAGLGAELTNVRKTATVDLDVLTTSVSGLSHGLSRIKELVGSDLSGDERNQCFVAFMAPFVAHAGEVIRELEDGERRVLAHVREITEYYHGDVGKDEASPLRIFVIVRDFLGMLERVCKEVRGAKNCHGGNPALNLNNV

SEQ ID NO: 37880 - protein, 469 aa, Oryza sativa
MIDLSSSMVTSPATASWSDMVFDLLATVFHTFSDPADLLRCAAVCCSWHAAAASVRDRHPLFSRRPPPPCLVYTAAASGDGDDNTRAATIFPLAGGGRTFEVTLPAEPPIRDRSWLGSSHGWIVTADADSAELRLVNPVTGQQIDSLPPVDTIEHVRHRSQSAAAADDDDEDDYDYEIVQYDWTMEQRDDRPPTQAKAGELAEYLLMRAFLSSDPSSDSGGGGCIVVLLHRPKYQLSFARVGVDERWAWVNLPDSDFYTDVVYNDGDGMFYAVRHQAAIHAYDLSGGPSAVRRTIVLADQLHGVIDLETKYLVRAPDGGEWLQVWRMLKPVRRAADTHGDTTPTTAVYRKTTIWIKVFRVDLAAQRLQETATLGDGGDSHALFIGCNQPFWVPAGGGDGECPAGGVLPNHIYYTDNDEDYALLYPEAPRDIGVYSVADGSFSPFRPSLPWLTWPLPIWLVPNFGYYCQG

SEQ ID NO: 37881 - protein, 82 aa, Oryza sativa
MLSFMCRTSPSRWIYGNKTDIVISKYEGSFMVMVTQIGCMGTILAARKDESVFSDPTYNVLFGKRDEPLLLACARQLIEHIR

SEQ ID NO: 37882 - protein, 269 aa, Oryza sativa
MPNCQLSNGICIFFSIMYFPLFFFLLQKNQLCAHLISEIRTCQYSVGCSKVGVDVGNIVAGEPQQPSEAGGLLHQLGNRRLLPGVRVRGERLAGPVAHGPRPRAAAGLARAPPHRPRPRPRLAVHPRAHLAARGAQGHQEQQRPARRPHARQDRQLRPRQDRPQRRHHAHRRHAGVHRAGVPRRRPRHHQDGRVRLRRRPARARVGARGRQRRQRRAAVGRRGREAVPRPGGEAGGAGRGVDGPRARRADVPAGQRRQRGERGEGLPAP

SEQ ID NO: 37883 - protein, 366 aa, Oryza sativa
MADCMQEWPEPVVRVQALADSGLEAIPRCYVKPPCDRPAPEADDASSGASIPVVDLGNGGDDEGGQLAEAVAAACRGWGFFQVVNHGVRPELMRAAREAWHGFFRLPLQEKQKYANSPRTYEGYGSRLGVEKGAILDWGDYYFLVLSPDAAKSPAKYWPANPGICKEVSEEYGREVIKLCERLMRLLSASLGLDGTRFQEAFGGAGCGAGLRANYYPRCPQPDLTLGLSAHSDPGILTVLLADDHVRGLQVRRRDGHWVTVQPLPDAFIVNVGDQIEILSNSMYKSVEHRVIVNAEEERISLALFYNPRGDVPVAPAPELVTPERPSLYYRPMTFDEYRVYVRKNGPKGKAQLEALKGQSITQNNE

SEQ ID NO: 37884 - protein, 152 aa, Oryza sativa
MEGVGVGVRIRALLCCIAMAAMLLSSYQQGQAEASYMPWPPATPPPPAAAAANSTSTAAANNSSSSSSTTAPPQQPTAFPMYGVTPGSLRPQECGGRCAYRCSATAYRKPCMFFCQKCCASCLCVLPGTYGNKQSCPCYNDWKTKRGGPKCP

SEQ ID NO: 37885 - protein, 209 aa, Oryza sativa
MEEVTSDAAAAKEEETGGRRPPPASHRASHRRRHCSPASAPPPATTPPAATARPPQLPPSHAPRRRQIRGGGRRWRRRWSRRPLPVASSSAAALHEVVEPAKPAAAAARPPPPLLARRHHSPAPALPPAAVPPTVARATSVGKERGGGGGGGAATRSLLPPRRRQRHTRSLSRQSPAWSLSASSAQTALMLAITTNDDAFLLSDELIFT

SEQ ID NO: 37886 - protein, 254 aa, Oryza sativa
MAGVCGSVAAAAAMVVVVMVSSLPGGVEAKTTIEPCTGSDSCSALLGYTLYADMKVSEVAALFGTDPAALLAANALDFGAPGAAHRILPMGLFVRVPTRCSCTDGVRKSVSVRYAARPADTLATVADGVFAGLAFADQIRNANAVASADPDAPLDPGQKLVVPLPCVCFNSSDNNLPAVYLSYVVQVGDTVPAIAASYETTVTDVMNVNAMGSPIAAPGDILAIPLPGTCSSQTLQTISQMSRMVYCIELTVLS

SEQ ID NO: 37887 - protein, 387 aa, Oryza sativa
MGRREYSEQYHHRAGAGAGAGAAIVVVVVAVAAAVVCECEAKPRAFFVFGDSLVDSGNNNYLMTTARADSPPYGVDYPTHRATGRFSNGLNVPDIISEYLGAESVLPYLSPHLDGPKLLHGANFASACVGILNDTGIQFANIIRIEKQLRYFNQYQDRVRGLIGGAAARRLVEGALVLITLGGNDFINNYYLVPFSARSREFALPDYVRYIIGEYGKVLRQLYHLGARRVLVTGSGPLGCAPAELATRSATGECDLELQRAAALYNLQLVRMTRELNAELGAGDVFVAVNAYRMHMDFISDPAAYGFATSKVACWGQGPYNGVGLCTALSTLCPDRSLYVFWDNFHPTERANRIIVSQFMSASPDYMHPFNLSTILAMDAATAAAAP

SEQ ID NO: 37888 - protein, 48 aa, Oryza sativa
MLLERLNRAEEEEDAMEEPEEEKLEAMPQLASGMEDLSLLLRAFIALY

SEQ ID NO: 37889 - protein, 137 aa, Oryza sativa
MAGFHRLSLAFLLLVVVVAGDLMISTATSMAVGTSDDDGPPIKISMRYANAEESRWLDSWAEKTQSAGGGGGDDFEVRRATDEESARLNRMRADADRRARDGSGFGFDGHIEFDDDHPFGRVVVTDFPPSSKPNDDL

SEQ ID NO: 37890 - protein, 199 aa, Oryza sativa
MDESDEQSNGGGGGGHRGYEWKLPAALSANTTSVHVTALDGVVNVNSLFTVAVFVGLSLADPGELRSLAGDASCDAGQGVARSLLVLEVVAFSSFLFSSLVAQGLKLALNLINSKDPHDTLHAHIDARLLRLGMLASAVGSVVGCVFLMVSMVMVVQIRLGTLGCATNRAAAKAAAGLVGLVTTALAVYVGTVFYTFTH

SEQ ID NO: 37891 - protein, 132 aa, Oryza sativa
MEMGSELSKTVATFIVQKILLDDVGLRYICATAERFFAVGSVLANMVVSLAEQPSTRLLKHIIRCYLRLSDNSRACAALQTCLPDMLKDGTFNNCLRDDPTTRRWLQQLLLNVTGAGMGAAPQPGLDHMMGI

SEQ ID NO: 37892 - protein, 211 aa, Oryza sativa
MERRIQTRRRMPRGGCGDLPAAVLPLRLLHRCVRRRRQGRRRRAPLLRSFREAGRSRSPFRRPSGRWWSLPRRVGASAAVGRARVAPAAVHVQVRQLQPVLPRARVRPPRRPRHHRVLPRGLALQVPQPPLHAVTTPHPPPLYVRRLDPTARDHRDGAVTQQVGAPSARRLCRCIIASGAACLSFSLFLSPSRARAWGHACMGGAGGARGA

SEQ ID NO: 37893 - protein, 256 aa, Oryza sativa
MSSSSSSSAVFPLDHLAAPSPTEQLCYVHCNCCDTILAVGVPCSSLFKTVTVRCGHCANLLSVNLRGLLLPAPAPAPANQLHFGPSLLSPTSPHGLLDEVAFQTPSLLMEQAASASLSSITGRSSSSCASNAPAMQMPPAKPVQQEPELPKNAPASANRPPEKRQRVPSAYNRFIKDEIQRIKAGNPDISHREAFSAAAKNWAHFPHIHFGLMPDQGFKKTFKPQDGSEDILLKDSLYAAAAAAAAAAANMGVTPF

SEQ ID NO: 37894 - protein, 339 aa, Oryza sativa
MLPTLPMRFLPSVTYCPHPVRQQPDADGGGYLLAIFAMDMDADAEADGYLPQVLCLLPSSAPFDRRRWGTRRPIFPSEKPKSFTAHQTFSFQGSAYWVDLGQGILFCSCHDLMSGTNNINNNDDDDLQFGYIQLPDGCYVGCDSLYLTHLPSQYRDIRCISDSIRFVSIEGYNTDPPYDMLLSMWDLTPSSRQWHKVGSIHVGSLWEQEGFRRSGLPTNTSPTQPMLSSEEDGVVYLMAGDFYEEDEKHRSLHVFSVDMTTCEFVSAWRLPPWRHSGPPSLIGSDIFKHLKMDNLCQLVPPNMRAKVLPRPPKRDRGEGNVITVRPRKVQRVHHQGENV

SEQ ID NO: 37895 - protein, 450 aa, Oryza sativa
MDEAWERAVEAALQAAGEGSSSPARSLTLDGAVKCLHGRLPAAEILERYQSLEHLSIAGVGVASLAGFPRLRNLTRLTLSDNRIAGGLDHLVAAGLASLRDLDLSNNRIQDVGDLSPLANLRLVSLDLYECPVTRVKDYRSKVFGMIRTLKYLDKMDADENERPESDDDDDDGDGDGDGEEEEDDDDDEDEDPGSGEVANGGVSHPRGGVASHPVEVNGVIDVDEDESDADEVVPNGGDEHHANGFRVAAVGDEDEYVEEEDDDDEEDYEEEDDLGEEIDEDGDDEDAVVEVHDVPSSSDEEEDGIEEEDEEEDEDEEEVEDDGEEAEPESSGRVALAVGDVGEEIDGHEHGEGEDEDENGEIGEEDEERLEDDRVYEEGNDDDEEDVDDEDEDTEYLVQPIAQPQAMAVGNDFDAAEADDADEDRDEVDDDDDGGTDLPSSSQGVLRLG

SEQ ID NO: 37896 - protein, 591 aa, Oryza sativa
MASDMDTTRALAILAATSFVAMLACVQAAGDESYTSMKDAVQSPQVSYYDYIIVGGGTAGCPLAATLSQRFRVLLLERGGSPYDDERIGNMTRFADTLSDTSPSSPAQRFVSEDGVINSRPRVLGGGSCINAGFYTRASDEYVRGLGWDLEATTAAYRWVEDVVAFQPELGPWQSALERGLLEAGIAPQNGFTFDHLGGTKVGGSIFDAEGRRHTAADLLRYARTDGIDVLLRARVAKILFNVRAGRRPVAHGVVFHDSEGQMHRAYLSNGRGNEIILSAGAMGSPQLLMLSGVGPADHLRSFGITLVLNQPAVGQGMSDNPMNAIYVPSPSPVEVSLIQVVGITEVGSYIEGASGANWGVRRSGSGGDRPHRNFGMFSPQTGQLATVPPKQRTPEAIARAAEAMSQLDDTAFRGGFILEKILGPLSTGHLELRNRNPDDNPSVTFNYFAHPEDLRRCVAGVSVIERVIRSEAFANFTYPYFSVETLLNMTAGFPVNLRPRHDNDSTSLEQFCKDTVMTIWHYHGGCQVNRVVDAEYRVIGVDALRVIDGSTFNASPGTNPQATVMMLGRYMGVKIQNERLGNEGLGRRNL

SEQ ID NO: 37897 - protein, 139 aa, Oryza sativa
MALPDDVLAAVLRRLPPRGIAAPRCVCKEWRSLVDGRRLLRADLLPLSLAGILLNYDSTWFTQFLSRPTAAAAVSCRLDYTVPPPPAYIYVKDHCNGLLLLLREECRLVVVNPATRQWELLPPPHHHHHPLPPAMGCGL

SEQ ID NO: 37898 - protein, 586 aa, Oryza sativa
MDPEAEEAQLRLEMELAKKAKADMSGLQRSSSLGLDHAGLYPLPLPPGWRSAPTSPLRTPSSPPPLQFPPAWAADVAGTSGSAAPEDDGPARNAGADEATAGSAPKNEDPARAAGADDGPTRSDYAAMMRMALAKFQDDDAAADDEEAASAVMEQAMTGLMDLTYRKAKPPELPYEFATRWPIPIAHDGTLQAEVMRDPVILPSGYSVDQTYQNNQKRQNPWTNTSTFTDHSLPYSLSVPNHLLRDMISAWCLDHSDLSPSTTSDTPSTPLEPSEEEQIQRILKLFSGNSASQREALKLIQLLTKTTKGVQPCLAKYADIIPVLINLRRKYKSSWTQDLEEERLTIILNLTMHRQNREILAGQNELAGAIKKIVKKAGNRGKRTSSLAKVASIVAVLSEFDMFRKRMLDAGGMKMLRGMLKIKDTEVITEAATAILALYADGEGEQPARFHEAPQMLLECHMFTDGILLLLDRLPKSPRVFRKICDQALQLVNIVMAEDASGPVTRKGILSAISLIYEIVERDVGKMNAVKNMEDFIERLRQLSSDRLPMQKMLQVERIIRTLSDAFPAPTVRGRCQEPSGSRLLA

SEQ ID NO: 37899 - protein, 200 aa, Oryza sativa
MASSAVVAACVVVVAAALLLVTAPGAAAQPGGASSGSGCNAGLIRLLPCLGFVGGNNAAPSNTCCANLGSMVHDEPLCLCQALSQSGGGGAIPVPVNRTRAVQLPLLCRLDLPPAATACPGFDLGGAAPSPPVSVPRSTPNSTAPSTPTPVTVTRAPPQQMTPSPKTSSQTPEYSSGLKLIADCVPVALGFMALVSALTF

SEQ ID NO: 37900 - protein, 470 aa, Oryza sativa
MALRPPRPCPAGVQQRQHDVDGAGNAKTSPEQKLELLDLQEEDDELIFLDADDEEGRQLREKLESLEREFCLLDEQRDNALFQIHVLEETVRFREELVRRLTAVTPLVVAQLDEVVDEHHAVVTLGDGCERKMCVGVAGSLDRGLLKPSANVALNGRSLALVGVPPSDVAACSAARFLVADADKPGVAYDDIGGCEAQKREVREAVELPLTHPELFAAAGVDPPRGVLLHGPLGTGKTMLAKAVARETSAAFFRVNAAELARHDGPRVVRDLFRLARDMAPAIVFIDEVDAIAAARQGGDDDDGGARRHVQRVLIELLTQMDGFDESTNVRVIMATNRADDLDPALLRPGRLDRKVEFTAPESPEEKRLVLQTCTAGMSLDGDVDLDALAARRDKLSAAEIAAVCRKAGMQAVRDRRGAVTADTSTRDTSPSSARSPATPPPSSTSTTDRRLRLATQLISLRLSLGKGIV

SEQ ID NO: 37901 - protein, 688 aa, Oryza sativa
MMEISSNEEMMEMAIVEQLPPSSHHLNGGSVEVDMEEDHVWPTKDGPLPIFLKFENVEYKVKLTPKNPLTAARVAFASHKSTEDQGSCKHILKGVGGSVDPGEILALMGPSGSGKTTLLKILGGRLSGGVRGQITYNDTPYSPCLKRRIGFVTQDDVLFPQLTVEETLVFAAFLRLPARMSKQQKRDRVDAIITELNLERCRHTKIGGAFVRGVSGGERKRTSIGYEILVDPSLLLLDEPTSGLDSTSAAKLLVVLRRLARSAARRTVITTIHQPSSRMFHMFDKLLLVAEGHAIYHGGARGCMRHFAALGFSPGIAMNPAEFLLDLATGNLDGISSPASLLLPSAAAASPDSPEFRSHVIKYLQARHRAAGEEEAAAAAAREGGGGGGAGRDEAAKQLRMAVRMRKDRRGGIGWLEQFTVLSRRTFRERAADYLDKMRLAQSVGVALLLGLLWWKSQTSNEAQLRDQVGLIFYICIFWTSSSLFGSVYVFPFEKLYLVKERKADMYRLSAYYASSTVCDAVPHVVYPVLFTAILYFMADLRRTVPCFCLTLLATLLIVLTSQGTGELLGAAILSVKRAGVMASLVLMLFLLTGGYYVQHIPKFIRWLKYVSFMHYGFNLLLKAQYHGHLTYNCGSRGGCQRLQSSPSFGTVDLDGGMREVWILLAMAVAYRLLAYLCLRKRISLMPL

SEQ ID NO: 37902 - protein, 336 aa, Oryza sativa
MIAMQDEVIPHLEAGMVPSTIDPDTAGNAERANRAKKQVKISAWKLAKLDTNEAMKAAARARASSSVLRPVDARHRGGHDAGDLSSSGNGSVRSSVSAAAKEQRRRASSLPSSCAQSVASQDEYEQSGSSVMSSPVRLHKLAPPPLPAAHNVPPRPPPPVNAAPEAAIPRPPPPVPPATRISNPMFQSATSYVRENRRASVVWDQEAGRYVSVAPAPATARPGGGGGGAEQPAARAPPFLANPGGEREPLSAARSRNNPAAPAPTNAAPSSSSTLPSERLTYSGQSIFFGGPLLGGAAAAGEPRRDEAAGTRARGGESFPVFAPGTFQKKPPPFRR

SEQ ID NO: 37903 - protein, 247 aa, Oryza sativa
MLSRSLRALVNVTKHSRLEVWPASLGTSSFTDENIALFLFPPKMRPDGKLDQLVKEVIEYDLALRAVMGKTEMLIFPSTMLPKQYQAFQGKHYLWGLFRPRKDIVGVAEEQAAHAMCLENQEGSKDGTEQVEFHGVPDPNMDTEPQDPEAAEMQDAADRNMAPPIGGSNASRANHPSMAATQPANREQIDPSLGIPQGRMFAFVAQPTPRFEQLMQELEREGALISTMPRVTYGPGCGQSQATTAKG

SEQ ID NO: 37904 - protein, 399 aa, Oryza sativa
MEEGKHAVVDLSEEEERRGGGAPGEGSSDEVGDAVGLGRGAESTEPEGSSAVDDAGHGVAAEVAKNDDLEEPLLEPEGVTAVGSGGGDGTASDGGENELHEVPKNPMATRFAFRATDANATPVSTYRGMLSRSRKNAGPTRFVSAGAPPSADPETPALSTSSSELVKSSPENASAVPDADHGASPGRGNEQDLEAAEKQSEARFVSGHTAANAMPPSTFRIRPSRSRKQSSPTRSILREADPPLPAPDAAAAAAAAAESSHREPSRSKKQPRPERFIPEEGEAAARAKACRSGIALDRFITSQLNNPSGPSTEWEREVTAADVVGGGQGEECTTSDQSSCSIAISDSGPPEEPLPDDRRRIYSVLAVLGVSLAVSMAVLALFYIFGSESPSPPSDPNQE

SEQ ID NO: 37905 - protein, 533 aa, Oryza sativa
MLSSCAPTAVPPQDASGAATEPFRSLQIATAGAAAKKKRRPAGTPDPDAEVVSLSPRTLLESDRYVCEICNQGFQRDQNLQMHRRRHKVPWKLLKREAGEAARKRVFVCPEPTCLHHDPSHALGDLVGIKKHFRRKHSGHRQWACSRCSKAYAVHSDYKAHLKTCGTRGHTCDCGRVFSRVESFIEHQDACNAGRPRAAEASSSPGRGGGVVVGAPAAASSSQQQQLFAVPASLSRTASSASPSSDLVVSPVAWPATGGGGPAMVSPRAAAPAPAGGSIAAFHHRFTDPALSPPTPCGGRRGGCHTTHSLELQLMPPRTTTTCAGGSLGGTPVATAVGYYASSSPHSPAAALPSRQPVADAMRLQLSIGFGGARDDGNNNSSSSSGEVSASATRLKEAAHEQLRLAMAEKAAADEARAQAKRQAELADQELATARRMRYQAQVELSRAHVLRDHAIRQVDATQLQITCYSCSHKFRARAAAMISSDVASYVSSVVTEGGDAEVDNDGNLHRRRLNADDGMPRGHSRTMAMDLN

SEQ ID NO: 37906 - protein, 324 aa, Oryza sativa
MAATGVLVVVVALVFAVTVAGGGGAGVGGDGGFITWEDLSMPAGAARSSTWDDTAGGGGGKRSGGGGGGEQRTTIVVSPDGTGHSRTVQGAVDMVPAGNTRRVKIVVRPGVYREKVTVPITKPFVSLIGMGTGHTVITWHSRASDVGASGHQVGTFYSASVAVEADYFCASHITFENSAAAAAPGAVGQQAVALRLSGDKTVLYKCRILGTQDTLFDNIGRHYLYNCDIQGSIDFIFGNARSLYQGCTLHAVATSYGAIAASQRSSPSEESGFSFVGCRLTGSGMLYLGRAWGKYSRVVYSYCDLSGIIVPQGWSDWGDQSRTK

SEQ ID NO: 37907 - protein, 512 aa, Oryza sativa
MAAGVLMTKPFMAAASALACLLVMLRCLPSVVATTVSFNYSTFSNAKNITLQGSAAFAGGGCIEITTGSNLPSSGTMGRVAYTPPVQLWDAATGEVASFTTRFSFNITPTNLDNKGDGMAFFLVGYPSRMPDKGDGGALGLTSRYFDTVQPGENRFVAVEFDTYLNRDFDPNATYDHIGIDVNSIRSVQTESLPSFSLTGNMTAIVVYNSSSSILSAQLVKTWTNGSTTLYNLSTTVDLKSALPEKVSVGILAATGLSLELHQLHSWYFNSSFQQNPPPAVQHSPTTSGSGLAGVIAGATVGAALFVVLLFAMVVVLVRRRRSKKRREVEEAEEARHVGLARDDDDDDDGEPIVEIEMGMGPRQIPYQDLIEATNSFAAEEKLGQGGFGAVYRGYLREQGLAVAIKRFAKDSSKQGKKEYRSEIKVISRLRHRNLVQLIGWCHGRDELLLIYELVPNRSLDIHLHGNGTFLTWPMRVKIVLGLGSALFYLHEEWEQCVVHRDIKPSNVMLDE

SEQ ID NO: 37908 - protein, 103 aa, Oryza sativa
MLSGRGLPVDLRLVGGLLRCLRRHSAGRHLLPLGEASLRMLVLPCGRSFVESSAGALKAVLRSLLPCLVLAVAGGLRLPRSGGLRHRSRRGTGSSAVAVAAED

SEQ ID NO: 37909 - protein, 482 aa, Oryza sativa
MAVAAAAAARRRDVSCLLLLLCFSSSMAATGGGGGGGEQEADRVARLPGQPASPAVSQSAGYVGVDERHGRALFYWFFEAQASPAPEKKPLLLWLNGGPGCSSIGYGAASELGPLRVARQGAALEFNQYGWNKEANLLFLESPVGVGFSYTNTSSDLSNLNDDFVAEDAYSFLVNWFKRFPQYKDNEFYISGESYAGHYVPQLADLVYERNKDKRASTYINLKGFIVGNPLTDDYYDSKGLAEYAWSHAIVSDQVYERIKKTCNFKNSNWTDDCNAAMNIIFSQYNQIDIYNIYAPKCLLNSTSASSPDRAFFANNQEQFRWRIKMFSGYDPCYSSYAEDYFNKHDVQEAFHANASGLLPGKWQVCSDQILNSYNFSVLSILPIYSKLIKAGLRVWLYSGDADGRVPVISSRYCVEALGLPIKTDWQSWYLDKQVAGRFVEYHGMTMVTVRGAGHLVPLNKPAEGLMLINAFLHGEKLPTSR

SEQ ID NO: 37910 - protein, 89 aa, Oryza sativa
MSSGRFSSQPRCPPPRGGISGRGSAQSLIRSGISSRSRSLLSLSLSIELPRSRPRLPLEVRRDSVVTMWSVVPRGVSCLQSPDLRLPRC

SEQ ID NO: 37911 - protein, 508 aa, Oryza sativa
MEAVGGRRRRPRTMLFLVLVALMVIMAMAKTASGGGGDDGGAGGDHDHDHEQFLKLWNGRGGADAKEDYLNWDDDDDDDEDEDEEEEEAEQVMAWAAKCRPPAGRNVVNVDSFGAAGDGCSDDTEAFLNAWKKACSLNNAVFLVPGGRRYKVGAARFIGPCKNRMIIQIQGTIVAPDEPSEWDPASPRLWLLFSGLAGARIQGGGLIDGSGSKWWANSCKIDRSKPCKGAPTALTIDSCRGVSVRNLRLQNAQQMHLTVSRSRDVRLASVRVDSPEDSPNTDGIHVADSTAVTIQSCRIATGDDCISISNGSFAVRMRDIDCGPGHGISIGSLGQGGAFAAVDGVSLDGARVARAQNGVRIKTWQGGAGYVRNVRFAGVRVDGVDHPIVIDQFYCDATRPCRNRTSNVRVSGVVFRNITGTARRAEAIRLACSDAVPCVGIVLSDIDLRREDGGGEVQTVCNCAMGFDDGRVSPAADCLRTSPCGGMSPDDYHPDDKDDDDEVRHTEL

SEQ ID NO: 37912 - protein, 335 aa, Oryza sativa
MAPSHLHRRLPPHPPPPPAHPPPLDRYKCNEEFLLGIVSLDRRAAAARLQPVAQLDDTCYMMSADASCDGLLLLSIGGIWWFICNPITRQFGALHLLCGFMVMGFYKHPPTGDYRLLLYRNQELMSEHLIPGDRNTCYVYTLGSSDVPRCIGWPETSASGATVVLHCSLHWYQRSQDMILVFDTTAESFRWMRAPSDRMKCTLDSGNLFDMDGKLGMYCSNDGCTIVDIWVLQDYKREIWSLKYQVELPVPEIRGMLGGAYHWSAMVLSQEGDVLVLVSCDRWLFYIDTEGNLLASFQHYGDGLFTIGLKLKPSLVQHAFFPLLDSYAVNASPFI

SEQ ID NO: 37913 - protein, 350 aa, Oryza sativa
MTSRTHWFSWPRCPSSPARTTPSSGGDDAKGKGKMPEFAEEDVLTGDEEDVLTGEDVFLGKAKKVEFAGGKDDGDNDINWQDVLLLWPSSSSSPWELTKTANLPNQWLDDESSFVADLTFSFEGHGFWADLLCGVLFCSCDDLLSDKVDRVDFSFINLPMGYQADVRYTGQVAAPEVYRTMGYAGGSIRFISIDGFLEYINPGDRYVTLWRLLLKSNTWVKEYEISLKELWNQQEFCNANLPMSMTPMYPILSSLEEHIIYFMLGEFNQDRDGIAFPVGAYYLLQVDMSCGRIVSSAPLPSACSLAPVVGGSDFISYLPHDTLYDRDVLSSVVSQSMSGCYQFGPATGLV

SEQ ID NO: 37914 - protein, 204 aa, Oryza sativa
MTPSLLAFSSSSAARRPAPPPSAQRRGAAAPPRAPRRLPLRRNDEEQPRLHEPHLASPSCATTGSSHAAASSPPPRGRFTASGPTTTTWWTWPSPGRMGTAAAEAEAGGYAVSVEVPGARGREGGLVLRASGFGEGVPLAPAAGGGSLAAELSFDAPRVPVGVGPGSPAPLGMSISGDGAVNFAAWKGEKEGKRREREGKKSRG

SEQ ID NO: 37915 - protein, 360 aa, Oryza sativa
MASSSSSIAATNPLVGIQVSEKLTKQNYALWSAQVLTALRGARLEGFISGKTTPPPAEIEKKEGDKKEGEKTIKIANPAVDEWFATDQQVLGFLFSSLSREILSQVAGATTAAQAWQAISDMFASKSRAGLINMRLALTSTQKGTMSVTEYVAKMRAIADELAAAGKPIDQDDLIAYIINGLDANFDPVVEALVARVEPITVQEMYSHLLNFENKIRLRQAFLTASTNAANRNNVTRGGRGGMPRGRGGRGGGGRGGNGGRGNNGGGRGDNRPTCQVCNKRGHVASDCWHRFDETYVPDEKIGGAATHAYGIDTNWYVDTGATDHITSQLDKLTTKEKYQGTDQIHTASGEGQGHEENNS

SEQ ID NO: 37916 - protein, 175 aa, Oryza sativa
MMDGWNGSLVEDVLHDAGDVDPVEVVVPVDVLGVEVEEGGGGGRRRRGHGQPKLLHVEVVEAGLEEGEGAVEVDELHDEGVLAGEVGVAADEEEAEAEEGEEAEELEGERVGHRHERPEGGDGAEEVDGPRAHRHPVLPHPRVLQEVAPPRPVQHRVRRRVPHRRRHVVHRHLRR

SEQ ID NO: 37917 - protein, 144 aa, Oryza sativa
MKLLPSSPVISAGADSVFEMVEAFGVSHYDLPVRDLRDVLDGIMAITTDPEVLYDHKPCSWACVQQTEGDGQPLAVVAELLFLHFLLQIVQHRDLRPTQERQHRQVAIQGYCLLYFLQAPASCYSDSLKVEQPKWQRLAQLSLM

SEQ ID NO: 37918 - protein, 610 aa, Oryza sativa
MGVFSSAPKVYKPASEVNLGADSNEFYISPNVKAPRVAGLLVKIFAWVLEAPIIGSIVLYILKRDNLVNKLVSDAEIPEPPLFTAAHTWQDIPEQNVSLTKPDMSPAERVQEAVVCLPARLESVLADPPSPGFRRWTIRDFTSAYISGEITPVMVARRFLAAVKECSGPDLNMALFISCNPQDVIRQAEASTLRYQQGAPLSAMDGVLVAVKDEIDCLPYPTTGGTRWLQRMRPCVQDAAVVAQLRACGAVLAGKTNMHELGAGTSGINPHHGSTRNPYNTGKVAGGSSGGSAAVVCAGLCPVALGADGGGSVRMPAALCGVVGLKPTAGRFSKDGLLPLNWTVGMPGILAATVEDALIAYAAIADQSQPSHLQPELNLPLLKAASSMPTIRLARYAKWFNDCSEDIRSCCYKAVHTLRTRYGWETADVTIPEIEEMRLAHYVTMGSECTASFDKYLKKLSKSEIGWDVRIALSAYGSFSSRAYLNSQRIRNRQMYFHDKIFETFDVIVTPMTGVTAHELQDNAGHTGELDYINGAALVRYSIAGNFLGLPAITVKVGYDREGLPVGLQFIGRPWSEATLLHLAYAMQEACGKNYRKPMVYYDLLNKNKY

SEQ ID NO: 37919 - protein, 197 aa, Oryza sativa
MAATAMDHDGGEVVTPGELLGNSSLLAGLGAYADGRCVRASITGHRRLVPPPPGSTDQRSTVEVVGHKAHGAVPQPGSVAIARVTKVMARMASADIMCVDSKAVKEKFTGMIRQQDVRATEIDKVDMFQSYRPGDIVRALVLSLGDARAYYLSTAQNELGVVSAQSITGGTLVPISWTEMQCELTGQIEQRKVAKVE

SEQ ID NO: 37920 - protein, 429 aa, Oryza sativa
MSLPDLFEKLLGDDQDSWPAEANLLLAAHDGNLRRIKEIAATLDDDGEGIAATVARTAFHGMNALHAARSLHVYRYLLEVANMDVNKPDTTPGRKTPLERAIAGGDLPSVRYLIDHGADIHHEREGNITFLHSAAKKGRTEIVKLLLSRGAHVDGKSDHGTPLHFAAIKGYESTVKILLEHQADPNKVMPSSQATPLSAALFTTSLPCVKLLIQAGADVNATNNPLARAAGSGLTEAIKLLLKAGANPNCPDTHGRMPIELAAVYGTREDVEILFPLTNPIPTVADWSVDGVITYANLERKKLEDDDYVNTKMSDLKQKGNEAFDEQDYEKASVWYTQALEVDPCDATTLLKRCLCWLRMGEGKKAVKDATTCAKHHPKLSEAYHRLGEALMLEKDYEKACVALTHGIELDPESDEMDKLFWEAMDLKN

SEQ ID NO: 37921 - protein, 372 aa, Oryza sativa
MSHRTPGSDTWELAVRSKQLWEELAAEVDGLGGGGARERLGWMRTGSLLVGRTSEEMATLEERTKALSQAGIRAECLSAASLHALEPELYVGHDGGAMFLPEDCQIDAFQAVSLIEKTNGSYSSEGRYMEIYNDPAMSLVRSETTGTVQGVQTSKHILYGRKAIVIASGAWTRTLLRSFLEPNPTLDIPVMPRKGHLLVLDKFDKLKLNHGLMELGYVGHQVAKSSGTPLSSESSEDEHGALSISMTATMNTKGNLILGSSREFKGFSREVDMSILKCIWDRAAEFFPTLKNVHLDIDENTEIRIGHRPFMPDGKPVIGSVPDLPNVLIATGHEGSGLALALGTAEMVTDMILGNPGKVDFSPFSIKDRFSG

SEQ ID NO: 37922 - protein, 261 aa, Oryza sativa
MEDFQPCSLQSRSSPLPPSDPVTVAVEEKLNVAVKRDGGVNNFDVQGTLALLVLNDADGLILLQIESQDIPGLSFKTHPNINKDLFNSQQILGAKDPIRPFPSGQNETPLVKWRIQGMNESSLPLSVNCWPSILGNETYVNIEYEASEMFDLHSVIISIPLPALREAPRVRQIDGEWKYDSRNSVLEWSIILIDQSNRSGSMEFVVPPADPSMFYPISVGFSASNTFSNVKVTGIRPLNEGSNPPKYSQRVRLVADNYQVV

SEQ ID NO: 37923 - protein, 507 aa, Oryza sativa
MAHTSSQKHGNDDVDTGAEAAMDQLAGRSSLSPAREKTRRRPEKSGTVWTATAHIVALLVGSSVLAVAWTFAQLGWVAGPAVVVALSVVTYYSSALLADCYRDDDPLHLGGGAVHGEYIAAVRSYLGPKSVTFCGIIQYGVLWAAMVGYTITSSSSMSAVRRVNRFHRNWLAAGDGDGGGGGGGATGVRYMVVFGAFQLLLSQLPSLENVAWLSVIAVATSFGYSSICLGLCAAKWAYHRGGVRGTLAGAAAGSPGEKVFNVLLAVGNIAISYIYSPVLFEIQDTVRTPPSESKTMKRASLYGLAMSAVFYLVLGASGYAAFGDDAPSNILTGAAFHEPFWLVDVANACVVVHFLGAYQVIAQPVFARLEAYVGGRWPESRLVTASYELRLRVPAWTSAPPTAVTLSPARMALRAAVIVATTAVAAMMPFFNAVLGFIAALGFWPLAVYLPVSMHIARVKIRRGEARWWALQGASAALLVVAVGMGVASVRDMVQRLNEAAPFKTTG

SEQ ID NO: 37924 - protein, 515 aa, Oryza sativa
MALLSAPVRRRRSRVRVLLVCCCLLLALAAPSAAAAAAGHDYGDALAKSILFFEGQRSGRLPAAGQRAAWRGDSAVSDGGAAGVDLEGGYYDAGDNVKFGFPMAFTATMLAWGVVEFGDAMPPAERAHAADAVRWATDYLLKTISHPGVIFIQVGDPTKDHGCWERPEDMDTARTVYNISAARPGSDVAGETAAALAAASMVFRDDDPAYAARLLAGARSAFEFADEHKGAYSDDPELRAGGCPFYCDFDGYQDELLWGAAWLRRASKEGTYLDYIQNNGKTLGAEDSTNEFGWDNKHAGINVLVSKEFIDGEVLSLQSYKEFADGFICTLIPESSSPHITYTPGGMIYKPGGSNMQHVTSISFLLLTYAKYLSNSSRTVNCGNVSVGPATLQQLARKQADYILGDNPMKMSYMVGYGDRYPQRIHHRGSSLPSIKSHPQRIACNDGTPYYNSSSPNPNPLIGAVVGGPGEDDVYEDDRADFRKSEPTTYINAPLVGVLAYLVGNPDPGQGHVRH

SEQ ID NO: 37925 - protein, 102 aa, Oryza sativa
MTLSLFFLYLPIDDPATCFAHDEKDFESNETVWALYERWCSFHSAEHDHDDMVRWFGCFKDRARRIIEFSKSSKPYKWGVGAWGLNIFDDMTPEELFEFGNN

SEQ ID NO: 37926 - protein, 225 aa, Oryza sativa
MPKTQRRPGCCVLPEGTKLTLAHDDHGVAAAAPRFIIYKDKADAVPSNLRAMDAILAMFGILPGSDKAAQVADTLRTCGELTAAGGEEPRHLPRGGARLRRLGAGHQRAARGHHARAREGAPQVRGSGRRRRPDRRRRRGGVPPYAISIRGVLLPPASRRGGAEGRPPRRRRRGPGRRHCRRRVPRQHHHLGQCLLRAPQGKPWRRHLPLHAAGLCSVASQLRRY

SEQ ID NO: 37927 - protein, 269 aa, Oryza sativa
MRSPAALLPVVADGGGGVGVEEEMDVDEDMAMCGGRGGGGGEKKRRLSVEQVRALERSFETENKLEPERKARLARDLGLQPRQVAVWFQNRRARWKTKQLERDYAALRQSYDALRADHDALRRDKDALLAEIKELKGKLGDEDAAASFSSVKEEEDPAASDADPPATGAPQGSSESDSSAVLNDAEILPHKPAPAAAADAAASEETEAVVTGAALLHHAEVFFHGQLLKVDDDEAAFLGDDGAACGGFFADEHLPSLPWWAEPTEQWTT

SEQ ID NO: 37928 - protein, 195 aa, Oryza sativa
MVLVVPEGSHAVRLGNEASIRQRLAGAARGARYALTFSAARTCAQAERLNVSASGQWAVLPMQTMYSSNGWDSYAWAWDAAADAFDVVIHNPGVTEDPACGPLIDSVAIRTLNPPRRTNKNLVKNGDFEEGPYIIPGTRWGVLIPSMVVDEHSPLPGWMVESLKAVKYIDSDHFAVPRGRRLSSCWRGGRARSRR

SEQ ID NO: 37929 - protein, 155 aa, Oryza sativa
MVDLLDFGSGAGALAVRVDTMFVAGFANRSGHWHALRGSDHLFHRGDHHHQRARPLLLRPIARAVLEASRMGRAPAGEQARIADEHLPYIEHWDAMWHELGRWRRRGEWGGPFTGVLRERANIGSAEEALAVVGWTFRQSAKAARRRLGGGDVPH

SEQ ID NO: 37930 - protein, 159 aa, Oryza sativa
MQVVGTAAAFSPAVTPSPARRRAVDSGRRFSRSCRSGRVSVSAVGYSQLEVRRVSYRPPGTEQNLLNEISLNLKEKSFGLLFGRSGSGKTTLLQLLAGLSEPTHGTICIQKYNDSGNPMGPPELLTAQRVGIVFQFPERFELPLSPLSNINSISLYMVS

SEQ ID NO: 37931 - protein, 398 aa, Oryza sativa
MVCCWAEDPNSDAFKQHLARVPDFLWLSEDGMKAQVYDGCQSWETAFIIQAFCATDLVNEYASTVQRAHEFLKNSQVVRNHPGDQSYWHRHRSKGSWTLSSADNGWAVSDTTAEALKAVLLLTKISINVVGDPIERERLHDAVDCLLSFVNKDGTVSTYECKRTSTWIEILNPCESFSNMVVDYPYPECTSSVLQALVLFKELCPGYRTEEIEKCVRNATMFIENTQGEDGSWLGTWGVCFTYGAFFSVKGLIAAGRTYENSSSIRKACDFIMSKQLNTGGWGESHVSNETKISPLLFFYNIKQVYVNIKGDHAHAVNTAWAMLTLIYAGQMERDPAPLHCAAKELINMQLETGEFPQQEHVGCFNCSLFFNYPNYRNLFPIWALGEYCNRLRSERRA

SEQ ID NO: 37932 - protein, 810 aa, Oryza sativa
MAFCKPCLVFYSVLTFLILNGGPSHVLAKVFMVVMEDDPIISPKSSQKKVMRGEEAQKYKAMTTTKHDIFLDSFLPAGSYKKLYSYTHLLNGFAIYAKSEKAIKTLSGAKGVRLIQEDIKMAKMTTYTPRYIGANVVWPLLGGAEKAGDGVVIGMVDTGIDPSNPSFLSTSDQAKPPPASFKGTCQTGERFPPDSCNGKIVGARWFARAGQATGEFNATMHYASPYDPDGHGSHTASTAAGNFHTPAISKGYNFGHASGVAPGAHLAIYKAAYSFGGYMSDVIAAVDKAVEDGVDIISLSLGPTTITSGPASFLNLLETQLLLATKAGISVVQAVGNGGPDANSVVSFSPWITSVGASTTDRKYNKSIIIGNGQVFSCGGLSPSTPGETMYPLALADDVCNTNSTGGSSNCQDPDVFIRSLVQGKVIICMFVSSNYYEGDFLAGIVDTIQKIGAAGVIITDRSSSDSDIEYRPTFPTSIPSAIVVNSADAQALLEYYDDNLVRDKEGSVTKFGATIRILDGRRAIYTREAPVVAEYSSRGPDVDDMQMQAADVLKPNVMAPGHHIWGAWSPTSDAMVEFQGEGYAMLSGTSMATPHVAGVVALIRQRHPKWSPAMVMSAIMTTADVTDRSGRPLMARRDGGVLERATPFDMGAGAINAARAVDPGLVFDAGYRDYLQFLCAVPGVDDAAVLRAVGVPCPPSRARWCSDLNAPSVTVASLVGSRRVDRRVTSVGAENETYMAHVQAPDGVAVRVSPDTFAVAPGATATLRIVLNTTAPGNTFSFGEVVLRGDKKHTVRIPLAVFPAAALSP

SEQ ID NO: 37933 - protein, 415 aa, Oryza sativa
MASLAVPLRASATPAIAGTGSGGGSRAADPVKVSCVRSKVTCGFPSVGASSSLASSVEPVRATATQAPLATHQSSSTEKTKVGINGFGRIGRLVLRIATNRDDIEVVAVNDPFIDAKYMAYMFKYDSTHGPFKGTIKVVDESTLEINGKKISVTSKRDPSDIPWGNFGAEYVVESSGVFTTTEKASAHLKGGARKVVISAPSADAPMFVVGVNEKNYNPSMNVVSNASCTTNCLAPLAKIVHEEFGIAEGLMTTVHATTATQKTVDGPSMKDWRGGRGASQNIIPSSTGAAKAVGKVLPALNGKLTGMAFRVPTPNVSVVDLTCRLEKSASYEDVKAAIKEASEGSLKGILGYTDEDVVSNDFIGDTRSSIFDAKAGIGLSSSFMKLVSWYDNEWGYSNRVLDLIGHMALVNAKP

SEQ ID NO: 37934 - protein, 286 aa, Oryza sativa
MTTDHAGKKVDVVVVGNVDGEHVGVEQARHDLHEEAAAAAAADHHATRGLAIGFLIREVMVEGLASFLVVFWSCVAALMQEMYGTLTFPMVCLVVAMTVAFVLSWLGPAHFNPAVTITFAAYRRFPVWPKLPLYVAAQLAGSLLACLSVNAVMRPRHDHFYGTAPVVVHGTRLPFLMEFLASAVLMIVIVTVATDGTAGKTVGGIAIGAAVGGLGLVIGPVSGGSMNPARTLGPAIVLGRYDGVWIYVVAPVAGMLVGALCNRAVRLSHRIVAFLCGTSVGIAGSP

SEQ ID NO: 37935 - protein, 257 aa, Oryza sativa
MSEARHGAVGGEQAGGGEAVVAPQRGHGRPDVELVDVVGAVRLTDDAVHVAGERVELERQVEVGEAVVAGDAVPVHPRVLGGDGHGVGPQLEPPVERHEHAVRRLGARHGQRRHGGGGPGGAGVLREEHRLAVDDDLEAVDVVVPGGGLPGADVEAVGAAVVEEDGNGLDPGEVARHAVGAALADEVRVDVEVAVGDDAEVGVPPAMEVEGVAVAADEPRVAARPRHVAHCTTTESIRQRQDGGATTGGEMLRTSSW

SEQ ID NO: 37936 - protein, 308 aa, Oryza sativa
MLFNIRTEQCLFLPDTVPRPWSSDDFPMIMLAATVSSPPSRGTDDPCIGAAIVHCTPFITDSRQITFWRMGSHMAIPSIPPDHQFDVVSNQFVVEEMEDVIYHRGAFHFVTKLKNVFVCRLALHQADLVVDHREWLMFAPQDDLGYPRPVATARYLVESREQLLMVLKCTCNLPGWPPLVFSVFEMTHVQAPAGAPQYVWTPVPTLVGRMLFVGHGCSRSYELANFPGFQEGIYFLDDLQFYSVSRIVQYQEYLCFDNGKYTLGPPHVASRCFWPDQVNSNYSSPVWLLPGGEDDANNAQAQVDVHMM

SEQ ID NO: 37937 - protein, 69 aa, Oryza sativa
MQLRAPPPAVGMPPDVSLVAVCLEVSSICVRSCAAFFQATNVAAWTNSFPHFFSGKIQMYMFHFFPDLN

SEQ ID NO: 37938 - protein, 451 aa, Oryza sativa
MAHNDEASSSRSTTSSAAQPSPPSRLAPASAFASPMDAAAPARDFMAEALRLVHNRLTCLVDRRTMARVCHDWRVAVKPLQHAPHRRPLPWILVPRADGPSFSCALRGCGGHGLGVPHDARAARCFGAYDGGWLFLAFRETFRHKLLSLRDVQLRLRLPFFVRPDMTAAELGRPVPYIGMVMLAATLSSPPEDEDCVGAAIITYGPYEAGRRTHAFWRVQSAKAFPDQAAAMGHGSDAIDEPALEDVIHHKGAFLFLITEEDLHVFAVRDFHEDGKGNMKMAPRAIRRFSRGGRDYGGDIVVRYLVESRGNLLMVVRRVPDRLHAPPRTSAFKVFEMVEPPSGTRIEALYAWNELESLGGRMLFVARGCSRSYDAGDYPGDEFGEGVYFLDDGRLYRESAVFTARRRRRRYPCRDTGKWLPAADAAGVPRVDKFLPEQGPSDYSPPGWLLP

SEQ ID NO: 37939 - protein, 208 aa, Oryza sativa
MEEVVVGGKERKRPRGALDCSFALPAAASSPPPPAADDAEVSTSETSKSSVLSLPNAPCDNGGGAFAELLHCSNTNGSKPLQQQQQATLAYYAAAQSAHMAAPMSFEVMAMPPHLAFSQEQQQHATVAAFDRGTLQSNASLWPPPPQPPPSQHPFLLQRFAAAPAEVAGLPFFLAGGVGGAAAAAPAATTNGGERRLQLWDFKEERKT

SEQ ID NO: 37940 - protein, 509 aa, Oryza sativa
MLTCGRFLSSSAAASTPSLSPFRNLTLSLLRRPHLRLLSSSATASAAAAAVEPDTKGGAGGGAAKPQWKAAINFKWIRENTDAVAANIRDRNSAANLDLVLQLYDEYLALQKEVERLRAERNAVANKMKGKLEPSVRQALVEEGKNLKEGLIALEEDLVQLTDKLQLEAQSIPNTTHPDAPVGGEESSVVRKEVGSQRNFNFTIRDHLQLGKELDLFDFDAAAEVSGSKFYYLKNEAVLLEMALVNWAITEVSKKGFTPLITPEIVRSSVVEKCGFQPRAQNTQVYSIDNSDQCLIGTAEIPVGGIHMDSILPDSDLPRKYVAYSHCFRTEAGAAGAATRGLYRVHQFSKVEMFVFCRPEESDKRHEELITIEEELYASLGLHFKTLDMATGDLGAPAYRKFDIEAWMPGLDRYGEISSASNCTDYQSRRLGIRFRPSPADPPPANAKKGKGSSGPTQFVHTLNATAVAVPRLIICILENFQQEDGTVVIPEPLRPFMGGLEVLSPKTK

SEQ ID NO: 37941 - protein, 423 aa, Oryza sativa
MAAVDDDRWEDLPTDLLTEILLCLPPISGRRRVRLVCSRWRDAVDELEPETTHSRAKPLTFLKRSVDSGRPATARVFDDLAGGGLGGSREIWNGGGGGDGVSGSSPDIVGTCNGLLCLWHCGSDSGGEITLVNPVTGESLAIPPPPPPSPRWRSHTTEGPEAERLSFAYHPLTGRYSIVHFPAAFCDGGGDNLADPAVEVLTLGGAGASASWREVAAPPGSRCCLALGIVSVDGATYWVTKDGRIMSLDHEHERVTAVLPLPPAIAGELDSWWSTRLTEVAGRLGVAITSNHTTPSKYNVEVWVLDGARGKMTWSHRYTIQDLQFSYQEIAWPHFAYGENVLTILDSDHPRNQLYTHWLWPHKNRTSVATGDVVKGTLVEEFVIDPENVKILSLIDPEIHVNMFSYVETNEPLNIYKEVCMDS

SEQ ID NO: 37942 - protein, 522 aa, Oryza sativa
MDNAAAVATFMEITSCGSQEAAVQHLASCRWDLDAALNRYFIFGGVLAAAPTPAPVADVAPPAALDDGVRAPIPARSDTLYGDMYGGARRRDRNSRPAPSVWEDEPPAVTPSVAPVYIQMPSANPAVAPVQIQMPSETAASVPAAPVPVHAPSQPPVVAIAVKKEQNEKDEEEDNGRDDDDDGYSDSDYGMDTDDDDDRYDECIEKTPSPPPKSTQQQATTLAEMYRRPRELMHDADFHSTKVHAARQDRWLLLNLQSAGEFASQMHNRDLWADQVIARVVRESFVFSLLENSYGDDDDEASKVCCFYKLHDQLPAVLVIDPITGQMLAKWSGVIQPETFLVDIEEYSKSKPSMRSKPYIFQRKPMPVRSAPAASEQHHQEPAMVDTAAPMDIHNVQEPDTAAPAPAPVVEHGVQQPATAGAGAQQPADEQDDDDQPMEGEKMYRMRVRFPDGSVVTKEFGCKRRVAVLFNYCRSVLHDKPQAFKIKRLLGVGGAFHELPQGDHSFEDLGLNCATVSVILDT

SEQ ID NO: 37943 - protein, 586 aa, Oryza sativa
MAPPLLDLPSHCLLPRLRRPTSGRLLLHLRLKPLSSSSYTTTTTTTTSSSTSSSRAPQVPPSLHGPSLRRGRRLPGETDGLLSFARIFDLAALRVPAAACAPLERRLRGHLLNWSRVRNVVRQPGDDGGLLFPVPHPSLATPSSLPTAVARREKLAREFNARGFVQFPNLAKMSRPPARKRKGKKDEGGGEAAATARDTKDKVYVVEVIGERKEEHGDEWMGLVGEEGFGRITWRGGPTRLLLLDENYANKRVDDLPEAVKVLLDHETNKDGSSSYELVQCQLTLFYNYWPMNEILEEILPEGIIVPTGFETVGHIAHLNLRDDHLPYKKLIAQVVLDKNKPKIQTVVNKIDAIQNDYRTMQLEVLAGIDSLVTTVIESGLRFQVDLSTVYWNSRLSTERQRLVDHVFKNSDVVCDVFSGVGPIAISAARKVKYVYANDLNPTAVEYLERNIVLNKLERKIEVFNMDARRFISSIYSSQHVHPVTQVVMNLPNDAAEFLDVFRGISWNHHLAVPSCVMPNIHVYGFSKAEDPEYDFHERINLTLGENVSDVEMHRVRLVAPGKWMLCASFTLPVSVAFAKPNYIAC

SEQ ID NO: 37944 - protein, 449 aa, Oryza sativa
MAAQHDMVSKFGAAAIVVMLMLVVPNSGSGEDAGHDKDQLAPMSSEAEFGFSLPIVHGRPPAPGMDDEKFVTPFRIYEDVVYLAEMEIGERQQKQYLLIDTGSSLVWTQCDECPHCHIGDVPPYGRSQSRTFQEVSCGDDDDNDKEEAIASYCPAKSPGYITLCVNGRCMFKALYNLTGQGETVQGYMSMDTFHFIDDRRFDYQAKFRMVFGCAHQENIVLTAVKECTGILGLGMGDASFLRQTGITKFSYCVPPRMPGYSYRRHSWLRFGSHAQISGKKVPLVMRWGKYYLPLTAITYTYNELMSPVPIIAYKSQEDYLHMMVDTGTSLLSLPTSLHDDLIKEMEAIIKSENIMEGATRWPKHCYKRTMDEVKDITVTLSFDGGLDIELFTSALFIKTETTKGPAVCLAVNRVDDSSKAILGMFAQTNINVGYDLLSREIAMDPIRCA

SEQ ID NO: 37945 - protein, 119 aa, Oryza sativa
MILLFLLNAALGPARASLQATFLRRVAPHVSTPDRIIRTALRCGGPRPPRVCFVSSSPASTWARATWSSSHSSVALFDLPLLLATDSAVSLPASAAPPRDTSALHASSLPAAAACISGV

SEQ ID NO: 37946 - protein, 267 aa, Oryza sativa
MKQPRAAGVVRRDSTSDGHEHAVGYVTGDQFYGAKASLNVWSARVATAAEFSLSQIWVISGSFGNDLNTIEAGWQVSPELYGDNNPRFFTYWTTDAYQATGCYNLHCSGFVQTNNRIAIGAAISPTSVYNGRQFDISLLIWKDPRRGHWWLQLGSGPLVGYWPSSLFTHLGGHANMVQFGGEVVNTRPSGSHTPTQMGSGHFPREGFNRAAYFRNLQVVDWDNNLLPAAALRLVADHPSCYDIQGGYNRAWGNYFYYGGPGRNVRCP

SEQ ID NO: 37947 - protein, 546 aa, Oryza sativa
MMNSWEWYRSTAAAGTGAGALLEQRRASARSATVPFLPMRSREPAEPMEWTSCAKQRRDSENYAWSTPARAACHAPAAISDSIKEFLIRSLSFSSLRGMEPSVISRQCINSTRIRKIAAKTAEATSAVKKNCETIKTESINKLTEEALRIWKSGSYLHADEDGRSVYIGSLPRAGGDSRHGTMWAVEPPIDAAAPLPQYARLRAAYGRYLGTPDSYGSPLPFLPVDAAQRDRDRVEMDAIMWQPVACSGSDVVGGRDARGVVLLRDRYGRYLRGSNNLLAPRRSVPVKPYVVNEHMFRWEVVRVPLSEARPELPIAAQSGFVAACFPPLLRVIEFVGEDDLDNIGEGEIWTTVETRGRSVRLLKEKIAKLVGYEDFTMCVSAGRHGQFTPLLMDANFEGEDTLLWEVVRVPPSGDMPGLPIATQPGFFVRACFPQPLREIQFVDEADLDNTSEGEIWTTVEIRGRSVRLLREKIAELVGYDDFTMCVSAGRHGQFTPLLIDLPRSRETLNIVLLRTNSEANDQMIFPNPNALPSAEATDEDNATIE

SEQ ID NO: 37948 - protein, 441 aa, Oryza sativa
MFVKSETKTRGGLTAWFALTSVYKSEQFKSMAIAYTSPTAAILCEDAFQSMYAQMVCGLCQRHDVVRFGAVFAAALVRAIRFLQLNWGQLAADIEAGELGPHVADPSVREAVSGILRSDAELAEFVRIECSKGDWAGIITRIWPNTKYVDAIVTGAMAQYIRTLQYYSGGLPIVSTSYASSECFFGINLRPVCDPSEVSYTIMPNTAYFEFLPVGEVVDATNLVDLARVEVGREYEVVITTYAGLSRYRVGDVLRVTGFHNAAPQFRFVRRQSVLLSVELDKTDEAELHRAVERASSALLRPRGVSVAEYTSRACTERIPGHYVVYWELLTESPVGAGDGDTVDGETLGRCCLEMEEALSAVYRQGRVADGSIGPLEIRIVRPGTFEEVMDLAVSRGTSIGQYKVPQCVTVPSVVELLDSRVVSSQFSPALPHWIPTPRSD

SEQ ID NO: 37949 - protein, 526 aa, Oryza sativa
MDHESIVASDLSIYPLPPGTRTLATPRVVLAPPPVTVVNQPHADWRGLPDAAVSRVLDRLPVVDLFRLGYLFSPRWLHIWRARPLYLHDRQFTTPPIPAANVANAITNVLHHHVGEGVQLLPVQGGGGGGGGQGEGALVGGGDADEAVTSDDEIYEDEGIIQNAGHEIGRVYCLRVETTRWSLDHLVRWCAELQRGGARVLMLANLAIPEHPELPQAILNCGASHLGLHVFFFTVEAYHIAALVELRALGLYGCIEGHGMIDRVLHPESPIRKLAIHGGMGRTFAVAGATRLRSLVLFDNQVGTVAVDGAARFRNLYMSDTKPSRIRIGAAPRLRRILSLDIFNTVLVIQGLAIQIGMMEPPPQIRSVRHLCLRVNYTEMDVRLPRLMEQILKSFPRVKSLDIMRCDDVTQAEGLLQWNDAHYDGNNFFDGLESFNYHLRWIYLEDFRGGKCEVALMKAMLDKASVLRQLMIQYSTSSVPQLTLNQLDLSLQNFKLHTLNGAIRGNLVSFVAADASGSCVRLAAQG

SEQ ID NO: 37950 - protein, 445 aa, Oryza sativa
MVSSPSPSSPFPAAAVSDARRAGGGRTTASEVDEKYAHVATPLHNHRGGSGGAKKTPRRAKSEGGGGADPAAYVAAVSCSDCRFKQRLHAPASPGPGAVIRSLFVSLTRRSTPRSSPSPTSASGGDGGESEQWRLAAADLSRRLAAATRTRDEALEETTRLKHSLTELEMKLARLEARVLPTPTAAAFPVESFLRAVSTARAAVRSLTRALSNHLRSPVNPGPNLESFLNRAFHADFELDTEGDVHTADPAGRCEANLAAYHSIAALTWEEVLLHGTKHYSEGLSRFCDAKMSEVVSSLGWARARAWPEPLLQAFFLAAKGVWGVRLLARSVHPPLPVVRVDRGARFDSRFMEDAAAGRAGKLEPASVKMMVAPGFHVYVACAGVVKCKVVCFYSSSSSSRTGGHRDGGSIANGSVGLGSSCSDVNGSATDAVDGCNNQSSSVVT

SEQ ID NO: 37951 - protein, 491 aa, Oryza sativa
MADAWAASPPSPTAPSPFAADDLVDARLAPWPPFAPWPAPGQLHHNRRGGGHPNPLFTILPASALAIGVVLLVAVVVILVMTRRWKPGTVDGAGGASCNGDKPGGAPASSCGSSVRGYNNSRYYAAAAAGCIYGGRLGFSVQPRNRGAQVFTYRELESATDGFSECNVVGRGAYGVVFRGRLGDGTTAAIKRLKMDGRREGEREFRIEVDLLSRMHSPYLVGLLGYCADQSHRLLVFEFMPNGSLKSHLHRRALAPAEQPPPLDWQTRLGIALDCARALEFLHEHSSPAVIHRDFKCSNILLDHNYRARVSDFGMAKLGSNKANGQVTTRVLGTTGYLAPEYASTGKLTTKSDVYSYGVVLLELLTGRVPVDTKRPPGQHVLVSWALPRLTNREKLVQMVDPALIGQFSLKDLVQVAAITAMCIQTKADYRPLMTDVVQSLIPIVKSPLMSCTSTPLRPAHGHHHVVCMSPSRGSSNGGALETRCVMHGLD

SEQ ID NO: 37952 - protein, 525 aa, Oryza sativa
MDPFLLSIILCSWIFVVVSWKKLNCMRRRLPPGPPRWPIFGNLLQLGPLPHKDFARFCTKYGPLVYLRLGTIDAITTDDPEVIREILIRQDEVFASRPRTLAAVHLAYGCGDVALAPLGPNWKRMRRVCMEHLLTTKRLESFAAHRALEAEHLCQFVWAKAQSGKPVNLREVLGAFSMNNVTRMLLGKQYFGLQSAGPGEAMEFMHITHELFWLLGLIYLGDYLPAWRWLDPYGCEKKMREVEKKVDDFHQKIIDEHRKAREAKKSASLDDDNKEDMDFVDVLLSLPGENGKEHMDDVEIKALMQDMIAAATDTSSVTNEWVMAEVIKNPRVLRKIQEELDGVVGRGRMVAESDLGQLTYLRCVVRESFRMHPAGPFLIPHESLKPTTIMGYDIPARTRIFINTHALGRNTRIWDDVDAFRPERHLPASADGGRVEISHLPDFKILPFSAGKRKCPGAPLGVILVLMALARLFHCFDWSPPDGLRPDDIDTQEVYGMTMPKAKPLVAVATPRLPPQMYGRHGKQV

SEQ ID NO: 37953 - protein, 127 aa, Oryza sativa
MPPPPPPRFLRSSASLRSFFSAVIRFCTSSSAIRCDASAASMAAFALAFSRSISAIADSSVSLASCVLCSSSAFHRCSSIAFCFAFSASLHAVLYMSMVCFSSSRSLFISVSTSSCAQAIRRTCHEQ

SEQ ID NO: 37954 - protein, 286 aa, Oryza sativa
MINDSLSRLDSTERSNESTYDAGTPGSNQVTSKFVKDKPKDDSDDVEECLRQLQEYYSKGHVHTSIEDAWNEVVAYEHVALTALALEWGMEPPPDPFQKPKSSLVDQEAQTLRAPQQTSDAAQHNIVSCKEEPSQQILPIHQPRTEVSIEEIVERGKKWMGEEVMVAFKKYIEGKADLAGHQYHLELCHQCFHVESYFQNFHHYNFNVKIKKHDSDEWSESMYFAEVKMIFRRKYYFCCPLEPRENGHCYACRNQGMDDLRLRHPATGGFEMGSPDTVFPYMYTSG

SEQ ID NO: 37955 - protein, 95 aa, Oryza sativa
MAAVVVLFRRVQRRLQVKLVLVVRRLLRLEHRHMWRRRRRRPPLRVVLRRWRHCHGAATLEARHRRSRRCPCRPPVRRAPGDAMVDPDREILVEL

SEQ ID NO: 37956 - protein, 129 aa, Oryza sativa
MLESRLSSPGRWRLRPSKISWAATVLPLRELLKDAYLLVRSKRLVSVKRNTASEDLQDPLCRYYMQSIIPRGAYNLEQSSASWSWCVHALENNIARLLFSILPAPLVYLCRPWIMTLVSISEFWKCLKT

SEQ ID NO: 37957 - protein, 254 aa, Oryza sativa
MQGDHGYYGGRDSPPQGYGYGGGYGYGGGYGYDAGGYYSGGGGGYPSAGAAAAAYEDPMVGRRTHDFPAPMNELEFQPSATCPKNYVIFDQTCTKSRVMFHPSLAHKFGGGSSAYDNNVYGGGGAHDAAKGAYRDSVGYDDDDSCSVRQKEDTDEIDALLSSEDGDEDDVVSTGRTPGYRDGSSPDSTCSSSYGGGQARPGRKKERMKKMVRTLKGIIPGGNQMDTPAVLDEAVRYLKSLKVEVKKLGVRGSDN

SEQ ID NO: 37958 - protein, 52 aa, Oryza sativa
MDWWWCSRQLALNSEVVCFFFSGACNTTSFPERLHQNSLHAIRRKGCVSDMP

SEQ ID NO: 37959 - protein, 379 aa, Oryza sativa
MYHPQCELLMPLESLEMDVGQSHLAAAVAAAMPGELNFHLLHSLDAAAAAASSTAASASSQPTVDYFFGGADQQPPPPAAMQYDQLAAPHHHQTVAMLRDYYGGHYPPAAAAAAATEAYFRGGPRTAGSSSLVFGPADDESAFMVGPFESSPTPRSGGGRKRSRATAGFHGGGPANGVEKKEKQRRLWLTEKYNALMLLIPNRTKEDRATVISDAIEYIQELGRTVEELTLLVEKKRRRREMQGDVVDAATSSVVAGMDQAAESSEGEVMAAAAMGAVAPPPRQAPIRSTYIQRRSKETFVDVRIVEDDVNIKLTKRRRDGCLAAASRALDDLRLDLVHLSGGKIGDCHIYMFNTKIHSGSPVFASAVASRLIEVVDEY

SEQ ID NO: 37960 - protein, 523 aa, Oryza sativa
MCSWSLSSHTLTSPVRQAAMEPKSSSCGGAGIRLRLLVVLHLLLLVPSSAMAFNYADALAKSIIFFEGQRSGKLPPGNRMPWRADSGLTDGAQYNVDLVGGYYDAGDNVKFGLPMAFSTTMLAWSVLDFGKFMGAELPNARAAVRWGADYLLKAATATPGALYVQVADPNQDHRCWERPEDMDTPRSVYRVTADKPGSDVAGETAAALAASSMVFRRADPAYSARLLHAATQVFDFADRHRGSYSDSLASSVCPFYCSYSGYHDELLWGASWLHRASRNASFMSYVEANGMQLGAGDDDYSFSWDDKRVGTKVLLAKGFLRNRLHGLELYKAHSDSYICSLVPGTASFQSRYTPGGLLYREGSSNMQYVTTATFLMLAYAKYLRSSGATASCGDGGGGARGEVSAAELVAVAKRQVDYILGKNPAGMSYMVGFGCRYPRRAHHRGASMPSVRAHPGRISCDAGFGYLHSGEPNPNVLVGAVVGGPDSRDAFADDRGNFAQSEPATYINAPLVGALAYFAGTTK

SEQ ID NO: 37961 - protein, 279 aa, Oryza sativa
MEGSPRRRKLRRLSPGAAPQQPKPSLNSLPSEILENIVGRLPVRQAVRTSALSRDWRRRWESSPGIRFGWGSGEAGAAAAVGQILARYACPVRHFRHGWIESGGSARADEWFVVLAGRGVEHLALIFSEADNFLFHTLHAAIFSCRELTKLELGSCRLPAAPSDFSGFPNLTVLTLTMVAFPPHGERTLEAMISSAPLLQSLELKNVSMEGGEWDEWVIRAPNLKDLIIQLEFDFLWEIEQLPSIQTATISVDNESTDRDFVQLLTCFARPSYTGYRSG

SEQ ID NO: 37962 - protein, 368 aa, Oryza sativa
MVPWRRSSSSSSAPSSRPARRPARTNARVSPDVSSELSPLAGEEGAGEERWSALVPDLLADILRCVEAGSERWPPRRDVVACASVCRRWRDVAVAVVQPPLESGKITFPSSLKQPGPRDAPMQCFIKRNKKNSTFFLYLGLTQELTDDEKFLLAARRCRRGLHKEYAITINSDGLFHGSQSCVGNLKSNFTGTKFTIRDWQPPYEGAKAFSSRSGRWFGNKHRCPLVSTGDVEVGEVSYKYSLLRPRGPRRMSCSVQCPVLKGTAVDPQDGKRLSNSIPSSLVLNSKVPSWHEHLQCWCLNFHGRVMVASVKNFQLIAPVEPGEPSDKTVVLQFGKIDDDVFTMDYRQPLSAFQAFAICLSNFGTKLA

SEQ ID NO: 37963 - protein, 191 aa, Oryza sativa
MDMIGMASPAESPGGGGTARPSRYESQKRRDWQTFGQYLRNHRPPLELSRCSGAHVLEFLRYLDQFGKTKVHAHGCPFFGHPSPPAPCPCPLRQAWGSLDALVGRLRAAFEEHGGRPESNPFGARAVRLYLRDIRDTQSKARGIAYEKKRRKRAAASHTKQKQQQQQLVEQAAAAAEAHAAGCMMPLSVFN

SEQ ID NO: 37964 - protein, 544 aa, Oryza sativa
MRPSRLNQHSFLFLLREASASAAARRRLPPLHALLVELGLQPYARVHNALIQAYAASGLVDDARRVFDGMSHRDTVSFNSMIHAHAMSGDVVSARRLFERVPSPTPVTWTSMVAGLCRAGDVAAARRLFEEMPVRDLVSWNAMMSGLAGNRRPVEALCLFRRMMAEGFAPNRGTVLSALAACAGAGALETGKWIHAFVERKRLFRWWDEFLGTALLDMYAKCGAVELALDVFSKLRSRNTCTWNAMINGLAMNGYSAKALDMFRKMGLDRTVVPDEVTFVGVLLACSHGGFVDVGREHFHMIEKKYGIRLILEHYACMVDLLARSGHLQEAHKIIAGMPMKPDAVVWRALLGGCRLHKDVKMAETAISEMEATCSGDHVLLSNLYAAVGRWSGVEDVRRTMRSKGIEKIPGCSSIEINDSIHEFVSGDKSHPSYNDIHAKLAEISARMQQQGYVTETAEVFYDVEEEEKEQALGHHSEKLAIAFGLIGGPPNVAIRIVKNLRFCADCHKFAKLVSQIYHWEIVVRDRARFHHFTEGACSCNDFW

SEQ ID NO: 37965 - protein, 54 aa, Oryza sativa
MHWAPGSSIAKSSSRGFAAPDPRPALQPFPLQEPLRPTEPRARLPAQLGSDVKP

SEQ ID NO: 37966 - protein, 159 aa, Oryza sativa
MENKKRSPPLPPLSSVAAVVVLPVLLLLFTFMATEANAQVFCRSQFNLANEACSLRTFSGPNPAVPLRQLNESAVAVMAEHREREHGHGGGGGGGGGRLRSHRADPYDTACCRRLMGIDNACICQAMSYLPVFMSRVKHAIKLTPVPGCDVSFECAAAY

SEQ ID NO: 37967 - protein, 295 aa, Oryza sativa
MDHPWRFPAGDELCPVCAAPHFPFCPPPPHPFPYDLHPPPPPPPPEYHAPFHPPPPPPPPPEYHVPFHPPPPMWAPPGPHPYEVLDMEAPHKRMRVGDPYGDGMPPPLPPPPPPGMVPVEGDRLLGLIRDHGRPPFPPPPGMLHGEPYPPPDRFGYGGGRGYPPPPNYDNPYAHEGSFPDYEHAGRFPPAHERLAALGSSFVPGGPQEGYFNHDHRYNRFQRSESPVAPPLPPPARYPEARSRYDSHGWHPEADVPPPPPPLEPPVPSSSDYHAKPPLQACFGSRRPTKGTSRMW

SEQ ID NO: 37968 - protein, 341 aa, Oryza sativa
MEEHDYDSNSNPPLMSTYKHLFVEQHRLDMDMGAIDVDECELPVIDLAGLMEAEQVCRADMVRAASEWGFFQVTNHGVPQALLRELHDAQVAVFRRPFQEKVTERLLGFSPESYRWGTPTAKCLEQLSWSEAYHIPMTTPRPSTSIRARAVIEEVSRAMYELAQKLAEILMRGLPGAGEGETMVTTREETCFLRLNRYPPCAMAMGGFGLCPHTDSDLLTIVHQQQDTVGGLQLLKGGRWVAVKPSPSTLIVNVSDLLQAWSNDVYKSVEHRVMANATLERFSMAFFLCPSYHTLIIPSSSHVHDDDAHYRSFTFGEYRKQIMEDVRSTGRKIGLHRFRTR

SEQ ID NO: 37969 - protein, 607 aa, Oryza sativa
MTKATPVKASKNLQLQKQSPTNLKETNGHVCKKEVVNGECPVRDVKCISTWICKNLACKAVVTSEDSFCKRCSCCICHQFDDNKDPSLWLVCASENDDKNCCGSSCHIECALQHKRVGCFNLGNIIQLDGSYSCASCGKVSGILGYWKRQLVIAKDARRVDMLCHRIYLSYRLLGGTTRFKELHGIIEDAKAKLESEVGPLDGMSAKMARGIVSRLPAGSDLQKLCSLAIERADELLSSPDLHLQDSLPAACRFRFVEITSSSIVIILKETPLPSSDTIRGYKLWYWKSREEPSMEEPVVLSKDQRKVLVFNLAPCTQYSFRIISFTDDGILGHSESKCYTGSKELLFKRTTQNVAGADAHTHRREKTQAFKSTGFKIRDVGKILRQAWTEEGRFEGFCEDMHEASCDRSVTDVEQTENSEQGQLLSGACRKLQFSTFSVPDLNVEAPVPMDISPDKCYNSKIVPVRSNDSGGSETCAVGRSAEAEPPAVESRPEGCEQDGASTICREKQLARPRELDEDFEYCVQKIRMLECKGHIDNDFRMKFLTWFSLRSTENDRRVVTTFIKTLINEPSGLAEQLVDSFGEAINCKRQRNGFCNELWHDDKGQ

SEQ ID NO: 37970 - protein, 430 aa, Oryza sativa
MAPPSCLLRVGWLPAALCALALALAPASDATSASLVGINYGRVGSNLPPPQAVLPLLEGLGIGRVRLYDADPAVLHAFAKTGVELFVGVPDQSLAGLADPGGADSWLRSNVMPFLPDTKIAALTVGNEVLTGNNSAVTRALLPAMQSLHGALAKLGLDKQIAVTTAHNLGVLGTSYPPSSGAFRRDLLPYICPILDYHARTGSPFLVNAYPYFAYSGDPKGIHLEYALLEAGYAGVPDPNSGLRYPNLLVAQVDAVYHAIAAANTAAAQVVEVRISETGWPSSGDPGETAATPQNAARYNSNAMRLVAEGKGTPLKPTVAMRAYVFALFNENLKPGLASERNYGLFKPDGTPVYELSYKLPRDNSTFGGAGNSGWRFPGGGGGNVSGGYDNNGVNSGYYDISAASPDSAGPCRWSQAAVAGAMAVLVVAA

SEQ ID NO: 37971 - protein, 96 aa, Oryza sativa
MGIIFHLSPQSRPEPRPAAHGRPSRRRGMVPFCRRRWGRPRTWKREWRSRLRGLEFDLFVTEKIGARAAMVELAPGGLSANARRQPRRSPQVSPQY

SEQ ID NO: 37972 - protein, 127 aa, Oryza sativa
MHRSMASQAVAPLLLILMLAAAAGGASAAVQCGQVMQLMAPCMPYLAGAPGMTPYGICCDSLGVLNRMAPAPADRVAVCNCVKDAAAGFPAVDFSRASALPAACGLSISFTIAPNMDCNQVTEELRI

SEQ ID NO: 37973 - protein, 335 aa, Oryza sativa
MHHRLASLAVSPSSPRHATPRRATPRHAEKPRSSKPLAAARASPAHHPRRAAMQVFHGAQFVRLRNLWEETYITADEDGRSVYHYDPGRRPSHEAIWAVQLAVAGEPPTQYVLLRGAYGRYLGAPDAVERRWPLSCCCPAPVVGQRDFDQPVVDAIMWHAVRRTGHVVCLHDKSGRYLRGKLMSTLVCGGRPSLTVGDGRLSDDEKELRWEVRPVLPSPGRPELPIATEAGLAELFVKICFPPRRREIQFVAPDGDGNIVWDSFQYQGRSVQLLRNELENRVGYAITMCVRAGRHGRLTPLLINLPHSRETLHIVALRRNSEADHRLTFPDPDAS

SEQ ID NO: 37974 - protein, 377 aa, Oryza sativa
MSPPPPPYYHHLLLLRSSPTTTGGGARVLAAAELARMKLLCSACEAAEASVLCCADEAALCARCDRDIHAANRLAGKHLRLPLLSPASSSSSSAAALAPPPPSPPKCDICQESHAYFFCLEDRALLCRSCDVAVHTANAFVSAHRRFLLTGVQVGQEQDEHSPDPPEPSPPPPPPPPASKSDHPAPLYGEGGGGFSWDAADSPAAGGLPDWSAVVDQFGSPPPRHTDTATVTTPPPTKRSPRAPAFGGQGGMMDWPLGEFFGGFTDFTGGFGFGFGDSGTSKADSGKLGGSTDGSPYYRSSSEDDRNADELFGQVPEIQWSVPELPSPPTASGLHWQRHPAATHGGGGGGPDTTAFVPDICSPDSCFPATTSKRRRQ

SEQ ID NO: 37975 - protein, 501 aa, Oryza sativa
MSHYTMHAHINYTALPPTSPLQLPLPYLPPPPPPPQPPLLQLQPPPPPSSPVSFDTAFQSRISPSILLIILILAVIFFVSGLLHLLVRFILRPAPRDAGDADSGDANVTAFQGQLQQLFHLHDAGVDQSFIDTLPVFLYGAVVGAGRKDPFDCAVCLCEFADDDRLRLLPKCSHAFHVDCIDTWLLSHSTCPLCRRSLLADFSPYGGGCSPLLFVLESGSEGSISDRLDAASSAHLSLVMEQEEEAEPEQKHAEAAEKADEVVVSVKLGKFRSQATEVAAGGGCGGSSSANPEQDVRRCYSMGTYEYVMDERSLLRVAVKPPAKKRPTTQMPGHRVAMSECDCHSKRESFRGLDALPGGKLAQAQPPKPPAKVGKKESFSFSKIWMRGAPRIRKDGASSRRASSFRLSSVLQRAASDVGATAAPKPLRPDVVSPVTESEYNVSAWDKSEKSASGSVADWDLESAAATAAVPGAGAGNGLSSRADEAPSFARRTLLWIRGHL

SEQ ID NO: 37976 - protein, 157 aa, Oryza sativa
MVRPPLALQIWRVSFLLPPRRAAASTGAREAPAANPAARGPQAANPVAGEARASDLSARQQREVLGRREWRGRRIQRGEGAGFGRRWWSRARASARAWASAGGDDGGGGGLAGGLRRAATTATARRPRRRPWAALSGSSTTATWLPHRWQPVVVLGL

SEQ ID NO: 37977 - protein, 480 aa, Oryza sativa
MEPMAGRAPQQAFRLRLRRIAHLQRRKPRGRQHGLQRRRQLVAAADREALHPWPQDELLHLGHHVRRRARRVQRLQQRRARLQEVEGAALAPVVDAHHNGGAELLHDTEVRGRRREGPGAGREMDGHRFVGRGRESQGRGRAAEGVEHEGGELERDAELGGEAREALVGEVELEWVAGPRRHQCGHLEVRRRPSSAAPVVRELLHERRPMCTEADVEVEEVEAARGAERVEEGLRGCEGGELHGRGGVRQGLVRGELERDVEGSRGDGEGGGREERVPEEGGGAEERRVGMARRRRKRGEAMIEPRQYLPSGSGVSGVEEACGVEEVVDERLRRMVRGHGHGELEQVGVEGGVVGKGVGVGIAGIHDPAEEGGVGGGGGGEHVHVHVDDGVPVAVVVGGDGGRRVLRWFGGAGAEGGARAAAVVEHGGGLRRLAAVRLRQRQGGGVVGMARGGGHEGNIDHRQHVEYSYPMRLRLRRRRR

SEQ ID NO: 37978 - protein, 408 aa, Oryza sativa
MNKCRSSSSSSNSRALYALLLTSLILTVIILYLPPPPDPLSQSQFEFDQLKLDDHPPPPQLHRRRTKRCAEHLRWAASLASQHNATLLLTVDRNQAAGCANFTTIQKAVDAVPDYAATRTLIAVDAGIYREKVVVWSNKTALTLHGRGNLNTTVAWNATSNSTGGSTVYSATFTVLAPAFVAYNITFQNTSPPPEPGDAGGQAVALRVAGDEAAFHWCGVYSAQDTLLDESGRHLFRGCYIEGSIDFIFGNARSLYVGCTISSVAMASATGNKEVTGSVTAQGRASAAERTGFAFVRCSVVGTGQVWLGRAWGPYATVVFAETYLGDVVAAEGWNDWGDPGRRQQVWFAEYACWGPGSATAATGRVSYARQLDQRQAAPFMDVSYIDANQWALPPSTPELYGSRYTPS

SEQ ID NO: 37979 - protein, 337 aa, Oryza sativa
MPEYCVTGGTGFIASHLIRALLAASHTVRATVRDPEDEAEVGFLWELDGASERLQLVKADLMVEGSFDDAVRGVDGVFHAASPVVVVGNSSSNNGKPNDDDDEEEVQQRLVEPIVRGASNVLRSCARASPRPRRVVFTSSCSCVRYGAGAAAALNESHWSDAAYCAAHGLWYAYAKTLAEREAWRLAKERGLDMVAVNPSFVVGPILSQAPTSTALIVLALLRGELPRYPNTTVGFVHVDDAVLAHVVAMEDARASGRLICSCHVAHWSEIVGSLRERYPGYPIPAECGSHKGDDRAHKMDTAKIRALGFPPFLSVQQMFDDCIKSFQDKGLLPPHA

SEQ ID NO: 37980 - protein, 458 aa, Oryza sativa
MAPAAAKASDLYREETDRDDDDDDVGLAVILPDAWELPRRRVLRNVFRRLPRNPDFDGATFLSKPWLALAVDGHNVVAEPQRLMPGLLLPEEMALDPASRAFLSLADGRFHDIAFPHARGARCVGSSRGWLVMLREGPEGVVGAAATATVHVIHPLLPHLEFRLPDEFSLFEIHAAADLEEHVVRLPLSKEARLRAGLPLAERLQRVYKPDEKNYPYITMVALSCSPAGSDDDDCVALCVYLCGRCLAIARPGDASWARVEVGWEYMEPTEYNRKFVSVVHLNGSFYAACYDGTVLRVTIPPAGSSSSSASTPPRVEKFADRPYRSKWSMWRSRWWLADDGAGSLVFIGTERCLNPSDDERYLSVFRWDAELRFWRRPKSFGGRALFLSAGTAFFADARILPWCAGDCIYFTDDESVVTGENVTVRCYDMRSRKLYFVEDAGAKVALAPPVWVMPFHE

SEQ ID NO: 37981 - protein, 64 aa, Oryza sativa
MTKMSFSSSALVLVLPSVVSGTTGSQVRAPALARAKGSEPAGSRTASWRRDQARTSSSWWCCST

SEQ ID NO: 37982 - protein, 62 aa, Oryza sativa
MLFPPSGAAAAWKVARWWPRGNPLMRGRRHGDIRCWSVLFLTKAEQAGPTRLIGSCRINLTI

SEQ ID NO: 37983 - protein, 585 aa, Oryza sativa
MDRPRQQHEPEHLGGGGIDVEVELDPEDLQPSVPLKKVPAGDLFEAARAGDCARLALLLGGGANVNERDRWDSVALYYACLAGHADAARMLLEAGAVCAERTFDGDRCHYAALNLRLRRLLKAFEARPPPLPPLPAALRATFLACPANRAAFLEMLQWTAGSEAAALAAAAGFGPTDNPSSTSLFPPDITFYVDGKPIEAHRVILCARSSFFRRKFNTDWKDRKEVRFSSQKLSFGALYSLVHFFYSDRLEVDVDDMENLARACKVCKCEGLQKILIKEATLQRYAEHKSPRDLDSSQKRFILHGQSLPEEDRLPSALRHIFEECLANSREQECYNDESNEMSRDSGVDAAADLYIKVCDKVFHCHQVILASRSEYFKARLSRNMDFLEVKSGLQSTQSLPFLEEHDMSTEAFEKVLEYMYTDNLEHMDPNQAEELFDIASRYLLFPLKRVVADILLPYLEHVSPAELCHWLMLSDIYDVVKIREYCLDIIACNFEMFADTREFRALLLTLPPPSGDDSLRTTRPSEPGTAGNTDQGNLLDDLREKWLEAEAAELDERDESAKLFDNRLEMLMLVAEQEANDGNV

SEQ ID NO: 37984 - protein, 224 aa, Oryza sativa
MAAAAAAAVESVVVVHNVAKRHNVGTLARSATAFGVAEVVVVGRRDVSAFGSHGATSHLRFRHFASLPLARAYLKDERGCDICGVEITHNALPVTAHPFRRSTAFLFGNEGTGLSQKECEICDFFVYIPQYGGGTASLNVTVAASIVLHHFGVWAGFPERGREGNKFVVADKPKGQSRGLYCTDSIEEVIEERKMRRENACDIFEENGSSEHQESNVLGTMLSD

SEQ ID NO: 37985 - protein, 535 aa, Oryza sativa
MPAAAGDVNSTWTLAIRAAADQGRPRRAVALYLSSLRSGRRPCPFALAAVLKSVSRLLLPAAHPLLAAAAASIHAHLLRLGLLAHPYPRAALAHLYARLPDPSRAHSLLDETPPRPPRGRAGAHSFLVSRNSLLASLLRSGDLAAARALFDRMPVRDVVSWNSMVAGLAKAGHLDAAIELFDKMPERNAASWNAVMCGYIAQGDLAQARELFEQMPVRSNVSWITMISGYANSGDVHAAGELFERMENKKDLYAWNAMIACYAKNGCAREALAVFNRMLKPHVWVMPNEKTFSSVISACSQLGDLRFGLWAESFMGSVGIELDDHLRTALVDLHTKSGRIDRAFDLFRGLGMRDVVSYSAIIVGCGMNGKFNEAVSLFKEMSDAKISPNAVTFVGLLSAYSNAGLMEEARACFASMTEKYKISPSMEHYTIMVDLLGRSGKLDEAYQLIMQMPMKPDASIWGALLLACRLHNNVELGEIVASKCFELEPGESGYYILLGNIYSEANKWEKVKRLRKIMAERGLNKMPGSSWVQAS

SEQ ID NO: 37986 - protein, 464 aa, Oryza sativa
MEGQGLVSRSWQESKLLWRVAFPAVLVELLQFSIGFVTASFVGHLGVVELAAVTAVESILEGFAYGVLFGMGCALDTLCGQAVGAGRLDVLGLYVQQSWIVCGATAVALTPTYAFAEPILRSLLRQPADVAAVAGPYALWSLPRLFAHAANFPLQKFFQTQSRVWALAAISAAVLAVHAALTYAAVVRLRYGLRGAAVAGNLSYWLIDAAQFVYLVSGRFPDAWKGFTMTAFSNLAAFVKLSLVSAIMICLEFWYYAALLILVGLLKNARLQLDIMSICINYQFWTMMVAMGFSEAISVRVSNELGARRPKEAKFSVAVASLTSAMIGAIFMSIFFIWRTSLPSLFSDDKEVVDGAARLGYLLAVTVFFGNIGPVLSGVAVGAGWQILVAFVNIGCYYLVGIPFGVLFGFKLKLGALGIWMGMLTGTLLQMAILFFIIMRTKWEAQAILAEKRISELGETTAND

SEQ ID NO: 37987 - protein, 209 aa, Oryza sativa
MSKPDRRSGAATSPSLRFLGLLKQPDDGSGDHELELDERDVVWSSSSSSNTSPSSWASSTNSSPSLTPSASAGVGVRRPLSSSHAFPAAGSVGLSALLADDHAPTASIPAKARPERQQPPQPYHQSAPVAVPAWPKATDSDRRRRGVQHEALNDEEDDDDELVVPPHEMAARRAAAAASVMEGAGRTLKGRDLRRVRNAVWRTTGFLDL

SEQ ID NO: 37988 - protein, 538 aa, Oryza sativa
MAMSMAMSRALAARHRSHLGHRIEVKSHHASPPRLPLLPRSPGLTLASRPRMLPARPRMSSSESDLSPTPPSERTMTAWDLASLWVGLVVGVPSYYLAGSLVDLGMSALQGVATVAFANLVVLVSLVLTAAPAVTHGLPFPVLARAAFGVRGAHLPAVIRALVGCGWFGIESWIGGRAVFLLLPSRLKSYQPLLAPVPGLGAAPLEFACFLAFWAAQLGVIMHGMEGIRKLEKYSAPVLIVLTSALLAWAYVSAGGFGRILSLPPRLTRAEFWKVLFPSLTANISFWATVAINIPDFARYARSQADQVLGQAGLPVFMGMFTFAGLAVTSATEAIFGHVISDPIELLGRIGGPATTVLAIVGISLATITTNIAANVVAPANALVSMSPRKFTFAKGALVTALLGIAFQPWRLLSPSESFVYTWLLGYSALMGPIGGIILADHYIVRRTALDVDALYSEDSHGPYYFQGGFNVAAMAAMAAGVAPIVPGFLHNVGVLPSVSKAFETAYNNAWFVSFFVAGAVYCLLCRRNRNELKHQHD

SEQ ID NO: 37989 - protein, 142 aa, Oryza sativa
MTSEGRKPPSQRKQRSAGLIQTPEMRWKTSPLMAPSLMAATSSWCARQLSTYTCSSPSGSCCCSAARSSYISRWCSSCHLPYSTSNIAASELSPPPPPPPTPSIPPSRTPFPLPPSPISPPLPGKNTPCTMYRSVHIFIHNT

SEQ ID NO: 37990 - protein, 82 aa, Oryza sativa
MVTCYHEHGEPRHEHRHGSLWRSSSAARKRRPGHSRGRRPQASVGLEGVGMGKIEGCWGGWALGRRPKSRMSARWENGKAKE

SEQ ID NO: 37991 - protein, 484 aa, Oryza sativa
MQQGAAGQAPRRDDGEAAGPSGGGGGGGEDRLSALPDAVLGRIVSHLKAWQAVRTSVLSKRWRDVWASAPRVDIRHPCACNERADQERFHGFVDTLLLRRRPFAPIKALRLCWSHDGDANNWIVHAVRRGAEEIELSTRHHQGSLEPEPEFTSFISPKIKILKLMRVGMDIRSITQICSRCTSLEELELEDVRLLEGQIQSASLKRLSIIKCYIDDGFLVDAPNLVSLCFIRPLGIERKGGSNSSSDRLWWPVWLNDDDGYDHDDDFFANASAVQSDDKRGSKSDQDDLEGCNDDDCTVAYDEIADEYSSNGGPGDEHGGYSESDDSTICGPYGLFNVLVKTSLIMIAREGELLLRRELENFPMFINLNTLSLGEWCMVPDFSALSTILEKSPNVERLYIHLDMVHRGRGDIDPSGGSFACNNLKRVKITCCEDDVMVHKLAEFLEANGLQRQRIFVRRTSRTRRDSRAKQKEQEDHLRLAKKW

SEQ ID NO: 37992 - protein, 481 aa, Oryza sativa
MAGTGGSPLLRSPSPVMNTMPTPPSAAVFDVEAASGARRLGIKPAADAGAAFVLESKGKWWHAGFHLTTAIVGPTVLTLPYALRGMGWALGLVALTAVAAVTFYAYYLMSRVLDHCEAHGRRHIRFRELAADVLGSGWVFYLVVTVQTAINAGITIGSILLAADCLQIMYSDLAPNGPLKLYHFIIVVAVVLSLLSQLPSFHSLRYINLGSLLLSFGYTILVSAACIRAGALSDVPEKDYSLSSSNSEKTFNAFLSISILASVFGNGILPEIQATLAPPAAGKMMKALVLCYTVVLFTFYLPAITGYWAFGSQVQSNVLQSLMPDKGPSLAPTWLLGLAVVLVLLQLLAIALVYSQVAYEIMEKSSADAARGRFSRRNVAPRVALRTAYVAACAFVAAMLPFFGDIVGVVGAVGFIPLDFVLPVVMYNMALAPPRRSPVYLANVAIMVVFTGVGLIGAVASVRKLVLDAGQFKLFSGNVVD

SEQ ID NO: 37993 - protein, 157 aa, Oryza sativa
MSRHLSFGTPSPTTTRRCPCRRRSRRRNSTSPPPSSATPWDATTSTATAARSAWCSSASATRRVRLPLPPSTTPPPPAPGPLRPPPRPPSPTRMTGDFACPHLASWWGGPRSTSGALGGYSGTGSATRWSICHTSTSRRSSLRRHAERCSCRRRTGG

SEQ ID NO: 37994 - protein, 708 aa, Oryza sativa
MMCAKVVAAAAAEEREMELLLSEIPQVTAPHGQRGGRGGGGGGGGGAAQCYGLHGPTRYHAHAGAPARYGGDPCFPLVLNRRDDGGGQQGGARGAIHVPLSGGFASSPASSTSAGSAPSPGSDRFVGRSPSPMVQATTDEDTERLASQLDGLLVGDAPAADALAAALMPPQGSPASAAKNVYLPDVSAVHGAYNNGYNFGEPGYSLHHEPGVLADQAMASGYVAPSQCFPVDVGLDGYGGFPPSLGTSVGSFMYTRTRNSSGIGWEQGLVHPDHARPVLLPGQSGAEHNWGYAGTGQISLDPRGRSLPKSPYEYSVAAARDIGYMKGGFNQMEPFCDGRKNVPFLNRAKERRFQQHVNNRSVELGSPGMLMYENIVELESPRMLRYENMVGAKGYIYFMAKDQNGCRFLQQKFEEGKDQADLIFEGIIDHIPELMANSFANYLVQKLLDVCDEEQRLRIIAVLTEDPVKLLRVSLNSHGTRSIQKLIETVKTRKQIMLIISALQPGFIHLVNDPNGNHVIQKCLKNFDAEENKFIFEAAATHCVEMAINRHGCCVLQSCISNAYGEYQIKLIMQICADGLYLAQDQFGNYVIQYVLDLKIPFANAQLASLLQGNYVYLSKQKVGSNVVEKCLKVFPDDDKAAIIWELISASHFEQLLQDPYANYVIHTALVQTRGHLRSALVNAILPHEEAIRTNPCCKRISKVLSRR

SEQ ID NO: 37995 - protein, 291 aa, Oryza sativa
MALFLPLLVAASLFSPAAALLAGGEHGVVVVEPRQVEIMFDLATQSWYHELYRPLKAALTDDGAGPELMGHAVVDLLDDDQPPSKQITVRLFASGGGGDEAKLLVAEDDAYVAGFANRTGHWHTFRGGRCHHPVIIPAGGAAPCTELPFGGTYRELIGGVANLRAVPLGRASAESAMRVLSRYDPATTPAADAKMVVAKFMVMVTEPMRLKAVSRAVGGRWEEESYLSSDEAKYVPYWGEISAMLVEWNSTGRWGELGPRSKMDRARCPRPAGCEDDGGDGDDGGGKLFMI

SEQ ID NO: 37996 - protein, 499 aa, Oryza sativa
MALLRCLFLLAVLLPHRNAAVVAAASPHHGPAPHDYRDALTKSILFFEGQRSGKLPPSQRVSWRGDSGLSDGSSIKVDLVGGYYDAGDNMKFGSPLAFSMTMLAWSVVEFGGLMKGELQHARDAVRWGSDYLLKATAHPDTVYVQVGDANRDHACWERPEDMDTPRTVYKVDPSTPGTDVAAETAAALAAASLVFRKSDPAYASRLVARAKRVFEFADKHRGTYSTRLSPYVCPYYCSYSGYQDELLWGAAWLHRATKNPTYLSYIQMNGQVLGADEQDNTFGWDNKHAGARILIAKAFLVQKVAALHEYKGHADSFICSMVPGTPTDQTQYTRGGLLFKLSDSNMQYVTSSSFLLLTYAKYLAFSKTTVSCGGAAVTPARLRAIARQQVDYLLGSNPMGMSYMVGYGAKYPRRIHHRASSLPSVAAHPARIGCSQGFTALYSGVANPNVLVGAVVGGPNLQDQFPDQRSDHEHSEPATYINAPLVGALAYLAHSYGQL

SEQ ID NO: 37997 - protein, 416 aa, Oryza sativa
MLGGGFNLRLVPSFPPEVEAPMAAAAAMAAVAMSGSMEASPAAAVVPCRRDMKRRLQEEIDAVRGLLGKAEALVAVASEDVNGSAAASASAVAKRSPRRVRSPPRRGRSNREELDRARDRRHGGRSDREVFDRGRDRRHGGRSDRDREVFDRARKIPRRRPHEAESEPRKIEAAAGAPPQCQAKDGEIAPAMDASPSLCEREEGEIADDHGAALDIDIDIPRGGAISPLVVNKAQSSPLAKNDDDDELVDISGEASPVAIENFPEATKSSISPSSDEPSLGNYSGDDDDDDGDDGESSKKPDTTCLPTEAAATATTPLVAAAASPPATQTSQLIAIAKEKQRLRRELERRAAREALEAMARAARPIRDDIAATDMMQLGLFETQYIVSTEKSQDSLRRGSGGLLQQLGFFLKPEYS

SEQ ID NO: 37998 - protein, 153 aa, Oryza sativa
MAAAAAWCSLSRGVRRAALELRQWSERGAASLAPDEDELEAVERQLDVGPTSVRSPVKRKAKLPESYEMLCEFFNCFESSTQLLRMKGSKASFPNICATTQHLSERWCRKLDWSICICCNKVSSQSIRRCSWCSMPNNFKWTAMTSRKSSRNS

SEQ ID NO: 37999 - protein, 647 aa, Oryza sativa
MDSAAASADGGAFLEFVDYAISMLSSSSSGGNGDESPGAGPAPARPPWGWAVAQVLKSCCAYSSGVTAAILLSDLFQSWTEQSKSLTAKRKVELTNLLKTRNRRRRLPNTITIDSIHEKNFLSPKSVLDAVVIDVFVIPGTNIYMLTLGDMWSTSTIDLYLHRRYYNYIGQHDVLKKGREVMLTGCCLRTAMEGSGHARILPTEYMVMLLDEEEDEDAMLLAAQFCMYSFSSMMLDENRNNISYSFYARIEKIESLEPFGSTERKQIVLVDNDDAKIKFVLWGEQVLLANLFSVGSMLALHRPFIANYVHNNHEESQELCLEYGSATQVYLVPIAQQEEQVLLTPTQIRSQGSRLSCVPSDHMASQVTLPRDLHGSVDFSKYPFRVYVSDLHDKMVGVSLFGMVTSVCKASTSGTYFYLEIEDATGVVLMKLNFIGLWSLGRVGVGHMVYMSGLTCTLSSTNKLEVAWTEKEPGSLFVNISLLPALLNSTCLHNLSLLSDLPHSTNRTHICHVRLDHIDVNSLKVLLFHNLCGCVVSDQSGGLQCSFCKCACHISGCTHGFQLHLTIADDSEKVFAWCIGQTAVEFLQISPDEYMELPEDERAMYLYTLQNENFTVAIANTSQRIEAYIEGEKFLPVWEITRAQKCE

SEQ ID NO: 38000 - protein, 255 aa, Oryza sativa
MSLCRRERERDSNNGQWTMGNGNGSGGERERGKVLTWTSWALTWRCSARRKRNLEESRLVPEPMTRLAGNPDSFHATYVSTSTGLETISSSASGECSASAGTIFRNSATFRCSRFRRLSPGIWRAPAVTMARSEPRVTARSVSETRRTRGRNAAACCRSSISPRSLSGTASTSAISSAMSRVRMVCAIAIPTLPAPITDIFVSRRRCDVGVDPPSATGRKNPDDAPSASNPSSDRDEAFFMSRDRDRDLPPSLTG

SEQ ID NO: 38001 - protein, 415 aa, Oryza sativa
MMTPGSSSTSVPGDEADAGNWDAGVETAARLEAMVHAEDELSEEQIQANNQTQEDELLALQAIYGDDLVIFDNKDGLRFFQISLHYQLAGDIRVHLNVCPNGRTETGAENDDDDDSDRLLYACSLQHLPPVVLACLLPRLYPSHRAPYFVVAAKWLDEPEVSSFCSVLDEIWAEQPAGQEVVYKWVDWLSTSSWFCIASDDQIVFGPDADSAGGDDRAIGRSCSLDSMIPLIQRYSKERSHEIFARRIHECGVCLSENTGRNFIQLPCSHSFCVKCMETQCRIHVKEGSVARLTCPDTSCRRPLPPALLRGLLGDGEYARWESLVLRGCWTRCPTWPTAPGAAPRAWRPATTPSARGASSPSAPSAGSGATSGTPASPRTRCSTSCWNGRRRRGRWRRRRRTARRCRRRGRWRSF

SEQ ID NO: 38002 - protein, 446 aa, Oryza sativa
MSRRNTTGWPVPRGGAEPTGKPGPSAPVRAAHAFGQMPRRRTTTTARWVRRHQVHKGKPRGAATVDRLSALPDALLHHVMSFLKAWEVVRTCVLSRRWRHTWASAPCVDIRAPSSRRERGPGRDSDPPEDFGRFVYRLLLAREVSAPVDTLRLRSSNGEEYAEMYDNDDVNMWISSAIKRNARVIHLNGHREDDDLVLEHTAFVSQRLKILKLSNVNLDWKIPRQLSSRCTSLTELELNNCPVNGGEISSVSLKKLRMVKCLITVDLSICAPNLELLCCITPYHRVPLFKNLSSLVAATIVLDDSFLCRDDFLHEDERGSSDDEDDNKTISDHYDKMVTNSDACGDGNLVDEYNYGSDIDSDDDIYEYSQIANECRDGKYSHCHDSECCSSYHDTCKLANSFSGQDLLCSLSNARSLELLAHSGEVFQDLFLLINLYQVLFPVLAL

SEQ ID NO: 38003 - protein, 196 aa, Oryza sativa
MPSKSAAGRSISGEVVSWFAGAAPAAPRRRCGRRLRSPLPPLGSRGGEEDRPPLPRRRRPREARRHREADPFHLQPRRSSPSIAAFIHRHHPRDRRSEVKTVRPRLLPLVAGKPSPSSTQGRRLWSSSPAISLAVCRRISGACRFRRCEGSRVRRKYSRRLIEDRLLQVEEKESRRRRRLAYTPVELPVGVEPELR

SEQ ID NO: 38004 - protein, 352 aa, Oryza sativa
MASEVVRRRRRIADYLNDGEELGIEGSPAVTPRSPALAAARSLLPRFRWARAASRIGRKGKAEKEGVVVVEEEIAVEKNGEPVAAAAAAATVASTSVFDNESHTRTPDLGVGLSLVFLLAKTSDEFNKMAKVRAEMETLLREIKEQVRQSSSGGVGDDDASKPRCNLESAASSCLTDTNENERASARMMEDQATSSSNHMEEEEVSCEKSAEEYECCFPRMDVLEEEFHAELDLLQVNYGSDVQLFLPEEHDAEQPDEITGCREEFNDDVGREDEVVEDEDYDDEAEYNGVNAVELERRLHELLHQRNQERIEELELALKRAEKKLVEKEMEVSMWKDTAKLALRQDSSTML

SEQ ID NO: 38005 - protein, 411 aa, Oryza sativa
MMALTERQPQSEKKAARARPMSAKAVVVLCATSFFVGLLLSGRMTLLMPPPSGSVGAASSGHGSRLSLFSDDCEHRHKLDEGNPNDIMNEVSRTHQAIQSLDKSVSSLEMELAVERAKQNGGLGAAVPSKRGRRPPRAFVVIGINTAFSSKKRRDSLRDTWVPRGERLRRLEEKGVVVRFVIGHSATPGGALDRAIDVEDAETRDFMRLDHVEGYHELSSKTRTYFTAAVATWDADFYVKVDDDVHVNLGMLTSRLARYRTRPRVYVGCMKSGPVLSQKGVKYHEPEYWKFGDEGNRYFRHATGQIYAISKDLASYISINQPILHRFANEDVSLGAWLIGLEVEHVDDRSLCCATPPDCEWKKQAGNVCAASFDWSCSGICKSVDRMRAIHSACGEGDGAVSNNFAAAAAA

SEQ ID NO: 38006 - protein, 494 aa, Oryza sativa
MAPAPLAGGRLVLVVVVAAACMARWSEGIGVNWGTQLSHPLPASTVVQLLKDNGFDRVKLFDAEDGILAALKGSGIQVMVGIPNDMLADLAAGAKAADDWVATNVSNHVNNGVDIRYVAVGNEPFLETFNGTYLNTTFPAMQSVQAALKKAGLADKVKVTVPLNADVYQSPTGKPSDGDFRADIHGLMLTIVQFLADTGAPFVANVYPFISLYKDPNFPLDYAFFQGSSAPVVDGGVTYQNTFDANHDTLVAALRRNGYPNVSIIVGEVGWPTDGDANANPQYARQFNQGFLTHIASGQGTPLRPGPVDAYLFSLIDEDQKSIEPGNFERHWGVFYYDGQPKYPLSLRGGGNGNGNGSTLMPAKGVTYLQRRWCVMKPSASLVDQKVGDGVSYACGLADCTSLGYKTSCGGLDAKGNVSYAFNSYYQVNDQDDRACDFKGIATTTTVDPSAGSCRFIIEIAPTANGVAMAATVRVAGVMAAILAVFIHLVVPVF

SEQ ID NO: 38007 - protein, 980 aa, Oryza sativa
MDDLEQAILLASDSPAAAAASPAVRAEALAYCARARDETPPSSLLHLCLYGLASSPHAHVHFWCLQTIHDALLLRRRLALPDDLALLRSSLLSLAVSSNAASPPFLRNKLAQLLALLVRFEYPHVYPSYFLDLIPPSPPLPGPTDMFARVLVSLDDDLLSQDYPRNAEEASDAGRVKDAMRAQCVPQIARHWHEAAVSLRAADPAVAAVALDAARRCISWIDVSLVANDVFVPLLFDIALSPGSVAPLAAAAVGCLSAVAAKRMDARAKVALLRSLMSAQKGFGSPDSGLKMAHLVTAYAVEALECYRKLGSSDADGAAALEMLEEVLPAVFAAAESGDDDEVDSGSVLEFLSGYVSTMKAPTEKQLGHLGQILEVVRMQMSYDPVYRGHLDVLDKIGKEEEDLMAEQRKDLIALFRSICRVAPGATQLFIRGLLVTALSSAEVSVEDVEVALTLFYRLGEIVGEEEIRTGAGLIRELVPMLLSARFSCHTHRLVALVYLDTISRYIKFMQENDQYVPHLLTVFLDERGIHHQNAHVSCHAGYLLMRAIRLLKAKLVPYLDTILQSLQDALVQFTATDWANKDIKFSSSEDGSQIFEAVGLLIGIEEVSPDKQVQCLTALLNPLCQQIESLVMDAKAQGLEESSPRAIGLQQIIVALTMISKGFNERLVMGSRPTLGVMFKKTLDVVLQVLISFPNVKPLRSKIISFLHRMVEILGISVLPCIPIALRQLLVDNEAKDMSEFLYLINQIICKFKSSANALLEDVFPAIASHLSVILSHDAFSNGFASNTEEMRELQELEKRFYAFLLHIATHDLSTVLLTPSCRHYLENIMQLLLITSCSHKEISHRKTCVQTFVNLIKDWCSSSEIEDKLPGFRVFMIEKFATGCCLQSVLDKSFNFRDGISIALFGEIMMAQKVMYERFGENFVVNFVTKLREAHCPPDLAEQYYQKLQGNDVKAFKSFYESLVMKIRQQQNGSLVFR

SEQ ID NO: 38008 - protein, 85 aa, Oryza sativa
MPRLYSLGRVCAASVGSRTESRPAIEFCPTSPILRASDLFINAVRFYSIASPEAPTPTEYSEKIPNVGIGWVCIPFRLMAVKKKR

SEQ ID NO: 38009 - protein, 224 aa, Oryza sativa
MPSSMQPAAASPSSSRRAPSSPAVRPPTSSSRPAGTLEPFPYHYQRRLALTPPPQVVAPAAPAPPPQVHTMVTRSKTGSLKPVDRLVLSVSHNAISPLSANYRSALADPNWRAAMAEEFKALIDNGTWRLVPRPPGANVVTGKWIFKHKFHSDGSLARHKARWVVRGYSQQHDIDYNETFSPVVKPSTIRVVLSITTSRSWPINQLDVKNAFLHGTLDETVYCQ

SEQ ID NO: 38010 - protein, 541 aa, Oryza sativa
MPPPHPAPHRLHHVGLHRHLSQPRAPIPRLPPPVRLRPLHPLRPFPGDHPHRRPPQHVPLQHRPQVAPLLRRRRVQHVEQRREEEERLPEPRREEGRAVGAVHHGLDEHRRAHVADAAEDRVPRARVVEHAALVHQGAQAEHVVHDDRRLVVVDADDVLGGDRLPPRRRHGAELEWEPERARAVAEPAPRPLEPSGWPETWLRVADERHPHLRWPAFPLRQPLQQGWPLEAVVLTAVVHDVHLAPPFRRAEDGHVGERERHPLEAARRHEHLVRFQQLHGRRALLRGREQPVLQARRAGQPRLQAVGEVMRQPLGGVPCRRRVPLDLLQEFAGAPAVARCHRLRARHEQLAQVHHLPLALPPLPPRRLPAVFLRGDAWRVHLLVPVEHHLLQHLADAIVVVVLLLRRGHQFARPAHLGLQLVPAMLTTLPSPTIAAPLHHQGSRILHGCTVHLTGDAGGGGEDLGERLLRLEESGVVGVQAEEHVVVDVLLHENTRDVREHHIVGRRGGFGRRRGWPHELQQRSAPRKHELLSSPECHMMY

SEQ ID NO: 38011 - protein, 474 aa, Oryza sativa
MPPRRRGSRGEEMAEASKEGGINALPDELLQHVLSLLSADEAVKTCVLSRRWRHLWRSTDVLRLDADKERWKSSKRFKKFVNHLVLFRGCSPLREFDLEFSSCREKDEKGEDSDEDESDDDRGEDESDEDSDGDESDEHSDDGESDDDSDEDEDSNPFQCVMMWVMYALICQVQVLKIHNFNERYIEIDGGMPLVSQHLTKIELSGIVLKDCFLNFSSCPALKELYFTKNCCFDSVKKIFFQSMQCLRIFCCQFSEYHRTLIYAPSLIRLFLEGFWGRTPFLERMPSLVEASVRPHQDCDDWCSNTYTGNCEDEDCDGCHGMIDKIGNSSNCVLLGGLSEAKSLKLIAGPEIIIFGSDLRWCPMFSKLKNLLLNEWCLLSNFWALACILEHSPVLRKLTLQISKEAKSMMQTEENDNPLRKPAAISEHLKVVKVHCKEVDEVVYKIGKWLSTLDIKVLIKRRNQSPKRFCSSKV

SEQ ID NO: 38012 - protein, 521 aa, Oryza sativa
MGNSLPVESKFTFEEENDRIKYVVSSMQGWGEKMEDAHAAILNLDDATSTSFFGVYDGHGGAEVALYCAKQFHIELCNHEDYHNDLINALDNVFLSMDENLQQSDAWRELVIPHDNGCMYFLKAGVCAKPFPQATYTGPAYEGSTACVVVIRGNQMIVGHVGDSRCVLSRQGGLAIDLSFDHKPCTRTESERERVQNAGGRSLGLRCEQVMGNYVVKEQWVLGDFGGGVTISRSIGDFAFKKNKDLDREKQMLVCDPDILADDITDDMEFLVIASQGLWSCVDSADVVSYIHDRLSVEGAELRVICEEVVEFGLASGENTTVILVQFKPGAFQYQLVDPAGFGTAVSNIASTSAAPAGASDTSDEGVMADSCATADTSGSARAESGELVPTPSANNTVTDEVDPTGTVAADDKVDPNSSANADADDGAPKPSLGAVIESDEVALDATATGHQVAVRQQEEFDPKKCWICGKGYKKILLEPSSARARNPLLAHAKTCESEDKKAKKKITKYMMKANVTNQYH

SEQ ID NO: 38013 - protein, 406 aa, Oryza sativa
MRGSLEVHAIGRHAASPCALRLKALPALDMMRYQRLSPDCLPLANGGGGGSGSVTRKPASRSCKDDDGGMAVAADSSRLSSYLPSSQLDSKPLRARAPQPSSSSAAAWSPARDHAHAHHNHHHHHHPSDSSDTASPSSNGAGTGGDVLLQWGHNKRSRCRRDASSSANAAPSSSQRRQTASAAGKILRRSSAPAEKLMPPPPPSTTTGSYTRGSNLRSASSFPTRSAAAAAVGDAHHHRSAVEERSGGGYKRSPDKAHKSALDAALHMDSKNNHHHHHHDSSVTANGGAGAGEKIGSERFELPRIYISLSRKEKEDDFLIMKGTKLPQRPKKRAKNVDKTLQYVFPGMWLSDLTRGRYEVREKKCVKKVYSTLHLAFSVHAFCVFLQTRRGKLPRFRASVTQIGWV

SEQ ID NO: 38014 - protein, 146 aa, Oryza sativa
MPPRKRPPPPAKAPEAPPETKPKISPPAKPIAAAPPPPKAVLSDTVLAALSQHERPIYKPVFAGGDKGMSQTEIRIKTGMPTSTLTKHLRDLRAGRVCYRRGGPVQGGMMERIPCGVCPRIDECSPDGVISPSTCVYYKKWLQMDF

SEQ ID NO: 38015 - protein, 380 aa, Oryza sativa
MDGHQFGPWNLLPDDILELLVGRNLCEIDRLHARRVCHSWRAAFARIEPPPPPPPLPLLLLPEADDNEHGLAFSCVLSGWDAHPFFLPRAARHRVRCFGSCDGVWLFLAMEDGLQGDRARDHVLVNLHSFQFLDLPNVIRLDHTFPQLMKDIEIAIVAVTLSRQPTQQGCVAAGIIELPPFPIGVRPFAFWRMGDRVILPFYEDVFGDQAVEDVIYHNGYFLFLTQDEHIRVCQEPVFHDTNVDVDSILLRFEPRVDDGDAVLARYLVLCRGKVLMVVRLGCPHRRSPTSAFRVFERVDYLVVNAGVVEVLEHTWSEIDELGGRMLFLGRGCSRSYEEADGYPGMEGVYFLDDRSFRDPIFHDPDMVFDHTYHCCDNGRW

SEQ ID NO: 38016 - protein, 468 aa, Oryza sativa
MFSPLPVTVLVSIAALAFISGDATIVHEPVAAAAAPSSDEADSIDGGGGGFSLPLVRRRSTTTTTMIDVAKKEIQLATAIAAGDKKLLVPLYGRPQGGSTYLVQLRIGTPTDRISPRYVLFDTGSDLSWTQCEPCTNCSSFTPYPPHDPSKSRTFRRLSCFDPMCELCTAVVDGGGGSAGCLFRRRYGDGGAVSGELVSDVFHFGAAGDGGGYQLERDVAFGCAHVEDSKAVRGYSTGILALGIGKPSFVTQLGVDRFSYCIPASEITDDDDDDDDDEERSASFLRFGSHARMTGKRAPFKQDGSGYAVRLKSVVYQHGGRLNQQQPVPVYVAGEEAAAAMPMLVDSGTTLLWLPGSVFYPLQRRIEEDISLTRRYDLTHPSLYCYLGNMTDVEAVSVTLGFGGGADLELFGTSLFFTDENLTEDWVCLAVAAGNRAILGVYPQRNINVGYDLSTMEIAFDRDQCDRV

SEQ ID NO: 38017 - protein, 38 aa, Oryza sativa
MAVQWNQWRRRSGWCSPRCCSSELVELQHVTFLASLEL

SEQ ID NO: 38018 - protein, 394 aa, Oryza sativa
MKQYYKAALLRYWVVVPFLLWLVATEEQLAAGAVAGAAAESSSTWGGQGQLQLPLWVRPGDRRLLGMSVAGMAVDAVVAADGTGQYTTIKQAVKAAEADTSGRRYTIHVKAGKYVEDVEIWRPNITMIGDGIGRTIISGMKSKNKNRGTACTGTLNVQKDGFIARELTVENTAGPQAMQAAAVVVKSDRAVFFRCEITGYQDTLLADVYRQFYRECVISGTIDFVWGEATAVFQMCHLLVRRPLEGSHNTITAQGRNHSEPVVARSGFVFQECNVSTKEDLRGVDTYLGRPWHPDSRVIFMSSYLDGNVVNPKGWVAWRINNATDERSTASTVYYAEYNNTGAGANVTQRVNWHGFHLLAPHEVRNFTVDSFIDGGSWLPETNVPYHLDLDLGL

SEQ ID NO: 38019 - protein, 176 aa, Oryza sativa
MAAAVEEAFPIGFTKGIRSYWRSRKYHSVDSSAAGRGTSNLVRLGGGSGSGSDGGAWAVRLGGMFRARVKAAAPAATTTAVAKVPARVLGRVRDAYVDAMVGVAKKQAAAALSQPGAGTTEALWQKRVPVRRSRGQSKKQLRQKADELGQRLVMEMYKSVLASRDLSSMLQASRAQ

SEQ ID NO: 38020 - protein, 466 aa, Oryza sativa
MVVCSAGNAGPDAATVVNAAPWILTVAASTIDRYFQSDVVLGGNNTAVKGGAINFSNLNKSPKYPLITGESAKSSSVSDTESASHCEPGTLDASKIKGKIVLCHHSRNSDTPKTEKVGELKSAGAVGAVLVDDLEKAVATAYIDFPVTEITSNAAADIHKYISSTSEPVVTITPTITVTEYKPAPVVAHFSSRGPSPQTPNILKPDVAAPGVNILASWIPTSTLPAGEEKPSQFNLVPGTSMACPHVAGAAAAVRAWNPAWSPAAIRSAIMTTAAQLNNDGAAVTTDSGSPATPYDHGAGQVNPAAALDAGLVYELGEEDYLQFLCDYGYDASQIKLVAASLPGGFSCGAGGNASDSKDLISGLNYPSIAVTGLGKAGGTRTVSRVVTNVGAQQEATYTVAVAAPAGLDVKVVPGKLEFTKSVKKLGFQVSFSGKNAAAAAKGDLFGSITWSDGKHTVRSPFVVTI

SEQ ID NO: 38021 - protein, 98 aa, Oryza sativa; identical to SEQ ID NO: 28718

SEQ ID NO: 38022 - protein, 99 aa, Oryza sativa
MRLGPGDGEHKWTCCVHLDAPPSIPHTNHLIFFLLRISAAHPLPWGLITGGVILLVSSRKNSHNFLFSKDLFFVYCFHQSYLMLARIKEVDTYLIETQS

SEQ ID NO: 38023 - protein, 462 aa, Oryza sativa
MQAEKISQQAIGYSTTNPLFRVDTHSHQLYYPQRPLFKTVAADCLGKRDYTSGSKHDFARPEYFNGQNAIVSISVHQGFNQEDSLVLNRASLERGMFRTQHFKSYKALIENKEITKRLKHKENINFGKTPSKKGLVDSLDIDGLPYIGASLQSNDIIIGKVSDSGEDHSIKLLHTEKGIVEKVVLSATDDGTNSAFVTLRQTRSPRIGDKFASMHGQKGVIGFLDSQENFPFTHQGIVPDIVINPHGFPTRQTPGQLLEAALGKGIALGGATRYATPFTSPSVEVITEQLHKAGFSRWGGESVINGRTGERAASPVFTGPTFYQRLHHMAEDKVKFRNTGPVHPLTRQPVEDRRRYGGVKFGEMERDCLLAHGAAANLHERLFLLSDVSRLHVCRRCQRAAVVVSPAVAADGGGGRKVRGPYCRFCRSAEEVVRVSVPYGAKILYQELFSMGICLKFDTELI

SEQ ID NO: 38024 - protein, 461 aa, Oryza sativa
MSSCALVQRPPPWRAAVAPGDGMVAVDGTQFVVDCGRTIFFSGFNAYWLMMMAADPALRGAVATAFQQASAHGLNLARTWAFSDGGDQPLQSSPGVYNETMFQGLDFVIAEARRHGIYLLLCLTNNFDNFGGKRQYVRWAGDAGHNLTSDDDFFTSTIVKSYFKNHVKTVLTRVNTLTGVAYKDDPTIFAWELMNEPRCYADPTGAMVQAWVEEMAPYVKSVDGRHLVTPGLEGFYGAGEHESKELNPWGIYYGTNYVATHRTAAVDFATIHLYPDVWLWGSSADEQATFFRNWTRSHIDATAAYLGMPLLVTEYGKFLWKEVGANKAQRNYFLDLVLDAIYASASRGGPLVGGAFWQLLLDGDIVAGMDSLRDGYEIILAEDSRAASIIGEHSEQLAALNGQDADVLCRRASSHRRTRLSNSLSCGGGDTLELLLRMVLACFVSLSRSISSFIVQNFILL

SEQ ID NO: 38025 - protein, 139 aa, Oryza sativa
MDVPFFLAFAIIALLSRYVPFALPPMARDLLADNSAEPARAAKCAVSVAVAGLMLLVSLQCGAGGEQYCPDVRVEGRALWLNCAALFLGMVVGGVAVVVMPPLAAVSPLVQVMVEHLTRFTETIAVTAFAHDFCIFISS

SEQ ID NO: 38026 - protein, 324 aa, Oryza sativa
MKGEAGLDRWRGRDFSSSFPLVLILEEVAAASSSSPKIGGVDFVWLLRPTAFLLSWLVGLRRRCCGMPSPDAAAGDIESALDDFARADADCIAAALACGRTSFSYRRLPEPRRLRLTVRKLDDSYFDVQIARSAAVWELKAAIEDVFAALYDETDNKAISWQHVWSHFCLCFKDEKLTDDKATLRAFGIRDGDEVHFAQHLSVEYRPCKSLSLRRSRTSLDDFSARSRSLLDDLGEDDGDKFIDTRHSTSALEEGLYVYQHDEERMEESRKKGGFFSGWFSYSRLRGNSRTHSEDAIQSSCEKRDTRTRPKLGRWLSSKKTKGT

SEQ ID NO: 38027 - protein, 332 aa, Oryza sativa
MDCEGAAAAEIYRLPEECVAYAISMTTPGDACHSSAVSPAFRAAADSDAVWDSFLPPDHAAILARADDGIAAAGECASKKDLFARLCGRPVLLDDATMSFGLDRRSGAKCVMLSARALSIAWGDDPSRWRWTPGLPGSRFPEVAELLDVCWLEITGKLQLSLLSPATTYAAYLVYSFADYTTGLECNIGMPTPMATVTVVSGAGGTTSRPPAAPATTTTTEQHKICLQHMGEEETIMHRQELVIRLRKAFGRTVRFDPDMDIRCPRPRDGGGGGGGWREVELGEFAVPAAGGEDGVVEVSFKEETGRWKTGLIVQGIELRPKCTSKLIKLDS

SEQ ID NO: 38028 - protein, 467 aa, Oryza sativa
MESEQVKRRFGRCPYCRAMIYQDPNAIIYYCSKCRTPIRGKNPEPTDDAEYALSQLEILSADTASVFSDDPDTLSRTSSVAYGGGEQPPVRTSSAPYAAFDRGSVRAGSRSGEQSGEERGGSPMHSRVSELRPTSRRTRRPMSGDMGAFRDDGSSYGSDNDVPTSAAASYRRRASPLTSQELEASSSSMGSSGYQPSGVSSSSMGSSSVYEPSGAARSPLTDPAFQRDLLQALDNLRRVIAAVEQPYGVDAHLQQAGMPPKSASCNDAATGGSGGGGGAYAAAVTRRNSRLMRRLESQLVQALPRDGLRRDRSTSSSSSASSSRPGGDRARAAGRKHHCRAVLGGTPFVVCDKCSEILQLPAAVSANRAARLECGGCGETLSIKLPAAAAAAASGSTDRPKKIFSAPQPAVRRLDDDDAGEEHASARSNLSGDQRWPASPAEGPLHRMLGYSTVSSVFRSRRYGEQH

SEQ ID NO: 38029 - protein, 175 aa, Oryza sativa
MELDTDPTKLKAKPIIKPKVEPCDDDDELPPPPPPASGSGEDWEATTPLAAGNPFFTALIAKSHLHPKFQMWIPPRFQHRLAEPEARTAAVLHSGGKSWATSYCGHLKMKKLDAGWSEFAVDNRLLVGDACVFELVAMGAAGGLEFQVQILRGGLPAEVVTSKGLTSDQPILIVD

SEQ ID NO: 38030 - protein, 727 aa, Oryza sativa
MGFNFHPVNDSDWLIRAAMLLSFTLQVILVFVAPTRKRSCHPLPHLAVWSSYLVAGWVAVVGLGLLLNSLSISGSNNGSSSIFAFWTPFLLLHLGGPDTITAYSLDDNELWLRHLAGMLFVVFAALVVFFSSVTSNPMVTATVLVFVAGVIKYGERIYSLYSGSVRGFRDKMLGEPNPGPNYAKLMTEFESKKNAGLMVEIIVVDGEHKEALEQAEVMKNGRKSVETMAYELFAMFRVLFVNLVLSYKERRISQAYFLDLGDVMTAAAAFEVVEVELGFLYDMAYTKAAVSSTRRGCLLRFVATACLVVAVVLFVLMDKAGVRHVDRGVTYVLLLGGVAIDVAGYLMLLSSDRTLAFLDGKPKLAWLARVARAVRLPTRRWSERITKMNLIRYSLSKPEEDAGRRCWCCRWTTIPRVVRCLAWVADMVGVREILDDFFFIRHEPVSCRKIKDSNKGKKSIDVLNYVFDGLRKTANEVRYSGGNEMEEVCDYRGGEGIINELVGDIQLMELNVNDVVRESVRREFDECLLLWHVATDLCSHRRREMEVPRNGDIQSLMSISETLSEYMLYLLARRPEMLPAATATAAVIGLLRYRDTRAEARRLFRSAAAWDPTHHDAQRMLLEVNTSKKPAVVKGDKSKSVLFDACILAKALLQLGDDTMWRVVAGVWREMLVHVAGRCHGSTHVRQLSRGGELISMVWFLMAHMGIGDMYRTQVGDANAKLVVLDQ

SEQ ID NO: 38031 - protein, 115 aa, Oryza sativa
MADLTGGGGGGGGSAGSRRPLGFLKNAAKHKHGFVQLLLMGSVLMMSLRTLGQKHRRRDLIYDNADLRREHDDLSLRMRDVQDALRREADADESGALASHLRRIFAAHPASTDDK

SEQ ID NO: 38032 - protein, 252 aa, Oryza sativa
MYSSNSSSPAGKNQAIREARTNNQGGPVRCLSRSCPARRHPVGPVAARHHQPMTWAKQLRASSSGCSGTNAATTKHAGAAKPPWLRPTPPPPSTPPQHGRPGSSPNAAQARRRRPASRQPHRQPRQLLGRCHQPLPPASHRPAAPSPASPVVRLPRQTPPSSRHQPPSTAPSAHRPDQVVTGQIQPRKGQIRRRHSGSAATRRAAARPSRCAVPPPHAGDGSPPGVRERQGQKSLRLRRRRQTVGGDGGRTA

SEQ ID NO: 38033 - protein, 359 aa, Oryza sativa
MDKHTCKLCFRRFHNGRALGGHMRSHVMAAAAAAAYCPSSPAMSLASTSSTEIEMDEKKEMTKKTEQEKTLTSYVLRENPKRSYKVSAGEFSGGGGGGGGGGESSVVQDGESDTESSPPRGGAGSFFAVSRRRSKRARRRRRAPDPEPASSVSDATTEEDVAMSLLMLSRDSWTRSRSEHETHHRGASSEAEQNNNNVVNVFDEEDEDARDVAGEDHDEELSYGGGEAAAARHRTSRFQCGACRKVFRSYQALGGHRASLKRGKGGGCVPPPRPAPASSAAAPAIHECPFCFRVFDSGQALGGHKRAHMPSGGARSSPSPSPAKCGESSGSIDLNMPATMEDDFELSAVYDAEFASTRQ

SEQ ID NO: 38034 - protein, 532 aa, Oryza sativa
MAVWGGLGQAATVAQLVGADVGGLISSIIQAAATARQNKRECDQLARRVVMIADLLPHLQDPEVMRRPEVRRPLAELGDTLREAHELVASCQGRSAAYRFVMAGRLADRFRDVQSKIDSYLIVFPFIAHIDITRRLDQIYRILAPNDTAAASSSSSAGSSQSDQIYNILVSNDTTAASSPSSAGSLQSPDALEFARISQGDGGEEFTVKELVAATNNFANEIGRGSSGSVYKGRLRDGREVAIKSLVKTSPDHGREESLMRGLAILSRLRHDHIVRLLGFCVVREKKRESTLLLSFRKKKKAAAERQAGELLLVYDYMENGSLADQLHGHLSSSSSSSPVMASWKMRIKMLLGVSRGIQYLHHGATTTPIIHGDIKLSNILVDSSWVPHLTDFGAAVINGMERPSTVVHGTAGCIDPEFYSTMNQTRSSDVNSFGVVMLEMLTGKRPIFIDRKEEGEVTNLVAFSLPIIEDGELGRLLDRRPAEPTARQLEALEMVARTAARCVQLQRKERPAISEVVAILETELDLLLRDG

SEQ ID NO: 38035 - protein, 268 aa, Oryza sativa
MSQGGDGAEKEIGCHKRFVEFTKSSFDVSRISSCLVDIKNLRILMQRLCNVDPSFLTNKQKLAFWINIYNFCIMHACLQHGLPPSPDKLLGLLNQASVNVGGTVLNVLSIEHLILRHSPEGKQGIMDERERDLQLSYGLGYPEPNVVFALCRGSRSSPALRVYTAEDISNELERAKVEYLESSVRAASKKKVVVPKLLYWHMRDFADDVASLLEWIYSQLPGRSSSTGQLKRTIRELLGASGAGGKAAVAKAVEVEPYSAEFHYLLPL

SEQ ID NO: 38036 - protein, 197 aa, Oryza sativa
MMDTLEEQLRESQEHVSQLEEQLRAAKISTTGASTSTAVGRDRYFFLTPPYPPAFHALLGEASMLATESAPYLVDPTAAQPPVPELVHTSLIPTLSPQLGSSLETPIQVDSETEGTDTEPEIEPDITDPSEDEAPVPRITFLGGPRTLSTARKSTRPPGKRPKPDPEATTSEPWGLRFARASDHPLPAPGSCGWLED

SEQ ID NO: 38037 - protein, 99 aa, Oryza sativa
MLMNLNMCVSRFFNIYIKMSHLPYNSPTHLTHISSLHSYTLHIQRLISTCSIIQRSRSCAAYSLLPPRSSPRPRGSFSRLPRQSRDSRESPQSRPLHRL

SEQ ID NO: 38038 - protein, 575 aa, Oryza sativa
MPLFRAAALRRLLSTAAASSAPPKLWNLPYRLRRAAVPAARAAVSEYLHATRCLPSSHADTIAARSPRSLHAFLAGLPAVPSSLRTSAFPSLLRRHLAFHPLNELPFFLESIGLPPTTRSDLMFLADHPSLLPAVAALAHFGFPWSRLGLLFPTVLLRLPPDLITSRLASLEACLGPLPRAAIIAACLAFPSLLENDLSSSDRLVDDLGKVFGRLGPGLGTSNDIDAFLGVCRRTWMFYDAGSEVGGIGDLVGCNNQRVFLELEEERIGKMLKFFKGLGMAGEEVGRFLLTNPMVFYLEFGDVVISVPEYLRRVGLAVNEVNAAVEKHPYVVGKNLLQNLPGVLRAMELDHWFLEKISDGGESLRYLFPDFVLEDVSYDVEIERASLGGMIKMKADKRAQHIDGKLEFLKSIGYGENKIATKIIAVLHSNRDTLQERFDCLLERGLEYKMLCQIVSVFPKILNQGKKMLNDKLNYMTKELGYSVEYLELFPAFLCFDLENRVKPRYTMLRWLRENGLLRRTLAPATVLANSEKRFISNLYNVHPAAPKLWLECFSSRKHMEYYLRNIYHQHADTK

SEQ ID NO: 38039 - protein, 325 aa, Oryza sativa
MRHVPYHPGRHERHVRAALGERPVSPHGAGGLHRAAQVDPLPFHHRLPPPRVRVDRRRLQAQRVRPARRRTLLANRGAVPPHHQQQLPRARAPPAVRLPHRPLPEAHRPRGDPAADDQPRHRRRRRRRPLRGLAMARRPASQVRHLRRAGERGATERQRPPRARARAGARRRAVPVGDPEPDRRRRVARRVRAADAGARRGVGAVGGASAGAGARRGGRVPDALRVGLHHRGRRARAAAGDAAVGGGPGHHRAGHGGAGRRRGDRQGRERRLVRPRRRRGGGAARRGGRREGGVREQRQPHQGCRWRPGTGGALHRRACWLPQTL

SEQ ID NO: 38040 - protein, 694 aa, Oryza sativa
MASPLAVFHPASATAAAAARRHHPPRPPHLHLHLPLHHQPSSPRRRFAAEFAVGGADGGTGGGGGRRARGGGDVDVAAVGAALRDARTADEVETLVKGFLDDGGGGEEHLPLQVYTSVIRGLGKERRLDAAFAVVEHLKRGSGSGGGGGGVNQFVYNCLLGAVKNSGEFGRIHDVLADMEAQGVPPNIVTFNTLMSIYVEQGKIDEVFRVFDTIEGSGLVPTAATYSTVMSAYKKAGDAFAALKFITKLRGMYNKGELAVNHEDWDREFVKFEKLTVRVCYMAMRRSLVGGENPVGEVLKVLLGMDEAGVKPDRRDYERLVWACTGEEHYTIAKELYQRIRERGDGVISLSVCNHLIWLMGKAKKWWAALEIYEDLLDKGPKPNNLSYELIMSHFNILLNAAKRRGIWRWGVRLLDKMQQKGLKPGSREWSAVLLACSRAAETSAAVDIFKRMIDQGLTPDVVSYGALLSALEKGKLYDEALRVWEHMCKVGVKPNLHAYTILVSIYIGKGNHAMVDSVLRGMLSAKIEPTVVTFNAIISACVRNNKGGSAFEWFHRMKVQNIEPNEITYQMLIEALVQDGKPRLAYEMYMRACNQGLELPAKSYDTVMEACQDYGSLIDLNSLGPRPVKKVEPIRIENKFSSSYYVGDLPAAQNILVALEHLVYIDTERKGGSCSIRPPLFSEHFKLTPSLQH

SEQ ID NO: 38041 - protein, 572 aa, Oryza sativa
MEATTTDGTTDHAGKPAVRSKSGTWRACPFILGNECCERLAYYGMSANLVNYMVDRLRQGNAGAAASVNNWSGTCYVMPLVGAFLADAYLGRYRTIAAFMALYIVGLALLTMSASVPGMKPPNCATISASSCGPSPGQSAAFFVALYLIALGTGGIKPCVSSFGADQFDDADPREHRSKASFFNWFYMSINVGALVASSVLVWVQMNVGWGWGFGIPAVAMAVAVASFLMGSSLYRHQKPGGSPLTRMLQVVVAAARKSRVALPADAAALLYEGDKQACGTRRLAHTEQFRWLDRAAVVTPTTDKDDDTGSRWRLCPVTQVEELKAVVRLLPVWASGIVMSAVYGQMSTMFVLQGNTLDPRMGATFKIPSASLSIFDTLAVLAWVPVYDRLIVPAARRFTGHPRGFTQLQRMGIGLLISVFSMVAAGVLEVVRLRVAAAHGMLDSTSYLPISIFWQVQYFIIGAAEVFAFIGQIDFFYDQAPDDMRSTCTALSLTSSALGNYLSTLLVVIVTAASTRGGGLGWIPDNLNRGHLDYFFWLLAALSAVNFLVYLWIANWYRCKTVTTTEAAAQT

SEQ ID NO: 38042 - protein, 156 aa, Oryza sativa
MENRERAGAGAVGSAGSLGLRVGQAVFSSASLLFMSVGVEFFSYTAFCFLVTIMGLVIPWSCTLAMIDVYSILVGCPLRVPGVMVIVVIGDWVLAILSLAAASSSAAVIDLLLQFHGSHCSPRFCGRYQLSAMMAFLSWFLTAASSLFNLWFIASR

SEQ ID NO: 38043 - protein, 104 aa, Oryza sativa
MQLMAARKLLEQPGTAAPPVLGGSIADDRDIVIILASLLCALICVLGIGLVARCACSRRGGGGPDAAAANKGVKKSVLRAIPTVEYASAVWKPTHYSEVPPFLP

SEQ ID NO: 38044 - protein, 114 aa, Oryza sativa
MESVPLTAEAIAFTEKKMDMTLDDIIKMSKKKNPGGKKPARQPIKKRPFQNDNTNQGNAKVQRFMETRSSLRQGVLAQRRTNLGGNQFAATKQAAKKAATMPIRSRGVRWNKPR

SEQ ID NO: 38045 - protein, 109 aa, Oryza sativa
MGIRRRSERLLRAMACCRIVLVFFFFFFFFCVCVLVATTTTMDAVKGTSAAAAGGGGGGRWTELTAGSPVRYSAGADEFRGSKRRIPKGPDPIHNRRAGKTTVAPRRRD

SEQ ID NO: 38046 - protein, 289 aa, Oryza sativa
MAMASSLIRALDCTATPGTRGAPAPVAPRRRVARVRLAPRCQWRPLTARAQAAATQPDPEHQAPANGGPSAFPTTALKVGAGVALALALGGASWRARGGSAGPVLMQPAAVCSLNVVTDSASRATAERSAAAAATMRTSVDALSDSLFRREDAPRDRATLMDLVFEQVTKEQIGDRGKLTSLLQKEWSASRDSERKLDLGLLLTDVLINQREWQRAKEVCQQLTGRYQRDSRPYLHLAVINMMMAVETMLSPETANSDDIEKMSKNAMDAWKEFKTKYEHAKGSTDSST

SEQ ID NO: 38047 - protein, 44 aa, Oryza sativa
MYSRMTRDSQTGRPRWMRTGTLAWTGLAARRRSVLRSRSTATRS

SEQ ID NO: 38048 - protein, 130 aa, Oryza sativa; identical to SEQ ID NO: 37449

SEQ ID NO: 38049 - protein, 33 aa, Oryza sativa
MGQCNLVPSFSSFFSLNFCVVFLIETHRAILER

SEQ ID NO: 38050 - protein, 250 aa, Oryza sativa
MRKEELDYVLIPLGMALMVGYHAWLLLRIRRRPATTVIGVNAINRRIWVRHIMEEASGKHAVLAVQTIRNNIMASTLLASTAITLSSLIAILMSSAGGGGGDGLLPGAPLVVGAAGETALSVKFFAILVCFLVAFLLNVQSIRYYSHTSTLVNVPVRLIQRRRRPGLAVDYVTATLNRGSYFWSLGARAFYFSCPVFLWLFGPIPMFAACAAMVCALYFLDVCDDWEEEHQDHDEQDGSGSDERSGEAKV

SEQ ID NO: 38051 - protein, 60 aa, Oryza sativa
MDWVQSTFKTCPEEVGKVGNYVCNFEWHVVLQEGMGTWHAEISWLIFSICRDFVEPPCRG

SEQ ID NO: 38052 - protein, 131 aa, Oryza sativa
MDCSEFCTPPTTHRSLSGTPSCISCITARSNIHSPSRDAATPPISIHADANGAAPPAQTEATQTRRQHHCAQMDQRPARSVDTRACAAGYTHVAAMPTAALTPRARLITYAGIPSQSSVAVISVPKLSTVK

SEQ ID NO: 38053 - protein, 97 aa, Oryza sativa
MEVAVRRPRPEPGAVVVVEARRRPEPGAVVVVDPHPRLPPSLKSTWTSTPTTSKMPPSSKKFSKIMGRLNLTGPIGQRTIPACCVKFGLTRSIRETA

SEQ ID NO: 38054 - protein, 96 aa, Oryza sativa
MPNEVRSAGSAGGWEAKRGLPSDQLAAARLRHRGVAAPPARHLGFRGAARGFRHGREEEEEGNGTRSGSVRVVTETTREPTERALYIPTSPRGTCL

SEQ ID NO: 38055 - protein, 453 aa, Oryza sativa
MRRLAVAAAALLLVAWHFSLITMAAAQLSPPQPPDDQYDDPPMPGLPVSPPSPGYSDSPEPPLPDSPPSQEPDTPEPAPPTPPQQQQQPWQSPLPPRREPAPPRTVVPPQEPGWSSVPPPPARVINYTTTGCTTMLVFGDSTVDPGNNNRLQTAMKANFLPYGADFLGGRPTGRFSNGRLITDILAEKLGIARSIPGFRDPRLRSGQLRRGVSFASAGSGYDEATARSSNALSFPNQIEDLWRYKRNLQRLVGRRRAEELVRRATFIVSAGTTDLLFHYLASNQSAAESGPQYENQLISRVANYTQVMAALGGRRFVFVGVPPIGCLPIARTLLGTGTTRCHENMNLLATSFNERLVEVVRLLKNQPNIRATFVDTYTTIGMATISPNNYGLTETSRGCCGTGVIEVGQTCRGRRACTHPSKYIYWDAAHHTERMNQIITEEVIMNSIGEIYA

SEQ ID NO: 38056 - protein, 491 aa, Oryza sativa
MSASDCSLSSQSRSPIPCSEMSPKKLAVIYPPPGMISHLVSTVELGKLLAAQGLDITIVLGGHDEKEAAATATTSFLAEAAAANPELSFHRLPQPTLQCDVPADDYVSRIFEFARSSGPDLRDFLRSTSPAVLIIDFFCYSALNIGAELGIPTYFFLTTCIASVAFMLYLPVVQGENTLSFRDLGGDLVHAPGIPPIPADHLPRSQFDRDSMSSNHFLALSEQVCNAHGVMVNSCRSLERRAADAVVAGLCTFPGRRTPPLHCIGPLIKPREDDSAERHECLAWLDAQPKDSVLFLCFGSMGVFSVEQIKQVAVGLETSGHRFLWVVRRPPGFEHVTGPDLEALIFPEGFLRRTKGRGLVVMSWAPQREVLEHGAVGGFVTHCGWNSVLEAVTAGVPMLAWPLYAEQRMNKVFLVEEMRLAVAVEGYDKGVVTAEEIQEKARWIMDSDGGRELRERTLAAMREVKEALSDKGEFKIALLQLTSQWKNYNNS

SEQ ID NO: 38057 - protein, 79 aa, Oryza sativa
MQQRRRRLQLVVVEYLPVVVILVHLPPAALVRAGGERDGADDDVHDEEQRRRREVPADRRPRAHPRRRRLRHVHLSRGG

SEQ ID NO: 38058 - protein, 178 aa, Oryza sativa
MSSSSQIRQNFSSEAEAAVNRLANLYLQASYSYLSLGFYFDRDDVALPRVSRFFRELAKDKREGAERLMRLQNQRGGRVLLQAVQKPAQDEWGRSLDAMEAALNLEKGLNQALLKLHALGSSQGDPHLCDFLESHYLGEEVKLLKRLGDHLSTLRHLQADPQAGLGEYLFERLNLKHD

SEQ ID NO: 38059 - protein, 102 aa, Oryza sativa
MRRTGWSAAPSYSYPAAASPTAKLLDRIARIWAKATETRMANMASSAELSARKEEKIRKDNTRSYRELEVDLMAMASHLSPHVHRVEKRGWRIERVKGDNIG

SEQ ID NO: 38060 - protein, 81 aa, Oryza sativa
METKVRMSCRLGTMVALVLVGVVLAAILQEATVDAASSSSDSPAAKSGTGYLDYGNLKAKLPPPGVAVTKRPCIAKEKCRG

SEQ ID NO: 38061 - protein, 320 aa, Oryza sativa
MAVVAVAVVIALLAAFLTPLAVYLARRASPPPPPRRNLPPGSLGLPLIGQSLSLLRAMRRNTADRWLQDRIDRYGPVSKLSLFGAPTVLVAGPAANKVVFHHEALAPKQPRSLAAIIGRRNILELVGDDHRRVRGAILQFLRPDMVRRYVGKIDSEVRRHLAARWAGRRTVAVFPLMKTLAFDVIATLLFGLDRGAIREQLADAFDGMHEGLWTVPVDLPFTPFRRGLMASARARRLVEATVREKAAKLEHGESSPSDDLISCLLSLRDGGRQLLTEEEIVDNSVLALVAGHDTSAVLLTFMLRHLANDPATLAAMAQGK

SEQ ID NO: 38062 - protein, 186 aa, Oryza sativa
MTASWAPRWCPVYCKCGLLANARGVLDRMPDRNTVTCNAMLTGYTAAGDMANAEAVFAGMGSRTPVTWATLIRGFAEERDMVDARRWFEAAPPGMRNVVTWTVAVQGYMATGDMETARELFDKMPTWNAFVWSSMVTGYFKAGNANEAHAVFNRIPVRNLVNWNTLIAEMLTIGSPARNKKSDVLI

SEQ ID NO: 38063 - protein, 188 aa, Oryza sativa
MGMDWYAWLSAARLDQAVAYEYALVFSRNELEADDLAYFDHEFLHSMGVSVAKHRLEILKLARRSRRRAALSSRLVAAVDRVARYVRALVVVVVQGREDESSSALVLVPSQQLQPDVDKTPRRSRSKPKSTKEVAADAAAPTTPKAMRSPVLAIGGRAASTVHAVKDGEKGGEDMVRWDRLFQDLKPN

SEQ ID NO: 38064 - protein, 478 aa, Oryza sativa
MAELRTSWKSMLCCVGGGGVAGVEDDVPPERRRVRGGGHHQRLLSSSSSASSASRVSLSSLSSTGTLTPEDLSLTLSGSNLYAFTYAEMRAVTGGFSRANYLGSGGFGPVYKGRADDGLRPGLAAQAVAVKYLDLDCGTQGHREWLAEVFFLGQLRHKNLVKLIGYCYEDEHRMLVYEYMSNGSLEKHLFKSLDGAMPWMRRMQTAVGAAKGLAFLHDADTPVIYRDFKASNILLDSDFNTKLSDFGLAKDGPQGDATHVTTRVMGTNGYAAPEYIMTGHLTDKSDVYSFGVVLLELLSGRHSVDRSRRHREQSLVDWTRKYLKKPDQLHRVVMDPAMEGQYSYKGAQEAALVAYKCLSPSPKSRPSMREVVKALEPILDMNDYLQIGTFVFTVVVEDNKKDDVTKTKQVDGENKVDMRIEATVEEKHQSHHDRYRQKNPNSAIHADIVLQRDGSIGSYTTSLRRHRRTPSYLKERGA

SEQ ID NO: 38065 - protein, 627 aa, Oryza sativa
MPPAYTAAEPVSHHHHLVVVDPSTVYSPPLPALPPPPPQQPQSALVLSGGKEDLGALAMLEDSVKRLKSPKASPGAMLPKPQADAALALLAEWFLESSGGVSLSAVANPKLRSFLRHVGLPELQRTDLAGARLDARFAEARADATARVRDALFFQLAADGWREQVVTLCVNLPNGTSVFHRGVPVPAPAPSDYAEEVLLDAVASVSASGSSNDLHHCAGIVADRFKSKALRDLENKHHWMVNLSCQIHGFTRLVRDFARELPLFRSAAAKSAKLAAYFNAKPTVRSLLHKHQIQELGHASLLRVAHVPFNSSGSDYRAAFEMLEDVLTSARPLQLAVLEESYKLVCIDDSAAREMADMLQDGSFWSEVEAVHLLVKLIMDMVKEMETDRPLVGQCLPLWEDLRGKVRDWCDKFNTDEGAALNVVEKRFRKNYHPAWSAAFILDPLYLIKDASGRYLPPFKFLTPDQEKDVDMLITRMVSREEAHIAVMELMKWRTEGLDPLYAQAVQVRQPDPSTGKMKVANKQSSRLVWETCLSELKSLGKVAVRLIFLHATARGFRCSPSMLRWLSAPGSLAGGIDRAHRLVFVAANSKLERRDFSSDEDKDAELLTEGDDDVLNEPGSLERSSV

SEQ ID NO: 38066 - protein, 281 aa, Oryza sativa
MGDPNDLKTSVEALTTAMKEMQASIAANAKAIAALSSGRTSSSGATTDSGEPRTVRPPRFQKMDFPRYDGKSDPLTFLNWCESYFHQQRIMDEEKVWMASYNLEDGAQLWYMQVQADEGKPSWRRFRELLVLRYGPPLRSAPLFELADCRRTTTVEDYQDHFQALLPRAGRLTKAQRVQLFTGGLLPPLSLKVQMQNPQSLVTAMSLARQFELMEQCTATLAKAPGHGILPTLGPRQAPPQPPAPRAASPPVLIDGRPVKRLSQAEQDERRRLGLCFNCWN

SEQ ID NO: 38067 - protein, 255 aa, Oryza sativa
MLDCLWGTIDPGGVAVELHEDRMALDAICSAVPVEMISTLATKETTKAAWNCIKTMRVGKPSAQKLRSEYEALAFRDGVSVEDIAMRLNTIVTQLSTLGDPEPDDKVVEKYLCVARPRFSQLALSMKHCSTSPLCPWRRSLDASRRLRTLASRRPRPYQVAAASSISPKKSGLNVTRKRNRRRRRAMAEATPVASAAAGKGAMVVVVATTLARCARRTSAVIVANLATGPNIAGANQSRSKRTWPRRRMSPRSCS

SEQ ID NO: 38068 - protein, 37 aa, Oryza sativa
MSLSRMDLGMVSGIEALPSELWQRAEFSTMMAARCCD

SEQ ID NO: 38069 - protein, 496 aa, Oryza sativa
MEACSIARIINLGDLAMRPKKLCRLLIKLLSDLLLKESGKYEYVHPPPMETQAADLPELSQDMLMEIFALLEIPDLVRAGSVCQSWRSAYTSLRDMGQYKQQTPCLLYTTESSGEKVSCLYSLVEKRAFRLTLPGTPLHKRLPIGSSHGWVVTADELSELHLVNPITGQQIALPPVITIEQVKPIFNDIGVVQGYKIGWYCAEKDYGDPYGEPSPILTPSELRDHLYYKAFVFPDPLTRSFIVVVIHYPFCQLSFARVGDDKWTWLPHNTRYRDCVYHDGLLYALTSHGQIDAFDITASVVTRKEIIKHMKGISESMYIIRAPWGDLLQVWRTVDAAEQQDGDDDTLCYETEDGIVPVMRTKEIKVFKVDMAANKLVQINSLPYHVLFLGHNQSICLRAEEYPQLRANHVYFTDDHVDLLMLIKNGPRDIGVFDLENRRRKKTISPIWSSWPSPVWITPSIAKADGWCVPCGVGTPVMGGRELARREGGLMACSLT

SEQ ID NO: 38070 - protein, 200 aa, Oryza sativa
MACLPLTSPARGICITSRALFEFQLCIRTEDSPEAEDEPKGGTLIEGCTEFTNILRSTSFTETVRLYGEKCGLGVKFLLLVNAVQATVDVEIIHSRACGLNLKLYAKTSGFSDVLRLFRGVAQSSRKISSVVAVVRRSHLDLCIEGSPADIDLGEKLPCTRWEHRFGAGFHGTVEEVVKLGDFTTISVKVTWKAVSKLPP

SEQ ID NO: 38071 - protein, 379 aa, Oryza sativa
MASSAAYFAFSVLVALHLCCCHGQAPDAAGNSSDVTAIYSLGDSITDTGNLIKEAPPGMFETIKHLPYGITFGYPTGRCSDGLLMIDFLAQDLGLPFLNPYLGKNKSFDHGVNFAVAGATAMDPTDQFNGRFFAPFSSNSLNVQLRWFKDFMKSTFSTEEDIRKRLQSSLVLIGEIGGNDYNYALFGKSVSEVEKLIPSVVRTIIDAAKEVLEMGANRVIIPGNFPIGCMPTYLTSKRSSEPSDYDATGCLRELNRFAAKHNARLRRAIADELRPSYPAAAVAYADYFNSFLALLDAAGELGFDAGSARRACCGAGGGEYNYDPRRMCGAEGAAACAEPEKYVSWDGVHMTQAAYRAMSRLVYHGMYLEPQILSLADAP

SEQ ID NO: 38072 - protein, 254 aa, Oryza sativa
MENPSSYVRSNVAGLVSLLESCKDADPQPAVVWASSSSVYGLNDAVPFSEAHRTDKPASLYAATKKAGEAITHTYNHIYGLSITGLRFFTVYGPWGRPDMAYFFFTRNILQGKPVTVYRGRDHVDIARDFTYIDDIVRGCLAALDTAGRSTGGGGRKRGAAPYRIFNLGNTSPVTVPALVAMLERCLMVKARRHVVEMPGNGDVPFTHANISLAREQLGYRPTTSLEMGLKKFVRWYLSYYGYNRGTHAFRSRL

SEQ ID NO: 38073 - protein, 274 aa, Oryza sativa
MMESKAAMMVTILLCCSSISPAFAQKHKGPPAAAAVSLPPSPAPSPAAPRHVDLADLLSVAGPFHTFLDLLEKTDVLRTFQSQANGSKDGITVFVPKDAAFASLARSATANLTSDQLKSLALYHALPRYYSLAEFNRLGGAASPVPTLAGGEYTVNVTDDMGTVHVGSMWSNPKISSSVYSTRPVAVYEVDRVLLPMQIFRTDPPMAPSPAPAPDAKPASDAASPLPGKSSSAKAKADEKKSSSSPPSSRRGAGIAGYFLALAASASAGLLLLC

SEQ ID NO: 38074 - protein, 321 aa, Oryza sativa
MMAVTNGVIHASSREPLFSFGVIADVQYADIPDGRSFLGVPRYYRHSISVLQRAVSTWNKQHNIKFSINFGDIIDGYCPKDKSLWAVQKVLDEFEKFDGPTYHMFGNHCLYNLPRGKLVSLLKMPTDSDRAYYDFSPCPEYRFVVLDAYDFSALGWPRDHPVTAEAMKFLEEKNPNSDKNSPDGLVGVDRRFVMFNGGVGKEQLSWLNDVLQDASARRQNVILCSHLPMDPGSASFAALMWNYDEVMAIVRQYKCVKACFAGHDHKGGHSVDSHGVHHRTLEAALECPPGTSAFGHIEVYPDKLLLVGSDKMADTEMCFEP

SEQ ID NO: 38075 - protein, 368 aa, Oryza sativa
MASPALWACFVVLAAGVVAYAQRHSQQDTHVLYERLGSDVTLPCGTAAWGTAVTWRVNGTDLEAAHYNGSQLVLEGLDLSHSGHYACYQGSSWHLRYQALLHVGMPPREPVLTCRSNSYPKGFYCSWHLPSPTFIPNTFNVTVLHGSKLLGCEKDPAPKNRCHIRYTHLFSTVKYKVTLTVTNALGHNSTAITFDEFTIVKPDPPENVVARPVPSSPRRLEVTWQTPSSWPDPESFPLKFFLRYRPLILDQWQHVELSDGTTHTITDAYAGKEYIIQVAAKDNEIGTWSDWSVAAHATPWTEEPRYLTTEAQAPETTTTTTTSFVPPPTTKICDPGEVGDGVGSSTGLLLTVTVTVTVTTIAATGLFI

SEQ ID NO: 38076 - protein, 182 aa, Oryza sativa
MASCSVTLLIFFVEPSSPRHPSFASPPSSGDDGLALILSAPLIGPKPAHAARRTPPPPPGVPRLGVLAATARASLTARPRGRTRGEPVTLSLLPHRRRHRRRITGPPDVLSHLAPTSSPPGGHPVKGKREREMRKGEKGGREVLTVHPDMWGPRGSHADSTTTSDETGVKTTEGPKVNGFVS

SEQ ID NO: 38077 - protein, 59 aa, Oryza sativa
MPFPQRAAFSPRRHHLLLRHNGGTFFMGAPRRRHPPHGARRQHTRHPPRPRGQRHPRLQ

SEQ ID NO: 38078 - protein, 306 aa, Oryza sativa
MDRNTNNNSNSSSSSEMPGKKARKPYTITKPRERWSEEEHERFLDALIMYGRDWKKIEEHVGTKTTIQIRSHAQKYFLKVQKMGLAAGLPPQYPRRRLVMQQQQQQSSPAVSSSVAATAILHGQPQCLPPHHNVAVQSSIGWECPGVLPPATNDMQNLEWASTSGTAAWGNHHGLIEPPAAFVSFPGESSFMGAASFSNTSMDWTGTTSEMATASIVQDETIELPLSPDDLQFAQVYRFIGDIFDPDSPCPVETHLQKLKSMDDIIVKTILLVLRNLEDNLLSPQFEPIRRLLSTYDPNRGLSGHL

SEQ ID NO: 38079 - protein, 639 aa, Oryza sativa
MRRHAGTIILLLILACLWLCPGRSSGFSWNIFSSSSSSSPPTAGESRAAPTLELDGAVADFLMDGADDPRAVKLLENARSKLAGPSNCWQEAYRRLFASCGDIMADKEMQSRLAWHLSSCFQEDSGRPPFPRCGEVSDMVHCRKRLGVSEDQVFLEFFLETNTLCHQLQAEAFKHNTERLVNDLTRTSKSAEEKLEVIEERSDQIIQESRKVQETISSIEMQADHLAEASKNVGDQIDDVLAHSKAIFEQSKEIADSQAKLREGQTEMRETIDAGMTHIQESYESLGNGMDKLKEEAVDIQREIKTVGDSMSTKMQDLQSTANDIGSVAGKSLENQMQLLDGQSKAMDGLNNLYSFQAQALEESRETVQKLAQFGQRQQEELLSRQEEIRQAHEHLIHNSHSILEAQEEFRAKQANIFAALDKLYILHNAILAESRFIKAFFFYCCIVFLIYMLTSAKQTFSIRGHLYFGLCITLLLEIGLIKLGADDIDKQFWVISKVFLVRSVFLALATVQMLHAIFTFRDYELLNHHLLQTLVEKVRALEETAAAGEKMLPYGGGGAESERSLMDYSWVLDELADEVDSNADPSYALPGDEQRQVAVVAPRRRHCASPEEVVGENSITTSAGRRYNLRPRSSYRQT

SEQ ID NO: 38080 - protein, 501 aa, Oryza sativa
MKPRSSRDGHNAAAAAALLLAALVLSGDVLPAVVAGGAPSFNYKDALTKSIMFLEAQRSGKLPPTNRIKWRGDSGMEDGKLANVDLTGGYYDAGDNVKYGLPLAFTVTTLAWTAMAFEKELKAARELENVHAAIRWGTDYFLKAATKKDHLWVQVGDPNADHQCWVRPENMPTPRTLYQINDKTPGSEIAAETAAAMTASSMVFRKDKPYSRRLLNKAKLLFQFAKTHQGTYDGECPFYCSYSGYNDELLWAATWLYLATKRQVYADFIGHEAISSSVAEFSWDLKFPGAQVLLAELNMTSSGGLQSFKSQADNFVCAVLPDTPFHQVSITPGGMIHLRDGANSQYVTSTAFLFVAYSDILRRINQPVMCGAQAVQPARLLQFAKQQIDYLLGANPRGRSYVVGFGVNPPTQPHHRGASTPVLPPGYQVNCGMSFSEWFTPDRPNPNELTGAIMGGPDGGDNFSDKRGNSSCTEPCTYINSLSIGPLAALAIRGPNLIATQ

SEQ ID NO: 38081 - protein, 147 aa, Oryza sativa
MRGMSSGWTSGAGSGRSSSLGITIGWSSSFTSSRLHAAVASTNHAPSPVHATATSPPPSPSTNLPANGWYSTSAFPSASLITTLAGSPPPLRPPASKTCSDRTRWRSPATRSITDSGSVSAGVGDDGATSDLLVLVTVNPMLINSAS

SEQ ID NO: 38082 - protein, 272 aa, Oryza sativa
MISVLFIMQLASHATQADEATELASSCDCAEVPASQQIVSESSTAGSSTEHLVSCEIKPLGVDEDIETIDANEETHLVIQDCPQCRICLDNEGDDLIAPCHCKGTQKYVHRSCLDNWRSTKEGFAFSHCTECRAAFLLRANVPPDRWWLRLKFQLLVVRDHTLIFFIVQLVVALLGMLVYRFYGDELREMFGYEEHPYAFYAMAILAIVLVGLLYGFFIAIICGQRITERHYHVLAKQELTKEYIVEDLEGTDGVPDLDPNHVTELRILGLY

SEQ ID NO: 38083 - protein, 126 aa, Oryza sativa
MGKVGEKVRAFATNRWLVFVAAMWLQSMAGIGYLFGAISPVVKAALGYNQRQVAALGVAKDLGDCVGFLAGTLSATLPAWAMLLVGAAQNFLGYGWLWLIVTRQLPALPLSMVLLCNGQWIGCSWI

SEQ ID NO: 38084 - protein, 75 aa, Oryza sativa
MGVELTGRPPAGGSASRALALTTRSSWPRELAVLDRCICMLSMLAYAFTVPDMVLDKLSSPSAVHAPPPSSSSLP

SEQ ID NO: 38085 - protein, 595 aa, Oryza sativa
MSGSGVPAGRGSRSFDFGADDVLCSYDDFAAPSEPKRPDPADKQDFHDSRLGRPFGKAYEQESYGKEDVLFAVEKCMKKYADNLLRSLEGITNRLSQLEIYCYKLERSMGELRSDVLRDETDQRLKSLEKHLHEVHRSIQILRDKQELAETQKELAKFQLTHNTSKKKEDMPTPSFPEQKTLEEKADAPGQQLAIVLPHQVNSSLAPRASQPVQQYKDQTVQQPPSSSVPQQDRYVLSQAIVYYPQRQAPGIQDTQGQQVQPEVQYLPVRPSATQDVPVHASSQQSQAANQTQPQSFPPYQQQWPQQSSQPAPAPVAQPQPTFSQPFPPPVQQPQLSNTQQFPPQPMQQPQLSNTQQFAPQPVQQPNAQQFPPPPVQPQQSNAQLPPQAMQPQQHPPVQNQMRPQTPPNYPHYQPHQSLNPPPETLPGSMAMQGPYNTVAPAAGSRSEVPYSYGGPGMPPPQHNMQRQQLPPPSQGSFGPPSKGGYAGPPQYAPQGSSHGYNTAYGYPPSGPSAAQAPQLPPAPGNVGMSHPGSHQMMRGHPYGEMIEKAITMGYPREQVMNVIQRMTESGQPMDFNTLLDRLNEAGSGAPPRAW

SEQ ID NO: 38086 - protein, 74 aa, Oryza sativa
MAKARVNLTVVVGLSLVALLVLTAVEDVGVSADNEIGYTTMNHDDIPGTPKLLHPGGPANTYTRGCEKEQDCRD

SEQ ID NO: 38087 - protein, 585 aa, Oryza sativa
MSSSTIRKALGAVKDQTSIGLAKVTSNIAPELDVLIVKATSHDDEPAEERHIREILHLTSGSRAHVAAAVAGCSRRLSRTRDYVVALKSLMLVHRLLADGDPSFHRELLHATRRGTRLLNLSDFRDEAHSGSWDHSAFVRTYALYLDQRLEFFLHERKQGSGSNASSSADGPSPRDRWGSPDPYGRRSPSYSSPPGNGNGYGYGGYDDYRERNGNNNTDDKKPPTPVRDMKPERVLARMHHLQQLLDRFLACRPTGGAKHSRMVLVALYQIVRESFQLYADICEVLAVLLDRFFDMEYAECVKAFEAYASAAKQIDELCAFYGWCKETGVARSSEYPEVQRVTDKLLETLEEFMRDRAKRPKSPPREPEPEPVKEEEPEPDMNEIKALPAPEDYKEPEPEKVEEEVKPEPPPQPQGDLVDLREETVTADEQGNRLALALFQGPPAAGGSNGSWEAFPSNGGNEVTSAWQNPAAEPGKADWELALVETASNLSKQKATMTGGMDPLLLNGMYDQGAVRQHVNAQVTTGSASSVALPPAGQKTQVLALPAPDGSMQNVGGDPFAASLSFPPPSYVQMAEMEKKQLFD

SEQ ID NO: 38088 - protein, 72 aa, Oryza sativa
MGDKLHRREGNSPDHQLRPGNKSTPPAAWNFSSRGGGGTTKTRRRGRRAARGAIRRRRRRHGAHLRPPSSLR

SEQ ID NO: 38089 - protein, 269 aa, Oryza sativa
MAARLHLRLGPRLRGFASSFAPLLAAHPRALPLSRMGSVAPLAAARARRGFGSAVATAPPAEDEDFATAADLQFEPPLKVVKYPDPILRARNKRINTFDDNLRSLTDEMFDVMYKTDGIGLSAPQVGVNVQLMVFNPAGVKGEGEEIVLVNPVVYKMSKRLLVYEEGCLSFPGIYANVVRPDNVKIDAQDVTGAKIKVKLSGLSARVFQHEFDHLQGILFFDRMSLDVLESVREGLKDLEKKYEESTGLVSPESIENYKGRKDLISFSR

SEQ ID NO: 38090 - protein, 180 aa, Oryza sativa
MAASSPPPSLWKMTTGGTAATRGGGGTADTSKCHRRATTAKNIHHAPLPPAGPSTLLPSNSLGGRSATGMTSDPLVEAAYKMTALGSTAACVHRRLSSSSQASSCQCCLDALCGGGFSLRRRCLVHLHRRKEQKGGRRLNSRRPLFPFFLSRHHREQPMFISSPRVHVLLFFVLFFPPCV

SEQ ID NO: 38091 - protein, 220 aa, Oryza sativa
MPAIHDLHMLRQSSRAMQTSITEITAGLDKVTELVLALRAGFEAKGVALETTTTTPSPPLATAPPSLPSSLFAAAVEEPVMTMPSSPPSVQSAEVLQPLAVVPFSQLSFASEAAAVLSHLTTVRSALAGAPSTQPSPWKTIVSRRHRSLLRPQQQRGIFQQLPRAAAAITLSVARRRGASRAAPTAWDPGGPRAPGKGAQLLQHSVSNTRVNLLGVAPST

SEQ ID NO: 38092 - protein, 99 aa, Oryza sativa
MEGGGDHYDGGHLPELGGGAPFLFRSRTIGVGAIFLMWGASAIVLGAVPEPAIPIAHMLLSFAFLMAGVALLTLSVAAPRCAMAARAAATLENWLTALI

SEQ ID NO: 38093 - protein, 155 aa, Oryza sativa
MIAWIEPISCLVFSLMARFLRISAASFLCSCQPSMSSSNTSSRFLNRNGWPDIFCRSIIPISPPVFESLPSNFSDEPFSIFGCVPSVYPIIFGMRSLALPISTQLLGSQFASLARIDIPSKGRRSCSMNVSSFGIDQHFEINSQHPRIQEFSWLL

SEQ ID NO: 38094 - protein, 115 aa, Oryza sativa
MAAGHRTLLLLVAVLFAAAAVALADDAKPTILTPVANTPLGSFDGDSPADDAMDDEDAAPVGAPIGTTMTEPKPELTTTPGAAGEAAGGASAGYSLGVASHVGAAAAFVAGVFAF

SEQ ID NO: 38095 - protein, 115 aa, Oryza sativa
MSRRGEARAARAGGGARSSRQRQPADGRGGGATRAEADATRRARGFPGVFAVFFLPSFSCGRRFARGAGLRLYLAVGKQRGGQRHGRLRAARQAAAQQMQRGVVSCLGSSFSLLF

SEQ ID NO: 38096 - protein, 177 aa, Oryza sativa
MCGGAILANIMPATPRPRKCRPTTATATPKATTPNVVVVVNLVDKEAEVSESSGASSSALPDFSWQGMSASSDDDAAAQQALLDAAGGAKKRPRSEPHVTSDDEVLPASFDSDNNTAAAGLLPLDDPFLFGDQFGDLNGGAFASLMDGLFAAGEANVAGESVGLWSSGDDFLNASYY

SEQ ID NO: 38097 - protein, 467 aa, Oryza sativa
MGGSREEDRQHHNHLPSELPLGFRSSSPTTMIASSSMSKESSNYDMADFDQASLFLYLDSHDQQSIQEQRQTLNIFPSQPMHVADPAHEAKSAGVAMAMLPNGNQLQVLASHPSKKPDQQGGQKINSSVPTNPPGPNLPLPNSAKDNKNSSLIKKEGSSSGKGATTSNDPEREGRRTLDPKTLRRLAQNREAARKSRLRKKAYIQQLESSRIRLSQLEQQVHVARVQGAMLGAGDQHQGLPSGPSAASLFDLEYGRWVEEHSKLIFQLRAALNEQMADSQLQVFVNGAMAQHDELLSLKGAIARADIFHLLCGVWATPAERCFLWLGGFRPSEAIKVMLKQVEPLSEGQLMSIYELQQAAKGTEDALSHAMDGLQQSLSDTVAAPDVAAAGGFMGHMSLAMNKISAMEDIVRQADGLRQQTLHKLQHMLTIRQAARCFVAISDYFHRLRALSTLWVARPRPEEGPAM

SEQ ID NO: 38098 - protein, 269 aa, Oryza sativa
MSGQTQRLNVVPTVTMLGVMKARLVGATRGHALLKKKSDALTVQFRAILKKIVAAKESMGEAMRASSFSLAEAKYVAGDGVRHVVLQSVRSASLRVRSHQENVAGVKLPKFTHFVDPAAGSAGPSNASPSLTGLARGGQQVAACRAAHVKAIEVLVELASLQTSFLTLDEAIKTTNRRVNALENVVKPRLENTISYIKGELDELEREDFFRLKKIQGYKKREIERQMAAAKQFAEEQLAEEVALKRGISVGAATNMLVAGGERDEDIIF

SEQ ID NO: 38099 - protein, 582 aa, Oryza sativa
MRAKVELAVLLLVLVGVAAGTRPPSAPPPVTEDTLQKVAGSLEMYVDELPQMPKIYGFSMRHGHPSPIRLTIGMYQKKWKFHRDLPASTVFVFGTSAATATFPGPTIEAAQGVPLSVTWQNYLPARHILPWDPTVPTAIPRRGGVPTVVHLHGGAHPPQSDGSAFAWFTAGFGETGPAWSTPTYTYPNAQSPGVLWYHDHALGLTRANLLAGLLGAYVIRNPAVEAPLGLPCGDEFDRVLMLADRSFYADGSIYMNYTGIIPNIHPQWQPEYFGEAITVNGKAWPFLAVARRRYRFRIINTSNARYFNLSLTNGLPFTVVGSDTNYLSKPVTAASLLVSVAETFDVVVDFSQSTSSEAELVNTAPYPYPDGQAPNDLNGKVMKFVISPAKAKDTSRVPAKLLDYVAVAEEEAVQRRYIVMYEYEDAATGNPTHLYINGKRLEDPATETPRPGTTEVWEVINLTPDNHPLHLHLATFQATRVRGLVDEDAFKGCMAKLNDAVRCNVSRHAVGEEVAVPEHEKGWKNVVKIAPGYMTTIVVKFFMVDSGKPYPFDATAEPGYVYHCHILGHEDNAMIRPLKLIK

SEQ ID NO: 38100 - protein, 196 aa, Oryza sativa
MMAGRRSAHVDAAVIAAAALLLLAATAAEGAVSSWESNSDEDYHIFVDNRMSDNMHLSCYAVQGGGRSEFYHSFRADPGREVQLPYLQPAPNARLVCKWACAGNYLKGVTLFSSSWREATSGECRRRGGGCNMVFDWHEMFVDGRSGGGGRRLLGDLPQHECQKMLLVFNRRCWFKSHRHPYVGRAMNGLTDYLMA

SEQ ID NO: 38101 - protein, 342 aa, Oryza sativa
MMASSILLMYFDMQKYDAIKALEIYKRAGYQAEKLSAFYEHCKRLELARTFQFPTLRQPPPSFLITMEEYIREAPRVSIASKSLESEEQNSPSDNEDEAPQETEKPVDEEEQEPSEPEEEPQPTAESVEGTEPVPLATTGDLLNFDEEVNPLIANIEESNALALAIVAPGNENKASASQDLFALDKSGWELALVTAPSTHTSRPVDNQLAGGFDKLLLDSLYEDEARRQQIASATYNGSVAGNPFDPNDPFAMSNNFAPPSNVQLAMMQQQHQDYQEQQQQYYQIQQQQQMVTLPPQTYHQQQQTQYSALPSHDGLSNPFGDPFGGLVAMANPPKQNNSNLV

SEQ ID NO: 38102 - protein, 737 aa, Oryza sativa
MAARAPPRLRAYPLALFFLPVALLGVLAGAAPIRGDLRRVVEVEGEPRSVVWAVQLSDLHLSAFHPERAADFRRHVGGALAMVNPSLVLITGDLTDAKSKDLLSSRQEKSEWLEYEELIDEVVGLSGLNKEIFYDLRGNHDSYGVPEVGGMFDFYEKHSINARLGRTGNVQSITLQNSGWKHLFVGFDSAASIGLRSPANVFGQPTDQLLVELDAALSQWDNYSSTSAVTKVTFGHFPMSFSSSTTSGGSLRDVFLKHALSAYLCGHLHTNFGRNLKRHHRSDRNHLSAKQYYQTNMHEGTSTSIGSNNCSTTTESVAEFWEWEMGDWRSARSMRILAIDSGHVSYTDIDFRFSSMDVIIVPTFPLDSRFMQRLSTPHDLNCQANSTSHFGMVRTLVFSKYKIIAVSVEIYDSFSGSHHLVLEKDMEMTSGEGARGAMYTVPWNWKAYVDESPDRYWLQIEAKDLTGKIYYSQLRPFSVNGLTAKVRWTWKEFRVMGCQWGQLYQPIMWSTLAFLCLLILIPRTLLMLYENHMLKCRSSKTAAGSSGRHLLISFEYFAAELSKMYSVWSGMLIYLLYLVFFPWFAGNAVTENHNKMYLYYKGWSTSNLANLSTAAPYIGLPDVMVIVLPHLLFVVLPAFLIIAAIAANRAAYLVHISHKAKKDDDHYEERKCIHHVWIFRCFRRFLILLCLPIAWRHWKHCRAIVRAYEANPFMDAPIYCFGVPLLVCLAIYGASAI

SEQ ID NO: 38103 - protein, 137 aa, Oryza sativa
MQQVIAKLMVVILLATVVVIDDGVGASEGGSRHAKACRAPARFYANGCMHVCLLGSWVLIEARPAAWIGLNIGDSGEDDLAATEIGMATASTFLRSSSCQGQGGNGLEGTYRCSTSEESRRSSPESEEWTTMAGGWT

SEQ ID NO: 38104 - protein, 133 aa, Oryza sativa
MIGCGSPNWGSSRPCSWRRPRGRRTWTGSAWRGRRRCSPGCGACPCGRRGTGSRRSPPPCSTPSSAPSPRSPPCSTTGTAPRPTGRRRTSTARPRRPPPPPPPPTPPAPPRLLYRPSSSSSSEIGSIRDYTLA

SEQ ID NO: 38105 - protein, 116 aa, Oryza sativa
MSRSSSSMATVLVVLMVVSAGGLSPPCAAAAKEEKPVVVLPPAAAPGEAPSADAAAFVRPCCDTALQADRDGSSFCYDHLLPYAAFFEGNQVKVAEVAATILSTNLWVYACSLATY

SEQ ID NO: 38106 - protein, 624 aa, Oryza sativa
MWPLLLRAAVVYAALLAAGEADGSHDVLDIFGTRSESDYYRNAFQGKQGQAVPLPRGGGLRREQQELGAAGPGGSGLSKAPPRSAPSKVALDSLKLPVDTSAGFAGGWNLVSENSGVSAMHLVVMQHGKAIMFDTCTTGRSLMRLPPGRCRPDPRSKQPGAMDCWAHAVEFDYNTGALRSLKIVTDTWCSSGAFDADGNMVQTGGFFEGDKSVRYLSACGTCDWKEFPKSLADGRWYGTQLVLPDGSFIVIGGRRAFSYEFVPAAGRANARATPLRLLRDTTDDVENNLYPFVNLLPDGTLFIFANDRSIVFNYRTGQVVRELPILPGGSRNYPASAMSTLLPLDLRKGAGLSAEVIICGGATKNAFKLGETSTFPPALRDCARINPSKPGARWALDQMPSGRVMGDVLILPTGDLLMLNGAAKGCSGWGFGRQALLSPVLYSPYLRRGKRFRVLNPSNIPRMYHSTSALLPDATVLVAGSNTNSAYNFSGVDFPTEVRVERFTPPYLSPQLSPNRPAIDAASVPGDGMRYGARFTFRFTTPAQGVGQGDFKVTMYAPPFTTHGYSMNQRLLILPVTAFAAQGQRHTVTVDAPPKPELAPPGYYMVYVVAKGVPSKAAWVKMHK

SEQ ID NO: 38107 - protein, 414 aa, Oryza sativa
MGDEKHPSSKLSEILRPGKLLHRRRRLVSEFADVGREDALHESDTVKYRVFAGTWNVAGVAPPDDLDLGDWLDAKADSYDIYVLGLQEIVPLNTRNVLGPTRSSAAMKWNSLIGDALNRFTTGRRRRDDDDDEGAQRHGQQQQPFRCVVSEQMVGIFVSVWARSGLRRHVRHAAASCVGAGVLGRLGNKGAVSVRFLLHGTSFCFVCCHLASGGKDGDAQLRNADAADILSRTTFRRRTTAAASPAPEELPLPRKILDHDRVVLLGDLNYRIAMDDAEARLLVRAGKWSMLLENDELLLELAEGGSFDGWREGLVTFSPTYKYHLNSDMFYWSIDAAAGGGDKQQQRAPAWCDRILWRGKGMRQASYERCGGYRISDHRPVRALFDAVCELAGGGVGVEHSAAGIASFGHVPLL

SEQ ID NO: 38108 - protein, 138 aa, Oryza sativa
MLLNISSDGSSLESKLYDRLSRDKLVSSLRDDEMHPCRPLEASNSSVTAPSSPQMIPSQVQQSVLFCHDAARPPSCDSLVRNWRRERLSLSVHEPTGEMKVNSSNTRTGPKKFMQNLLVLLLHEKCGIGFMVCISWKL

SEQ ID NO: 38109 - protein, 743 aa, Oryza sativa
MDAGEGGGAPAAAAAVSNGFVHAVVRWCFSPLFFWLFTVALVAAIHLASTYISPSRDEEDKEKKARRGGDFAGAGEEREEEEVGRNDDKILEMMRSFSFMHASEEDFMEGMATYDHVVARMAPEPLPLTPPAAPPPSTFSFRFQHQLPEILRETAVVSGEIPVQVLEEHEPEKKPAIAMESKQERERDAEEREVVMEEEEEEEQSREAVSGRTSFASEFSGFGSDSDSESTASDGYSVKDLVVDSDSDWFLSEKDFPAAAVAGHDAGSLRGYYKAKVLKALEALDASASNLERSFQDSATTVSPGSVDGQASPDIIGAANDPAKYPEDMWSRSPSPDVEYNEDEHKGNEATNMAEEVSFDMSDDERPPASGGKKTTAMAASSSSSSPVHDAESEDENSLDHSEKETITIHDHSYESVSDVKRRSPEAISDAELDDASSRHAAVLDAKVRSPDVHSSEPIFDNYEEHEVSNDQSQAAVSDEKRSTPHSEGEFAGTDDRSHELISDVWKDIVGANDQSLASAHDEERSPDQSVAIISDDHKAIVSATNDSSNGEVSDHKSTPETAEQEFSGNDDPYELVADARIISERAEEDDIPNERPGNATRHVTFSVAEKGKVLDVVEEDQEDKWKDLTEEEEDELESLWEHQDLIEQLKLELKKVRSIGLPTILEESETPKAPMEDLKPWRIDAKFLREDPMDELNKFFKSYRERMRKFDILCYQKMYAIGMHIFTITSLPLFISDSSTNI

SEQ ID NO: 38110 - protein, 656 aa, Oryza sativa
MALRVLFLMLSAFPASCLAVAAPISPDAVPLLAFKSACADPAAALVSWTEASDPCSDRWRGITCRKPSPSPPPSSPPRVRRVVLEGLRLGGDAGAVAALAGLPMLSFLSLKNNSFTGSLGDVDFSTLAPHLKLLYLSGNGFSGRLPESVLRLRHLRRLDLSGNRLTCTIPPEIGHRLPSLLTLHLARNSLVGPLPASLGAMARLAKLNVSGNHLQGRIPKRLAAVFPASSFTGNPELCGAPLRRRCNEQLHMVYGGGGSGADTSHQPKRGRRRSNDRWMVAMIMAAVGAAVASLVAAALCGVLWLKNKKPERPRASSRTSSMAREETVRFDGCCVEFDVCTLMRGAAEMLGKGATATTYRVAMGGDNVIVDDASVVEEGKAGEVVVVKRMRRREGATREDERRKRKLAREMGTWRHANVVSLRAFYASADELLLVFDYVPNGSLHSLLHENRGPARVPLEWQTRLKLAQDAAQGLAYLHGVSGGKLAHRHLTSSNILVDAGGNARVSDFALLQLLVPAPAADEAAQKQDVHAFGVVLLEILTGRSPEDGNVDLALWARTVVREEWTSEVFDVELLPSRGGAEDEMVALLHVALLCVADDPGERPRMAVVAKMIEDIRDRGSKRSRYSASPSQVGHSYESSPSISEDTTRSTNASSS

SEQ ID NO: 38111 - protein, 254 aa, Oryza sativa; identical to SEQ ID NO: 37957

SEQ ID NO: 38112 - protein, 157 aa, Oryza sativa
MPPPAAVASLTLQVPGGAHDVTSLATSPRTMAVPGTTEQLTIFYSGSMVKFDNVPREKIRYACRLRRLYSSLQRSLQTQDTSMFPSSSSLHIQTKRRGYSVIRLLREMLMVCSSTRTKPMLVHSDSIGAQRTGTPPSRRRIHARGKSRSCQEMSHCW

SEQ ID NO: 38113 - protein, 82 aa, Oryza sativa
MGSNREWQPSYGLRGDSHRPALPSLLARKGTWPPTPRSPSTVDGGRRALAAGAPAAAVGIRRRRAPTASSRAVGPLRRAPLP

SEQ ID NO: 38114 - protein, 373 aa, Oryza sativa
MEPQPGSPETAELPAPMVLEPPPPPSDEAAAEEEEAGVKPDRQSSSSSSSSSSEEEKEVSKDVAVETSVVVPSVVAASPDDEAAAVASGDGGDVIKHDDEAVVRPDDWASWPQQPAQTVDDVAAAATTTPQAAPEIQTMSLQPAAVAGFDPERISKSIFQAKPPGSSSQAEWSVASNESLFSIHHGARPSGDLCGFYAGESRSHFDYFYDEAMAGAAGDHTSDWKLATVAEGSPGGSARSDATDGGGGAAKQKAAIDFRRHESGSAGSSSNFSFAFPILAETTTSPRKRDYGGMYHPLKKEAEQQQAASPASAFEEMTPEEERRRRRSWWCCCCGECCGCCWFACSWSSCCCCCRWRWCSRCSCSCPTFCRRN

SEQ ID NO: 38115 - protein, 557 aa, Oryza sativa
MASFHIATALSATLLLSLLVLGRSDATLPPPATPVPPSTACNGTTDPTFCRSVLPSNGTSNLYTYGRFSVAKSLANANKFLSLVNRYLSGGRLAAGAVAALQDCQLLSGLNIDFLSAAGATLNRTSSTLLDPQAEDVQTLLSAILTNQQTCADGLQAAASAWSVRNGLAVPMSNSTKLYSVSLSLFTRAWVRPSTKKPRTATPKPPRHGGRGRGLFDATDDEMVRRMALDGAAAAVSTFGAVTVDQSGAGNFTTVSDAVAAAPTNLDGTKGYFVIHVTAGVYAENVVVPKNKKYVMMVGDGIGQTVITGNRSVVDGWTTFNSATFAVLGQGFVAVNMTFRNTAGPAKHQAVALRCGADLSTFYQCSFEAYQDTLYTHSLRQFYRACDVYGTVDYVFGNAAVVFQDCTLYNRLPMQGQSNTVTAQGRTDPNQNTGTTIQGCAIVAAPDLAANTAFATTNYLGRPWKLYSRTVIMQSVVGGLIDPAGWMPWDGDYALSTLYYAEYNNSGAGADTSRRVTWPGYHVLNSTADAGNFTVGNMVLGDFWLPQTGVPFTSGLN

SEQ ID NO: 38116 - protein, 506 aa, Oryza sativa
MHAAGKAPKCKASFFLCSLLLYFLLPVLALYVVALAVSPFYSGSSCPEESLASGDVAHLAAAGDAGNRRNDSSPPSDDAAPTGLGHIVFGIAASSELWKSRREYIRTWWRPEQMSGFVWLDKPVYEFYSRNASTGLPGIKISGNTTKFPYTHGRGSRSALRITRIVSESFRLGLPGARWFVMGDDDTVFFPDNLVDVLSRYDHTQPYYIGNPSESHIQNLIFSYGMAFGGGGFAISRALAAQLAHMQDGCIDRYPALYGSDDRIHACVAELGVPLTRHLGFHQCDLWGDVLGLLGAHPVVPLVTLHHLDFLQPVFPTTRSRTAALRRLFEGPARLDSAGVAQQSVCYDGDKQWTVSVSWGFAVVVTRGVLSPREMEMPMRTFLNWYRRADYTAYAFNTRPVARQPCQTPQVYYMRQSRLDRRRNTTVTEYERRRVAPVKCGWRIPDPAALLDRVIVLKKPDPNLWKRSPRRNCCRVLSSPRQGKDRKMTIDVGVCRGGEFARIEGS

SEQ ID NO: 38117 - protein, 390 aa, Oryza sativa
MSRRQEICRNFQRGSCKYGAQCRYLHASPHQQQQQQQAKPNPFGFGTGSRQQQQPSFGSQFQQQQQQQQKPNPFGFGVQGANAQSRNAPGPAKPFQNKWVRDPSAPTKQTEAVQPPQAQAAHTSCEDPQSCRQQISEDFKNEAPIWKLTCYAHLRNGPCNIKGDISFEELRAKAYEEGKQGHSLQSIVEGERNLQNAKLMEFTNLLNSARPSQTPSFPTMSSFPEVKNNSSFGASQTNGPPVFSSFSQIGAATNIGPGPGTTAPGMPASSPFGHPSSAPLAAPTFGSSQMKFGVSSVSGNQGSGQPFGSFQAPRFPSSKSPASSVQHRDIDRQSQELLNGMVTPPSVMFEESVGNNKNENQDDSIWLKEKWAIGEIPLVEPPQRHVSHVF

SEQ ID NO: 38118 - protein, 99 aa, Oryza sativa
MSAACSPPPPPPTSGRREEDVMTLLTTMLEVGEEAEAEAAAGDELLLETLQPTVVVAPRDLGKNRHTLGFRVASGVFVLEVSWPVDAGKVAAAAWDAPV

SEQ ID NO: 38119 - protein, 400 aa, Oryza sativa
MATGDDRLSDLPDELVLRILHFANAKEAASTSLLSRPFGALWRSSGAVNLAARVPCGSRYIGRAALIARRDAFVRAAEAALSAAAAADHRVTRLTVHIECDKEDKGSIASFLLSSENDERRGHRDVFDAVLSHPAARRVEELSVAAVHPHWGDKGNIVSSHGVGIYSINPANLPSNTLRVLDLTNCRSLAPSAAAAAAAAFPRLETLRLRHCTTNIDDLHRIIDAAPELAAVRLEFVHLISNIRDVHFLVQLAMSSTTRLRFPAATALTLTNCLTNGGMSGSVIDAPRLRSLTYKGAARSQFELTSPAPDMKMVHLHFNHYFHQRDYLRFIHNFTKVKVLKLKAEHGCPWRILPQHCSPRARRRFQPLEQDGEGRRDREHAPLLPSALRPQPESHQHGVT

SEQ ID NO: 38120 - protein, 72 aa, Oryza sativa
MFFWVCLVAGLWRLRQEVSTCEYEDVRVMWEMLSRTSTAGAGAGRAAPPARRHSRFRQPRPWTESICLCAGF

SEQ ID NO: 38121 - protein, 146 aa, Oryza sativa
MFGMERILGFSEAEKQGIRPNGSTVISMAAVVYLADARVEDPILGAYGRILKLQQQLDRLKAERARQHHPATSSPAPADDVALQPEPFHQPPAQPSTPPALAIPDEEEEEDNDDDEDEDEEEGQEDGEGHAPADDDVPCAKRRKYN

SEQ ID NO: 38122 - protein, 426 aa, Oryza sativa
MGWGEPPAPQQRKAAGGGGLKLLLSVLLVGLALRLLVNPSAYLLLSSSSTTTTAAVALGQGDDAVLAGGGSLPSNGSCDLFHGKWVPDSSGPDYTNNSCRFIETPQNCMTNGRPDSGYLYWRWKPYGCEMSRFEGEKFLEAMRGKHWALIGDSILRNHVQSLLCLLAKVEEPTQVYHDKTFKSRKWHFALHNITVSLIWAPFLVEAEIFEDDDGVSTSELQLHLDILDSNWTRQWNSFDYVVISTGQWFPKTAVYWENGAVTGCHYCQDKSVAELTFEYAFRKSLRKTFQFITSSPHKPVVFYRTWSPSHFENGEWSSGGTCKRTVPFKPGETGDRESDMKMWRIEREEFAKAVVHDRHNNAGRLKLLDTFELSLQRPDGHPGPYRTYHPFEKATSAKVQNDCLHWCLPGPIDAWNDIIMQMLAIN

SEQ ID NO: 38123 - protein, 123 aa, Oryza sativa
MYLQVKCPHSPLPPAAAAAAGSSIGSSSNTPSPHERQQQPATTAERSSGGGGGSSDSRQQQHGLPAATVGSSSTGASSYGSQSVASRSGVGGGCDGEIGGMREKDGNSDGSGMVPILEIFSGI

SEQ ID NO: 38124 - protein, 349 aa, Oryza sativa
MNRRFLHVLVKDFTNHPCPYALLSINASGLFYPAAVRPNGSGEGTKLEEDYLPDRTVSFHHPSGSGGSMQFMSLGQSNNAIIGVDNECRTILYNTEWHSIRTMPSMHGCKWSPPVSLAVNNSLYVMELYPRQDGHVSFEVLAYGSQHAYGSQPVYGRMPSKPSRAYREDWYWRSLPPPPYVHYQGYEKDEAPPGYDISVEHPCKITATAVVGGGSGSSIWISTAGVGTFAFDTANDTWTKRGDWALPFRGNAEYVAEHGLWFGLSSQGDDLFCASDIAAASVSPPVVLDAWGLDHLGVTTSRKCYHSKSYLVYLGNGRFCVGRLFHVEEGDTETERFVVFDGRGGGGAK

SEQ ID NO: 38125 - protein, 140 aa, Oryza sativa
MNHAKNLIYKPQTSAAAKLAHLPLHHQERKNAAREEEIQEPEELMSSSAVIPPPSPERRVPMVADDGGGGHGTRWWRPSPSTTSSATCAATPPPGARRPSPPRRRRLPLLRRCFPSWCVPRWWSTRRTWSGSSRSCHSSR

SEQ ID NO: 38126 - protein, 306 aa, Oryza sativa
MATTKTQLLMKLGLLLLALASQPSPSQQSQAFFEIWLGQNSMQYGTPTMDTPSIAGDIVAANATAVHAAVDPAGGGKQYRTIADALAAVPDANNTRRYVFRLKPGQVFREKVAVGEGKRYVTFESDPANPAVVVWNNTAATPGKDGKPLGAAGSAIVAIEASNFIANGVVFKNDGPTGGKQGQTVALRVAEKRASFFNCTIEGGQGVLYDEMGTHYFRNCTINGGVDAIFGFGRSFYDDCRIDLQARPRRAHGASDVEEAALAHQADQFYLERLRLSQLRHRDRWRRRQGLPRQGMGGLVVRRLHL

SEQ ID NO: 38127 - protein, 112 aa, Oryza sativa
MEFIPDSCWNAGIPSAPMMSCGRLRAASRLLNVPRTALAASLASLKSSNSASTFLVPLTFSSTRLASSSRPISTRLLGVSGKNSAPTKIAVAGPMASPSDSLHPHGWILSVK

SEQ ID NO: 38128 - protein, 554 aa, Oryza sativa
MGHAVARRLILLLVFLPCFLLPLSGAHAFPASALEAEAVAARHHRLRIALNATAVHVGKALEALSGAAVAPASAVMTTPFSAGSSSSSPLAAAARDDCAELLEDSLDLLAGAGEPSAAHDDAVTWLSAALTNHDTCADSLNEAGIPHGADAAPHLAAARAMVRDCLTMYAEAASAAMATSNKDGLAGVPVRNGGGKSKKQRKRGRRRRRSLFPRWLSARDRRLLLVPAAPLVESADMVVAKDGTGTHRTISDAVKAAPERSGRRTVIHVKAGRYDENVKVGRKKTNLVFVGDGKGVTVVSAGRSVADNFTTFHTATFAASGSGFMMRDMTVENWAGPERHQAVALRVSADRAAVYRCSIIGYQDTLYAHSNRHFYRDCDVYGTVDFVFGNAAAVLQRCNLWSRSPLPGQKNTVTAQNRRDPGQSTGLVIHACRVVPSPPPPSTAPAVAAPLAPTYLGRPWKLYSRVVVMMSYIGGHVPPEGWLAWNATFALDTLYYGEYMNYGPGAGVAGRVAWPGHRVINDSAEAERFTVARFISGASWLPATGVSFLSGLSL

SEQ ID NO: 38129 - protein, 130 aa, Oryza sativa
MATMGEELYESDVLWPDHQSPHDVVPPTATATATAPTPARRGQQQITRHCSTASSRPVDIPRAAQRWSGGDQGDDCGGGTMVPPHVMVSRRRSTEEGDQAFSLRTGTGRARRDLSHLRNSVLRMTGFIEG

SEQ ID NO: 38130 - protein, 304 aa, Oryza sativa
MDVEFFADLDLDALLASFSSSAAAAGSGVSGLFAPSPPHDAEAGSPESVSSRRPSPSREAALSEVERFLMEEGPAAEEGVGAEDFFDALLVDGGEEEEEEEGKGSEAGGSTDGDSGKENEVATPDAEKEDVEAEVDGDDPMSKKKRRQMRNRDSAMKSRERKKMYVKDLETKSKYLEAECRRLSYALQCCAAENMALRQSLLKDRPVGAATAMQESAVLTETLPLVSLLWLVSIVCLLPVPGLPNRNPVARSSAGRDLATVTGKKTSSEQQLEETLLLHGRRWKGSRARIKLDTGPFRLAAAAC

SEQ ID NO: 38131 - protein, 184 aa, Oryza sativa
MEHIGPFLLAAMAVAAAVAAASETATTVPVAALPPLPALPVTAAASTLQPGTASCMDDLMPCATVSDDPTMLTPCCEAVAEVLKSDPECLCKVAEMSRNNTRKLASVSNNLDSDQQLFAQCKITGVSSDVCHKDKGHQGGHNETDTPAGDSLTDSQAKNASPPSRLSEAFRILFLLQILFIFGL

SEQ ID NO: 38132 - protein, 111 aa, Oryza sativa
MDNNGGGSAPTSSKRSCPFVNITNVINAKLTNKRAARLSQVKSMFQKTVRTVNRSTRTLHIRFREPQLLDLAMKITLLSLGMCGYHAQTKLNCRTVHPTCMKMLLIPVRLN

SEQ ID NO: 38133 - protein, 360 aa, Oryza sativa
MLGSLNEALDEAHKLVESCCGDGQMYRLVGSRAVDAKLDSVNNKISNCLMNLLAAQGAGTAKKIDELHLVVVDRNHHRASNSNAGVREDKMTSHQHAAPGYSRPNNSARMKQNTAGIMFGNHTASDHGRRLNSSVRSLRVMNPALSHHQLANNSAWWKQSEINTGSSNYSVRSLGESSSAKSSSGRSWTEINSANSSIVRSRTKINSAHSSIVRSRTEINSAHSSIVRSRTKINSAHSSIVRSQTEINSNRSSINSVREISSAKSIHKEKIDPLLAHSHHQANNSVRVSYTCKNGNKSVQQNGVNSSNSMRSEKASTAATARPPLQGSYSDAGVAGYPNGQGYALYQYSIEDDPTSCAVM

SEQ ID NO: 38134 - protein, 196 aa, Oryza sativa
MKSLSFSLTGTYLVCLYLLQKLPERTWSSRERLSNSFWNSSMDANVVERAGAGDASCCCTPPPRPPPRSSRRRRNDDESGAGSESLLEGSFRRQKVTRLDCAMLADHLLRFTSMTEHQLSQSPCTRDQTEKAWAASIAASLSAAPASSAYVTHRCRCRYWLARRIASAAQRPAASVSDRLHTRTASLAPRDTEALV

SEQ ID NO: 38135 - protein, 183 aa, Oryza sativa
MRGLPCRSLWATREAKNLYAWGLPRRRRRLPPSSSPLLPPLFSLPPSFSLDLGLPAARASPPHPAPAASVPDQPRRPRQGLAVACQAGGLLLWPDPGRRWVASGSGDLLPAYGAVAASAGGGGVRGTAGPGPFRSRSSASSVGVRWGRAPSGGGDVGCSTELGRWCRQSGSSSRCSPAIVQVM

SEQ ID NO: 38136 - protein, 578 aa, Oryza sativa
MAGDQMHVLSALDSAKTQWYHFTAIVIAGMGFFTDAYDLFCISLVTKLIGRVYYTADGASKPGSLPPNVSAAVNGVAFVGTLTGQLFFGWLGDRVGRKSVYGMTLLLMIICSVASGLSFGDTPTSVMATLCFFRFWLGFGIGGDYPLSATIMSEYANKRTRGAFIAAVFAMQGFGILAGGAVAIGITAIFRSRFPAPPFAADPAASTPPQADYVWRLILMFGALPAALTFYWRMRMPETARYTAIVAKNAERAAADMSKVLQVKITAEQAEMASPVDKPFTSKPFGLFSGEFARRHGFHLLGTTSTWLLLDIAYYSQNLFQKDVFSAIGWIPEAKTMSALDELYHIARADADRAVRDGAGLLVHGGADRRGRAVQDPGGGVLRDDGVHAGAGGAVRPLDGGGEPDRVRGAVRAHLLLRQLRAERDDVHRAGGDIPGEAARDVPRDIGGVGEGGRDRRVFRVPVPGAEPRPGQGGGARLPTGHRRPQLALRARRLQLARLPPHLPCAGAQGQVARGDVTGERGRPAVIHPLIPPPSVCMQDPCICVVSPLEIFVLFFLEPIGMHMFFFFLESIRGWMMK

SEQ ID NO: 38137 - protein, 389 aa, Oryza sativa
MTSAAPAAAQFAAPAPAAMGIYDRRHHPLAAGVWGDHPFIRPDTTASTSNAAAAAMVVAPPPLTEPKFESQLALPLQHGDDQDNAAALQESPRHASDSFEQEASKPRDKIQRRLAQNREAARKSRLRKKAYIQNLETSRMKLAHLEQEITRARQQSAYINRSSNPATLPAPIDSGVVTFEVEYAQWVEEQGRQTAELRASLQAAAEGPELRAVVEAALAHYDRLFAAKREAARRDVFFVMSGVWRTGAERFFLWIAGFRPSEVIRVLAPQLEPMTERQAADVQGLQQKARHLEDALSQGMDKLKQTLADSLLAEAVVVSTSCDASPPPPPPEEEEPSSSAAGDGGCYMAQMGSAMGRLSNLVAFVDHVRHRRSPPPTSHLHVRRRAELG

SEQ ID NO: 38138 - protein, 420 aa, Oryza sativa
MLRAAARALTVSSLNPKVLALADHHLGGLVARRAQSMQQELDANPASHPFSEIIYCNHSNPQSQGQQPNKFFREVLALCNHPHLLDRSEASFMFSSDAITRAREIVGFIPGKTTGGYSHCQGIEGLRDAIAAGIASRDGLPSYSEDIFLTDGAAAPVHMMMHLLIRGKKDGILCPIPSHSLYTDSMVLRGATLVPYYLDESRGWSVNISDLKKQLDGARAKGIDVRGLVVVNPGNPTGQVLVEENQCEIVELCKNECLVLLADEVYQENIYTDQKKFNSFKKVARSIGYGEGDISLVSFHSVSNGYYGECGRRGGYMEVTGFSSEVRGEVYKVASLSACSNISGQILMSLVMNPPKVGDESYPSYRAERDSILSSLSCCAEAMVSTFNSMEGMTCNKAEVEYLCSLVFGCRHGQLKLLRR

SEQ ID NO: 38139 - protein, 25 aa, Oryza sativa
MADLGGGVGGGVASVPNCASTLLCL

SEQ ID NO: 38140 - protein, 59 aa, Oryza sativa
MMPMPLFRWFLSFSFSLFFLARFYGFFLVSDISCTVVIRKIMSEDGYGPYGVILFRIRG

SEQ ID NO: 38141 - protein, 235 aa, Oryza sativa
MAGGGDELKLLGTWFSPFVSRVKFVFHLKGLSYENIEEDLKNKSELLLKSNPAIKKVPVLFHNGKPLCESMIIVEYIDETFAGVGPSVVPTDAYERAVARFWVSYIDNKLVAPWFQVFRSKSMEEKAEGLKQIFVAVMVLEEAFKECSKGRPFFGGDNAGIVDIALGSQLGWVRASQALSGIKLFDPAKTPLLAAWAERFLALDAAKASMPEFGRLIEYAKMRQAESDAANAAAN

SEQ ID NO: 38142 - protein, 16 aa, Oryza sativa
MDKMGETLFVFLNFES

SEQ ID NO: 38143 - protein, 514 aa, Oryza sativa
MAMVQDITGYLCLSLALLLLTLVLHKVARKATGNGAGKPRLPPGPWRLPVIGNLHQVAMGGPLVHRTMADLARRLDAPLMSLRLGELRVVVASSANAAREITKTHDVAFATRPWTSTIRVLMSDGVGLVFAPYGALWRQLRKIAVVELLSARRVQSFRRIREDEVGRLVAAVAAAPAAQPVNVSERIAALISDSAVRTIIGGRFERRDEFLEGLAEAIKITSGFSLGDLFPSSRLASFVGGTTRRAEANHRKNFELIECALRQHEERRAAGAVDDDEDLVDVLLRVQKDGSLQMPLTMGNIKAVVLELFGAGSETSANTLQWAMTELIMNPRVMLKAQAELSNVIKGKQTISEDDLVELKYLKLIIKETLRLHPVVPLLLPRECRETCEVMGYDIPIGTTVLVNVWAIGRDPKYWEDAETFIPERFEDGHIDFKGTNFEFIPFGAGRRMCPGMAFAEVIMELALASLLYHFDWELPDGISPTKVDMMEELGATIRRKNDLYLIPTVRVPLSTVL

SEQ ID NO: 38144 - protein, 137 aa, Oryza sativa
MDLHRPATGWPRERRGRRIRSRRRRILQPPCLSRRCSGSGSPDDRGSVSGDCGSAGDDDGNHSSHGDVCNKLPPSPTQLDDGIRRLGIRDFLLEFFLLEKNVFVGEYLNIAASEILFSLVVVLAWPPTKMIFTGTLY

SEQ ID NO: 38145 - protein, 486 aa, Oryza sativa
MNGATAGSGSGSDHDDARAAEEARGEEAAGRAVEVEEEEEEEEAVPVAEERAAWGGGGTPPTPEPKSDADAEGAGSLDRVELNAGAGGGREREDDEGEDEAVGARGVELNGEDAMSHDGHDGDEDGDDEEDGDDGEEEEEEDDDEEDDDDDSTPDASPRAEAKAEGESSTVMAGCANQPAEPDPFLDGDDSGTEEEQAAFMVELERFHREHGLEFKPPKFYGKGLNCLMLWRQVAHLGGHEQVTICKLWRQVGETFRPPKTCTTVSWSFRIFYEKALLEYEKYKVRTGQLQVPLSALPQPGGTGREIGMNQSSSARVRRDSAARAMQGWHAHRLLTNGIYGDQMLKEKDSVPSSSRGVLKRKKASSPECAIKVSRTKINKSQDDSMVTDVGEPAEWVKINVRQTKDCFEIYALVPGLLREEVHVQSDPAGRLVITGDPEQPDNPWGITPFKKVVNLPLRIDPHQTSAVVTLHGQLFVRAPFGHADM

SEQ ID NO: 38146 - protein, 269 aa, Oryza sativa
MNEPRCDADPTGGMVQAWVEEMAPYVKRVDGGRHLVTAGLEGFYGDGEHESKELNPWGIYYGTNYVATHRAAGVDFATIHLYPDVWLWGSTADEQAAFFRNWTRSHVHDTAAFLGKPLPVTEHGKFLWKGGGANKTQRNYFLDVVLDAIYASASRGGPLVGGAFWQLLLDDDVVAGMDDLRDGYEIILAEDSRAASIIGEHSEQLASLNGQDAEALRRRRRRPASSHRKTRLGSGGDSDALRLPRTLLIRFISLSRSISSFIQDNFVLF

SEQ ID NO: 38147 - protein, 66 aa, Oryza sativa
MHKSLSPLRRPVSSSGSCLRRRCCRCRCWPPAPAAARRLSSRNTCLPGPATPGGSRTWRGTCRRRA

SEQ ID NO: 38148 - protein, 155 aa, Oryza sativa
MDGLLGGREGKRRRLSSSAPWRVADVDAWNKNKYIVNKYYCTDKCICFPCFLPFLIQVICWLDHRGEAWIRCCSLAASCSSLSGHSRWYQLLSHAVHVVSGDRLHGRHESKRNLIIFWCEDHHWPQCWQVLEMVYLPQVLTTSPTGKKEKNLSIL

SEQ ID NO: 38149 - protein, 238 aa, Oryza sativa
MAMAMAASSCASCSAAADSFSSSASSCCCCGSSRIQVRGDAPFLFFLQELGVGSGGEGCFCCASSPGYTPSSPMVMGSPRRAASPDYTPSTPPRRAASPDYTPSTPTTPRRAASPNYTPSTPQRHAASPDYTPSTPTPPRRAASLDYTPSTPPPRAASPDYTPLSPPPRAASPEYSPSTPPPPPVPSDAESGTSPLWRRRRRHHPYQRRGSSIACSPRAVQVAGGHHHHPRCAILHGY

SEQ ID NO: 38150 - protein, 243 aa, Oryza sativa
MTDELRSFLELNLPKVKEGKKAKYSVGVMEPKVGSHISEATGIPCQCNEFVQELLRGVRLHFDHFIDQLKPTDLEKAQLGLGHSYSRAKVKFNVNRVDNMVIQAIFLLDTLDKDINSFSMRVREWYSWHFPELVKIVNDNYVYSKIAKFVVNKSDLAEKDIPALADIIGDEDKAKEIVEAAKASMGQDLSPVDLINVQQFAQRVMNLSEYRKNLYEYLVTKMNDIAPNLTSLIGEIVGGLELG

SEQ ID NO: 38151 - protein, 325 aa, Oryza sativa
MLDRGICLDTIFFNSIIDSHCKEGRVIESEKLFDLMVRIGVKPDIITYSTLIDGYCLAGKMDEAMKLLSGMVSVGLKPNTVTYSTLINGYCKISRMEDALVLFKEMESSGVSPDTITYNIILQGLFQTRRTAAAKELYVRITESGTQIELSTYNIILHGLCKNKLTDDALQMFQNLCLMDLKLEARTFNIMIDALLKVGRNDEAKDLFVAFSSNGLVPNYWTYRLMAENIIGQGLLEELDQLFLSMEDNGCTVDSGMLNFIVRELLQRGEITRAGTYLSMIDEKHFSLEASTASLFIDLLSGGKYQEYYRFLPEKYKSFIESLSC

SEQ ID NO: 38152 - protein, 141 aa, Oryza sativa
MGVHLLKRQQSSASAGGSSAGGGMPPKGCMAVRVVGPGGVGGGGGGAEGERFVVPVGYLKHPLFVGLLKEAEEEFGFEQKGAITIPCGVDHFRRVQGIIHHQKHHHGGSHGAGGAGAGGLLSGHGSSGHHNNFHIAACFRA

SEQ ID NO: 38153 - protein, 378 aa, Oryza sativa
MGKAARTGLPPRRRGLPEEIVVWEILVRLPPKPLLRCRQVCRAWRRLTSTGDFLLTHHRHQPTLPLVDRYKCNEEFLLGIVSLDRRAAAARLQPVAQLDDTCYMMSADASCDGLLLLSIGGIWWFICNPITRQFGALHLLCGFMVMGFYKHPPTGDYRLLLYRNQELMSEHLIPGDRNTCYVYTLGSSDVPRCIGWPETSASGATVVLHCSLHWYQRSQDMILVFDTTAESFRWMRAPSDRMKCTLDSGNLFDMDGKLGMYCSNDGCTIVDIWVLQDYKREIWSLKYQVELPVPEIRGMLGGAYHWSAMVLSQEGVVLVLVSCDRWLFYIDTEGNLLASFQHYGDGLFTIGLKLKPSLVQHAFFPLLDSYAVNASPFI

SEQ ID NO: 38154 - protein, 574 aa, Oryza sativa
MEDGMDFSPHKNSTEQNRTSFEEDDQFSIRSAPSKPSPDKKSKPKNKPNHHSDKTANPPPQRPETTAALVTTTAAAATAGTNRGEAVSNGSLDSISSGSTRSNSLESSSTGAAAAPTVLTTSASTASVSASGQNVKRHTGGDSRWEAVQAATARDAPAPLSLAHFRLLKRLGYGDIGSVYLVELRGTSAFFAMKVMDKASIASRNKMARAETEREILGLLDHPFLPTLYTHFETDKFYCLVMEYCSGGNLHSLRQKQPSKHFSEPAARFYVAEVLLALEYLHMLGIVYRDLKPENVLVRDDGHIMLSDFDLSLRCTVCPTLVKSSSVHATGSGGGIGSRGDAIDGGESMPANQGCIQPSSFFPRILPRRSRKASKSDMGLLLNGAAAVEFNAEPTEARSMSFVGTHEYLAPEIIRGEGHGSAVDWWTLGIFLYELIHGATPFKGAGNRATLCNVIEQPLRFPSDGGASAVARDLIRGLLVKEPHKRIAFTRGATEIKQHPFFDGVNWALVRSLTPPSVPEPVDFRQYAAAASATTPKDKKPPENAAAAAAPAAADGGGAANSSTGESYTDFEYF

SEQ ID NO: 38155 - protein, 425 aa, Oryza sativa
MAKQAWSSLFGCFTSHHDGGGKRKKGGGGGKKAKKKVAAAASQKQRKLQSRLSFSDLSFGGMVSPEDLSLSLAGSNLHVFTIAELRAVTRDFSMTNFIGEGGFGPVYKGYVDDKLKPGLRAQPVAVKLLDLEGTQGHNEWLTEVIFLGQLRHPHLVKLIGYCYEDEHRLLVYEFMTRGSLEKHLFKKYAASLPWSTRLKIAIGAAKGLAFLHEAEKPVIYRDFKTSNILLDSDFKAKLSDFGLAKDGPEDDETHVSTRVMGTQGYAAPEYIMTGHLTAKSDVYGFGVVLLELLSGRKSVDKSRPAREQNLVEWARPYLTDARRLGRVMDRNLAGQYPAKAAQKAAALAHRCVSLNPKSRPHMSAVVEALEPLLALDDDCLVGTFVYVAPPDDVAANGDGSSKRRAGRRRSDGAAAAAAADGVQRE

SEQ ID NO: 38156 - protein, 97 aa, Oryza sativa
MARARRARRRCPPRAALPPPPPPRPPPWTASAAVWSGRAPPPRLHHPRRRPPPPTAAAAGAARRRRRRRRRKGACCGWCRRASCGGWAPSGCARRCR

SEQ ID NO: 38157 - protein, 284 aa, Oryza sativa
MQTVLSHEIGPVSLNAQEKVSLPDDLVLNENLAELVDIISEDDTTLSSSIVFYPRSCGSVETRDEPALSLGSSSLLSEHRKRHGLYYLPTGKAEDGPVDYPHANDPLLPASSESALDDKLKTIQPVTGGKKPKAVKSRPKVVKLDGEDFLSSMVASASVPKEDSLSGAVRGVLLGRDLKPSSSQKASDKAYEGIINKMDSGESSSQWKNNVDADFVGHPTSSSRPSIQQSHDKESTNPLESDGKEARKHRRSRSGHRQGKHKHRERHCTQPDVPQAPIIQDFLL

SEQ ID NO: 38158 - protein, 383 aa, Oryza sativa
MNPPELMDDLVDEILLRLPPDEPACLARASAVCKRWRRLLSDRAFLLRRRRRAPPPLLGFLHNLDNADHPDRFVPTTALPIPPPPPELHCGMALDCRHGCALLDAYPSRIDLVVWHPMTGHLLRRLPRPDVPYLLYYNAAVLCAAAAAGCDHLDCHEGPFRVVVVGTEEDNEAWATVYSSESDEWSPPTSARLARGPEFCVEGKPATLIGDSLYFALVFGIGVVKFDMKRHRLSLIDPPAELDDGFVLMPLDNDGVLGLAAVEDHSLLSVWSMDVSLDHGHGVANWEKCRVIELDSLLPNLDHSTPVLPIGFVEGANIIFLRTDAGVFTLELRSMRVTKVCKMGSSTLSCRTRASTFLVSISSSSTADLRSVMAGHGDRRLLT

SEQ ID NO: 38159 - protein, 244 aa, Oryza sativa
MSNAGRRRRSLTSIAPSPVSSSSFPSGAREAQAPPSQLPSWKFSQVLGELPLAAAGEGHDNGTLQDDGDTISAIEFDGRGEHLAAGDHAGRVILFRRTDDESHPPPPPSRADLERTDYAAAAPPAYAYMAEFQSHEQEFDVLHSLEIGEKVKKLRWCARPNSSSLSMLATNDRTVKLWKVSEHRSRKGNGQPRRRRSTPTSASLSEIALLGEGDSSVRNGYYYEWASKKARNYLSPDSAEHSEK

SEQ ID NO: 38160 - protein, 138 aa, Oryza sativa
MSVEILDGKTVRSFVEDEGAFNSSVDGRFAALDANRDGLLSYTEMAGELMSLRVLEKHFGVDDEAAMGPDELVELYRGLFARFDRDGNGAVDLEEFRAEMKEMLLAVANGLGFLPVQMVVEEGSFLKVAVDRELAKAA

SEQ ID NO: 38161 - protein, 211 aa, Oryza sativa
MEMAIKGHYSEVCDVVDRLFVAMFDHLNKNCAKELEAINRQYPFKPLKYLPKTLRIEYDEGIRMLKEAGVHVEAMGDLNTESEKKLGELVHTKYDTDFYMLCRYPSAVRPFYTMPCSDDPRYSNSFDVFVRGEEIISGAQRVHVPEVLARQAEERGIDVGSIAAYVDAFRYGAPPHGGFGVGLERVVMLFCGLGNIRKASLFPRDPRRLNP

SEQ ID NO: 38162 - protein, 73 aa, Oryza sativa
MGSHLHRDLLLAVVLAAIAAASLAGRADAARPLPPSPALPSPSSSSALEAAKAAVSTLMEMLPSGPSAGGAGH

SEQ ID NO: 38163 - protein, 174 aa, Oryza sativa
MGTATRGSSTRAAATAAASTPSSARASTKGTGSTASTTATASRAGRAAAATAASTARASATATASTASTAATATPASGPVARATASARRPAPTEAPTSESSSAVSNTASAATISEMVIGMLGSTLGTRSMDLVSTALPMATATKAPGMKARSKDLGCTHSATATSDRGTGIQGL

SEQ ID NO: 38164 - protein, 94 aa, Oryza sativa
MISPTPQHAILCFPLSHRPSPTPSQRRCPDPRMHHLQIWRWLGFGLEWWLAAGRTRVRSGGAAAGAVAACARQQVAGGDARRQRRRAACGRSSS

SEQ ID NO: 38165 - protein, 176 aa, Oryza sativa
MASHVDPLVVGRVIGDVVDLFVPTTAMSVRFGTKDLTNGCEIKPSVAAAPPAVQIAGRVNELFALVMTDPDAPSPSEPTMREWLHWLVVNIPGGTDPSQGDVVVPYMGPRPPVGIHRYVMVLFQQKARVAAPPPDEDAARARFSTRAFADRHDLGLPVAALYFNAQKEPAIRRRRY

SEQ ID NO: 38166 - protein, 126 aa, Oryza sativa
MKLLNGHATQLKALQVLAKRKAESRTALLIALLKILPHLLSRRKINEIRSNGDFSAHAQEGHHTLIITPPSCNFLLIFLVMRWIIIQVRGHTIRPELHTSRGSPLTVILAIEFYIQRQKTDITKWI

SEQ ID NO: 38167 - protein, 147 aa, Oryza sativa
MGSSVGATIFYCVALSMVIVMTQLPPTEADSVAAAEFASSDLKADKLTSRKLMGAANAPAPAPLGMCPVRFDEMKGPFTELGKKCKAASVTECCDAFKEIACPHNTLLNDLNNGCGDDMFYFIHTYGRLPPGTIFKKCVEGPYGMKC

SEQ ID NO: 38168 - protein, 115 aa, Oryza sativa
MLKLNSTINAGNGSIVDAYQQWWLRRRLLRRASPLPHQDRHRRGSESWSWAVKRVVVVALVVAAKKLELDDTGAAVAVAAARSMVYHGRGEGGRRRAAELMGRGGGGGDSYLWRR

SEQ ID NO: 38169 - protein, 654 aa, Oryza sativa
MSWLRNAVHRAVEASGGPLLTRTVRSSLGTVVHHAGQAVAGGARLINDRIGSRSYKSMRLTAKRLEDAALSYRGEDRVQLLRRWLVMLRETQRAAAAEKEAKRAGHPDQHLPVLDLYMDYETGAEPMNFIHVFLYSQALECLVLSMIMEFPTEEEASLLSEVFGLCLPGGKDVHNAILSSIKELAKLFSTYHDEVLAKRAELLQFAQCAISGLKINPEISRLDDEILQLQQRINGMDALRSNSTSRRSKASQTVAEGFRTAVNEIRLCSRMEELVLMKKSMHHGNSFETYFEKVNKLKVLSESLANSAAKAERRIMENRLQKEESLIFRVTKTNEVSVTEKEILAEISGLQKQKDLLEDELKKVDNILNAAVMKLKKTREERDQFDEASNQIVLHLKAKEEELSRSIASCKVEASTVGAWIIFLEDTWKLQALYEELRKKQANDELDKCATCFAKLIDHHLYARVEELSTCIDSIKTFVDNLKIFDNRSVSAEDGNNGSSKQSNPRKYLEEEYLEAEKKVVAAFSLVDNIRAIYLSNQDYQARRDDPDVKKLFANIDKLRVEFESVPRPLLQIEIKEREERAKQSRSLQAARSSRQAGHESPIPAQLRTRLPSESDSELAKSDPEYREYSADDISGWEFDDLEDDGARLSVKSI

SEQ ID NO: 38170 - protein, 182 aa, Oryza sativa
MAQMEFEPDKVGTVTVNGKVYSFRRVHWHAPSEHTINGEKHPLELQMVHAAADGSLAVIAILYKYGAPDSFYFQLKRKLAELAADGCSFGEENAQVALGLVHLRSLQKRTGSYFRYAGSLTAPPCTEDVFWSVLGKIRQISQEQVALITALLPAGGARPTQPLNGRTVQFYNPPNSTISFKV

SEQ ID NO: 38171 - protein, 507 aa, Oryza sativa
MGDHRATAKVRVNGAPAEATLFCTDPPGAANGGGGDGGELRWRCAGGAAAERVLSLDADVLGVEARGKEVVVKAFVLPADAAARSVSCAAGAGKGGGGRRRRRRDYVFEMAAGEDAAAAWCDRMRGSLDSLGRPKRLFILVNPFGGKKCGKKIYEAEIKPLFEAAGVNVTMQETRYQGHARQVASSLDLARYDGIVCVSGDGVLVEVVNGILQRMDWEEAMKIPIGVVPAGTGNGMAKSLLHSASKTYSVPNAVFAIIRGYSQSLDVCTIVQGRKKFFSVLNMTWGLVADIDIESEKYRWMGSARFDFYALVRIMNLRKYYGSIQYVPAPGYEAYGDVVKQVENCTVECQEQIGKSLCSYQGPSVEFQGSEWRSLDGPFVSIWINNVQWAAESIMAAPGAKFSDGYMDAVIVRDCPKADLLALLMKMGDGSHVKSPYVTYLKVRCLRLSPGQLVENPKRGGIIDVDGEAIARGEGTYGKNQKQDVMGYGPSIQMTVHRALATMYCPK

SEQ ID NO: 38172 - protein, 497 aa, Oryza sativa
MRLHAGAVQLQYFMPQQGATAAAAADHHQADSATACSASTSPAAAAATMWEYHHQLSTHAALQPSSSFPYSYWSPYSGSTALAGSAFAADSSSSSTDVMRLPAAGEHAHGHGWSHGELSNSTTGGGYRENFLDLLASKNVTPEMFEEVPASEHYNVAPAGTTLTTTARSFDHHARSDVSPIKYEIAGSPLYLGGTNTVLQVQDMTMMSSTPACYGEHHHHHHHQLTKEGSCNHQQQEQHELAISPMASFLQQISSGSASVGVHNSSLDYSGLGDQPDKICCQDGREMEASPFGMRSLPDLGSFAGYTPAIESTSVQPYMRCANSSDSNRQEQETVPARSSSSGSGAAATDRKKRKSEERQESTVKKSKQEASKASPPKQPVPKVKLGEKITALQQIVSPFGKTDTASVLFETIKYIKFLHEQVQLLSEPYTNSSRSNKQGNSVPWGDQAEASKGETMEHDLRNRGLCLVPVSWTPEVYRDGNAMDYWTPAYRGCLYR

SEQ ID NO: 38173 - protein, 207 aa, Oryza sativa
MNTYAGMIAGGWLKYWIEVGAVLSTIGLYSATLSSAAFQLLGMADLGLLPRAFALRAPVFDTPWVGILATAAITLAMSFTSFDTIVASANFLYSLGMLLEFAAFVRLRARLPAMPRPYAVPLRGLPAAAALCAVPSAFLVFVMAIAGWKVYAISAVFTAAGVAVYYLMDLCKARGWLTFSAAAADRGGSGDDAMMYRRQGSTASEVV

SEQ ID NO: 38174 - protein, 328 aa, Oryza sativa
MMGPNVSSEKKALAAAKRRAYVTFLAGDGDYWKGVVGLAKGLRRVRSAYPLVVAVLPDVPGEHRRKLVEQGCVVREIQPVYPPESQTQFAMAYYVINYSKLRIWEFVEYERMVYLDADIQVFDNIDHLFDLDKGAFYAVKDCFCEKTWSHTPQYDIGYCQQRPDEVAWPERELGPPPPLYFNAGMFVHEPGLGTAKDLLDALVVTPPTPFAEQDFLNMFFREQYKPIPNVYNLVLAMLWRHPENVDLDQVKVVHYCAAGSKPWRFTGKEENMNREDIKMLVKRWWDIYNDESLDYKEEEDNADEASQPMRTALAEAGAVKYFPAPSAA

SEQ ID NO: 38175 - protein, 72 aa, Oryza sativa
MEDARSSRCRRRRRRGEEEEKLILQIPAVDQGVSPASSENRGECVVQEQGDQSTGQCRIIWLIDRLTNCHFC

SEQ ID NO: 38176 - protein, 166 aa, Oryza sativa
MAAGKGSHTHRAFLLCNYALLGAASSCIFLTLSLRLLPSPCGLLLLFLHALTAVFSAAGCSGSFTAPATPAQWHNAHTAGAALTAIFQGAVALLAFTRTSDFLAELQSYVRDDDAAVILKMVGGLGTAIFVLEWAALALAFSLRLDDDDGAGDYDNKNWAAASYHV

SEQ ID NO: 38177 - protein, 466 aa, Oryza sativa
MPEKGTVVMSRYELGRSLGHGTFSKVYQARSLVSGETVAVKVIDKEKALRAGAGMVDQIEREVAVMRLVGRHPNVVRLHEVMASRSKIYFVMELVRGGELLARLVAGGGRLGEDAARRYFHQLVAAVDFCHSRGVYHRDLKPENLLVDDDGSGGGGNLKVTDFGLSALSASRRHDGLLHTTCGTPSYVAPEIIGDKGYDGATADVWSCGVILFLLLAGYLPFFDSNLMEMYKKITNGEFKVPDWFTPDARSLISRLLDPNPTTRITIDELVKHPWFKKGHTKRPASSNTMKLNEEEKPANAAMNMKPASLNAFDIISLSQGFDLSGMFCCHGHSSRTQDQLFVTGKPATAIVSRLEEIAETEHFTVKKKQKKRQEEDGMAVKLQGWKEGRKGQLAIDAEIFEVSPSCYVVEVKKTAGDTLEYQAFCNRDLRPSLNDICWTSPATAASEKNQLPAVSEVSPLSSPRN

SEQ ID NO: 38178 - protein, 192 aa, Oryza sativa
MLAYDVFLRLHLRQRVGVHEAEQQLEHLRLHVFNVHDSISVALLHRAVERRPEHRRPRREHAPVRGERLAADLKHHIRALLGLQQVAELLVHVGRGHGYKGFDGEYLGRLLGADLTDDDNVAPDGERIVPKIIGLLEIYPFDELHIAPTTRILEIKCLYGPVFQRRLLLHLVSETKLELGLHRQTHVGLFFF

SEQ ID NO: 38179 - protein, 100 aa, Oryza sativa
MAACRCSSRLSLQLPPPCLLIVLVAAAAMVAAAATGARAAWVDYPSGVPCGETIPVEQCDPGDAAANSACMDVCHYGGCRRGGECVSLGFGRGRGCHCKC

SEQ ID NO: 38180 - protein, 115 aa, Oryza sativa
MRDKGRESGGREGEELCLHCLEGRGLEQRTGGDAGGDHGGLCLPVLDASGVQRQSGSARCSWRQGGRPPRRSARAGSNGGGGSFGAGVRRGRELGSTMAHAHARAAHVRSEVGEG

SEQ ID NO: 38181 - protein, 509 aa, Oryza sativa
MGCGGSKEAVATGNTVGSTGGRSSRRLFRRKSSVVAAANAAPSHAPPPPSDESSAAAVVKESSVNEEVKGKGKATPKEKAIDEEKKDVEESTTAAAADEVVVKDTGVVIVEKTTTAAAAKATPAAVKKIVEEKKKEEAKNKQEAVTDDKKKEKVIPTKVAIDEKKEDVVVPMKEEFVKEKEKITDAKNDVASTENVAAVDEKIKAEEDKNKNKNDDEVVATATMEAAVEEEGDDEAALAEDDDDDDDDEQPNDDESITFAVAPVAEDDEGSVTFPGARARPVVANADEVHQEDDVTSVTSPTTAPATLENDTSSSAAAAFPAAVPAPVAGEEVAQLEQPSSSKSNNGEMEAVAGVDQAEDAKKETSNIEAINVEQEEIKVEEEEEKIIVSQETEEEEEKSAVISRDEITKVEVEREEIKVEHEEIIVSQETEEEKSIAVSKDDDGQSDGKQTIELKEAMTATKTDEKGEEQVAKDKKDDEQEQQATAAPIESPKQEQQATADPIEAPLN

SEQ ID NO: 38182 - protein, 502 aa, Oryza sativa
MEGGGTRTRRRAATASPGRNKVWVEPPGKTHHLRSPPPPPSPSSSKRVAVVYYLCRNRHLEHPHFIEVPLASPDGLYLRGLYPSLFLVQASVFFFFPFSIPTNDAGGVDADVINRLNVLRGKGMAAMYSWSCKRSYKNGFVWHDLSEDDLVLPAQGNEYILKGSELLDRSPPDRQQNGVGEPKVETLKHPPEESPHSRGSQEGCSSSSSPSAVTKEASPPPPTPQPQQQAQSATLLPSSSASTNREDDQCRTPRSGSSGNISPEPAGRVAPPLSEASSPGPLEYRVCKPIGAQDASTQTDDSERDAPERNSRMAGVCTENSTSDSEIQECHPRSTQPSPKGPGVVRESPPVCSSDASPGGRVETLESLIRAEASRRSSFRALEEEHLFAPMGVKFKPANLLMQLITCGSISVKDHRSFGLIPTYRPRFTQVEFPSPMFSTPLALRHLDNIPCNARTIGMRIPESEYFSGSLVETKKQDESGKGGTPTLKRSSSCSEDRYVIV

SEQ ID NO: 38183 - protein, 154 aa, Oryza sativa
MPNIVQDPCNCCCCSSILHSRFLRLGYSQTHTHTHTLCSSLLPCVLVIRVASFSLPPHLPFCFFFFFFNFGRRFPLQFGGAKSSPKRSSIQFFPCFFLFSLLPLALSLYANQNIHSIWSYPSLPVHCFPPCLLPSLVDSLCLYPLQFPHTRYKT

SEQ ID NO: 38184 - protein, 188 aa, Oryza sativa
MGECSYNSMSPSTPLPPPPSAAAAKKGSPEAAAAHKERPKIRIIHIIAPEIIKTDVANFRDLVQRLTGKQQQQQQESAETTLPPPSPVAVLDEKKEKVTTKKRPAPAEDESMMRKKKKKKIKCEVKVEEGHGFGYDHPDHTDLWMDLNPGGFLSFLEEEDVFQGMAADLFQSPLGSSRMDFVGEMYAS

SEQ ID NO: 38185 - protein, 92 aa, Oryza sativa
MAWWRKKVVFPARRAWAAVSTRVRARKPGSGGSILKLHEDVQTCGYKDVQVMFEILKSELEESRAPTKQRKPPAWRPPSAWSSRSSSIAAAQ

SEQ ID NO: 38186 - protein, 86 aa, Oryza sativa
MVLVRCQRRDNLAEELLQGVDGGRDLVKEASEQGRLWAEVEHAGVVVTGSSGDDLAVTGEVESLPVERPDNVAEVGNHRWVDRRRV

SEQ ID NO: 38187 - protein, 516 aa, Oryza sativa
MDFNDARSKSQILHVFPFNSEKKRGGVAVQSDAGVHVHWKGAAELVLSSCKSWLALDGSVQPMSAEKYNECKKSIEDMATSSLRCVAFAYCPCEIERIPKEDIADWKLPEDDLTLLCIVGIKDPCRPGVKSAVQLCTNAGVKVRMVTGDNIETAKAIALECGILDANGAFVEPFVIEGKVFREMSEAARGDIVDKITVMGRSSPNDKLLLVQALKRKGHVVAVTGDGTNDAPALHEADIGLSMGISGTEVAKESSDIIILDDNFTSVVKVVRWGRSVYANIQKFIQFQLTVNVAALVINVVAAVSSGDVPLNAVELLWVNLIMDTLGALALATEPPTDNLMKRQPVGRREPLVTNIMWRNLFVQAIYQIAILLIFDFSGRSILRLQNDSREDAEKTQNTFIFNTFVFCQIFNEFNARKPEERNVFKGITKNHLFMGIIAITTVFQILIIEFLGKFFKTVRLNWRLWLVSVAIGIISWPLAYLGKFIPVPVRPLQDYFKPTCWRRASRRDEEESGQS

SEQ ID NO: 38188 - protein, 179 aa, Oryza sativa
MKRAAPWEEPLEVSSDDSLSSDSDDEAGKGKGDNAFGLPNSTKAAAPDAMSKKKKPGGVDFNALSRHGYRGGPSVLTVPPPKVEPNWSWSTGKDRNDKEDQTESYEERERTRTAVTEGEKLIGVRNPQPRQMEKENKDASFSQKEKRKRDRGQASRGKNYVEEEKRLLRGSGVYSGFDT

SEQ ID NO: 38189 - protein, 308 aa, Oryza sativa
MNDLFSSSSFKKYADASPASGVGGSDMEAGGEGVVNLDRFFEDVEGVKEDMKGLEALYKRLQSTNEETKTAHDARAVKALRSRMDGDVEQVLRRAKAVKGKLEALDRDNATSRKVPGCGPGSSTDRTRTSVVAGLGKKLKDIMDDFQGLRTRMAAEYKETVARRYYTVTGEKAEDSTIDSLIESGESESFLQKAIQEQGRGQVMDTISEIQERHDAVKDIERSLLDLHQVFLDMAALVEAQGHQLNDIESHVAHASSFVRRGTVELEVAREHQKSSRKWACVAVLAGIILIAVLILPVLINLRILTLR

SEQ ID NO: 38190 - protein, 128 aa, Oryza sativa
MGLRAEVGERDGVCTRRGSALLASRSLSPDPPPLHRSSPPAYCHRRQIRARGSCLCRIPGEGGGSLAAPGRLPPLELKKAKRLEPEEKEKEAAPAPAVWLAGARARRGRAVLALEWKIRGNTERRRGK

SEQ ID NO: 38191 - protein, 394 aa, Oryza sativa
MTNESLIEASFPRIVQIEFQALLVVMGGAFQRQVRPPPLVDPVRRLEVRRRAAVHRQDGGREQVQRLASTRRADAQQQVLHRVPRRHPPHGARADVLHLLPVVEVPHVLGADRVPRVDEHVGHPPRQRREGVVASAAAAMVQEGGRGGGDEAVGDADALPHPPVADPLHRRRRERRVEEEHGEGDARPGHGLGGERRDGGAQGVAGQPDAVVMLMPRRGHDGVDGPHGGVEAGGAVEAVADELEVERQVPGRRGLLGDGAAERDDVVRRAGSGGGGGVEEVPRRLERVDGAEDGGVGGVHEHLSYLEVEEPPPRRRAGVVAVPVPLPVALHDVHALDEARHDGSLVVRAIPGRRKTIRTQSTLLNNTNSKILKRLSNIPLWISHYFRNSSISRR

SEQ ID NO: 38192 - protein, 388 aa, Oryza sativa
MLPFFDSPSPMDIPLYQQLQLTPPSPKPDHHHHHHSTFFYYHHHPPPSPSFPSFPSPAAATIASPSPAMHPFMDLELEPHGQQLAAAEEDGAGGQGVDAGVPFGVDGAAAAAAARKDRHSKISTAGGMRDRRMRLSLDVARKFFALQDMLGFDKASKTVQWLLNMSKAAIREIMSDDASSVCEEDGSSSLSVDGKQQQHSNPADRGGGAGDHKGAAHGHSDGKKPAKPRRAAANPKPPRRLANAHPVPDKESRAKARERARERTKEKNRMRWVTLASAISVEAATAAAAAGEDKSPTSPSNNLNHSSSTNLVSTELEDGSSSTRHNGVGVSGGRMQEISAASEASDVIMAFANGGAYGDSGSYYLQQQHQQDQWELGGVVYANSRHYC

SEQ ID NO: 38193 - protein, 526 aa, Oryza sativa
METAHLAYVLLFLVTAVLLFHLRRGGRSAPAKLTTAHRPHPNPVLGNTVEFIRNRRRFFDWYTDLLRASPSGAIEAWGPFGAGHAVTTACPAAVEHLLRGNFGNYVRGASFRAAMSELIGDGLFAADGRLWSVQRKVASYAFSSRALRRFSDDVLAVHLRGGLLPFLDAAAASGEAVDLQDALRRFAFDSICHVAFGVESSTLLETAREDSGRHEALFAAFDAAVEISFRRALAPFTLVRKLTGLVNVGSSRRLREAIGVIDDYAMSVVESKEAACRDRDSEDVDPDLLSRFMAAMDEEDGGELGAMFPTPEGKRRLLRDVVVSFVLAGKDTTSSALTWLFWLLAANPRCERRVRDEVSRSPDGDGGGDAKGMHTHYLHAAITEAMRLYPPVPFNGRVAVGDDVLPGGAAVRAGWFANYSAYAMGRMERLWGEGCLEFSPERWLRDGGEFVAVDAARYPVFHAGPRACLGKEMAYVQMKTVAAAVLRRFSVEVAAPAPAMESPPAYEMTATMKMKGGLWVRLRKRE

SEQ ID NO: 38194 - protein, 194 aa, Oryza sativa
MVQRFWDSAMALGPLDDEIESQSQISEASRSQMMSDIHNEQSFSFKLQDRRGRMHRFSCEVQSLTPLITCILQRLGPDLDRDHLPQILYEDEDRDKVVLASDDDLTAAVDHARLAGWKGLKLYLDYSGSSGVRRKSVVPSVGVGGGGGGRSSGGSTAVMDLSSRDAWAAAYSGVAAGAALVTGLGLMAYLRRAS

SEQ ID NO: 38195 - protein, 172 aa, Oryza sativa
MSASPRHKDTRRRRWMPTGRPAASTITTSTTNIISTRRSRRRRWMPTGRPLASTTTTSTTNTISTRRRRRRRWGTRGRTRTLLRHSRTDTRRRRCTRRRTRSRRRPRRTGTSAPRSARDASRPFVAAASWTYASDDEERRSNYRMQSPAKMACSEGIYTTTYVDGPFYVIAG

SEQ ID NO: 38196 - protein, 80 aa, Oryza sativa
MPRAEVRVTRLFLTPACPPPPRAIAVEATTGTSRSLLSPSGPPPLSRTARPLSLPLALATSPMASGCAAAAGCWLLPADI

SEQ ID NO: 38197 - protein, 418 aa, Oryza sativa
MAMMERIEVTKLHHHLLLLVLLLVVAAAGGGSVQAAEEDEMSGRRRRSRRRRAADVMVPITILNSAVDKGAVCMDGTPPAYHLDPGSGGGNRSWVVNLEGGGWCNNARTRRFRTASRHGSSDHMERRIAFTGIMSSAAADNPDFHSWNRVKIRYCDSGSFAGDAFNEGLKLQFRGQRIWGAVIQHLLDVGMASAEHVLLTGCSAGGLAAILHCDQLRALLPAAATVKCLSDGGLFLDAVDVAGGRSLRSYYGDVVGLQAVAPNLPETCTDHLDATSCFFPQNIIDGIKTPIFLLNAAYDVWQIEQSLAPNAADTSGTWRVCKFNRAACNASQLQFLQGFRDQMVAAVRVFSESRSNGLFINSCFAHCQSELTATWNGGSPALQNKGIAKSVGDWYFGRAEVKAIDCPYPCDKTCHNII

SEQ ID NO: 38198 - protein, 195 aa, Oryza sativa
MDTIRCCIACILPCGALDVVRIVHSNGRVEEISRPVLAGEIMKAYPKHVLRKPPSTCPADGGGGGIVVQKPVILPPNAELQKGKIYFLVPVMAPPEKEKEKEKAKAAQAQAPAAARRRRRRKETADEAAGGRAASNAAAAPPTRVGSEGEKERLLANERYLSEIMKEKASTARDRRRGRVAVWRTHLESITEDDL

SEQ ID NO: 38199 - protein, 316 aa, Oryza sativa
MAAAVAVAGPSMEVEQDLPGFRFHPTEEELLDFYLSRVVLGKKLHFNIIGTLNIYRHDPWDLPGMAKIGEREWYFFVPRDRKAGNGGRPNRTTERGFWKATGSDRAIRSSGDPKRVIGLKKTLVFYQGRAPRGTKTDWVMNEYRLPDYGAARAAAPPPKEDMVLCKIYRKATPLKELEQRASAMEEMQRGSSHGDYTATRASLVHDASASTGDDYFSSDDVHDSGFLIQSSSSSAAPSGSSSKNGGAGAPREAKKEEADVTVTVASATSLQLPAVSQLPSPQLPAMDWLQDPFLTQLRSPWQDQHCLSPYAHLLYY

SEQ ID NO: 38200 - protein, 699 aa, Oryza sativa
MEQLRQVGEAIGGVNALMAFHDDLRCINPRQCALLAHAYALAFRAVAGELRARLRFHDRLTKWKPLDDPLRELHRVVRDGEAYIRHCLLLDPAHWWARAAAATHGTECVEHHLHNLLWCVSVVVEAVENVGEVTGSDPDELARRRLALARDYDKDLLDPKLFRERLGETFLATRELAARMDMAWKEDRWLLSQLLDERKGPTSSPEPPLTRQEHRLADLLAAPRGKLHPASVLLMSDFHMRRRLGGNGNLKEVQWLGEAFAVKHVVGVDAEAAAAEVAALASVSPHPNVAHCRYCFHDEEKRELYMVMDQLMSKDLGSYVKEVNSAKRRAPLPLVVVVDTMLQIACGMAHLHSNKMYHGNLNPSNVIVKPRHGDAYLHVKVAGFVSGSGTANAANPCIWCAPEVVGNEAAATEKGDVYSFGMICFELITGKIPFEDNHLQGENMSKNIRAGERPLFPFQSPKYLTSLTRRCWHGEAAQRPPFHSICRVLRYVKRFLVMNNPEQAAADAAGAGPAVDYLDMEAQLLRRFPEWEGNGVADVPFEMYAYRVMERDKMSNACRDRSSDSGSDGNSLWGDDSASGGSSTTATDASASSRPLLDRSGSTRSSPPRKVAIAAAKAGKCRSGIVTRLKPSSKITASSMSVTCAGPPQKSRSMGTVRPPPVVARRTPRIKSDGHLNRAAIPPTRRRKSGGNASDSELA

SEQ ID NO: 38201 - protein, 189 aa, Oryza sativa
MEHPPPAKIILLQRRVEYRQMAANARWWMRRWWQPRVDPAAAAPSAPSRLPPTADPAPVALLSVAASGSGSGGGDYGLIRRRQLPLSLLASLPQQIRRWWQRQRQPQVDPAAVAPSVSSRLPPTADSVVAAMSAAATSGSGGGRGWIQWRPRGWIRCGREVRGRGGGGEGGERGGVGEREICGGGGKYG

SEQ ID NO: 38202 - protein, 221 aa, Oryza sativa
MIQLLFTLLAAEAALVLVLLFRTPFRRLALLAIDRAKRGRGPVMVKTVAATMLVVLGSSGYSIAKIRRRVGDLGQLTPTDQVLASRHLLEASLMGYSLFLGLIIDRLHHYIRELRTMKKNMEAVTKQSRTLEEAKHGSVEEIQQYQKEISRLNEQVQEFKRLSETKTEELKTAEANTLALQKQSEGLLTEYERLIAENEEFRNQLQSMDLRLSHSDNKKNT

SEQ ID NO: 38203 - protein, 326 aa, Oryza sativa
MSQGGGGSSSDSGATSTGAEVDDEEKAISAVIDAAQLKWEAPTSQGGHCYGHRGAHAGRAPPAGYVCHRCRVPGHFIQHCPTNGDPRFDIPRVAPTPASSPAPAESGESGGVIPAELYCKICRNVMANAVLASKCCFDSFCDRCIRDHIAAKSRCACGAQARAGDLIPNTTLRTTIANLLATTTGAAASASSGTDKTRSSAGSNAPQPAAPQSPAASQASRSNVSSKKSATISSGVLGPRKAREMVVPGDHSAQSGALAVDGDRHGSYGFPFGPAPGYVDPFFAVGVPFGADPYMYYGGAPYGCGGAAYGYYGGEDRRDTKRTRLR

SEQ ID NO: 38204 - protein, 473 aa, Oryza sativa
MAAAARSALASAGRAANEAVSFVVFMVLDVVEVLLCVVYKVADYMLEGAWRPCYCSSSSTAAGAAASGKIVVSERGGSKVVSMLSSTKLHLEDISDTLYTRPSVLAGAASATTRSPSSRRGGGGVRAPPATTVTVHSAIVQMLRGKIGADGDGKQHKPYPSPRWSDCHCTNCNPADAGRLFVHVEAPPGGAATEEDVLFIHGFISSSGFWTETVLPNVSPEARARRRLFAVDLLGFGRSPKPADSLYTLREHVEMIERSVIERHGVKSFHIVAHSLGSILALALAVKYPAAVRSLTLVAPPYFPVPRGEVGTQYVLRTVAPRRVWPPIAFGASVACWYEHLSRTVSIVLCKHHRLWELAFRVFTLYRVRTYLMDGFFCHTHIASWHTLHNIICGSAGKIDKCLEIVRDQLTCDVTIYHGRDDELLPVQCSYAVKAKIPRARVKVVDGKDHVTIVVRRQKELAMELEEIWNRKR

SEQ ID NO: 38205 - protein, 100 aa, Oryza sativa
MNTMIGPAPSPAAAAAAAVSPSCYASPAASSVRRRGVVGVVRCAPDSGRGGDGGGGGGKGKLRVGSPIVIVEAPVMLKTAASVPSLRHNAGQVKAGDVGR

SEQ ID NO: 38206 - protein, 144 aa, Oryza sativa
MAGYRLGLDVERIFSSAAEFCVGNGKDTKFWTANWLNGHSISWRWPTLYTYVGRSQITISQALSNNRWVRDLRGALSNEAIAQFFQLWDEIQEVVLNREDDTIRWKFSADGQLSASSAYELFYMARKICPFSELIWHIKAPSWV

SEQ ID NO: 38207 - protein, 285 aa, Oryza sativa
MTTISSPRSSSASHRSRRPSSAPPSSASAGAASSPARSSSAASAPTTTGAPRCSASSSTTTATPCSLPRLIHPTASPPSASLSGRAPASGCPSSAAATPSPSSSTGRGSRPSCGTPSPAAAAPWRSHRNSPSTKVISSAAADDGHVHVHGNCPFKLALVFIDNGRTQISVCLYDSESGTWGDIASTTLVTQWTSSVGTSTMVGNVLCWLIHRPICILEFNLDKQILSVIGGLAHVPDNSRPSSSFIFPMEDSKLGIGILSGQRIRLWERMANSEWLLRRAMQFLC

SEQ ID NO: 38208 - protein, 82 aa, Oryza sativa
MGHKSLGPRPEKEKEKKPNPPRPEPDRAAARLNPPPLAAPQCTHHARRKFPYQTGRWRRRRRSLWSSRSSRPSLRWTTLRSL

SEQ ID NO: 38209 - protein, 206 aa, Oryza sativa
MARFVIISVVVVAAFAAAAVVEARVGPIDVAPTNLIINPLGAIIDNGRKITGAVVDECAWTCDHVAAGNTKMCNTLRKLPGVSSPKELLTAAVKLSMRKAKAARARFEAAARAAEKGTPMESILDTCKEGYDSTVSALQEVQRCIDANDSKASLITKMSAATTFTGDCGNAYEERELEPSLALKATKNNVNRVVTGALAIAAKLKL

SEQ ID NO: 38210 - protein, 194 aa, Oryza sativa
MDLDLDRKQIKRCVVAFLPPPEEEDAGEEIRVVPCPAAAAEEERRRSSKRKGKRCASNGSKPAGTLVPADGEEMILVPPGKLALSKNLVDKILSLERMELPHVADIVDDGNPNPSEADKALRRCVLDLDRDNKRHQDKLAACQAIIRSVRHGKGYAVVDNRLDFRVAVCRAEGVFLLPCHIADLIPVGFDLVSN

SEQ ID NO: 38211 - protein, 388 aa, Oryza sativa
MDLQHNVLEAAPAMEALARRCPRIKFLTLGSFQGLCKASWLHLDGVAVCGGLESLYMKNCQDLTDASLAAIGRGCRRLAKFGIHGCDLVTSAGIRRLAFTLRPTLKEVTVLHCRLLHTAECLTALSPIRDRIESLEINCVWNTTEQPCSVANGTTTECDPEDDELGEVYESAAKKCRYMEFDDLGSWEMLRSLSLWFSAGQLLSPLISAGLDSCPVLEEISIKVEGDCRTCPRPAPRTIFGLSDLAGFPVLAKMKLDLSEAVGYALTAPTGQMDLSLWERFYLHGIESLQTLYELDYWPPQDKDVHHRSLTLPAVGLIQRCVGLRKLFIHGTTHEHFMTFFLSIPNLRDMQLREDYYPAPENDLMFTEMRAESWLRFEVQLNSRQIDD

SEQ ID NO: 38212 - protein, 408 aa, Oryza sativa
MDGRNSGDALPRERWNDIPADMLGLVLRVIPCAADRARVRSVCRSWRAAAAIQRPPPPLPVLVFSRFSFASLSRLSPAMAFTKPRRFFFHKDVTIRWVGSFDEWLVGTKPSRECKDADGHCFLLNLMSRKKIQLPRPCALHFFDYFCKTLPIVNTSGWVDIIIHDREYSMCFRKVVLSASPASDSMCIVAAISSRTLALWHPGMRSWCVCRSFGIDGSADIAFYQGRIYMAMVSTYFPHILSILFFQLEEVNGRVMVSYVEQCVTETLPPVEGCVVNEFYIVEWRGKLLLIVMYAEHVWLDTEKIGIYALDFSTNPHSLTEINNLDGDCLFISLRSSKSFPACQYDGAKGDFVYFVSGYWQHATGVHHSFDVLVYNVRDATTTRLSVSAPEDNSGPFTNNLLWLFPPR

SEQ ID NO: 38213 - protein, 508 aa, Oryza sativa
MDELLYRALLLSVLAVALLQIIKAFLIIIRAKPAAPPLPPGPWRLPVIGSMHHLAGKLPHRALRDLAAAHGPLMMLRLGETPLVVASSREMAREVLRTHDANFATRPRLLAGEVVLYGGADILFSPSGEYWRRLRQLCAAEVLGPKRVLSFRHIREQEMESQVEEIRAAGPSTPVDLTAMFSFLVISNVSRASFGSKHRNAKKFLSAVKTGVTLASGFKIPDLFPTWRKVLAAVTGMRRALEDIHRVVDSTLEEVIEERRSAREDKARCGMVGTEENLVDVLIGLHEQGGCLSRNSIKSVIFDMFTAGTGTLSSTLGWGMSELMRSPMVMSKLQGEIREAFYGKATVGEEDIQASRLTYLGLFIKETLRLHPPVPLLVPRESIDTCEIKGYMIPARSRIIVNAWAIGRDPRYWDDAEEFKPKRFEKNMVDFTGSCYEYLPFGAGRRMCPGVAYGIPILEMALVQLLYHFDWSLPKGVVDVDMEESSGLGARRKTPLLLCATPFVVPVL

SEQ ID NO: 38214 - protein, 120 aa, Oryza sativa
MRGGPSSALPPLAGCRLPKLRLHRSVPPQLRRSPSPSAARRHRRRLDDGRSVPLLARSGLKVAGSGLGRRWRRWRLEGGSSRSKAAAAARLREQQLEGGGGGSTAGTARRQPARAPSTVQ

SEQ ID NO: 38215 - protein, 174 aa, Oryza sativa
MQSAHAPLSAMSPATSHTQLLHLNPGPNVTISTLSPRLNLPFASMYDSTYHTLLADVFPHLCNVILNGSTSRSSSPKLFFTASITATPPAWRQMWSTPALRLIFSLVCPRWRRRCNRFCHARSAASRAISMAGRTRGRRRCRLAANARSAALGRALLMLTPRRPSSSSRCMMQE

SEQ ID NO: 38216 - protein, 91 aa, Oryza sativa
MVYQLSLVYLAFVSFACRCSFVTHFHELAAASFSRTTCKQNIHVTSGTRFVFYEKERVRVSKTFLCLVSHACVITTDRCWRTGQAEEDAGW

SEQ ID NO: 38217 - protein, 88 aa, Oryza sativa
MCTDLPPPASPLSSSSSTCCTSPPRAHGFLPPPSPLPPPMPLPRVRTVPPSPSPKRRSVIPAGERGRRGEEEEEAATDMWGPTVIDLK

SEQ ID NO: 38218 - protein, 180 aa, Oryza sativa
MTPPLESLRLLTPPRSAAPPKSPLPPPVRPCPSLIATICSAGAATLTRPFSCEYSHAPPRPSPIAAVPNPPMLPLPSSVSNSPDAADQLMLHRRCPTPSPHSTAGPAPSLPRLASPNLLPDAPLNPSYRTPSFAAVQTAGSPTPPAALHPTFYPPLASPTAVGRTPIRRVHSTSHPCLPT

SEQ ID NO: 38219 - protein, 203 aa, Oryza sativa
MRMSKALAAVVAISVSLSAAAMGVDATVESTCSDAAASDKRVHLAMCLSQLGHHRDADAWGLAKAATLVGVDKADLAADDIKELEAGASTAGIKPALAECAKQYRGVGFAFASAHDVINNRAYDVGEKKLDEALSLTQKCNAAFAKIGVPLQQPLAQLTADTIQIAIIAKAITCLVNVNNNPALVAAAAAAAAAKAPQQSQYP

SEQ ID NO: 38220 - protein, 66 aa, Oryza sativa
MLFCYRIAANCNAALLLYGLNTNLTSDNFLSFFELSPHRFRTESNVRNNPLHIRTSSVPAPYPLKK

SEQ ID NO: 38221 - protein, 205 aa, Oryza sativa
MYSSETGAWSTPVVLDDGLDSWEQRWRDAQSRGEFYRVPYVMPRRVALVGDEIYFTLREDNAIIKYNWGMHCLSEIDSPSPDVYGIALMEMENGSLGFACIEDSSLYVWSRKVNSEGAAEWVQCRVIKLDKMIPVANLSDEAFVVGSGEGMGAIFVSTGVGLFTIELKSRRVKKVAEPEVYFSILPYMSFYTPDRGTLLSLARTH

SEQ ID NO: 38222 - protein, 117 aa, Oryza sativa
MVAASARAAVAAASVRAVAALMVAASARVVAAERIRRLPPWGGRICHRPPRGGQVRRLPLREGRIRHRSPRRGKGRSVAGDRGDDGAGLRQGGDDDGGGSSGLPASGVWIRRGRLRG

SEQ ID NO: 38223 - protein, 387 aa, Oryza sativa
MEPGPSSPSPSSACADHPTPAPEEDEEGGRGWVVVPASEVPGADAPKVIDWEDLQQELARVWSLSAALATARERKALLAARLQSALEARKASVQQDNELAEIRERVQARADFMWDLKMHTKKMTEDVDDRREELRIKIRTLSTTSNTLSTARNKLKEADKLLSGENGLHVRLKTVERMLRTRQQYMTAQVAHLYPVRPLIERSPANKPSFLNSSILKTRDAESMAPNGPQNGQAPLAILGLQLSKLTMKKTGYFSDKTEIQNSATALGYVAHAVSLIASYLDVPLRYPLRLGGSRSYVLDRAPSVESSSLASAISSAPLSTTMRTMEFPLFFESQETTRSAYAIFLLNKDIEQLLNHIGAESLGPRHVLANLKQLTTIVQSQQYISN

SEQ ID NO: 38224 - protein, 90 aa, Oryza sativa
MQTKPLSSPSLPGSICERASGLHVHDSLSIASITSHSNEARRWYNLKWCRVERCPNIEGVVFTPPSTGSNIIFCYLKTFWASQLTRARHI

SEQ ID NO: 38225 - protein, 139 aa, Oryza sativa
MDFVKGLEDAVVESASCKAFAALPDLRKAITELTVLKGVGPATASAVLAAYAPDVAPFMSDEAMVAALGNAKEYTLKQYLAFAEKLQTKSKELSSGEEVFTTSDVERALWSSAVASKSLKAPPGNDLENKSKTHGKRKR

SEQ ID NO: 38226 - protein, 383 aa, Oryza sativa
MAIVDLVNAGEQQQMGSKRAAAEDGDGGVDDSREYYCRRGVRHLCDSGITRLPGNYVLPASDRPGQAAGAAAAAGGSVKLPVVDLSRLRVPSERGAVLRTLDAACREYGFFQVVNHGVGGEVVGGMLDVARRFFELPQPERERYMSADVRAPVRYGTSFNQVRDAVLCWRDFLKLACMPLAAVVESWPTSPADLREVASRYAEANQRVFMEVMEAALEALGVGGGGVMEDLAAGTQMMTVNCYPECPQPELTLGMPPHSDYGFLTLVLQDEVAGLQVMHAGEWLTVDPLPGSFVVNVGDHLEILSNGRYRSVLHRVKVNSRRLRVSVASFHSVAPERVVSPAPELIDDRHPRRYMDTDLATFLAYLASAAGNHKSFLHSRRLY

SEQ ID NO: 38227 - protein, 312 aa, Oryza sativa
MVPHGRVHPAAAASSSDFSGEMNQSAASSDPSSSPPYSFHFEKPLPPTAAAPPPADARRYQQLLPAPQPGTYVVQMPKDKVFRVPPPENARLFQHYTRRARRRARCSCARVCSWLLLALVLLAAALAASAAVVYLVFKPRQPDYTLLSLAVSGLGGILGNASSTAAPAPVSFSPEFDATVRADNPNGKIGVHYEGGGSHVAVSYGGVRLADGAWPAFYQGPRNVTVLVATAKGLGIRFSGRLLGDIAAAGRLRSVPFDVDVKVPVRLQVGGVRTWAVPVRVRCAVVVDRLAADAKVVSKSCRVKARFLFWKD

SEQ ID NO: 38228 - protein, 284 aa, Oryza sativa
MEADASHTPTTSSSVSVSFSSSSLSTSSSTSSLVDNGAQDRPKSSKPKHAAKKRKRAAAEEPANAAHGAGEDTSSCSTDDNAAASGKAQAGGGGGGVDSSSTCTAASAPRSGFKHPSYRGVRRRSWGKWVSEIREPRKKSRIWLGTFPTAEMAARAHDVAALAIKGRNAHLNFPDSAHELPRPESTSPADIQAAAAKAAAEVRCEEESSPSSSPTAEQPEEEAACPDTVHADGGQDNALFDLPDLLLDLRDGLWWSPVWPAALAAEEYDGGDAVVLNEPLLWAE

SEQ ID NO: 38229 - protein, 327 aa, Oryza sativa
MPPPPPPAAAIGRRSSILSFAAARDRCFSRRFLRAGLRPLAIPLPTGVDDDAGTTVHVWVPANPPRNPLLLLHGFGASATWQWAPYLRPLIAAGYDPIVPDLLFFGASYTRLADRSEAFQARSIKAAMDAIGVARFGLVGVSYGGFVGYRMAAMYPDAVERVVLVCAGVCLEEKDLAGGLFPVAGVGEAADLLVPRRPEEVRRLVRLTFVRPPCIMPSCFLWDYIKVMGSDYIQEKTELLYALISERQLSDLPIISQPALIVWGERDKVFPMELAHRLKRHLGESSRLVVIRNAGHAVNLEKPKDVCRNIIEFFQEGVTEPLNDEKV

SEQ ID NO: 38230 - protein, 211 aa, Oryza sativa
MNIALGVARGLHHLHAEASIVHGNLTSNNILLDEGNDARIADCGLSRLMNATANSNVIAAAGALGYRAPELSKLKKANAKTDIYSLGMIMLELLTGKSPGDTTNGLDLPQWVASVVEEEWTNEVFDLELMKDAAAAGSETGEELVKTLKLALHCVDPSPAARPEAQQVLRQLEQIKPSVAVSASSSFTGEPSQTTATATTITDDTKSTITE

SEQ ID NO: 38231 - protein, 498 aa, Oryza sativa
MARHKSSPPAIRRRGVGMLRWAVRVASSIVLWTALLHLSSLLGLPRPPLLAARPSCLGGGGGSNSSASSAVTVAAADEVGRLAPPAVPRRRVYKSNGYLLISCNGGLNQMRAAICDMVTVARYMNLTMVVPELDKQSFWADPSDFGDIFDVNYFINSLQDEVKIIRELPQKFSRKVPFSMQPISWSSEKYYLRQILPLVRKHKVVRFSRTDSRLANNGLPLKLQKLRCRVNYNALQFAPSIEALGKKMISALRKTGSFIVLHLRYEMDMLAFSGCTHGCSDEETAELTRMRYAYPWWKEKEIDSEKKRLEGLCPLTPGETTLVLKALGFPRDTRIYIASGEIYGGEKRLTELKTEFPNIIRKEMLLSADELRPFQKHSTQMAALDYLVSIASDVFIPSNDGNMAKVVEGHRRFMGFHKTIQLDRKKLVELIDLLEDQELSWDEFSTAVKELHEGRMSEPTRRKAIAGQPKEEDYFYANPHECLGAARKRREKLKHTEI

SEQ ID NO: 38232 - protein, 434 aa, Oryza sativa
MVQRKQARKKPKDSQLGSNDGLPADHARGGAIVRTALPNYMRATSSSDARGGGREAAAATGAPPRRERGAARGKAMVLADGGGPFVSRATCSSAMRGLGRGLGLRGGAAHACPYSYCSFKCHAADADVVPLRTLVASRRRLIKTQQSMKLKGASPFRKPSNGGGAADGFFVEIYSGAAAAAAPTVSSGASCSDLSTEDNDAAVREGEYAVFDHRSRGDDEDKARDSDGSVDGSCGSSDVISGGSVDLFVTKSRGGKQEIDGGKGIYLDQEAEDFDACKSDISEELDAKYEDGGVDASNGSSIDDISSAFGGMNFKDACPDPTGAASSQRKRWNIAKRTTSEQGEKMRLFNPRAPNFLPVEPDPEAEKVDLRHQMMGDRKNAEEWMVDYALRRAVNKLARAQKRKVEMLVQAFETVQQDDDKKSITLTKSSQPCR

SEQ ID NO: 38233 - protein, 323 aa, Oryza sativa
MSLRQLLLQARRFASRPPPPLSNMLVLCRGISDRGHKALPSAPPRHSTGQIQMPQTFHCSNANPLGNRFQIDVVDSDLWPASFDLSMDHAPKTGCPDDFQEHEDGEMHDSEDEIDDMRHRKKLFYKLDRGSKEFEENNVSLRHRRKREKGNVKNPKESKKVDPDESASVKLPKLKTKYTVREEDVVEAKRDRVPTFNQMTDPYHHPFCLDIHVTKGSVRACFVHRVSSRVVTVAHSISKDMKFDVGSRKGMKACAAVGALLAKRAIEDDIHNAIYTPRKGDRIEGKIEVVLRAIIDNGVEVKVKLKQRKPTKNALAMQHSQSH

SEQ ID NO: 38234 - protein, 250 aa, Oryza sativa
MCCTGDEVAGPGEQRRRPLDADAGGDKGAVATTSSSLLAAPMLSRRRQAEEMAAMVSALASVVAGGGGTSLPAKRPAEREPEEGAAVEGVWWSYCSELAAAAAAPSPAAPFPAGTLRAIAGATLACVGGGRRRGGAPVAVLGRLQRRHGEEAVQRGAAAAVGEVGGGDPGPAQGGARVARHLRHRRGRRPRLRRRRPPLPRQPRQAQLPRARHPPTAADDDDGRRSPVPATAADGRAAGVAGALSRRRRR

SEQ ID NO: 38235 - protein, 539 aa, Oryza sativa
MKQALRRLCISQASEMAAMKRLSMSPGSSSSSEVGTIHRLYASLMVQSNGESHLHDDEKMNLIEISITPEKFSKNSSRATSEFSEDCDFETADGSAVTSLHSASSTSAEIQKIRIQDVISDESQFGLCSYNNRPHMAKDLRWITIRELALQQGSLGLDNFKLLKRLGCGDIGTVYLAELVDSECLFALKVMDIEYLINRKKMLRAQAEREILEMLDHPFLPTLYAHFTTDNLSCLVMEYCPGGDLHVLRQRQPGRSFPEPAARFYVAEVLLALEYLHMLGVIYRDLKPENILVREDGHIMLSDFDLSLRCSVNPVLLRSSSVAANHQPRKLAGPCAESSCISSSCQPSCAQTSCFMARPPLPKPRKPKSSHRKLPQLVVEPIDARSNSFVGTHEYLAPEIIKGDGHGSAVDWWTFGVFLYELLYGKTPFRGPGNDETLANVVSQNLKFPENPSVSSNAKDLIKGLLVKEPENRLGSLRGAAEIKQHPFFEGLNWALIRSAAPPETRPCDVVTLTTAKKKKVGKCLEFRSNSEDLEFEVF

SEQ ID NO: 38236 - protein, 302 aa, Oryza sativa
MALSSSSHLLPFSRPPATFPRARHAGGGRGRAGATGRFIACSSPPPPDVVVTRERGKNAKLIAALEKHNVQSLELPLIKHVEGPDTDRLSAVLRDEKFDWITITSPEAAAVFLEGWKAAGNPKVRIAVVGAGTERVFDEVIQYNDGSLEVAFSPSKAMGKFLASELPRTTETTCKVLYPASAKAGHEIQNGLSNRGFEVTRLNTYTTVSVQDVDPLILKPALSAPVVAVASPSALRAWLNLASQVDNWGNAIACIGETTASAAKKFGLKSIYYPTTPGLDGWVESILEALRAHGQSKEAPGC

SEQ ID NO: 38237 - protein, 398 aa, Oryza sativa
MGMADSHLDGVPAMRKTTVSSSSSLNIAFLLSMVATNLLSLYHLSTRASTAPPLLLPAAHQAQAQDEQLLRQLTAIRATVSQLNHLRSSTPPPPPPPPELLLYSRLAPLASACSAHPDLLHRFMSYTPFSPCPDDALSLAEPLLLRGCHPLPRRRCFSSSSISSSHNLNNLPTDPFSPLPDSAVRWPPGAKCTSFSCLPPSLGFDLARTEAARFLRAEGPLDLTVPQLLRLASLSRAGPIRLGLDVGGGTGTLAARLKRAANATVLTTTMNLGAPYSEAAAARGVVPLHAPLQQRFPVGDATMDLVRAGHAVNRWIPEAALEFLWYDADRVLRPRGLLWVDHFWCRRPDLAAVYQPMLRRLGYKTLKWAVADKTTPTPTAPPGAKHDHVYLTALLQKP

SEQ ID NO: 38238 - protein, 417 aa, Oryza sativa
MQTADHSVPIGVRLLKLQLSTIEASIPPEAIQPFWTDGYRKSWGVKLHSTTSLEEIFQMLTLLEAAIKRDHLSSEFETTSELLNLNTQDNPSQNHVGLSGSAAVLPWVPDTTAAIALRMLDLDSAVSYMQNQKMERNGGDFMKPPSRFVAVKNAQELDPLETTGLDLFDGRWATGSGRRGRGRGSRGGSRGGRGRSRGGRVPRGISISSRIGFKDENEASRKNTRRGRTRGRGRGRGRRTVRSRQPSEGKGRSIPKENLLGSFSMLSNAKAATVEESPRSSGADEWGLENRRPYIDGDENSSGSQLDQSEDNEENGQPMDEEYDEQVPDYSRGYSGGSRPHGMIDDDVSEEEDEDVEGDDDGEEDDADRAVDDVDAEMDEDDDIGDDGEDGGDGGDGVEANADEDEGGSSYSSEYSD

SEQ ID NO: 38239 - protein, 617 aa, Oryza sativa
MAFARAVAAGFDIDNLGYLIAFAERFGASRLMRACSQFIELWKRKHETGQWIEVEPEAMSTHSEFPPFNPSGIVFVGDNMKQNTETMSVSNGEANGEDASKAEHKSGQQMGYQAAYPPWAMHPPPYHMQGMPYYPGPYYPPYPPVDDPRYHYSGRKSSRKHSSDSKESEVLDEGSDGSSSERGSSHGHKSHKKGKRSGKKKPSVVVIKNVNVTSKKHGSSESESQSSSEDGSQDSDDTHYKKRHGKHKSSGSKKKEGAKTNFDSGDDYNNKDESSYGQDADQGNWNAFQSFLMRAEEKTRSNDADMFSGEKAPPSRKKNNVNTADPILLAGGDSGDVYEQRGAGFDPVNGRSRAIRLQSNDELMMSGEGGRYMDGEIKEIEAGGGRYRRGTSEDFMLYGQERSMDRRSALDPLAEARYRNPNQVDKNGYAAADESFIIPLRSGSQDNVGPEYRATIDIDVELPTNTKKTSDGKAGTQLFYEPDELMPERGSEDASFGYDPAMDYESNMMVRAVKVEDSNDEDVSHSNDGDVKKPEKEKIRGTKDGSDKRKKDAILRRLSAPKTPLNDAQKRAQNMRAYKADLQKLKKEQVLFLFSPFLSPSSLKLSSSAWCKFRYIS

SEQ ID NO: 38240 - protein, 374 aa, Oryza sativa
MGSCNSWKPTLTMVGVVVVFAVMNTLIKMALNEGMHATVLITLRQLIATLFLAPIAYFRERKTRPKLTAEILVYLFFSAVLGASLTQWLFFLGLQYTTATFACAFINMTPIFTFLVALPYGLEKVNLNIAGIAKVGGTVLGFSGAMVLALYQGPSLTKLSSSSSSSSSSSSPMASAAVIAAGHVGGAHRWAIGSVALLGGSACWSLWFILQSRIARKYPALYSGTALMFFLSFLQMAVVALAIDRVSLPPWILRTKLQIITVLFVGIVGSGIGFLAMSWCVEQRGPVFTTAFTPLIQIIAAAINVIVLREQLHLGTVIGSALVIMGLYFVLWGKSKEASPSSSSSHPAKEAVPVLQQQHGHDDQETTNVQMQTV

SEQ ID NO: 38241 - protein, 508 aa, Oryza sativa
MVYPSLILAYMGQAAYLCKHHIIESDYRIGFYVSVPEKIRWPVLAIAILAAVVGSQAVITGTFSMIKQCTALGCFPRVKIVHTSDKVHGQIYIPEINWILMILCLAITIGFRDTKHLGNASGLAVITVMLVTTCLMSLVIVLCWHKSIFLAFGFIIFFGTIEALYFSASLIKFREGAWVPIVLAFIFMAIMCIWHYGTIKKYEFDLQNKVSINWLLGLSPNLGIVRVRGIGLIHTELDSGIPAIFSHFVTNLPAFHQVLIFLCIKNVPIPHVSPEERFLVGRIGPKEYRIYRCIVRYGYHDVHKDDQEFEKELVCSVAEFIRSGAAAAADAAASSKPKNVCGGGAEESEKEEEERMSVIPSGSIRMMEEDGGAGAPSSEDTVGGSGSGSGRGSSCGGGGAREIMSPSPSPPPVVVAPRKRVRFVLPAASPRPDAGVREELQELMDAREAGMAFILGHSYVKAKSGSSFFRRLVINFCYDFLRRNSRGPNYAVTIPHASTLEVGMIYYV

SEQ ID NO: 38242 - protein, 434 aa, Oryza sativa
MIKMLDLRDVQDSCIGQIILLRCEKLCTILWPEKGFPNLSMLHIDSLVCHVETEQQQAYATVMDLRFVQSLVLRSNNKFCWNCNKTHINICISSTPKDATPKKKTMSYYSAQKVVGSPLHMPIVTTIQPVVCYKDVNLAMISAIELEGSSAPRHEPLDIHVEIGEGISYANVVSEQALSAVSFMMNKAKSLHVHDNFSITSVNPKHVILTEDKEITWYCLKRCHIERCHKLNTVFSTDYIKYRFQTLEAFSAAELMMANCIWSRGRTFPGWNSNMFAKLRSIHLHYCPRLTFVLPLSWPTPYSHLPSLETLHIVYCSELRQIFPVEAVALREQPRGVLRFPKLKHIHLHDVPKLHQICEISRMVAPVLETIRVRGCWALKRIPAINGRPIVDCEKDWWEKLEWEGMNVGHDPSLFEPRHSMYYKKALPRCSLLR

SEQ ID NO: 38243 - protein, 182 aa, Oryza sativa
MAFYLGSMGGSPSSWGVAEVPVPSSRPWSKAEDKVFESALVAFPEHTHNRWALVASRLPGRSAHEVWEHYQVLVDDVDLIERGMVASPGCWDDDNNSAGHGRGSGGDERRRGVPWTEEEHRLFLEGLEKYGRGDWRNISRWSVKTRTPTQVASHAQKFFIRQANASSRGDSKRKSIHDITAP

SEQ ID NO: 38244 - protein, 273 aa, Oryza sativa
MGCKACQKPKVHYRKGLWSPEEDQKLRDFILRYGHGCWSAVPVKAGLQRNGKSCRLRWINYLRPGLKHGMFSREEEETVMNLHATMGNKWSQIARHLPGRTDNEVKNYWNSYLKKRVEGAEAAARKSAEPADVVTGSPNRSETGQERVAADRPASSESSGPVESSSADDSSSLTEPAAGLAAVRPHAPVIPKVMFADWFDMDYGTSLAGTAPGLSYQGSSSVQVDVPCGGAVDSLHGLGDGGFCWDFDDAADHMQGGGGLCDLLSMSEFLGIN

SEQ ID NO: 38245 - protein, 360 aa, Oryza sativa
MSQTELPESTSPSESSPAMASTTPAPYVVEDCGPNLQLFSDGTVIRFEDYNILPPPVLPPALSTVQWKDVVYDAGRGLKLRVYRPPAATVAGEKLPVLVYFHGGGYFIGSFEMDNFHACCLRLAHELPAVVLSADYRLAPEHRLPAAHDDAATAMSWVRDQAVASGDAADPWLAESADFGRVFVSGDSAGAGIVHHVALRLGSGQIAVDPARVAGCALLFPYFGGEERTRSEAEYPPGPFLTLPFSDQGWRLALPRGATRDHPLANPFGPESPAMDAVALPPLLVVVAQLDLLRDRDVDYAARLRAMGKQVEMVEFEGQHHGFFAVEPLGDAGSELVRVVRRFVYGNGGDAAAAAAAASK

SEQ ID NO: 38246 - protein, 245 aa, Oryza sativa
MLTGNLPFDDQNTVVLYQKILKGDARIPKWLSPGAQDILRKILDPNPITRLDITGIRAHEWFRQDYTPAMPFDDDDDNNISDGNLHMTENQDIETSPAISQINAFQLIGMSSCLDLSGFFEKEDVSERKIRFVSNYSPTSLFEKIESTVTEKGFQVQKNSGKLKVIQVCKEPANPRGHGNLLISAEVFEINESLYVVELKRSSGDCSLYRQLCASLSEDLGICKRQQLLKKDSMRQDLCRYNSSF

SEQ ID NO: 38247 - protein, 438 aa, Oryza sativa
MSTACHGVRGFFSISAAAMTIVVTTAVVLLSGPQLAAGARVLINHAELRRRDIATAGGGGGGGDGACATAVAPFGYPCEEHEVTTQDGYILGLQRIPRGRIGGVTGGGAAAARQPVLLQHGVLVDGMTWLLGSPEESLPYILADQGFDVWIANNRGTRWSSRHVSLDPKSRSYWNWSWDDIVVNDMPAIVDYVCSHTGQKPHYVGHSMGTLVALAAFSEGRMVDKLKSAALLSPVAYLSHITTPIGVVLAKAFAGELISDLLGIAEFNPASPQVSNLVRTFCRKPGMNCYDLLTSFTGKNYCLNNSAADIFLKYEPQPTSTKTLIHLAQTVRDGVLTKYDYVMPDANVARYGQADPPAYDMAAIPAWFPIFLSYGGRDSLSDPADVALLLDDLRRGGHAGDRLTVQYLPQLAHADFVIGVCAKDLVYNDVISFFRRFH

SEQ ID NO: 38248 - protein, 528 aa, Oryza sativa
MHAFAPPVPAPPPMSAMPPPPGPIQPAPISSAAPAVPLELPPQPPINLQGLSFSSMSGSESDDESEDDEMTAETGGSQDRLGKRKRGAGGKRPATFFEGLIKQVVDRQEEMQRRFLETMEKREAERTAREEAWRRQEVARLNREQEQLAQERAAAASRDAAIISFLQRIGGQSVQVPPAATVIQMPTPVQLQTPPPVKQPARQHQPQPTPPPPQAAPIPAAPLQQQPPQPQHKETIHHEAVTPRRAPPTSGSSLELVPAAEQHVESGLGGGEGGSASSSRWPKTEVQALIQLRMELDMRYQETGPKGPLWEEISSGMRRLGYNRSSKRCKEKWENINKYFKKVKESNKKRPEDSKTCPYFHQLDVIYRRKHLTGGGGGGASAANVAATAIEHQNPNRHEIEGKNINDNDKRKNGGGGGAQVPTSNGDTAPTTATFDVDSGMKKPEDIVRELSEQPPREFTTDETDSDDMGDDYTDDGEEGEDDGKMQYRIQFQRPNPGGANTAPPPATTPASAVPTSTPTSTFLAMVQ

SEQ ID NO: 38249 - protein, 341 aa, Oryza sativa
MAKKKGFTSIFSRLLVVTGGGDDERGGGAAATTSPSPPPWPWPSCGNRPRTVSSRRDGGCSTSAAAAASAAAARRIAGEMYKTVNSVYFDYSAADGYSCFDDDDGRVVDDDDDGDSFSTTTASEEWSEAVIRSLGRTSTDRFFFDPGPPTNSILAAAAVPETKPVAAAAVFHDEEKEKLPEPPASLVEESVAVAVESEDPYSDFRSSMEEMVAAHGLRRWDALEELLVWYLRVNGKHNHALIVAAFVDLLVGLAAAATTTGTTPTTTTTTSSGRSTASTSTACDITTTTTITTSSATATMEPCPCGGGSSDDLEEEEEEARVMISLGASSCSLAPSTFANS

SEQ ID NO: 38250 - protein, 444 aa, Oryza sativa
MDVASLESSVEATLDALRGDQWRARQPFTIFRVPANVRESNRTSYEPRVVSIGPYYHGGAPLRTMEDHKWHYLQGLLSRHAGDGSVAAVSASTLVAEMRTLEAQARACYSERPAGLASDDFIVMLLLDGCFILEFLLKWHAKEPDALCDAGRGLTLVPAAADLLLMENQIPFFVLERLYGAVTGGGAQHGRESLLHLFVKYLGSEDEEPMRWPSGDWEVHHLLHLYYQSFIPNRTPPRSRRGPRSDRRTITRTPRVIPCATEMREAGVQFVAAQSPAAAAGGTRYDVAFDARWGVMEIPTVLIDDARRPLLANLLAFEQSQRGEEEGLLSSYVALMSQLIVTARDVELLRRRGVVVNLLDNDEEAARFFNRLDDCHPAGYDSQAFSGLYDDVTRYCGTWWHSHMAGLRRNYFPSPWSAISVAVATFVIALAATQTYFTVFPPNK

SEQ ID NO: 38251 - protein, 358 aa, Oryza sativa
MPAFADIAIDPPLADSYRALALLRRDRDGGIAPPAVQMVGSGGAVLERDLPMVDLERLTRGGAGERKACAGAMARAASEWGFFQLTNHGVGRELMEEMRREQARLFRLPFETKEKAGLLNGSYRWGNPTATSLRHLSWSEAFHVPLASISGADCDFGDLTSLRGVMQEVAEAMSRVANTVAAALAEELTGRGGGGASAAPWFPAGCDETTCFLRLNRYPACPFAADTFGLVPHTDSDFLTVLCQDQVGGLHLMKDSRWVAVRPRPDALVVNIGDLFQAWSNNRYKSVEHKVVANAKTGRLSVAYFLCPSYDSLVGTCGEPSPYRAFTFGEYRKKVQEDVRTTGKKIGLPNFFKHSSVQ

SEQ ID NO: 38252 - protein, 258 aa, Oryza sativa
MHTGICGCKQPVPTVNLQKPIDNLYMDDINTHFEDILKVDDGDRDASDGGDAPSFIYMWPCPSNCLKPYSAHCYISVQDEMQTNLHQGTTTIIKEASGITLPDFVHDSALSLHLHDCLSITSIQGHASAAIDLSWRILWWCRIERCPNLEGTIFTAPCTRDNIFRSLETFWASQLLKVFYIWDWDTSLFQPSYNSFENLKFLHLDRCPSIPKAKAHPPARATQAAAHLRPQDVHAPARDREDQGLLEPQTAAICWSPR

SEQ ID NO: 38253 - protein, 396 aa, Oryza sativa
MPSPTSSASAAARGSAGAGDTLRNSCHDFARSLARLPASIMDGLSRSMARRSRRPRDTQPHPPLPPPLLPEELFFAEFERRYGGRHPFFYGCRLAEALGIARREGRLVFVYLHDAGGGGNPYADQFCTGTMCSDVVVEFLDANFVSWGAVAGRGEGAAMVAALRPGSFPFCAVVSPVSDESIVILQQVEGPVSPSELVDILQRTIDEQRASSRQSWPDEQLAAAVRASRADEEERMRSVALRLRQEQDAAYLESLRKDQEKERSRKSVQEGSAKPKASNVLRPRYPGQSAREPNKAAQARAPAQNQNGTVASHRAEANTKIMIRFPNGERRQQAFHHTDTIREIYRYVDSLGIPGIGNYQLVRSYPRKTYGRQQLEMSLQDAGFYPSVTLYIEQLQ

SEQ ID NO: 38254 - protein, 160 aa, Oryza sativa
MTRAMRRRRLRIGKVLDCFSFSMCCARSSGCLCLRASEEDGDEEAAMERKSLVSSSSQVDQVIRLRDLVDGTRTLGFHLEPKTVELKVSMHCNGCAKKVQKHISRMEGVTWFEVDLEKMKVVVTGDVTPLEVLQSISKVKFAQLWPLPPQPAAPATVSSA

SEQ ID NO: 38255 - protein, 242 aa, Oryza sativa
MVPRVERGGGGFHLPNSEREDSLFIRALISVVSGDTTVPTLLPEPTMATVVAGAATCARCGVDGCIGVDCEVVVLAAAAGSSCSDEEDEGECTTGAVASGGVTGGVGKRRPRRRSGGEGSRYRGVRRRPWGKWAAEIRDPRRAVCKWLGTFDTAEDAARAYDVAALEFRGQRAKLNFPASTAAQQPRPLLHHNLRENCGSNASSPVHAPEHARTAAAAKDQEIWDGLREIMMLDDGSFWSMP

SEQ ID NO: 38256 - protein, 368 aa, Oryza sativa
MKEGMSCFSWNPSLRCWHGSNDGGSPCSQAAQAASAGAGGAKKFTLAQLSAATDGFHESNVVGEGGFGRVYRGRLEEGGQGLVAVKQLCHGGAQGTREFLVECMMLMMLHHPNLVSLVGYCADAGERLLVYEFLPRGSLDAHLFGRRPQEPPLALGWAARVRIAVGAARGLRYLHEVVTPPVIYRDLKASNILLDDDLNPRLSDFGLAKLGPVGDDTHVSTRVMGTYGYCAPDYAMSGKLNVKSDVYSFGVVLLELITGRRAFDAASSDSESEDHQRFLLLRDWARPYLAGDRKRCFALADPALQGRYPRRAFYQLAVVASLCLRDNPNLRPSMTDVTRALDHVASQSQPWEDKQRATTTTPPPNSQP

SEQ ID NO: 38257 - protein, 58 aa, Oryza sativa
MGCFPCFGSGGKGEAKKGGGGRKDGGSADRRVARVGSGAVLVVGVWGERVGSWGWFCL

SEQ ID NO: 38258 - protein, 328 aa, Oryza sativa
MVTGRSEQMVCVTGAGGFIGSWLVKELLHRGYFVRGAMREPADIKNAHLHVLDGAREGLSLYRADVLDRNSLRAAFALCDGVFHVASPVSNDPELLPAAIEGTKNVINAAADMGVKRVVFTSSYGAVHMNPNRRSDQIVDESCWSDLEFCKQTQNWYCYAKMLAERTAMEEASKRGVNLLVVVPAVTVGEMLQPTLNASVHRVATYMWGTKSAYPNAVAAYVDVRDVARAHALVYEHPDARGRYLCIGSVLHRSEFVRLLRELFPQYPITSRCKDNSKPMVKPYKFSVQRLETLGMQFTPLKESLYRTVISLQDKGHLPAAISRRSAL

SEQ ID NO: 38259 - protein, 230 aa, Oryza sativa
MYHHHHGGHGEVASLHLLSPPNPPFFGAAAHHHHHHHGLINMALPPQAYFVPAAPPPPFQEATAALAAGDDATAALAVFELERILEEAAAAGGGGGNGSPSSGSDGCCYGLQGVAPAAEEERRRRRMVSNRESARRSRMRKQRQLSELWAQVEHLRGANRRLLDELNHALRGCADVRRENSRLRDEKAELAGKLQLLLPRQPAPEKNAADDQSSCSSEPCKNSTTTTAAE

SEQ ID NO: 38260 - protein, 112 aa, Oryza sativa
MTLSCRQGSRRHRDSSPSMRDVTRFHLFVRRRRLRRPPQESRTAAVDRDEESQAIIEIVARVGTPAEKGTGHSKLVRHYDSEASWNNVSLFTSTPPSSLLCCSCCYLLMVCL

SEQ ID NO: 38261 - protein, 181 aa, Oryza sativa
MKVLVAVDDSRGSHRALSWVLDHLFFPAAATGDGGEEEQVPRPAPELVLVHAIEPLHHVMFPVGPGSAVYGAASMMEAVRAAQAENARNLLVRARLICERRGVAAATVAVEGEPREALCRAAEDAGAGLLVVGSRGLGALKRAFLGSVSDYCAHRASCPIMVVKPPPDAGDEDDGGHCTSN

SEQ ID NO: 38262 - protein, 173 aa, Oryza sativa
MGGCCCCSSRGSETDRAPVHIYRQQNQEEHEPLSSAYDGSSPASAIVAVDTNLDTSTPDTYRAPPAPLPYDVSLPVPENPDLEKSDLKSKTDDQQEESLEVDEFKSCEKCVAEDKPDEEDVCPICLEEYDAENPRSLTKCEHHFHLCCILEWMERSDTCPVCDQITLIDDMYE

SEQ ID NO: 38263 - protein, 85 aa, Oryza sativa
MPVFPDRPRARGRGHGRRLAVEVSSSGGRWTMGEIGQRRLKSVGGGDGRGSPTSFAPSHGEDLLRRRGRLTAGCGEELPAALTTP

SEQ ID NO: 38264 - protein, 302 aa, Oryza sativa
MASVTYLDDAHSEVIDPPKNEEMLDVTELVDDHTQHSPKPNAMVSGNVRELLECPVCLNAMYPPIHQCSNGHTLCSGCKPRVHNRCPTCRHELGNIRCLALEKVAASLELPCKYQNFGCLGIYPYYCKLKHESQCQYRPYTCPYAGSECTVAGDIQYLVSHLKDDHKVDMHNGSTFNHRYVKSNPHEVENATWMLTVFSCFGQYFCLHFEAFQLGMAPVYIAFLRFMGDDAEAKNYSYSLEVGGSGRKMTWQGVPRSIRDSHRKVRDSYDGLIIQRNMALFFSGGDKKELKLRVTGRIWKEQ

SEQ ID NO: 38265 - protein, 478 aa, Oryza sativa
MRSRVVLYTWMVRGHLHPMTQLADRIANHGVPVTVAVADVPSSGESRKTVARLSAYYPSVSFQLLPPAAPARSGADTADPDADPFITLLADLRATNAALTAFVRSLPSVEALVIDFFCAYGLDAAAELGVPAYLFFVSCASALASYLHIPVMRSAVSFGQMGRSLLRIPGVHPIPASDLPEVLLLDRDKDQYKATIAFFEQLAKAKSVLVNTFEWLEPRAVKAIRDGIPRPGEPAPRLFCVGPLVGEERGGEEEKQECLRWLDAQPPRSVVFLCFGSASSVPAEQLKEIAVGLERSKHSFLWAVRAPVAADADSTKRLEGRGEAALESLLPEGFLDRTWGRGLVLPSWAPQVEVLRHPATGAFVTHCGWNSTLEAVTAGVPMVCWPMYAEQRMNKVFVVEEMKLGVVMDGYDDDGVVKAEEVETKVRLVMESEQGKQIRERMALAKQMATRAMEIGGSSTASFTDFLGGLKIAMDKDN

SEQ ID NO: 38266 - protein, 302 aa, Oryza sativa
MFTAMHRILSRGRRTPAASSSSVTAFATASDSQRLAGKVAVITGGASGIGRATAEEFVRNGAKVILADVQDDLGHAVAAELGADAASYARCDVTDEAQVAAAVDLAVARHGRLDVVFNNAGIPGDLTPTPVGALDLADFDRVMAVNTRAVVAGVKHAARVMVPRRRGSIICTASTAGVIGGVAVPHYSVSKAAVLGLVRAVAGEMARSGVRVNAISPNYIWTPMAAVAFARWYPSRSADDHRRIVENDINEMDGVTLEAEDVARAAVFLASDEAKYVNGHNLVVDGGYTVGKVPNMPVPDGH

SEQ ID NO: 38267 - protein, 121 aa, Oryza sativa
MTPMASRSRRELPTLTRPVSFRTRVNGASALRKEISTAASNAAKRASWRPESSLAVSSSVELSTPNATWQMLSKANRRSASCRSTASPDAAAASRNGRSPPRRCTARTSSEKRRSAREEKA

SEQ ID NO: 38268 - protein, 457 aa, Oryza sativa
MAAAEGYQMEAAVLAAPVVKDREVLRLRRDAAGRRDVTGLVRTIVAAAPPPDSTTRTAAAGAFNVIDLGEVARLFAAWWRGLRGVRPYYAVKCNPNPALLGALAGLGAGFDCASRAEMEAVLALGVAADRVVYANPCKLEPHLEYAAGVGVDLTTFDSEEEVGKIKRCHPGCRLLLRIKAPDGDDGGGAMLNLGTKYGAHRDEVVPLLAAARRAGMAVVGVPFHAGSAVSRVGIYAAAIEAARVRRRRRARHAAHARARHRRGIQGRRRRRRIHVPGGKRRDQRGPREALRWRRHAQRRRGDSRAGALLRRDGVRARRPHLREAHARRGARVLDRRRHVRHPVLRALRELRAAPGAGDRHRRRRRRAGGDHGRRDDDHVDEHVDEDAPVDGVRPHAGLVRRGGEGLSAAGAVHRGLAGVRRRRRVHHRVQLRLQRVLHVQHEDLPRLLLLDHWESAT

SEQ ID NO: 38269 - protein, 669 aa, Oryza sativa
MLNTGNFVLYDMNRQVIWSTFSFPTDTLLAGQNLRPGRFLLSGVSQSNHASGKYRLENQQDGNLVMYPTGTIDSGSAYWSTWTFNMGLLLTLSLDPNGTIWMFDRKNSYTKILFHANQPSNASPDMEIYYRLTFDPDGILRLYSHVFFKLGRAPTTEVEWLEPGSDRCLVKGVCGPNSFCHLTVTGETSCSCLPGFEFLSTNQSTLGCWRALPTGGCVRNSSNDETRVTTTMVEVKNTTWLENPYAVLPATTSIEACKLLCLSDCACDIAMFSDSYCSKQMLPIRYGRMPGNTTLFVKIYTYQTISGTRQRAMSIHANSALISGVSLAIFSLFVLLVASLLLICRHRRSLAHMTMTAPRQEDSRIDGNIVGLRSYSFQELDLATNGFGEELGKGAYGTVFKGVVADTNQDIAVKRLEKMAEDGQREFNREVRVIARTHHRNLLRLLGFCNEGIHHLLVYEYMPNGSLANLLFHSDASPAWSKRVAIALDVARGLQYLHSEIEGPIIHCDIKPENILIDSLGIAKIADFGLAKLLIGNQTKTFTGIRGTRGYLAPEWSKNRAITVKADVYSYGIMLLEVISCKKSMDLKRAGEEYNISEWAYECVMFGDAGKVADGVDEAELVRMVNVGIWCTQSEPVMRPAMESVALMIEGAIEVHQPPPPASYSQSLT

SEQ ID NO: 38270 - protein, 500 aa, Oryza sativa
MAPPPVNSGDAAAAATGEKSKLSPSGLPIREIPGGYGVPFFSPLRDRLDYFYFQGAEEYFRSRVARHGGATVLRVNMPPGPFISGNPRVVALLDARSFRVLLDDSMVDKADTLDGTYMPSRALFGGHRPLAFLDAADPRHAKIKRVVMSLAAARMHHVAPAFRAAFAAMFDAVEAGLGAAVEFNKLNMRYMLDFTCAALFGGEPPSKVVGDGAVTKAMAWLAFQLHPIASKVVKPWPLEELLLHTFSLPPFLVRRGYADLKAYFADAAAAVLDDAEKSHTGIPRDELLDNLVFVAIFNAFGGFKIFLPHIVKWLARAGPELHAKLATEVRATVPTGEDDGITLAAVERMPLVKSVVWEALRMNPPVEFQYGHARRDMVVESHDAAYEVRKGEMLFGYQPLATRDEKVFDRAGEFVADRFVAGGAAGDRPLLEHVVWSNGPETRAPSEGNKQCPGKDMVVAVGRLMVAELFRRYDTFAADVVEAPVEPVVTFTSLTRASSG

SEQ ID NO: 38271 - protein, 197 aa, Oryza sativa
MSTVTSCTFLSIRPTVSSAGSLLSKKPAAFVSLASERKSRPLSPCFAISSNKPGDPKIDVSPFSISPVVLVNPVPVDGERWQVAENKDEVSLWFDVPGLSPADLIVEIDEDVLVIKKKKKASPKSNYNTPTSGAIADHQEATADEFSGGGIYARLLLPAGYSREGVQAKLTSGELKLTIGKVKESVRRKINVDISVK

SEQ ID NO: 38272 - protein, 78 aa, Oryza sativa
MASEANPSVAHSASPSPTTLSASSCSPPNTTTASTSSPSRRTSMVMASWIWPATRGKKKACDDVVDRPSTMWWIGRQR

SEQ ID NO: 38273 - protein, 763 aa, Oryza sativa
MSRRPSVAPEPAPRLVCNATTGDLPAGCNLGLLARIELLVLFCSAILALLVFLGSSRRRSSSATVRLVVWGAFTVSYPVAAYTIGLMQSSPFHHELFVVWSCFFLFVLASSDSITAYTLADIKSPATVLLNRGLQVIYVSVLLHYYASVLSPKLKIYLFIVWLVSLGKIALSALGYRLALRSDRLEADNKLVADYMTYEHDLSRQGGSDGDPVTMEGYKYIVRGEETDVMELTAPDYVKKIKVDGARALVTVESVWRCKGRLLMGSSVADASAAARRDLCLSFALFKLLRRRCSNYPLAESGQPKTRDFVLRGLLGQGKDDDDDGDGDRRSRRDGRAFRVIEVELGFLYDLFYTRYPFICHAAVSTAPHLAMCALVMTISVLTLSSHSLRHYHPTHHRSIEVNGVNLDVALTMFIIALVIVLEAYQFVAVLFSDWQKVKMLCRYVLRPSWQGNPFFEAVLRVLCYCGSGVYWKKTMSQYSIVRHASPGHAVKDWLSRATRRWLDRLMFNGGKARSVKVSAAVESALASALRDRDDDDGVLGGGGRATLRQHRLDWAWGGATWRTCAHAILIWHIATCLCAMQMPAAITHKKTRPRARKAAGGGDGDGDRAVATSLSRYCAYLVSSAPELLPEHQYTTRTIAEAVLLELRVCLRGCASDKEVLDRLKAVAETATASSPESGIHVHGARLWTQLMVIPDQEMTWKLLARVWAELMLFVTPADNATAHVQHLTMGGEHITHLWALLTHAGIVDRPNSPSPHPHPAP

SEQ ID NO: 38274 - protein, 242 aa, Oryza sativa
MLGRAAEICRIGMPGWCTAMAVSPEMETQLLFMMNNVRWGNQKRYQLWFARKHLMVPGGEERIPDIVRFICCGYHPTNKVMQSGVIARWAVIGWLLTSCNKSYVQANAKVALFYDWLFFDEGKGNLMNIEPAMLLMVNSVSQYTDITNMLLEFLFLLVENYDVRRKEAIAECVRNAFAVLVKKGVVPSLDILTCCEKLSPMLRQKLVAFLSSASPEETEKTCGQPIDEASKAMDLNNRVCSN

SEQ ID NO: 38275 - protein, 720 aa, Oryza sativa
MAMAMAMALLLLLLLQLWSVEAQVAAPPPASCPDRCGDVSVPYPFGIRDGCHLPGFRLTCDATHTPPRLMLGNGTLQVVDISLANSTVRALDLAGAVNFTYDVSKLAPSGSGTWSSLGTVAGAGPYVVSEQRNRLVVTGCNVQATLAGENTNIIGGCSSFCPVSEMFTSVAATVPVVPGAGADNATDGGFICSGTSCCETPIAIGRPSYLVQFLSLDQNQELTGKLPVAVRIAERGWFEGVAGELLNTSSDSAAALRTPVPVVLEWVVSPTLEAVLQGVTGQFADDRNWSCPADAARSACRSSNSFCSNVTGNYRRGYVCRCRRGYGGNPYVAGGCLDIDECKLAGRCYGECTNTPGDYQCRCPRGARGDPRIPNGCVKTNLGLSVGIGVGSGAGLLVMGLGAAFLKRKVKKQRARMLRQKFFKQNRGHLLQQLVSQKADIAERMIIPLSELEKATNNFDRSRELGGGGHGTVYKGILSDLHVVAIKKSKEAVQREIDEFINEVAILSQINHRNVVKLFGCCLETEVPLLIYEFISNGTLYHHLHVEGPMSLPWEDRLRIATETARALAYLHSAVSFPIIHRDIKSHNILLDGSLTTKVSNFGASRCIPAEQTGITTVVQGTLGYLDPMYYYTGRLTEKSDVFSFGVVLIELLTRKKPYSYRSPDDESLVTHFTALLTQGNLGDILDPQVKEEGGEEVKEIAVLAVACAKLKVEERPTMR

SEQ ID NO: 38276 - protein, 78 aa, Oryza sativa
MRFCSNLHGGLSRLGELLDVKRVGTCHQAGSDSLLTLGCYNKIKEVYFKGSTEKHAGVLYGLVIEDGVNRPPPTQPNE

SEQ ID NO: 38277 - protein, 96 aa, Oryza sativa
MGVPQEHAGCGVLGVGHGRRGGRHASEPRREDQSIGLPLLGLAGLGLRRGLDPSAQRVQRSLRHGSGQGGGRREGARSDRSVGNDQRIFRWRCRVC

SEQ ID NO: 38278 - protein, 658 aa, Oryza sativa
MEDLSLSSELDPALLSTSTSSSSPPDSASPSFSFYHPSPPNYTLAVSNLSCRDPRRGSGGAGLLSWLLGSFSTSSPPATGGAGLLNNVSFTASSSQILAVVGPSGAGKSTLLRILSGRGTGGEIAARPHAVVSVNGRAVTSRARLRRMCGFVTQDDNLLPLLTVRETILFAARFRLRSAVTARERGERVEALMQELRLSEVADSYVGGCGGAGGAPRGVSGGERKRVSIAVDIVHDPPVLLLDEPTSGLDSRSAMDVLSLLRDVARARRQVVVLSIHQPSYRMLAYISSMLLLSRGAVAHFGTLKSLEHSLSRLGHEIPMQLNPLELAMEVTEQLEADHARFGAALATTIHQHQHNKVIDDEDESSGAGEHEHEHGYYCSRAVEVGALAVRCWRTMHRTKELFAARAAQAVIAGLGLGSVYFRIRPDPEGVALRLGLFAFSLSFLLSSTVEALPILLHERRVLMREASRRAYRLSSYVVANALVFAPCLLAVSLLFSAPVYFLAGLRATTQAFACFALAVWLIVLMASSLVLFLSAVSPDFVLGNSLICMSLGVFFLFSGYFIPRESIPRYWAFMYYVSMYRYPLDLLLINEYGGSSSGRCVAWAGGVCLRKGGDVLRGRGIDEGMRWVNVGVMLGFFVLYRVMCWAVLVRRAAKTTL

SEQ ID NO: 38279 - protein, 438 aa, Oryza sativa
MAMEKVDAKEREKIEAVRKTLRKQAPLTAKQAMYCNDACVERFLRARGESVKKAAKHLRTVLSWRDTIGADHIIADEFSAELADGVAYVAGHDDEARPVVVFRIKQDYPKFHSQKSFVRLLVFTLEVAVSCMSRFVDQFVLLFDASFFRSASAFLNLLMGTLKIVADYYPGRLHRAFVIDPPSLFSVLWKGVRPFVELAPATAVVCSLDFEDSLEDASFTAYPRTASLRFEPAAALLATGTKGIGLGSASSRFSVTVSHDNTLKPWYLSTTTPSSVGPRSVVPTSSPSLIGASPLSARSFSFASPAARSTTTPPVHRGAPLTPFSTKGGQKAPAPAQQFPRTPRPSFLQSPSMLFAFKKDGQASRGERERESFLPFLRFYRRPYDEISYRAKMRPPLGGLIAIVDEKSKQHKTVQPPLRRHAGLHHQQLFQLHHHQRI

SEQ ID NO: 38280 - protein, 337 aa, Oryza sativa
MQHGEQSGAKKAAAWVVSPNGQVKREMAVEAARGEGAAAAAGAGEEEEEVQAGGMIAAAVGDGFEGVEISVRIDLAVLHCPLCLLPLKPPTYQCAAGHLACSSCHGDVPGKKCHTCGGGGGGGVYARCPGLDTFLRAAKILCPNDLFGCRSYVAYHDVAAHQRACPHAPCSCSEPRCDFLGSPPMLLAHLVADHSWPVSKVPYGEVLTIHVPESERRHLVVAGAAGGDDERVFVLSVGALGVARAVSVACVRANAAAGPRYRCKLWAHAPGGGAADFVHMDSAVASSAAAPGGEVAVDEEARFLTVPPCFLHLLDAGTSKEMLIRLSISIDIDIDMS

SEQ ID NO: 38281 - protein, 471 aa, Oryza sativa
MSSSDEHLRLPPRSGRGALHHRAAAAAPANAISLHVDAEADDGPAAAERSSSTTREKRLERFMEYSKRALVYEFTLATSLLQHRTASFTAGSAWAKAGVALLCAALFVDLMGSVYLALVTRLLDAEATDASCRWHVVRVYASAVLLMSMPFCLLMSLNALYSFLAVALVPPIYLVLLLFAKEHHHHRHRGGVLHEFPPPRGERTTVLISYEDYDGKLKSQFDASATVNTIATGAGLTGTFFGYSTSTDFSPNHAVTVSESLLFLTIVGAQFVMLVTAARPMFRKESSPARLAGFLSLLVGSLPVLLPLSAFAGAIDFLGGLALLAFSIDFLELVVFFKATFYKEALEEEPDAPPRPTSTTTTDGLQLLWLCVMYIYFTALEALYQEQAGRKTKLELLEKARVLVYFWAFCCCSLDGGGRGKLPLLPPLEELRKHHHHLSLGRARYAVMGLAALDVLWRVARMFLVVAPVKP

SEQ ID NO: 38282 - protein, 356 aa, Oryza sativa
MSSRRHGMKAVVVVVVIAHVLLCHVAGGGGGVPAVIVFGDSTADTGNNNFIQTMARGNYPPYGRDFAGGVATGRFSNGRLAADFVSEALGLPPAVPPYLDPSHSIHQLASGVSFASAGTGLDNITAQILSAMTLSQQIDHFRQYKEKLRWAKGEAAAHHIISQALYILSVGTSDFLHNYLVFPIRGNRFTLPRYEAYLAGAAAGAVRAVHGLGGRRVKLAGLPPLGCLPVERTINPDRPGDCNEMYNMVALSFNARLKRLIGRLNWELPGAQVEYVDQYSILSAIIAKPWEYGFGNSMQGCCGTGFVETGILCALDDALACDDADKYVFFDAVHPSERAYKIIADAFINTTSPVFH

SEQ ID NO: 38283 - protein, 155 aa, Oryza sativa
MQVTSAAAGMTVKVSTTPIFSKIPRAQTNKDFQVLLRIEAPPPVDLKGRVPIDLVAVLDVGGGGMSLEPVKKAMKFAIRQLSDEDSIAIFGPPMSREVIPKFMNIHGSRRIAEKKVDELEGRRFAHPARSSLDEALKVCAFLWFVYFYIEFLIYF

SEQ ID NO: 38284 - protein, 715 aa, Oryza sativa
MASSLINLLLTEVAAIVSIVLLALLVVLSSYRRRSGHPALRLFVWAASTLFLPLVSYAVSAAAKWDAARVPLLLAWTVFLQMLRNTIDTARSSSSTIGNGSGSSKFRPSVEQLARMGWVAFLIVSSDGTAGSPQLTGVLLWLWVLSLAKLVHRLVAAELAKNSFAVGLNAYLISDYMKQLYGQDQGDHDVQAPPLLVMGEEKLQIEARPQGYRIGRTSPPPLCVDAGHVVTMDRICRLFSSGDPLVASNPQIKDTCLSFALFKLQLRRFVGCPIAEAGSRRSVAFVLDGLLGESHERVFRVIETELSFLADFLYSKLTVFYASGWWFPVLNSMLVFATWVSCLAAGGAIVHDMTCHGTTLASNYDNLREYLQNHDTVFHIIVGLDVLVTVSFIVAIVFTEGWEIATYVRSDWIKVSAICEYARRPSWRKSPWTRRNVGRVLPLKPMQRWDDRFGQTSILQLRPCYCGCVSRQVDRIAKSSATVPAAVKTAVVDTLRTNQGNLGNGVLSLQRNGVADKLAWACHHAGDERSVSEQILVWHVATRLLEIMRSEGAHGRHDDGDGDGGGDSDTVVVATRLSRYCAYLVALKPELLPDHPAWTEELYEGVVEEVSRVLARFAGAVVRYERAATCLGGSTNATLRKAAKLGRQLAEELGGDEELPWRVLADFWAELVVYLAPSENVTAHSKALRRGGEFITVLWALLGHAGIVSRPDTDV

SEQ ID NO: 38285 - protein, 47 aa, Oryza sativa
MQVRNFLSSKSGSSGLMKEIFLSVIRKFLSSRSRTSCLVSSSKLSNG

SEQ ID NO: 38286 - protein, 73 aa, Oryza sativa
MLAAAACILRRRRRHHARGRHLPPSPSSPHRCSARHHPALQRRPRRPASPLRLPHARTRERIRYLEDQIWMSC

SEQ ID NO: 38287 - protein, 1055 aa, Oryza sativa
MAAAGVPFSIRGYAARARAGAADEGGRCWPFAGKAGALPPMEVRGFRWWEDEAAALAEEEGEEERRLAAKRRKRSIVELFAAVPKVVAAADEGLGRGKRVRRKLDKGDPPAVGVEAAKKKGFRKQKVLVEIGVRKKGKNSKTKVTSASMSQLFQNAIQKQKKKSLSKKKGVPLEKKSMKGNKTTTLSSQKTTKSSCHVQSILKKHLKTGVGTLLKNTDVMSPSKSLLKPKRVTFSDDNDILGRTDSQLGDGTEKSQLLQTSQQHYKDGKSQGGDNHCSTYEPQFSYQRAGAIVDSVEEDTSSTVLLTKSKEKTILANPVDLNHCLEISSSGSCLNSINSAVLSGQVLPQNFAGVGSIPNEGSNVHVGFQAEENHHKYHGSSVGASLAVKARSSDLIRRQLPEPSSSCFVASLRVNDGNRSKMLQERLTALHPRLIRSKDMVNSISSSAGSNKSTDAQTPNCVSACRNMHSEGYQGLPLNSHGEFVKLHPSGTIDPNGMFKRQFPVGDYVRPSAFPAFITPETCVDYAHLKSSYQGPQFCAVDTFDFQSEPYHSPTASAAYGMGFRQSPSSERMEVHGYAVPSNNDPYSNQQELSVGCFCPAFTGQGNQTHKPLEMQNCFPSQHYEQNSQPAPETTVRLMGKNFTLGTSSNQFRGLDNKNPCPSKQSRDEDHGTSAKAFSQLFHGTRVEPPSTLRNSNGGAEHPSRFSSVPEAELRCGLDSYSFRTSDRYQQPHLAVQNKLYVNPVSRHNESEPWQQQLHVENHILGASEPQLLGTMHLRQSKTAATVPSYSPKHNFSNLVEIRPARSQFAYFPRQNVTQRTPISSFLSGYAVQSSPGLTTPTKFTSLRPLPPSVTSSHVYSSEDAQPHGSVPPFYPSIALSDQASKNCDPGDLKDNRSMQQTPITSNHDSSEQLNRGFKRPAVEDDVFLKPRKSFIAVGKDLNLLPLQEERLGLCGSRPDAQLPVCLSKDSEVDVQLLNNDTQIAWSDSVNRVRTILPVKLRSGAKHILEPGASPTATLGQEESWPLHSIKTFVVEDDAHAVGTSKKRDEEICRV

SEQ ID NO: 38288 - protein, 277 aa, Oryza sativa
MTIIDYVDLCDDEEIIVEEPGPHGQVHAADMHVELVDLTTEGDGVEDQNIPGKDDAVLCTTLHSPNFIAAHGQGETAHLIVTLCKQGFIAVVDDAEEAMQSGNKELSAANDGKGEAMQSADQGIVVAGDCTEEVMMSGNQDFASAVADAEETMQSGTQEFVAEGDHSRDAMQFGNAGQASTCSSMSEQGAITYSSMTEQIATASSSMTGQWSREAAAFLCSRPMSIALPFPRQFWKAGEYSVAAQPTINSDQNHLRIHPKFLHSNATSHKWAFGGAS

SEQ ID NO: 38289 - protein, 380 aa, Oryza sativa
MAASSARLLAAAARGRAATTFRHAPTVSSSLSFPPNPHHRPSLRGRAGISFSSTSISLPSGSPHGASAPFNLFPPDSDPFIQWDPPPPDAASPLGAGAAGREAPGDLTLVVLLGWLGARQKHLRRYADLYRDRGVGSVRFVVPVRELLGLDLGRRVERRVADLAAGIAAWCDADHRRTLLFHTFSNTRWLAYGAILENLQSRADIIERIRGCIVDSAPVLEIRPEVWAAGFSAAMLKKSSSMTGPSVESPDGYTSNGTLNNLSSDVTRPTWGENILLSTLQKFFEIVLHLPDVNKRLEKVHSVLSEKQPTCPQFYLYSSADRVIPAECVERFIDMQKSLGQSVFAHNFVSSPHVDHYRSFPHVYAAKIDEFLKICSIARV

SEQ ID NO: 38290 - protein, 109 aa, Oryza sativa
MHGAFPPDIPAPPVLMPVPGAGPLGPFIPAPPEVAMRMMRDQGGPPPFEPTGGPRPRRPGRGGLPMGGPSPILAAPLPPPHMHDPRKIRSYQDLDAPEDEVTVMDYRSL

SEQ ID NO: 38291 - protein, 271 aa, Oryza sativa
MSQCPTHVALRLLALLFLLPAAWSATFTMTNNCGYTVWPGLLSGAGTAPLSTTGFALAHGASATVDAPASWSGRMWARTLCAEDATGKFTCATGDCGSGGIQCNGGGAAPPATLMEFTLDGSGGMDFFDVSLVDGYNLPMIIVPQGGGAAAPAGSGGGSGGKCMATGCLVDLNGACPADLRVMAASTGTGAAAPGGGPVACRSACEAFGSPQYCCSGAYGNPNTCRPSTYSQFFKNACPRAYSYAYDDSTSTFTCTAGTNYAITFCPSTTR

SEQ ID NO: 38292 - protein, 477 aa, Oryza sativa
MADRIPAVAAAIAIASLILVVTPEMVSSGFIPRFKLSPKANKQIRDIFKDHAADLAGLAADAIPSKGEGEGSSSDPSQAPATTGGTYLITVGVGTPPQYVYGAFDISSQFVWVPCEECVSPYSCPSDKTGVYKTLPRELYSCGEQRCRTIVGQPDCGAPYNGPCKYTCRYGGAGGTETEGHLGLQPFTLGDNTMPVNMIFGCGLEPETNFGVIGLNRGRLSLISQLQLGRFSYYFAPEYDDTAAGNASFILFGEYAVPQTSNPRYTQFWSYENGAYSYLYLVGLSGMRVGSNNLNMLGAGSGGRDPLVAYLSTSVPITFLEKNAYDLLRRELVSTVGSDTVDGSALGLDLCYTSQYLAKAKFPAMALVFWDGAVMELQPRNYLYQDTATGLECLTILPTAVAGGLSLLGSLIQTGTHMMYYDIQIQGRGSLWFESFDQPSKSSNRASSASAAALPRIISTAAAIACSVWSVVACMFV

SEQ ID NO: 38293 - protein, 267 aa, Oryza sativa
MKARVGSVSPVLFKDGEGCGACYKVKCLDHGICSRRAVTVIVTDECPGGLCAFGRTLFDLSGAAFSRMAVAGAGGHLRDRGQLSVVYRSVQIYQDCVQVRREEHSLPCKRGLDELLAVTAGRVRGRPGRHWIHADKAGELSGVAGHEACVGGHVVPRAGPACRALLGEVDDAVGPEGAHGPGRHPQELEAHGHLHLAPQLRGRPLIGWGSAGPGPTFYRPGKLPGGPAKAGPTWQSVRQESQASSIVMQLIILVGLIIHDSIHGKCS

SEQ ID NO: 38294 - protein, 480 aa, Oryza sativa
MLSKIATRERTRTTGTKFSRPPPPPLARGAPLVGVLPSLLANGPVEFIRHHYEKMGSVFTVSLLQQKVTFLVGSEASSHFYKGLDSEISQDEVSQFTIPTFGPGVAFDVDYATRHEQFRFFGDIMKPAKLRTYVDLMVAEVEGYFARWGQSGTVNMKQEFEQLVTLIASRCLLGEEVRDKMFDEVSTLLRELNDGMRLVTILFPRLPIPAHRRRDRARARLGEIFSDIVRSRRGSSGGGGGGGGARHDDMLQCLIDARYKDGRATTETEVAGMLVAALFAGQHTSSSTSTWAGARLLTNPDHLRAAVEEQARLLRRHGGDRVDHAALAAMDTLQRCVKETLRLHPPALMLLRHARRSFVVRGGSGEREYEVPEGHTVASPLLLHNALPRVYRDPGEFDPGRFGAGREEGAGGLAYTAFGGGRHACVGEAFAYMQIKVIWSHLLRNFELQLVSPFPETDWTVVMPGPKGKVMVTYNRRKLT

SEQ ID NO: 38295 - protein, 441 aa, Oryza sativa
MEGGRGGKRWRFATPNLAVAAAGERSIQRYLLQLHACLDENGPRPVIPLSHGDPSSSACFRTAPEAEEAVAAAVRSGDYNGYSSPATSLPARRAIAEYLSCDLPYKLCTDDIFLTSGGTQAIEIVMSVFGQPGANILLPKPGYPKHEAHAVFHRMEVRLYDLVPERGWEINVEAVEALADENTVAIVITNPNNPCGNVYTYEHLSKIADTASKFGLLVIADEVYGHLVYGSTPFVPMGVFGETVPVLTLGAISKRWVVPGWRFGWIAICDPKGILKETKVVDSLRSFRNLTTGPATFIQGAIPHIMKNTNDEFFRKTLELLKETAEICFGEIKEIKCITCPHKPEGSFFMMVKLDISQLSDICDDIDFCSKLVKEESVVLLPGRALGMENWLRITFALDPPRLKQGLERVKSFCRRHQSHANMLNISASAKVEPHFGMSKS

SEQ ID NO: 38296 - protein, 373 aa, Oryza sativa
MGNLGVREAGRMAVLSRRWRRLPGLLPRLVIDAREFEPAALRAGWHARTKRAMERVAGAVESLLPGDRAIERLRLDAYLLRDESYTVRRVVERLNDAVDSGKVAAGGLELVFRATGGGGAPDQDQPSKRQARRLARLLAAAASPSLLPSVAELSLVNLRFTSPALASLLGRCTGLEELGMYQSDAGFGAVLDVGHARLRRLAVHAVDEAMYKKLRVSSAPRLERVVVANWFCRYAPVSFGHVPCLRELHLKNKAVYYQEPVRLSKMLASTPHLESLTLGFSSWRIWIEPEAPKQLEPMFSKLKSLVLTGIFRGCDLSWTLFFLQAAPVLEEFILEVDKPLDAKAPSDIYGEMPKTDDVTWQVPEFQHHHLKHL

SEQ ID NO: 38297 - protein, 138 aa, Oryza sativa
MKRRSSVWETDRSWEGKWVRWRSVQLDGGGGRSRVTPRRHPPRRGGAGGGGETLAWGDEIQKYLFGNLRRSLTIEADNLARYVYCSTQHIFFISSVHLFSNLSLQYHFIFQLQLMDILLHLANMIVTSDICKYIIRIS

SEQ ID NO: 38298 - protein, 466 aa, Oryza sativa
MARSRPRVWLLAGCSAVLLWAFVGQLVAVGRLLALFGLAGDAEPSPPPTALPPRRVYKSNGYLKVSCNGGLNQMRSEICDMVAVARLLNLTMVVPELDKRSFWADQSNFEDIFDVKHFIDTLRDEVHIVKQLPKRFGPEDSNNILNMPPVSWSDEKYYLHQILPLFSKYSVIHFNKTDARLANNGISTQLQLLRCRVNFHALKFTPQIEALGNKLVQKLQAKGSFAALHLRYEMDMLAFSGCNHGLSQEEAEELKRMRYAYPWWREKEIDPQAKRLQGLCPLTPEETSFILKALGFQKDTLIYIAAGEIYGGEKRLEPLQAAFPKLVRKETLLDLEALRQFQNHSSQMAALDFIVSTASDIFIPTYDGNMAKPVEGHRRFLGFRRSVLLDRQKLVGFIDLYNNKTISWNNFASSVQETHRNRVVQPSCRQKLENKPKEEDYFYANPHECLANSRFCSRTKDAISVR

SEQ ID NO: 38299 - protein, 385 aa, Oryza sativa
MEDSSLFMEWAMETLQHLHPLPATPPPAGGGYAGDNATFPSLQALRESSVSQNGMAPPEPTAHEGHRASNSWSSGDTDSVSGGGGGAVMEHDGWSTSPNSVRCAAGGGGGGGGGGLWPVSWNFSSAMTQPCNDQATPSNPPTTTRARYGGGGVRYLPAAVSPSPSAQTRRASSKGNGGGGSGSSSAAPYAQEHIIAERKRREKINQRFIELSTVIPGLKKMDKATILSDAVRYVKEMQEKLSELEQHQNGGVESAILLKKPCIATSSSDGGCPAASSAVAGSSSSGTARSSLPEIEAKISHGNVMVRIHGENNGKGSLVRLLAAVEGLHLGITHTNVMPFSACTAIITIMAKVEDGVSVTAEDIVGKLNTVLQQNSRNSARETKS

SEQ ID NO: 38300 - protein, 417 aa, Oryza sativa
MEMASGGGAAAAAGGGVGGSGGGGGGGDEHRQLHGLKFGKKIYFEDAAAAAGGGGTGSGSGSASAAPPSSSSKAAGGGRGGGGKNKGKGVAAAAPPPPPPPPRCQVEGCGADLSGIKNYYCRHKVCFMHSKAPRVVVAGLEQRFCQQCSRFHLLPEFDQGKRSCRRRLAGHNERRRRPQTPLASRYGRLAASVGEHRRFRSFTLDFSYPRVPSSVRNAWPAIQPGDRISGGIQWHRNVAPHGHSSAVAGYGANTYSGQGSSSSGPPVFAGPNLPPGGCLAGVGAATDSSCALSLLSTQPWDTTTHSAAASHNQAAAMSTTTSFDGNPVAPSAMAGSYMAPSPWTGSRGHEGGGRSVAHQLPHEVSLDEVHPGPSHHAHFSGELELALQGNGPAPAPRIDPGSGSTFDQTSNTMDWSL

SEQ ID NO: 38301 - protein, 478 aa, Oryza sativa
MEMALTPLPLLCSSVLFLVLSSCSLANGRDTPSSSSSSSSSSSSSSSSSSSSSSPATSTVATGISAAAAAAANGTAALSSAVPAPPPVVIVVHHHFHRELVIAAVLACIATVTIFLSTLYAWTLWRRSRRSTGGKVTRSSDAAKGIKLVPILSRFNSVKMSRKRLVGMFEYPSLEAATEKFSESNMLGVGGFGRVYKAAFDAGVTAAVKRLDGGGPDCEKEFENELDLLGRIRHPNIVSLLGFCIHEGNHYIVYELMEKGSLETQLHGSSHGSTLSWHIRMKIALDTARGLEYLHEHCSPPVIHRDLKSSNILLDSDFNAKIADFGLAVSSGSVNKGSVKLSGTLGYVAPEYLLDGKLTEKSDVYAFGVVLLELLMGRKPVEKMSPSQCQSIVTWAMPQLTDRSKLPSIVDPVIKDTMDPKHLYQVAAVAVLCVQAEPSYRPLITDVLHSLVPLVPTELGGTLRAGEPPSPNLRNSPC

SEQ ID NO: 38302 - protein, 282 aa, Oryza sativa
MNALLRVQERARERRARCSADGRDSQDAVGERDGRADPIKQAEEQWCDSQGSVSEVRSKIHMRHDAVAKRERAIAYALSHQPRSSKQSARPSSPARSLRNHESNRCNHDWSYIEGWMATKPWESRLMEQSHAELKCSKNSGELNLAGAQLSNASSVKMRGNRVAAKPPSVLSASSSDFPCDVSSASTSSATPARSDGGHGEGPSYMSLTKSAKARQSYNSPFQIQRQRSGGMSSYKRVALSPLDVQSNACSEFSVTSRKLNSLSLKGRSMTRSLDKENDNLF

SEQ ID NO: 38303 - protein, 405 aa, Oryza sativa
MDATATDLRVSIAHQTRFAFRLAAALSSPRAHPAAGGAAGAGGSNVAFSPLSLHVALSLVAAGAGGATRDQLVSLLGVPGRGTAEGLHAFAEQVVQLVLADSSPAGGPRVAFADGVFIDSSLSLMKSFKDVAVGKYKAETHSVDFQTKAAEVASQVNSWVDRVTSGLIKEILPPGSVDHTTRLVLGNALYFKGAWTEKFDASKTKDGEFRLLDGKSVLAPFMSTSKKQYLSSYDSLKVLKLPYQKGRDLRQFSMYILLPEAQDGLWSLAAKLNSEPEFLEKRIPTRQVTVGKFKLPKFKISFGFEASDLLKILGLQLPFSSKADLTGMVGSPERHNLFVSSLFHKSFVQVDEEGTEAAAASAAVVSFRSAPVTVDFVADHPFLFLIREDMTGVVLFIGHVVNPLL

SEQ ID NO: 38304 - protein, 322 aa, Oryza sativa
MLRKVAAPTKIQKSLIRPLFRCQASMNARVTFVCELHAAEENLVVLSASFDHAHHIYYLVYDGIDESLTMIPSLSPHRFVAFHPRPVLRRRATGGYDLALIARYLSRKSREDGDVLLLFTKEKESSCCSDQWMEKKKGMRLPTGPLGFFCPDMIFSFKGNTFWVDLSQGFMCCDTNVLFSGDTVDFRHLSFPHQYLLHDATALANTTVAVWTLDQGGLCWKKDVEFRLGNIWSQRDYKQSGLPRMVPVWPFLRPHAHGTLYFLVPKPMTGPSDPQMYHICGLDMCTKKIQLSQYSVRSNILRPAAFPTNAFQHLDESPLATK

SEQ ID NO: 38305 - protein, 522 aa, Oryza sativa
MARMSLRPRGRRPREACGDDRLSALPDDLLLLVLRRLDTRAALATGMLSRRWTNLPHELDALDFRVSDILPPRYHRCILRHRGVMNWIAYRHAIPNSLMPAIRRHERRAARALVRSVESFIDADDGRPSRRKVSRLRLEFFGTHNTAGINRLISKAIDDWGVEELEAVGKPMYWRQPPTHEFPSHGLCKDPRASRLRTLTLGGCVLPPLHEYGGVTKLVLHGMAASTPAEAYEGVFTSCPQLQVLHLESCFLDRRKSLVVDAPISEIRELVVDACDIISVKLRSLPRLQNLASMGTQVLFDRRTSSSSFPCLRQWHLACLYGLARKFSRWLEPDLTLDRFFHYTLDITDLIVRFTGPERWIVPSSCSPSPPLLRSLRRLLVADVPSSWDASWPRILLDAAPSLKTLHIHIAPRDAKKPTGGGFSWHHPTVPLHNYRLEEFAMAGFGGTVSQVYFVKLVVGACTALRHVSIFKGGDLKYKGNWDWEMPRLQENSWNDKEKETMEKQIMDAVSCSTDHLQIVLG

SEQ ID NO: 38306 - protein, 54 aa, Oryza sativa
MFISSCVFFFFLVESSSLVLVKVGAPIYHHGASHLCEKGIDRRVKKSFLLPWLQ

SEQ ID NO: 38307 - protein, 295 aa, Oryza sativa
MTVVVVADDAAAAAAAAQQQEELPPGHGQTVCVTGAAGYIASWLVKLLLERGYTVKGTVRNPDDPKNAHLKALDGADERLVLCKADLLDYDSIRAAVDGCHGVFHTASPVTDDPEQMVEPAVRGTEYVIKAAAEAGTVRRVVFTSSIGAVTMDPNRGPDVVVDESCWSDLEFCKKTKNWYCYGKAVAEQEACKAAEERGVDLVVVSPVLVVGPLLQPTVNASAVHILKYLDGSAKKYANAVQAYVDVRDVAAAHVRVFEAPEASGRHLCAERVLHREDVVHILGKLFPEYPVPTR

SEQ ID NO: 38308 - protein, 555 aa, Oryza sativa
MTTSSSGSVETSANSRLGTFSFASASFTDLLGGNAGAGGGGVSRYKAMTPPSLPLSPPPVSPSSFFNSPIGMNQADFLGSPVLLTSSIFPSPTTGAFASQHFDWRPEVAAAQSADQGGKDEQRNSYSDFSFQTAPASEEAVRTTTFQPPVPPAPLGDEAYRSQQQQQPWGYQQQPAGMDAGANAASFGAAPFQATSSEMAPQVQGGGGYSQPQSQRRSSDDGYNWRKYGQKQVKGSENPRSYYKCTFPNCPTKKKVERSLDGQITEIVYKGTHNHAKPQNTRRNSGSSAAQVLQSGGDMSEHSFGGMSGTAATPENSSASFGDDEIRVGSPRAGNGGGDEFDDDEPDSKRWRKDGDGEGISMAGNRTVREPRVVVQTMSDIDILDDGYRWRKYGQKVVKGNPNPRSYYKCTTAGCPVRKHVERASHDLRAVITTYEGKHNHDVPAARGSAALYRPAPPAAAATSSHPYLPNQPPPMSYQPTGPQPYALRPDGFGGQGPFGGVVGGSSFGGFSGFDDARGSYMSQHQQQQRQNDAMHASRAKEEPGDDMFFQNSLY

SEQ ID NO: 38309 - protein, 167 aa, Oryza sativa
MFVPWDHEHEVNPLTGEASFVERLYYVEAADIARLREEARATSVQAVSAYLWKKLAAVVSSSASIAKSDTAARRCSMGYWVDLRWRVRSPDFCRALRSYVGNATTYVEREEPADAVLKKPLGEVAAMVREVAAKLPAARSASVSAARCPPPPAALLAPALAGPPPCW

SEQ ID NO: 38310 - protein, 382 aa, Oryza sativa
MAKRARLLSAAAGPVLPDELVWEILARLPARGLLRCHAVCRDWRRLATSADFLLAHHRHQPPRPLVFGCARWRSGAAADADAAVDSVDLIRHPAERRRVLGFSDYRQHQSFKIHSSCDGLLLFVSGRAFYICNPATRQVTPVPALTGGGSQVTLYPHPSSGDGEYRVLKWKYPDAVCILAVGSSEKPRRIGLPEAFLPPVFWIDEIGFLPPVLLHGCLHWHLRKPEDAILVFDTVAESFRWMVSPNVDGYGAHLVEIDGGMLGIGIVTQGMAKLWVLQDYETEVWSLRYHVKLPVARMRSIAREGFFSWKIVCHRGEILVYIQSSVFLFLCDTKGNLREKIHLDNMLPCAMRHCLKESLVNHAFFGRHGGAHVGQPQFFCGL

SEQ ID NO: 38311 - protein, 154 aa, Oryza sativa; identical to SEQ ID NO: 37082

SEQ ID NO: 38312 - protein, 169 aa, Oryza sativa
MASRVAMASTSVQETWSGHAASTAALALLTVSNPSNASERLSGASLSAVLPAVDVISTEPSHPCTPRHATPHTRRQSIEIAMLDTSPINQSSKVFVHRRSSRGRRGGRWSRWCGWWPASCPSPRRARCSRRWGTCCCSSPSSGRTRRAAPRRRRRAAPSTTTTTAEPSC

SEQ ID NO: 38313 - protein, 496 aa, Oryza sativa
MATCADTLGPLLGTAAANATDYLCNQFADTTSAVDSTYLLFSAYLVFAMQLGFAMLCAGSVRVKNTMNIMLTNVLDAAAGALFYYLFGFAFAFGAPSNGFIGNHFFGLKQVPQVGFDYSFFLFQWAFAIAAAGITSGSIAERTQFVAYLIYSAFLTGFVYPVVSHWIWSADGWASASRTSGSLLFGSGVIDFAGSGVVHMVGGVAGLWGALIEGPRIGRFDHAGRSVALRGHSASLVVLGSFLLWFGWYGFNPGSFLTILKSYGPPGSIHGQWSAVGRTAVTTTLAGSTAALTTLFGKRLQTGHWNVIDVCNGLLGGFAAITAGCSVVDPWAAIICGFVSAWVLIGLNALAARLKFDDPLEAAQLHGGCGAWGVIFTALFARKEYVDQIFGQPGRPYGLFMGGGGRLLGAHIVVILVIAAWVSFTMAPLFLVLNKLGLLRISAEDEMAGMDQTRHGGFAYAYHDDDASGKPDRSVGGFMLKSAHGTQVAAEMGGHV

SEQ ID NO: 38314 - protein, 427 aa, Oryza sativa
MKPDWSIFSKFDHNGGYLHKFPIDSPISHDIGLGLISHFGTLVESSFQHPRHICSTGNGAVQEAFSCFNKFAGAFYFWLSRASNPKIFHRLSAIAGSSSRACQSQIKQVTSCMQHLAGLRFGSQVREEHAIQILLAKLANATFGRLWNEVEERHACNILMLAAATVPPFENISPKMLADSMTLGRDNGRTREPVDQHSLEENHSGCTCVAVPRIILPEDATEPKTGIKFPTLLEDNSNPTSEVLVGMGFRSMRIMRVKNLNLYAFGLYIQPDSICKRLSPKYASVPVSELKDHPDFYEDLLRENIHMTVRLIVSYNGLSIGTVRDAFEKSLCFRLQKMNPNTDYHCLKTFGSYFSEDICIPAGTKIDFRQTSDGQLITEIDGKQIGAVQSKDLCRAFFDMYIGDPPVSVETKQDIAQNVGGLIRRCY

SEQ ID NO: 38315 - protein, 130 aa, Oryza sativa; identical to SEQ ID NO: 38129

SEQ ID NO: 38316 - protein, 81 aa, Oryza sativa
MRGAGCGCLPQFQTAAPSSPHRPPRRRRWGISELGLSLVNHPHMPTLTRNEPNGPTIEWRVAQQRVPCLRPSPDAAPRLCT

SEQ ID NO: 38317 - protein, 510 aa, Oryza sativa
MEHGGHELAVVVLVLLLLVSATSCTFLEEDVILGTVEEAKVARLGGGGGGGSKGANASTRRADNTCAGVGVGVGGGGGGGGGGGGGGRGRFYLGWKEEIAGMAGRPETAAWLRAVRRRIHERPELAYEEVETSRLVRDELDAMGVGFRHPVARTGVVANIGTGRPPVVALRADMDALPIQEAVEWEHKSKNPGKMHACGHDAHAAMLLGAAKILKAREHHLRGTVRLLFQPAEESGAGAKRMIEGGALEDVEAIFAVHVSHQHPTSVIGSRTGPLLAGCGFFKAVIHGGRRSGDAVLAAASTIISLQSIVSREADPLDSQVVSVAMVNGSDHPAATARAAAAEEEEEFVLGGTFRAFSNASFYQVRRRIEEVITAQARVHGCEAAVDFFENQSFYPPTVNDARMYAHVKAVAGELLGAGSYRDVPPMMGAEDFSFYSQVVPAGFYYVGVRNETLGSVHTGHSPYFMIDEDVLPTGAAFHAAIAERYLANHSPSSSSSSDSDDPDVELEAS

SEQ ID NO: 38318 - protein, 423 aa, Oryza sativa
MASRRQWGAGAGAVDVPAQERKGEAAKIARRPKTTTVVAQQPPRIRRALADVSNLVNGRAALPVVNRQKAAAAAADKCRKPIKQRNENNKAAKPEVIVISSDSEKHKKNPAQRAASRRAPIQTLTSILTKCSRASDGVISPKKELIYDIDASDSHNELAVVDYVEDIYRFYRNTENTYRPLCTYTVSQTEINERMRAILTDWLIEVHYRLMLMAETLYLTVYIIDQYLSLENVPRKELQLVGVSAMLIACKYEETWAPLVKDFLVISDNSFSRQQVLSTEKSILNKLQWNLTVPTMYMFILRYLKAALGDEEQEHMTFFYAELALVQYSMLFFAPSVIAAAAVYAARCTLGLSPLWSDLLEYHTGLAEPQLLGCARRLVSLHAAAPESRQKVVYKKYASPKLGAVSLHSPAKKLLPPPSPVAA

SEQ ID NO: 38319 - protein, 463 aa, Oryza sativa
MDLLPLVTLLLLAHAAAWVAWQAAARRRRATCYLLDYACHKPSDDRKVTTELAGAIIERNKRLGLPEYRFLLKVIVNSGIGEHTYSPRNVLDAREDCPTLRDALDEMDDFFDDAVAAVLARAAVSPRDVDLLVINVGSFSPSPSLADRVVRRFGLRDDVMAYNLSGMGCSAGLVSVDLARNVMLTRPRTMALVLTSESCAPNWYTGTDKSMMLGNCPFRCGGAAALLTNDPAFRSRAKMELRCLVRAHIGAHDDAHAAAVHREDADGRLGVSLSKALPKAAVRAFTENLQRLAPRILPAGELARFAARLLLRKLLRRKAAAGAAAKINFKTGVDHFCLHPGGTAVIEAVRKSLGLDSYDVEPARMALHRWGNTLASSLWYVLSYMEAKRRLNAGDRVLMVTFGSGFKCNSSYWVVTKDLADAGAWEDCIHDYPPANLVNPYMEKFGWVNDLPSQGQGGAFPFF

SEQ ID NO: 38320 - protein, 242 aa, Oryza sativa
MVVLAKPAALEQISLVRSPSVEDNFGAGLPVVDLAADGAAGEVVRACERFGFFKVVSHGVGEGVVGRLEAEAVRFFASPQAAKDAHGPASPFGYGSKRIGRNGDMGWLEYLLQVALHHDADAGDHQWVTVPPDPASFLVIVGDSLQVMTNGRMRSVRHRVVANKLKSRVSMIYFGGPPLEQRIAPLRQLLVAGVGNGEEEEQSRYEEFTWGEYKKAAYLSRLSDNRLAPFHRQPPPVANPLA

SEQ ID NO: 38321 - protein, 102 aa, Oryza sativa
MRGELVSRFLTGAEQSTVEHLYVHLRSSSVRDRVTFYFHYLNLLLRASCFTGSTSLPDFSGGSPRPSPTSRCSTSTLSASRSMCSMAWPPCAGLLSARVCPL

SEQ ID NO: 38322 - protein, 82 aa, Oryza sativa
MEVLPIIRHLLPLLMVLLLISCLTRNSCYMDDLLIVPHMEGLLMIHHMEDLPLIHHMEDQYPQYGRPANDPPYRRPVNDTSY

SEQ ID NO: 38323 - protein, 242 aa, Oryza sativa
MVTVREEIRKGPWTEQEDLQLVCTVRLFGERRWDFIAKVSGLNRTGKSCRLRWVNYLHPGLKRGRMSPHEERLILELHARWGNRWSRIARRLPGRTDNEIKNYWRTHMRKKAQERKSNMSPSSSSSSLTYQSCHPETPSMIIGIEEQELHGGSGCITSIMKSTPVDMDGYPMDQIWMEIEAPNVLPGPCFDEAEDSASNSLSGPLLPYPMWDYYCPETCLRMDDEIKVAPQFGYGKGVGPCY

SEQ ID NO: 38324 - protein, 160 aa, Oryza sativa
MAFIKVVFSVLLPVVVSMLVATTTMADHRGQVVYTPGQLCAAGRGYPMYPLPRCRALAKRQCAGGAVDEQVRQDCCRQLAAIDDSFCRCPALSHMLVGMYKELGAPAKGQPMDEVFPGCRRGDMKRVAASLPAFCNVDIPIGIGGVCYWLSYPMNPATGH

SEQ ID NO: 38325 - protein, 226 aa, Oryza sativa
MPPGQMLEPSEPEAEFTLACLQNGLRIDGRSFLAARPVDITFGEELGNVTVAIKGTRVSTSVRATLMPPRSDRPYEGFLQITTDISPMAGVEYDSTGGGANSSARAREVLFDRLIEKAVRRTEAVDREALCVVAGEQVWNVHLTVHLLSDTGAALDAAVLSSMLSLRHFRRPDYSIENGNQVRLYSADERVPVPLAIHHTPLCVTFSIFNCLPPDLPSPRRMTTTI

SEQ ID NO: 38326 - protein, 381 aa, Oryza sativa
MKEGGGDGGFVRADQIDLKSLDEQLERHLSRAWTMEKRKEEAAADQRGSKPPALAAAHYSQNRRQRREEWEIDPAKLVVRGVIARGTFGTVHRGVYDGHDVAVKLLDWGEDGHRSEQDIAALRAAFSQEVSVWHKLDHPNVTKFIGAIMGARDLDIQTESGHLAMPSNICCVVVEYLAGGSLKGFLIKNRRKKLAFKVVVQIALDLARGLSYLHSKKIVHRDVKTENMLLDKTRTVKIADFGVARLEASNPSDMTGETDTLGYMAPEVLNGSPYNRKCDVYSFGICLWEIYCCDMPYPDLSFSEVTSAVVRQNLRPEMPRCCPSSLANVMKRCWDANPDKRPEMAEVVSMLEAIDTSKGGGMIPVDQRQGCLSCFRQYRGP

SEQ ID NO: 38327 - protein, 439 aa, Oryza sativa
MELPRMASRRLPLPLVAQLVVLLGLACGLRSSSAAAAAASGLAGERVTYLPGQPPVDFDMYSGYVTVDKRAGRSLFYWLQEAPAAAQPAPLVLWLNGGPGCSSVAYGASEELGAFRIRPDGATLFLNDYRWNKVANILFLDSPAGVGFSYTNTTSDLYDSGDKRTAHDSYKFLVKWFEKFPQYKYRDFYIAGESYVGHYVPQLSQLVYRNNKGVKEPLINFKGFMVGNAVTDDYHDYIGTFEYWWNHGIISDGTYRLLNASCVHDSGEHPAPACLAALNASTVEQGDIDMYSLYTPTCNETSTSSAAARQRRLKQGHYPWMTGSYDPCTERYSTEYYNRPEVQRALHANVTGINYTWATCSDILNDNWRDSPRSVLPIYHELIAAGLRIWVFRDMLHVLQLHGLSRSKLQIDRTNTMNSRKRPVSHQQGGTSPDLIRRK

SEQ ID NO: 38328 - protein, 322 aa, Oryza sativa
MQTEARVGVVVDGGRAAMGRRHIGTVAHLAAGGFAGAVSKTCTAPLARLTILFQVAGMHSDVAALKKYSIWHEASRIVREEGFGAFWKGNLVTIVHRLPYSAISFYSYERYKKFLQRVPGLDEDSNYVGVARLLSGGLAGITAASVTYPLDVVRTRLATQKTTRYYKGIFHAVSTICRDEGVKGLYKGLGATLLGVGPSIAISFTVYESLRSHWQMERPQDSPAVVSLFSGSLSGIASSTATFPLDLVKRRMQLQGAAGTSSVCKSSITGTIRQIFQKEGLRGFYRGIVPEYLKVVPSVGIAFMTYETLKSLLSSIDEDDES

SEQ ID NO: 38329 - protein, 659 aa, Oryza sativa
MDSPADDPYGRRPHASWQTIRSTNTWSSNDTYSMMDNRPISDLERARLRPLSTEEFPWISREVDTDNPSFAPIRAASTRKPPAWFQEAREEGSSTELSRGNSTRSHNTARESIVDLAYLVSDLDFYAGAVHDFGHDALSPDSWTAQDEQDWPLPEDADGATFGQISILRNKSNAKSMGRKPSTRSRRSEKDTSLVTWDGPGDPTNPKNWSRQRKWAATITVSLFTFISPVSSSMIAPALFDIATEFGEDPGSSTIPLALSVFVLGFAIGPLFIGPMSELFGRRIVLQISNLFYFAFNLGCGFAQNTPQLIAFRFLSGLGGSAPLGIGGGVLGDLWMPQERGRAMALYSLMPLLGPAIGPIAGGFIAEYSDWRWVFYSTCIAAIVIQIMGFFFLQETYAAEILRVKKVALIKATGDSTLHTEFETPNRKLSKHLGAAFERPFRLLFTQPIVQILALYIGYVYGVMYLVLASFPMLWRNQYGIRRPSISGLNYISLGIGFFIGTQIAAFSADKIYKGLKAKHGGVGRSEFRVPLMVPGSLLVPIGLFIYGWTAQEHTHWIGPNIGAAIFAAGNQMVFQCCQTYIVDAYTRYAASAIAATTVLRSLGGFAFPLFASAMYRGLGYGWGNSVLGFVGLAIGFPAPILLWWYGEKLRKKSQFAAG

SEQ ID NO: 38330 - protein, 233 aa, Oryza sativa
MSHGDHSFAKVITVGGEAGTIGWVDLWKGILFCDVLKDNPVFLYVSLPPPLMATRKLRGCPRNTRDVSVIKGLIRYVELQIHIKPGSFTRGNYISNGWTVATWSRISSNPFEDWHQNCKLDASQVSFENNPVHYEKLPELLDDQGIPQLTMVRLHTGHPVLSMHDHDIVYLMTKVNYLDDKAWVLAIDMRNSTLQGVAEFNAERVIALRYAFTQSGISEYLNMLPGIKGNRKR

SEQ ID NO: 38331 - protein, 494 aa, Oryza sativa
MISRLLSRSTLSRGVRGFASSSSALDASAKLNKPARFATPIAASDIPKGFVVSSTYAGIKAAISPKPADGAAAAASNPNPKPDLALIVSTVPAAAAGTFTRNVFKAAPVVVSNEVLVEGAKAASGARVQSVLVNSGCANAVTGTQGMQDALACVELVKKNLAPHPGLAQSAEGRETLLLSTGVIGVPLPMPAIKRCIPHLANGMILRSDPESWRETARAFMTTDTFPKLRAKTFKLGDTECRMIGIDKGAGMIHPAMTAPGGGLHATMLGLIATDAAIAPAALQTALNRAVARSFNCISVDGDMSTNDTILLLANGQATARRTAELDESSAHFDAFVAELTAFCQELSQLIVRDGEGAEKFVEISCTNAPSFDVAHGLLSRLVTSMLFKCAIHGEDANWGRILASVGGADPTLTAHIDPSKVSVSFVDPVGQLPAITVLSNGNPAKVDEAEINKLLQKEDVKIVIDLQNGAEQCTYWTCDLSREYIDINADYRS

SEQ ID NO: 38332 - protein, 257 aa, Oryza sativa
MYLRCMTQATPTKWNKWLHLAEYWYNTSFHTALGCSPHKALFGADPHVSQVLVLLSSVHQSVVDLVSERNQLSAFLQQQLQRAQLRMKHQADKGRSERSFAVGDHVFLKLQPYTQSSVVNRPYPKLAFKFFGPFEILEKIGQSAYRLQLPDSSLIHPVFHVSQLKAHVPDHTPVFTSLPHPVVLDAADVWPEEILERRLVKKGNATHVQVLIKWSSLPAHQATWEDYEVLKTRFPSAPAWGQAVSPAGGTVTPVPHA

SEQ ID NO: 38333 - protein, 277 aa, Oryza sativa
MSGGVGPTCGGGITLPSTGAPLPPLHPTPTSPTARPHHHYYLFSIKQLNSFGAAAVLAFSTTVPLSDIAFALLVIPYLVVLSVLAFPQRPGKPNPGAPVFLGRGRFLLRAHDALGFLVGAALPALYILDGLRSGDTAGVAAASPHAFLLAAQIFTEGLAAAWPGRFSLPVRAAVVVMYGARRMFAASEWLRQEMEKRDQFGGGVGGAPAVARRRVVAGRVLAVANLAYWGINLFAFLLPFYLPKAFNRYYCGSDSKEDDATAAAGAIDADDAKKKDS

SEQ ID NO: 38334 - protein, 284 aa, Oryza sativa
MVGMRGAYGYNDNGNEGGVVVGGGEAEAEIAAMAVLHKVAAPPAQSTASKLKARVKETFFPDDPFRGFKGKPLTTKWVMAVQYLFPILDWVPSYSFSLFKSDLVAGLTIASLAIPQGISYAKLASLPPIIGLYSSFVPPMVYAVLGSSRDLAVGPVSIASLIMGSMVRQAVSPAAEPLLFLQLAFTSTFFAGLVQASLGILRLGFIIDFLSKATLVGFMAGAAIIVSLQQLKALLGIVHFTTEMGLVPVMASVIHHTKEWSWQTILMAVCFLVLLLTARHVGLY

SEQ ID NO: 38335 - protein, 404 aa, Oryza sativa
MARRGGALAAAAVDVVGSVLVVCCLCWCAVQPALAGGVGGGGGDGGMRCKYNAMFVFGDSLADTGNICVNKSAAATLLLTFAQPPYGMTYFGHPTCRCSDGRLVVDFLAQELGLPLLPPSKRSAGGGDFRRGANMAIVGATALDFDFLKSIGLGYPIWNNGAMNVQLQWFHHLLPSICATQPQGCRAYLSKSLFLFGSLGGNDYNAMLFFGFTVDQARNYTPKIVDTIITGVEKLIAMGAAEIVVPGVMPVGCFPLYLTMLRSSNESDYDEHGCLRPLNDLAIHHNALLQARLAGLQARYRSAAAAAPAPVRIMYADYYTMVAQMLHTPARFGFRSGMTACCGAGGGEYNYEFEARCGMKGAAACRDPSRHVCWDGVHTTEAANRLVAGGWLRGPYCHPPILHH

SEQ ID NO: 38336 - protein, 227 aa, Oryza sativa
MKEARVVIMGGGGVGKSALTVQFVRNVFVSTYDPTIEDTYRKMLVIDGQQCMVEILDTAGTEQFLALKELYIKSGQGFILVFSLTSLASVNELGPLREAIVRIKDTTAIPLVLVGNKSDLRADRQVPREVGTSLSKAWGNVPFYEASARKRINVDEIFADVVRQIRAFQAINSRPGTRPGTSSGASGKHGFGANGSSSHSGSKDSKLAGSSFGTSSKARDRKKCVIM

SEQ ID NO: 38337 - protein, 320 aa, Oryza sativa
MAAKDNKPKVAPSTHLIAGGIAGFAEACTCHPLDTIKVRMQLSRRGKKAGEKPRGFIATGAHIIKRETPLGLYKGLGAVVAGIVPKMAIRFMSFEQYKAALADKDTGKTSARGVFLAGLGAGTTEAVAVVNPMEVVKIRLQAQQHSLADPLEVPRYRNAAHALYTIIREEGFMTLYRGVALTAARQATNQAANFTAYQELKGLAQRVHGTSELPSYETALIGLISGALGPFSNAPIDTIKTRIQRASKVEGETAVSRVVKVAKDMFAQEGASAFWKGITPRVARVAPGQAVVFTIYEKVKSYIEAAKTGEFSLNDTRSDE

SEQ ID NO: 38338 - protein, 217 aa, Oryza sativa
MAGGVVDGLTMASSRADGREARSSAAAVTWSWRAPVATPPAARAPPVGAPPLHSWRHPITLPSTLSGTGANTVSRAEKPRRPAVEELPRRRGDEHRAEQRAGLLDTEQRQRPLASSASAERSSKGPSRRRAVAVRNSLVPSGDGDGRISAAGFSQVGDLDEASPAWENNGGHTSRRYNISQLFSSPSPHQVGPVPEFFCARCSFLWLCLDSKFVSKL

SEQ ID NO: 38339 - protein, 383 aa, Oryza sativa; identical to SEQ ID NO: 38226

SEQ ID NO: 38340 - protein, 345 aa, Oryza sativa
MKYSTSVTMDKAYIAVFSIVILFLLVDYLRRLRGGGTSNGKNKGMRLPPGLPAVPIIGHLHLVKKPMHATLSRLAARHGPVFSLRLGSRRAVVVSSPGCARECFTEHDVAFANRPRFESQLLMSFDGTALAMASYGPHWRNLRRVAAVQLLSARRVGLMSGLIAGEVRAMVRSLCRRPAAAAPVQLKRRLFELSLSVLMETIAQSKATRPETTDTDTDMSMEAQEYKQVVEEILERIGTGNLCDYLPALRWFDVFGVRNRILAAVSRRDAFLRRLIYAARWRMDDGEKKSMIAVLLTLQKTQPEVYTDNMITALCSVSTSLKVCSPMDRDRTTDHRLIERLKNID

SEQ ID NO: 38341 - protein, 120 aa, Oryza sativa
MTPPRAPLWPSTATPHRRRATPPPLPRDAGRCPPNGEREREGEGAAERPREIGAPRVLRRSEAYTLLGTRIEESLTTLMRNGELCLAPRSSVSSGRSIRGWESLMWKGEGECHVTHCGHP

SEQ ID NO: 38342 - protein, 541 aa, Oryza sativa
MTQHYDAVCVGGGSAGIYHLYMLRKLGFNVHLFDAAPDFGGIWRLNCYPGARVDSEVPLYGLSFPEVWRSWNFSCKYPDFKELRQYFNRLDEKLELRKDCSFNHRVRSAHWDDAAQKWTLTAGPSEDKTVTVTAQHVIFCLGFASKVNIPKIPGMEKFKGRIVHTGEWEESIDCTGKKVAVIGTGASGIQVSQEIGPLVDRLTVFVRTPNLALPMRQQKLEASAQEAFKDIYPEIFEKRKKTFGGFHYDFDPRETLSVSAEERERLYEELWARGGFHFWLETFHDLHANKEANKTAYDFWQKKVAERIKDPKKREILCPEEWPHTFGTVRPSLEQNYYEVMNQDNVGIVSIKRGGDEGIKEITETGVRLNSGREIGLDQIILATGFDTHTGGFKQIDIRGKQGLPLTDKWSQGCNSLNGLNTAKFPNLFFLYGPHGPTAYSNGPSTVEVQAEWVCEFIKYMRDNKITSFDVDGQAEAKFGEHINELSAKTLFHESHGWYMGRNIPGKPVQALNFTGGIPLYVTELDECKKAGYQGYDLVKA

SEQ ID NO: 38343 - protein, 220 aa, Oryza sativa
MAPGAGSSSSARRGRRVAAAEPPRRALRMRASSPMYYTSDDEDLPEIVLTPPAPAPPRTGTRSLRMHASPPDYGRRRTNRPRRVARTRSPPVVQEAEREPPAPQQPAAVVVERVFYMVGSPPDVITATGEGPGGRTVAGFRCRRLTSTRTLVDGEDAAARAAAISGARALVMCSCHGAPFTHAEFLLHAGGTDLGRNVTGYPWLGDEMELTPPGAGGPHL

SEQ ID NO: 38344 - protein, 156 aa, Oryza sativa
MAAEGGRCQKSYFDVLGICCPSEVPLVEKLLQPLEGVQKVTVIVPPRTVIVVHDVDAISQSQIVKALNQARLEASVRAYGNGSEKITNKWPSPYVLLCGLLLVVSLFEHFWHPLKWFALVAAAAGLPPIVLRSIAAIRRLTLDVNILMLIAGKNSL

SEQ ID NO: 38345 - protein, 518 aa, Oryza sativa
MYRPLPRAVSALPKRLTRASARSVITPCRPAIASSVPSHSVSIGRLLSISRASRAEAAAKPAAPTASSSASASYSDGGPAVPGVTTDAKSRAVYITWASGITSKFHNIWLRDHCRCPQCYHPTTKQRLLNTFEIAPDAQPISAEATTEGLLVHWPLLPSERAAQPAAPEPAQGTEEAAGDSAAGPQHPSLYPWRWLMRNSYSPLLSDPVTAASDDTGLKGIEKVLWGKGIGSAPPTVRYDEVMGSDEGVLKWVTKIAQYGFAFVSGVPPTPTDTEALIRRIAFIRETHYGGFWDFTSDLAHGDTAYTDLALQAHTDTTYFTDPAGLQMFHLLSHTASKTSASGTKGPSGGESLLVDGFLAAAVLKDVHPDAYDTLSRVRIRTHSAGDENTMIRPLLDGGYPILQHDEATGELVLVRYNNDDRSVLRIDADDVEPFYDALTKWNAILTNPEGEYRVQLKPGTPLIFDNHRVLHGRAAFVGNRRLCGAYVNHDDYRSRLAVLRTQLAENRSTRGVWDDGL

SEQ ID NO: 38346 - protein, 486 aa, Oryza sativa
MSYNHSPSITAETINQKVRIFTYEPCGEIVRHARRLEKEIYENPGSLPFQEIIYCNLGNPQALGQRPINFFREVLSLCDNPSLIDRDEARALFSPCALKRARKIIESLPGRDSGSYTSSQGVRGLREAVADGIAARDGFPSKPDNIFLTDGASSAINMMMQILIRSHEDGILCPLPEYPLYSASIILHGGTMVPYNLTEDSIWGLEIFEVKRCLEDARASGLTIRAMVVINPGNPTGQVLSITNQEEIVEFCRKEGLVILADEVYQENVYTENKRFNSFKKVARSLGYDHHDLSIVSFHSVSMGYYGECGRRGGYMEICGFGDDVIDEMYKLASLTICPNIAGQILISLVMDPPKLGDEAFEIFMVEKEETYSSLLKRAKALQKAFNGLEGVSCNKFEGAMYLFPRLRLPQAAIKAAQLEGVSPDVFYAHRLLDATGIAVVPGSGFHPVSGTSHIRCTILPGEETITAMVPSLQAFHEAFMDEFRG

SEQ ID NO: 38347 - protein, 500 aa, Oryza sativa
MATIAFSRLSIYFCVLLLCHGSMAQLFGPNVNPWHNPRQGGFRECRFDRLQAFEPLRRVRSEAGVTEYFDEKNEQFQCTGTFVIRRVIEPQGLLVPRYSNTPGMVYIIQGRGSMGLTFPGCPATYQQQFQQFLPEGQSQSQKFRDEHQKIHQFRQGDIVALPAGVAHWFYNEGDAPVVALYVFDLNNNANQLEPRQKEFLLAGNNNREQQMYGRSIEQHSGQNIFSGFNNELLSEALGVNALVAKRLQGQNDQRGEIIRVKNGLKLLRPAFAQQQEQAQQQEQAQAQYQVQYSEEQQPSTRCNGLDENFCTIKARLNIENPSHADTYNPRAGRITRLNSQKFPILNLVQLSATRVNLYQNAILSPFWNVNAHSLVYIVQGHARVQVVSNLGKTVFNGVLRPGQLLIIPQHYVVLKKAEHEGCQYISFKTNANSMVSHLAGKNSIFRAMPVDVIANAYRISREQARSLKNNRGEELGAFTPRYQQQTYLGFSNESENEASE

SEQ ID NO: 38348 - protein, 481 aa, Oryza sativa
MASVDGATRRGGGDGSIRRRRVLVFPLPFQGHINPMLQLAGALHGRRGGGGGELSVTVLHTRFNAIDPSRYPELAFAEVPDGIPPDVAANGNIVDIIVALNVAMDGGESSPSFRDVLASVVAADDEGRKPRASCLIIDGNLMAAQKTAAELGLPTLVLRTGSAACLGCYLAYPALLQKGYLPPKESQLYEPVEELPPLRVRDLYYTSNANQELVRKVLGWIAETARNSNGVVINTFDELEPAELERIRRELDGDGVAIVLAVGPLHKLSPMNAGGSLHLCPDRSCIEWLDTQATGSVLYVSFGSLASLDSNEFLEVAWGLESSGQPFLWVVRPDLVKGLDKPSLPDGFERAVEGRGKVIKWAPQQEVLAHHAVGGFWTHNGWNSTLESVSEGVPMICKPQFADQMLNTRYLEAVWAVGFELVGKLERGEIKKAIKRLMVEKEGAEIRERAKELKKKMDQCLESSGSSQIAINRLVNYIISL

SEQ ID NO: 38349 - protein, 406 aa, Oryza sativa
MTWRKFRTDRAGKAVMAVEEVQALRKEFDAQQASNHQQPVRKKVRKDLYCAFHGRSSHTTEQCQNIRQRGNAQDTRSQQGTTIEAPREAAQEQTPPVEQRQDAQRRVIQVITRADPPGQLSKRQKKMHIRAVHSITSAGKRAPQYVNQLISFGPEDAEGVMFPHQDPLVISAEIAGFEVWRILVDGGSSADVIFVEAYAKMGLPTQALTPAPASIRGFGGEAVQVLGQALLLIAFGSGENRREEQVLFDVVDIPYNYNAILGRATLNKFEAISHHNYLKLKMPGPAGVIVVKGLQSSAASKGDLAIINRAVHNVEAELHSRPKHVPKPTPHDKIVKVQIDHADPAKLVSLGDGMGEQEAEGILAVLKKNIDIFAWSSDEVGGCFGRPHHASPGSQAGCQAKKAEVA

SEQ ID NO: 38350 - protein, 948 aa, Oryza sativa
MKKKWRKQRLQRAKERKARAAGASVFGSSSLGKGTVGSLFSQRSANMATAVWDVVQICPSSRPGEYRMWISIDQHLQALKLKVPRQFYVNFKSNPGNEVFLPGVYEAERLVKTLPRDAPCRHLYRITVDEDVYQEQEAHFSNLIHHPNVEGVYEKQLPLDVRALIQLGSSCVYGRNGASQKLSRALDTGFRLHDLSPPTSVDISPSHSYLSGGAGIRYFYLYHAHRDGRHVLSVFSPEGDVKVHIVDSAGLRQVPNLETMYADRVAHMRKRGTLAEVKGVFEYSDTMRVDVRIHTSASRAFKALAKDLTTLRTAKQGSALLAMCTSKDQAYYETHVPSVAEFPIIKIAAAALEDELPALGWQLYSARRMFQCYLRAASWVRGWIDLAGHFDLPLCNLEKDFTIFGADIDFARRLVKQDMVLWWSPHSQPDLGGREQDIHAQSRWDEQESLELSHPGAYATVCLEVGLVDLAVDAVLQSGTVNDMEGSSSGVAFEGASHNLDEYSRGTVESSTILGDSVLTSAVFSAVKGMVKAWFMTKRRGRSQFSSLLSDNFWRWASSDASAMFEPALQRFLFGLMKKTLLQLLAEFKRLGASIVYASFNRLFLLTTKPSAANAMAYSRYLLSAVTSRELFKHVQLDIIHYWEYLLWMDTANFGGVIADVDSLVAPTEEAEAEAARTTKSGMPTFNVEMNWNIQTFLPLAVQDKFSIAVGSFIFSMYEHKQQATVAGDLDRTPLRAVAEPNTPANGEASKDDAEDGGKDRDEVVGSAAAAVAKFSTDLINHTMTRKMLKQLASLKTAMQTSSDEINAAVARDEDEEYVDMLTAEHKRAWAFPVLPGSWLAMSNPLLEFIKTTTAVLALSRENAIEVQILKRNLLDMINVREFAPEAEFRNPCEPFKLPLVICAFCNDDRTLDLCRDPDLMPNPTRWHRRPSGSAPNARSPTAWRSSR

SEQ ID NO: 38351 - protein, 478 aa, Oryza sativa
MAESVVSVDAVDGEQEQQQRLQQEELQLADLPNDALRSILLRLPSEPGYLAVAAAVTKNWRRQVLGSNGSFLRAFRAAHGGVPPLLGFFCNRRNLPCPFFTSTVDAGVVDLSPPAGKQRPFIHDVRHGRVLLDDGEDGQLLVWDPLARRRDIIPTPRCYFTSDDSCGAAIICGCDGLEHVVGASVGGGDCHLAPYRVIVAFNDRPNYRSDEWNHECICTRVWISETKEWSEVYSMRGSCDFDFMPSALVAGAIHWLVGDTNSVLQFNLITKKLALIQTPLDISEFMLFPTKDGKLGFTGVLGSHIIFFHMDIAGDALTTMRTWSIQNVIQVDHFLPPYINILRTRRSLASPWVVDYYVSDSDEGEEEHGVDDDDEPREILPTMQHDNEASGSHSPQWSESWYDEDFDQEKDALIPTVSENVNVIGFVTEANAVLLYAAGRGVYTIDVETKHTQRVAACANYSHVFPYTSFYTAGIPYT

SEQ ID NO: 38352 - protein, 378 aa, Oryza sativa
MSSCAYRDGDVNGKKYDSNGNVCSTMTPTLKYSLIAVCSLLAAALAGLGVFFVVRLRRNRAKAKRISAVPARPLSAWGGPSVLARARQSTIRSDQSRLSRMDLVRGDSYSTAPTSPSPYGSGGYGRERSASFLLPPGTVDARGLSSPSESSVSSGSGGGPLSPMSPLDGNQFPVLEADRTRVPSIIIAEPSPRGARPTSTYLEVDRDRRIPVQQVSSQRPVSIHAAAGQVAEIAQPVPNKRQSALAPAWKFPQASRPEPERSPSPELSLREEEELFGLASQPAEHVEVLNDDSGHAGNAYDYSPYRPARESAISTRSMYSARSSLYGEPAHYDAVGDSSLDEEDIVSPSSQRYEQKTLSFIPNLEEMRANGDVGTRRF

SEQ ID NO: 38353 - protein, 444 aa, Oryza sativa
MSFARSAAPVRTALRTAANQQRAFTTANAAGVKTAAADDGALTSTVTVAIKAGSRYESAPGVAHVLKNYLFKSNQKRSALRLVREAEFYGGVLSTALTKEHLLLTAEFLRGDEEFFVEVLGDVLSKSKFAAHEFNEEVLPQVQAEYAQAQSNPAVLGYDSLLQTAYRQRSLGHSLFASPASPITHRQTVDFAHAAFAKDNIAVLGSGIDSAKLNQLVSAHFGELAASASVSSTPAKYFGGEQRVAFAAPHGAENTRASHGHFFVGFEGAGHKDAEASANLAVLRALLGGESSVKWSNGVSPLSQIAESIPGARAAAFNLTFSDSGVFGAHVSAPSASVQQAASKVAQALKNIAGGLKEKAIKAAVAKAKFERATVLENRTAAHELVSAQLLEAGSVATLENAFAALDAVKPASLSKVAEKLLKSKPTTVAVGDVHKLPYADEVL

SEQ ID NO: 38354 - protein, 280 aa, Oryza sativa
MKFGKSLSSQIVEMQPEWRDNFLSYKDLKKRLNLISGGAAGERASKRRRVGGATAVTVTAAAAGGMTLEQAGFVGLLDAELDKFNFFFLEKEEEYVIKQKELRERKMASAEEVMRVRKEIVDLHGEMVLLENYSALNYTGLVKILKKYDKRTGSMIRLPFVQKVLQQPFFTTDLLYKLVKECEEMLDQLMPTNEHSVASEDGKDDSEGEEKGSKPSSSSSANGGAVPGEAEAEDERSTDMKSTVTAALRALREIRSGSSTVSVFSLPPLHGSNGQDEPGR

SEQ ID NO: 38355 - protein, 51 aa, Oryza sativa
MPRDMWIQRGGVGENPRASWHSMVWDLTCCWSGTPLVGIWQPCVGFGNALS

SEQ ID NO: 38356 - protein, 418 aa, Oryza sativa
MVQAIRGLLALLPFAVLLLATLQTVTAAPSEARPASTFSQAMRRRRALAARQDLVPRATPDEIERAFEILKRSQFWSADLQKRAASTAGKSGNNQWTVNDDDQSICFCVNRNAAGAAASAPAASAPASSGSSSDSSSGASSGGASSGASAGASSGASSGAKSGSYSSSGSSSGSYAASGSSSGSVSHSGSGSSSGSGSSSGSSSGSGSSSGSGSGSSSGSGSSSGSGSGSGYNPTYVYNNSYDNSKSESVTNNNTTNIDQSTHDSHDTYNTNQTTTNNNIEQTNIAGDQNNTQNNVHQTNVAGDQSNTQNNTQNNIEQTNNTDNSSHTYNDSSTTNVDKSKNYQDNSQTDSNNVDNSQTNSNNVDKSQTDSNNTDQSQHSTTTTTTNEGGAGGEGGNKNTGIDASGSKANVCILASCK

SEQ ID NO: 38357 - protein, 383 aa, Oryza sativa
MLPPPPLRSVAASGDGWLSLSVSTESTGSGESNKRLKRGGGGGSVEDDGFPLHDEVLLLVFAASSLDLHDLVRCTATCRRWRRLVTGNAEYICRSMLPSSRLIRDLAVGFFHQSHEDESSSSVVPPRFVPLPSASSRFGGGELDRVLDNPGLFKNSRLVASRKGRLVVELRRASRAAALRLVVCNPMTGDMSVLPVLSGKDRPGLYACALLTADDLQDSADPLPPGPAAFRLVVLYKRRSFTACRSYSSDTNAWSTERKLSGVKIGGKRLGDMAAGVTFRGRVFWLVNSVVFVLHLDTLVATTENISWHWRWNGKPCFCLGDPVPNRRLAVSPDGRLCVVQVGRNLRTYNPVINVFARHDSGGCNGSTAQKIRWKVEEGTTWS

SEQ ID NO: 38358 - protein, 121 aa, Oryza sativa
METGGTERQMRWEGEQKLEPLSPPAPARPRACTHASPACTRSARMRSEAQIDRFSRTWLGSPICTRGARLGWPCRQPNTKGLHPWMRARCDAENQTHPKSIQWYECLALPGDGDFHITICS

SEQ ID NO: 38359 - protein, 631 aa, Oryza sativa
MGNGITKNPCFSGDPYAAAVASDPLPDDSHGHSFTYVPSSAAAFDHSPRSAAASSETSYFSLSGAAISANPATSASMPSFRLYNELTWPPSTACTFESSRSFAAAPLIQAAPPRLSMSGPLHATSGRFSEASGSASTASDRFSDHPFMDGMLDRASSASSTARLMPSFSHLMSEPRVAQSGLSNERSLIRSLVRVASKLRFGVPLSGRRSNGPAEPTTKSDGDYRSTPKGNVEWAQGMAGEDRFHVAVSEEHGWVFVGIYDGFNGPDATDYLFANLYVAVHRELKGVLWDDIQGVDVVTDNLPDPALANATHLCFLDAGGVGGGGDDDPDAERKAKRGRIERNADDDGASSVHRDVLKALARALARTEEAFFAAAEERAAQSPELGLVGSCVLVMLMKGKDVYLMNVGDSRAVLARRREPDFKDIFFRPDQDLQLLKAEVMRELEAHDRNGLQCVQLTPEHSAAAEEEVRRIRSQHLTDRQAVVNGRVKGKLSVTRAFGAGYLKQPKWNDRLLEAFKVDYIGAEPYISCTPSLRHHRISSNDRFLVLSSDGLYQYFTNKEVVDQVAMFTAEQPDGDPAKHLVGELVLRAARKAGMDCRRLLEIPHGDRRNYHDDVSIIVMSFEGRIWRSSV

SEQ ID NO: 38360 - protein, 277 aa, Oryza sativa
MLLRSSSTPFLHSFLSPSSAAAAPSSLQLRRAFSDGHLPSLHPSSDGGGGSKNNTTGLHTELSFSIYNTFNKMAPPPPPVQEQEEAEQQQAPGEPKLPLFLARGLGIDRIASGLFTAGGGGDGDGGNGGAGRMSAVEEEHAEKVAALDAQYKRMMDEQPGDALFLRNYAQFLHEVKGDARRAEEYYSRAMLADPSDGEIMSQYAKLVWEVHRDLDRSLTYFHKSVQAAPHNSNVLAAYASFLWEQDDDDNDDLGEGGQDVAVAAQPGHVRQLASVAV

SEQ ID NO: 38361 - protein, 247 aa, Oryza sativa
MMSSPTPAPLLPVAPLDGGGGYLRWKESVLLRLRTLDLAYVLSEHQPEDGRSDSAKKKRARDDELCRGHILATLSDRLLPDYAHHATAAAAWRALARTYDMDGKLPNLPLDRFFAYRFVDGEPVLEQLAHLEAMGVAGKLDDRTMYGLVHQKLPPALVKAIALASPPYPDPPSMDHIWDTARLEERMRLCGEIRRGEHTQDKEDDDDQGGGDYPDEDHRSPKRKRRYDRGPCYNCGEPGHIARDCRG

SEQ ID NO: 38362 - protein, 73 aa, Oryza sativa
MMQQNKNKFYKTAYTMIKLSQNYIFNSVYHKTTHLTLNLSQNYAFKMMCHKTTCLVTKLLQNYRFRTNLVTKQ

SEQ ID NO: 38363 - protein, 368 aa, Oryza sativa
MAAAAPELVDDMTYEILLHIPPDDPASLVRASLVCKRWRQLLTDPAFLRRYRAFHRTPPMLGFIHNVDHSSNSSYIPRFVATTSPSPFYPDFPPPSIEFPTYWWALDCRHGRLLLQLFNPIDLMVWDPTTGDHRIFPQPPYLDFYCTGAVLCATRGCRHVDCHGGPYLVVFVGTGEDDHSWACVYSSETGEWSSQASIAFDSYVEMLPGLLVQDTLYFRCERGKRILGYDIGRHELSEIDPPPLGHEVGILMESGYGGLGFATVEDCSILLWSRYVGDDGIEEWKKSWVIGLVFLNPVGNPSLSWELAGFAEGVHTIFISSEIGVFTIELKSGQVKKLCEEGYYTVVPYMSFYTSDIAIWRPEEPAED

SEQ ID NO: 38364 - protein, 252 aa, Oryza sativa
MASSNEKPLPTPISAAAGGSGGNAPPGRPTTVDSMLLDKGAAMLQALRPVKHIKQHVCTFALYAHDPRRQVETHHFVSRLNQDVLQCAVYDADDKHARLIGVEYIVSRKIFDSLPAEEQRLWHSHAHEIKAGLWVSPHVPGMLEKAELEKMAGTFDKFWCTWQVDRGDRLPLGAPALMVSPQDDPAADVRPDLVRNRDDKYRYSTTELRAARADVAVPAEPRPGQADYWLRHRKGFAVDVVPHEMKCHAPFP

SEQ ID NO: 38365 - protein, 500 aa, Oryza sativa
MAQFGGFGGWSAMDVAAAAAAALGNVSGAVYHADPAAAVYASLVPGMAVVPGRAPPSAVQIEAARRWKELEKMALRSVNLMVTCAGAIQAGDYAAAAGSLSDAREIFAKMPTTRTGIGRVLTHFADALAERLFPAFPQSAPPPPPPRGEQRELFRGFYEAGPYLKFAHLAANQAILEAFEGCNSVHVIDFALTDGIQWPSLIQALAVRPGGPPFLRITGIGPHAAGNRDELRDVGLRLAEFARSCSVPFAFRGIAADQLDGLRPWMFQVAPGEAVAINSVLQLHRLLVDQDAAAAASFPAPIDGVLDWVASMNPRVFTVVEQEADHNKSSLLERFTNSLFYYASMFDSLEAISRHGGGDGAGNPLAEAYLQGEIADIVSREGSSRVERHEQMPRWVERLRRGGMTQLPLGATGLWQAAMQLREFSGAGFGVQENGGFLTLTWHSQRLYSASAWRATAGKKMTMMASGAADAMEESQNSNTNGGGGGSSGGGHGALNQIMQ

SEQ ID NO: 38366 - protein, 220 aa, Oryza sativa
MNVLIEKFYEWCVEEKPFDGNPPAIQGVHFVEDLQPYIERKLFTVNTGHATAAYYGHNRGFKYVHEVLADKELHDIVQNTLKETAHLICTKHSHISKEEQAEYVQAIVKRISNPTLKDVVDRVGRDPLRKIGRKERFIGPAALLAEAGEKYDNLLGGIEMLLRFQNVEGDEASVELAKKLKELDATTATKELTGLEEDHPLFAAVAEKVKKVQGEKGESS

SEQ ID NO: 38367 - protein, 433 aa, Oryza sativa
MAEGEGSSSRRWALGDPDVVEVSPEAAAAARWSSARLKRKRTTVAHEIIDLDANDDPDGVMIICEKASSHKSNHSVSHPSDWPKHPKSGLAEDVPGPSHQPGTSTVLPWGCTTPGRPRKHKEIKTVDNKIDEKYKAFKQFDTVTDHSDHYYSMSGKGNVPEVKKPSKDWVRRIQHEWKVLEKDLPGTIFVRVYEDRMELLRAVIVGPAGTPYHDGLFFFDVYFPSQYPKKPPLVNYRSGGLRLNPNLYDSGKVCLSLLNTWSGHGCEKWNPSNSTMLQVLVSIQALVLNAKPYFNEPGYAASANTPQGEKMSMAYNESTFLLSCRTTLYSLRNPPKHFEDFARVHFCKYGRNILVGCKAYMNGAQVGCLAGNGVQDVDEGDKSCSANFKGSLKTLFDELIKEFTRIGVHCYEFQPQRVNPGSTRAKADTTLRL

SEQ ID NO: 38368 - protein, 569 aa, Oryza sativa
MRLASVWLLAAAAAMRLVVALPAATSCSQPTVHLPQGTVKGMVDDAYQLDQFLGIPYAKPPVGDLRFARPQPVDASDAVIDATQFGDICMQPPAGFNMSEDCLNLNVIRPKGVVAGAKLPVLVWIYGGAFFAGSAPAYNASELVARSAAMGKPIVFVAISYRVGPFGFLGGKEVVADGTPNAGLYDQRLTLKWVQHNIARFGGDAGRVTIFGQSAGAMSVALQTFAYDGNTHGLFHAAIMDSGGIAPGPLLTPEHPTVQSTFEQLAAGVGCTQAPLLKCLRSANATQVQSTGMQLTAKAGGTFPVPGALAFLPLVDYTLITDYPSVNLAQGKLADIPVISGNALDEGTLFAQKALNSTADFETWVRSAAVIYNTTYTERALQRVFELYPDDPVQGSPYPNEGTSTSAATLDVGSRMYAPLESNQYKRSAAFFGDFTFNAHRRTYLHAAVGAARKNSRNVWSFEFRQNDMYPNGTGSALGAFHGSELKYLFIRPDGRQKDPQLAEQMPRSYVSFTYYHDPSRLSSLPWTRYTTGEVLQLKGGNVTTVPDTFRKDAMHALTNPRSAAVFGF

SEQ ID NO: 38369 - protein, 81 aa, Oryza sativa
MEGQAGIHVSSTGRRGSSPCSHTGGPRERSTSTLVQLGRAQSPPPPFGLVCTYMVTYNLIHIVACVYITCYHIVPPPVKCI

SEQ ID NO: 38370 - protein, 368 aa, Oryza sativa
METLSMLKVGYTLLRSETPATDLVNAFMDWAARRSLLLLAVFVPPYLAYRLASSALAAASPEDVAGKVVLVTGASSGIGEQVAYRYARRGARLALVARREASLGEVAARARALGSPDVLAVPGDVARPDDCRRFVQATVEHFGRLDHLVNNAGLANVCWFEEVPDVANFKQVLDVNFWGTVHPTHAALPHLKASRGKIFVNSSASAVLAMPRMSFYNASKAAVHNFAETLRMELHGEVGVTVATPGWVDSEMTKGKHLSSHGAMEVDQDTRDAQVGVFPVERGERCAEAIVDAVARGRRRVTSPAWYGALFLWRTMAPEVADACQRVFYHRRSSAAGGGGRARAALEATGAKAVLQPPSLRSSEIKVE

SEQ ID NO: 38371 - protein, 445 aa, Oryza sativa
MPPGVRISKRVRAGAPTEMPPGVSTRSAKRQLIAEQGKGNGHEELPLETENNGDEDVGSGHLLQDNDVNRPPSPVMDWSYGHDANHKEQPAQQTNSDVEVPIRRGTRKSRPPTAGIMLDKMTKAMGRMPIAVAEGKKRPDEPVQAAKFASEAGVIIRTKVPVFPHWKQYKDDEGYINNFMGKLSVRLAINQKNQPTRDACADVLQKGIRQTRYNLKKAYFNGVPANEIRTTSPISSMTDEQWLELVAKWSNPKNMQISEQNKQNRLNVRFHQATGSRSYAAHLHAYKEKNKVVELDVVDAFEDCHTSREKGLSDAAKDAISSMKAIMEEPVPDGETPRTSAEVVSKVLSRDNSNTTFLKNAGLQMSSKKSVTPTEAALQEELAAEKQSSAILHAEVVELKEQANLANEALAKTQKELAEFKQQQEENNLLLRRILSLSQGNLNLS

SEQ ID NO: 38372 - protein, 209 aa, Oryza sativa
MAATVLLPTHNWTTRRHTSNADNQPGSRPPFADPKKKGWTATGVGGDGGGAAWTGEVAAQGGRRCGRGGSSRRRRSQLYLKPPPLDPGGGRPPSPDRARDSPAEPVARRWRRPSSSLAAGAGRRRRPSLEEAGGTPPPAARHTEEAQAGDRPPPTCNRRSTACRTRRPSSSLPIRKKWRWRGKWVNGFYEGEGGSKYRPVWILRLLTNP

SEQ ID NO: 38373 - protein, 459 aa, Oryza sativa
MKFTTTLSALLTLAAASQSAVATGEFQNLQLRQGGDANALLQELRDNNLTSLANVLSQHPAVTERILADNSEKTLLAPNDDAIAMLPSWVTSNSSRLEATLLQHVLRGNFETDKLNAYPLHTIGHSLLNNSDFSKLPGGAGQAVALAKSGNRTFVAEAVNNDTFVQQSVKVDTVTVLPISQAITVPGSVTDTLRFLGYTGISTLLANVQNGALANTIDSLPGVTMFVPTNDAITKFTATNPNPTDIPTVLGQHVVAARVVYSPLLIDQGSLISASGQDIVFDNNAGTVKAGNFTAKILQTDIIAQQGVIHQIDNVLASTALDTGRAAQAQKSAEASVDAEKAQSISGPVSGKNAITTQGTDVPAAQQGSGANNRSANDNTDNAGSGQTESAIGNGTNGNNGGASQAGNSNGSNGNGNGSGNQNGNGVDHRNPNAASASTANTALAASAVLAASILALVL

SEQ ID NO: 38374 - protein, 252 aa, Oryza sativa
MASSNEKPLPTPISAAAGGSGGNAPPGRPTTVDSMLLDKGAAMLQALRPVKHIKQHVCTFALYAHDPRRQVETHHFVSRLNQDVLQCAVYDADDKHARLIGVEYIVSRKIFDSLPAEEQRLWHSHAHEIKAGLWVSPHVPGMLEKAELEKMAGTFGKFWCTWQVDRGDRLPLGAPALMVSPQDDPAADVRPDLVCNRDDKYRYSTTELRAARADVAVPAEPRPGQADYWLRHRKGFAVDVVPHEMKCHAPFP

SEQ ID NO: 38375 - protein, 550 aa, Oryza sativa
MQAPVMFVNTGNGERQTGRQAQMSNITAAKTVADIIRSCLGPKAMLKMLLDPMGGIVLTNDGHAILREIEVAHPAAKSMIELARTQDEEVGDGTTTVIILAGEMLALSLPQLDRHIHPVVIIQAYKRALADALSVIEEVSIPVDVDNTEQMRQLIGSSLGTKFTSRWSDLMCDLALKAVRTVSHNAGGGKQEVDIKRYARVEKVPGGEIEDSCVLDGVMLNKDITHPKMRRRIENPRIVLLDCTLEYKKGELQTNIEITKEEDWNRILQIEEEQVKAMCDAIIAVKPDLVITEKGVSDLARHFLLKHNITALRRVRKTDNNRIARATGANIVNSVHDLTEQDVGTQCGLFDISKIGDEYFTFLTKCKDPKACTILLRGPSKDILNEIDRNLADAMAVARNVIFHPFLSPGGGATEMAVSVRLAQKAKAVEGVAQWPYKAIAEAMEVIPRTLIQNSGSSPIRVLTQLRAKHAEDANKNGAQGGGSWGIDGDAGKIVDMKEFGVWEPQAVKLQSIKTAVESACLLLRVDDIVGAKAAKTAGMGTGGAGGDED

SEQ ID NO: 38376 - protein, 505 aa, Oryza sativa
MRFLAVASALWLTLCPSVLAQDISASGSLSLNSNQPSWTFDYSTQNANDQNWIGLYYTAGGGPVDQKKGSSNSIKWKWAPSSQGSVQIDTNSLEPGNYTAFFLAQNGYTWLAEPLQVIKGREFGGDVSFIVADVSLPNARAGDKYSHSVRGLVRGGSSDVTFSKESGSADWIKVSEDGIISGTPSSSADEAVVTVRATGRDSATSAAFKISVAGSGNALISTLKVLSLNMWNGGTGVTNYHDKQVKFLASCGADVVGIQEDQQGRHVPRLADALGWYHWSSGGDVGILSKYPITQDYGVISGPARSGGVKIALDGSNKEINFFVAHLGYTPYGPYDTCFDHYPVDKIIEREAQSGRTPQMRATLAGMKSQLDNADDTPVFFVGDFNAPSHLDYTEGLKEKNCGYSGIKWPTSVLPEEAGLIDSFRVAHPDPVKEQGITWSPIYIWNGGRRRPEPLDRIDFVLHKGKGLKVTDSQTVVVGEPRPQPNHKENEWFSDHRAVLTTYEI

SEQ ID NO: 38377 - protein, 341 aa, Oryza sativa
MGYSDSRKSDENNTSSKPASPVVSSDVVEIKETWENVVVADEEGEGGEDGFASDASESKSKSSSDEVDYELLDLLAGASEGCSGGNNNDEVKNFAYADHKMHVLRERERRKEMKNKFEILHALIPNLPEKTDKATIVEATINYIKNLQDKIHKMEMLKVEREHAIALATAATATAAASADTALQAPPPSEEENEEHDSVVAAATREMALADMVHAWEQQQEAAATGGSHGGHAVPPPPPAASLQTWTGPNMTASLTGDDGFITLSLPHQGGQKNLVAGAVSVLERHHIDVVTATVSASEQGDNLISLHCHLSPGSSSSQNLTPLDKFKLAMSELMLWVISV

SEQ ID NO: 38378 - protein, 418 aa, Oryza sativa
MGSDWSTLTGCLVMLIAERLLANDVTDYIRFRAVCSPWRQHTEDPRVGDGLRPKYLPRSWIMLEETPPAAAPFRNRLLNTGTGAVLAVDVPELKDHDVMGPTLGGLLTLRERGGAHVLRLLHPFTRHLTELPSLVTMIHAASHDPKMVEPEYHQPTAIGLSDDHKAVAVFCGLVNKVAVARPGDSHWKWVYVPHFHLESAASLAGCFYAVSHVYIYQLESDGARGEPKLVPVAYVPVDAPSFRLTLVADDERERLMLMKEVFYVHAGEEVPPEGPDMLTMPRVCVAYAVDMAARTIALSRLGARALFMGDDRAVWASPGAFSPGVAADTVYAGRPNRLFTVHECGIEADRPLTVVLHTHGLVSGLTRHAVFESDDGEDLNPMGIVETVSSYVASDRGGAARPTMYVASHARRGRGRGV

SEQ ID NO: 38379 - protein, 483 aa, Oryza sativa
MELPRMASRRLPLPLVAQLVVLLGLACGLRSSSAAAAAASGLAGERVTYLPGQPPVDFDMYSGYVTVDKRAGRSLFYWLQEAPAAAQPAPLVLWLNGGPGCSSVAYGASEELGAFRIRPDGATLFLNDYRWNKVANILFLDSPAGVGFSYTNTTSDLYDSGDKRTAHDSYKFLVKWFEKFPQYKYRDFYIAGESYAGHYGPQLSQLVYRNNKGVKEPLINFKGFMVGNAVTDDYHDYIGTFEYWWNHGIISDGTYRLLNASCVHDSGEHPAPACLAALNASTVEQGDIDMYSLYTPTCNETSTSSAAARQRRLKQGHYPWMTGSYDPCTERYSTEYYNRPEVQRALHANVTGINYTWATCSDILNDNWRDSPRSVLPIYHELIAAGLRIWVFSGDTDAVVPLTATRYSIDALGLPTTVSWYPWYDAMKVGGWSQVYKGLSLVTVRGAGHEVPLHRPRQALILFKHFLQGKPMPDAPTKVQNEA

SEQ ID NO: 38380 - protein, 496 aa, Oryza sativa
MATIKFPIVFSVVCLFLLCNGSLAQLLSQSTSQWQSSRRGSPRECRFDRLQAFEPIRTVRSQAGTTEFFDVSNELFQCTGVFVVRRVIEPRGLLLPHYSDGATLVYVIQGRGITGPTFPGCPETYQQQFQQSEQDQQLEGQSQSHKFRDEHQKIHRFQQGDVVALPAGVAHWCYNDGDAPIVAIYVTDIYNSANQLDPRHRDFFLAGNNKIGQQLYRYEARDNSKNVFGGFSVELLSEALGISSGVARQLQCQNDQRGEIVRVEHGLSLLQPYASLQEQQQEQVQSRDYGQTQYQQKQLQGSCSNGLDETFCTMRVRQNIDNPNLADTYNPRAGRITYLNGQKFPILNLVQMSAVKVNLYQNALLSPFWNINAHSVVYITQGRARVQVVNNNGKTVFDGELRRGQLLIIPQHHVVIKKAQREGCSYIALKTNPDSMVSHMAGKNSIFRALPDDVVANAYRISREEARRLKHNRGDELGVFTPSHAYKSYQDISVSA

SEQ ID NO: 38381 - protein, 354 aa, Oryza sativa
MTTRATRYIAPILASTARVPSSSSTRTPALQKIGRINMSSVAQASAANGGSAMHKIARNGFDSSGGSGLYDRARPSYPPAAISTIITEATNSASPAPLRIVELGAGTGIATRMLLAAATSAAADGTPPPGIASLTAIEPSEGMRSHFETAIASGADSLKHQMQSKGLLSPQASISVEEGGFESFDAGKGNDAVVVAQAWHWCQDWDGALKQVANALRANGILALIWNLEDREAAPWVANIRDLYEKYEDNTPQYRHMYWHAMYKAPTLASEFVADEPRHYHRTIPTTIQGVIDRVLSKSYISVLPQEKQDQLAKDIKSYLDTTPDEVLGRKWIDKEAGVWEYPYRTDLFLFRRN

SEQ ID NO: 38382 - protein, 419 aa, Oryza sativa
MATAAAADVPSCRDLPAAVSAFADAFVDFAVSGIFFPSTPTPSPPPPPTPTTFLPSPTRLVAIGDLHGDLPKSLSALRLAGLVPPHDPTSWSAGPTLAVQLGDILDRGGDEIRLLYLIRRLAISAAGQGGALLPIMGNHEVMNVSGDFRFATPQGLREFSAWAGWYRAGLAIKRRCARGGDGGDPPPKNPFLGIPKEFPGVKPEFWDGIRSRLAALLPDGPIARRFLADLPTVLVVGDSVFVHGGLLEANVEYGLERINAEVSEWIRGERGANAVAPEFVRGRDAVVWLRRFSDGVNCDCQRLEGVLGMIPGAKRMIMGHTIQTEGINAVCGAQAVRVDVGLSRGCGNGLPEVLEINGGGTNVRVITTDPAEAWQYRKQGAEKAAIATAVKEKKGEVKEGLALLVRESHGLKEVQAKAA

SEQ ID NO: 38383 - protein, 337 aa, Oryza sativa
MEIPNQISGGGGGGSVVIEIPAATEIAGVDTAPAKVCDDDPRAQPLRDREWVSQLPPDHPLRYTCGLPNGVFLSMSFVTIIYAVIAPWMLWRVATDHVSLMWTSSILACSYGALWTIALSERLAGAFLAIIFRVSYVALVAFASTHLIGTANGISIVYLDTFYVAGMLGYAVAEYRLRRGTEQCPSAILAAKPPPLEDQERGDEEAGLYYMGFLFGSVSLCLVGRMAWLLLYPCGGKCLISYVIEELSFEASMLIYIWVIFVSLTQLEGALVCYNTLFCKMPICFGAWFVLGVLLGVPVSGAIEMLIFWIGTMALAGFFGYCLAVHAYCKRNQKTPA

SEQ ID NO: 38384 - protein, 770 aa, Oryza sativa
MALIGTVAAEVLIPLAAVIGILFAVLQWYMVSRVAVPPHDGVGGAGKVERESDGGDGDGDGVDDEEDGVDYRGVEARCAEIQHAISVGATSFLMTEYKYLGAFMAAFAAVIFVSLGSVGRFSTSTEPCPYDAARRCRPALANAAFTAAAFLLGATTSVVSGYLGMRVATFANARTALEARRGIGRAFAVAFRSGAAMGFLLASSALLVLFAAVNAFGLYYGDDWGGLYEAITGYGLGGSSMALFGRVGGGIYTKAADVGADLVGKVERNIPEDDPRNPAVIADNVGDNVGDIAGMGSDLFGSYAESSCAALFVASISSFGADHDFAAMMYPLLVSAAGIVACAATTLVATDAGELGAADEVAPALKRQILISTVLMTAAVAAVTFLSLPRSFTLFDFGERKLVKNWHLFICVSAGLWAGLVIGYVTEYFTSNAYGPVQTVAQSCRTGAATNVIFGLAVGYKSVIVPIFAIAGAIYASFRLAAMYGIALAALGMLSTIATGLTIDAYGPISDNAGGIAEMAGMPRRVRERTDALDAAGNTTAAIGKGFAIGSAALVSLALFGAYVSRAGIRTVNVVSPRVFVGLLAGAMLPYWFSAMTMRSVGSAALRMVEEVRRQFDEIPGLAEGLAAPDYATCVRISTDASLREMVAPGALVMASPLVAGTLFGVEALAGLLAGALVSGVQVAISASNSGGAWDNAKKYIEAGATEEARSLGPKGSEAHKAAVIGDTIGDPLKDTSGPSLNILVKLMAVEALVFAPFFAAHGGIVFNHL

SEQ ID NO: 38385 - protein, 116 aa, Oryza sativa
MYSLRLASSGSTGLGFALGRLGGRSGGGGGGGGLAPASASSSSVVSARTRRTVSVTPNAAAPTPGEQGVAMEQGKQQHQPPPPSQPQPQQEKRGSRDDDMHKTTGDVMTHSFGEGY

SEQ ID NO: 38386 - protein, 120 aa, Oryza sativa
MTEERAQPEPSAGIAGTMTTDRWSSSPASSSFTRSALVNATIKRVVVVVPYNISVLQISNFVVPSGVLTRPQPLLPTAVAAAPQPPPPPPFPSASSPPPPPPFLRERDKGERGRKKGEGG

SEQ ID NO: 38387 - protein, 543 aa, Oryza sativa
MAQTAKTGKATATQSAWVHVRPPGDRPSDAEATNRYALHMRLPRGDYFTKAIPLDCDQLKKLDPAQADIVQISAQSEEQMRTLKRQGHVPTPTLGQRLGRSGHRHRSDSKRSMQPKLQPVTFLNYGNYASFAPSYDSSASSISYATSAALWRTSAKAHRSLSLTWGARPFQEEALLADDDEDDGEDAETSSEAIAAPAALCGAAHVDAEGDVAMEDSPEDDVAAALRELLDGVDQGGVNESLHKLSEDELITSHLRFNMMLLHRLQEFQWARLRRSYGPGASSRKAILATEEESPSADEEATAALLLESLSALVALQPRAVDLASEAVESLVPHASKLRAFSASSGAIDPDLLGDVRDGFWGALDANVVKSTRSSVVASETPLLLRDDVTVRLADGSGSKAKKTSRRIGPGGTQVEERGRGTLERFASSRTYDQSNDRHDVEPARMTDPQHATLARSPSKGDEAPSATRTPSQGPSHASPMPAHPHMHAAYGPGQAQGMTPQSQRLMPGGNSSYAFASPSGGPNHLGRPMQYQQPAYAQSPSR

SEQ ID NO: 38388 - protein, 81 aa, Oryza sativa
MHPGWSQGVMLTPRYGSCVATERSSYYVLTPATGVVYNLPVNPAEEHVYHVQLITCTDLTLICIWACCSHGRVQGDPYLQT

SEQ ID NO: 38389 - protein, 455 aa, Oryza sativa
MSVYVDLPFELQAAPAGFKPGQSSASTLAAPVTHTLQPVGPAFLAHKRRELNGLSFAQDDKTIADSLAAAAAAAAANGDDDAGVGEEDESEELLARDPKEWKTQDHYAVLGLSSLRWNATQEQIKIAHRKKVLKHHPDKKAGSSGLTSDDSFFKCIAKAHEILSNPEKRRQFDSVDESVDDEAVPTGKEPADKFYQLWGPVFEREGRFSEPKNGAVPKLGDANSTRDQVNEFYDFFYNFDSWRSFEYLDKEINEGSDNRDDKRYTEKKNRNERARRKKEDNARLRNLVDKALSVDPRIKQFKADDKAAREAKKNKGRPGVNGAAAVDPRKAAEDKKKAEEEAKRKADEEAKAAEQEKSAKADAKKAKEAAKKAIKKEKKALNKLITDNNYFQSAAPTPAVIEAQLNELDALCEKLEATKLADYRKKAEAASGADAIKAEFVNAAKDAGIATSAFA

SEQ ID NO: 38390 - protein, 1065 aa, Oryza sativa
MAPAPTAAGVPATVPAKTVKGSAGAAAKSGAAAEKKEASAETDALLSGDKDAAQELTNLVKIEGPAALANLGIEAVILKGLGDKKNAAGREGACALLSNLCEQGVGHEVEPFLFEKVLTPLVEAMGDKEKAVQKAALDALKAFVQVMSPWATPQLLKVILEQARSAGKWQVKIGCITLLEELVTVSSERMAALMPEIIPVMTEVIWDTKSDVQKASRAALTKLCVLISNKDIERFIPALINSLIHPVEEVPKTIQLLSATTFVQEVDSATLALMVPLLSRGLNERPTATKRKVAVIIDNMTKLVDNERTVRPFLGKLLPGLIKIESTLADPEARGVVQRAIKTLREVGNVTGDGSDVKPLEDVSIKASLEQVNKALGEQSLQAQANLGAYVATLVANLANARNFELTEWEGALIPYITLIKGSKPEQAKAVSKALLTALAKETGDSVEIFDDEEEGEDLCNCQFSLAYGAKILLNTATLRLKRGHKYGLCGRNGSGKSTLMRAITNGQVEGFPSPEEVRTWYVEHDLDGSEGLTTVLEFILADKRLSMTREEAVSTLHEVGFDDARQNSPIAGLSGGWKMKVALARAILFKADILLLDEPTNHLDVVNVEWITDYLIGTPATAIIVSHDSKFLNDVCTDILHLNRFKVKRYPGNLDAFVKRVPEARAYAELNTGEDYSFKLPDPPLLDGVKTKEKSLTKMKDVTFQYPGTPAPQLKGVSIQISLASRVAILGPNGSGKSTLVKLVVGDTEPGSGEMWKHPNLVIGYVAQHAFHHIDQHLDKTPLDYMLWRYQTGEDLEEHMKANRELSEEEKLAMKQGEVYVVEGVKRLIEDIVARKKLKNSFQYEVSFKNMSSADNVWIPRDELIKRGFEKKVMAFDSKEAQRLGMNRPLVRKEIEQHFEDFGLEREFTSHNTMRGLSGGQKVKVVLGAATWRKPHIIVLDEPTNFLDRESLAALIKAIESFQGGVAIITHSREFSEGTCKEIWAMNDGVLVASGHDWTESNSKGTKIETQEDDEDKFDALGNKLEKVKKVKKESASDKRKARKDRLAKKKAGTYDSADELEDL

SEQ ID NO: 38391 - protein, 245 aa, Oryza sativa
MGNSKTPQPSKKSRIMLSDTDGHQLDNDEFSSESASNQMVLFNPETVAKGQDELGENHSPSLQKSANNPNRGMPSIGAFTVQCAKCFKWRLIPTKEKYEEIRECIIQEPFECERAREWRPDVTCNDPEDISQDGSRLWAIDKPNIALPPPGWERQIRIRGEGGTKFADVYYTSPTGRKLRSLVEIDRYLLENPDYVAQGVTLTQFSFQIPRPLRQDYVKKRPKIVNPNDEASVVTTKSVKPEEGV

SEQ ID NO: 38392 - protein, 252 aa, Oryza sativa
MAMTPQLAFSRMPPGFRFQPTDEQLVVDYLQRRTAAQPCVTPDITDIDVYNVDPWQLPAMAMYGSDHDRYFFTMAAREAQARRTTPSGFWKPTGTKKTIFVVAGGHEVPTAVKRRFVFYLGHHQPSGSNNNNKTSWIMHEYRLMNSPRAAVPSSSSVNRLPTDDLTEEMVLCRISNKDLPKPPFIHNSLLQFSSVGLNGDGYNYLILDHLEPPAMEYPNVGIGNVDDAAAGTDDPGDLDEEIDDSMQRNHGG

SEQ ID NO: 38393 - protein, 485 aa, Oryza sativa
MFSANLFRSIPPQVNPVGEAFDPEEDEPVLELAWPHLQIVYEFLLRFVESPDFNTNIAKKFIDHHFVLQLLELFDSEDPRERDFLKTTLHRIYGKFLNLRAFIRRSINNVFFQFIYETERHNGIAELLEILGSIINGFALPLKEEHKTFLTRVLIPLHKVKSLALYHPQLAYCVVQFLEKDSALTEEVLLGLLRYWPKVNSPKEVMFLNEVEEILDVIEPSEFVKIEVPLFQQLQRCINSQHFQVAERALYFWNNEYIVNLIGDNVQVILPIVFSALYQNSKAHWNRTIHGLVYNALKLFMDINPALFEMCTNEYKQQRQMEKQKLHEREEAWKRLRDTAIKNSKAIGVEPPATLKDEQAAPAGSVNPYDLDAFDSAADLTAGAESLFEAMGQGINGEVSTADFDDVESNRLAQEGAAQEPQVAGEDSVDDMKDFPETARQQVGKQESPHVRRKSVIPMDPTVLAELAGHKSLDGADLPKPSGDA

SEQ ID NO: 38394 - protein, 147 aa, Oryza sativa
MSAVKVNLYQNALLSPFWNINAHSVVYITQGRARVQVVNNNGKTVFNGELRRGQLLIIPQHYAVVKKAQREGCAYIAFKTNPNSMVSHIAGKSSIFRALPNDVLANAYRISREEAQRLKHNRGDEFGAFTPIQYKSYQDVYNAAESS

SEQ ID NO: 38395 - protein, 271 aa, Oryza sativa
MLFAGSSHGQLICCRSGYCLVVDVFTGAEVSPPRLPFSKDHEEIYFCGTLTAPITSPNSHLLISNRSSLFDWPVGSDSWSELKLPVNRVDQIVEFNGQLIAVIEYKLYTLQLAPKLRLKKMKTLWWDDMSECPYLRPWLVVCDGMLLIVDHYITLSFGAPVNYRPYRLDMSAKPAKWVEVKKLENWALFIGGDARSPPFAFKNPERWGGRSNCLYYAHYSQPWSLHGLGDDADAVWDPTTDDNLVFKRNWYSQLQAFWVYPSMFYSDGDGQ

SEQ ID NO: 38396 - protein, 554 aa, Oryza sativa
MSYGGYSNGPSRGGCGGGAPRGGPSSYGGGGGGYGGGSYGGGSSSYGGGGYGGGAGGGYGGGYGGGFGGGDRMSNLGANLGAVDWNSVDLVNFEKNFYIEDPRVAGRSDREVQDYRASKQMTIQGQNVPKPVTSFDEAGFPDYILSEIKKMGFAEPSAIQSQAWPMALSGRDLVAIAETGSGKTIGFALPAMVHINAQPLLKPGDGPIALILAPTRELANQIQVECNRFGGSSRLRTCAVYGGVPKGPQTRDLQRGAEIVIATPGRLIDMVDAGKTNLRRVTYLVMDEADRMLDMGFEPQIRKILQQIRPDRQTLMFSATWPKEVQRLAGDFLNDFAQVNIGSTELAANHNVKQIIEVCSEFEKKGKLIGHLETISQENGKVIIFTSTKRVADDLTKYLRQDGWPALAIHGDKQQQERDWVLAEFKSGRSPIMVATAVASRGLDVKDISYVINYDFPTNTEDYVHQIGRTGRAGRTGTAYTFFTPENSKSARELVGILREAKQEIPREIEEMGRFGGGGGGRGFRGRGRGRGRGGYGGGGRTGANSFAVGNSRW

SEQ ID NO: 38397 - protein, 140 aa, Oryza sativa
MFLGDTMLTGVKIEDYISVGESLALLVSIGTMQAKGNTAYGVNMESRLKIKYYPINRLMLFFGLSLIKLHSAIALGINLQSQYLLRRHSKMALHIGLNTLRNGQINLKMSTSKMVQIALLGLVPLATSMYKSFVHSAEHN

SEQ ID NO: 38398 - protein, 408 aa, Oryza sativa
MVTPDKKRRKKLAEPEPTPTPAPEPVPRLLRVRPGNKKKNKGASPEKQPPVYMVLAHGVEEEPTTHSVIEVAACAAARRLLNTGSGRGRGRGMSFAAVGTRTVGVGVELTTVYDPETSTERGGPRLIFPKVNPVLISISDDGGGVVGGGTLYALSRTPAVVRPLDFEPWFFVLDDLSHTVWRELPSPPLFPCRLNPLEFLDPPKLRVAAYALVGSHILLSVSVQQLQPQQQQEDKGTCAFDMDTEQWEMVHDSNLPFDGQALPLGSDDDHRFVAVASAAADVTVYRMVVGISAVTGKKELTIVALRVVVASNSKCRIVPGNLLCAMGKGSFASFEFRSIAAASMGKVGRARIVHRTYSLVDDGEDDWVVMVKKQDRQVYKLRDPSFLGGCSFFHVKISEPFFASSNIF

SEQ ID NO: 38399 - protein, 252 aa, Oryza sativa
MASSNEKPLPTPISAAAGGSGGNAPPGRPTTVDSMLLDKGAAMLQALRPVKHIKQHVCTFALYAHDPRRQVETHYFVSRLNQDVLQCAVYDADDKHARLIGVEYIVSRKIFDSLPAEEQRLWHSHAHEIKAGLWVSPHVPGMLEKAELEKMAGTFGKFWCTWQVDRGDRLPLGAPALMVSPQDDPAADVRPDLVRNRDDKYRYSTTELRAARADVAVPAEPRPGQADYWLRHRKGFAVDVVPHEMKCHAPFP

SEQ ID NO: 38400 - protein, 481 aa, Oryza sativa
MAGPTIVLLPAWGSGHFMSALEAGKRLLVAGGGAVSLTVLVMQAPTEIEASVVEAHVRREAASGLDVTFRRLPAVEHPTGCEATEEFMSRYVERHAHHVKAAIAGLASPVAAVVVDLFFTPLLDAAHELSLPAYVYFASTAAFLALMLRLPELRDDLTVGFDGMEGTVDVPGLPPVPPSYMPVCLVSKTVKNYDWFEYHGRRFTEAKGIIVNSSVELEGAVLAAIADGRRPAPAIHAIGPVIWFDATLPPEQPHECVRWLDAQPAASVVFLCFGSIGFLDAAQVRELAAGLERSGHRFLWVLRGAPAGGVRYPTDADPGELLPEGFLEATAGRGMVWPRWAPQKDILGHAAVGGFVTHCGWNSVLESLWFGVPMATWPLYGEQHLNAFEAVASMGVAVELRRTTAKDGDAARSLVEAAEVERAVRRLMAPQGGGSSEAREKAAEVSAACRKAVEEGGSSHAALQRLVREIVRVVAGLTRPE

SEQ ID NO: 38401 - protein, 524 aa, Oryza sativa
MPTLNKIIFGAAAAVLVSSSAAFPLYSVHGDSPWMARADNSSLESCLSSSGGFEQAYASSGDYSALTSSYNPLFSYKPLVVAVPNTESEVASIVKCVAAQEGRQKLAPKSGGHSYEAYSLGGQDGSVVIDLSHLNSIQVDQANKTAAVGAGVRLGALAKGIWDQGKFALPHGTCPLVGVSGHALGGGFGYTTRAWGFLLDRIKSMRVVTSNGDVITVSEDENTDLWWGLRGGGANNFGVVTQFTFALQDAPTQILNYNYAYATNEDCAKAIVAIQDMANDPDTSTGLEAGLGGELLVAGSAAGDFNGNACQLAGQHINTAREGHDALMARFNARAGVQPATASVKPFDSWIDALTDLMGNLSATGPQHEQFYAKSLVQPATARYNYTSALALVSELDSYAGLRGTGNSISFDFLGALAYSATIEDASFNAHGATLINQFYSYGFPSNDDPNAQQDVWKAFDSLVRTAQASAPDADWGAYVNYVDARLDDWAHAYYGAGLDRLKQLKATWDPQSIFDFPQGLAHA

SEQ ID NO: 38402 - protein, 341 aa, Oryza sativa
MRFITKDPEGYVPISVVAGFKKIKALIQSNAMLASALRTSSKLVVSNDGTRVKREQPFTESDLEELQARIVVAENLPDDHCYQNLMKLFSTVGSVKTIRTCYPQTPNGTGPVTNRSAKLDMLFANKLHAFVEYDTVEDAEKAIVELNDERNWRNGLRVRLLNTCMTKGGKGKKGGHDINDGHGVEDDVSTSNQSNEKHGEEALQTPDAQGEQLPDESAGDMGRGRGKGRGRGGRGRGRGYHYHNNNQQSYHNHQQHNHQNNNNRNAAHPVGTPPSNHPAKNEQQQQAQPQPQPQPQPQPPAGANKQPPGPRMPDGTRGFAMGRGKPQTSTTTPSASSGSEP

SEQ ID NO: 38403 - protein, 373 aa, Oryza sativa
MASGGALSPVEEKPTVVKTTKAEQHEEEAAVAVKSAAEMMKKSSPCCPRCNSIKTKFCYYNNYSMAQPRYFCRECRRYWTQGGSLRNVPVGGGCRKSKRSSASSASASAASPPAPAVGAAPPVVPALSSAISKLLQSEPMAAPCADFPNVLPTFVSTGFELPAAAGDRLSLGSFEAFGNLSAAVAAPGGGGGSSTTTSFMDMLRGVGGLFDGVGNSHQMGGNGGGGGSYYAPLITGAGNGMLMPPPPLPPFSGSLMQHGMQGLFANHAMGGGGGGVMNAGEDGSVMAGLGGGQWPPALGGADEQQGGGDGGEAVMTKDTGGGASSSASRPDYFYGWNSAAGGVVAGGGIGGNAAAATGATPWQGLIDSSSAMM

SEQ ID NO: 38404 - protein, 413 aa, Oryza sativa
MGCGLSREKDAGGGPRRRPGSVGDVVVFLPGLRVPRSVDFSQALAGRLDEASSRLSSLRARVVDMAMQESAAALKPKRRAAARHGSSTANLLQALEDYLPVLLGLVKEGSELRHGVHFVWTNQEDNAEETAMADAWYEVSSVLHLMAMVCLLQANSLLLPRSYGDGYAPRVSEESRRATVDVFLKASGYLDCAIRQVLPQISSELRRQLPVDLAEGNLKALSLQALGQGVDMQLGLAIDSPKATLAVKRRLACEMVKYWHQIQESIPEIPVSDGWGKKHLLFVKWKYVEAKAAAYYFHGLILDEGNTEKSHGMAVAALQASEEFLKESKRASEAFHATPPTSRSPTPFGTAKYMLDKIPKDASSKVKINQDLYTQERVIVTPPPLPDFALALKPDDYDLPPLDPLWNKEDSRQ

SEQ ID NO: 38405 - protein, 336 aa, Oryza sativa
MESFASLAGGGSSSTTARLPELISPENPDHISPPPLLYQLLAGPESSARQHGHDGHHHGGGGGEAAAAAVQGQVSPAGAEAAVKAEIMSHPQYSALLAAYLGCKKVGAPPDVLTKLTAVPAAQQLDEADGHPRRRHEPQRDDDPDQLDQFMDAYCSMLTRYREELERPILEAAEFFSRVETQLDSLAGTGSSEEEQDPSDKQLKHQLLRKYGGSLGDLRQVFSKRTKKGKLPKEARQKLLHWWELHYKWPYPSEMEKMTLAQTTGLDQKQINNWFINQRKRHWKPTPVAGTAFPTMEAAGGGFRHSGHGGGLAAAAALPLYMGRPFVVDGMYRLGS

SEQ ID NO: 38406 - protein, 314 aa, Oryza sativa
MEKTSAGKEEGSESKTAAADNDGSSTSSTTEEEESGESQRRTSSSSSVRPYIRSKNPRLRWTPELHLSFVRAVDRLGGQDRATPKLVLQLMNVRGLSIGHVKSHLQMYRSKKIDESGQVIGGGSWRSSDEQQYHHLQMQGGGDGGQAYNLGHLSLPAALHHRHITAGSGTILQSRVANAWSPWRCHGSYWLRAGHHLLVGSKPYYPPPPAEARANTSSNHPDFVQGSSSSPDDHTMNHQRPVVLKEMIYNEGSNHQGGPLNLDLSLDICPRGEKRKRELISWRKYEEDHDHTTIAIGGDQEAESCATGLSLSLF

SEQ ID NO: 38407 - protein, 201 aa, Oryza sativa
MRSKASMFLKQMVSTIVAVVKAKSTAVRAKTSAMKTRLLIFGVLRNRKLLATAINHKIHAIMGGAAAQDTTNDGGVAGVEDDDGGGSKKAVVLCNTAPSFLTERGYYDHAGEEEEEEEDSDEYLTHSLFQEEDDEDDELVNAPGSVIDLVRDAKEGEGGEFRLEDEIDHVADVFIRRIHKQLKLQKLDSFKRFCEMLERSA

SEQ ID NO: 38408 - protein, 59 aa, Oryza sativa
MYTTLHNCFLFLENSSALFVSKEQGKNFDGNAHLDSIPGPIYRSNPPKITFDKPPKKMR

SEQ ID NO: 38409 - protein, 787 aa, Oryza sativa
MQYEPIFPYFADRFQGRAFRVLSDTYVTSDAGTGIVHQAPAFGDDDHRVAIAHGVISRDESPPNPVDGSGRYTAEVPDYQGVHVKEADKQIQKDLKARGRLIVQATLTHQYPFCWRSGTPLIYKAIPSWFVRVEPAIEKLVKNNNATRWVPAHVGEGRFGNWIANARDWNVSRNRYWGTPIPLWASEDMDEIVCVGSVEELERLSGVTGITDLHKDKIDHITIPSQKGKGQLKRVEEVFDCWFESGSMPYAQAHYPFENKEQFEKSFPADFISEGLDQTRGWFYTLLILATHLFDSAPWKNLIVSGLVLAADGKKMSKSLRNYPDPNLLINQYGADAIRLYLINSPVVRAENLRFKEEGVKEVVSSTFLPWLNSFRFFLASVGLYEKDHGVKFVYDRHQSSTNVMDRWILARCQSLIRLISDEMAAYRLYTVVPRLGELIDELTNWYIRFNRRRLKGEYGVDDTKAALNSLFETLLTLCRTLSSFTPFLTENLYQGLRKYMPAPAADDKEDYRSVHFLSFPEVNESYFDPVIQRQFKALQAVVELGRVIRVNSNLPIRVPLKELVVFHTDAEYLADAESLADYIKEELNVRDLVLSSDEAKCGVRFKLFADWPVLGRKLRKDVGKVRKGLEGVSSDEAKRYMQTGKLNVAGVDLVEGDLKVSRYVETKEIEGAFESNTDGNVVVLLDVQPRPELQAEGTAREVVNRIQRLRKKAGLVATDEVDAFYSFEQGLGQALAECIESQSDAFMKALRRKPLPESHRKPDAKVILQEEQEVGDDKFVLTLAWA

SEQ ID NO: 38410 - protein, 445 aa, Oryza sativa
MAMASVAALRLVVLLAAAVPLLPPPAASLAVTSTYVRPTARATLSVLHDGYGRTPQQVHISAVGSDKMRVTWITDDDAPATVEYGTVSGEYPFSAAGNTTTYSYVLYHSGNIHDVVIGPLKPSTTYFYRCSNDTSRELSFRTPPASLPFKFVVVGDLGQTGWTASTLRHVAADVYDMLLLPGDLSYADFYQPRWDTFGRLVEPLASARPWMVTEGNHEVERIPVIHPRPFTAYDARWRMPHDAGASPSGSNLYYSFDVAGGAVHVVMLGSYAGYAAGSAQHRWLRRDLAGVDRAKTAFVVALVHAPWYNSNRAHRGEGDAMRAAMEELLYGARVDAVFAGHVHAYERFARVYGGGEDACGPVHVTVGDGGNREGLATRYVDPQPAASAFREASFGHGRLEVVNATHALWTWRRNDDDEAVVADEVWITSLASNPACNKKYSISLY

SEQ ID NO: 38411 - protein, 158 aa, Oryza sativa
MSQTQCSKVVRGRGRNKRKWTADEDEELVKALCEVSLDPRFKVEGGGFKNCYSQGIENILAQRLPGRGIRSSPHVDSRLKVLKRKYYAIKDMLALPRFSWDGMRKMIQCEKELYDAHCKDHPRAKSLYGNPFPYFDTFDVIYGKDRTGREEEELSAPW

SEQ ID NO: 38412 - protein, 477 aa, Oryza sativa
MLDDELQAALDRRAAKGTLRQLTIYPTSSTAASTSSSSDQPLVDFSSNDYLSLATSSRVRADSAAIIASDSPLSAQLGSAGSRLLDGNSSAHEAIEDDLTRHFASSEAGLLFNSGYEANVSLLSTLPQPKDVVIYDELVHASVHDGLRRSRVPAHLRIPFRHNSVDHLRDILSRLRQDGTLTAGTSAAPGEQRNVWLAVESIYSMDGDACPLRALLDTLSQHVPQHRICAVVDEAHSTAVYGSRGRGLVNALGLQDDPRITARLMTFGKAWGASGAIVLCSKIARHYLINYARPLIFSTALGYPQLASILAAFRSVQDGSAEKRARATFGNARRLVDGLEGVIRSQSPAAKRTIALPPHLKPKQQAQLAVVADDDFVRWSMQQPSPIVPVLTSRARELAAHLRANGLLARPICYPTVPKGEDRVRICVHADNTTSDIDRLIDSVQSWVHDDSGHISTRTEVGRHTAPSPAHALAAKL

SEQ ID NO: 38413 - protein, 65 aa, Oryza sativa
MHHQNRRAFCPFFPELLFHTSPISSDRKNLKKYKLVHVYPKWCLVGGTKVGLNFNPFLENISYRG

SEQ ID NO: 38414 - protein, 284 aa, Oryza sativa
MDRTATASWEVMSRRGEQQQQLMMQAPASHNGGSGGGEPARSRWAPKPEQILILESIFNSGMVSPAKDETARIRRLLERFGAVRDANVFYWFQNRRSRSRRRARQLQQACGAALHQLPSAAAAAGAGGGGDYYHHHHQPSSSPFLMHGGGGGGVVTSTTAAPAVAASGHFLADEVDGGGDDDLFAISRQMGLMARHGGGDHHYSSYADSDATQLSYQPTGTIQVFINGVAYDVPSGGALDMAGTFGRDAMLVHSSGEVLPVDEHGVLINSLQMGECYYLVSKSI

SEQ ID NO: 38415 - protein, 357 aa, Oryza sativa
MSVPGVASRAADRFYCPPPRRHLLHHHHNQASKAAAAAVERQPRSAAAAAKEEEEETNLECFIASTAVRVPAHRLPRTSSSSRERGAAGAPPYYELADLWEAFAEWSAYGAGVPLLLNGTDGVVQYYVPSLSAIQLFAARPPSSTSGRLGEDSDGESAQDMSSESDHEHLRCRCLVNSISADQDGFSSDDSESGNQELYPVFQYMEHDAPYGRQPLADMISLLANRFPDLRTYKSCDLLPSSWISVAWYPIYRIPTGPTLKDLDACFLTFHSLSTPAEGTLSGHPETNVFHDSKIYDVPGKVTLPLIGLASHKFNGSMWTSNQEHEQQLTKSLLKAADDWLCQRRVNHPDYRFFLSH

SEQ ID NO: 38416 - protein, 187 aa, Oryza sativa
MAMVAMVVAAMAVAAVARGDMSADRTECADQLVGLAPCLQYVQGEAKAPAPDCCGGLRQVLGKSPKCLCVLVKDKDDPNLGIKINATFALALPSACGATHANVSHCPQLLHIPPNSKGAAIFSPGGDKGSPAAPAKDNSTTTTDSRAVQAANGGSRSSAATAGAALTALLAGYFLLLLPEFSAPSSF

SEQ ID NO: 38417 - protein, 521 aa, Oryza sativa
MSKDAKSPTKESKRKSKSSDAAESPKKSKKTASATASSSSNVESTSSKGKSKAKDGQATLKVQGSKSASQQLSKAGAAFASFADYNPAPSTKFSLYRAEGLPDETGARDDASDERLLLAGETDTMAYVGNNFEFGSTAEARGYTGEYMVGIYDPSSSSITLRALPTFQVARSIKANSSLASISSSRTFADYGEMTAARRALGDAFGNRKQKANARNQDRMKVDTANMEVILDDFTGGIQDSVASLPSLDEVLASSTASRPMPPANLDAKHPAEAYRISDLIPTDVFQALPIQKLIDNVHDADELQKLIPYSREFPDWIWSRLVDNLQRSSHLGGGSKSQKHTTFDDDDEDADKPANGDDDDVMMMPALGATEDKEDATNKVRLAYYMSMLWYLHSRPKSVSQRSRLITSLKLDGEDANKRIVRALLNTFSETPANSDRAQMSAFHQTKLLAYMCALALHLDNFSVDYDKLARNCNIAPSTLRELFRTLGCTAATTGGERRMVLKTPFTLPQPRKGKAGGRK

SEQ ID NO: 38418 - protein, 497 aa, Oryza sativa
MPTLNLDLPNGIKSTVQAELFINNKFVPALDGKTFATVNPSNGKEIGQVAEASAKDVDVAVKAAREAFDTVWGENTPGDARGKLLMKLADLVEEHVDELAAIESLDNGKAFSIAKGFDVAAVAANLRYYGGWADKNHGKVMEVDTKRLNYTRHEPIGVCGQIIPWNFPLLMFAWKLGPALATGNTIVLKTAEQTPLSALKMCELIVEAGFPAGVVNVVSGFGPVAGAAISQHMDIDKIAFTSSTLVGRNIMKAAASTNLKKVTLELGGKSPNIVFKDADLDQAVRWSAFGIMFNHGQCCCAGPRVYVEESIYDQFMEKMTAYCKGLQVGDPFAENTFQGPQVSQLQYDRIMEYIESGKKDANLHLGGVRKGNEGYFIEPTIFTDVPHGAKIAKEEIFGPVVVVSKFKDEKDLIRIANDSIYGLAAAVFSRDVSRALETAHKLKAGTVWVNCYNMLVPQVPFGGYKASGIGRELGEYALANYTNIKAVHVNLNIPAPI

SEQ ID NO: 38419 - protein, 427 aa, Oryza sativa
MPFDIEKCARPNILALEPYRCARDDYKDDGTNVLLDANENAYGPGLALGSNGKLANGDASDIEIDLLGLNRYPDPHQHELKQHLINLRNTKVHTQKDLTVDSLFVGVGSDEAIDALLRAFCTPGKDKILTCPPTYGMYSVSAHVNDVEVVKVPLDVDDGFNAQPDKINAKLTEDPNIKMVYLCSPGNPTANLVRKEDVRKVLEHPTWNGVVIVDEAYIDFSPDGSSLAEWVAEWPNLVVMQTLSKAFGLAGIRLGAAFTSPQIARLLNSLKAPYNISNPTSQLAIQALQPQNLKVMHANRAAILEQRERMLVEMPKIPGVGRFLGGRESNFLLVEMLDGPDGKPSNEVALQVYERLAEKRGVVTRFRGKELGCFGCLRVTIGTEKEVTRFLAELKSVLAEIHSGKVANGAPKSVEERKEQEASGVVA

SEQ ID NO: 38420 - protein, 208 aa, Oryza sativa
MVVSLYKGKLLHHPWPSHLLKFHTQKASGYAYHHNLLAGTLFLCGSCLSYAFWFIIQVRLASVFPYRYWATTLTCLSGSLQAFVIGILISPTKSAWTLKWDMQLLTVVYSGVFNTGISFVLMSLAVKHRGPIYPSMFNSLSLIVMVIMDSVLLGTSIFLGSILGTAFIIVGLNAFLWGKGKELKQAVAQHTSHKQNTDHNEQVGDEIA

SEQ ID NO: 38421 - protein, 193 aa, Oryza sativa
MQTIKCVVVGDGAVGKTCLLISYTTNAFPGEYIPTVFDNYSANVMVDGKPVSLGLWDTAGQEDYDRLRPLSYPQTDVFLICFSLVSPPSFENVRTKWWPEIAHHAPNIPTILVGTKLDLREDPETIAKLRDRRMQPITYAQGNQMARDIHATKYLECSALTQKGLKGVFDEAIRSVLAPAPVKSKKKNNCTIL

SEQ ID NO: 38422 - protein, 242 aa, Oryza sativa; identical to SEQ ID NO: 38274

SEQ ID NO: 38423 - protein, 499 aa, Oryza sativa
MASINRPIVFFTVCLFLLCDGSLAQQLLGQSTSQWQSSRRGSPRGCRFDRLQAFEPIRSVRSQAGTTEFFDVSNELFQCTGVSVVRRVIEPRGLLLPHYTNGASLVYIIQGRGITGPTFPGCPETYQQQFQQSGQAQLTESQSQSHKFKDEHQKIHRFRQGDVIALPAGVAHWCYNDGEVPVVAIYVTDINNGANQLDPRQRDFLLAGNKRNPQAYRREVEEWSQNIFSGFSTELLSEAFGISNQVARQLQCQNDQRGEIVRVERGLSLLQPYASLQEQEQGQMQSREHYQEGGYQQSQYGSGCPNGLDETFCTMRVRQNIDNPNRADTYNPRAGRVTNLNSQNFPILNLVQMSAVKVNLYQNALLSPFWNINAHSIVYITQGRAQVQVVNNNGKTVFYGELRRGQLLIVPQHYVVVKKAQREGCAYIAFKTNPNSMVSHIAGKSSIFRALPTDVLANAYRISREEAQRLKHNRGDEFGAFTPLQYKSYQDVYNVAESS

SEQ ID NO: 38424 - protein, 287 aa, Oryza sativa
MAFEEQGERIKDLELIMQRVAFAATLFDDDGIEIRFMNDDSTPPNMLGNIRTEQQIAQVMSNRRYKGLTPFGTKLRQKVIDGIVLPKLRQPRKPVLVIGITDGQPAGENAGALEDTIRYAVNSTQNLGPGAVAFQFAQVGNDQKATEFLGKLDNDPVIGSMVDCTSNYENESAEMARANPPVDLTPDLWVLKLILGAIDPSYDTQDEQGSAQVPGPGQFSQQQGGYGGQQQYQPPPGGPGQQYQPPPGGPPRPQGGPGGYAPPPGGPPSGYPGQQTYGGAPPAPPRY

SEQ ID NO: 38425 - protein, 401 aa, Oryza sativa
MASEMFKAATSEKLKEMDWAKNIEICELVAQDPGKAKDVIKPIKKYLGSRSKNTQLYAVMLLEMLMNNCGEPIHKQVIDNGLLPILVKIVKKKTELPVREKIFLLLDATQTSLGGVKGKFPQYYGAYYELVSAGVQFSNRPNVVVTQAQAPVPVPEPTIEPNNNSLSRRLDEGQKEVHAQPVSESSMIRKASSVMEVLKDVLDSMDPRHPEGATDEFVLDLVEQCTFQKQRIMHLVMTSRDEVVVSQAIELNEELHKVLVRHDALLSVQPTTTVASTLKEEEEEDAESLYRRLRKGKALSEDYTDDSIPSFRSIPEDKMRRPLTIEPSNTDKKLGALNIRSPYPEARPDVLIPPPPAKHAERERFFREKSMDANLLGHLRGLSLHSRDGSSSCSGSTDYGD

SEQ ID NO: 38426 - protein, 673 aa, Oryza sativa
MSSIQQRKEEILAKKAKLAELKKQRELRQREFTSHRQSLDAGELASPTPSRARRTEDLDSLISSLVDRPTSSSPAGKQRVSDEQSRERAPGTPPTKLYQDASTDTQTLSFAELTTVYEIPVESKPEYITYSKGVQTTEPWQPAQDSSEDTEEGEGASKSPSRRRRKLSQREIEIEEEQIRQRLRQEIEEEIRALQLDEKNESEKARFPARALEADELQAVTGSNEFLDFVERSSKVIERALDEEYDVLADYALQSRDAEDDDEYVGRKGRRIKEVMQFDLTETMGRKRMVSDIDFSPKFPELLCTTYTKSQQAPHTPPGLLNVWNMHLKGRPEYSLHATSDLLSCLFHPYHPSLILGGTYSGQLCLWDTRARNQRTGEPVQKTPLMGGRSGHAHPIYSLAVVGTQNASSVVSVSTDGVVCAWSTDMLTLPQEYLELHSPNPAAYKTDDVAPICMSFPASDPTYFLAGTEQGNILPVHRYDRAGAKAGVDTRYTYRGHEAPVTSIDFHPARGKVDLGDLFLSCGLDWTIKLWRAKPPSTTAGSLSGAATTIAPLLSIAREDSIYSAKWSPTKPGVFGCVDGAGKLDIFDITASSDIPVATARPSHIEKDAYALRSLNKLAWEKNQGKHVAVGGLDGITTVFEVGNELGGVETKSEKWAGVRKWVGRQSKASEAA

SEQ ID NO: 38427 - protein, 697 aa, Oryza sativa
MCGIFGYINYLVEKDRKFILDTLVNGLSRLEYRGYDSAGVAVDGDKKNEVFAYKEVGKVAKLKQLIEEEKPDLTKVFDNHAGIAHTRWATHGPPSRVNCHPHRSDPKWEFAIVHNGIITNYKELRVLLESKGMRFETETDTEAIAKLAKFVFDQHPNLDFTSLVKAVVKELEGAFGLLMKSVHFPGEVVAARKGSPLVIGVKTAKKMKVDFVDVEYAEDGQALPAEAASHNVALKRGNDLLSVPGLSADKSLLHRSQSRAFLSDDGMPQPTEFFLSSDPSAIIEHTKKVLYLEDDDIAHIHEGQLNIHRLSKTDGTSNVRAIQTIEIELQEIMKGRFDHFMQKEIFEQPESIVNAMRGRLNAEEKTVTLGGLRQYISTIRRCRRLIFIACGTSYHSCMAVRGAFEDLTEIPISVELASDFLDRQAPVFRDDTCVFVSQSGETADSLMALRYCLERGALTVGIVNVVGSSISLMTHCGVHINAGPEIGVASTKAYTSQFVCMIMFALTLSEDRASKTQKRLEIMEGLSKISEQFREILKLDQSIKEMCLKFKDQKSLLLLGRGSQHATALEGALKIKEISYLHCEAVMSGELKHGVLALVDENLPIVMILTRDSIFAKSLNAYQQVIARKGRPIVICNQDDEEFPGEKTDKIEVPHTHELLQGLLNVIPLQLMAYWLAVAEGLNVDFPRNLAKSVTVE

SEQ ID NO: 38428 - protein, 456 aa, Oryza sativa
MFRGEKFVLDIDDDGDLRQSEPVAAAPAPSPFTFVGDVLERKSSAPTPPSAPTLKSKTGFPEHRKRPIQSRFKQRKQQAETSVLSDGTTVSAGAQKPRQNATQDEDASPKNWQDQEKMQIDQQNRDVLAGMSEAEIAKARAELLGSLDADLIQKLLARSNIDSGSNEVDSLQPPPEPIEGGILHREKPTKQKSVAFADDKAPSAPKQPTVQDEDQEPTIEVDYEPDFPDADKPSTLEEVAETSHDTIHFPTPAQPPSLDPNSATFLTDLHEKYFPSLPSDPDKLEWMRTRKADKAAYSPASSSLNPNEIRFSFDGELLAPKTSASIPVSEGLHHHGNAPEAAGYTIPELAILSRSTYPAQRCVAFQTLGRILYRLGKGEFGDAGEEGANRPGADETFGELARGLWREVEKEHVIAQLVAESEGNGVDGGRHMSAKAYATEAVWLWRKGGGRRWKAD

SEQ ID NO: 38429 - protein, 516 aa, Oryza sativa
MVDPTHGLFKLPSKEERRITRNGAPLNPIKLAMMLTPLQGAMFFSGWLAWTVDAWDFFAVSLSVTALEKQFDRPAHDVTTAITLTLLFRSVGAAIFGILSDRYGRKYPLVINLFIIAALSLGSGFIQTYTQFLAVRSIFGLGMGGIWGMATATALENMPPEPRGLFSGILQQGYAVGYLLAASVNLTWVHRTGNWRILFFLGAGLSAFAALVRLVLPESELFLRQKAQRDASGATGESKAKVFLRELKEMLKTHWLRCIYGILLMTGFNFLSHSSQDLYPTILQQSKLLTSQQASRATIISNCGAISGGFVAGYLSQYLGRRLTIILFVIITGALIPAWILPHSFGALAAGAFFLQFGVQGAWGVVPIYLSEIAPPAFRATYSGLAYQLGNAASSASSQIEATGGDNLKERNPKWFPGAPATVKEFIPAYARVSAILLGTVCAYLIIVVVFGWEFKGAEFEKALPATIPGAGDQDAAELGEKRNTTDAYDEDSIEHVGDQRFQHTSSNEAIDEKKV

SEQ ID NO: 38430 - protein, 494 aa, Oryza sativa
MPINLDVSQAEIDQLGIKTGARVTLRDFRDDRNLAILTVEDVYRPDKVNEAKKVFGSDDDTHPGVKYLFDTAKEFYVGGKLEAINRLEHYDFLDLRFTPSELRAHFNKLGWQKVVAFQTRNPMHRAHRELTVRAARSQQANVLIQPVVGLTKPGDIDHFTRVRVYKALLPRYPNGMAALALLPLAMRMGGPREALWHAIIRKNHGATHFIVGRDHAGPGKNKQGKDHYGPYDAQVLVQEHQEELGIKMVEFQAMIYLPDSDEYLPINEIPEGTRTLNISGTELRHRLRTGKEIPEWFSYPEVVKVLREENPLPAEKGFTVFMTGYQNSGKDQIARALQATLNQGGGRPVSMLLGENVRHELSPELGFTRKDRDLNIQRIAFVASELTKAGAAVIAAPIAPFEDARKAARDLVEKSGPFFLVHVATPLEYCEKTDRKGVYAAARNGEIKNFTGVDDPYEAPAKPDLVVDLEKQNVRSIVHQIVLLLESNGLLDRL

SEQ ID NO: 38431 - protein, 389 aa, Oryza sativa
MADTKASSRAESFRSVSSQPAAAETPATSTQSTVAGVERDEQPPQEWTAPTDGPLKTPVPMPPSVSKPQKPAPLTPEQEVKYATVLAQVSSWETIPATTAKNAPQAPITDHERMWLTRECLLRYLRATKWVTANALRRLQSTLSWRREYGADTFTYDYISPENESGKQVILGYDNEARPCLFLSPGKQNTKMSDRQIHHLCFMLDRVIDMTPPGQETTALLIDFKGAAKGAVPSVEQARAVLNILQNHNPERLGRALITQMPWYVSIFFKLISSFIDPVTKDKMKFNEDLRLWIPPQQLWNEFNGDLNFVYDHSVYWKGLQEQTDKRREAYRQRWEKAGKRIGEFEDYLKGGGAKSLSQTLEEAGGVANEEKAAADPDLVAAEVGKLSV

SEQ ID NO: 38432 - protein, 611 aa, Oryza sativa
MPKPSTLTFKTTVIPKTNTSTLPDLSPLMTGSKFSLSPLTVKTLSGDSGGASSIITKNKQGGQAMPYLGTTKGLDVSPQNMGGAFRDLNKPSLSPEPPKSALLQGKTVQLGKITETVQSPVKAKPEVAFQPPAFPPTPVAQSSPCSIKPTVPSSATSSSSTMQESAAKTSDVLSPTGPSILPSKESMTKPSSPLPDGTISSSLLSIPMPVKESSTGLNKIVSKPEVVTSEVTGTTVSASTSSSVPITEGKPSSIPATSGSLPSIPVSAPKVVPVSAESVVVTSTGKDVGPSNPSSDEDDMEEEVPSASSDLNLGALGGFGLGSVPSSSPPKSNPFGNSFTTSDNKSSGSSFTLTTSPGQLFRPASLSIPSSQPAQSSQSTSSSTFSSAFSSGLSGFGQSAQIGSAQQSGFGQPSQIGAGQQAGFGQPAQIQSGFGQPAQVGVAQQSGFGQPAQIGTAQQSGFGQPAQFGAQQALGSVLGSFGQSRQLGSFGAGGFGGFASASASGGFSSNSGFAGGATGGGFSAAAAPAGGGFAAAATGGGFAALASKGGGFAAAASSGGGFGGAAQGSGFSSGGFGAFGGNQGSGFSAFAGSGSAGSGGPPANLLTQMRK

SEQ ID NO: 38433 - protein, 60 aa, Oryza sativa
MGSICGAARRPGCGWCGGNKGACCCCAAAATAAACCCCMSSACCIICCCCAAAAACFIRC

SEQ ID NO: 38434 - protein, 429 aa, Oryza sativa
MSIVRPRGSARPAKIKVANPVVELDGDEMTRIIWQKIREDLILPFLDIDLKYYDLGIEHRDATDDQVTVDAAEAIKKYRVGVKCATITPDEARVKEFGLKKMWLSPNGTIRNILGGTVFRAPIVLDDLPRPVPGWTKPIIIGRHAFGDQYRCQNFAVDKPGKFTMQFTPEDGSAPQTWDIFNFPDAGGVGLAMYNTTESITGFAHACFKMALEKKVPLYLSTKNTILKAYDGRFKDIFENLYETVYKKDFEAQGTWFNHRLIDDLVAQAIKSDGGFVWACKNYDGDVQSDIVAQGYGSLGMMTSELITPDGQIIESEAAHGTVTRHYREHQKGNETSTNSVASIYAWTRGLAFRGKLDKNDELVYFANALEEACLDAISAGKMTKDLALIYHGKQMKREHYVTTMEYIDEVAKILKHKLSAKGIEAGKL

SEQ ID NO: 38435 - protein, 466 aa, Oryza sativa
MLLFLDEPTSGLDGQSAFTICRLLRKLADNGQTILCTIHQPSALLFETFDRLLLLERGGKTVYSGPIGRDGKHVIEYFAARGAQCPPGVNPAEYMLDAIGAGSQPRVGDYDWADWYLESDMHQDNLREIEAINREGAALPKPEGRGSEYAAPWSYQFKVVLRRTMLSTWRQPAYQYTRFFQHLAFALLTGLLFLQLGNNVAALQYRLFVIFMLAIIPAIIMAQIMPFWIMSRSIWIREETSKTFAGTVFAATQLISEVPYALVCGTVFFVLIYYLAGFNTDSGRSAYFWFMTFLLELFSISIGTMVASFSKSAYFASLFVPFIILVLNLTCGILSPPQAMSSGLYSKFLYNVNPIRFTISPLIANELYGLSIQCAANEFSRFSPPSGQTCEQWAGNYISRIGGYLANPSATQDCTYCTYATGEQFYAPFGITWEERGRDLGILIAFVAFNCVATIVFTKVFKFSNR

SEQ ID NO: 38436 - protein, 482 aa, Oryza sativa
MSALDLKNIQGDILLDGLPKRVEFFFFFQITDGHIKDFCRSLKTLANDISHVDNTAQMRQDIGAGKSTRKEGDLVEMAGVNIAFSWKGLQKMSTVLAKDIGNPADRDYTDGMKAHAIGDTASPSTIGDPIKPGTNEPDWEQPFSQPDLLHGVILVTGNDDAQVKQKLESIKKTFQFGTSSAFVKELKTISGKVRPAPFKGHEHFGYNDGISQPAVDGIDKAPKGQDTIEQGVILCNRGSNAGHHPDWMTDGSFMCFRKLEQNVPAWNKFLVDASNTLGTWSDQLGARLIGRWKSGCPVQLSPEFDDKNIAADPSRVNDFNFAPADSDNANFTCPMAAHIRKTNPRNDLGPRGPNGVVNRFRILRRGIPYGNELDADPNGTRGLLFVCYQSTISNGFAFIQGQWANERNFVRPGVGFDAVLGQLSKSEQVDITGLFPQDAKRAIKLNAVSPFVIPRGGEYFFTPSMGALTGILSSVKEGKTDL

SEQ ID NO: 38437 - protein, 166 aa, Oryza sativa
MASNKVVFSALLLIIVSVLAATATMADHHKDQVVYSLGERCQPGMGYPMYSLPRCRAVVKRQCVGHGAPGGAVDEQLRQDCCRQLAAVDDSWCRCSALNHMVGGIYRELGATDVGHPMAEVFPGCRRGDLERAAASLPAFCNVDIPNGTGGVCYWLGYPRTPRTGH

SEQ ID NO: 38438 - protein, 198 aa, Oryza sativa
MSLRQLLLQARRFASRPPPPLSNMLVLCRGISDRGHKALPSAPPRHSTGQIQMPQTFHCSNANPLGNRFQIDVVDSDLWPASFDLSMDHAPKTGCPDDFQEHEDGEMHDSEDEIDDMRHRKKLFYKLDRGSKEFEENNVSLRHRRKREKGNVKNPKESKKVDPDESASVKLPKLKRSIQCVRRMWLRQRGIGCQHLTR

SEQ ID NO: 38439 - protein, 310 aa, Oryza sativa
MAMQLSLPVLPTGFRFHPTDEELVINYLQRRATGLSCPIPIIADVEIYNFNPWELPSMALFGEHEWYFFTLRDHRYPNSVRPSRSAASGFWKATGTDKPVQVANMQSTPVAMKKALVFYVGRPPMETKTTWIMHEYRLTNTGGSTASHPSLSSSTAHPSVKLDEWVLCKIFNKSPEPDNTAPPSNVVSRLQCSPPLPPPAAPPGNYPPLPVGATNDGGVFACAGDMLFTIQEHQEGTPSMLPPIPNLEPPAATIGNSSLNGTAAAAAAADGHGRLEEEDTSAYTFTDQEMEQMLMDLMDQDFFGNDQPQE

SEQ ID NO: 38440 - protein, 216 aa, Oryza sativa
MKYEEDEARSKHYFRRSKLSHNAPDFVPVAQRRKDVTDVRQPKSGNVLIDRTPVIQNMSVKPQGSNAIKPQDQCLQVVEKQASDDGKENRHQEDRNVRQANDKVVKTGTKQPQASTVKTSVDSKQQYWKKVEFPGQNPNSAVHGSSKAHEKHLNESKAPEKHSNGANCSSATVSLKTAREETIVARVSSLAISYQNSSVDVVKIGSMPVLVNKANV

SEQ ID NO: 38441 - protein, 409 aa, Oryza sativa
MNSTSKYHRDYPFLPAAASSSDGDGDGDGFYIGEPRNPAAGADSTDVFLFLAVPAGWLVRLAAFVGELVASAILGLVYPVAALIGWLRAVPAAVASLLRRAATGLLAAACTFAVLAAAFVVSLVLGFALVRHWVAEPVTARHPLYFDYTEAQPSAAVALGGGAAAAVPAGHAVRVSMALLLPDSYHNRHIGVFQIKSEAISASGITIASTTQPYLIKYKSSPVRLIQTALLCVPLTMGIRSESQDANLKLLHYREGHGRHKRTVLIRVMLQPRAMTVHLPQVYQAEIVVQTTLPWTKELVRALKWTLCVWVSLCVYVFILVLAMICWSRSPSAFSSRDRRLYDHQVIENSGMDMGDSGERSDKELYGGVGVKWKQRIRKRKAQHGTLQGDRMELKFTEGSTSGVAMDGE

SEQ ID NO: 38442 - protein, 548 aa, Oryza sativa
MACFGMMRRVAIIGGGPAGLSMADQLAAINARAPAFSVTLFERRTGFGGVWTYDADPGNCDVRFDRHGRAHALWGGRKDGDDAGRFCPPGPMYDGLRTNLPCDIMTYRSHPYPPQTPLFPSRQMVEKYIVDFANTLEPIDTRLATAVQSVRRVSHDPTAAAKSIGAGSKWAVRSIDTTTGVERDEEFDCVVLASGRCNTPSIPFVKGLWDFQGTVMHSAWWRSPVPFAGRTVLVVGNSSSGSDIARELAGYILRTLPEGDTATRDYIARCDRDPPRILHSYEKFDAPPPLDYDPRSTDSPDWAKRITVVPRIDHVEKMQGGGSRIVFEGGETRDDVDTIIFGTGYAYDFPYLDQEAAPFDTHPLIPQPPSTPPQQVGGEMYEPPFRTSSKLTNLDDWSLFYAADASICVLGAPIRIVPMPLTHVQARIVAAAWSGHIDPHPHSALPSLDPSIPSTDPERWTSRSPAPKQGAHSTTDLGYPSDTAYQNTLLALLPKGLAHQGDDEETQVPETRSNQPVLAKSEGWSTMPTFRNQRRQDTKRLRRLLLGY

SEQ ID NO: 38443 - protein, 291 aa, Oryza sativa
MSSRRDVLAVVLVAALLPPALSRGLWLGHHGLGHGHGRWRAPHVGGHGQGQGPQQHAPLGGGGWSSAHATFYGGGDASGTMGGACGYGNLYSQGYGTNTAALSTALFNNGLSCGACFEVRCDAGGGGSHSCLPGSVVVTATNFCPPNNALPSDDGGRCNPPRAHFDMSQPVFQRIALFKAGIVPVSYRRVACQKKGGIRFTINGHSYFNLVLVTNVGGAGDVHAVAVKSERSAAWQALSRNWGQNWQSAALLDGQALSFRVTTGDGRSVVSNNAVPRGWSFGQTFSGAQFN

SEQ ID NO: 38444 - protein, 774 aa, Oryza sativa
MTSIFSSWVGSNKLAVDVEQPPADPSRNRALSSASNPMSPIDRATSMTPKAPYQFSSQPDWGMSARDHHRETSEATLNGQASDNGASADSPAVVPFSREPSLIRPTASRPQSMAGASDLTHDRLTAFSSTLGGVDSEAAWSATQPESAKNSAPRRRKKIAPPELLVIVKPPPSKQANPLNLQIQLVMPQQLQRREGSQRRSSMDSSAAHPELTPSSSNDLRRRDSITSTRSAGSEISAAGSVASTSSGRRVTPLYNLNFHTILSTTVSDAGTDQKVAKYVRKGIDLDGFGVLEPAELVGGVNDLATLYRNAAAEHGSSTVHGPLASSASPRNETDSSDSIDEASAFSAPTRDNAGLAAGAAPGVEPPTSYQAMTPEARGVEANLGGKLLGKFKRFSLNVRPASSSGATSAFGPDSAATQDRVTGSGSSNSHNMFGRQPNDPARAPGHHEIPQFSPGAGVVEGKRTEGYYWTVRKWNRRVAHDGGEHGHLVSRTGAAPRAADGQGANPVLASVWKRFNLVNRMGGSEVHPPASQIPVRFEWSRDSRKSRSRRRAEVMQARLRASVSLNASVTSIDRHMGEPARTNGSLHPTASTSAQSLAVDDAAPRLSSGDVLRSTSRPSSFVSGAGHRSPRRSVDTSAAGSSAPHGDDSGDESDPEDSETPWNCHLVLGPTTRIPLGTLSPAPHHPKLVGQLAVPFPLPDLSSTGLGPDGAGLTREELKDVIIVTCLHLIVRESFGGLARRRSHGSSEAGAGATAASMANVNGWRLASLPKKQ

SEQ ID NO: 38445 - protein, 139 aa, Oryza sativa
MPEFGASSSRLAALKKQSAADSGHAKVTGGDARLASAEQLRREVQALRLRNALDPKRFYRASAKNQAMPKFAQLGKIIASPLEPKAVLSRKEQGRTVVEELIRDAEAASYAKRKFSESQASHRSNYNGRRKPPSKKKRT

SEQ ID NO: 38446 - protein, 190 aa, Oryza sativa
MIDDIHNHWRRAEAVRIKCLGVPTLDMDNICFHLEDKTGGKVIYRNINILILYRGRNYDPKQRPQIPLMLWKPLAPIYPRLVQNVADGLTFEKTKELRNTGLNSSPLMKLTRNGVYVNVVDRVREAFKTVEVVRLDCSHVGSSDCKKIGVKLRDLVPCVPLLFKDEQIILWRGKVKQENSVSLQFSPEPS

SEQ ID NO: 38447 - protein, 619 aa, Oryza sativa
MSSEVPATPVDETVYQGAIGIDLGTTYSCVGWWVNERVEIIANDQGNRTTPSYVAFTESERLIGDAAKNQAAMNPRQTVFDAKRLIGRRYDDPDVKKDMQHWPFTVIDKDGSPFIEVNYLGETKQFSPQEISSMVLTKMKEIAEAKIGKEVKKAVITVPAYFNDSQRLATKDAGSIAGLDVLRIINEPTAAAIAYGLDSKSSTEKNVLIYDLGGGTFDVSLLNITGGVFAVKATAGDTHLGGEDFDNALLDHFKKEFERKNKLDISGDARAVRRLRSACERAKRTLSSVTQTTVEVDSLFQGVDFQANITRARFEEINAAAFKGTIEPVAKVLKDSKIPADKVDDIVLVGGSTRIPKIQSLISEFFGGRQLNKSINPDEAVAYGAAVQAAVLTNQTSDKTADLLLLDVAPLSLGVAMQGDVFGVVVPRNTPIPCNKTRVFTTVEDNQTQVTFPVYEGERTQCKDNRLLGEFELTGIPPQPRGQAELLTTFEIDANGLLKVSAQEKITGRKANITITNSVGRLSSNEIEQMIKDAETFSKADKDFTAKHDAKNDLEAYVHSVEETISSPAANLKRPAKIQIEQELTKALELLEVQDASADEYRRASLRLKRSMQKAFGGR

SEQ ID NO: 38448 - protein, 201 aa, Oryza sativa
MKNTIDHGELVAASEIASQVVARRGALTDERRGGRGDGEVDELERHLGDARHDVAARGAAEGVDEAAEQHGHERQRGAVRHRAQRPEQHQRRVRAVREREQPVERHAPPATILPRRSSHRLAAAAAAGRRRRRIHSERPARLRHALQTQDSQHQTTIHHPLQRTQKSTSKPRFLIDLHHQCLSKKAPINQRTTRWINQEMS

SEQ ID NO: 38449 - protein, 372 aa, Oryza sativa
MNRGEFQSSLVQQMIWSGSSTGTATGVGSGGGAGSLMGSLKPCHEDQEASPNMPSLSSPSLIFSQQFQHSSPGLVPMNGTAGAAASLPSLHDGGGGGHESSMPESWSQLLLGGLAGDQERYSVTAALLSKGLENWGDHAAAAAASACMVGGMKEEGSMAQAAATAAAAAYSFYGSHLAGDHQHEIQAAAAGGGASNKSQLSQMLMASSPRSCITTSLGSNMLDFSNTAAPPELRSHHHNSDNSSECNSTATGSALKKARVQASSSAQSTLKVRKERLGDRITALHQIVSPFGKTDTASVLQETIGYIRFLLSQIEALSYPYMGDANGTGPMQNGPVGERNPGLFPEYPGQLLNHQGDTQLGCKTICKFVVPL

SEQ ID NO: 38450 - protein, 399 aa, Oryza sativa
MAGRPELPAWTPPVPTRETDLEWAPLTTLDLSQISGDDFTSVPESVVREVGEAFSRDGFIYAENHGLSWEHVLRQFAIGQYAFNGVSEADKAKYKADILSTGSFVGYKEQGHWKLNGVKDRIEQLNFGSQSFAADKREQLFPPSIQHLLPEIEEFARFNHAVILRKILSVLSLVLKLPANHLWELSKEPEKRGLDLLRYAMYHTPDQQDDDKLGGVRLQGHTDFNSVSILWSQPITSLEVLMPDNKWRLVKHRDNALVINLGDAMHFISGGYLKQTIHRVVAPPADQAHYTRLGIFYFALFNDDVALEPIEESSVVRETYAARKHKEGGFWDAAKAKGEKVPTAGDWERLRVKAYGQQQAKKAQDGHDVEEIAGQKVLGYNGERVKSKFTAQTSAVRAN

SEQ ID NO: 38451 - protein, 329 aa, Oryza sativa
MTASSLAAAASDGASSSSGSASAIVAGTVNGHHVLKIVGYSFTKAVPSGKSIRSRPFRAGGHTWHVLYYPNGNRAEKADFVAFYLCLDDAEACSEAVEAKAIFSLLDMEGNPVSSYRFTTRVVNFMEHKKDFHTEEETPLIVAPPSDMRRQFGDLLLSKQGADVKFQVGKKKFDAHRSVLAARSPVFKAQLYGRMRESTTRGAIRIDDMEEEVFRAMLTFVYTDDLPEMKQQDEAAMAQHLLVAADRYNLERMKLICEHNLSKHIDTDSVVNILVLAEQHSCHMLKEACLKFLRSSRSLKAVMETNGFGHLISSCPGLIKDIMSKLSPC

SEQ ID NO: 38452 - protein, 390 aa, Oryza sativa
MASSVFSRFSIYFCVLLLCHGSMAQLFNPSTNPWHSPRQGSFRECRFDRLQAFEPLRKVRSEAGVTEYFDEKNELFQCTGTFVIRRVIQPQGLLVPRYTNIPGVVYIIQGRGSMGLTFPGCPATYQQQFQQFSSQGQSQSQKFRDEHQKIHQFRQGDIVALPAGVAHWFYNDGDAPIVAVYVYDVNNNANQLEPRQKEFLLAGNNNRAQQQQVYGSSIEQHSGQNIFSGFGVEMLSEALGINAVAAKRLQSQNDQRGEIIHVKNGLQLLKPTLTQQQEQAQAQDQYQQVQYSERQQTSSRWNGLEENFCTIKVRVNIENPSRADSYNPRAGRITSVNSQKFPILNLIQMSATRVNLYQNAILSPFWNVNAHSLVYMIQGRSRVQVVSNFG

SEQ ID NO: 38453 - protein, 458 aa, Oryza sativa
MRLMDSLDKLFKWHAHPSVLLMTYSSFLGMTKQDSKVRNRYREFIAEVLMNNPGLLILDEGHNPRSNKSKLRKLLMKVKTEFRILLSGTAFQNNFEEYFNTLCLARPRFIGDIMSELVPERKRETVGRRAKHQEAVARRAFVEKVGQKIESDNKHIRSDGISLLNKLTRGFIDSFEGAKLINLPGIHVYTVFMKPTDIQEEMLAKVTMPKLGSSRFPLEVELLITIGSIHPWLIKTTKAVSTFFSPAEVKKVERYKRDFAAGCKAKFVIDLLHKSSFRGERVLIFCHNVSPITFLVKLIEMVFGWRLGEEVLVLQGDQELPVRSDVMDKFNGDSAGKRKVLIASTTACAEGISLTGASRLVMLDSEWNHSKTRQAIARAFRRGQERTVYVYLLVASGTWEEEKYNSNRRKAWMSKMVFLGRYVDDSSQNRVTDIDDEVLKELADEDHTGTFHMIVKQD

SEQ ID NO: 38454 - protein, 370 aa, Oryza sativa
MGTESDQYPAHLSSSATVAGHGDDGESPEIAGAARLYVVGLIPQIFAYAANLPIQKFLQAQSIVAPSAYISAATLAAHVALSWFAVYKLGLGLLGASLILSLSWWVIVLAQFAYIVVSDRCRLTWAGFSSKAFSGLPEFLQLSAASAVMLCLETWYFQVTVLIAGLLKDPEIALDSLAVSMSISGWVFMVSVGFNAAASVRVSNELGAGNPRAAAFSVKVVTSLSLIVAAIIAAIVMCLREYLSYVFTQGEEVARAVSSMTPLLAVTIVLNGIQPVLSGVAVGCGWQAFVAYVNIGCYYIIGVPFGCVLGFHFDLGAMGIYGGMIVGLFVQTLILVYVTFRTDWNREVGEAKKRLNKWGDIAKPLLANED

SEQ ID NO: 38455 - protein, 311 aa, Oryza sativa
MGGVTSSTSSSSPATAAGGSSYSAEAAQALCCACVGQSTVAVEEAWGRYDAVLGPGCHFVPWCVGRRVAGYLSLRVQQLDVRCETKTRDNVFVTVVASVQYRALADRAYDAFYCLTNAHAQIQSYVFDVIRASVPNMNLDEVFGQKKEVARAVEEELARAMTMYGYEIVQTLIVDIVPDEVVRRAMNDINAAARLRVAAAERAEADKIQQVKRAEGEAEAKYLAGVGVARQRQAIVEGLKRFVPNEKDVMDMVLVTQYFDTIRDIGATSRSSTVFIPHGPSAVRDMAAQVRDGLLQATAAAGGGAATLKAL

SEQ ID NO: 38456 - protein, 490 aa, Oryza sativa
MAIEMGKRKRPVDDGGDSSEPELPADIITHITGRLTSQVDFLNCRNVCPSWERALRGEARRLAAAVERVPWLLLAAKADGSYLGRRQAGDVAAVQLPGRHVRLGRREICLGCSSGWLVVANDFGYARLVNPLTAATAPLPPLWRLPYLDAAHGYDGCVGSFLYVDEHHRGGPGVAFSFDGLCDLVLLKAVVVDISDGGATVAVLYRREREFAMARTGQRSWRLVNNKLDGIVDMARHGDGKLYTVHLSGKVARWKFDCNVRRSPEILESVLVIDSPYHYVVKADNNVNAITMSREYEHDHRDRAGECCYLVGAPRGTLYLLKRVYKHKQVGSDGGGGGRTQRTTATFHVWHLTWASDGGMEWPATMDGAAIYHNLATFVSYTGAVCVGKRDADAVLAGGAVYFTEDAAGYAGAAMAEDFGVRRINIRRQKSRRITRMTRLGDESMKRIKDKLEDEESEEVKPLGRCMNWPPPFWFIPSLDDSLGAAPPGK

SEQ ID NO: 38457 - protein, 248 aa, Oryza sativa
MAVGNKVFVPAIFFIAAREALEASLVIGILSGMLENLVMHTKSAEDLRDEASLTDHEREQADLKRRTIVRKLRKVVLLGALTGLLIAFAIGAAFLAVFYTQVNDLYGKAEELWEGIFNLVAVLLITPMSLAILRAGNSKRKWKRKLESAFNDRHIQPARLRDEEGESTAVNRGISSNDTASSSSSSARRAANASGDDEAHPKTTATEKLNPLEAVDVVPTMSQNAQASRPRRGLRGLFSKPSGAVSDL

SEQ ID NO: 38458 - protein, 535 aa, Oryza sativa
MVLGGWLLMWAPASSPTILVAFGLLFGLVLAWQAGLQLHRLWWRPRRLEKALRARGLRGSSYRFLTGDLAEESRRRKEAWARPLPLRCHDIAPRIEPFLHDAVVRPEQHYGRPCITWLGPTPEVHVTDPELAKVVMSNKFGHFEKIRFQALSKLLPQGLSYHEGEKWAKHRRILNPAFQLEKLKLMLPVFSACCEELISRWMGAIGSDGSYEVDCWPELKSLTGDVISRTAFGSSYLEGRRIFELQGELFERVMKSVEKIFIPGYMYLPTENNRKMHQINKEIESILRSMIGKRMQAMKEGESTKDDLLGILLESNMRHTEENSQSSQGLTIKDIMEECKLFYFAGADTTSVLLTWTILLLSMHPEWQGRARKEILGLFGKNKPEYDGLNNLKIVTMILYEVLRLYPPFIELKRRTYKEMKIGGVTYPAGVIINLPVLFIHHDLKIWGSDVHEFKPERFSEGISKASKDPGAFLPFGWGPRICIGQNFALLEAKMALCLILQRLEFELAPTYTHAPHTMITLHPMHGAQIKIRAI

SEQ ID NO: 38459 - protein, 54 aa, Oryza sativa
MTLEPWLTSKSRFRSWSCYLFDGPIFLKEDFLSLAGEYCCSGHREQGRQCLQRL

SEQ ID NO: 38460 - protein, 367 aa, Oryza sativa
MGLSRRFLNLIVDNRIPGAKSLRCIDLTLARYKLFNTTTPAALTLNGNGNGLKKRMEKICLPSPIFNLGAPGERIHMFPALERRAFSLDQSGRGLLLEADTSRLVVMPNLHKPKLEPIALYIPGAEIDLDDLDGGGGGTLFIMDRIAKPQEADYLFEALVYRMFCSSYLSKSWDCQLLPPPPPYVVKCGVDFLKIISYGLVKGGSEICISIDGVGTYCFDTVKHTWIEVGKWMLPFQGKFEYVHELKLWFGFTPNDGHFAVADLSAMDEYLQPQIRHCWNELDESLIQGWKQIRDPQLVNLGSAKFCIARFFHTGDFGDGLSGQNVSVLTGVEFTHANVDHENIGLIKHKSRCHKSSCGEETITAVF

SEQ ID NO: 38461 - protein, 248 aa, Oryza sativa
MNAPEWAGGAHCGQTVTITNNKNGNTQSAQVADLCPGCSWGSLDMSTSLFSALNNGNMDDGVFPISWSFGSGSSASNNNKQQQQQQQQAQATSSTYTPEATYTKSSTPSATPTPSSVTYSQPAAPTSTSSYAPQPASSSNSKTVVSTPEWWADVNNACGVKPDAGSLPIAISSSALLAADKLSDACGKWIQIKNNQNGKELSLQVVNYWAGAEGDVALGEAYKRLANNYENPETIESVTWGFIDGQGL

SEQ ID NO: 38462 - protein, 413 aa, Oryza sativa
MALLLPEFDPADVRAGRDLIHRLTADAAGIQRGVLREILSRNSGTEYLRRFLGGAAGDDDDVRDAFKRRVPVSGYEDVKPYVDRVASGGEPSSALLCSDPITCLSRSSGTSGGQQKLLPSTAEELDRKVFFYAVQALVRNMSLHTDHGEDDDGGGGEGMYLMFAFHGDRTLSGLPIQSALTTYYHSRQFQECDIGGFDKCTSPLEAILCPYGEQSMYCQLLCGLLHRCRVDRVGASFAAGLVRGIKFLENHWEEMCFNIRSGQLSDWITHTPLRDAVTGQYLQGSNPALADEIASECARKPWDGIVRRLWPRARYIRTIVTGSMSQYIPILEVYGGGLPLVSPIYASTECAAGINLRPLDPPSHVSYALPPNIAYFEFLEVMDENGEKVQGTTRLDDNLGEVKVVDLVDVKVG

SEQ ID NO: 38463 - protein, 804 aa, Oryza sativa
MRDAAALELHAADAAAAARPAMVAASDHYARLLQLCQTAANPGAGRAIHARAVKAGLLASAYLCNNLLSYYGETAGGAGGLRDARRLFDEIPLARRNVFTWNSLLSMFAKSGRLADARGVFAEMPERDAVSWTVMVVGLNRAGRFGEAIKTLLDMTADGFTPTQFTLTNVLSSCAVTQAGAVGRKVHSFVVKLGLGSCVPVANSVLNMYGKCGDSETATTVFERMPVRSVSSWNAMVSLNTHLGRMDLAESLFESMPDRSIVSWNAMIAGYNQNGLDAKALKLFSRMLHESSMAPDEFTITSVLSACANLGNVRIGKQVHAYILRTEMAYNSQVTNALISTYAKSGSVENARRIMDQSMETDLNVISFTALLEGYVKIGDMESAREMFGVMNNRDVVAWTAMIVGYEQNGRNDEAIDLFRSMITCGPEPNSYTLAAVLSVCASLACLDYGKQIHCRAIRSLLEQSSSVSNAIITMYARSGSFPWARRMFDQVCWRKETITWTSMIVALAQHGQGEEAVGLFEEMLRAGVEPDRITYVGVLSACSHAGFVNEGKRYYDQIKNEHQIAPEMSHYACMVDLLARAGLFSEAQEFIRRMPVEPDAIAWGSLLSACRVHKNAELAELAAEKLLSIDPNNSGAYSAIANVYSACGRWSDAARIWKARKEKAVRKETGFSWTHIRSKIHVFGADDVVHPQRDAVYAMAARMWEEIKGAGFVPDLQSVLHDVDDELKEELLSRHSEKLAIAFGLISTPEKTTLRVMKNLRVCNDCHAAIKAISKVTDREIIVRDATRFHHFRDGLCSCKDYW

SEQ ID NO: 38464 - protein, 73 aa, Oryza sativa
MGKDISLGNWCLRLVREQSNYSRTMVASTFSSHSSRKILVLLPDGLYANVLYICKKIYWANNSNYTGTKRRAL

SEQ ID NO: 38465 - protein, 531 aa, Oryza sativa
MADQELKQFQEEVEAVKQWWKNPRFANTTRPYTAEQVVSKRGTLKQTYPSNTQAQKLWKTLEGHASKGTTSHTYGALDPVQVTQMAKHLETVYVSGWQCSSTASSTNEPGPDLADYPYNTVPLKVEHLFMAQLFHDRKQHEERTNLSPEQRAKTPVVDYLRPIVADADTGHGGLTAVMKLTKLFVEKGAAGIHIEDQAPGTKKCGHMAGKVLVPIQEHINRLVAIRLQYDIMGVENLVVARTDSEAATLITTNVDERDHAFILGTTNTSLEPLVDILNRAEAEGADGPKLIALEDEWLAKAQPVRYGDAVAAELEKKGKKAEAEQFRKEVLGTSLLKAKAKAKSLGVEIGFDWDACRTREGYYRYQGGTDCAINRAIAFGPYADLLWMETKSPIPAQAKEFAEGVKAARPHQWLAYNLSPSFNWDAAKLSTEQMKSYVWDLGKLGFVWQFITLGGLHSNAYISDLFAAGFAKEGMKAYVELVQRKEREIGCDVLTHQKWSGANFVDACLNTVLKAASTSAMGKGVTETQFK

SEQ ID NO: 38466 - protein, 734 aa, Oryza sativa
MKGLKDFRRSLNKDRHSGGKPPTSSASPAAFTNVKSAVTIQPPKLVIRAVRDYRSNSPHELSFHKGDFFHVITDPAPNADWFEANNPMTNARGLVPASHFDVLSKSNRANPATFAGPGATSPQMGSMSPPTSSAASTTGVPPPSGASSSSKAYGGRAAGAAMTAKGGGGLYAVVKYDFNAERADELEAKAGESIIVIAQSNFEWFVAKPIGRLGGPGLIPVAFVEIRDLVSGRPIDDVQELIESGVVPKVEEWKKMTAEYKKNTIPLGRFDFPQSSQQGLNSPYANMAAAASGSSTNNAALPRSDMHAHQASISSLPVPTPPPKDDLYNHTGGPLGAAGAVQPFDEHDPNAIDPLTQLPPGMSPGEPLPTGIITSATVDSFHYEQGDYWFRIQATHVAGPSPSAPSNAPTAPDGEERDLILYRLYEDFYEFQIALLDHFPAEAGRETDANGHSSERILPLMPGPLDVVDDLITSQRRVDLDQYIIELCSLPEYIMRSELVRLFFEPRPGDHCTAHPARGPTDEQDNNLQYNDYGYLAGDVDAGQQRNQQTTQQQQQLRSNGVNKYAEDQPVGRASTSSRTEDELSAKMRGASLGGGSGGASSGQRDSARSSAAFGGGVGGTISTGRTSQASSGHRKQNSSGPSTQPQTSGSAASVPYHRIKVARRNDLDSVIALRMPPSPTYAQLLEKVRERLGADVSVFKCNEKPDLIDDDASLTAWLDEATDRGWKLMLHAS

SEQ ID NO: 38467 - protein, 372 aa, Oryza sativa
MAPAATSSRSHAAQDPREQQLDMSGQNRVAIFDKQGGPVSIKDVPVQKQLKRGEALVRVIYTGVCHTDLHAMLGDWPLDNKLPLVGGHEGAGVVVALGEGADQFVKVGDRVGIKWIATSCLNCSFCRTGAEPNCPHAQCSGFSVDGSFQKYAVSYANHLSIIPDALPLDQAAPILCAGVTVYKALKEAQLIPGQYVAIPGAGGGLGHLAIQYAVAAGYRVIAIDTGADKKQLCESLGAEKFIDFKTSKSLVDDIKAATPDGFGPQAAVVAASGAAAYEQALDYIRPRGVLVAVGLPGNTDIRANVFFTVFRLVRVVGSYVGNRQDAQEALEIAASGKVRTHFKTLGLSQLPQVYDDMQSGKIAGRIVLDIDQ

SEQ ID NO: 38468 - protein, 421 aa, Oryza sativa
MLLRPHPGRLTLLRAQQPPRTRLIIRLPLSHGLHTTAIRQEQRRSRSPQAGTMTPVPDEDRRPAKQSPFYFLTGYAGWAKRPSRPFPPPFFSPPSGSFSDPLSTHNRSRDRRPKVNGEMILGVTNGDDAMLVTENLLAANDGVGAWAQKERGHAPLWSRLIIHFWATAAEKDGIGAASTGFSVDAKQADGENKPDPVRYLSEAYAATKEALGPPTEWFGTTTTSSALLHWEQDKPTLYVTQLGDCKVLVLRPDQEYKGNDDVSIDEQEDIGGNVVFATKEQWHYFDCPRQLGTNSPDTPEENAVLDVVTVQEGDIVLAMSDGVTDNLWEHEISANALKSLRTWVKKHAADETATEKSNGVSTEAMKFLAQELVLAARQIAEDPFAESPFMEKAVDEGLAIEGGKLDDISVVAGFVRKRDMT

SEQ ID NO: 38469 - protein, 412 aa, Oryza sativa
MGAGEVVQGLKPVAAMVVVQVVFAGVNIFYKLAVVCDGMDMRVLVAYRYLFASAVLAPLAYFVERKNRTKMTWRVLMLSFVCGLSGGSLAQNLYISGMKLTSATFATAMTNLIPAVTFVLAVLCRYERLAIRTVAGQAKVAGTLLGVGGAMLLTLYKGAELNPWHTHLDLVAALEARHPAAAAATGNNDRVIMGSMLVVGSCVFYAVWLILQAKLSREYPFHYTSTALMCVMSGAQSAAFALLVDREPARWRLGLDIRLLSVVYSGVLASGVMLVVLSWCVKRRGPLFASVFNPLMLVVVAVLGSLLLDEKMHVGTLLGAALIVVGLYAVLWGKGRETALEAAKVGDDNDNHHIHVVVVVPPEQAQPQPHQQAEADADATTTACEQPSDSDRANIASSLRHSHRYFHRSCGF

SEQ ID NO: 38470 - protein, 567 aa, Oryza sativa
MSHSPVEPVKVGDETIAKGNEANQHVKPANGDQLEKQVSPLESEVFSRPDGASVDDIYERKVYILNKVMNDHIGMGKVQWQLFLLSGWGWMADNLWLQGVAIILPQVEREFNISSDVRWMTFSLYCGLILGAATWGILADVIGRRPSFNITLCIAGIFGIAGGAAPSFVGLGGLLAALGFGLGGNLPVDGMMFLEFVPAKSQYLLTLLSVFWSLGQLLASLVAWAFIANYSCDDNQSNTVTGPNTVACDVSQNKGWRYSFYTFGALTFAMFVARYFVFNLPESPKYYLSRGRDADAVAVLKDIAARNGKPLGDDVISVEIFRSAAGQEASMDAQEIGHKPKGMKRITSAPKEFIHNFKGVSFTPDLSHVRPLFVGWRMAVTTTLLWVLWSLIGLAYPLYNAFLPIYLSEAQGLDGASDVYTTYRNYAIISVCGVPGSIIAAWAVELPRSGRRGALGVGTLLTGVFLFLFTTASTEGAVLGYNAVTALTQNIMYGTLYCLTPELFPAPHRGTGDGIAAALNRIFGAMAPIIGIYAGGTAPLYVAASLFLLSGVLSFLIPLDSRGKSAL

SEQ ID NO: 38471 - protein, 828 aa, Oryza sativa
MHDHSQPLAKRPKMASTPLNIPLESMLPAPAPLRVLILGSGGREHAIANHFLRSNRVEHVFCAPGNGGTATLGPRCTNIDSPKATGDFSEITAWAVQNGINLCFPGPEQPLVDGVELAFRKVGIPVFGPSPVAAQMEGSKTFAKAFMDKYNIPTAAFQSFNASQVDECLAYIQKLGGAQQVVLKASGLAAGKGVLLPESDQEAQEGVQDILVKKVFGDGGSSLLIEQRLVGPELSVLAFCDGYTVTALPACQDHKRIGEGDTGPNTGGMGAYTPAPEGLVDDLPARIRNEVLVPTIDGMRNEGFPFVGMLFVGLMLTADGPKMLEYNVRFGDPETEALLELLDESKSSLADIVLACVERRLDSVKPVVRNQHAVSIVLASQGYPGKYPTGVPITIGAVPQNVTVYHAGTKLDASGQLVTAGGRVIAVSAFGNTLQEAVELAYQGVDAVHFEGKTFRRDIAHRALKPAASSSGGLTYAAAGVDIDAGNALVEAIKPLAKSTRRAGCDASLGGFGGTFDLKAIGMRDPVLVSGTDGVGTKLRVALDMGKHDTVGIDLVAMSVNDLLVQGAAPLYFLDYFACSKLSVPVASAVISGIAEGCRQAKCGLIGGETAEMPGMYIGDDYDLAGFAVGAVEREALLPVLDQLKAGDVLIGLHSSGVHSNGFSLVRKIVARSGLELSAPCPWSAEKDGSKPAATLGEALIAPTRIYVEALTPLFAEAKGLLALSHITGGGFTENIPRILAPGVGVEIDLASWQRPALFDWLQATGNVEPEEMARTFNNGIGMVLIVQQQEQQGILDLLSQAGERPVVMGTVVDREGVHYTNMNAWSA

SEQ ID NO: 38472 - protein, 159 aa, Oryza sativa
MKELAMSYFIFSRFGETANLIIGGGPQASASVSSPPSGTCSRSTSSVTNPTPYFHPSSGRFTWSMTYHTLSLSGYSAAHRSSSSRRRMSSSVRFAYTRCISVVSSGWSRSTDWMTWYMGVIPLPPAIIASRRAFRGLPLMTNSPRPVYSTWPSGPLTSM

SEQ ID NO: 38473 - protein, 97 aa, Oryza sativa
MPWGTAARTPPRSRTSATARRCRRRRHRRRGRPRTRPWGTTRRRSTTASCRSTSASGSAPTSSSRTASGSSCCRPPRTGSMPRRPSTRTGSSGGCSS

SEQ ID NO: 38474 - protein, 365 aa, Oryza sativa
MADTKEQVFDIPKTCRAGVVVNEGPDFTVEVRDVPVPEIKDNEVLIKLNATGICHSDLHFMLNDWALPKMSDLGVQCAGHEGAGVIVKVGANVKTLKPGMRAGLKPVQDTCGSCELCRNGNECYCSNAVMTGLMVDGSYKQYVVSPERYTTVIPDGVSDIIAGPIMCSASTVYTSIKESQLQPGDWAVFPGAGGGVGMQGLQLAKAMGLRPVAIDTGADKKKLCLENGAETFIDFKEVDKMAEEIIKICDGIGAHAVFVTAVQSYPQSITYLGSRVGGKVMCIGLPPAGTQHIDVDPNQMCFRKQSVQGTLVSSMGDVDKTLQFAQRGLLKPICTVYPLSKFNEVVQKLRRGEIAGRAVIDFNTE

SEQ ID NO: 38475 - protein, 458 aa, Oryza sativa
MGKEKTHINVVVIGHVDSGKSTTTGHLIYKCGGIDSRTIEKFEKEAAELGKGSFKYAWVLDKLKAERERGITIDIALWKFETPKYYVTVIDAPGHRDFIKNMITGTSQADCAILIIAAGTGEFEAGISKDGQTREHALLAYTLGVKQLIVAINKMDTTKWSEERFQEIIKETSSFIKKVGYNPKHVPFVPISGFNGDNMIEASPNCPWYKGWEKETKAKATGKTLLEAIDAIDTPVRPSDKPLRLPLQDVYKIGGIGTVPVGRVETGVIKPGMVVTFAPAGVTTEVKSVEMHHEQLPEGVPGDNVGFNVKNVSVKEIRRGNVAGDSKNDPPKGAESFNAQVIVLNHPGQVGAGYAPVLDCHTAHIACKFAELLEKIDRRTGKSVESSPKFVKSGDAAIVKMIPSKPMCVEAFTEYPPLGRFAVRDMRQTVAVGVIKSVVKADKGAGKVTKAAQKAAKK

SEQ ID NO: 38476 - protein, 687 aa, Oryza sativa
MASGHLVAVAVVIGSLCVAAVGQGNNIVLPFAPSCSTAGNYTGDSQYKKNLDQLFTTLSAGAIAGDWFNTSSVGTGADQVFGLIMCYADRNSTQCQECLAGAPAGIVQVCPGSRTADANYDACLLRYSDKSFFSELTYGADPTIAWNVYFTPFVDNMTTMNDTRRRLMSQLAERAGDTKLRLDNGSLPYADSKLGTSALYGLAQCTRDLAASECRRCLSGYVDDLSNTFPNNSGGAIKGYSCYLRYHLWPIDITLPPPPLPPPSRPPSSSPAPPSPPPSVSGGLVAGSTVGAVSFLVVLGVSIWLLLRRRRKRAGEARELEMDEGDFFDDEADDFEKGTGPKRFHYGELAIATDDFSDEHKLGEGGFGSVYRGFLKELNLDVAIKRVSKSSKQGRKEYASEVRIISRLRHRNLVQLIGWCHGGGELLLVYELMPNASLDTHLYSANAGVLPWPLRHEIVLGIGSALLYLHEEWEQCVVHRDIKPSNIMLDAAFNAKLGDFGLARLVDHGRGSHTTVLAGTMGYMDPECMITGRANAESDVYSFGVVLLEIACGRRPIMADHQSEVDEDRIHIAQWVWDLYGNGRILDATDRRLNGEFDGGEMEAVMVVGLWCAHPDRSLRPTIRQAVGVLRGEAPPPSLPARMPVATFLPPVDAFNHTSSSVATGSSSASTDTARSSRTTETSSLLK

SEQ ID NO: 38477 - protein, 425 aa, Oryza sativa
MAAMMAVTTMVTRNNAVGGGAVAVVDRKGWFVPEVSFPWSSVEGECINSSSKRLEFPRRTAAPPLFASVGLSLPSAAKGRDNCDVARQLAAAEAEEAAGKKRQGRKMKGGGGLLSLRKVRVKIGNPHLRRLVSGAIAGAVSRTFVAPLETIRTHLMVGSCGAGSMAEVFRWIMRTEGWTGLFRGNAVNVLRVAPSKAIEHFTYDTAKKYLTPEDGEPAKIPIPVPLVAGALAGVASTLCTYPMELVKTRLTIEKDVYDNVLHAFVKIVREGGPGELYRGLALSLIGVVPYAATNFYAYETLRRLYRRATGRADVGPAATLLIGSAAGAIASTATFPLEVARKQMQVGAVGGRQVYRHVLHAMYCILRGEGAAGLYRGLGPSCIKLMPAAGISFMCYEALKKVLVEEEAAPELEAECAEEIKEKVA

SEQ ID NO: 38478 - protein, 300 aa, Oryza sativa
MANTGLSIPMVNGATIHLLPGFRFRPTDDELVIKYLYPRAFHVPLPCAIITDVDIHHHNPWDIVPVAEREKGKHFFTRKEVKYPGSRRSNRVAGNGFWRAAGSEVPIYYKPEGAANDMLVGMRRTLVFHYGKSRSAERTEWAMHEFQLAGAGLLPHPMMRHATSNGSEPPCGCLEATIAKKSDGLSATLRAKRDSAPLMRIMVEPDSSWVICCIYKKRQRAPPVVIPPVIGDVGEAIIPHAIGDAREGQLHFIDFLGQPARNDPSSPHSCTIDPSSLEEGSDESAGDGEDKDGDGMNEAN

SEQ ID NO: 38479 - protein, 463 aa, Oryza sativa
MRHAALLGVGFALCLLRAQAQPYDYPTAKPSTTWANTDAALRHHVAYTDGSVARAALLRLNPARLGPSFAFGFFCTNHRAGAPCADFLLGVAVVYCNSGAGITAVTTGIPQVVWSANRAAPVGDGATAELTADGDLVLRSPGGKVLWSAGAAGRGVSGMSINSDGNLVLFDGSNRTVWQSFDHPTDTLVVGQSLKQGARLTANASFDNSSEGRIYLAVADDGLAAYVDAKPPQRYYVLGYSKNAGAYAAYTNGSLAVLDRPGGQQLATVQLPAVAAGTVQYMRLEHDGHLRLYEWRSNGMRWEATGDVLHPYPGDCAYPTVCGAYGVCTDMQCSCPDAANFRAVDFRRPNRGCVPTSPPAPPATCRSRRARHRLVSLRDTAYFNSHDTSMRTLERVGEAACKAACLGDCACMAAQFVYGFDPNDGFCYLQSEVLSLETMQPEVFHYNSSMHIKIAQGRLPRRF

SEQ ID NO: 38480 - protein, 530 aa, Oryza sativa
MPSAMNMITAAFRRYLGCFSAGSTHRRRRGAAEPVLAGSLTLPAAAGGDNAARRLDVVVPAPSRPDGVTVSGEDFIGSLPGHVRSAIVSRLPVADAAARTGVLSSSQWNGLWSSTPLVFQDSDLILAANFTSVAPVAATVSRVIENHPGPFHTVTLTSYFPESERDTFAGWIRAVAAKGVRDLTLHNIPWSGLHVLPADLLQCCAALERLRVCVWRFPATAGVLHPGGGDGDGAAPPSFPRLRELVLNRSAIEEADLENVVACSPALRTLVLAFSRGAPGRVRLASGSLRCVVLCQSLVDELAVVAAPLLERIVLRWCASGTHHGHLMRIRISRASSIKAIGYLKPTCHGLHIDATVIKPGITASPDEVAVPSVKILGLQVRFGVAAEATMVSCMLRCFPNVETLHIMPIEDPQSTQLDDFEFWEEINSVECVRSSIKKVVFHGFSWKNSEIAFINSIAEGGLVLEKICIFQSRHGAAPDDDELNAKLSMVASLNIGLGRTEIIFSGEDPTWCYRAAADLSRADPFDCCR

SEQ ID NO: 38481 - protein, 49 aa, Oryza sativa
MVQGRHQICRLLFLRRRPTARPPRPRDSSSSSSSLLGYHADTQVPRSNT

SEQ ID NO: 38482 - protein, 22 aa, Oryza sativa
MQCTRGKTERPREPLLQLDTEH

SEQ ID NO: 38483 - protein, 351 aa, Oryza sativa
MAAPPCPPRRPISAPCFLLCFLLGFVAGLFPFAHRHLHLDLHLPLPPPATAILVREDPPSVVVDVDTPLPAAAEERKLLLVVTPTRARPLQAYYLRRLAHTLRLAPSPLLWLVVESGAATRDTAALLRGCGVMYRHLSSPVPDAPQDRPRRRGRRQDRPAVDSRARQRNTALDHIEHHRLHGIVYFADEDNVYSLDLFYHLRDIRSFGTWPVATLPPGKSKTILQGPVCEGSRVVGWHTTDRSKNQRRFHVDMSGFAFNSSKLWDAKNRGHQAWNYIRQLDTAKEGFQETAFIEQLVEDETHMEGVPPGCSKIMNFHLHLEDKNAIYLNGWQTTQNLDVIIPLKKEARPLL

SEQ ID NO: 38484 - protein, 182 aa, Oryza sativa
MCDLVARTGRHQQRYEHGRRLVAGCIPFRYKDNNDETSDDGHKKLVEVLMINSQSGSGLLFPKGGWENDETVEEAAAREAIEEAGVRGDLVQLLGFYDFKSKTHQDKFCPEGMCRAAVFALRVKEELASWPEQSTRKRTWLTLSEAVERSRYPWVREALTTGFTTWHENWSNGDDHVDPSSR

SEQ ID NO: 38485 - protein, 335 aa, Oryza sativa
MSSRMAGATLLRHLGPRLFAAEPVYSGLAASARGVMPAAARIFPARMASTSSAGADVKEGAAEKLPEPAATAAAAATDPQNKKAVVSYWGIQPPKLVKEDGTEWKWLSFRPWDTYTSDTSIDVTKHHEPKGLPDKLAYWTVRSLAVPRDLFFQRRHASHALLLETVAGVPGMVGGMLLHLRSLRRFEQSGGWIRALLEEAENERMHLMTFLEVMQPRWWERALVLAAQGVFFNAYFVGYLVSPKFAHRFVGYLEEEAVSSYTEYLKDLEAGKIENTPAPAIAIDYWRLPADATLKDVVTVIRADEAHHRDLNHFASDIQQQGMKLKDTPAPIGYH

SEQ ID NO: 38486 - protein, 347 aa, Oryza sativa
MPFGRLSPVSESVSETDTESLYSGRPISGDLQPRHLNFSRPKPQDLPSSRNIQRDIHYAASTSSASSSTTAGSTRGAGAFYEPSTHDYPTEPRFSDDSDGEGEDGDSIAPSTRSAGSDLVWDNAAGELRSQQTGLRRNGDFDAQHYAAPTPRRPGNRTFLSDSSVVDPELPLIPELPGDVPSSHIIAQQRQKQHQQQQKEKKQREYLKQKEDFKQRDVSKQQEDLKPTYGNFQVESAPRIVKSTSVEQQIERANSLSSIHTANTAQTQTSLGRVAGWEDSRSNHTPSESGDKKDWKSSEFDISGLSEKKLAKLKKKGINPQLYMEMKAARGGKGKLVGPLVGNTYIG

SEQ ID NO: 38487 - protein, 246 aa, Oryza sativa
MAVRAAFENSNEVGVFATLTNSYALVAVGASENFYSIFEAELQDVIPICHTTIAGTRIVGRLTAGNRKGLLVPTSTSDQELQHLRNSIPDSVKIQRIEERLSALGNVICANDHVALVHPDLERESEEIIADVLGVEVFRQTIADNVLTGSYMSLSNQGGIVHPKTSIQDQDELSSLLQVPLVAGSVNRGSPVVGAGMVVNDWMAVTGLDTTATELSVMESVFKLGEGNASGAINTTHKEAMVESFY

SEQ ID NO: 38488 - protein, 425 aa, Oryza sativa
MGAAISCCGCPPRRRAGAADDAAAGLTDDILAEIFLRLPPHPACLRRVSLVSRRFRRVVTSRRFLRRFSDLHGGAPGAPLVGFFSNHNHGPWADTRFIPVGVDGTGDSRRSRCRSRRATAARNPGGVLALGDDAEWHVIGCRGGRVLLLSPTRLRLLVLEPMLGRRQYIPAPPAPEYRPAYFSNAAVVSAAGGHDELRLRPHLFRVVFVSSNAATKRSTAFVYNSATFRWTKAAATEMSSVIDGRPSVLIGQTLYWHLISHGLVAFNLETHELHEILVPADAFDDVHDANLSIVVPRSGGGGVGLAAVSGYILQLWTLRDYTHGASTWDLRNIVVLDALLPLRNARLPPPPQLPASAKPMPLVWLMALDEDENVGYVWTAAGVFAVQLDTMNYHKVLGPVCRGMQFVFPYKSFFLPQGGSAAMIM

SEQ ID NO: 38489 - protein, 631 aa, Oryza sativa
MGNGITKNPCFSGDPYAAAVASDPLPDDSHGHSFTYVPSSAAAFDHSPRSAAASSETSYFSLSGAAISANPATSASMPSFRLYNELTWPPSTACTFESSRSFAAAPLIQAAPPRLSMSGPLHATSGRFSEALGSASTASDRFSDHPFMDGMLDRASSASSTARLMPSFSHLMSEPRVAQSGLSNERSLIRSLVRVASKLRFGVPLSGRRSNGPAEPTTKSDGDYRSTPKGNVEWAQGMAGEDRFHVAVSEEHGWVFVGIYDGFNGPDATDYLFANLYVAVHRELKGVLWDDIQGVDVVTDNLPDPALANATHLCFLDAGGVGGGGDDDPDAERKAKRGRIERNADDDGASSVHRDVLKALARALARTEEAFFAAAEEHAAQSPELGLVGSCVLVMLMKGKDVYLMNVGDSRAVLARRREPDFKDIFFRPDQDLQLLKAEVMRELEAHDRNGLQCVQLTPEHSAAAEEEVRRIRSQHLTDRQAVVNGRVKGKLSVTRAFGAGYLKQPKWNDRLLEAFKVDYIGAEPYISCTPSLRHHRISSNDRFLVLSSDGLYQYFTNKEVVDQVAMFTAEQPDGDPAKHLVGELVLRAARKAGMDCRRLLEIPHGDRRNYHDDVSIIVMSFEGRIWRSSV

SEQ ID NO: 38490 - protein, 120 aa, Oryza sativa
MAQGRGSAAQGLALGLLLVCLLVGSDVAAAATYNVDWSFGADSWSKGKNFRAGDVLVFSYDPSVHNVVAVDAGGYSGCRESGTKYSSGYDRITLGRGTSYFICSFSGHCGAGMKMAVTAS

SEQ ID NO: 38491 - protein, 195 aa, Oryza sativa
MAEIRRKLVIVGDGACGKTCLLIVFSKGTFPEVYVPTVFENYVADVEVDGKHVELALWDTAGQEDYDRLRPLSYPDSHVILICFAVDSPDSPDNVQENWISEVLHFCQGLPIILVGCKKDLRYDQKIIEELRKTSQKPVSPEEGEEIRKKIAAYKYLECSAKTNEGVREVFEHATRAALLSRSTRGKSHKKCLVL

SEQ ID NO: 38492 - protein, 489 aa, Oryza sativa
MCPQPDEPQALGANGVHQNGNGTTNGDHEGYRAFKTDQSKKVQSSNPYAPVGDFLSNVSKFKIIESTLREGEQFANAFFDTETKIRIAKALDDFGVDYIELTSPAASEQSRLDCEAICNLGLKAKILTHVRCNMQDAKLAVATGVDGVDVVIGTSSHLMEHSHGKDITYIKNTAIEVIEYVKSQGKEIRFSSEDSFRSDLVDLLTIYSAVDKVGVHRVGIADTVGCATPRQVYDLVRTLRGVVSCDIETHFHNDTGCAIANAYCALEAGATHIDTSVIGIGERNGITPLGGLMARMIVADRDYVKSKYKLEKLKEIEDIVAEAVEINIPFNNYITGFCAFTHKAGIHAKAILNNPSTYEIIDPKDFGMSRYVHFASRLTGWNAIKSRAEQLGLDMTDAQIKTVTLKIKAMADVRPLAIDDADSIIRTYHYNLNATQEKPLLQLTEEEKEKFAKAERELAQEDEKKALERKADDEADVPRAKKQKTETVA

SEQ ID NO: 38493 - protein, 614 aa, Oryza sativa
MDQARISFFPDGLRVMIIDDDAKAVRRATATLSQLQYAVVATHSTASAGLRALSGDNVVEIQAILCDVHKVVSSGFDFRRVVESELRIPVIYLLSKMEEEDMVAGEDAEFLNHLLLTATYIVRKPLNPTVMARLWRVVAWRMYCLEERIQANVAANAGAGGEDDDDDDDVVIVEEPQVHFKVVRRTSGGSRKRQLTINVVDDGNRGSGSGGGGGGGADANPTRILQHITSNLQEFRTKHQKKDMAIERPLISSDSMFLKAILPTLKISPCNPLTLTGGIGSSSVAAEAFAGGSSSAAPLQIPVFQQQSTGNGNTVISFSNNASPMAMRAPTDNTMISFNNVSAAPVANAVISFSNISRSAAMQAPAARGQHLSGDVQQLDFPQQKLYFGPFSYQGPPPPSMHNHINLLPPTSSPVTCSMDKGKVPIIELPYGMPVDDFLVSQTTYGGAGPSIGATDAAAAAYPYTDAPSNNVATGCLMVPPMGPAFSITEPTVVAQGEGTGTGVDAGTSEKNAIVEAPNNPAPLMVLDQVAADAAMDVQEDIMFSLESLLGPDYDLLPMEDVSAPDTAAAGDAAGGSLDGEEGGMDIGWDLDLDDILVENVNDFAFLDNLAGSE

SEQ ID NO: 38494 - protein, 293 aa, Oryza sativa
MNSFYYDSVLDAFKKPDVTIPPIPPHLEHPIVSTQWGHTYLWAVFFIMAGFSVLFFISSQRASYRYRLMHTTTFFITAIAALSYFAMATGVGKTLTTIGEHRHGAPREFFYARYLDWALTTPLLLFDLTLLAGLPVAEIIVLVLADEVMIVTGVIAGVHPTKTGKWGFFTFSCVAFAWVLFQLVTSGRSTAFLRSPKVGGLYNQISLALVVVWTLYPVAFALCEGTGKLSPDKEILFFAILDVIAKPLWGAWLLIATPDEGHVLVPESLCAPAGTPASGGYGAISQEPRAEDA

SEQ ID NO: 38495 - protein, 396 aa, Oryza sativa
MPSSAASRRRRHRHRHAGKPDYPPSELPDILRVRELRLAPRASSLPNPNPHKPQPHPTIPSSTTTTTSGRRRNRRGRGRGRGRKEGDARDWAGGLPLDAILAIFHKLDHIEILMGAGQVCRSWRRAARDEPQLWRRIDMRGHADLSFELNLFGMAQAAVRRSAGQCEAFWGEYAADEKLLHFLGERAPSVKSLRLISCYDILNEGFSAAIKKFPLLEELELSLCSNIGESNVFEIVGKACPQLKRFRFSKDCFYSFEDNEYEMDEEALGIATMHELRSLQLFANNLRNEGLAAILDNCPYLESLDIRHCFNVNMDDTLRAKCARIKTLRLPYDSTDDYDFQVQKPISLADFYSDSDDDCVYGGPDYILDSDEYDDYCDPYRYLDGVYEGVASGRAR

SEQ ID NO: 38496 - protein, 110 aa, Oryza sativa
MSSCAPSRPATGTSTRRPCTRRRPSSATPWRRRCAPASSRRGTSSTSRPSYGLPTRTPAMSCHLLGVRSGEYNCNLFCWTSYICSCVAPGSLIIRVILHVQLRSYSNQSI

SEQ ID NO: 38497 - protein, 772 aa, Oryza sativa
MVQSAVLGFPRMGRLRDLKKANEAYWGGKLSREDLLAEGKRLRLGHWKIQKDAGVDVIPSNDFAFYDHVLDHIQMFNAIPERYSKDNLEPIDQYFAMGRGHQKDGIDVPSLEMVKWFDSNYHYVKPTLQDNQTFTLSSDPKPVREFKEAKEAGITTRPVLVGPVSFLALGKADRGQSVDPITLLEKLLPVYEQLLKQLKEAGAETVQIDEPVLVFDLPSKIKEAFKPAYEKLNALQGAGGPQIALSTYFGDIVHNLDVVDSVLKNTYALHVDLVRNPEQLTKIIEHLGEKQILSAGVVDGHNIWKTNFKKAIEVVETAVQKLGKERVLVATSSSLLHTPHTLASEKKLDEEVRDWFSFASEKVVEVAIIAKAVTEGPDSVREQIEANAKSMQSRATSKRTNNPDVKKRQDEVTAEMHNRKSVFDTRYAQQKEHLKLPQFPTTTIGSFPQTQDIRIQRNKFTKGEITPEEYEKFIEKEIQDVVAIQDELDLDVYVHGEPERNDMVQYFGERLDGYVFTTHAWVQSYGSRCVRPPIIVGDISRPAPMTVKESKYAASISKKPMKGMLTGPITCLRWSFPRDDVHQSVQAQQLALALRDEVVDLEAAGIYVIQVDEPALREGLPLRSGSEREKYLSWAVDSFKLSTAGVQDSTQIHSHFCYSEFQDFFHAISALDADVLSIENSKSDAKLLKVFIDEAYPRHIGPGVYDIHSPRVPSEQEIKDRVEEMLQYLKPEQLWINPDCGLKTRQWKETKTALTNLVNAAKFFREKYSKSS

SEQ ID NO: 38498 - protein, 184 aa, Oryza sativa
MPRVLEPKPSPPPPSPLPPPPEDYWSPTAVTPPEPTKPKPPPPSPPPPPQQPSQRYWTPPPAITPEPAKPAAGKPTSSSPPSTKDSPRPPLPAPSPAANGGDPRLPATTPLSKQKRKEEKREKEAQEMGRAGAAAAEEERPPATATASGGGRREAEERRLMVNMAAAAAVLVGIIVSVWRTLSS

SEQ ID NO: 38499 - protein, 330 aa, Oryza sativa
MVRPARVDSLPVAALEETARLVRRAAPKRRVAELNIEAQQASGARRGGCRRHGGRGGGVLGADGVQVLTEERHGGGVLGADGVQLLTEDQHACGYLSDAEWHPGGCFVPESEDQACGGIDNSELPPDSGFVHVSQDEASNDVPDSDLPPDGGFVPDSEDEASGGVDDSELPPDGCVVPDSEDEASSGGDDSELPPNGCVVPDSEDEASGCVHDFELAPDGCVVPDSEDETSGGVHDSELPPEGCIVPDSEDEASGGGVLNLEQKPEKGIFANLEEQHMDGIEQLVGGEEVAGLQDDVGVSAGDGGVDEFAEIRESMLRILLPLYFTIPHK

SEQ ID NO: 38500 - protein, 734 aa, Oryza sativa
MAVLMLVWCVSVFLLLPSATAQATTFTSNVDGKEFTTFSFPKFDKPLLQLPDNLTFSGNATIAQDGLQLTPDSGNRPEIFLVNQAGHAFFTAPFVVWESKSSSSSSNSAAAAADGKYVASFSTVFKVNLFRSNLNKTVKGEGLAFVVASSNARGPPVGSHGGFLGLTNASTDGNATNGFVAVELDTVKQRYDIDDNHVGLDVNGVRSTAAAPLAPLGIQLAPRNTTVDDGICFVWVDYNGTSRRMSVYIAKNESKPSAAVLNASLDLSTILLGKTAYFGFSASTGAATYQLNCVRMWNMTVERLHDGTTTTATKLAGTSGWKLAVGVLCGVAVVLGVVAALYIRKRRRRSGGDPSSAFNAAIDFRKIPGLPKEFDYMELRRGTNNFDEKMKLGQGGYGVVYRATVVGEDGRSTDVAVKQFSGANTKGKEDFLAELRIINCLRHRNLVKIVGWCRQNGRLLLVYDYMPNGSLDRHIFGEPGAAALDWKQRYNVVAGVASALNYLHHEYDQMVIHRDIKPSNIMLDSAFNARLGDFGLARALESDKTSYTDMAGVTGTLGYIAPECFHTGRATRESDVFGFGAVVLEIVCGRRVSCSDLPGWLSLLEWVWRLHGAAGGGGILEAVDQRLAGEFDEVEAERLLLLGLACSHPNPGERPRTQAILQILTGAAPPPHVPPSKPAFMWPAMPVALDGDDDDSETPTSRSSMLLTSSSTGWTKIFQVSKEHDVAEKDVAAE

SEQ ID NO: 38501 - protein, 294 aa, Oryza sativa
MVGKNVLAAAAVYFALTSALALPKDKPDDIKSKHDDDDHPRTGLPHQPDDKDCSTKAPYPTGDSSNTDFGTGIGIPTGYFPTGSGFVTGVTLTTEDSATPTATDDSASATITDDSSLPVITDASTLGSTDDSSPTATDDGASATATRIAKRAAHPDKGKDDPTSSPSSSRSSDDDNPSKTSDDNGKPTASTSGVEDNTSRTSDDNSQPTAPPSGDDNGSGTVTITITEAPTVTITISTSVPTTSSTSRSKGQRGKKSKTSSRSLTTSDSSTSSTSTTSSTSSTSSVEDSPTPAA

SEQ ID NO: 38502 - protein, 382 aa, Oryza sativa
MRCWRRLAAAGALLAALCAALALAVAEHRRPDTTASSSSRRPLRFASGGGFKVALFADLHYGENAWTDWGPRQDAGSDRVMAAVLDAEKPDFVVYLGDLVTANNLGIPNASLYWDRAISPTRGRGIPWATVFGNHDDMPFEWPPEWFSPAGVPPLHCPPPSMSDSDCSFRGTPRLELMTSEVIRNGLSYSSNGPKDLWPAVSNYVLQVLSQKRDDPALLMYFLDSGGGSYPEVISSAQVQWFHSQSQFLNPNGRIPEIIFWHIPSTAYAKVAPKAKSEIRKPCVGSINREEVAPQEAEWGMMDALVKRASVKAIFVGHNHGLDWCCPHEKLWLCFARHTGYGGYGNWPRGARVIEISEQPFSIQSWIRMEDGTTHSDISLSS

SEQ ID NO: 38503 - protein, 365 aa, Oryza sativa
MSGLLNSNLNNSASNLQDSSGRPFTASFSGQSGSVPGAFHHSGLHNIHANFNLPNMPGSLAQRNAAMSGLPSSGVQQPGGSISARFASNNLPVGMSQLPHGHSGVSSRVNVGGGPAFSSSLNIGGTIQGLSSNLGAGGNRNSVPGMSVSPALGNLGPRITGSVGNIVGGSNIGRNISSGGLSVPSIASRMNLSGNIGSGGLNVQGSSRMMNGILQQGSPQMMNMMGSSYPTSGGSLSQNQIQGGNNSLGSMGMLHDANDSAPYDMNDFPQLTGRPSSAGGPQGQYGSLRKQGVGVNTIVQQNQEFSIQNEDFPALPGYKGGYSYIIVERSLTFSEGVLINYTWCIMQYQLHDCYNLLSQLSTGPR

SEQ ID NO: 38504 - protein, 274 aa, Oryza sativa
MTAGGDRLTRPFVDEIVNANQNAADCLQPMGQTSENVGADFNITREQQDRYAAESYRRAEAAQKAGWFEDEITPITVKVKDPKTGEGKDITLTKDEGPRWGTTFEGLNKIRPAFPDFGDKSTGGNSSQVTDGAAAVLLMKRSKALELGQPIVAKFVGATVAGLAPRIMGIGPSVAVPKLLTKYNLTIDDIDLVELNEAFASMAVYCKDALKIDHAKLNVRGGAIALGHPLGCTGARQIVTGLSECRRRKAKVLLTTMCIGTGMGMAGLFVNEQL

SEQ ID NO: 38505 - protein, 136 aa, Oryza sativa
MEEEMVAVVMSCECCGLEEECTGEYVGGVRAYFGGRWLCGLCSEAVKYEAGKSSPRAPVDVEEAVRAHMAFCRMLKRGGPAERVAEGMCQMLRTASWKQRRRASGSSSSSSSPSPRAAPERHHHHRAPSTLSVQLI

SEQ ID NO: 38506 - protein, 585 aa, Oryza sativa
MSPHAVMANVPEKTWWKEAVVYQIYPASFNDSNGDGLGDIPGIVSKIPYIKSLGVNTIWLSPIFASPQHDMGYDISDYRAIHEPYGTVEDVQSLIDQLHSNDMRLLMDLVVNHTSDEHAWFKESRSSKDNAKRDWYFWRDPKYDSEGNRKEPNNWKSIFGGSAWHFDEQTGQYYLALFLPSQPDLNWACEEMRQASYDDIRFWLDRGVDGFRIDSMNLMSKHPDLPDGKIVDDEPYQSGAEFFASGPKMHDYIREMRAIFDEYDAMTVGELGFTKDEQSVSEYVAKDRHELNMVFTGDIVDMDFGPDGKYGRDDFHPRKIRNITNMWQRVMPKVNGWNSVYLDNHDSGRSLSRYASDAPEHRATAAKMLATYLLTLSGTPFMLAGQEIGTANLGKDYGTEAYIDVEGRNHYDAVLKTRGGDHSKMGDVMREIQLKARDHGRLPMQWDSSANAGFSAEGTTPWMTINKDYVDWNVASQIDVPDSVLAYWRKMLALRKEHTDLLTYGSYKPLSELDTGEWVLGYERESFETGKKAVVLLNFSDKEQRVHVESPSREEYEVLVSNQEAGIKGGYVTLMPYGAVVLVSK

SEQ ID NO: 38507 - protein, 520 aa, Oryza sativa
MDYRALMTMEKVLVQMEKDGVDSRMLDLGADCMCKLLVASLPDPPVYPDAVLSANDDDDLSGTGAEDRIGALPDDLLGGVVSRLPIKDAVRTAALSSRWRRIWLSAPLVLVDGHLLPPGEEAGQLALDASGAVAAAVSRVLEAHPGPFRYVELTSTAMGARARRGDLARWLHLLAVKGVRELVFVNRRRPLDVALPATVFALAPLSRLYLGTWKFPDTAALPRGAGFPHLRELGLYCVAMEDRDLDFVLANSPVLECLGIYYSQRQIVLLRLASHSLRCVQICMCIAEDIAVVDAPRLERLLIWEMFEDDNHATRLSIGHAPNLQLLGYLRPGIHVLENGNTIIKAGTKASPRTIIPSINVLALKVRFEVRNEAKLLPSFLRCFPNVEKLHVKSEKSDEPVGRLNLKFWQEAGRIECLQSCIKYVVFHGYRGDRSELTFLKYILGSGQVLQEMVIVVANGMFSTQDEVGEKLVKPLSSVKMASGDCNITVVEGTVHDEEDSCCLRDAFDFSIDDPFDRYL

SEQ ID NO: 38508 - protein, 196 aa, Oryza sativa
MAYMVDERDEVAEPAHGAPHLRHVASAVTGGGGRRLLLLRRRRRRRGVAGGGDDDGLGEQRVGERLLQLVHALRQRVLEVARLLLEPLHVGGLPLRHRLQLRREHPDHLGGAEPGDPEEEPLGAGAPHAGHHEEHVAPRRLTLRREQPVVVRQRRLHHRPELRPLRRRLQRRPQLRRLPPLLLHPLRVLHLERHHT

SEQ ID NO: 38509 - protein, 308 aa, Oryza sativa
MAVGTVPDSQDLPRRYGGRVTTFVVLSCITAGMGGVIFGYDIGVSGGVTSMDGFLSMFFPEVYRRMKGTSVSNYCKFDSELLTAFTSSLYIAGLLTTFLASSVTARCGRRPSMVIAGSAILAGSAIGGTAVNVSMVILGRVLLGVGLGFGNQAVPLYLSEMAPPLHRGAFSNGFQLCVGIGAVTARLTNFFTQKIRQGWGWRVSLAVAAVPGGLLTLGALFLPETPNSLLQQGRDKRRVRVLLTRIRGVSDVEDELEDIVAANSDKANSSRGLQMIVTQRQYRPQLVMAIMIPFFQQVTPHPLFSLDM

SEQ ID NO: 38510 - protein, 331 aa, Oryza sativa
MQIMRLFSLIIAFRSVEARMPEMVRASTAISAGRVVVVAGAAALVVVLLCAAPAPAAVEAVPAGAEVSEFPGFDGDLPSKHYAGYITVGHQPLKRHMYYYFATSERNSTTDPVIIWINGGPACSGSSAFLHSIGPLKIEGPMIHARDEPRTKLNPFSWTKMSSVLLVDSPAGVGYSYSENEDDYVTNDTSRVLDLYDFLSKWFSEYLEFLSNPFYIAGCSYSGVIVPVLAQEILKRNEDNGRIKINFKGYSLCNPAVDVEIENNAFVPYAFRMGLISDELYQNLVSTCNGKYWNNKGPSCLANLEQFHKKPMRNMILVRCLSSFPKAPSMV

SEQ ID NO: 38511 - protein, 537 aa, Oryza sativa
MAAVSPPTPQQQQQRCVVEVREGVELTEKEERIFRRLLDVVRHFGLGTQLRVAGGWVRDKLLGKDSTDIDIALDNMTGQNFCEKVNEYSELLGEEQKGIGVIQCNPDQSKHLETARMLIFDIWIDFVNLRSEKYAENSRIPTVEIGTAKEDAFRRDLTINSLFFNINTNTVEDLTGRGIEDLKKGLIVTPLPAKATFLDDPLRVLRAIRFAARFNFTLTEDLKDAASDEKVKSELGSKISKERIGHEVDLMMSDKHPVNAMCYIRDLGLFYVVFAFPEKPDPPVPDKCDRLCVSHIEVAWNLAHSIGCSVFSGGSDSKSQDEHRRLCFYSALFTPVRNTIYLDKKSKKIPVTNYIIRDSLKLKASDADTVVNVHAASEKFAELINLLESNENLTTVKEKLDDEYLEIPTDSVKRVLAGLILREIKDFWRVALFICTLTYPEVSSGGDSLGQPDELHQRKEKYTRAERLITELELDGVWKMKPLLDGKAIMGIMQVKGGPLIGKWQQRLLKWQLAYPRGTTEECIEWMKQSQSKRQKV

SEQ ID NO: 38512 - protein, 766 aa, Oryza sativa
MQNPNGTILQLYHAGRLAAALRAFESLPSSSPASAAAAPAPLTAATYAALVSACSRLRSLPQGRRVHRHLVASSSSSPDAQLAGNTVLGNHLITMYGRCAAPDSARQVFDEMPARNPVSWASVIAAHVQNGRAGDALGLFSSMLRSGTAADQFALGSAVRACTELGDVGTGRQVHAHALKSERGSDLIVQNALVTMYSKSGLVDDGFMLFERIKDKDLISWGSIIAGFAQQGFEMEALQVFREMIVEGSHHPNEFHFGSAFRACGAVGSWEYGEQIHGLSIKYRLDRDLYVGCSLSDMYARCKNLDSARVAFYRIEAPDLVSWNSIVNAYSVEGLLSEALVLFSEMRDSGLRPDGITVRGLLCACVGRDALYHGRLIHSYLVKLGLDGDVSVCNSLLSMYARCSDLSSAMDVFHEIKDQDVVTWNSILTACAQHNHPEEALKLFSLLNKSEPSLDRISLNNVLSASAELGYFEMVKQVHAYAFKAGLVDDRMLSNTLIDTYAKCGSLDDAMRLFEIMGNNRDVFSWSSLIVGYAQFGYAKEAFDLFSRMRSLGIRPNHVTFIGVLTACSRVGFVNEGCYYYSIMEPEYGIVPTREHCSCIVDLLARAGKLTEAANFIDQMPFEPDIIMWKTLLAASKMHNDMEMGKRAAEGILNIDPSHSAAYVLLCNIYAASGNWNEFARLKKAMRTSGVKKSPGKSWVKLKGELKVFIVEDRSHPESEEIYAMLELIGMEMIKAGYVPKHSWKHAIVDHIDSDLFNEEMLAEYG

SEQ ID NO: 38513 - protein, 299 aa, Oryza sativa
MESPPHATASADEMPSIWKEQHAQDAPPGFVPPMGPGEVAAVESLLGYEFRDKALVEEALPHGSFYYPYRPGVTYERLEYLGDAVLTCVVSREVFLTYGQLQPGPLTRLRAANVDKEKLARVAVVHGLHHFLRHKAPNLDGQITDFIEELSMYPIHSNGLLDPPKVLCDVVESLIGAIYCDSNFNQEIVWQVFQKLADPLISLETLGKHPVSELFEFCQKTRRGVKIVKDEWDKNLTVEVLIDGEMVGRATYAQKKEIAQNRAAKAALDKLKETLGQSQTEPMSAEVSEQFNKIDLTGS

SEQ ID NO: 38514 - protein, 328 aa, Oryza sativa
MDPVTAAAAHGGGHHHHHHFGAPPVAAFHHHPFHHGGGAHYPAAFQQFQEEQQQLVAAAAAAGGMAKQELVDESNNTINSGGSNGSGGEEQRQQSGEEQHQQGAAAPVVIRRPRGRPAGSKNKPKPPVIITRDSASALRAHVLEVASGCDLVDSVATFARRRQVGVCVLSATGAVTNVSVRQPGAGPGAVVNLTGRFDILSLSGSFLPPPAPPSATGLTVYVSGGQGQVVGGTVAGPLIAVGPVVIMAASFGNAAYERLPLEDDEPPQHMAGGGQSSPPPPPLPLPPHQQPILQDHLPHNLMNGIHLPGDAAYGWTSGGGGGGRAAPY

SEQ ID NO: 38515 - protein, 406 aa, Oryza sativa
MDTLKVALSRVLVDYYPLAGRLRASNEHDGKLIIDCNSEGVLFAEGFLPGLTAGDFILGHAKPHKSWKKLLYKDEQSFVCTPPLVVQVTHLSCGGTILCTAIAHCVSDAFGAAHFLRAWARAAMSEDSELAHPAVAPCHDRRALAPRCTPRIAFAHPEYTAASGGDDASAVAEASSRLFAPPLSPVSVTFTAAHVARLKKLYAPSASPLEQCTSFEALAAHVWRAWVRALDPPASLPIKLLFTMGIRRLVKPELSGGCYCGNGFVLACAESTAGQLAASAPDAARLVQETKQRVDDDYVRSVIDLLEVRRGCLPDLAATFTISSLTRQGLEDIDFGAGTPVHFGPLTSEVYCLFLPVTGDPRGATALVSVPQAAADSFERCCHDGLDDVDVEDKNQLPNIGDGMAS

SEQ ID NO: 38516 - protein, 328 aa, Oryza sativa
MGEQQQQVERQPDLPPGFRFHPTDEEIITFYLAPKVVDSRGFCVAAIGEVDLNKCEPWDLPGKAKMNGEKEWYFYCQKDRKYPTGMRTNRATEAGYWKATGKDKEIFRNHHMLIGMKKTLVFYKGRAPKGDKTNWVMHEYRLADASPPQPPPPPSSAEPPRQDDWAVCRIFHKSSGIKKPVQVPMQMPMQMQMPVAHQVPAANYQQQMAMASASIIQVPMQMQMPSMSDQLQMLDDFSTGSLMAPPPPPPSYSTLPGFPLQINGGAQQFVGNPSMYYQQQQQQQQQQMDMAAGGFVVSEPSSLVVSPPPTWTLPSGSTDTYIHTYIHT

SEQ ID NO: 38517 - protein, 528 aa, Oryza sativa
MAPSSTSSSAPAGPQQSSHPATEPEHQTTESEKNTEYASIIPAPRTEDDQQGRLQLQRTVSSVSHHDMANVQYVATGDNDTIYNKFTPRRKMVIVAVVSFCSFLAPISSTTVLSAVPEVAKTFSTDGSIINVSNALYMLFMGLSPCFYGPYGNIYGRKWVSVASAALFTAFSIGTALSPNLAAFFVFRILTAFQGTAFLVIGSAVIGDIYKPTERATALGWFLSGTLIGPALGPFIGGIIVTFRSWRDIFWLQTALAGAATVFCFFLQPETIHKKRADELAGLPAKQRASKMWAWLNPFRVVRLYRYPNILLTALASASLVWNMYSLLTPIRYVLNPRFDLQTPLQSGLFYIAPGCGYLVGTFFGGRYADHVVKKYIQKRGQRVSEDRLRSCVFFLGGVIPACMIVYGWSVEKRVGGVALPVIMMFLQGVAQLFCFPSLNTYCLDVMQGRSAEVVAGNYFMRYMFAAAGSAVCLPAVRAIGVGWFSTISAGFLVAGASMTYATAVWGREWREGIEEKKAARKEGDGKV

SEQ ID NO: 38518 - protein, 750 aa, Oryza sativa
MVAIPRVAAARSLARQLARYNIRVGGISATPLRVAVAAVPTASSSRAPSSFRNFSISTHRSAAAAAAVKAPPAQDAAAQSAHDGSHQPTSELTEADLSRLVRQRNVGISAHIDSGKTTLTERVLFYTGRIKDIHEVRGRDAVGAKMDHMELEREKGITIQSAATYCSWKATPPTEKSSVSGDAADIESKDLMAKKEDFHINIIDTPGHVDFTIEVERALRVLDGAVLVLRAVSGVQSQTITVDRQMRRYSVPRISFINKMDRAGSNPWRVIGQIRNKLKMPAAAVQVPIGAEDDFIGLIDLIRWKAVYNEGHKGIEIRETDEIPAEYLELAKEKRAELIEQLAEVDDEMTEIFIEEREPTIEELAAAIRRTTTRCQFSPVFLGSAIKNKGVQAMLDGVCAYLPNPAEVPATAMDMSASATKKAAEEAAKAAGEDEEAAAEARRNAAPPVLPLSPASEAPLVGLAFKLEEGKYGQLTYMRVYQGTLKRGNLIFNARTGKKVKVPRLVRMHSNDMEDVEEIGAGEICAMFGVECSSGDTFTDGTTQLSMTSMFVPEPVISLAITPEGKESQNFSRALNRFQKEDPTFRVHVDKESNETIISGMGELHLEIYVERMRREYNVPCTTASRASLSARRSRRRPRSPTRTRSRRVVRVSSVVSWATSSPWRWTPRRASTRPSRTAWWVDPSPTATSLPVKKDSTMRSRRVRYRATLSRVFASFLRTVRRTVSIRPSLPSDSPLPARSARLTRRRTR

SEQ ID NO: 38519 - protein, 443 aa, Oryza sativa
MPPIPGMVHWHSLLARHAKSLKTAWIRASRALDAQLVRGSQAQLEPILVRNSNRHPLHKVARIRQSQSRWYSTARGSFEATVRHFSTAGSRPGSKFDRASLPKSRVSAQISQSSGRAPFASTLRPSLTGGTLGRTAGGYTLGSGRIGGARHFSHGPAAQAQVVQNVSQAVRAFFISGQKAQFGGVSPTTGEKRYKAVTALQDETGRKIRSIPQITPGSWVDFPINPTITALTPLNGLTGFNSNTSESVDHLNTDGLINVLSVDFSRALKGLAAVLNDLKRLSALGDLPITYQGASLRVHFPGCDSDTVERMCAELNITRGTVTQDEAFDAFAGTQIALLFPFAPSEDVSECESLFDYEPAPHKQSPLIHLEDMLTPSESAQDYSTHSDSGLEDVLADDPWLSDPSGFESIRSGSDLSDKGNPLEYQGIEGIYRFLEQCDAVRR

SEQ ID NO: 38520 - protein, 445 aa, Oryza sativa
MAIEKIQARMVLDSRGNPTVEVDITTEKGLFRAAVPSGASTGIHEAVELRDGDKNAWMGKGVSKAIDNVNNIIAPELIKSGLPVTSQKEIDDFLIKLDGTANKGKLGANAILGVSIAVAKAGAGEQGLPLYKYLANLSGVKAPYVLPAPAMNVINGGSHAGNALAFQEFMIVPTGAKSFTESVKIGTEVYHNLKKVINTKYGIDATNVGDEGGFAPNVQSADEALEILTEAIAKAGYEGQVHISLDVASSEFYKEGKYDLDFKNPNSDSSKWLTGKELADVYLGFIKKYPITSIEDPFDQDDWEAWSHLRANAGITIIGDDLTVTNPLRIKTAIEKKACNGLLLKINQIGTISESIQAAQLAQSDNWGVMVSHRSGETEDVTISDLVVGLGVGIIKTGAPCRSERTAKYNQLLRIESLEPSAVYAGIDGFTQGETAPKVITNKSA

SEQ ID NO: 38521 - protein, 207 aa, Oryza sativa
MEADDDINIFVKDMNANDGERHPRGEKRRRVGNDQKVKVDDREQHWCEERGEKRRRVGHGQQRSHQRDQERSHQHDQERSVERDQERSHQRDQEGSVERDQERSHQRDRHRSVKRDQHRSVECDQQRSRQRDQQQGQEKVVGSDHPSKEQRGREEFITISDIETSFEFDGRLVGKRLVDAKYDKRSTPKGHRRRHKGRRRRRSSSST

SEQ ID NO: 38522 - protein, 162 aa, Oryza sativa
MCSTAPFDELPTSESSSPLRCATSASRSLIFSAFSSEALMASSAWVSAAFLASIASASSYLACSSCSTVERSAAMSASCWLCMLASFVRSSSSMLALACSASASPDCSAADSSAALLCAASASWSFALASSAALLARSSSSRTFPLSFSFSTNSSLAFTSSC

SEQ ID NO: 38523 - protein, 577 aa, Oryza sativa
MADPDPTQAKVVIDEKEQKDVKEESPSSEAASAAPDSAGPTPISATTQFSPPTSPPDSPPDARKHSTIEEYYSSRPKHDKLGNPIPERRRPQGAMSSVFGTAKVRLPGDLGANDPRRPRSPAPNSLPGDLGPNDPRRPSSRNVSPAPSGHSRQGSDPLDSPGGRRILKDPKPPPAPESEPADSDQDGDADNDTDNESERGRQKKRPEPGRTTAGKSVNVRGDSADSEVVFPQFQGERKPDPTKGESAISFKLTTPAEKAKMKKRVHPMSAFDSAPSGLSTPVGSDDESHSEMLAAQKLSLTMSAVHSTPSAHRVIRQIIRGDYAHFQREAEEGRKRQRMYLVATDISPEAEYALEWTIGTVLRDGDTLFAVYAADEEAASEGGVEIGHGAENVKDTARIIRDLPATTNAVPQATKPSPLAQSATPGEGASRTHSSAEAERRHAVEDITQRCVRLLRKTRLQVRVVVEVFHCKSPRHMITELIDFLSPTLVIIGSRGRSAVKGVLLGSFSNYLVTKSSVPVMVARKKLRKHSKTVRNRDGTTVPYSGITGRAGRLSNVIEAPKGNGLRVQGWDKVGID

SEQ ID NO: 38524 - protein, 592 aa, Oryza sativa
MSSPVDSVADPDQYTLRKTPFRLHVTPFSEILNKKYDGAGTKDDPYLVEWLPSDAEDPQNWPAYYKWLLTIQVAIATLSVALASSAYSGAVESLQAQFHPSKQIILTLGVSVFVLGFAFGPLFWAPFSEVVGRRNLLIFTYAVFTMWQAVSVASPNIESLIVFRFLAGFFGSSPLVNTGGTLADMFNANQRGLAMAIFASAPFLGPALGPITGGFLGESAGWKWVIGFLAIFAAIITVLGAISMPETYAPVLLRWRAQKLSEVTGRHYICKLDKGRDLRLKTQFKVALSRPWLLLFYEPIVSLLSVYIAVIYGVLYSLFGAFPIVFQKGRGWSPGIGGLAFLGVLVGMLIALAYIIFFENPRYIRIATKFGGIAPPETRLVPAMIGAVAIVIGLAIFAATDSPDLPWIAPIIGGGPFGLGMVLIFLSTMSYLTDAYLIYAASVLASNSVIRSLFGFAFPLFTSDMYQIGGKNGIHWGPAIAGLLALICLPFPFIFYKYGAHIRERCKYASEAKQMLEQMQSSSKAKQPAQAVKHDDVDLEGGEKTARTDSNSDSGKAATTTRPSLEVDPSTQAHTPDDESHSGSGSSHHGTR

SEQ ID NO: 38525 - protein, 183 aa, Oryza sativa
MQVTCSVRNSHCDSLYTGAFTSSYTQLPRYRSQVSGTLTTVRSAAVAAAAFAEDSFSAASSSSRRLASSAPPSLTLGSVTSRSLSCPSSTLTPASAALALALALALATSIVLLLLLLPAAAAIAVEAGASRTRTMTSSPRLAMLPAARCAAPTVSWRTWRSGDLARSAPAPKGKSAMDLMSSL

SEQ ID NO: 38526 - protein, 360 aa, Oryza sativa
MAGISACASFPVVAVDSALRPEAVEGQGAAATAVAAPKTVTESESSASASASMEPEEQVEEPAKKRKRDPAPDVGSSSMDGTDGQGSDDDKNDDGEEAPVLQAVSPPRQNALQRLVDECRVLLDGSSKSTQPPNSTTVSRIVALLNGIGPDDLKLGTVLDTSEVTRAAAFRRRDPIQVIGGNYLYECDNFTVAVFYLPAGTVMPLHDHPGMTVFSKLLAGSVHVQSFDWVSPSVYGSGGKRAVHSKNTKLVKKVLDHVVEAGCGTWVLYPSTGGNLHRFVAGVDGPCAFLDVLTPPYSEGRLRRCTFYRDYPFQLHRNHRFARNLSAQEKSQFAWLRPINASAPPDLRIVPLTYSGPPVV

SEQ ID NO: 38527 - protein, 489 aa, Oryza sativa
MKPRLNLPPGPWTLPLIGSLHHLVMTKSPQTHRSLRALSEKHGPIMQLWMGEVPAVVVSSPAVAEEVLKHQDLRFADRHLTATTEEVFFGGRDVIFGPYSERWRHLRKICMQELLTAARVRSFQGVREREVARLVRELAADAGAGGDAGVNLNERISKLANDIVMVSSVGGRCSHRDEFLDALEVAKKQITWLSVADLFPSSKLARMVAVAPRKGLASRKRMELVIRRIIQERKDQLMDDSAAGAGEAAAGKDCFLDVLLRLQKEGGTPVPVTDEIIVVLLFDMISGASETSPTVLIWTLAELMRNPRIMAKAQAEVRQAVAGKTTITEDDIVGLSYLKMVIKETLRLHPPAPLLNPRKCRETSQVMGYDIPKGTSVFVNMWAICRDSRYWEDPEEYKPERFENNSVDYKGNNFEFLPFGSGRRICPGINLGVANLELPLASLLYHFDWKLPNGMAPKDLDMHETSGMVAAKLITLNICPITHIAPSSA

SEQ ID NO: 38528 - protein, 161 aa, Oryza sativa
MAMRWCYVGKATKIFFTVLALLALIGVVLAFRALLHRAKSRASSSSSACAAADECQPILPDTVPQPSMPSTAATTPPPPHQYPSFPPPDAAMPMPMPQPPPPLQPPPPAIAQPPPAFASPPPPDALVPPPPPPAAPALVTPPPALPSAPPPAPEAPSPTAS

SEQ ID NO: 38529 - protein, 551 aa, Oryza sativa
MLLSHLRDTPREARGWRLWFSAWAVGALGISRGLDEGIISGVLKQHSFIKTFGFDDNSPQEATIASQLQLGSVAGSAIAFFLCDRLGRLRTSMLACLLWLFGTAIWMTSAGVSGTHSPGNYHQLLAGRFIAGLGVGFTPVVAPVYLAEIAPKAIRGLTVCIFSGSVYIGILLGYWSNLGTSIHYDDARQWTIPASINFIFAGLTFIACIFAKESPRWLIKQGRYEEGRKTLSYLRNLDEDHPYIVNEVEVMEQQILAEKEALEGLSIFQILKKLVTNKNNQYILFLGLGIQVLGQMSGGGVYTVFAPKIFGLLGVPGGQRTKLLTTGIFGIVKLLSSLAAAFFLVDMLGRKTAVTTGLLLQSLCSLYLALFLKFTSGVTKANETHSDKSAATGAIFFFYLSGLAWAIGVNSVQYLTQTEMFDITVRALGVAIVSLVHFAMQYAATRSLNPMLHAWGNFGTFLFYAMIALTGCLFVFFFMPETAGMQLEDIHQLFEKPWYRIGWTANRPANRKGATSSKVEADESQDGADLAYSAQLGQKKSIEEEEDEKKH

SEQ ID NO: 38530 - protein, 607 aa, Oryza sativa
MIFTSAAEPVKELPDHLDVYGFLFEYFPSSRPDTRNTGLPLFIDEQTAQQWTFEETKENTDLLSVALAEKCGIKPDTRAAIYATNSIYYPATIWAMHRLGAVVSPANAAFMAKELGLQIQESNSKLLFVSEDPVSLKNAFEAAKIANIPRDRIVIIQEPYTVLKYPESNYGRIQRKSQGAWTLAGLIEEGRDIVKAKGDAILTSTRYKLKPGEAKTKIAFLLFSSGTTGLPKGVAIQHFAVTSNALQTMAFNKVGSSLGAKGRFCPGKDVSLGVLPQVHIFGLSTCTHFPFYAGIVNVVISKFRGIEAMIKTIIKYKISVWWLVPPMVVLFCKDPSVAPYLDELRKVARFAMVGAAPLSEDLSRQFSKIFPKLDWGQGSGMTETCSVTTMFPVGEPVVMGSAGRLFSNTEAKVVNSEGKEVGSDELGELWLRGPQITLGYTNNEKATRETYVEGGWLRSGDEVRIDRNGDVFFIDRLKELIKVKGFQVAPAELEGFLLDHPDVSDAGVIGIQDESAGELPFAFIALSQDAKKRAASGGSKQQDEIRQSILKFVADNKTRYKHLCGVAFIDAIPKTASGKILRREMRDMAKKLAPEDLRQKRDVAAKL

SEQ ID NO: 38531 - protein, 497 aa, Oryza sativa
MLKFDEVQKHNSRESCWVVVHGNAYDVTEFLPDHPGGAGIILKYAGKDATEEYDPIHPPGTLEENLPKEKCLGPVDPSTIKKEEKVEKKQVVKDEGGVPPLSQCLNLYDFEVIAKRVLKPTAWAYYSSGADDEVTMRENTSAFGRIWFRPRILRDVSKVDFSTSLLGQKSTLPVYITATALGKLGHPDGEKNLTVAAGKEGVIQMIPTLASCSFDEIVAAKTHDAQVQFMQLYVNSNRAITENIIAKAEKAGIKGLFVTVDAPQLGRREKDMRMKFDDVGSDMQNQNKDNVDRSQGAARAISSFIDPSLSWDDLTWLRSVTKMPIVLKGVQTWENAVRAAELGLSGVVLSNHGGRQLDFARSGIEVLGEVVEALKAKGLFPNPMFQIFVDGGIRRASDVLKAVAMGATAVGIGRPFLYAYSAYGSDGVVHALQLLKAEMEMNMRLLGAPTLKDVVPEMVDARALGTHVNFTPVSHGHQIYEKLQTAVGMPGEPANKL

SEQ ID NO: 38532 - protein, 461 aa, Oryza sativa
MKCRAAGQPPLEAVWELHPVVVPDGGLALSLTCSEASQATHQAAAPTAGWPFVNGAGEAAATTASPTIPPWLRRYQDPDHATPASCGTGLQIQDLWNPMRNGSAPHHTSELTLSFSSPSPSSISGYTSCYNNNNMMSSKPWQLEARQPWPIHGHEGQRMAMASYHDHHPLDTNPSPESNSVSNSLDGGETRRPKFIELNAENLKILCNALESRVPQHSNIVPDIASTVLQCRSGMKKMKLRHKEIIKASSTTWLLFQGRDVDGKKAMAQELAKLVFGSSTEFSSISFDELTSPYSDSSSGELTLKRQRSADSNEHSFAQRLCEIVSKNPHQVIVINDIEQLDQDSEISIKKAIANGRMRGCTGEEVDFEDAIIVLSYEEEFDSRSRASPSPRVKQRLMNNNDDEESSSTEKGDNSPQRFSLDLNACLEDEEEDEGFLLIDNGVGMHDIVDGVFFFGLMADF

SEQ ID NO: 38533 - protein, 198 aa, Oryza sativa
MPRLLEKMAGAATDPTPPPPPPLHHHAAMATASSSPFDFDTHLQQAEAATACVVPNNVYHHHIDPSPSTSTSAGSTAAAAAFQPLPCFSELRWDQQMQSSGELDDGAAGVFVDSASALGSLSLDGLDLGPAEYYSDSTLLDYLNSSCTGSAMMTMMTASGNAGSYNYCGGAMDGGDTWRSDEVCQAAARKLGEWGGGI

SEQ ID NO: 38534 - protein, 355 aa, Oryza sativa
MEQVVNAVLDLVVPPASMVVLAFAWPTLSFLRGVEWVVKTLTVENMHNKVVLITGASSAIGEQIAYEYARRNANLVLVARREHRLFAVRENARALGAGQVLVIAADVVKEDDCRRLVGDTISFFGQLNHLVNTVSLGHDFCFEEAGDTVAFPHLMDVNFWGNVYPTYAALPYLRRSHGRVVVNAAVEIWLPMPRMTLYSAAKAAVIDFYESLRYEVGDEVGISVATHGWIGGEASGGKFMLEEGAEMQWKGEEREVPLAGGQVEAYARMVVAGACRGDAHVEHPNWYDVFLVFRAFAPDVLAWTFRLLLSTPSPSPPASARRHQLAALPAPPLHPLLEYPSARSPGRAAQQHKLE

SEQ ID NO: 38535 - protein, 274 aa, Oryza sativa
MESWVRAVVEAIHSSRAQAVIYLAGGASQALGWLLSVPGASGTVLEVVVPYSMASMAQLLGKMPLQFTSKQAAEDMALAAFNRALKLSGPGLQVMGVGFTGSLASSRPKHGEHRFYVSTRTQNCLRTSHVTLSKGLRSREEEDKVSSYFLLKAIADGCKVPATIQSDVQEPELPKESVEQFDEDQELQQVIDGQVCMKVYHFSDSMDKNFNRKIILPGSFNPLHDGHLRLLEVASSMCDDGLPCFEISAINADKPPLSIAEIKRRVEQFRKGRM

SEQ ID NO: 38536 - protein, 422 aa, Oryza sativa
MEAKQRTRHRDGEERRLVAAADGGAEEYDPWTAWLYKPHTISVLLVGACLLIWASGALDPEGASYHSSATSIKRGVWAMIAVFLAYCTLQAPSTILIRPHPAVWRLVLGLAVVYLVALAFLLFQNRDDARQFMKHLYPDLGVELPERSHGADCRLYVPENPKNKFINIYTLFDEFVVAHILGWWGKAVMIRNQLLLWVLSIGFELMELTFRHMLPNFNECWWDSIILDILICNWFGIWAGMHTVRYFDGKTYEWVGLSRQPSIMGKVKRSLSQFTPAQWDKDQWYPFMGPLRFVQVLFLCVVFMTVELNTFFLKFCLWIPPRNPLVVYRLILWWLIAIPTIREYNSYLQNSKPVKKVGAFCWLSLAICIVELLICMKFGHGLFHDPMPTWLIIFWSSVGVALVVFLLAWSWRNHLKYQRKRL

SEQ ID NO: 38537 - protein, 128 aa, Oryza sativa
MSILTAPVFTDIGRAPRRGGGGRKVTINTKLVKKRARRERLDISFPQPFRKVCGKHAKLFKSEVTVIVRNHVPLKAKKWKTIEKQHPGTMANVWKKLKVVKYSYVNIFYIFIFFLVANMELLLTGCIS

SEQ ID NO: 38538 - protein, 776 aa, Oryza sativa
MQNDTDTGAGLLELIVELGVVGVSLIDHKPRELLYLHLQKLFISYMTGYNSGTTSRFKLIIGHMQLDNQLPLSIMPVALATESMPDSNHPVFKANIAVSNVTSNGIQVYPHVYIRVTDQTWRLNIHEPIIWALVDFYSNLRFVSTNNISTVTEVDPEIRIELVDISEIRLKISLETAPTQRPRGVLGIWSPVLSAVGNALKIQVHLRKVMHRSRYMRKSSIIPAITNRIKRDLIHNPLHLIFSVDFLGVTKSTLSSLSKGFAELSTDGQFLQLRSKQVWSRRITGVGDGLVQGTEAFAQGLAFGVSGVLRKPVESARQYGAIGIAHGLGRAFVGFIVQPLSGAFDFFSLTVDGISASFMRCVDILNNKHVPQRIRDPRAIHRDGIIREYDKVQAAGQMALYLAEASRYFACTDLFREPSKYAWSDYYEDHFIVQNQKVALVTNKRVILLQCVDLDKMDKKPSKILWDVPWEDVLALELAKAGYQRPSHVIIHLENFRRSENFVRLIKCNVDEEHEPQALLLCSSIRKMWRSHQADMKVVPLKVPGGQHDVYFAFDEDMREFHSFARPLLSPRGAASNVEERLINDTVNFQNMWSSEQEIRSRCKLLSKQVADDGRVFSIWRPLCPSGYVSIGDIAHVGIHPPHVAAVYKNVGGNFALPLGYDLVWRNCGEDYRNPVSIWFPRPPEGYVALGCVAVSAFEEPPLDSAFCVSERFAEDAVYEEQIVWASSDAYPWGCYVYQVQSKSLQFMAMRRPKEECELKPKKVSESYAQQALERS

SEQ ID NO: 38539 - protein, 228 aa, Oryza sativa
MLPAMPSLAMLFAVLLLCVANTLAFSFLAVRIFRADGGPSKLTASSVRRSTKCILVLACVVEVAVLFASLRLAADRHALSGEVDHMRDQIETLQDDLKQYEQPFSALSDYLGLSVLELGSAVGRLRDKEEHLVKEYRDLKLEIEQIKSDIQSLRHEKEGRGYHKETLGGTSNQQKQENNEKTKQPAIDGIMKSLRAKATKLQQVKISFPWEKMKKAKNIFSMDFKLRP

SEQ ID NO: 38540 - protein, 272 aa, Oryza sativa
MKVIVAAAEGGVRRRRRYALLLAARDSDYVRKVYGGYLEVFIRAFGDDGDVGDGGGEEWDMFRAVDGELPGADEVDGYDGFVISGSPHDAYADDLWILRLCLLVRDLVAMRKRLLGICFGHQVICRALGGRVGKARGGWDIGIREVAMAESLPPYRFLDDALQGITAAAAPYAKITEVHQDEVWELPAGAEVLASSSKTGVEMFCAGDRVLGIQGHPEYTADILLNLVDRLSSAGSITMAVAEGVRRQLEDTGPDREFWIKLCKSFLKAEEE

SEQ ID NO: 38541 - protein, 61 aa, Oryza sativa
MGGKKKSGSGFWSSASWFACLGASKAAAAGSGSGGHAGYDAAGGMVGAAKHFSSSHKINFG

SEQ ID NO: 38542 - protein, 49 aa, Oryza sativa
MPKGGRVFIGVENDFCCMWRMAHCCHCRSYSDSVKFKYIFWKALHMGRW

SEQ ID NO: 38543 - protein, 493 aa, Oryza sativa
MPFIGTRGIYRRQGMCHRLLNAIESALSSLNVRRLVIPAIPELQNTWTTVFGFKPVEPSKRQKIKSLNILIIHGTGLLEKRLLATGTINQENTTVNDMMDAQTHVEATGSRTPVHFSCELPVGGDPDIKHHDDSHPLVGNSKGLTLNLPCVPEEKTAELTSPVLDVVQCMPESENTQEMKNGETDATLTSEDIIAEQKYEDKSNSSLTDSSAIPMTVDPGSCSSNETVKGEHHTSSEPSVEAILVRDKPEPSISCNVTNQEDKNSSMVPVDTTVHLATIVGNHDIQNSVEVKGMEHNTAKDQTFVSAVANNVATTEDPSDSVADCEVPIVRSIQQKDEVIADKNACATIDQTAVDDVANNFVATTENDTDSTAELGVSMERCIQQKVEVIKDKSDSPLRTSISKVMLEKSDQMKSTESDSVKMKDMAIEVKVTVENFSEAGKPASALVMSNDINGEVMAKPNLTCGDDQLHGGDGTYKNSMEDDLASREPVNA

SEQ ID NO: 38544 - protein, 239 aa, Oryza sativa
MAGGGEELKLLGMWASPFALRAKLALSFKGLSYDYVEEDFKNKSDVLLSSNPVHKKVPVLIHKGKPIRESQVIVQYIDEVFPDAGVTLLPADPHDRAVARFWAAYIDEKLFSAWILVFRSKTEEEKAEAVKQTFAVVEKLEGALSECSKGKPFFGGDTVGYVDVVLGGFVAWVHAIEEVFGLNQFDAAKTPLLAAWLERFDELDAVKEVMPDIGRLVELAKMRQAQAAGAAAAAAGEAS

SEQ ID NO: 38545 - protein, 86 aa, Oryza sativa
METEDTGAETLAPRRRRRPPPPRRASLTCRRFHHPQAPPPSNEIPSSLHRADSRPHHVVISGTDHRCSSASRSPPPRVISRASCQG

SEQ ID NO: 38546 - protein, 245 aa, Oryza sativa
MAGSSPSAAASGGGCEAVPSTSTIVAEMATGSHVLTVDGYSGTKGLAVGVHVKSGTFVAGGHSWHIKYFPNGATDETSEWVSVFVCLTGKYSDPRRRRAPPRPSRRGASSPCSSTAATGGRHCRRRRRSPRAASSGPSPPARAAPISGATRSSCGGRSSRTRRSVSSAMTASASGVTSPSPWGSAPTTPPRSSRHRPTCTATSAASSRRMRAPTSRSTSPATSSPRTGASSPRGRRCSWRSSSAR

SEQ ID NO: 38547 - protein, 102 aa, Oryza sativa
MRVPPLRATTALLATLLVAASFQDLTVAADGGGGVVPVPDSVCDAKCQKRCSLKVAGRCMGLCKMCCHDCGGCVPSGPYASKDECPCYRDMVSPKSRRPKCP

SEQ ID NO: 38548 - protein, 619 aa, Oryza sativa
MRFRGTHTREALSGPQNFQRALSHFRVVPARGWETLWRAWLSRHSPPPRPFSCRPPLAPSPTNNSSPISLPNLSRLRSHSLSLSLSLSLDADASQRHSERVNGGHGLADGNRHPTKRQAAPHEPSPSRRVTRRVSVHIPPQIPQCRNRKSPTSPRSLVQDYADAGVLLLLLHITWYSVAMRSNCSILRVGTPKLLSASPRSSGKRLYGDFVAAEKPKWNPRDPAQMQVVKEALHVATVPSCGLVCRDDEQSRVLEFCKGCVEQERSGSLYVCGCPGTGKTLSINKVKESVARWADETGMETPDALSINCTSLAKTHEIFSKILAKFQTRKKATCKLSPLQQLQTMFSHKESAPRRMLLVVVDEMDYLITRDRAVLNDLFMLTTYQFSRCILIGIANAIDLADRFLPKLESLNCKPLVVTFRAYSKDQISDIIKHRLKVLEYDVLEPLALEFCARKVAAASGDMRKALGVCRSAVEVFEARLQESSDQEFGLVTFDHMDIALSKAFKSPVVDSILCLPQHQQMVLCALANTFHHCKKKATTLGELNKSYIEICRSTQVPAVGMLEFSNMCMVLSDQGFMKLGQSKEDKLRRVMLQIDSSDITFAFKGNRFFQKCLEQQKF

SEQ ID NO: 38549 - protein, 186 aa, Oryza sativa
MASWWCGAFSSRKRWSSSRSSSPVTMRFSTIMFSIDRRKSPRGSSDCFTTAKLPSSFPAVKPSLLSQLFVFRCFGACGGGGQCLLSSLLPPLSTPFTFRSCCGGKGNGGGAGGAKWASSSSLFRWSTLFTFRCSWVVGQWEDGGGEENLASSSLLLRFPPASTARCRTTGRKGNGGGGGGGGGGEK

SEQ ID NO: 38550 - protein, 109 aa, Oryza sativa
MRNIRLRTLRDPHEVLRALCRPSTWTCNNSSDTSRTTPRGLGVPLRPGPFSPPTWLSRVPRPHTSSSNTGCNDFGQQAYSRDLLSMETTKSSCSSLPRTQKIKSLRIEV

SEQ ID NO: 38551 - protein, 63 aa, Oryza sativa
MRYGGGKLEVSFGYSFVDRPRACTCERVACAGWHELGAGAHECDSGLARGNTGRHRRWLGLAE

SEQ ID NO: 38552 - protein, 45 aa, Oryza sativa
MQLASRAQVHPVHSPPNGHHGKGDQIVSQVNRSTAQASVTGIMSH

SEQ ID NO: 38553 - protein, 395 aa, Oryza sativa
MNISDNGKASNHVFAVELDTVLSPELHDIDSNHVGIDVNSLQFIQSHTAGYYDDSTGAFMNLTLISRKAMQVWVDYNGQAMVLNVTLAPLGVSKPKKPLLPTGLDLSRVVEDIAYIGFSSATGLSIAYHYVLGWSFSLYGAAPALNPSKLPVLPKLEQRHHRSEILVVVLPIATAALVIGLLLVGFMIVKRWFRHAELREDWKVEFGPQRFSYKDLFDATQGFGSKRLLGIGGFGRVYRGVLSVSNSNSEIAVKRVSHDSRQGVKEFIAEVVSMGRLRHKNLVQLLGYCRRKGELLLVYEYMSNGSLDKHLHDKNNPVLDWNLRFHIIKGIASGLLYLHEEWEQVVVHRDIKANNVLLNNEMNGCLGDFGLARLYDHGTNPRTTHIVGTMGYLSP

SEQ ID NO: 38554 - protein, 185 aa, Oryza sativa
MPAMLGRSRRFCRWRGGRACRRARTPRCWAGGWRRSPSSRPWPAPGASASRRTPTSCAHDQAGITSPRSVQRTPSVSSAVTGCREDAYLSRPLVGSSRKRRRGRMRSSRAMLTRRFSPPLTPRRCQLPMTVSAQSWRPISTMVPSTRARLSSRGILSGSRSIAEYPIVSRTVSVPIKLSSCVTYA

SEQ ID NO: 38555 - protein, 55 aa, Oryza sativa
MPSGDNSNTANASSPMNSPSLVQWQWRAGCAAGAGSVSCWTLPGDVLSPAGEGPG

SEQ ID NO: 38556 - protein, 67 aa, Oryza sativa
MAAMVVCGPARSRAATRATNTSCARAISILVVCADDRSTLLLLLVCGARLLLQVRSIDENSRECRGL

SEQ ID NO: 38557 - protein, 207 aa, Oryza sativa
MEAHVERALREGLTEEERAALEPAVMAHHTFPPSTTTATTAAATCTSLVTQRVAAPVRAVWPIVRSFGNPQRYKHFVRTCALAAGDGASVGSVREVTVVSGLPASTSTERLEMLDDDRHIISSRVVGGQHRLRNYRSVTSVTEFQPPAAGPGPAPPYCVVVESYVVDVPDGNTAEDTRMFTDTVVKLNLQMLAAVAEDSSSASRRRD

SEQ ID NO: 38558 - protein, 93 aa, Oryza sativa
MASVATIGLPLLETGSVLFFFIITTKPAVVRMSTFTKLYRPSPRIKAMDMNTCSSQEHHISCLVTINYSCIAAKGRIFFLNVYLPCSLAVHED

SEQ ID NO: 38559 - protein, 92 aa, Oryza sativa
MQRMQWRRRGHGGGGGGGWRGETRLEADACGGRGRRCDWRLRRPAHMEARLEAGVRGGRGGGRSGGSADDGGGRRGTAGDRGRLQGATDRRW

SEQ ID NO: 38560 - protein, 515 aa, Oryza sativa
MPTLRSATASASTAGTASPTAIATPRSAKRRLTSPRRAAGSPDASQFTSPHKSPNVGIVGTPKLLSASPRSSRKRLYGDFVAAEKPKWNPRGKSPESHFSRAQSSDWDLTKEFICSADPAQMQVVKEALHVATVPSCGLVCRDDEQSRVLEFCKGCVEQERSGSLYVCGCPGTGKTLSINKVKESVARWADETGMETPDALSINCTSLAKTHEIFSKILAKFQTRKKATCKLSPLQQLQTMFSHKESAPRRMLLVVVDEMDYLITRDRAVLHDLFMLTTYQFSRCILIGIANAIDLADRFLPKLESLNCKPLVVTFRAYSKDQISDIIKHRLKVLEYDVFEPLALEFCARKVAAASGDMRKALGVCRSAVEVFEARLQESSDQEFGLVTFDHMDIALSKAFKSPVVDSILCLPQHQQMVLCALANTFHHCKKKATTLGELNKSYIEICRSTLVPAVGMLEFSNMCMVLSDQGFMKLGQSKEDKLRRVMLQIDSSDITFAFKGNRFFQKCLEQQKF

SEQ ID NO: 38561 - protein, 271 aa, Oryza sativa
MDAITTTIFQRIVDVPDGSLEPPPGVEHPPEPDEAEAGAERDGGVVEVAGADRVRRREEEHGAGVADPQERDEAHRPRRAPEVEGPRREVLLPHHHAGEDGHGVAADPADGCDRRDGREDDVDPQDGEAQQRARGGAEPDGVGGDAVARVDAAPHGGERDAAVAGQRVHDARGAGGDGEAAEEEGAPDDEEEGDGARGGAVPAVERVEQDLRRHERAGRLVARVEQVAEVLRTHRNRVHVRPFLGQVRDVRSHRQQKKKSILLNLCRHILG

SEQ ID NO: 38562 - protein, 119 aa, Oryza sativa
MGVYTFVCRSSGEEWTAKQLKGELEASAATPYELQRRLVAAASAADSAAGVQSSFAMVSPSSAVFQVIIGAVGGGAAIGGAAAGGAAAGGAAAEAPKAEEKKEEEKEESEDDLGFSLFD

SEQ ID NO: 38563 - protein, 600 aa, Oryza sativa
MSTWSGAASMPLRSAAGVFSAADNRLKEIDTLVGEIQMDFRSLHTPNCVFNGEEIEDDDDVVDPEYLEIMTLAGQIRCGVRELQTALDRKRIYDSSYGDEDRSMEETQGQACWFPSASQLELVIHSLDAQLRHCLLCLAMFPADELIKKKMLIHYWIGEGIVQSVTAGKDCFTDLLSRGLIQPACQRQHCSKVHYCKIPPIVSNFLVKTAHRMGFYQFDGEGKPMEDFDSERSRRACLWERQIGGRGDDVNELYGPSSCKDLLTLYNFNRQYVNMDKTWLSKQAEMSTLQLGQWKPSWRHRIEIVSPETLEAATMCESLKYLSLRGISLIEYIPDSIGNLQNLVVMDLSACHNLEKLSDSIGSLRKLQFLDVSECYLLDEMPEGIGSLEELQVLKGFLVGGATSKSNPCRLADLASLPKLRKLSISTGRRALVVQEDELNKLQGCTALESLTITWGAAAAAQGPKRQLISGVEGSIKGTSMGSELLLPPRLEKLDLRRTPMENLMHLLHPGNAENLKRLYIRGGKLKSFGDVEGWNVETLRVRFLKVLECDWERLRASFGKLRFLEMRECPNLTSWECDGEGVWREDDDNGTTHVGCFDK

SEQ ID NO: 38564 - protein, 46 aa, Oryza sativa
MLSIHTLRSCISFINCSANSLLASTVSRVWSSSKLDSSLGACIPMK

SEQ ID NO: 38565 - protein, 362 aa, Oryza sativa
MGQMDGGDGGGGGHPYHYQALLAAVHQQTVPFPNPFPAPSSGAEPPHPHNHNHNHNHNHNIHNSHNHNHNHNAAPHPCHTPTPTPTPRGFADWSASTSAFTSLAAHSSTAPSNAVHYSFSPCYAFWTHYMLNKNAYPTSFPAPHDDHLRLANNNHPRDAPGPASSYGVESFTSPSMAPNICTHMPPIEGPISAKEDKKPEILPRVVKSSDELETRNSNVEFHSETVGTFPESKQGHDSRATKLLNSGEYQVILRKELTKSDVGNVGRIVLPKKDAEASLPPLLQRDPLILHMDDMVLPVTWKFKYRYWPNNKSRMYILDSAGEFLKTHGLQAGDVIIIYKNLAPGKFIIRGEKAIHQQTTNP

SEQ ID NO: 38566 - protein, 194 aa, Oryza sativa
MSWSTSSSSPSAAWLSLAWRSSMAAKAAPCWMMAMALLEISRAFSMASLTWSLMGPCGNMSTQEPWNVITALSHAWRSCAEEVHAAHRRLHAALAQAVVVAGAVHHHVGHRAEHDGEQHDHGGDDQLGAPRPIVVVVRRHCRPRELASAGHDVDGRCGGARRLLRSMDGWMDATTMTAHQFYIFLMRKNERIQR

SEQ ID NO: 38567 - protein, 88 aa, Oryza sativa
MCQMRLLAKRTNWGWRHDLLVLETEDPSSSSSSSSSPRLPDPPPLPPSSATARRTRPHFLPLPPLPRLADLSPLNLAPVPPSPRSLPP

SEQ ID NO: 38568 - protein, 421 aa, Oryza sativa
MPTPVAAARQCLSPAAVPALDAAVASARRRAHAQTTSLHLISSLLAPPAPPLLRDALARARSAAYSPRVQLKALDLCFAVSLDRLPSVSASSSSGAADEPPVSDSLMAAIKRSQANQRRNPDTFHFYHQAATAQTPAAVKVELSHLVLAILDDPVVSRVFAEAGFRSGDIKLAILRPAPPMPLLGRLPTRTRPPPLFLCSFAAADDADVPSPAGNLAGAGEENCRRIAEILSRGRNPMLVGVGAASAADDFAAASPYRIIHVDPNTIDRSDLGVAAAMASATSGLIISIGDLKQLVPDEDAEAQENGRRVVAEVTRVLEAHSKVGRVWVMGWSATYETYLAFLSKFPLVDKDWDLQLLPITAVHAAPAAAGPAAAGGLMPPATTVAAFSKPAARSSLFSSLLFTFVSTNSLCIRFLLPSIC

SEQ ID NO: 38569 - protein, 80 aa, Oryza sativa
MWSGDADLTAPVRRATSPPPLLPSPSPSAATSAFSVAERRRFRLRLAPPLQRRRPLLSQSLSGAAAAFATITDYHFFLVL

SEQ ID NO: 38570 - protein, 265 aa, Oryza sativa
MAHEMMGGFFGHPPPPPATAAVGEEEDEVVEETEEGGHGGGVQGKLCARGHWRPAEDAKLKDLVAQYGPQNWNLIAEKLDGRSGKSCRLRWFNQLDPRINRRAFTEEEEERLMAAHRAYGNKWALIARLFPGRTDNAVKNHWHVLMARRHREQSGAFRRRKPSSSSASPAPAPAPPPPPQPVVALHHHHHRYSQQYSGYSGAAESDESASTCTTDLSLSSGSAAAAAAAAAAANIPCCFYQRGGAQATTDSHTIPFFDFLGVGAT

SEQ ID NO: 38571 - protein, 512 aa, Oryza sativa
MGCFLSKPAGAGPLPPNDAAALPADNPADPEAAAANGGADSAAADGGGDDKDAAKRAVPVFREFGLAELRAATKGFSADLIVSESGEKAPNVVYRGRLDGGRLIAVKRFSRLSWPDPQQFLAEAAGVGKVRHKRLVNLIGCCAEGDERLLVAEYMPNDTLSKHLFHWDKQPLPREMRLRVAYYIAQALDHCNAENRKIYHDLNAYRVLFDEEGDPRLSSFGLMKNSRDGKSYSTNLAYTPPEFLRTGRVIAESVIYSYGTVLLDLLSGKHIPPSHALDLIRGKNILLLMDSSLEGQYANDDASKLVDLASKCLQFEARDRPNIKYLLSSVGPLQKQKEVASHVLMGITKATAVLPTILSPLGKACSGMDLTAVHDILLKTGYKDEEGAENELSFQEWTQQVQEMLNTKKFGDIAFRDKDFKTAIDYYSKLVGMMSVPSATVFARRSFSYLMNGQSELALRDAMQAQVCMPEWPTAFYLQALALSKLGMETDAQDMLNDGATFEAKKQNSWRG

SEQ ID NO: 38572 - protein, 31 aa, Oryza sativa
MHGKLYTSCVFSLCFEDLFVFGLIRLLNTGL

SEQ ID NO: 38573 - protein, 58 aa, Oryza sativa
MLPVKREAYIAALKLRVVAPSLTIANCNLFSFSRRESSIFFLQYLCQAACMKQAASRT

SEQ ID NO: 38574 - protein, 433 aa, Oryza sativa
MAKRRRRWRRQRCCSSDPPLAVAAAALLLLLLVVVTAAPVVDAAAAGRHVVQRHLDRINKPGVRSIHSADGDIIDCVPRHKQRALDHPLLANHTVQTQPSQMPASASLLDRRQQLSRRAWQTWHHSGHCPRGTVAVRRTAAADVQRARSLALFGRKKQMRSPLPAPDVVTGNGHEHAIAYTAAEVYGARATISVWAPEIDEANGFSLSQLWILSGSFNGSDLNSIEAGWQVSPELYGDNRPRLFTYWTSDAYEATGCYNALCPGFVQTSSRIAIGASISPVSSVGGPQYDMTLLVWKDPKLGNWWLSYGDGAGGLVGYWPAELFTHLSDHATMVEWGGEVVNTHPPGSAHTATQMGSGHFAAEGFGRAAYFRNLETVDADNSLAAVPLDAIQTMAEDAGCYDIRKAYDDDDGRGGWGAHFYYGGPGHNTASCP

SEQ ID NO: 38575 - protein, 57 aa, Oryza sativa
MALWAGKLYSDVSEAKLSMKMCCLLQLIFSRSATAVARLIFTDASKLFILLWSVSCT

SEQ ID NO: 38576 - protein, 172 aa, Oryza sativa
MASSTAIALALLGIVLLLPGNAFVVVAYPRGGGGGDYRMQFLGQQNAARAAMGLPALVWDERVAGYARWYAESRRGDCALVHSSGPYGENLFWGSGTGWSPAQAVGAWLAEQPRYNYWSNSCYGGMCGHYTQIMWRATRRVGCAMVACYNGRGTFITCNYDPPGNYVGMRPY

SEQ ID NO: 38577 - protein, 415 aa, Oryza sativa
MATSEAAAISNPFAPLTNHQQEHPPPPPPPAKKKRNLPGTPDPEAEVIALSPRTLMATNRFVCEICGKGFQRDQNLQLHRRGHNLPWKLRQRSGKEPRKRVYVCPEKSCVHHNPSRALGDLTGIKKHFCRKHGEKKWKCDKCSKRYAVQSDWKAHSKTCGTREYRCDCGTLFSRRDSFITHRAFCDALAEETARLNAASGAAAAAAAATATSLCGQSYLFAGSGGPGMAGMRPNTMMPPQFDAAQLSWLYGNGKLSSSNASELTSATAAAKEAESVPSVFSNQQHAKPAAPTDMSATALLQKAAQIGAVTSTAAMPLVSPFEPTKPGGATASPADECGKFDGAALFAAASHHNANLGGAMSELTGAAGNVPYDVLSAVRHHAGLKDAGGVGREETRDFLGVGVQALCSSSIHGWI

SEQ ID NO: 38578 - protein, 144 aa, Oryza sativa
MDVVTVCPPLILGPLLQSTVNTSSSILINLIKGGGGDDEEKAATTDKRRNVVDVRDVAAALILTYENPAASGRYICSAYDIKVSEMVDIVRRFFPDINYPKFVGGEDERILSSKKLQKLGWKFRTVEECLRDSVQSYKAAGILK

SEQ ID NO: 38579 - protein, 261 aa, Oryza sativa
MAGKHLIGCMVSGSRSPDSERWKIHGDGDLPLSFSYYVSASNDDYSSINSPFQGDHTNSNLSIVFESSSHNWVMNAPAVTTLGAAALALHYANLIIFIEKLAVAPRHICPDERDALYNMLTDRIRASLRARLRPIAKNMAASSSSSSSACDPAMAAEWSGTVQRILGWLAPLAHNMLRWQSERNFEQRNVASSGTGVLLLQTLHFADQKKSEAAIVELLVGLNYLWKAGRELDAKAKKLVSGGGKRDEFTDYYSSNRMECR

SEQ ID NO: 38580 - protein, 474 aa, Oryza sativa
MAAISPASDGVGRRRRRVLMFPIPFQGHVTPMLQLADVLRSRAGLAVTVFHAPVNAPAAAEQSAAEEDYRFVTVGAGVAGEAAALMPTGGSGSDFAGALMRLDALLRAPFDDALRQALLADDEEEAAATCLVVDSNLRGVQEVAERRGVRTLALRTGGACCLVAYMAFPELCGKGVLPPLSRDQLQLDMPLDELPPLRLRDMMFSATTTYGTMATCLERLLDSARCSSGVILNTFDDLENSDLRKIANGLSVPVYAIGPLHKISIGQESSLLTQDQSCLEWLDKQEAESVLYVSFGSLASMDSQELLETAWGLVDSEIPFLWVIRPNSVQGSEQTCLPDGFEEATRGRGMVVSWAPQQDVLKHRAVGGFWTHNGWNSTLESICDGVPMICRPQFADQMINARYVQEVWKIGFELEGKLERRMIERAVRRLLRSEEGKEMRHRAKDLKNKATTCIEKGGSSNTAIDMLVNLIMSF

SEQ ID NO: 38581 - protein, 413 aa, Oryza sativa
METNTPPKSGTSFLKTCFNGVNALSGVGILSMPYALSQGGWLSLAIFITIAAICFYTGILLQRCIDSSSLVKTYPDIGELAFGRKGRIAVAAFMYLELYLVAIDFLILEGDNLEKLFPNASFFSSFHRIAGGTRQGFVLLFALLVLPTTWFRSLDLLAYVSLGGVLASAILVASVLWVGAADGVGFREGGVAVRWGGVPTAMSLYAFCFSGHAVFPMIYTGMRNRRMFPHVLLICFIICTLAYGVMGVIGYLMYGGSLRSQVTLNLPARKLSSSIAIYTTLINPFTKFALLITPIAEAIEGVLGLGTATTGGKPAQYRAAAVSVSVRTALVVSTTAVALAVPFFAYVVALTGSFLSATATMLLPCACYLRISSRASGKLGVLEIVACVGIIVLGLGVIVIGTYSSLKQIVQSF

SEQ ID NO: 38582 - protein, 420 aa, Oryza sativa
MGSRTVGWWLLAAAVVLAAAAADSGEAERAAEQHSERISGSAGDVLEDNPVGRLKVFIYDLPRKYNKKMVNKDPRCLNHMFAAEIFMHRFLLSSAVRTLNPKEADWFYTPVYTTCDLTPAGLPLPFKSPRVMRSAIQYISHKWPFWNRTDGADHFFVVPHDFGACFHYQEEKAIERGILPLLQRATLVQTFGQENHVCLKEGSITIPPYAPPQKMQAHLIPPDTPRSIFVYFRGLFYDTGNDPEGGYYARGARASLWENFKNNPLFDISTDHPPTYYEDMQRAVFCLCPLGWAPWSPRLVEAVVFGCIPVIIADDIVLPFADAIPWEEIGVFVEEKDVPKLDTILTSMPIDDILRKQRLLANPSMKQAMLFPQPAQPRDAFHQILNGLARKLPHPEGVYLQPSDKRLNWTAGPVGDLKAW

SEQ ID NO: 38583 - protein, 77 aa, Oryza sativa
MVARPGPRTSRSQEADSAAEPARVSLARTVSEASRRWMGQPQASDMRRILDTCAAARTRVLALMSSIASEKVLRPAK

SEQ ID NO: 38584 - protein, 176 aa, Oryza sativa
MAGGGLPRPLLLFLPSPAATAAAISWPWYISVEFIVRLTKLSSASLRGKLPPSLPPASPPVTGAPSSRVVTITADCTSSRQSLSLLGSMCVSPGTAPLKRNSEVRLRSTSSGVTPSSVLEFGSAWWSRSTDTMSGETISAARCRAVLPVGPARELTSAAPSSSSALTTSRLQCCTA

SEQ ID NO: 38585 - protein, 138 aa, Oryza sativa
MASSSAAAATYRCAEWGADLNLTAAQLYPEGVYFEAGNKGTLSFSWVDESRLRFAPEDKIRPFFETLNYWGIQRKRTRISCDACGRLLGYVYDDGPPAMDGTGQFGMGPSQVIPRRPRYRVKTKAVTVVNPPATAPYR

SEQ ID NO: 38586 - protein, 748 aa, Oryza sativa
MVPPGNGNGAAAAAGNDVILELSTPGDDWSHELQGDDVEANGGGNGDAPPRRTFSFGQAYKTRHRQPQVFTVWQTLMLGYQSLGIVYGDLGTSPLYVFPSVVLPDADATDFLGILSLIIWTLTPMSLVKYALIVLKADDHGEGGTFALYSLLRQHVNFKGNIPVPLTRLESDVHLKFHSKRRSRPSRLQLFLENSPKAQLAITIIVLIGTCMLIGDGALTPAIPVLSAVQGIQSRSSHIKQKHVVVLSAVILVLLFLVQRFGTSRVSFTFSPIMLLWFASIAGIGVYNIVMHYPPVLKAVSPHYIYYYFAKNKRVGWEQLGAVILCITGAEAMFADMGHFNKSSIQVAFSTAVFPSLILAYSGQAAYLIKNPGDLSTAFYSSVPAPLFWPMFVVSTLAAIVASQSLISASYSIIRQSIALGCFPRTTVKHTSDKYEGQVYCPEINYVLMVVCVLITVGFQGGPEIGRAFGVAVIWVMLLTTTLMTVVMVVIWEVNGALAGGFFVFYLAIEGTYMTSLMTKVPQGGWVPFAITVAFLSVTLSWTYGRKKKREYEARHAVGDGEFAGIVSRSARVPGMCLFCTDLMDGVPPIVRHYAANTGSLRELLLFVTFRTLPVRTVLAGERFLVAREGARAGVYRCIAQYGYMDEQGMVGDDFVRAADAALVEVAAAAAEADSGEEEAEMIGRAPASGVSYVIGRTVLRMRRARNWPKRFVINELYRFLQKNFRSNVSTLKLDHAKTLQVGMIYEI

SEQ ID NO: 38587 - protein, 218 aa, Oryza sativa
MCSLLLPASHCLPHPARTSHAAEPRVCSVGCRYREMEICAGSPSAMLASTAPTMAFAASPPLSSLAAAAAVISSSSPSKPLSRAKTPPPALLQAILPTAPPKHHSLSCSGSQAPRATTGEGSAVGDRGSGSGGNNGKGGGGDGDGGDNDYEEAEFGPLLGFDEVLRLTAACGVSLPADMMGAAKDASIREVMLLHHFDLQAAPWPLAAMIRAFLMLRN

SEQ ID NO: 38588 - protein, 283 aa, Oryza sativa
MKCSRHPYEGGVGVCAPCLRDRLLALAAAQNEASSLPPPPEPVPVFPRSVSPYVCRRKSDASGARRRTPSLLFFRTPQVGPAYGGGGGGGGGAGGFEEGDIEFEIRRRSSKFSVLAALFGAHRQHGSEEKRSSKERKHRSWLAAIMAPWGPRKKDPAVASPPRHSCHVISNRGLSPAMRYADEGGEEGSSPAESPWRPSPMRKTPCRRRPGGATGAGGVSGFAVCISPLVRPSPARHHRGGGHPPDAAAFSGELGPSPLHRLSSGSSLPHCRSWKLADGGRFR

SEQ ID NO: 38589 - protein, 151 aa, Oryza sativa
MRRGGSGGTNTTTGRRRLRFRLHLLLPLWGWEREGMGRRRGRRTGTCSGARRGSPRRSGARRRTTPRCSGAWRPPAPSRSSTCPPCPPWAPTTASSAAPGPGTTGRSSAASTSGTSRCRTRSCSPRRRRRRWGRLGRRRSPRRLGAPPGHR

SEQ ID NO: 38590 - protein, 465 aa, Oryza sativa
MASRAAAAMVLAGALPVFPGRPLVAAGARCCDGGIRGRVSCSSHRRSDHPSCAAEVSTRWLLVSPHPNGFQSCSVRFSLIVWLSGLVQEGGVVELLKGAVAALAVIAQISVSLPADAILYSPDTNVPRTGELALRRAIPANPNMKTIQESLEDISYLLRIPQRKPYGSMEGDVKKAMKIAMDNKDAILASIPVELKEKGSKLYTSLLEEKGGLQTLLKYIKENDPDRLSVALASSLDTVAELELLQAPGLSFLLPQQYLEYPRLAGRGVVEFSVEKGDGSTFFPTAGGEPKSVATIQVVIDGYSAPLTAGNFAKLVLDGAYDGIKLKCASQAIIADNENGKKGYTVPLEVMPAGQFEPLYRTPLSIQDGELPVLPMSVYGAVAMAHSVDSDEYSSPSQFFFYLYDKRNSGLGGISFDEGRFSVFGYTTDGREVLSQIKTGDIIRSAKLVQGRERLVLPPEAPAES

SEQ ID NO: 38591 - protein, 260 aa, Oryza sativa
MARRRPSSRRRSPPAITSSRSTATPGLRPWSPPATASTPAASTSATTRGASGTTPMAPTAATRIPTPYPSCSSCRTPPPPPAATAPPSRRSSCSACSTRRRTYRSSVHSFPSSDGFKNWGFLRFITHGDLDKSEHLVDDGFAVRCDVTVMGGIELRVEPASLLAVPEPDLHRHLGRLLSTGDGADVTFRVAGGEAFAAHRCVLAARSPVFRAELYSRGGFLRPAAAGRPETRVVDVDDMDAGAFRALLHFVYTDTLPEMA

SEQ ID NO: 38592 - protein, 267 aa, Oryza sativa
MGRQPCCDKVGLKKGPWTAEEDQKLVAFLLTHGHCCWRVVPKLAGLLRCGKSCRLRWTNYLRPDLKRGLLSDDEERLVIDLHAQLGNRWSKIAARLPGRTDNEIKNHWNTHIKKKLRKMGIDPVTHQPLEPPRPPPREQDATPRPPPPPPQEIEESEEEEQEPSPLIEPHEITAPPPAAAAEAATSNCSVSPASVLSPSCSSSASAASAVDVAEWPEPMYMFGMDGIMDVGWNGLISGAGVDVDVDVDPFDHYYHDASFDDQDVWII

SEQ ID NO: 38593 - protein, 348 aa, Oryza sativa
MEEETVPRDRFTFTSALQACAGVGSVELGHAIHRDVVRAGLASDVPVCDALVDLYATFGDVRRALQVFDAMPDRDGVSWNIMLAGCLRHGLSQQALELWRRMLREEHEPDSITLSTMLSILPLVCDNGKWGLEIHAWAIRHGLETELSVANALIRMYSDKNEQSHALLVFESMTMRDLQSWNAIISAHLQDYRILMIFRRMVDSGMRPDETTFALVFSACDNLGLVEGGMRLFSEMENEYRIPPTMEQYTCMVNMLGKAGMIHEAYEFMSKRKPLDNEQTVLRALLQACLMHRNARVGEIIAKRLIELEPDNEHNFVKLMEIYQNVGRLVEAEKVKKTMRDRGLSCQS

SEQ ID NO: 38594 - protein, 164 aa, Oryza sativa
MAISKLQLALLAAAMAAAAISPTASGAYTGCATPRKVTIQNLSGRDLPLSETPLANSGALFGAGYVLRHGTHAEFTTCLWTGRVAAPGAGVVEFHVGPDGGAWYQVDNRQAGSPVKVTVTPHGRPLQSHCPAAGCRGGGQCFADAVPGGNCHAVDELKIIYYSP

SEQ ID NO: 38595 - protein, 159 aa, Oryza sativa
MRTASCCSSSSSSGLQERQELRRTPSRTEAGGRPLLLLFSLRSSNSLSKISCSCLICLDRRGETRRCVGVGGAARWGARALSGAEGDASNGREDRRPGWRGVDSTAGIGRGRSERLKLAVGDWYYGQVFGGGVIHGKYCSTVFKLCLLLKDSVSLVVIT

SEQ ID NO: 38596 - protein, 87 aa, Oryza sativa
MSSRGWGESGGGDPPRLQGDSISRSKAKSRTTSLQPGSVSEHVAASSAAAVETGLEFGKVDGEAHAPAPLHLARHQQLFCVHQAMMR

SEQ ID NO: 38597 - protein, 86 aa, Oryza sativa
MDSLNTKLYLQNCYMLKENERLRKAAVLLNQENQALLSELKHRLARSPSPAAAAPGVANDSKNAAAAAGRHAGPPPVQDKSASKSK

SEQ ID NO: 38598 - protein, 548 aa, Oryza sativa
MRRKPAASEGGWGSDADPDSGSSGNGGGGGSPPSSPSPPSPPSPQPLLPTLPSPQAFVDAYTGYEDQGAWDPDSLSLELGLATLRELECIRYQEAQEDWRKSDDNKSDSCKQKDKDQGAWDPDSLSLELGLATLRELECIRYQEAQEDWRKSDDNKSDSCKQKDKEQEAWDPDSLSLELGLAPLQELEWIRYQEAQEDWRRSDDNKSDSCKLRDKTTSDDRSKSGDNKYDSCKTRDKKPIVDLADEFENNTIKKKITLLSEKYDFFRPVDRDGSCFYRAFIFSYMERIVAMQDDLERIIEVSRIGERIGKYKQAYARFGSFGIPQEEFLKALSAFEQLINLIEKGVAVEQLYQIDETDITKNSLRFLRFLTEIEICTHEDHYKGFLLTADYSSVFEFCQVEVRPENAEASNEQMKALVEALGIPVLVENLDTTSETDTPILNQHFIYPRPESEEGTMLGPLNSHEIVSPESSGYHAARGELQNQPSTSGSSTNSSTEALGLQSIGTSSTPNERDGKGDRTINDLSPAERRRLAILLYRPGHYDILCPK

SEQ ID NO: 38599 - protein, 152 aa, Oryza sativa
MSSSSSSSSALLLMAALLLSCGAMGSTARHLEEKAPHFPAVPELPPHPELPELPKPELPPPLPELPRPVVPELPPHPAVPELPPLPKPELPPHPVVPEMLPHPVVPELPHYPAVPGFPKHGLPPKPELPPLPTAELPPEHEVHDPEPETKQP

SEQ ID NO: 38600 - protein, 674 aa, Oryza sativa
MRRPELIMRSLPLILFLSLGSFHLAAAAVDDQFTFDGFAGVNLTLDGTAVVTPGGLLMLTNGTTLLKGHAFYPSPLRFFHEATSGGGSSTVRSFSTAFVFGIVSEYADLSSPGLAFVVAKSRDFSSALQSQYMGLANARNNGNASNHFLAVELDTIVNAEFGDMSDNHVGIDVDGLASAAADDAGYHDDRTGAFVNMSLLSRAAARVWVDFDARTSLVNVTMAPLELPKPTTPLLSAAVNLSAVIEDEAYVGFSSSTGVVASRHYVLAWSFKMDGPAPSLNVSKLPALPVTIARAPSNVLKILLPIASAALVSALAIAVLVIHRRRRRYAELKEEWEVAFGPHRFSYKDLFRATNGFSDERLLGFGGFGRVYKGVLLVSRVEIAVKKVSHESRQGMKEFIAEVVSIGQLRHRNLVQLLGYCRQKGELLLVYDYMPNGSLDKYLYAENSKILSWAQRFRIIKGIASSILYLHEDWEQVVLHRDIKASNVLLDAEMNCRLGDFGLARLYDRGTDPHTTHVVGTIGYLAPELGHTGRPSKASDIFAFGVFMLEVTCGRRPVLQDTNGGQLLLVDMVLEHWRQGTVTDAVDPRLQGDFAVEEASLVLKLCLLCSHPLPSARPGIRQVVQLLDGAMPLPELSQAHLSCNMLALMQNQMGNSCSVASSVAGNISDIPRAR

SEQ ID NO: 38601 - protein, 34 aa, Oryza sativa
MDSTLTSGLTSPSSRRLTSSFIDISSRRPRSPSP

SEQ ID NO: 38602 - protein, 393 aa, Oryza sativa
MKRPLRRPFAVLLFVVLCAAASFPSVLRRSVGPAPVLATLPPLDPARLNATLLRLAAADPSEAPLRRDVDDLLEGRLPASSARARAWRLRGDRLHLHLRHHQFPVYRRGHHPDHDHDPLLHPLPRQELHLDPSLRRALRSWHRLRRHDPGVLRNLPSLLSLPGRIPSCAVVGNSGILLGASHGALIDSHAAVFRLNNARISGFAANVGAKTNLSFINSNVLHLCARRPNCFCHPYGDGVPILLYICQAAHFLDVASCNASSRSLHAASISVTDPRLDVLCARIVKYYSLRRFVAETGRAAEEWSSTRDAAMFHYSSGMQAIMVAVGVCDRVSVFGFGKAADAKHHYHSNQKAELDLHDYKAEYAFYRDLADRPEVVPFLNDAGIAVPPVVFYH

SEQ ID NO: 38603 - protein, 615 aa, Oryza sativa
MASISGAAAAAPSSSGASCGLRLRRDHLPRSSHFRLARPSSITDVSRSCSSSSSSPPRSLSSKQSGHADVLAHGAVDKDPIRLWNRYVEWLYQHKQLGLFVDVSRIGFTEEFLRRMEAPMGRAFAAMRELEKGAIANPDEGRMVGHYWLRNPALAPNSFLRDKIETTLERILAFASDVISAKIRPPSSPAGRFTQILSIGIGGSSLGPQFVAEALAPDNPPLMIRFIDNTDPAGIDHQIAQLGPELASTLVIVISKSGGTPETRNGLLEVQKAFRDAGLEFSKQGVAITQENSLLDNTARIEGWLARFPMFDWVGGRTSEMSAVGLLPAALQGIDIKEMLVGAAQMDEETRNTEIKENPAALLALCWYWASDGIGSKDSLLLLSRYLQQLVMESLGKEFDLDGNRVNQGLTVYGNKGSTDQHAYIQQLREGVHNFFVTFIEVLRDRPPGHEWELEPSVTCGDYLFGMLHGTRSALYANDRESITVTVQEVNPRAVGALVALYERAVGLYAYLININAYHQPGVEAGKKAAGEVLALQKRILLVLNEASCKDPAEPLTLDQIADRCHCPEEIEMIYKIIQHMAANDRALIAEGNCGSPRSIKVYLGECNVDDDMNS

SEQ ID NO: 38604 - protein, 106 aa, Oryza sativa
MMASRSRLRLAAAGENPIPHSKSGGEGGTERKPEEALRREVTDLGGGSEVVHVPRFVPREAAWGWFDYLDKRIPWTRPTIRVFGRSAVQVQRGHRRRPRLSLNPSF

SEQ ID NO: 38605 - protein, 72 aa, Oryza sativa
MRRRWGRSCGRGAAPSEAAAVDEEFLAVAVERRRRAASWVGVGLATDQCCLLPLQPQAGTHQCCLPAGRRAR

SEQ ID NO: 38606 - protein, 327 aa, Oryza sativa
MEIHLHLHFLAILVVVPMLGSPAAGGLCRDSCGGIPVRYPLSIDDGCGSPYYRNMLTCADNATLRLRTPSGTYPVVGADYADPHLVVTDPSMWTCERPFTSVRAAPFSLDTSTRFSLSPRNDYLFFDCDEERVIVEPRPAVCDRYPERCDSTCDSTGYLCRNLPGCRGALEENNMSCCAYRPRAAESLRLMLRHCESYTSVYWRAVGDKFPPYDQVPAYGVRVDFEIPVTTRCLQCEDRRRGAGGTCGFDPVTRDFVCICNDARNSTTDCADGPASRYHSSAGVVAASAVFSISAAVGITGLVWYIRKIKSTKVVTCGVQSNENRFF

SEQ ID NO: 38607 - protein, 308 aa, Oryza sativa
MPGPGAHLLYALSGGAALSRLAGAARFGPHHCAVYAANAFLGPDLGSFAEWLASFLPSSSSAAAAVGDLAMGVVHHPFYYPLLLGFPLACLYAWLSRRLLLAGVLDEPSRVALSRRQCFYLITAGSLSHFFLDHLFEENGHSTMYTWILSTGWWVGRAPINSDAVVIVGLLCICLVLGFVYINRVKHEKSATQKSNQSFFLIVVIAILYCMWCATQIYLRNPPQPAIGYYEWDSMMLMLLCLSSSLMEIFRAFSRCDTTCSMDGRCFLCPVHERASFKLRSNASVEYSPFSLGSANSNTLPSLMSMEA

SEQ ID NO: 38608 - protein, 131 aa, Oryza sativa
MRSIDRSIREAARGGDAVAPRRGEVRHHFGPPASGERPAAGDGRHGGLAFPPARIEAKAKLDRRDTRRLEMRTRRRPCRSAIWPPLLTWVSANCKREAGGGTDFEVRAGSNASAKGCASFLLFILLGVLQS

SEQ ID NO: 38609 - protein, 294 aa, Oryza sativa
MEVEIVEVGPSSRPLRYVPAQQRWRPTPTPLPPPPPPLPPPPAASAASSSGAGDAAAVASAANQFDSEKLPQTLVSEIRPFLRVANQIEHESPRVAYLCRFHAFEKAHMMDPRSTGRGVRQFKTALLQRLEQDEKSTFTKRMAKSDSQEIRLFYEKKEKADERELLPVLAEVLRAVQIGTGKEKQKRIASETFADKSALFRYNILPLYPGSTKQPIMLLPEIKVAVCAVFNVRSLPFANTKDHKNQMDIFLWMQSWFGFQKGNVANQREHLILLLANMHARLNPKSSSETMSSR

SEQ ID NO: 38610 - protein, 185 aa, Oryza sativa
MANASVPKPAKRLSRKRSFRLGLPLLCGQSDVASPRGGGGAAAAARSSSSGRRQGELHRIFQHFDRDNDGKISGAELSAFFASMGDEMPAPSPGGGGAAAGYMLDFAGFVALMERGDSQEEDLRSAFEVFNAVESAGRITARGLQRVLAQLGDERSVADCEAMIRAYDVDGDGGLDFHEFQRMMS

SEQ ID NO: 38611 - protein, 807 aa, Oryza sativa
MSDTHGTGAPTSCTPSSHDYTKPALVVVVVVMATVSGAMSVVGVERLIRGRFTLFSMVRFLLRSTFVLILPLLSSMSRDTVHRPSVLFVLLWMLLVELMRKKVSSMARSSGADGGAFSRATGGRFRLMGHCDEATKLAWIGWLIFQNTYYSDSKCGDHKVLAMFAVLWSLVVAKLLQRVFNEWKAQESLTAAGNTHLIAGYMQLVVDKEATAAAAAAAAAGTALARCKYVVMGEEKLVVHAVKKKKHDVVTTTITTPHCGYGVGTYPQHQSEQKHVNLLVDMAKCDEVVTVQKIKRKIKLPRWWCCCCSTVTGSRFTDYIYQLCFSFALFKLLRRRFEHYPMVEAGSQTSRQLLLEELLVGGAKKTFRVMRQELDFLDSYYDAGSPVAMSSPWLFIVNYFFSLVFVSTYLAAIIVVLVDVEYNMGTFKSHLPSPGLYIAVSILLVVTLVAVEFTDLLTNYILSNWFMVHLFCLQAGDGGGRVWRWVCKPAIWMFIAGRFLLFYSFQCMLRLSCRGVNVDKIKLKQVSILRVCEPVHKVLTWSPQVKLATEGQTAIVNFLEDVVRDSLKDDGNVAIVSMPKLSGLQPKKGVDDTATQVVLACHLATELLEMKHVVMVDKEAKKEKKKMKREDRRAHDLHRGVATALSRYCMYLVARSPELLPDNERWVADRYGDMRAFLDEAASRRRRRCCCCLRRRLWKCGCWRTFLMDDMVVDAAAEPAAQAGVALFRKLHARTTTTEGGAVVVSAWKELADFWVRMVVYLAPSSDVEGHAMALADNGGDLITYLWAFCTHAGIIRDPNPSDKSLV

SEQ ID NO: 38612 - protein, 351 aa, Oryza sativa
MILRIRSRDGTDRITVPDPAAATVGDLQRLIAARVTVPVPLQRLSLDPALLLPSSASAALLADPAAPLSSLRLSNGSFVYLSYPPDARSSQPPPPKALSAAGSFGKKMTMDDLIARQIRVTRQEAPLCAAASFDRDSANAFQLHVAESLAFATKRAGFLYGRVDADTKEVFVDFIYEPPQVGTEDVVQLMRDAQEEARVDAIAHGLGMRRVGLVFTQAVGRKTSDTGEYTMSNREVLQATELQAEGGIPEWVTAIVKLEVGDDGSGDVHFEAFQMSEICVKLFKDGVLETEIGDKDDPRLSKMRKEVVAGGKDTMEVDNDFFLVPVKISDHQVFLFFPTLLHSIMNLQFTK

SEQ ID NO: 38613 - protein, 260 aa, Oryza sativa
MSSHERFRLSHLMPNSWFYKLRDMKRPRPTSSRMITAADHAARSSRRSSSSSSSIHHYYLHGHGTTTPKPLPLSPPRRSYYPYLERAKQMPLMEKESQLISHSPLHQRIPATAIPGDHHDGEFQDLQLRPIRTRPPSAAAASAEPRRTASGSGTCPSSPRMRSRRLHVLGGCECRAGSGRRRSGGGGFAVVKASAEPARDFRESMVEMVVGNGMRSPEDLLELLECYLSLNAREHHGVIMEAFRGVWVEIVADADCCVGL

SEQ ID NO: 38614 - protein, 419 aa, Oryza sativa
MEGALSASLGGLEFLETLAIRDMARIGGAIPASLSRLSRLKQLYLEGSMLAGGVPGSVLSGMASLQYLSLAGNRFEGKLPPELGSLPGLVQINLAGNRLSGEVPPSYKNLSRLAYLDLSNNLLSGAIPAFFGQQLKSLAMLDLSNNGFSGEIPASLCGLRNLTDLSLRHNKLTGVIPSQIGSISSLNSLSMDSNLLVGSIPESLFGLQKLWNLNLSRNGLSGSLPPGIRHGLPSLVSMDLSHNHLVGGIDHFFRSISPARRLTKNASSDMSVIFLPRQLQHLDLSKNSITGALPEFGAGASLRWLDVSGNAIGGQIPSSVWRLVGLQRPDISRNKIRGTIPASVASMASLRWLDISGNALVGRIPDSFARMARLRHASFRGNKLCGKIPQARPFNLLPAAAYAGNLCLCGKPLPPCRQI

SEQ ID NO: 38615 - protein, 490 aa, Oryza sativa
MAGGGGKSVAAALAMACFLLILAAFAPPAAAAPPDIMSIIRYNAEHGVRGLERTEAEARAAYDLWLARHRRGGGGGSRNGFIGEHERRFRVFWDNLKFVDAHNARADERGGFRLGMNRFADLTNGEFRATYLGTTPAGRGRRVGEAYRHDGVEALPDSVDWRDKGAVVAPVKNQGQCGSCWAFSAVAAVEGINKIVTGELVSLSEQELVECARNGQNSGCNGGIMDDAFAFIARNGGLDTEEDYPYTAMDGKCNLAKRSRKVVSIDGFEDVPENDELSLQKAVAHQPVSVAIDAGGREFQLYDSGVFTGRCGTNLDHGVVAVGYGTDAATGAAYWTVRNSWGPDWGENGYIRMERNVTARTGKCGIAMMASYPIKKGPNPKPSPPSPAPSPPQQCDRYSKCPAGTTCCCNYGIRNHCIVWGCCPVEGATCCKDHSTCCPKEYPVCNAKARTCSKSKNSPYNIRTPAAMARSVPEQPDSISFVVLNREDLV

SEQ ID NO: 38616 - protein, 147 aa, Oryza sativa
MGQEEAAAAPATVMFSWEQELGVPKQKMASDDDMPESPRKAPPPPARRLSVPPPPGRMLMAGSKSFSKARAVRPEDDPFLAAYLACTKSSNGGGGGVARESKGQRRSRWAGLGLGLGLGLSCKSSNGVVEDSMVKMAKLPEVHPRDA

SEQ ID NO: 38617 - protein, 148 aa, Oryza sativa
MSMAAHMVTSSDFFVGGAYNPANFPNTGFLYVRSSRRAVGVMEAWRAARASYPGRHERQVLNEIKRELVERRGVRIQFLDTAHVAGFCSNTRDFATLYTMHANCCVGLGAKLHDLRNLLEEWRAYRRMPDEQRRQGPVRWKVPGICIH

SEQ ID NO: 38618 - protein, 145 aa, Oryza sativa [sequence omitted]

SEQ ID NO: 38619 - protein, 103 aa, Oryza sativa
MEQARVPPSHGKAPRRRRRRRRRRKRGGRRPTSVATGRMEPALARVIWQTNCETEQQSTACHCDHCVHGFYHHHRALNEQASYCRLFYATAHTHQLATTSRGF

SEQ ID NO: 38620 - protein, 69 aa, Oryza sativa
MGEYTATTCHFKLLWQTTTYSASIRIISFFSHALFLNAKHVRYRLGYTIPMIRPCKTNKHSCFHLPINT

SEQ ID NO: 38621 - protein, 577 aa, Oryza sativa
MPKASPFLSLLLLLLLITIYIAHGAAGDAIGGDPWQEPEVAQQPAVVLAGEWQLLHQNTGVSAMHMQLLPGDYVLMFDRTDSGPSNISLDALSPCAAAATTALAAGGGGAVDCTAHSVLLDLRSNALRPYPLATNPWCSSAALLPNGTLLQTGGFSNGDRIARLFSPSTGWVDLPSFLAVRRWYATDILLADGRVLILGGRRQFNFEFFPHDDAPAPQPTLFPFLEETTDMDAEDNLYPFLHLLPDATVFVFANDRAVVFDPYNRVPLRRLPAIPGGVPRNYPSSGSSVLLPLRPDSPSHAEVLVCGGAPRGAYRLALRNGTFAPADRTCGRIAPTDANPVWAMEEMPLPRAMGDMVLLPTGDVLIVNGAAAGTAGWELGREPVTYPVLYKPDMQLGARFEVLAASTIPRMYHSSATLDTLGRVLVGGSNPHVGYVFDNVTYPTELSLEAFLPPYFDARLDGVRPRLVAAPSEVGYGEAAAVRFEVPGGAVSGGPEEVRVAAVAPAFATHSFGMNQRVVSLAVGTVAQLAAGLYGAQVAAPPSPSVAPPGYYLWFVLHAGVPSTAAWVRMRPLGAAT

SEQ ID NO: 38622 - protein, 183 aa, Oryza sativa
MHSWPVGLVSSCNKQTLSYHTTIAYLHFTNGEVSLLHREEQERRHGGRRRRRRLEVPQRLLRHLDVLCSSSSSSLVRRCRQRQGEQDQEEEGGGHLAIVVGVGVDVGVEGEGVGRARRRGGDAAAAEGGRLPGVRRGGEGEGVAPEQHAVDQGQVHPRGGRLVVISSCCCLLLLLMMMMMNWW

SEQ ID NO: 38623 - protein, 99 aa, Oryza sativa
MTVNSQPLLFVVKDDKTDLKLKKHLQELEQMLDQIVSEHVKLHRLVHSSDRGYFERLLSEHGWPKCKPRDVFVWRCRLTTIFVASVMIGYMLPEIGYPS

SEQ ID NO: 38624 - protein, 453 aa, Oryza sativa
MGYGFSTKLTAFFWPWRFSPWRFSPPPSTPMPRPHLPPPGAPSPTPMATAPALHNFPHASSSRRSPTLCDGLPLPHRHISTAPPPGPSPASPPKTIVKLASSIGTVVPVALSIVPYFYQVYTGNFERTIEVYGAPAMLAGSINSIIWLTYSIMASKKDLNLALILMHALLCMSTFTYLMCICACKRATKEGYILGAFFIGCLSAISIVVHWDLNPSKVVKIIFRCFGGISLLSCHYILLNDILGSVPKRSQKVATGFDLILSCITNLVTFIITFHDHPEHTTSLITSGVGFVLNVVEIVLLVIVTIMGYFFPLSEHPDADVEASRHISATRVTGVGMIPLEDALGTPETDDFIAVLTHEPQVPQFEVSYLILQVRNEFEIYSLRSMVNPNVQIITRVLFVEVIQRTMMRIERDHYIQILLQASGIAAAEPYPLMLRDVEIHYQTIRNQHEALP

SEQ ID NO: 38625 - protein, 321 aa, Oryza sativa
MKGPVEVTFLDGDDDSDDDDRWYYSPRREAVLCIGDDLALVDVTFPVDDMDTNPWFRGIAQLCRGHRLRAPLVVGLVALRGRAPPYNWCPWDASGVRGHPRDPRNPIRCIAICVGGSHALVYQPCCDRGSSKYTGGVLPFSEGGCKMARLRAFLRDRRVTVACVGAREAAEKLAEEWEVDVARPVELTDLFARAFGKVAGVDTVKPPKEPEPDRRWMTTSALLRAEAKAEAEAAKENHYSYSKRGKRPAAEVVKGLSMERMAHVALGPEMRLAPWPEKAADADWGSCYLEKSDWKYAARDAYLCLEIAAVCLQKLGAPVGN

SEQ ID NO: 38626 - protein, 426 aa, Oryza sativa
MDEWEELAWRVPETLMLVSCEMEATRLIEVAHSNLQVRGTLFRRIHLGMPAAIAMNLFGDPAAEGVIPTEILEEARREISQSGARHGKTRHVFARYVVAHLGVQQDDPAYRSWEVHHQDAIRFTDKALEKVSEAASHAEAAKDAVDIAETLLSQPQPPLQLWAEWTSAAEKLVDQAALEATLALDEVLRARQSVALEFFDAVAILRRGRAPPAAVDKWWQEIERTLPGAFLLVATGGLKALRLIRDAHGKLQERVAMLRVNLRQETPAAAVPVEGNSAYQLDPEGICPTVALEDARREISQSTVLHAKTRHVLARYVAHLGAQQDDPAYRSWDVHHQEAVDHISKALKRVIDTVSNAEAGKVALVIMGSVAYRCPLWDVWASEAEKFTAVAALEATMATNEMRCAQEAVAQELSDAWTILLSRRRN

SEQ ID NO: 38627 - protein, 81 aa, Oryza sativa
MPRLAPPPATASRHSPLPLRRPSPAPTTCRPLAALPSRHPRTSASRSSRPSASRRHLSPRPPPARATRSSAATRRCRCPPA

SEQ ID NO: 38628 - protein, 62 aa, Oryza sativa
MQTLMIICMKIFQPWLLLQSMENIQVFCLDLIKMPWLLGSYILIRYEIMEHVRSSRALVIIY

SEQ ID NO: 38629 - protein, 95 aa, Oryza sativa
MEFHRHAGGAKGCCRLRDGGRRRQTQAAASARPRIGVSRRRQLARVHASVCAPRRVAGGQSAPPPAAFSSWRVSSFLDPPSPHLHITVRFLILIE

SEQ ID NO: 38630 - protein, 517 aa, Oryza sativa
MMEVTGRILAPPTLELGTGTSRGQTFKFTIHQDDCQWNWKLKKYDKRVVAHGGTLNCWGVVDFSEGDLESKFIDKVVRKCSALGMVMTRKPCYEHVSNMEVLSDPKSLRDALIEAKRAAEEEDKKLQLLFCPMLNRCHGYKTLKLMCETELGIQTQCFLSTAAKLDEKRQDQYITNLALKINGKIGGSNMQLDPDSIPVVSAKDFMFIGADVNHPPPGNVSKDIPSIAAVVACVDKGASKYVTRIRAQYHRCEMIQNLGDICKELIGAYEKVNKKKPDSIIYFRDGVSDGQFDMVLNEELADMENKIMVGDYPKITVIVAKKRHHTRLFPKDRNQRQTKNGNVLPGTVVDTDVVDPTAYDFYLCSHKGEVGTSRPTHYYSLLDEHGFASDDLQKLVYNLCFVFARCTKPVSLATPVYYADLAAYRGRLYYEGMMMLQPAASAASASEAMMPAAQPQAAAAAAAAASPSSSAASSSEGMTASQPQAPAAEAASSSAGAADFRELAPMHGDLLNNMFFL

SEQ ID NO: 38631 - protein, 94 aa, Oryza sativa
MSTVRSGFLACQALYSWYFLRRFQLVLVLVLVAPLRQVKNLWHQQKEKKEEKISNQMCLLIEEEHNTAKALEGIPKRDLALGLLAFSFFFNSAV

SEQ ID NO: 38632 - protein, 414 aa, Oryza sativa
MAGGGGGRGRGARVAAPAGDSGKGAQAEWLRIYDGIVAMLRKTQAQVEELVAERDHLAAFVKIQHDFMVSRVGRLQSSLQQARKADTIRKRYEAANMEILIGDKEREARSYQKIAELTENDLEDFRTSIAALAAENYELKEKLKEVERHAELAENTVDHHIHSPRDLRAELKKLKHAYKTLSSEKEKEVSALRAENDFVWNQLRTMENDYTDLLKKKKIEAAQATEAAQKLQKNLEELQDQNKGNEIGRLQAEAVDAKMNISILEDKLQEMLSLVKEKDLEIEQLKHGQPMTSQINKKDINQKNRKCRSQDPPSRDKSTNLQATPPGRKVKISRQHASSSKQKQVQSRNNSRRQKLEGDKSEVGEKRKRALPSSSGLQRCSARQQAKSSASPVVQPLLFSPIFRVPKVKTPTPP

SEQ ID NO: 38633 - protein, 206 aa, Oryza sativa
MAPAVASSPSLVLSAAAATAYNKRPADSDASPPHQGDRTGQQEKKQQQLECPRCRSTNTKFCYYNNYSTSQPRHFCRACRRYWTHGGTLRDVPVGGASRRGGGGKRRRVSADADPSSASPPPPTTSTTDAYADLPAGFPFLSDGAFLPQFGLAGVAPAAFSWASAVPDLYNCGIAPWDDGTAVTGAAWDNFADIAGLDLSWPPPGN

SEQ ID NO: 38634 - protein, 316 aa, Oryza sativa
MHDAAANDGAYCPDCRRATAVVLDHTTGDTICTECALVLDARYIDETSEWRTFANDGASDDRDPNRVGDRADPFLPDHVGGTTIAYSSAPPKSADAAPLLTRRRVDVVGPSPENALVAAFRGIADMADRLGLVATIRDRAKEVFKKLGEAPTKGLPRGRNRDAVYAACLFIACRNEGMPRTYKELASVTAEGAAAKKEIGRLTTLIKKHLGDQGEGRAMDIGVVRSTDYLRRFCSRLGLGHQDVRAAGDAVRRLEERLDVRRNPESIAAAIIYMVVQRAGGSKSVRDVSTATGVAEGTITAAHKELAPHASVLFGG

SEQ ID NO: 38635 - protein, 196 aa, Oryza sativa
MALSTRRVCVLLLLVLLGLAATSNRARAARVVPAAGAAALRREEGEAPAAVHRGRRGVPRIGRGGGVGGGGVTVPVEHVARRRLQEHEHLNEEMLPSFSGGGGSRGGGVSSGGSSRGGGSSIGSGGGSRGSGGGSSSASRGAGGTESGRRFIPPIIPAVPGGGGGGCSGSGSSSGRRGVWNVGVAAASVLAVAWLV

SEQ ID NO: 38636 - protein, 66 aa, Oryza sativa
MAGIVVGRACWRWEVVRMSSSPWDHADECLHLHFILPRVLTWRRCRSCSPRLDAAAAVFLFRSWKR

SEQ ID NO: 38637 - protein, 86 aa, Oryza sativa
MAWASPRLSRLAVKRKRRLGFLTTPQSLRHRRSASSDEFFAFTPPKFSSRLQHAVAAGCGCGCGCGELPPSRRRGRSGEGMRRRRR

SEQ ID NO: 38638 - protein, 212 aa, Oryza sativa
MRTGEVAEAVPRVVAILSSLLQRVAERNDAAAAAAAVGEEAAAVSAFQGLTKPAISIGGYLERIFRFANCSPSCYVVAYIYLDRFLRRRPALAVDSFNVHRLLITSVLTAVKFVDDICYNNAYFARVGGISLMEMNYLEVDFLFGIAFDLNVTPAAFASYCAVLQSEMTYLEQPPAVDLPRLHCCPSDQDDAGCHHKQQQQQQQQQQHQLAV

SEQ ID NO: 38639 - protein, 143 aa, Oryza sativa
MARGKNDDEATAMDVVARKNDDVDEATPMTTPQTGKNEAEAAEAAALKGGAVVLTVESEDPYGDFRSSMADMVAAHGLRDWEGLEELLAWYLKLNAKGVHGVIVGAFIDMLVSLASSPIPSQSPSSSCITFEDYSSATMEEES

SEQ ID NO: 38640 - protein, 289 aa, Oryza sativa
MEKIRLMGILQRIAIAYIVTALCEIWLKGDDDVDSGFDLLKRNRYQLFIGLIVMITYMGFLYGTYVPDWEYRISVPGSTEKSFFVKCSVRGDTGPGCNAVGMIDRKILGIQHLYCRPVYARSKQCSINSPQNGPLRPDAPSWCQAPFDPEGLLSSVMAIVTCLIGLQYGHVIVHFQKHKERIMKWLIPSFSTLILAFSLDFFGMHMNKPLYTVSYALATAGAAGLLFAGIYALVDMYGHRRPTAVMEWMGTHALMIYVLIACNILPIFIHGFYWREPKNNLLRLIGVGA

SEQ ID NO: 38641 - protein, 207 aa, Oryza sativa
MSLMYTSASALPAISSSQRKEESKSATDCLSPPPPPPCLDLLSSSALCFAMADATKLSTVRLAAAFLFSCPIPSHLIVFQNDTGMVWRRKIVRSTSSIARAKGTSGRPMSRQPGSTPNTRWHVASSDHRVNTSCRSHVFRASATCARKGRRPFSTLSRLERATKARNRGVVMSIWALFRCRRHRSPSVLKMPPPRTSNMSANTSPLG

SEQ ID NO: 38642 - protein, 57 aa, Oryza sativa
MIAICSPITSSQNQSRMMQSLEQCQLYLSRTRMSSHVCDFQFATYHCNREFQQSCNK

SEQ ID NO: 38643 - protein, 330 aa, Oryza sativa
MPKDHTKPPRVRTLGVNTTLSGFGHENVEKVYSDTTTPSDDQTKTADSTVTKKRSAGFLFDEEGLFNVDDEGRTEKQQCAVAASNIIRNFSFMPENETVMVQHRHCLETVFQCLEDQNTEDDELITNMLETLVNLAPVLDLRIFSSSKPSFIKITEKRAVQAIMGMLASSIRVWHCAAAELIGRLIINPDNEPFLLPAIPQIYKRLVDLLSVPAVDAQAAAISALYNVAEVNMDLRLKLASERWAVDRLLKVVKTPHPVPEVCRKASMIVESLVSEPQNRMHLLVHENTFAEILTSEGKYSDTFARILYELTARPSNKVTAGQAIWGNIN

SEQ ID NO: 38644 - protein, 163 aa, Oryza sativa
MYPAIRSSFSEDHSLAVQGLEKMAGVRSIIGVKRMGELDQKAFYNACKNKMPNNKMKLALVCSKWEDEITKPEWHPFKVIETAGQTKEIIKEDDGKLQALRAQYGDEACNVVVKALVEMNEYNPSGMYPVPELWNFKQNRSAPMPEAASYLLKQWKTHKKRNT

SEQ ID NO: 38645 - protein, 197 aa, Oryza sativa
MREGRREPMGDWMVRGREREGKEEGRFAGGGSRPPPARPRRPPTRPPPARPGRLHPAGGWRRRSKGAAAAEGNRGGGGRRSRGRSGRGCPRRWPAGATARWLRGSGAGAGGGAGGRDRAMTVAARTARAPPRGLPRRRGAACAPTKSAGWRRTRAPTARRTRASAPSSRTTTSSPTTATRTPPPPSPSPATAPIRCH

SEQ ID NO: 38646 - protein, 630 aa, Oryza sativa
MDGESQTSKLSCEHMYSWYFTREELEKFSPSRKDGITEIMESEIRQLYCSFIRDVGIRLKLPQMTIATAIMFCHRFYLYQSLAKNGWQTIATVCIFLASKVEDTPCPLDQVIRVAYGTMYRRDPATARRIHQKDVFEKQKALILTGERLVLTTVRFDFNIQHPYRPLLDAMEKLGISQKEVKQVAWNFVNDWLKTTLCLQYKPQYIAAGSLYLAAKFQNVKLPVHGGHVWWHQFDVAPKPLEAVLQQMREMVHMKAKLFAHPSPAKQKEVLFEGMLLISNSPDSVLTQSSLSVSSSSPEIGDPNDHLQVDSSQDIVHIEDRSKSYPERNLSNLTADMNNPGKTHNKESLDQALKIKHGGLISCNQQIPLDAIAKIDSSTAKCVEQNIGICCSSSNTFNGKILNPFSISQRSGDKTKLCSEGGSSLTDVDSKSTQSVEPPTTICNHTSDSLNVDSLCSDQRLANSTAGTTEKASFVLPVQIKVDHLCVERKKVDVARIKDLLMKRKRRRERQGRCIPSVDLSEEAWIERELESGIVFKKVDHVVASYDLSDEGWIERELESGIVIGQKNDQPVSLDGLTEDDWIERELESGIIVEPGPAGKKLKSKLLSEGHEIMNSRWEINGKSMQNQVT

SEQ ID NO: 38647 - protein, 541 aa, Oryza sativa
MAAGLLLKLVGFCFWAVFWLGGAATVSTNAGGEAAAAAVVVDARSAIAVTDEDFVCATLDWWPPDKCDYGTCSWGLATLLNMDLSNKILLNAVKAFSPLKLRLGGSLQDVLIYDTGDPRQPCTPFTKNSSAMFGFTQGCLPLHRWDELNAFFQKSGAKIIFGLNALNGRVPMSDDSLGGPWNYTNAASFIRYTVSKGYDIHGWELGNELSGSGVGARVDADQYAQDVLALKQIIDNSYQGHASKPLVIAPGGFFDAAWFTELISRTKPNQMDVMTHHIYNLGPGVDTHLIDKILDPSYLDGEAGTFSSLQGILKSAGTSTVAWVGEAGGAYNSGHHLVTDAFVFSFWYLDQLGMSSKYDTKTYCRQTLIGGNYGLLNTTTFEPNPDYYSALLWNRLMGTKVLSATFNGTNKIRAYAHCARDSRGITLLLINLSGNNTNHIYVTSEGVQPYSTKKEGRRRFGRIPGLGEEAQLIREEYHLTPKDGSLQSQHVLLNGNVLAPDANGEIPKLEPVQVEGTQPITVAPYSIVFAHIPRFYAPACR

SEQ ID NO: 38648 - protein, 323 aa, Oryza sativa
MGCVSSKILSKSGSFQEKVVSHGFKGSNLIEEIILSTPKKSNGDQFLALLRTSTSSASAAASRAKDAADQSTTAAAVAAEEFVKIETINVSELLAGLEEEEEEEERDDGERCSAQACVLDGAVATPARATSFRTVEEFDALVTRSGSSEVAEAASSADQDATGAKPSEQEEAATAAAGNKRRARARQLGELKVPLPPAFDFSKSGSLRDWLLQGGQIFSPGSYVTPKFGTTSPAPSPPPPQERGGVLHNAGEPQPQHTVFDPELVAQFEQAMERLSEDEERVLEKILEAMGAAAEEEEEEEATATATARLEMPSHRPVMVVQE

SEQ ID NO: 38649 - protein, 237 aa, Oryza sativa
MTSWSDVSGSMPYEKLPGEGSPPASFQDTRRAPRRVRLFSWIFISGMSVSVGWSKLCHRMAPFDRTTRLPLLRSSATGGEVERPAATPAVTLVDQRTRPSASDKTRLESLVSASLGAMDLPAAIAGASRLATHTTVRSVMLYHMPMYCLSGVELDGEKKPSTKAPPSEALVCPGNSCSPSSILSLADEHNRGKRRRKTTMVVQAVLSITKICIPFCTLQDYRIRRSSFEVHNQIHKL

SEQ ID NO: 38650 - protein, 290 aa, Oryza sativa
MLVRCLLVVALAAVVAAAAGRLALAKENNGGRGRWQVYSPAPSPQKHPCLENPPNMTENTGGEAGDVVHGYGGLECYATGSRRSGGRAVILVSDYYGFRAPKLRKIADKVAYQLGCYVVVPDLLFGDPYTDDPARPFEEWIKTHSPVEAAEKTKPLIAALKKDGTSTVGVGGYCWGGKVAVELSKTEETKAVVISHPALVVVDDMKEVKCPIEILGGELDTISPPQLIHQLEDALDQNKRVHHLVKIFPDAPHGFACRYNATDPFAVKTAEEARADMVKWFDKYLEIMKR

SEQ ID NO: 38651 - protein, 368 aa, Oryza sativa
MHLSPQLGETMPSKKRKVELHADDQPPPTQAIMATPEPCSGRPWPDLPSELLGLVLLRLPSHADRVRLRAVCRPWRSSARVELDLLPPPLPWLLLRGGAFITLPDGAAHRLPAVPGDATHLASTGSGLLIVHGDGMLSLMNPSSLATTPLAALAAVLPKYISSIVDIASFQGKLYYLTSDVRKRQEELYIFGVDNAKQIGIRCISSTLKDIGEESWFGPCSTERYATERYLVASNDRLLMVRRWINLPPIYPSDSGIVKRTRRFEVFEAADLSSGCGRWIKVDTLMGHALFVSKGCSKSLSAGAEEDCIYFMHEDIKNGKPEDPFLDSGVYNMRDGTVAPLLTETLVAEPLAVHGGPWCPTWLFPSET

SEQ ID NO: 38652 - protein, 100 aa, Oryza sativa; identical to SEQ ID NO: 36093

SEQ ID NO: 38653 - protein, 103 aa, Oryza sativa
MTASAVPLPLRRNGAAPLLPPPPVALLPLPAPVAPLHLPPPSRFVHTALHRRVLDGGKSATTTTLTSPLPIGLDGGATGRAILLSFSHLPPSRRRAPEDGAPG

SEQ ID NO: 38654 - protein, 364 aa, Oryza sativa
MNVNGLHKFISDNRKDLTSIREAIPVALRGATDPYGLVLASLEDFYFGDNLILDGKKDGNLLGVRRTCLMLMESLAQLQTDATTGFISEGQVLTASIKERAKKIALEWKSKLDSLDFDASNGNCLEAHAFLQLLATFGIFAEFAQDELCKLLPSVSRRRQTPELCRILGLSQNMPGVIGVLVENGRTIDAINLAYAFELTNQFEPVELLKAYLQEVKSVPHFKTGKISLQVQNEMNERELSALKAAIKCIEEHKLDEKYPIDLLQKRVIQLEKAKADKRRAVEAAKPQSKRPRANGSVYAPHTSFPDKSFYQAAPPQRHSYPYERQYVYGAEAHHHPTMISSAPYGISPAHTTYYEKDGEPNRG

SEQ ID NO: 38655 - protein, 222 aa, Oryza sativa
MSPSQAPPPHPPPPAPTSNNKPPKKRPRASRRPPTTVLTTDTSNFRAMVQEFTGFPAPPFAAAPPPAVRPRLLGGVGGGHQLPPFLLRPSPLKYTHSHPTPPPPPPLHHQACTTTSFLGNAAAATTSTSSLVDALALFAKSNVMVAPPPPPPTSAAASSSADQYHHHHGMTMGGLFNPFDDYEAAAAAAAAEGDKVVHGGAGHGGFFSPLGAGAGDDKYDRH

SEQ ID NO: 38656 - protein, 247 aa, Oryza sativa
MGKHGKCDVEACYPGGAPGGGMYPYMIENAQLRWAFIRKVYVIVSVQLLVTVAVAGAVNLVEPIKTFFQARTPEVLVAYVIIIISPLIMMLPMIYFRNKHPINLFFLLLFTVCISFSVGLGCLSKNGTVIFQAAGMTAAIVIGLTCYTFWAAKRGYDFEFLGPFLFAATLVLFLYAIITIFLPMGRTGKLVYGCVAALIFSGFIIYDTDNLIKRYTYDEYVTAAITLYLDIINLFMALVTALQAADG

SEQ ID NO: 38657 - protein, 219 aa, Oryza sativa
MVPSPRGGCPPSSPSGSPATTTATEDPVLVGVTDEGVPLEGVIQFDKPGDAAAESKLVSYAKLGLLASGDVLCLLVFSAIGRFSHGLPVLDAETFKTADPFIAGWLLSAYLLGGFGDDAKGRNGVGNAVVVAAKSWAVGIPLGLAIRALSSGHIPPTPFILVAMGSTWVLLTGWRALVSLLFSTGQSQQDDVYRRGSPFELFEVKKVLQIIGIFFYTCN

SEQ ID NO: 38658 - protein, 92 aa, Oryza sativa
MAAGSGREEAAAAAGYGRGPPWVFRGRALYQLHLVKAATARAFVPRELRLVEAFGYTLGGMFLARYDDSPAGKFDELVVIAGIVWNPPTSCA

SEQ ID NO: 38659 - protein, 327 aa, Oryza sativa
MRIHPNTPPPPVRIPAREAQNCMYDRAVLSFGPRTRAGDAAAACVVLLLHKPMCELSYARPGDERWTWVSPGAGTGLQWRNWYCDAAYNKDDGLRRAARRLRPCPGPHRPSPVARKVFHEREWSESLASRFLENVHGLCGIPFRYLVHTPSGELLHVWRFRDSVSSYDLSLDDQDDNDDDDDDDSGDSLQEESSPEDEDDDSCDPPDEELVTEDIQLYMTDFHGQKLEAMDSLDDHAMDSLDDHAMFIGYNAPLCLPTKDFPGLSPNCVYITDDSLEYINYSRRNNKRDIGVWSIEDQKLQSLGGASPIKDPWLNWPAPIWITPSLL

SEQ ID NO: 38660 - protein, 161 aa, Oryza sativa
MGGPLSTLSTWTRRAWQQPPLPRGGGGCAAAAAADRSASTWPRQRPGGGRARPQRSWQRLKKGRRGRWRRLASPSAARVAVELGIDLAKAVVGRRACSSSVFLVAGQERARGRQRSWRRFCVFCLVSSSHSSSSTAGWERERILCFLVLSSMFSFSDFNEE

SEQ ID NO: 38661 - protein, 377 aa, Oryza sativa
MAAAAGGQTVGRSSFSRAAAPHVASSSTAAGVKLGPNGAAFVSSGIPDLDRILGGGFLIGSVVMIMEDSDAPHHLLLLRSFMAQGVVHKQPLLFAGPMKEPRLFLGTLPAVASSKEDGRQRGMGAGTSSDGRTSDEALRIAWQYKKYFGEEKTSHAEHRDNKQEFSNDFDLRKPLERHLLNAQNIECASTQEGDTLGVLQDRCSTFLSKLPRKDGGNAHAGRIAIQSLCAPQCGYFEKDWDMVSFIRSLKAMVRASNAVAVITFPNTVLSSSFCKRWQHLADTLLSIKAIPDEDKELAKLLTGYQDMVGFLHVHKVAQTNSQVPVILEASTFSLKLRKRRSLVLERLNQAPVGGSGGPSLDASGSCSSSSQGSQLDF

SEQ ID NO: 38662 - protein, 607 aa, Oryza sativa
MAPRGRRLTEQIHSEHQVVAALLDKAEALVMAARAKGAHGGAAAAGEQHPDHPSRGKKSGRFLRRQETPPEAATAIGGDVSPPEKRRKTTAASPIVEVEVEVIEPTMPKAQRDRLYGLLASLSADTPLPPHIVGLMRSQCCCVVDPNGEEMDVDLSSAKDAALFQLLNLLVEFAQQQTTKIIEEQEPPKIEASDATSSSSICDLLEDGEIADEGAAMGMDICGGVSPLIVDSAQLLPLPKQQEDDELIDIYGGVSPVSVNNFPDSPRSSSSRSDSSSSSSSSNGSGSSSSSSSGASSGSSSCAGSSSSSSGSDTDADADSASNRPDTTTDHPTEAEVKPMVEHEVMEQDKKLTTERAAASPASQLCITDMGIDICGGVSPLVVDKAQFSPLPKQQQEDDELIDICGGIDSPVSVSKFPETPRSSSSDSSSSSSCSGSSSSSERNDSASSRPDTTADHPTEAEVKPMEEQKLIIERAASPHTEMQELITERAASPHTEMQELITERAASPRTEMQELIARAQERQKLQRELEREAARELERKAAREQLQEMKRTAQPVFDIIDPRDMKQLGISGEAQYIVSPVKSRDSLRRRGGGLLQRLGFFLKAEF

SEQ ID NO: 38663 - protein, 587 aa, Oryza sativa
MNRPEWKQALLGCVGAVVFGAVLPLYSYSLGSLPEVYFLADDGQIRSKTRLYYFLFLGIAVVCITANIVQHYNFAVMGERLTERVRGQMLAKILSFEVGWFDEDENSSAAVCARLATQSSKVRSLVGDRMCLLVQAGATASLGFSLALAVSWRLATVMMAMQPLIIASFYFKKVLMAAMSKKAKKAQVQGSQLASEAVVNHRTITAFSSQRRMLRLYEAAQQGPKKDNVAHSWFSGFCLCLCQFSNTGSMAVALWYGGKLMAKGLITPTHLFQVFFMLMTMGRVIADAGSLTSDLAQGGDAVRSVLDTLDREPTIKDDDNDNERKKKKRKEIKGAIEFKNVHFSYPTRPEVAVLAGFSLEIGAGKTVALVGPSGSGKSTVIGLIERFYDAQRGSVLVDGEDIRSYSLARLRSQVALVSQEPTLFSGTIRDNIAYGAAEEHATEDEVARAAALANAHGFISAMERGYDTRVGERGAQLSGGQRQRIALARAVLKDARILLLDEATSALDAASERLVQDAVDRMLRGRTCVVVAHRLSTVEKSDTIAVVKDGRVAERGRHHELLAVGRAGTYYNLIKLQHGRSPCLSPM

SEQ ID NO: 38664 - protein, 329 aa, Oryza sativa
MALEAVVFPQGHFGYGCGRDSPAYGMPWCDVLAAAGGGGGFGEFYGVDEWDDQLQVASVDEWEVASKDNSDASTEGKAAAAERAEPVAAGRRKRRRTKVVKNKEEIECQRMTHIAVERNRRRQMNEYLAVLRSLMPASYSQRGDQASIVGGAINYVKELEQLLQSLEVQKSLKNRSGAMDAAGDSPFAGFFSFPQYSTSPRTGCSAAASAGSSGSASSVVMDDTAGSAESGRQSAAIADIEVTMVEGHASLKVLARRRPKQLLKLVVGLQQLRIPPLHLNVTTVDAMVLYSFSLKVEDDSKLGSVEDIATAVHQILGSIQQQEAVLSIS

SEQ ID NO: 38665 - protein, 379 aa, Oryza sativa
MSTSAPTSSPEPPEFIRGSLIPALPDDLAIHCVALLPRAAHPSLALVSRAFHTLLCRDPGPLLAARRRLRLSDPHVILSLRPPASASPLFFLLLPHPGWPPLPLPSPPVPVSSSSSVAVDGNRVFLFGGSVSGVPSPSVQILDPRTRSWSVGPRLSSPREFAAAVAHSGVLFVAGGCVPSSPFWAESLNLSSPDAKWSPVPSPPHFREKWMHGSASLAGKVLAVADRGGLAYDPAAPPTEAWAPVSPILDMGWKGRAAVVGGILYSYDYLGQVKGYDPDTDCWSKVEGLEQELPKFLCGATLANVGELLYLVWEGKWKGKGKAKGKGEARSMVVIDWAAIAVTKAEEGRLTGKVLSRDTIVFKDMPKGSAITHCIALEL

SEQ ID NO: 38666 - protein, 386 aa, Oryza sativa
MEHSPSNRMTFLLLLLLQLLIGCTHYAQANPGHHMIDSIFSFGNSYSDTGNFVKLAAPLLPVIPLDNLPYGETFFGHPAGRASNGRLIIDFIAGHFGVPFLPPYLGQVQNFSHGANFAVVGATALDLAFFQKNNITNVPPFNSSLSVQLEWFHKLRPTLCSKTQGCKHYFERSLFFMGEFGGNDYVFLLAAGKTVDEVMSCYVPKVIGAISAGVEAVIEEGARYVVVPGQQPTGCLPVVLTPYASPNATDYDAGTGCLWRFNELARYHNAALLAAVSLLRRKYPSATIVFADYYDPVIEFMQKPDDFAFSDSSKLRACCGGGGGPYNYNATVACGLPGTSVCPTPNTSINWDGIHLTEAAYARIAACWLHGPHAHPPILAAVRRRT

SEQ ID NO: 38667 - protein, 69 aa, Oryza sativa
MARALVLVVILLAAIAVAPFAEASTVTGGSRVLLASDAPAESPAGPAAAPGPAEESSSESAPSPSAADA

SEQ ID NO: 38668 - protein, 619 aa, Oryza sativa
MAMVVAGSHRPPPPPQSLRLVPPPPPQPPPPPLTYRHHCKVCKKGFMCGRALGGHMRAHGIGDDNDTMDDDDGRDDDHSLSPCDGGGEPSEAAGSPTTTTTKRMYALRTNPGRPRNCRTCENCGKEFTSWKTLLDHGRCGLDEEDGRLDVSLRSPPLHDGGDENDGEEEEEGDDLTLAAGGWSKGKRSRRAKVMAVGTGSVSELQLPAPSTEEEDLANFLVMLSSSSSSSSRVAQPAIVVDDADQESCASGSKDEERNRFLVPQPISMAAPMMAQMTVIAPQVVPQHISTVPRGMFECKACKKVFTSHQALGGHRASHKKVKGCFAAKLESSRNETSQTQTQQQHVSAAPHDNTRATTSHVITSDISMDANTIGASADADGKAAASGVGAGEIVLAGASSTDMAMMMSVEDFAPTPLAPSAVSPFKKKGKVHECSICHRVFTSGQALGGHKRCHWLTSGATDPLTKLQPVAQDHAMMAAMCHQLTLGRPIFDPTDQRILDLNVPTNPLAEAVAARQQQQQQVAALNDGALCLNAAASVYLQSWTGHSNGSHVNKTTATSSRINDAAGGVTTEDDEADSTSAKRAKIGDLKDMKVAGESLPWLQVGIGISSESKEKNTQE

SEQ ID NO: 38669 - protein, 129 aa, Oryza sativa
MASGSGAGAGLPLEELGLDGAVLDALWRCAAAAAPPPSRLCSAARKKGKRKEERERKPCAGMPPCVVTVGGEPWRCAAAAAPLWPPSRLCSAARKKGKRKEEREEEQCQRVILVLTQLFLSPFQPKIIK

SEQ ID NO: 38670 - protein, 103 aa, Oryza sativa
MKAEEARRTSTVAPRLPIFLSLPDLARGLEEWRGGGATVMLWSLAESPLSAASGKKSRSWIIALSEEKGKVYRCPCMTLLVCTGHHIAYLPYHGSLTGCKDLN

SEQ ID NO: 38671 - protein, 388 aa, Oryza sativa
MGAAGDNAAKAPAAAAGSNGKGTAASMDVVSSSSSSSPAPAPSVLKSVLLSYAYVSVWITLSFSVIVYNKYILDPKMYNWPFPISLTMIHMAFCASLAVVLVRVLRVVAVPASPPMTPSLYAASVVPIGALYALSLWFSNSAYIYLSVSFIQMLKALMPVAVYSLAVAFRTDSFRRASMLNMLGISAGVAVAAYGEARFDAFGVMLQLAAVAAEATRLVLIQILLTSKGMSLNPITSLYYIAPCCLVFLTLPWYFVELPRLRAAAGAAARPDVFVFGTNSLCAFALNLAVFLLVGKTSALTMNVAGVVKDWLLIAFSWTVIKDTVTPVNLVGYGIAFLGVAYYNHAKLQGLKAREAERRAASMATAKDGDAEAGARLLPEKDAGEQKN

SEQ ID NO: 38672 - protein, 201 aa, Oryza sativa
MAATRGSVRLLLLILLLRPAAAGSPLMMTCAKTPHPDVCITVLGAIPECRNTGDPRVLAENAVRSAATIGAAAGTFARAELDIVKDTDMWQCLDECAQDIEEAVSHLDDTEGGVVDLDAKFKDVRLFMDVAERDTWSCEESCRDAPDSTVKATLLDKNEAFEKFMRVTGALIEMVIGTADEPAPEPSADEHSDELIPDVQL

SEQ ID NO: 38673 - protein, 208 aa, Oryza sativa
MTMLLVACLQENFHNLSVSLHRSPFLEGRWNFEWFGDSSPGALAARLLFERSPTTVAHFTGLDVLIKDGYSKISSNVKFLNTVQSKFLLTTQLSVEGPIRMKEEYVEGLIEIPRIREETLPDQLKGFFGQTAGALQQLPAPIRDAVSEGIKLPLNGMFQRLFMISYLDEEILIIRDASGAPDVLTRLEGPQPNSIDGTSDAVLSEYES

SEQ ID NO: 38674 - protein, 242 aa, Oryza sativa
MESGSMDITAIDDPKEFDMLLGRWHPIEGSSGYDGSPFCEKRIQIVTGKTTTPPPPPATPLCAAARGRFAACPAVRHRTPKENARLRYVDPGRQRRAAEGCTPLGRSRDVRRHRRVYRITVFAAVDHDSFAARGAEGTMLLHRHVQRSVVDGRASRISVGCRIKHHRLSGLVPAAETGATCPPPAADSAAMEGGVAESESPPPPQHPLADALASSLDSCTLASDTADPGDGDLALDLPFMSV

SEQ ID NO: 38675 - protein, 727 aa, Oryza sativa
MGEIMKEAPHSLWRSRLGMPFSGLAAAALLLLLLSMANSTIACLEQEKSSLLRFLAGLSHDNGIAMSWRNGIDCCAWEGITCSEDGAIIEVYLVSKGLEGQISPSLGELRSLLYLNLSYNLLSGGLPEELMSSGSIIVLDVSFNRLDGDLQELNSSVSDRPLQVLNISSNRFTGEFPSTTWEKMRSLVAINASNNSFTGQIASSFCTGLPSFAMLDVSYNQFSGSIPPGIGKRTALKVLKAGHNNISGALPDDLFHATSLECLSFPNNDLQGTIDGVLMIKLSNLVFLDLAWNRFSGTIPDSIGKLKRLQEFHMNNNNISGELPSSLGDCTNVITINLENNKLAGELSKVNFSNLHNLQALGLSSNYFTGTIPDSIYSCGTLTWLRLSRNKLQGQLTEKLENLKSLTFVSLSYNNFTNITGSLHILKSLRNLTTLLIGSNFIHEAMPEDETIDGFENLHVLAINNCALTGKIPNWLSKLKKLELLLLHNNQLSGPIPTWINSLNFLKYIDLSNNSLIGDIPTALMEMPMLKSDKIEDHPDGPRVSPFTIYVGVSLCFQYRAASAFPKMLNLGNNKLSGLIPVEIGQLKALLSLNLSFNNLHGEIPQSISDIKNLMGLDLSSNHLTGAIPSALVNLHFLSEFNVSYNDLQGPVPIGGQFSTFPSSSFAGNPKLCSPMLVQHCNLAEAAPTSPTSTKQYIDKVVFAIGFGVFFGIGVLYDQTIISRYFG

SEQ ID NO: 38676 - protein, 480 aa, Oryza sativa
MVEAASAAPATVVVPLTQTLCANAPATSVTVVSKQTVRPDGASAVGDVKLSVSDMPMLSCHYIQKGLFFPPPGVPIASLVSSLVCALSRALAVFPALAGRLVTLDDGRIVIRCDGVAVEFYHAVAPALSLGDFLVPNADVPTRLTKDLFPMDRTVSYDGHRRPLTSFQLTVLGDGAVFVGFVANHAVVDGTSFWHFFNTWAGLCRGTPVQPPDLRRNFFGDSTAVIRFPGGAGPAVTFDADAPLRERVLHFSAAAIRELKAKANQWKRSDKFAEANGKHVDETKAHGGYREISSFQSLCAHIWRAVTRSRRLLAADATTMFRMAVNCRHRLRPAISPLYFGNAIQSVATTATVAELASNDLRWAAARLNATVVAHEDGAIRRAAAEWEAAPRCFPLGNPDGAALTMGSSPRFPMYDGNDFGWGRAIAVRSGRANKFDGKMSAFPSQAGDGSVDVEFCLAPDTMARLLGDHEFLQYVSRAP

SEQ ID NO: 38677 - protein, 252 aa, Oryza sativa
MADHFAVMAGRLLTESTVQSAIDEASAAAMPSSVIASEHNDVQDEREKSGVLVECRICQEEDDQTYMETPCSCRGSLKYAHRKCIQRWCDEKGDTICEICLQQYTPNYTAPAKLFQHGRNSIFFRTPGYIQAQVMQNTDRSAAASTSYDPELPNPEGVIYCRIVALTLMVLLLLHDAISVFLGDHDAYTVAMITLLMLRTAGIVIPVYIILLSLTELLHRRNQRQISDAAAAVNINQQAPQSPRRQHVISIQ

SEQ ID NO: 38678 - protein, 232 aa, Oryza sativa
MEVESAARRMWGYLRAVFFMVRKGVISKRRLLLGMQLAMRLKRRNRAVARSVASLLSHHHGGGGGGALRRRREYEFSCSNSPDVVHGGAASRRRLAYFPCLSAEDDVVDAGASATAAAALQRIEYYGYAAAAASSPAPSSPGFMVRDELLAPGDECSTPGLSPLLGTTGGYSVRVSNYSSEEEEDGDYGHADGGGGGEAVDDEAEEFIRRFYEQLRRQNHVALLPYMTESAP

SEQ ID NO: 38679 - protein, 379 aa, Oryza sativa
METAAAVVCRGGGLRAPARRGGSDSSTTRAGGVAASPAPATTARRRPLLVASLGEPLITAQPLSSSLGDGAAVHETLARSDSVIPSLKPSHCVDHSVQVDADEETGSTKTLPPPDDVPTKTVHVKFVLQKRCAFGQRFLVVGDVAALGLWNPAKAAALDWSEDHVWTVKKELPAERSIEFKFLLQDRSGHVEWQHGRNRILHVADTSNTLIVCEDWDEAKNQQVSEEIGDADGIFSGSDGVFQEDELQLGEEQETNKGVTVGVDDAKSALVTYIYREMMGANDAIQPQLALDKHHKIPDELSGEANMAAQDGNHTATAAAASGFAGSNGEDAILHKEGDPVENNRLGLASIFFNDMAWTRKALQQLLRSLGFQIGTRKT

SEQ ID NO: 38680 - protein, 363 aa, Oryza sativa; identical to SEQ ID NO: 37619

SEQ ID NO: 38681 - protein, 66 aa, Oryza sativa
MMIAIYAHSLACHHREKEKGKCILTVTPVAFILTWDSSQLTVSSEIASLDPTPKQPITGHLTTPVP

SEQ ID NO: 38682 - protein, 254 aa, Oryza sativa
MEVAEAGVDGVAGRRQQEEASGAAPFGRSSSLIGAAGFDGALRELKDLRSQLHQTADCCEKAFLDTEKKKLILESTKGYICDAIVAVIDHLGTVSSKLEQQLQEKIEITQTEKKLNFLKQRLLTCEQYAITLKLLTVRGDNDAIQYHRRYLSQSTGGTKEENGANSRKDDVKFVEYNSPTIPGAILTFKPYDIQSTIGRERSVATTDSESPTTDAKSSFSFRAEDVPIVLAEHRKKANHGSNILSFIRKGRRHA

SEQ ID NO: 38683 - protein, 192 aa, Oryza sativa
MAMSSVRKAFVRAAGGPISSFAEKRGSFFSGPDGGGKWLKDAREWCDRWQSVGWAIGSLCAGAGVVGGIAARYIRHDVEAYVDGKIAQVVSKNDEFRVAATKTHYDFQQKISDLFLEYQRELNMLAKSHLQFQRDMMKLEHSIFLLPNFAPEEKGPVGAVGGDRGPVDAVGGDREPVGAVGGDKGSEGQLNL

SEQ ID NO: 38684 - protein, 69 aa, Oryza sativa
MFMPSCFWILFCSVNFVEVINMLYCHLPSTPIIEILLCLWGIIQMQLKNNICYYVQLRTDCGLEPKPLI

SEQ ID NO: 38685 - protein, 329 aa, Oryza sativa
MEVMVPVMAPSAPCSPRTAAEHHHLPSYCYFFSSAPTSPTRASYSGEAAAAAVGVGEGDGAFDFAFGFSGQLRESTPILAAADELFEGGRIRPLNTPHPSILQLVDDSAYASPRSPGRRRRIAAAEAAEVSSSSSSQRGRSGRAAPASSSSSASSRSRRATRSLSPFRGGGGGGADDEYPSSPPSPRTSMMRGCGSGSRKWRLKDLFLFRSASEGRATGAGSKDPLLKYTMLSSSASSAAAALHHNPQKLRGGGDGSASMRKGRGSTASASDMPYTVGRAAAEDMRRRTTTPLPFHRNSLFGYLRSNPAIHSISRKLSGSGSNRGKTAA

SEQ ID NO: 38686 - protein, 65 aa, Oryza sativa
MNKIKGKGLLALTPRWWPVQPDQVPPSPLLLLLLLLALLLLLLLHPWEWRLSWRSGVGGVGASVG

SEQ ID NO: 38687 - protein, 512 aa, Oryza sativa
MAAARAAAAVDAYQHNTLIRAAADHRSLLLAFRAMLREGVAADHFTFPFALKALAQAHHRSPPPCAAATATATTTLGCLHAQMVKSGHGANVYAASALVHAYVSRADAASARAVFDAARHRNVVTWTAMIAGHAAAGEAREAVALFREAVARGQEVNGITVAQVMGACAQSRDLESGRWVHATLRRWGVEPILLDVALATAVLHMYASCGGLDAAFEVFDKMPRRNEVSWNAMAEVCSRHGRQDKVLEVFPGMHSVGMKPDKVTWLSILRACTSKGAAGLGQGVHAYMEKTIGHRHVAVCTSLMDMYSKIGNARSALQIFQCLKRKDLMAWTSMIIGLAKHGHGKDAVQLFNQMQHGGVVPDHVAFVGVLTACSHAGMVDEARKYFDSMWNHYGIRPTIKHYGCMIDLFSRAGRLAEAEGMMQMMPIQPSVTMWGSMMNGCKVHGRADIAERVGRQVAELNPQFGAIYVIMSNIYAEIGRWHAVEHTRRLMWQTGLKKIVGSSGTEVQMLCS

SEQ ID NO: 38688 - protein, 301 aa, Oryza sativa
MKSAATSKPKPRPKPPPPPPPEASSKASSSSSSAADPNSKRSGPTPTPTPAAANPTNSANPNSAPLLPSPHPRLPSPHHHLPPPQQQQPPPLPPSRPLLTVAAVEAAMASIPPPPQYGLESLDRRNVVLSDGTVRTYFALPLEPPPQLRQPLPLPLPPFPARQLGPPVGLPPPTAERWAPMRPPAALLPMPAPKRKWEGQANGSVPGESSGRQQQQKPEEKRVAKQVKVETPDVDAKQLKSSFLKMVKLMNENAEQKKNYRANGKISQLKCTVCGRNGLCGCKREATLWKGWTEIHAGEIC

SEQ ID NO: 38689 - protein, 572 aa, Oryza sativa
MAGYIDGTKEEPPATIITKKDDKDVRVTNPAHTEWVAQEQQVLSYLLLSLSRDVLIQVVSIPTAVGVWDAISGMFASHSRARVMNTRMALTATKKGNLKVAEYVAKMRGLADDMASAGKKLDDDDIVSDILAGLDDDFDPVVSAVAQRSEPISVGELFSQLVTFEQRLELRQGGIQSSTNSASRGGNGGGRGHGQPNQGQNLNRGRGGQGRGRGGFTNNQGGDHPKCQLCDKLGHTVVKCYKRFDASFTGEEKSAAAATSSYGVGTNWYIDTGATDHITSDLDKLTVREKYNGGDQVHTASGSGMKINQIGQSIVRTQHRDLILKNILYVPEANKSLISAHRLAFDNQAFLELFPRYFSIKDQVTRKLLHQGRCERGLYPLKSFPNKQVFAAIKLSPSQWHCRLGHPSSVIVQQVLSHNNLPCVSESNKHSVCDACQKGKSHQLPYSKSLSRSSAPLELIHSDVWGPAPTSVGKNNYYVSFVDDFSKFSWIYLLKHKSDVFQCFHNFQNPVERLFDRKILAMQTDWVVNITNSIPFFNASVFLTVCHVHMHINKTGLPNVSTIILLKLGYPF

SEQ ID NO: 38690 - protein, 54 aa, Oryza sativa
MRACVSRHPFDTMMHHAGAARLDQITSIDNMRLFMDNFTNTLHTRRDAGDKTTA

SEQ ID NO: 38691 - protein, 212 aa, Oryza sativa
MEFLHLLGPFLAAASPPPGGATPPPAAASAPDILASLPSFFHPLLHADADVPCCCCLPILAAAGDGAPPPRPSTCFWSASISCWSSRYLAFMLSSSNLSVLMSFFAAAHPSWNDCGVPSSSCRRVVGIAGAASAPGAEDDDLSAAEELASALLILTCSVKSTCTTTRSGSLSFCAACMHASNDSFWQSITLHSLFLSCSVSVGCACKSIDRH

SEQ ID NO: 38692 - protein, 139 aa, Oryza sativa
MREEWRWGGQIQPRLAGSGLGQQRWRLVGEDSARSPSSRSPLFLQPSPTELIVIVADEPPLHRLSPRSGTPPTPSATSTAGPSAAALSRGQRQGEGWKRNSGRGSDGQGTLTLANASPGSVSQQKGGEERSPAKDHAPS

SEQ ID NO: 38693 - protein, 525 aa, Oryza sativa
MEMELPSWASVLVIVLAAVVFLLATILRHGRRAYRLPPGPNPWPIIGNLNLIGALPHRSIHELSKRYGPLMQLRFGSFPVVVGSSAEMARFFLKSHDIVFTDRPRTAAGKHTTYNYTDILWSPYGAYWRQARKMCVTELFSARRLESFEHIRGEEVRALLRDLHGAAAPVLLRDYLSTATLGVISRMVLGKKYVGVEGASAGNGGGGEGTSPAATPEEFKMMMDELFLLSGVLNIGDFIPWLDWLDLQGYIRRMKRVGKKLDRFMEHVLDEHDKVRRQQGDRFAARDLVDVLLQLADDPNLEVQLRRDNVKALTQDLIAGGTDTSAITVEWAISELLRKPEILAKATEELDRVVGRGRLVTETDMTSLPYVEAIVKETMRVHPVAPLLAPHVAREDASVGGYDIPAGTRVLVNVWTIARDPALWDSPEEFMPERFIGSKIDVKGQDFQLLPFGSGRRLCPGHSLGLKVIQLSLASLLHGFEWRLPDGVSAGELSMEEVFGLSTPRKVPLEVVVKPKLPAHLYTGP

SEQ ID NO: 38694 - protein, 294 aa, Oryza sativa
MGWWLGGGLPVIAMLALNVVAAVLVSLVKVAMDGGLNPLVLVTLQQLTAAIFLGPIAYFKERKSRPKLTLEIFTYLFVSAALGAALRQYMIFVALRYTTATFVTAFSNIAPVLTFLLAILTRITEPEEKDRHCKACGHADISSRSHGADILQGRGCHPHNQDPPCNSSSSSSSRSSHEQQELDAGHGGHPGQLRVPLLLVPPPQQARQEVPPCLLLQCLHVHVQLPPGGRRRPLHTTQRLRLDRQDQVPHTHHPLRRCGGVWPFVCATDMVHREARSSVRRSLHSGGADHCFSD

SEQ ID NO: 38695 - protein, 372 aa, Oryza sativa
MSTAPTLSLQKTSVALIQLGSTSFDKAFNLKRARDAVLRAAATRPGATASISAPVGMVVLPECFNSPYGVKYFAEYAESFGGAYQKIKKPLPSALARMGKGKEEIRWTIDASTDPSAESRLAREKGVGKPVDIDERIQKLSPSLKMLSETAREAKVVLVGGSVPERDDLTGNIYNSSCVFNEEGQLISIHRKLHLFDIDIPGKMTFQESETLAGGDRVTLFDCSLGRFGLGICYDLRFPEPAMIAGRLGAGCMIYPGAFNTTTGPVSWELLLRARATDNQVYTLGCSPARPSQQAMDGESTDKDGWRQGEKAYPAWGHSTVVGPLGDVKAKLAEEEDTLFFTLDPEEVAQTRRNIPISTQRRFDVYPDITCG

SEQ ID NO: 38696 - protein, 386 aa, Oryza sativa
MRDLTLANNVVQPYIIERGKTASQIKRVVITQPGLPRDYWKYANLVRNSLLCASVNSTLGINRDEILIAAPTWFSTNDASAGSAQSNDLVFNGGGWATGVDSAGPNGAAISSFEALDALVSKFFDKSTYPNLQQVVIAGHSLGGSFTQHYAMLRKQNQAQDGMMSYFVGNPGAYVWPTSQRPVQNPGGNCASTADEWGYGLQDLPSYGQGQGSASSIASRYYGRTVTYGLGLQDNEGGDSHCEAAYQGTSHLTRGQNFQRALEAANGGNVPASHTFNYVAGVAHEDYLIFSDPVSQYHLFAAGTNFAASASATSSAAASSATSKRGSSSSAQSGASGSAAAPSASGSSAGSSSGTSSGAGGLAFASPAAVVSAMLASSAAFLALAL

SEQ ID NO: 38697 - protein, 38 aa, Oryza sativa
MPPRPRRRRAVVIHGRRRRRRPLPPGQLHLRLSFSSPV

SEQ ID NO: 38698 - protein, 530 aa, Oryza sativa
MSFEDKAMASRVASPSPKSMASESDPSMMLAITSNMEHSQANNQSVSVLGPVAIFWDIENCPVPSDVRPEDVAGNVRMALRLHPVVKGAVTMLSAYGDFNASPRRLREGCQRTGVKLVDVPNGRKDAADKATLVDMFLFALDNRPPSSIMLISGDVDFAPALHILGQRGYTIVLAIPSSVTVSSALSSAGSFVWDWPSLARGEGIVAPRSIGRRFADPPGYQHGGNFGSFPDTQNEEEAIVYMGTSRNECSGRTTSNQIYCYNSSQTTREPSKAFYTVTDGNCGTSSRSHNLACSLNEGPDVDQGLPDERSWWVRPGDLQGLKGQLLRLFELSGGSVPLVRVPSEYLKLFGRHLYVSEYGAVKLIHLFEKLADSFVVIGKGHRKVICLRNSGDSNLKKYSTTPIILKKENRGGSILDESTIGTGQQLGSSSDDFSEDERNINPDVDGAYAFDSHLDNFRQEIQELLVCYSCPVPLGNFKSLYEQRYKKTLIYESFGVDGLEELVEKVKDVVELCEDQTSKRKYLIANYRS

SEQ ID NO: 38699 - protein, 477 aa, Oryza sativa
MNEFGLHTAGKAMKNQDWAVFLAKCTAMLGWLMPIFTAGLFAVSQVAQTANLELRPETKFASTSKSLSTAIDSDIIDKVLLQETPKYPRWTWEDVALPEVSLVDHPSEWPLPNTELVAKISGLKSKLKCETVSLEGGEGADWQCVPFGGSKKKPICGADQSRTALVASTCPQLSSSYSINYVWGSCASDGFISVMMCNESLVEVDVQTTFRTEDLYINTNEIPITNASSEQPSDVKADTTSVYAALDNIGADDKKFNGLDDFFRTLVLSRLSTTLERIVMPERQNSVSQAIRQMHGILAAQAINSELIRRPLAKKLRVRDDSQPIIPAHVDYVIPRLTQGNVQTFVLIGLLAFTLLFGLLSLRTASRGTLPKSPGSIAAQASLLADSSLWWRLPDGAEWMEDDDLARCLRRKTFHLGWSRGPSGNQTYGIYIVQDEGKAARPAGVSQTTTDNSGEVGDVRYISMAPGLYSYGDIKSY

SEQ ID NO: 38700 - protein, 402 aa, Oryza sativa
MPEPEVGVLGGRGLHRDGLKGWPDLRSLSGKKMTTPPPPPVEKQQQQARPAAVAPPDQTLEFSDGLLLRVLACLPEPHLTGAASLVCRRWMRLAGRLRRRLVVRDWAFVTHRLHHRFPELADLDLFPASIVVPAVPSPTSPLLTCAEVSLTLDTGADPPLVACRFLADDVLDRGLVAVAASFPNLRRLSATAASESGGLMDIAGGCATLQELELHRCTDLALRPVSAFAHLQILRLVAASSALYGTSEDGGVTDIGLSILAHGCKRLVKLELVGCEGSYDGIAAVGRCCAMLEELTIANHKMDNGWLAALAFCGNLKTLRLQGCCRIDDDPGPAEHLGACLTLESLQLQQCQLRDRRALHALLLVCEGARELLVQNCWGLEDDMFAMAGLCRYSNHQSHFSI

SEQ ID NO: 38701 - protein, 292 aa, Oryza sativa
MASYGSSPYASTSTGSQADSPLDKIREYTSKVEGLIDQYTQPIKPHLPALGRFLIVVTFLEDALRILTQWSDQKYYLQRHRGFPWGISHIFLLANVVVMCAASAAVIMRKYPEMSVGALFGVVVVQGFGYGLIFDLNFFLRNLSVVGGLLMVLSDSLSAKKNIFAGLPSLSETDRKIFFQLAGRVLLIFLFIGFIIQGEWTLARVIVSVLGLGACVMVVVGFKARWSASFLVMLLSLFNLFVNNFWTVHSAHPSRDFLRYDFFQTLSIVGGLLLLVNMGPGGLSVDERKKVT

SEQ ID NO: 38702 - protein, 247 aa, Oryza sativa
MADDVAPRTASAYLDPSYWDERFGKEEHYEWFKDFSHFRHLLAPLLSPSISVLEVGCGNSRLGEELLREGVAGGITCVDLSPVAVQRMRDRLAEQGTEGVEVVVADMLDLPFDRESFDLVIEKGTMDVLFVDSGDPWNPNPTTVDNVMKMLEGIHKVLKPEGIFVSITFGQPHFRRRFFEAPGFTWSVEWSTFGDGFHYFFYILKKGKRLLDSNGNQHTQPAAPSINMFHEELESEDYIFRTNVDEL

SEQ ID NO: 38703 - protein, 451 aa, Oryza sativa
MASADVEKPTEPAPAPAVPDYLASPNAVFGDEGVKWRYGRAPDYSKTRKVWEEGKKMNHAAGSLPQLVENLVKNWEVEASFKPRLEDWRTIDHANYTFAINGGPPQTAEHMLKVGTYNAIIAPNEFYSPENSDFASSHKTFKRMMPTFAWEVLEVYSGPPTVAFKWRHWGTMKNDYVGFNDKGEKVTAKAHGGPIDIQGVTVATVDDKVRLQAVDTWFDPLEMFRQIAPGGIVNKEIMNRKVDPTDALDTVVPQNDGVKIAQEHNDPSSEHAKEPAPQDILPKQVSNSTGEPADAFVPHQGADTEKAAEKVTSDPSGPAQEIVASAADNGVDAELSKPASNFTESTSNGDSITKDPEQTINQVVETRTTGPQDANGTDESRATGTFDAVDEHLEGSAEKVHPHPHDMEETVKPVAGEAVAAPADSTETRMTHEEMSRLGNAGECPFLMNRE

SEQ ID NO: 38704 - protein, 600 aa, Oryza sativa
MCGITALLLASVDQSAAPEINEALSLLQHRGQDAAGIVTCGNKGRFYQTKANGMVRDVFDVNAVARLQGNMGVGHVRYPTAGSSAHSEAQPFYVNSPYGITFAHNGNLINTDELRRFLDADAHRHINTDSDSEVLLNIFANNLQKTGKFRINEEDIFTAIRDLMKQCKGGYTCIAMLAGFGIIAFRDPNGIRPLGMCSRPSSAADGELPLEGHGKDYCFTSESVVCDALGFEDFEDIKAGEAVIITKYAVSRRILTPPADSPDAYAFSPDIFEYVYFARPDSVMDGASVYRSRMAMGDKLADEVRRQLQKTGESVDVVIPVPDTSRVAALQLAQNLGVPYREGFIKNRYVGRTFIMPGQSVRRKNVRRKLNAMALEFNNKNVLIVDDSIVRGTTSKEIIQMARDAGAKKVIMASCAPPIRYSNVYGIDMPSRQELVAYGRTVEQVAEYIQADMVIYQTLEDLIDSVQQFNPELKQFDCSVFDGKYVTGGVDSAYIAHLEHLRSENAKAKKAATKIPVIAESQKKIYASRASPAASSVAGNDDRLAVDAAPAGANGSAANGNRKRRLNEEEMEEEEKQQDVGCSGPMNGADDIGLFNSWTR

SEQ ID NO: 38705 - protein, 141 aa, Oryza sativa
MLKQQQQQPSPTLVGGRRCMDRGGGSGGSMGLIALALASTGIIIISYSLHRRFLADLKLSIARAQQQQEQQEQEKPQRPRERTRRVRFAADVVEPSSDGDEYRRRYVAGRPSPAMGNSSSSSPPARPFARPRRVMQSHPAS

SEQ ID NO: 38706 - protein, 371 aa, Oryza sativa
MVKSSTKKVVIDKPSMARDIPTSLCDLPQAVRDGIVNALVDHQEVAATKDVVEMEIGSSTAEKVANMASQPGSSGTVGSKKRKWGFGVDPTGGVLTKGTHSLTSSPDNAPTSGRLKPMRFMSKSKAKAAPTISNQNMGKHDEASSQPATHIIVSPSTAPLPSVAAVVLPPPGTAFNHLASACQEVLFSAKAASTEVNRLIAELTATNEKLSKLKEELTTANTNNESLRLLIKENSEMHQEGQKALAEEKSKREALYAGLKENFFAFNEVAKQLGRGVQPPPHFDDVSLLASIGELVGEMEKVPADIIQKADWDTRIALKTGACHTLACISSKHPELDLNKEVHEGVAEEEREKLMDQLEKTGEAVASFYLD

SEQ ID NO: 38707 - protein, 459 aa, Oryza sativa
MDGPSGWFLEVPPPLHTVDPPGSPPPASILLEPYGYFSDRTNHTTARGLTRGGKNIVFTFWTATPPRASFFTLHSPDDTKCSAFADAPDAVCSDHHLLLLRIPICLEATQIYAINNHYFVYHAGGDGEQRLTPVPTPPGLTFAFPNSEVVLLRRRRPREAFFLAALHRPTLCRQYTHEQFDLHLYSSETGEWSTKLMVSVDADDDDDSTSFRFSYASKAIVVGGELGTVGWVDLWHGILVCDILLDNPRLRFIPLPPPLVPRQLKGDPMFHRNIVVLEGYIKFFEMYNHTTGSASAQGWVAATKKMKISSIASGNSSSSSWEDDCAIKFSEIPVESLTFAQMLRLQPNLKQGTGTTRLTLKRLHAGYPALSLHDSDVVYIMHTPDPDEEDKALVIAVDMRNKALKGVADFGFGRPVGYGFTYLQTGISKHLSNCSSSSRDGILGAGEKEVPGEGVATAA

SEQ ID NO: 38708 - protein, 63 aa, Oryza sativa
MPCSLSSGRLMLMHRGMLRRSVMRLSPNASLAGLRRLRRLRLHSSFGWSWRRRRFSLNQWRRL

SEQ ID NO: 38709 - protein, 337 aa, Oryza sativa
MQAFSRQLRTPGAALLRHASRRAYSASSTPYASTIENLRINSDTKVLFQGFTGKQGTFHAQQAIEYGTKVVGGTNPKKAGTEHLGLPVFGNVEEAVKNTGATATAIFVPPPLAAAGIEEAIAAEIPLVVCITEGIPQHDMVRITSMLKSQSKTRLVGPNCPGIIAPGQCKIGIMPGFIHKRGRIGIVSRSGTLTYEAVNQTTQEGLGQSLVVGIGGDPFSGTNFIDCLNVFLKDEETDGIIMIGEIGGAAEEDAADFLKANNTSGADGKGKPVVSFIAGISAPPGRRMGHAGAIVSGGKGGADSKISALEAAGVVVERSPAGLGRAMREQFVKRDLL

SEQ ID NO: 38710 - protein, 185 aa, Oryza sativa
MSTHAETNPQMIAAHGSTTLHPAVMAANPPRRPLQTSTTFQCPVWSRFPNSVVSAATLPARVVVTAVRPTPDHCPLMPPAGPYVLRMVVNDPGLNPYQPNHSRKVPSTTSDALWPLSATDRPAWSNLPMRGPSMSAPQSPATPPTMWTTPEPAKSMTPEPNSRGPDVREAEAHPSADQIQWDTTG

SEQ ID NO: 38711 - protein, 228 aa, Oryza sativa
MVVNMEWGNFWSSHLPRTPYDILLDDETHNRNDQGFEKMISGMYLGEIARLVFHRMAQESDVFGDAADSLSNPFILSTPFLAAIREDDSPDLSEVRGILREHLKIPDAPLKTRRLVVKVCDIVTRRAARLAAAGIVGILKKLGRDGSGAASSGRGRGQPRRTVVAIEGGLYQGYPVFREYLDEALVEILGEEVARNVTLRVTEDGSGVGAALLAAVHSSNRQQQGGPI

SEQ ID NO: 38712 - protein, 416 aa, Oryza sativa
MGMEAYELDASTIPDHHLLDLDSTFAAIVDRVVFNHSGPGIKSMSLAHTRYDTDGDRRVTAWLDRLASREHHRLERLDVNIGAALHTPASLFRCETLVELRLVVHAAARGLRLDVDGAVHLPQLRRLCLEHAGFRSSTQFQNLIDGCPLLELLHLRFTAVARREDTVSIEIRSPSVRRVVLEGCGGYGMVPFEVSAPNVEELVLSGRNMVAVEKGGVRRLSARKVSLLMDDKLWWYNVFAPFHHFTAFLNVGTNMSRIMAGFHGVLELAISGWCIEYLSKIVDSMNLPDWGIEVLRVEGMWPNQGQAGVVLHLLRSSPCLRNLFITNELEHPREISIDENREQYPATPEFLFDAVPGRLTHLRRFFMFNFSGNRNEISIIKFVLGSSSISINPDQFGVTDYLGNDWSSTQLILASL

SEQ ID NO: 38713 - protein, 176 aa, Oryza sativa
MKIMPVQKQTRAGQRTRFKAFVAVGDSDGHLGLGVKCAKEVATAIRGAIIVAKLSTIPVRRGYWGNALGEPHTVPMKVSGKTASVMCRLVPAPRGTGIVAAPASKRMLELAGIEDCYTQSAGQTATMGNFLKATFEAVSKTYAFLTPNLWRDIAPPATPYVEFASHLARTQKKSLY

SEQ ID NO: 38714 - protein, 308 aa, Oryza sativa
MSFASFAPLPAPSSGASSIWARRMITKSVPTSEAEVELNVLSLLLDVPLAALDEHDPTSPVALPSPNSAWAPSPVADMGFADVSPLSLEMHAAQTAVKAALDVLEEPSLSRGLRISTDIPTAAGGRGCLTAPLSPALSSPVSPAESCFSTADDGLKKKGRARMSQEKRKRLARRREREALVATLTPSELHFLPHSSHSAPVTPVHSSFAPHAFGGFPFGAAYDSAPRDAFAYDMPSPALTTASLAASSAACSTPGSSPTALAAVGDANSSPPTLVVQPPSPQRHRLHGLGRPKHAWTGFAPTHLASVF

SEQ ID NO: 38715 - protein, 389 aa, Oryza sativa
MGMARRFLNLVVESNRDGLYSLRRVPANRLLYPSRRAAEAATAKSEEEVKAYKEHEGRRHPGLHFMERFGQFPSPMINFQASPTYEHSSRNLELATLLGDDENKILTVDNSGHTLLFDTVSYSVVKFPSLKSNKGRGAISLPVDRAAPQEPDGLYVMSPTADPLTSDCCFEVLNYGSRGFHERAPSRLPLPPLPSASYTHANLVSCTVVGSTIFVSSTAPECGTHAFNTLTGEWHHVGYWTMPFYGRAQYVPDLNLWFGLSARHPYNLCAIDLSNAHLHPPDVLQTWLDLDIPKSWSPSKLNLISLGSGRFCAAKIFRSNMPAAAAFLDDSDDDDDYTVDSHVIPTDFAVFTGLHMVRRNGKDGQEQIQMIKHKSIFYTFNSYNIEWVI

SEQ ID NO: 38716 - protein, 360 aa, Oryza sativa
MKSFATSLALAALVASTAMVSASTMDQPDVPDVVRRHAHKRAAHKSCSASGQAKHKSKKPAAAAAQNYKSSGSKSNSNSHSQSKSDSDSDSSSSSSSSSSSSSTSANGNTSGGKMGLCWANRDGMPIDNFDFGSVSWFYSWDSTPGWDNAPVDKLMYCPMLWGWKNADSFKKNVLDNLDAKSNQHKCAMAMNEVNQKGQSDMSPQDGCKLIEEYLIPLKNKGWYLMGPSTTNAPDGKTWYQNFKKACPDTFNKLDSIAIHYYGTSSDDFKQYLQDWHQTFGKDIWVTEYACTNFNGGSQCDKNKTNAFATEMANFMNSQDWIKGWAPFAVIQNLQGVSETQRLSNGNNPTALFRTYANAN

SEQ ID NO: 38717 - protein, 425 aa, Oryza sativa
MSVVNIRRDVDDKFYRYRMPLLQTKIEGKGNGIKTVIPNMSDIARSLSRPPAYPTKFFGCELGAQVSADDKTDRYIVNGAHDADRLRELLDGFIDKFVLCGDCKNPETDLKILKDGDILRNCKACGKRTGVDMKHKLTTFIVKHPPPKRVKGAKGAGKSAGQDAGDGGSDDELTKRIKAEAAEIPTAEQRGNVDDDWSVDTSEAAVAARVKALEGSVKSSLVLGDDEEDEDEDSPYAQFGRWLVANRKGGEEGRECSAAEVYKKAQEFGIEKKHKTVQVLAQSLFTDDAPKEIERYGAVLAKMVGDSEKHQKAMLGGFERLAGVQYPALVPNGVPKILMALYQIDVLDEEFVKNWGTHVSKKYVDKDTSKKVRRAAAPFLQWLDEADSDSDSDDDDDSDDDAKPNGNGAKKSSEEEDDDSDLDNL

SEQ ID NO: 38718 - protein, 417 aa, Oryza sativa
MRASSFSSLMLPCSHGHGGGRATASTCAAAAAACLALVALVILVVSMDPRAQASSWFFLSSSSSSSSSSSSTLVRPAASSHAASLRKPSSWGGGNGGGGGGEHLLVTSSSFGSGGGARGSWSRNSTSKEVLFQGGGGGGGDEMTSTAAAPTPALIIGSSSGDGVSPSRVAVTAAAAEPTPALAPAPAPEWGVGDAASGDDIIQVMPQAQRRGDVKLELLELGLAKARATIREAIQNKDNKPPLTDKDYVPVGPVYRNAYAFHRSYLEMEKVFKVFVYEEGEPPVFHDGPCRSIYSTEGRFIYAMEMENRMRTRDPDQAHVFFLPFSVVKMVKMIYEPNSHDMDPLRRTISDYINVVSTKYPHWNRSLGADHFMLSCHDWVSNYRTKLLVRIWTDTIWTGGLSKLMVGTDEPCLDSWY

SEQ ID NO: 38719 - protein, 525 aa, Oryza sativa
MFARGTARGVAPKARIAMYKCGGNWGCSDAAIIAGIDAAVKDGVDIISISLGGFPIPFYEDSLAIATFGAQREGVFVALAGGNSGPRPYTVTNVAPWMTTVGAGAVDRLFPANLTLGNGEVLVGQSLYTKMATGTTMAPLVLLDSCDEWSLSPDVVMGKIVVCLAGVYEGMLLQNAGGAGLVSMQGEEWHGDGVVADAFTLPALTLSYSKAEKLMDYFESAASPVASFSFACETVTGENRAPTAVGFSSRGPNRVVPELLKPDVLAPGLNILAAWPRDIPVSMLNMDTRRSEFNILSGTSMACPHAAGVAALIKKRHGDWTPAMIRSAMMTTAATLDNTGRDITDEGVQEAANATFTSATPLAAGAGHVRPQLAVDPGLVYDAGVEDYVDFLCSLNYTVEQLRVFVPDTAGCAPALPGGGPANLNYPSFVVAFNGSTRVRTLTRTVTKVYEKPETYSVAVSAPAGVKVTVRPATLEFKEKNEEKSYTVEFTSVAGGHVNQSWDFGHISWENRKHQVRSPVVFMWN

SEQ ID NO: 38720 - protein, 454 aa, Oryza sativa
MLSRTALRTTQRAARSAWQQQNRGLAAPASGSFTYESGDAQGIKFASRDIPGPVASVAIVAKAGTRYQPFPGLTEALEHYAFKNTERRSTLRIQRESELLGSALESYHSRENLVVGAKFLRDDLPYFVELLAEVAQQTKYTPHVLHEEIYPLMQLHQKALLADTTRMAQNSAYALAFHRGLGESLNMASSVPINKYVDADSVAEFAASVYAKPSFAIVGNGVAHNELNKWVNEFFTDIPSQPASKLESQASKYYGGEERISHGSGNSLVIAFPGSSSPTGSSYKPEAAVLAAILGGPSSIKWSAGSSKLLQATQNAPNLKIQTKSDIFSDAGLLSVTLSGSADDVASNAKSVVETLKAIASGVSSEDLAKAKALAKFKELEYGQSTQAAIELTGAGLVQGGKAYQIDEVGKAVDTVTAEKVQQLAKEALENRASVSAVGDLYVLPYAEEIGLRV

SEQ ID NO: 38721 - protein, 392 aa, Oryza sativa
MRSMLSTALRLERLQRLPAASLSRVYARPLHQASSCLAQVSPPLPFSWSHVKPNDASRNAEDAQAKAATSTPLPDHRLSVHQKRERKLREYEAKIKVKAMHEGLSPEELHRRALESAKPSKPASSPSTEAKTLSEVEKRDQQLAEAMRQRSKDEAAKKLASGQVHSTPTGAQEGPIKSLNKILDVEKLKTQDQETITKLWAGYHTIKNKLSAVIPTGKYLEMLANARKYPQFVLPLPRQVIDEESDSLNGASKEAFEMQFLEWAVVPNPAHPTLPPAATMLFTPLAEYKLKQDFSQPVLILTFYTDLCESNGVVLMRGEVTGLNEKTGKGGRIDQAHAQLLALTLQRFYLPSASTSSDKQADQSKCAQLLHDFHKRPEQFDVEQLVNVAFRL

SEQ ID NO: 38722 - protein, 659 aa, Oryza sativa
MHAMLKTSLSSSMRAASLPRSRVAGFAATRTLATVSDSPVRHAASGSGSHKVVIIGGGSAGMAVSHQLIRSGGFAQDDIAIVDPSEWHHYQPGWTLVGGGLKDKRDLRRPLASLLDPKLKHYAAAVQEFVPTQNQITLSNGDKIAYDQLVVVPGLSINYDTIKGLPEALADPSSLVSTIYGYNTCDKVFDTISKLKSGNAIFTQPAGVIKCAGAPQKAMWLALDHWKKAGLYNPADPASSPISIDFATGLPVMFGVPKYSERLNELRQQRGVNGLFEHDLVAIEGNTAVFGRPGGKEQVRKQFDLLHVTPKMGPLAVVKNSPLADGAGFVDVDQGSTRHKRFDNVWSIGDASSLPTSKTAAAITAEAPVLVRNLGQALEGKDSDAEYDGYTSCPLLTEYGKVMLAEFKYGGQPKETFGSLFGIDQGVPRSAFYHLKKSFFPWVYYNSYVKGTWAGPKGFSFGSAPISPAAVAAKRSFSSSSRSVTMPGSRRGFATSSVGLRNTPARRPRDPLDASPDAVRHTLPSGETFIVRPPPTASTPRSTIYQPQPLLSAEPLAEGAEASLPPALRPRSRKAASDEAITPQQIAMIQRLRAEDPILNTKSKLAKEFGCSPLFISIVAPLPKEVKAAKKQQDELKKQSWGLNKRVARAEREERRLLW

SEQ ID NO: 38723 - protein, 477 aa, Oryza sativa
MLSKAFTTAAMALAYAGMASAQTFTECNPLEKTCPPNPAFGDQKIDCDFAKGECSAFHNMIATEIKYNEQGALFQINSETEAPTIRSDNYLMFGRLDVVVQAAKGAGIVTSVVLQSDDLDEIDWEWTGGDDARVQSNYFAKGDTTSYDRAIHHPVSTPLDTTHKYSVEWTSKKIDWLIDDVVVRTLNAAEVANRKGYEMPQTPMQVKLGTWVAGGKNSNEGTREWAGGYTDFKQAPFDAYYRSVTIIDYAGKDAPGKSGAKEYVWTDKTGSWESIEVKKTLSEGNDEETSASTTVSKPTRTAQPIKTKTEAHTTIVEETTSVVLTKTETAQHESKTHESKTLETKVVETKTESAKETKETKITEVATTFSTAKATATAVASTVTTEEAATTPTEGSSSGSGSDSDKSESESGADSGFKPEVNPGTNSGAAVDPATPSGTATEAAPSDTTPIAVNSGSRMTGSIVTAFAGLMIAQILI

SEQ ID NO: 38724 - protein, 394 aa, Oryza sativa
MRIRRNASRVLGSAYFTTQSEASRAYMSNLPPTSSAPAPVAYGGGGGDLGGPMVTPDDACQLSLSPWDLPYELEDPDPLEAPFDRYMACIPFRASFVSDSDNNDDDQMEVDEDKSWNQVENEEVNDQQQPADHKVDQSGDPAARKMKGKMNESSMVVMEMQDADKQAGVWYCNKNDGKKWHCRNIVDGPKTLCDYHLAKSRSYYTRTGEAGAAASSKSGRAKAPAIAKPKSSSKRTPAGESSAQNNSIAAAAAAAVSVLPTISSQPSKRKASNGLLGGDAYYFYDMFVPYRKKDRGGSSSKQQAGAEEKEILPQDNAVAMEEKMDGKKLYDGVYNSSDYSSDTASDDESDEDYTVGGASKRRTKKRKMKLSVKKVQFSKMTKKRVKERSLKSLL

SEQ ID NO: 38725 - protein, 446 aa, Oryza sativa
MTAVPPENGMANLDISGKDAPAKTNGANGNNDVENDNSDDDEAEEGGEGAGEGAAKKKKKRKPRKKKKAGGGAAAQSSPPRTEVSKLFPNGSYPIGEEVDYLNDNSYRTTNEEKRAMDRDNMEFLTEYRQAAEVHREVRKYAQQNIKPGMSLTEIAEMIENGTRALTGHQGLEEGDNLLGGVAFPTGLSINHCAAHYTPNAGNKMTLKQEDVMKVDFGVHVNGRIVDSAFTVAFEPRYDPLLAAVKDATNTGIRLAGIDARLGEIGEGIQEAMESYEVELDGKVHPVKCIRNLNGHTISQYSIHGGSAGKSVPIVKSATTEKMEEGEVYAIETFGSTGKGYVHEDMGCSHYAKIDDAPKVALRVQSAKTLLRTIEKNFGTLPFCRRYLDRLGHDKYLLGLNNLVQSGIVQDYPPLVDVKGSYTAQYEHTILLRPNVKEVVSRGDDY

SEQ ID NO: 38726 - protein, 594 aa, Oryza sativa
MSSHQMTEPASSATPSLAQSQDLEKKLSSSADDGATAVGHADNSMSEKEETRPAPKTTASVGFAPQTAPNYIPADGADPAATRPTRTFSRRDRSENLDTTHPFGGDLERAETENHLERFQSQAGKDVVIVHWEGENDSENPFTWTRTYRWYLTMLAGLLVLNSTFTSSAPSGVIPQLEAQFGFGREVAVLSLSIFVAGYCLGPLLWGPLSEQYGRRPVFIGAMLVYTCFNIGCALSKNTGSILVFRFLAGTFAASPLTNSGGVIADLWDAKTRGIALSLFSLAPFAGPALGPIVSGFIAVSGTSWRWLFWVCTIFSGVCLVLVIFTLPETYAPIILLKKARRIRKETNDERYKAPIELVSIEWKDRLNKTLLKPFIMLGQEPMLLVMTFYLSFVYGVVYLLFEAFPIVFSVGHGFNAGISGVMFVPFFLGGCAAVALYVAYFNPKYARLADKLKEEGVNRVPPEERLYPIMLAGPCLVIAFFWFGWTSYPSISFWSPMMAGSLIGFGVLFCFLGVFNYLIDVYLANAATALAANTVCRSAAGFGFPLFATQMFEALNPRWASTLLGFVALVMVPVPFLLYKWGPKIRGMSKHAF

SEQ ID NO: 38727 - protein, 150 aa, Oryza sativa
MSPMRPRSSSASSTSPVAGKKEKTATKPAGGGARDPPKGRSSSFACRVCGKRFPSQQAMAGHEDHCRRHEDHVREAAAATAAAVVVVATATASGGCSNRATCGALLASYTCATQLLAAAAVADWSQVAAGIPLSKEQLVVAVAIVLADDG

SEQ ID NO: 38728 - protein, 300 aa, Oryza sativa; identical to SEQ ID NO: 32466

SEQ ID NO: 38729 - protein, 68 aa, Oryza sativa
MARHFLLQVEVQGSAGCGLWMALPDLEQPRIRVPGELPELNKGQNGAVPLAAPLPRGNPVRVSGPKAH

SEQ ID NO: 38730 - protein, 528 aa, Oryza sativa
MSRHGMQVLVRRALQSASSSRSASVTGSLPKHFLQARHSSAKPAAQGAASQDASASSTADHRAIGKAQSLFLTHDSSPGTPFVLPHGMRLARKVERVVRDLYDVYGYDEVQSPQLYKTSLWKRSGHWDNYRDDMFAAEGYKERLARTSVPASSVDDRSACCSIHAETEVEDETFGLKPMNCPGHCVIFASQERSYRDLPIRYAEFSPLHRNEASGALTGLTRVRRFHQDDAHVFCTPDQVEAEIDAMLQMLTSAYDTFGFAAFELVLSTRPHDAFIGSVQEWERAEAGLREALDKSGRKWELNEGDVAFYGPKIDIRLVDGQGRRHQTATIQLDFQLPRRFELSYADPNATQTGERSTPVMIHRAILGSVERFMAILIEQTAGWWPFWLSPRQAIVLPAKTGSAELDAYAARIAKYLSLGIHPDAEASQSSERHLQRFYVDVEANPQGEKLGKLVRKAQLARYNYILVVGEREMQTQTVTVRKRDDSNAPKNLTASTTPAAADAIANNAQIPITELRRIFCQLDSSHA

SEQ ID NO: 38731 - protein, 244 aa, Oryza sativa
MIAASARTASAKVVAGVSVMVAGTSIAKPVYSEEAPSSSTKLPIYPLPDAKVEVVPVQTELERQIGSARRAVSSVTAETRGSVRSLVDRWISLERSVEGEVKSLIPDTEPLTPGLLYVGVATLAGSIFTRYRAFPIRMLTPPLAAIVAVNTTNPQLAANLGAYYTQTERKYLPALTEQRQKWQAQARDLVSGAKDGFEKVKENTESSVRKGLESVESQTGLRVKDVVAAKDEAKTAIKDQMKAV

SEQ ID NO: 38732 - protein, 432 aa, Oryza sativa
MLAPATIRTAVRASQASRLGFVSLPAVRQYKSTWAHVKAGPPDAILGVTEAFKRDQDPRKINLGVGAYRDENGKPYVLPSVRQAEELVITSKGDKEYLPITGLADFTKNAAILAYGKDSAPVKENRIAITQSISGTGALRIGGAFLQRHYPEAKSIYLPTPSWGNHTPIFRDSGLEVKQYRYYDKKTVGLDFKGMIDDIKAAPAGSIVLLHACAHNPTGVDPTVEQWKEISNVVKEKGHFPFFDMAYQGFASGDTDKDAFAVRHFVSEGHQIALSQSFAKNMGLYGERVGAFSVVCADPDERARVDSQIKIIVRPLYSNPPMHGAKIAATILADQQLYQQWLGEVKGMADRINGMRSTLKNLLVEDLNSKLNWDHITNQIGMFAFLGISPEQVAKLVNEHHVYLTGDGRISVAGITNHNVKHLAESLHKVTS

SEQ ID NO: 38733 - protein, 366 aa, Oryza sativa
MADNAAAAADSAARTRYARGQLEALRAAPSEEAQARLWAEVSAALAAAGFSGEYDGLMDAEDPSIRKPGRKGKKAAGGGWKRHDAAAATQFLETDEVGAWRNGDSGVRYEHYVDEPRSVLQVIEEPFVQGGNAEYEDADSDDDYDGILKPAFAVDGDPDFESGEPLDSFEYLRRVRWEANQIPRVKVAKIDLNTARNEQTPYMPEIPDIAKCSPDLCASKPWEDTFITYFSETRLAFSELDSSDGPSVSGGTKNLLKPSNRSEPQTDPTLTMIRNMDAVSRAATLRNYIDMIQSLDKLSRNDCLWLFSLCVAVDTPLDAETCASLRSLLRKCANVLAAKLEMDDEVAMLNILITISGRFFGQYDNH

SEQ ID NO: 38734 - protein, 236 aa, Oryza sativa
MTRINIGYLLALGLLGTTAVATPAPRPLPQSQQEIDPNPSLTYSLRDPEVTDYQTQNGTGSAVPTTTSARSSAEQTGNASPTLTEIAAFTAPNGGKYTATAVDGTLRIAGYQLTEGGPDALVGGIRVSVASEGLIFGGNTAAYQTVTGVSTSEVTSTSTDASGNTQVVSSSATVAVTAESSGSTTASGSESASGSTAAASSSAAASTGGAAAGATAESRGAVVALGGIAALLCIFA

SEQ ID NO: 38735 - protein, 363 aa, Oryza sativa
MALEAVVFSEGYYFGCGGAMAAEAAAGGAWSWSHGYGGGVDQGKGAMELVVDDGVVNAFWDGGGGGASSSPVMAAVSGFIEEPDGGNSSVADAAPPPEHGGASVVGRDGSAAAPAAAAGRRKRRRARTVKNREEVESQRMTHIAVERNRRKQMNEYLAVLRSLMPASYVQRGDQASIIGGAINYVKEMEQLLQSLEAHRHARRARTDAAAALPFAGFFTFPQYSMSAVPTTTTTTVAAAATENGNAVAGAGAGDDADADVSGSKPSSVADIEVTMVESHANLKVLSRRRPRQLLRMVAGLQHHRLAVLHLNVASAGHMALYSLSLKVEEDCQLTSVDDIAAAVHGIVETIEQEQQQQQKQSCS

SEQ ID NO: 38736 - protein, 1034 aa, Oryza sativa
MMPMQPPPQPPHQHFNPNPAAAMNQRQQHQQQQRYNQASASSMGGFYPPNAVNAHDSYQASLPPASPQRVYSSPHAAPSIQLHDVPPTNPPSSSNTTHDASFASSTSSSHPPSSSRLRRVRPDTEEIKRVGRSHYVELLGFLRTHLAKVEQTAPRSNAREKLTRLSKQQFTELSTDVYDELMRRQNSAKDSTTQPFLAVRDEFHPKRNQARQKLATLPKNRFKDLASDVFFELERRFPELKHEFRPEAIARERAREQQMRDEAEAALQRKDSVGQPQPSTSDRIVPAKSTLVEEDIAVPYSANASKSGLRSADTDAASERVSSPLRGSIGSNGLNGIPDNRSTMYSQASSVGTGFFNGYTGSTVAGSIASPNLGRSSAFESSDASSAMLEKMRSDYELRIAKLQQQVSSLEAQVAEAGTRVRNADELAGRNEELDRQLSQLRKELDEAKQKHDDQRDQHRELASQKDSELESVRRELAERANIGGPADFEALQKEHAQQAEVVGELKQEVSTLLEELRELSARHDEVQADRDNDVTVIKDLNAQMANYKRLYETAKTELRNLKATSQLYVQPPKADDFLAASERGAIADVNLTAFQSSIDELLAAARSKTPGNVLLSMKTVVLATTLVTDDVAKYEQVPANAAELSSDEQEQLMALKSKCSATLNNLMTACRNHASSHGLSPVSLLDAAASHVSATIVDLVKLLKVRKASKSEADEFQARLGEDAAAAGRLKPLHINAQAASRDASATLSPNTANTFSFASLNPSDDRFSPRIRNSPTMGRYSPIGYKAETIRKESGGDSQWRSRATSFSSTGSAGANLSTPSMAAMPEMPNLDGAKRYMADVSTSSSSGTAAAAAAVSGSKDVGGGINGGAAVTGSPQTSDSQVQRSETYDSLHTTTSASGSGFGSHSGEENWTELRNYIEVQTEAIVHSIQALLSAIREGAQGVQLSENLTQITTIVSSIVAISKGNLPAKSRAEGERILDELTDNCDQLSEMQSHPTFDKSTKSSMASASYGVAKGLKALNVLFNEADASQ

SEQ ID NO: 38737 - protein, 762 aa, Oryza sativa
MAPGLMSADAKGVFNAQAVEAKSAAKDDGGANEGLGGGKTFEGQSKLPHLPIPKLEDTCQRYLSSLLPLQSPEQHAVTQRIVDDFLQNQGPTLQKQLQEYASTRASYIEEFWDESYLQASDSVVLNLNPFFILEDDPTPTRGNQLMRTANLILASLAFIHDLRTGVLEPDNVRGTPLDMYQYTRLFATSRIPTANGCRMEVEPESRHIVVMRRGQIYWFEALDEEHRPLLTERAMLGNLQAIVRDADKIQIDDVAKGSVGILTTEKRPIWSMYREHLREDSHNRKCLEVVDTALFVVCMDDSEPADAAELSNNMLCGTYKLQRGIQAGTCTNRWYDKLQIIVCANGAAGINFEHTGVDGHTVLRYAADVYTELIMRFAKSINSATKSLFKAKTSPYAKGAGKKANGSFSEADAQKAQDVNQATAPKKLEWNLTKKLTDGIKYGETRLSDLICQNECQVLEFDRYGKNFITRHRFSPDAYVQMAFQAAYYTLYGRCETTYEPAMTKAFLHGRTEAIRTVQPHSARFVETYMSDAKTDAKLDALKKACEGHAKLSKACATGQGHDRHLYALHNLWKKMQAERSDDQPAPKIFTDAGYAKLNHTVVSTSNCGNPALRMFGFGPVVPDGFGIGYIIKDDGITVCASSKHLQTKRFLDTLEAYLLDTQRMIIETYKAANVRSQSTYIDHAGVECDVRTGLPIGSKNNGYSLDYDQVPAQHFGQSGYSFFGDEKAAAKKDEQHKEDSAQSRRRSRLASVGKTILYDDY

SEQ ID NO: 38738 - protein, 322 aa, Oryza sativa
MQFKSSVLLMGLAAAGLASAAPAVADAAAPAVERSEPVATTNNVQRDTTDAAPSADYGIGPPMDQWSYKRDGQPAGDFGVGRADRWSYKRDGQPAGDFGVGRADRWSYKRDGEPAGDFGVGRADRWSYKRDGEPAGDFGVGRADRWSYKRDGEPAGDFGVGRADRWSYKRDGEPAGDFGVGRADRWSYKRSGEPAADYGIGPPDRQWSWKRSGEPAADYGIGPPDRQWSWKRDDAPAADFGVGRADRWSYKRDGEPAADYGIGPPDRQWSWKRGDAPAADFGVGRADRWSYKRDGEPAADYGIGPPDRQWSWKRESESAESQ

SEQ ID NO: 38739 - protein, 249 aa, Oryza sativa
MDCAGDDDAVAAGIICSLRGADLAGWTPPWWCSSSSKGAAREELIWPPVTRGKRSRRRSPSAVAAAAGKKGRWARASPASPLDYSGGSGSGSGSGSGSAASTSGGEDGAFCSPPGHRPAPATTKVSAMGRQQQLPFSAPSPLRPAGQRPRKKMGLPDVQQLVRSLAVENDSLREEMRTLQRACAALSKENDKLEIRLQISSSRNKPMITEDLKGKQQIDQQSATQSIGGGFALPDLNIPVQDAADGSVH

SEQ ID NO: 38740 - protein, 487 aa, Oryza sativa
MSSSIFFKFKSQKEPSQITFDGTSLSVFEVKRDIIALSKLGDGTDFDLEINTSDTNERYDDDTVQIPRSTTVIARRLPATKPGAGRAARYVSGKMPVNAKKPEAVDENGKIDVSQLPAGAMYTANGEWVIAKPDEASWDKFQQTQKVAADQAKELEADKEVMRARGLECSLDHKMFSDPVKTPCCGQIYCRTCIENALIDSDFVCPNCGEQCLLESLESDVETLDKVKAFQEEMKSEKQKKQAEEANKKSPSAAPNSPGKSPQPSDSRPGSANGKKRAADEELENTHKPTGPAEMKRAGSKEATPVQPAQPNAAKNNAAPVMPMANNLQDFAMQMDMMSRMSGMPGMPPGGMMNPMMMGMNPMMMGGPGAGGMNPMMNPMMGQMGMGGMNGMNGMNGNMNGGFGFGPQGQQGFGGHNGGGPPAGPRAWQQQQNQHHQQQQWGMHNGQNGAPQGPAANGAYFRQPVNPGRAQNRGRGQRSVDYKQLGQ

SEQ ID NO: 38741 - protein, 467 aa, Oryza sativa
MASFPPPPPPPHVRPAPATPSLAPPPPPQQQQQQPPGSAPPAATLLVRHLPGAIPQEMLSRLFSHYGATSVRPCAGGKLRNCAFVDFRDEVVASQAQSLLNRLRFLGKVLIVERANQPNSKNANEKQQEHEAQGALQVPSMNSLNQKNPISSAEPIAPRLGVDYPFPPHLEYAYPPPDGNILTNIVNALIAVPRFYTQVLHLMNKMNLPAPFRMALPTPPLPSQVPAPPPPPPPPQPSAANKPHLTDLSSDESELESSDEDVDKRKVKRTKHEAIVGPAVDKSIAHEAVGVKPAALVSSELQVIKKKNPVLQINIAPKAAQKELTVQSTTDKELVPTAEQLQGKHFVTPQDIEKEKLAPEEILSLPMFKNYTPGNPASVLYIKNLAKDVIQDDFYYVFGSVFENMDIARSSLSIKLMQEGRMRGQAFVTFPSVELAQRALNLVHGFVFKGKPMIIQFGRNPAANKSS

SEQ ID NO: 38742 - protein, 159 aa, Oryza sativa
MALASDKFVLSAIVLAVLTVAAAAAGYGGYGDVGEYCRVGKAVSRNPVPSCRNYIARWCAVAGGRLDSGKQPPRQLLEPCCRELAAVPMQCRCDALSVLVRGVVTEEGDRVAGMISQHAAPGCDAATIAGMASALTDYGRCNLQHTGFFGCPMFGGGMD

SEQ ID NO: 38743 - protein, 602 aa, Oryza sativa
MAPTQSERTPLLGTQQRQPSVSRHRPSFAASIGRPDLTAEEEDAIAQESAFSAIQGAAHGVDPNSSAFVPLDQSHFSVSGIGGAIAEEPEEPPLRADIWVIMGAMWIGSFLAALDGTIVATIMNSVGSEFRVSKEVGWLGTSYLLTQTAFQPLYGRASDIFGRKAATLFASVVFLIGSLLCGLSQTFWQLCAARAIAGIGGGGLTTMATLVTSDLVSLKARGTWQGLGNLVYATGAALGGPLGGALADAGLGWRWAFLVQVPLCAVHFAVVSWKIDIPAGPGSMIEKIKRIDALGSLSLVTSVTLILVGLSLGGNEREWSDKLVLGSLIGGGAVLVLFVLIERYVAREPLMPMSVLFNRTPGFVAIACWFITMSQFGIIFNVPTYFQSVEQTASSYAGLHLIPNAIIASSCSLGSGLIMARTGRYRKMLLLGGLFGFLGPLMMCFWHRGTSEVFYWATMPFGGAAYGSILTITLVALIASVDPKDMAAATGVTYLFRATGSVLGISLSSAILQNSLQKNLEKTEIPRKVIQLIRQDAGAIKELSKPLRQAAIGAYEQSMHTVFIAIAAAGFFAFLALFFIEERDLPGKKPAAPAAAPARAQR

SEQ ID NO: 38744 - protein, 541 aa, Oryza sativa
MMSGGLAWAWRAVRCGVVLPTLQLAVYVCVAMSIMLFLERLYMALVVAALWLIRRRRRRSNRREQDDDGAENDQLLQDPEAANSPMVLVQIPMFNEKQVYRLSIGAACGMTWPSDKLVIQVLDDSTDPAIREMVEGECGRWAGKGVSIRYENRRNRSGYKAGAMREGLRKAYARECELVAIFDADFQPDADFLLRTVPVLVADPGVALVQARWRFVNADECLLTRIQEMSLDYHFRVEQEVGSACHGFFGFNGTAGVWRVRALEEAGGWKERTTVEDMDLAVRASLRGWRFVYVGHVGVRNELPSTLRAYRYQQHRWSCGPANLFRKIFLEAPPPACPPGRSSTSSTISSSSASSSPTSSPSPSTASSSPPASSPAPTTSASPSTSPSTSPPPSPSSTPPAPRAPAISSSSGSSSRTSCPCTGPRPRSSACSRPPAPTSGSSPTSEATPTPSTSSQLIPPPGLGGRPPPAPAAQASSIMTSMSPRSSWGPACSTAPSTTSPTAATASTSTCSSSRPPPSSSASATSGPSSYYYSYSTCIHV

SEQ ID NO: 38745 - protein, 135 aa, Oryza sativa
MHVIENFTEIYVSRGLVPRDHVVGSGGAAPTRATELISRTSGPGSGCTVATRETGSARPQRCRSTGARDHSPVDRRPTADAPTEWKRGRRAVARNLQAPLVLRHLTDNLSLQSYQYGLISKSKQQVQIVTKDSKP

SEQ ID NO: 38746 - protein, 222 aa, Oryza sativa
MAQDLELRQRTALGVLGAATEPELDQFMEAYHEILVKYREELTRPLQEAMEFLRRVETQLNTLSISGRSLRNILSSGSSEEDQEGSGGETELPEIDAHGVDQELKHHLLKKYSGYLSSLKQELSKKKKKGKLPKDARQQLLNWWELHYKWPYPSESQKVALAESTGLDLKQINNWFINQRKRHWKPSDEMQFVMMDGYHPTNAAAFYMDGHFINDGGLYRLG

SEQ ID NO: 38747 - protein, 531 aa, Oryza sativa
MPPKPERLLFQYVSKPRRPAREPAPAPEVCGGGGEEVVASDADADAVYRMVTAAPTPSAMESALSASGVAISAPLLDLVLRRFRFAHGDPLRALSLLSLALDRHGVAPSPFALDTALYVLGRARRFAHMWDLLRSSRRLVPDADTPRTAMVVLGRVAKVCSVRETVDSFRRLSRMLRGRGDDQEGQLFNALLRTLCQEKSMSDARNVYHALKYEFKVNRQTFNILLSGWKSAEDAEAFVAEMRELGVEPDLVTYNSLIDCHCKNRGVENAYKLLDEMREKDISPDVITYTSLIGGLGLIGQPDKAKHLLKEMHELGCYPDVPAYNTAIRNFVIAKRLGDAFALMEEMASKGLMPNATTYNLFFRCYYWAYDIGSAWQLYERMRSEGCFPNTQSCMFIVRLCHRHGRVAQALELWSDMVNNGFGSFTLVSDVLFDLLCDEGKLDEAERCFHQMIELGQKPSNVAFRRIKILMQLANREESIARLTAQMAQFGRLAPEDCRRVDHTLQSTHQSSDRTDTDTIVKHSNTFESRR

SEQ ID NO: 38748 - protein, 498 aa, Oryza sativa
MANLASHMTPRMDDRPAFVARPGEPEDVQEFPDVSGISTKIYHHLGVDTPFDPQHRLVTSYILPIPALSIFRIVVTIYMLFTAFVTAVQEGIGTITYFTSLSYWGDCAYFFVSAIHTCTFWYSLSRWNKARLASRGQGAGRIEMLEKAYPRNGVGRIDVARSKAAIDAFGTQLHHSIESELAYSRRTEFEIGSRYPRSWLSKSFSRPLQVCHTLLVSTVSSYPLVVMVIFWTVLKGPAPLGDSYSAFANIGKHTLNWALTMLDLVVLSRTPLRPWWHLVPILAFLGLYLGIVDITFKRYGVWVYGFFNVQQFGVPLVVFFCLLLAVFAVVSLLITQLLMLLREVVAAKVQKSGGWGSAKAVGVPDDACIPTRRGPGPLGGGGKRTKPGHDIIHLRGRFPSNALVGDRSSGIVVDDVQIHALSMVGSELNVDEVKTPISRSTRPSIRFEGDDHALAPSRSRSRQADLPNADASSSEAHLFRLINWRAEENPFASNDRIL

SEQ ID NO: 38749 - protein, 527 aa, Oryza sativa
MAEDTEKGGKNAWPDLLVLSHNHYDHTDYNTISKLLNPPASARVKRPHVFCTLGTKSWFQSNFGLTDAEVTECDWWEQSTVSLGSEAVLKLTCVPAQHFSGRGLMDRDRTLWAGWTFHAVSEASSKASVYFAGDTGYRTVPRGMPREEEDTLPTCPAFKEIGEALGPFDAALIPIGAYEPRFFMSTVHLAPQDSVLVHRDVRSRRSYGIHWGSFRLTPEDVNEPPKRLIEEAQRQGIDPAEFATIEIGQSVAIPIAASAPSTTQGAKETTAAVEGGEALPESKLGTKQHWDEVYAREVSVFNEIGEEGEVWFGEDAVMRMIRFLETYYTDTVAGEFSSEEEGKAPAVLDLGTGNGHLLFEMLESSADLEEVVAPSRLVGVDYSAASIELARSIATKRGGTCEEVRFETADILDPANVQHLVDMPRSQLGCSEVGWDLVCDKGTLDAIALSSQPIDGTLPIDRYTEAVARLTKKGAVFLITSCNFTEAELVARFTAHGFAVQQVVPTPAFTFGGAKGSTTTTIAFERA

SEQ ID NO: 38750 - protein, 566 aa, Oryza sativa
MHSANLLRASSKAINTPSVRCLSTSSTARLAQPAAAAAASSGAAKAQLSPLALSRAKDVGSKWQGTSMLGGTTKNYVDGKFVDSSTSSWLDVNDPSTQALLSKVPLTTPSEFDAAVANAHAAFPAWRETSLLSRQQVMFKLQALLRDHMDDIANAIVLEQGKTFADAKGDVLRGLQVVEVACGITSTLMEERVEVSKDMDTYARREPLGVTAAIAPFNFPAMIPLWSIPMATVTGNTLVLKPSERVPGASMIIAELCERAGMPKGVLNVVNGAVDVVNGICDDPRIKAISFVGSDRAGAHIYHRGTANGKRVQANLGAKNHAILMPDANKNFALNSIAGAAFGAAGQRCMALSVVVAVGEAQSWVPELVERAKQLKVSGGFEEGADLGPLISPQARERVRSLTGSVEQEGGRILLDGRDFVCADYPNGNFVGPSVVEAGPGMKAYDQEIFGPTLVVVKADSLDQAVDYINKNKYGNGAAIFTTNGATARKFEKNVNAGQLGVNVPVPVPLPMFAWSGNKGSVLGDIGFYGKSALNFYTSFKTSTSLWRSDDAQMSERASVNMPTMS

SEQ ID NO: 38751 - protein, 619 aa, Oryza sativa
MSDKLSAEIDNDVHHNEKHQVSEKQEVDLSETAGRRASVALNIVENPLQRKSPQQVVADARQFAEENGMAEHAELFGNAAPVARDQSRFEELGSLSEPERAALIYERDHKWHGPKMLWYSIALCAVGAATQGWDQTGSNGANLSFPQEFGIDGGGRDSWIVGLVNSIIFLTAGLIGAFIVDPLNHYLGRRGEIFVTALCLTATPIGSGFAQSWQQLFAARFVMGIGIGAKNATVPIYSAEMAPARIRGALVMFWQLWVVAGIFLGFCANVIVKDTGRIAWRLQLGSAFIPSFILGVGIYFCPESPRWLMKHGKFAQGFKSMQILRAHPIIAARDYYYSYVIYVEEMKIAGGSTYFTPMRDCFTVPRIRRANYGASTVMLAQQMCGINIISFYSSTIFDNVLKDSNKALFASLGYGAVQVVFTIPTLFLIDTKGRRTLTLITFPIMAVFLLAAGLATLMPETASAGARLGPVVLFIYFFTIAYSLGEGPVAFQYSAEVFPTIQREQGMAWAVCINNTFAGILSLTFPAMVDAMTQVGAFGFYAGLNLIAWFMIFCFVRETKQLTLEEIDQVFQVPTKKFIGHELTVWLPWFIKAKILRQKIQKPPAIIGTEESVADALKH

SEQ ID NO: 38752 - protein, 312 aa, Oryza sativa
MPPPAAAAAAAAPVPKKRKVRTASTLSGSGGPGRGRGRVAEATFVGRGRGVWSVRGRGRGRIPTEVTVGTPSPSAPTPAPASATAPLIQSNVVISPVPPTLAASGVAAWPPAPAIPEFTTAAAAPLSEKPVLTAHDVVMATLFPNGVFSYTAGSSHAPPPPVASGSFFQEVIPPGGVPTNYAIHEAPDFDPNVFFADVPDGEQDELVLLSLTSTLLDIDNSLTLVADDAASSAQAAVDVASSSAQAAIDVPSSSVLAVVDIPSSSAQAAIDVPASLAQAATGVASSSTQGAAGNERPIMFDFDLNEPASNFE

SEQ ID NO: 38753 - protein, 464 aa, Oryza sativa
MKLSGTALAASGLLVASASSALAAPAASSSSSASTAKAAGAASKRSAPIHIPIRKREMVKRSGNELLDWANEQKAILQNKYGLPSADASSKARRAQGTALTNVQYDSTWVATVTGGTPSKDYEVVLDTGSADFWIASDYYQPSSSSTFQNRSTAFNVQYGSGQVAGYEASDTFSLAGTTVQDTRFAVADQVSSGLVSGNMEGIMGMGFQKLAASGEPPLWVAANVDTFSFYLERASLTSNNQEQAGGFFTLGGTNSSLYQGNISYNSLIEELYWMVRLGGIGARGSDVSLDGLTRAAIDTGTTLVGGPNSVVQSFYANIPGSQSQGNGYYSFPCRQTIDATLTFGNQQYTIPDSDFVAGTLDQSGSQCLGAFFGLGSSSQTDLQWIVGDAFLKNVYSVFTTSGSNGAAVGFASLASGLNSGTNSKTVSTSSTGATSAASTTAQRSGMLSLAAVLAVPLIAALAL

SEQ ID NO: 38754 - protein, 547 aa, Oryza sativa
MRYSYVAATLVGSALAMPQYGYSAVVPTGYQPAPTSSKPYEASTPSAYHASTPASSKVYEASTPSSQVHYPASTPVYEASTPPAYSASTPAASSSVYHASTPAASSSAYHASTPVYSASTPIYSASKPAESSSAYHASTPVYSASTPAVSSSAYHASTPVYSASTPIYSASKPPESSSVYHASTPAYSASTPVYHVSSYGTGYVKPTPSSYGTGYVKPTPKPSSASEYPHSDYTTTLTSTHTSWVPCSTSVGQGEHSSVIYSTYLTPTYSTVTVTSTVHGSKPTSDVPVYPAETPEGHKPTYPAGTPEAPKPTYPAGTPEAPKPTYPAGTPEAPKPTYSAGTPEAPAPTYPAGTPGGPQCPAPVTVTKTVHEVETKTVTVGAGGAYTPGPAPSVVYPEGTKPSSSVEHYSEGPKPSSVKPYPVGPKPSSEVKPPYPSSGSSIHYTASSAPYPIHTPSSSKAYPTEYPTPSSSTKEYPASTPSSSTKGYPASTPSSSTKGYPAATPSSSTKEYPAATPSSSAVPYPVNTPSSSKVAPQPTGYVAYPHY

SEQ ID NO: 38755 - protein, 389 aa, Oryza sativa
MDGFPFPPPFDGSYRGGFPSSSAWLDASGGDESSPGSWDKDVHPRGGFMSYFGNHAQNSHLVGAPIYIADASSPPEVEILQGNDDGNGNGNVRTEMRILWTEEEDIILMSAWIEHSTDSTCGADKGGGQYWGEVVESYNKTTPPLRKRNLKQCKDRWHKINRWTDLFECAYVKARRIFTSGYSNQMWIDAAHKFYVDDNKEAKLGPFVLMEVWKICREVSKWKTYNDNLRNARKRKSFHLEGDSEEADDTFDEMPKRPMGQKAAKKAALDAKIKSNGLGSSDDGHSKESPIQLDKFDRYSKFQEENNDKRMKLLDRQEKISSEKLEATKIAHLTAQEYKEGRKLEKESKMMETYNSLISQDTSSMSAEEKAQRVSMMKCLMKTLFPESD

SEQ ID NO: 38756 - protein, 454 aa, Oryza sativa
MTDIGANTKAAPSKSATAGKGPKEAVKETYTGELPLNHEPPAGYAAPRRDRGLQAPDHPTARLRPDPEAPKLPLLAPSIKSLSGSEPMIAQLAGTIDELTTFLKETPSSGAKAKGVLENAQVDLEKLSQRLETIKREEAKRVENSLAAQAKRYEAQISKQSEEAANKLSSRETDWQKSFEEERSKQMQQFKEKLEKELATQSQIINERLKEEVIAQGIELQRRWMKDIKAKVEEERGGRLAKLDELATELKSLEKVSLDNSSVLDENVSVHTLWTAVRAVQHALDDASATKVPFAEQLRVLKGTSKARDDPVLAAAIEALDASGAADTGVESLTTLKQWFDDKVGPRVRQVSLVPAPETAGVLSHLASAALSPILFHKKGLVQGEDVPSVLARAEYYLDRKDLDSATRELNQLKGWPKLLASDWLAASRKRLEVQQALEVVQTEASLASLMVSA

SEQ ID NO: 38757 - protein, 109 aa, Oryza sativa
MKSSAFATLCSRSFRPVLNAGSSFLLRSSSRSEGRSEGIAADDRCRDGRDSERDQPFIACTRSCSAWHPERSELLQLLPLGDLRRGLGLRCGGVVASSPWRRRFRLQRF

SEQ ID NO: 38758 - protein, 262 aa, Oryza sativa
MIHDFAITENFVVVPDHQVVFKLGEMFRGGSPVVLDREKTSRFGVLPKHATSSLEMVWVDVPDCFCFHLWNAWEEAESGEVVVVGSCMTPADSIFNESDEHLESVLTEIRLNTRTGESTRRAVLPPAAQVNLEVGMVNRAMLGRKTRYAYLAVAEPWPKVSGFAKVDLATGELTKFEYGEGRFGGEPCFVPMGGAGAAASPARGEDDGYILSFVRDEAAGTSELLVVNAADMRLEATVQLPSRVPYGFHGTFINAGELATQA

SEQ ID NO: 38759 - protein, 450 aa, Oryza sativa
MGHGVSCARTGDEHDFFRAAQLGDLDALAALLAADPSLARRATLYDRLSVLHIAAANGRIEVLSMFLDRGAPPDAVNRHKQTPLMLAAMHGKIDCVLKLLQADANILMFDSVHARTCLHHAAYYGHVDCLQAILAAAQTTPVADSWGFARFVNVRDDHGATPLHLAARQGRPGCVQVLLENGAIVSALTGSYGFPGSTSLHLAARSGNLDCIRKLLAWGADRLQRDSAGRIPYSVALKRNHGACAALLNPTSAEPMVWPSPLKFISELEPEAKALLEAALMEANREREKKILNGTKYSLPSPSPGDDSADDDACSEVSDTELCCICFDQACTIEVQDCGHQMCAPCTLALCCHNKPNPTTLTPPSPACPFCRGSISRLVVAQTRSACDPDKPSSLQLTRKRSRRSHNLSEGSSSFKGLPSAMGSFSKLGRGSSRMADSDSSNLDKPEHDL

SEQ ID NO: 38760 - protein, 457 aa, Oryza sativa
MRRPSLLTSNTATPAETQVVEFALDPAVAVENGADAGHADERPPEGYGWVVCGAVSLINGFTWGVAASYGVYLSYYLSSSHFPTATPMDYAFIGGLIFGCALLFSPVWTILTRELGRKLVMTGGCFLMAAGFVAASFATQPWQLYLSQGAAVGTGMGAIFTPSVQVVPQWFLRRRSLAGGIASAGSGFGGIAFALATDAMIRQLSLAWSLRITGICCLIGNLIGTALIRDRNAQIKPPQLGFATHLLKRYDCLLLLAWAFTNILGYIVILYSVSSYAVQVAGLTQKQAGILTAMLNLGTGIGRPAAGLVSDRFGRIQVAAYITLACAISVFAIWIPATSYGVLIFFSLVSGAILGVYWTCVGPLCAEIAGLKEVPSFLSLHWLTVVLPTTFAEVIALYLRRPDMGRWGYLYTQLFTGFAYLVAAGFLFELWRVKRVEKLDRGRELGRLGEWMYRYRP

SEQ ID NO: 38761 - protein, 642 aa, Oryza sativa
MSRVVVVGGGLSGLSAAHTLYERGANVLVLDKNPFFGGNSTKATSGINGAGTTTQAEQGIPDSAKTFFEDTKKSARDLARDDLIKVLTGKSGEAVNWLMDRFDLDLSKVSRLGGHSQPRTHRGGAQFPGMTITYAQMEKLEDLAEAEPDRIQILRKARVTKLIHQNGEVTGVEYEYQGQTHKEDGPVVLATGGYAADFDDVNSLLKKYRPDLVHLPTTNGDHCTGDGQKMVASIGGRLIDLEKVQVHPTGLVDPKEPDAKVKFLAAEALRGCGGLLIDNEGNRFADELGHRDYVTGRMWDNNKFPVRLILNEQASKEIEWHCKHYAGRGLMKRFDSGDDLAKEMGIPADKLKSTFQDYEAIAKGEKKCPWGKKFFSNSDLRMNQAFYVALMTPVLHYTMGGLEIDPESRVIDSQGKPIPGLFACGEIAGGVHGANRLGGSSLLGCVVFGRVAGDSASSYLLRNLATGKATARLGQIANHLETRVRADPNSKTITLEFGFGDGASSASSVQQQNSAQPAAVAQGQPAQTDKAVQQSGSAAAAQQTIEEKEYTMDEVASTPPETTSGSSSRARCSTSRASSMTTRAERRPLCSTPAATPPRSSSCSTTARSSRSTRPTPSLAVSRLDLPLPLLIDVPADVATNS

SEQ ID NO: 38762 - protein, 785 aa, Oryza sativa
MSAPNSAPDRSVSGQSPSTARSTTANASAVHFQTDEAADASLDSIAPSFNEPASDDGPEVSSDDGQGYDHYNTSFTNPERRSSSFGIATPSHGFPSSSAYNYKAMISKHGHGFPERAESVRNISALANLVDYRSNYFEDHRLSEEEIKHRTKHLGWSKAAAVSEYYERLNETLDGWREVDEILDSRFPDEVMRRFLHQDQIAAKNKRRNHHQSAAKHKRRNKQASNNGHCEQPESDGNVSDEEETEEEDLRRNKRSIKRSFSAKAIDAFSGLWFGSSSSPRMSDGRRDLEQARQPRSSSRTRQASRPKPFDLNSATEEEEEDDHNDRARAPTRQLLSSSPSATDDIRKTSARNDYGATSASSAGQLFDKLRREGRIEQIRRSESQLALASGANSPAPASGTQTPQEAISSSGSKANTIRPSRVDSISEHADPAAKSASADKHRSSMNRDPSIERYHRPYASQEEERQALLSTVPSRAKEEETSRSVQFAININLLINILLLAGKGVAVLSSNSVSLIASFVDSALDLLSTIIIFATSKAIAYCSWKTIYEYPVGKQRLEPLGVVIFSVLMIASFVQVFIESVGRLREVLATGSEDSESAASLPLIGVAFMLATIGIKTVMWLLYRSSKSSGVRAVSQDAENDVVFNIASLIFPIVGSRLGWPALDPIGGIALSIYIIYEWIETLWETVSKLSGAVASATEISKCLYCVVRFNSVNSVSAFELFHSGDNLIVEADIVLPHSISLKESHDLGEIITYCTENITGVERSYIHLDYNPKGQAGHLTQRG

SEQ ID NO: 38763 - protein, 277 aa, Oryza sativa
MAQPQPQRMEDQLQSQAQGQGQGQTEAIKYGHVFAVTGELAGQPIAPRDAAAMRSAEESVPGVPVPQDIGGGYSAGVAMETAAAYNQAVAAVRPGQASDAATNQGIAVTQTSVPGGRIITEFVAGQVVGQYSVADQAVEQDATKITVGEALEATALAAGERPVDRTDVEAIRAAEMAAQGSDVTMPGGLADQAQAAARSNADADRDDDKITVGDVLTDATAKLAGDKVAGAEDAAKVVQAETYSDAAARTRAGGVGAAVSTAARLNQADDDADDDAE

SEQ ID NO: 38764 - protein, 508 aa, Oryza sativa
MASPTATTGGQSQIPTRTLTNTTDGDDAIPDEDSSETTKLFHERLQAWKHACGYIEDYITATEKMHHQHSKEYEKVLKTVSNPLKEGHHFDQTLGGVAGLFDNIRSNTQGMATSHGETAKTLKGSILPVFERLHTEIKNKTKELTKGAGKGAKAVDKARNTSQKHIELLGKHTAAFDASSGAVKSHEDPYILQRQVYHRLSKQVLEENNNRDDMLSVQNHFAQFEAHVVQTFQNGLAQFNSIMQNQTELTRNAYGDMIGVAQRITPDFEWNGFVKRNNHLLIDPQAPKRAVEHIAFANQDHRSTQPLIAGSLERKGKIMSSYSTSFYAVTPSKYLHEFKTDDDFAKEPQPETSLYLPDCLIGAVDGVKFNIKGKNSSKGVLSKMSMGHEYHFRAHTPQDAQKWHDVISSVVGQTTNELPVSPVSPGTEQAHQTFPTSETGTVGAAGTGAAAASTLPEKSAAEPGLSSYEREAQQQAEMTPSTATTGTVPSTTGYPPEKGVSGTGEKVI

SEQ ID NO: 38765 - protein, 1333 aa, Oryza sativa
MSDLRIHAALSPRVAVLSSPDVDRVIQFNGIPDLSTLLRPFEFSVERLSVRTSQLETRVCDRFPLRFDPYSMFNAQAARAVNPAEELLDQVNQLIATNIKKWDAQVPKPNAAGQQHHTGSDNAFNELDDKEAAGKALEETLAKLQRGSLEETTPWFAAVQQLVFSQRPVCKHETFGHPVAVLLAVSSASPDPMNDFAKLYEVTSQASPFAAQPFINTDVLKYYVLIHDVRTSGPDLSSSKEMLEQIKKTYGLHCCLLAINSAPDDRPAAPAKLAALWSPYLSTLPTSPNPMSPPGDPTRANLAAVLDEEDVKRIKGFIRELTAQSIVPFMERYVQHMGEHLANSRRGLTNRLFGASRKLYGGVGVGGSSDKSGSGSSTPGGLATSGGYDAQNEWYPYTSIEAQTRRLADFAFTIRDYKLAASMYDLGRKDFAGDKAHRHSAAATEMFGLSHLMIMYTARSAPIDVDSYLAQACQEYTLRSAARAAPAMDENNALRATLLYYEAYRMLGYLRPAPAGLLRMSQRSDEVLAPLLLEQAALACLQLRPRAALRKYALHLVMAAHKYQACGQKALSLRCYANAAVVYRDKGWTLVENHIEHELGMQAYNDGDSDTALAHLVRLVRSSANSSVEHDTFLKAVQTAYKYSARAGEQPDSIPGAAATALALPVPMFDAASASLRFVPESSASATSAVDEEVWERLEEQLVASGLGERTHADGSKSRRKRPTSETSTQAREVPVGQTFWLEIALHNPLGVELAVDHIHPVLKHDTREQDDFSDVETEDPGRMVLGAFEHRRISVAMRANKEAKALRVASVTFRLADAIGLVQPLVKKGQRLNATKEQRAAVVYGRELSLAVSVHAARPTLTARIVYAPAHMLLGEQARLKVVFKNEGGAPIEDVRALCDQPELATFDGVPSSAEDTTMANHMDPAGPEDVLGSGQLMPGEEVERWLMVRPNRTGAVSIAWLLPFSSGDGETYLSRLALSIKVSAALQINVTTEPERSTVCRHVVTVEATNRLSSDEIRVDALSLLGPGWKLAKSSAMPQSVVIAPLQVWREQVLVEAASAEGGMDEYTATRLQDVLLSRDTRRARAAGVKLHLTRVAYASEWDGLMLGLHREARKVWRSRWLGAAFPTLGARDRRDAFTLWEPRDLDVVVHFTLRSRTESSAHCGQVAVYGLHPGPLRSQIRAITHPRLEQGAGKAAVRSLYAETIKEKATVLANILASRLNADQNPAVIHATLASTEDNDEAERRYRFVVRNFSDLYSVKVAIQLHDDTDADGARWTGRKTLRCALASGAVAELIATRSETPGVHGVRYGVVAETYGADGVLIARYIEQH

SEQ ID NO: 38766 - protein, 349 aa, Oryza sativa
MASSSPPWLLLPSFPWPPPPPPGSSSGRGGGGGGGGDPGDWKPNVVAAFAGAQLGRALRRRLAGLLRSPEARHLGALPRIGDIWFEGSDSFATHSILGVLENALSAPYACSSVLFNGNGSDRRYIGRGKLPSRRPSGINSKKRLWTNILLAVNILAYVAQITTQGRLLIWGAKINSMIDRGELWRLATSSLLHANLAHLAFNCFSLNSIGPMVEMLTGPRRYLAVYFTSALAGSLMSYRYCASPAVGASGAIFGLVGAYAVYTWRHRRFLGHGKESLEHIGRVVILNMGMGLLTRGIDNWGHLGGLLGGMAMAWFLGPAWQYQYVSKDGRAVFKDDAPILQLSNGKWLR

SEQ ID NO: 38767 - protein, 566 aa, Oryza sativa
MVGATGAKGLIKNARTFAIAVFASMGGLIYGYNQGMFGQILSMHSFQEASGVKGITNPTLGGFITAILELGAFVGVLMNGYVSDAFGRRKCVLFGLAWFLLGCIIQASTTGGSYDFITAGRAIVGVGIGSLSMIVPLYNAELAPPEIRGALVALQQLAIVAGVMISFWFTYGTNFIGGTGAGQSRAAWLIPVTVQILPALILGVGIFWLPESPRWLIDVGREQESLAIIASLRRLPESDLLVQMEFLEVKAQKLFEDRVSAHDYPDLQDGSRSSNFKLGLAGYKSLFTNPANLRRTLVAILIMLFQQWTGINFILYYAPFIFKQIGLSGNTISLLASGVVGIVLFLATIPAVLYIDSWGRKPTLLAGAIIMGICHLSVAIIIARCGGDWPAHRAAGWVACAFVWIFAAGFGFSWGPCGWIIVAEVFPLGLRAKGVSIGAASNWLNNFAVAMSTPDFITAAPYGVFIFLGVICFVSVAYVKFFVPETKLKTLDELDAVFGDNSGRSQWEAGIMLQAQRDVGLLRLAGIEEPKGVHGDNVSDDVDEKGSDIHSDGEVKKEGHTVVSTA

SEQ ID NO: 38768 - protein, 441 aa, Oryza sativa
MKDICAAYIHHKDALGALISYEMGKVLSEGKGEVQEVIDVADMAVGLSRSIQGSVLPSERPGHLIYEIPNPLGLVGVITAFNFPVAVHGWNFCLSFVCGNATLWKPSPTTPLTAIATTKLIVDVLKKHNLPTALAALVCGDVETGQTLTRDERIQLTSFTGSEHIGKLVAQDVAARLGKILLELGGNNAAIVLDDADLELAVPAVAFAAVGTAGQRCTTTRRLLLQRNVADKFLERLVKFYTSLQSKGLIGDPTDSSVLCGPLHSQRAVTKYWETLDTIRSSGGKILFGPDSPSSPGLASHLVESKGNYVLPAITMPASSTDKVFQEEVFAPILNVAVFDTLDEAIELNNSVRQGLSSSLFTTKLTNIGEWQGALGSDCGIVNVNVSTSGAEVGAGFGGNKATGWGRECGGDAWKQYCRWATSTVNYSSQVALAQGVKFDA

SEQ ID NO: 38769 - protein, 487 aa, Oryza sativa
MALTTFFREGFLMELLSAILGDFVSRSITFMIDRYPKQRPSVDENLQRLHHLLVRIRTVVEEAEQRHVTNHGMIRQLELLREQMFRGHCVLDAFRFRDEEEDEVTPRFALSKFNRAKRIRFSDSSSNTQIQTRSTNDLHQTVTSLERIIGDTKEFVVFLMSYPPVYRQPYSTHLYLDGCMFNRQMERENAISFLLQREPLAVAEEIVQVLPVVGPEFVGKSTLVEHICRDQRVREHFSLILYYSGDDLRYEKAETFSEICQTKHRNESNDAMDGRLLLIIELLGDVDERTLKKIHSSFRKQMTHEIKIMITSRSEKIIRLGAKQALRLNFLPFEAYWYFFKVLAFGATDPEQHPKLASMAMEIATVLRGCFLCVHIGGALLKANFNSKFWSRFVAFVREYRDEINSLMPCDCQDHPKFGWVIVRPKPENYFVLRDSYQKALVEDDGPKIKLVDLLSGRVRRRGKFEVLVWKSRIPPYYSYISNCVMY

SEQ ID NO: 38770 - protein, 204 aa, Oryza sativa
MSLQQANPYIVDGKGHLLGRLAATLAKELLSGQKVVVVRSELINVSGSFFRNKLKYHAYLHKRHLVNPKKAGPFHHRAPSRILYKAIRGMLPHKTARGAAALQRLKVYEGVPPPYDRKKLMVIPAALRVLRLKPGRKFATIKRISHEVGWNHMETVDKLEAKRKVKQQAYHERQVAASKKRAAAQTATADKLKDVNAQLASYGY

SEQ ID NO: 38771 - protein, 279 aa, Oryza sativa
MAGRGGMVEWEVGRRRDSEDVIVLSPGPPARRRPPPVKAVEPESGGFAYEPPEKLFYKTRVCETFVTSGRCMFEDGCTFAHGDEELRPSLTACAGGWRKPSPSLSAAAPPVAVAPTPPPAQVVHELLARGSGSGGGGHRAITKVCFEFRDKGICYFGETCAFPHVSAAEIRQGSRLSSMSSSSWEMPARRSVAVTVPRTFVSVPPVAPPPPPPHYRVNNSSSYNAASMAAAAPAASDANLVAQQPPPEQGGRKMTRLEMLSLKKMTGIYGDWLEGYEHP

SEQ ID NO: 38772 - protein, 297 aa, Oryza sativa
MARFPTAAPIRVVLFDAFDTLVTPRAAPHLQYAAVAREHGLDVADSDVKAAFKQAFRITATEHPNYGLETDIASPDHWWALVIQRTFTPHLHPAVSEQQYAATIDSLSHRLVTRFGTSQAYRLFEDVVPTLERLAQMRARDDRPVTLMLATNSDSRILGVLKSFGLDRFLNLDVDGSASAAQSSAGPVLSYFEKCAKPDSRFFQAALQRAATHRDESVPPINALYVGDQLHEDFWGATTAGLQAAWLQRSTGAESNQPHQQVDRARDDPHDLEYAHQRTITSLADVVGIVESSLKAT

SEQ ID NO: 38773 - protein, 527 aa, Oryza sativa
MEKQDCESQTPTQLSYFAQVFSQAGITPEVEAFEYKGSGTEEDPYIVDWITQDPRNPMRYGIVIRWSITAVVAIATLAVALVSSAYSGGAREVIQEFGCSQEVFTLGISLFVLGFAIGPLLWAPLSELFGRQILYITTYAALTAFNAGAAGSQNIETLLILRFFAGAFGSSPLTNAGGVIADMFPARERGLAMTLFAAAPFMGPALGPIVGGFVGETIGWRWVEGVLAIFTGVLWIIGTFLVPETYAPVILRKRAAELSKRTGLVYKTQKDANNSKESGGSATIFKTALSRPWVLLFREPIVLLFSIYMAIVYGILYMLFGAFPIVYQQNRGWSPGIGGLSFIGVAVGMGFAVCYSVWDNKRYADLSDAHKGFAPPEARLPPTFVGALAVPIGLFWFAWTNGPNIHWIVSIIAGGPFGFGTVLIFLGVMNYLIDTYTIYAASVLAANSVLRSLFGAAFPLFTTDMYANLGIHWAASVPAFLALVCVPLPFLFYKYGPTIRERCKFAAESAAFMRGMQEQQEQQRASK

SEQ ID NO: 38774 - protein, 343 aa, Oryza sativa
MSSISNDNNGDQKRQQQQQLVCVTGAGGFIGSWVVRELLLRGYRVRATVRDPADRKNAHLLALEGAHERLSLRRADVLDFAGLLAAFAGCHGVFHVACPLSNRDPELMAVAVDGTRNVMNAAADMGVRRVVFTSSYGAVHMNPNRSPDAVLDESCWSDPEFCRQKDMYCYAKTMAEMAATEEAAKRGLELAVVVPSMTMGPMLQRALNLSSTHVANYLTGAKKSYPNAVAAYVDVRDVARAHALVYERHDARGRYLCIGAVLHRAQLLQMLMDLFPQYTIASKCDDKGKPMVKPYEFSNQRLKDLGLEFTPLRKSCTTQSCACNETVTCLSSCHSRSVDPRYI

SEQ ID NO: 38775 - protein, 384 aa, Oryza sativa
MDGKKPYVIAIIIQVIYTGLYVVSKAALDQGMNTFVFIFYRQAAATLLLLPLAIILERRNAPAMSLRLFTKLFMYALLGNTITMNMYNVSLKYTSATVASATSNSVPVVTFFLAVLLRLEVIRLRTLSGVAKAAGVALCLAGVLVIALYAGPAISPLNHHRALSGGVHGAESSVGTGTRARWMKGTFLMLLSNTTWSLWIVLQASLLKEYPNKLLATLIQCALSTLQSLLLAAAVVRADPAAWRLRLDAGLLAVAYTGFVVTGVSFYLQAWCIEKKGPVFLAMSNPLCFVFTIFCSSFFLAEIVHLGSIVGGVLLVAGLYSVLWGKSKEHNINMQLTLAAAASTEQVKQRQEEDHKMEIAGGDEQEEIKQQQQGKMAASPEQQV

SEQ ID NO: 38776 - protein, 266 aa, Oryza sativa
MEWRDSFLDLILIPLSLLVPMAYHVWLWRAVRLTPLRTAAGINSATRRLWAISMTKDNEKKAVLVVQSLRNVIMGSTLVATTAILFCTGIAAVLSSTYTIKKPLSDAVFGAHGEYMMALKYVALLLLFLVAFLSHSLAICFLNEASFLINTSPTLLAGGDGAGDDGGRRLLGLPSTRDYMEEALEKGFTLNFVGNRIFFAGVPLLLWIFGPLLAFLSSLVMIPILYNLDVVNVKSHRGGDCGCGCGNGKSSVDKNGAAAAMDCTLV

SEQ ID NO: 38777 - protein, 416 aa, Oryza sativa
MSNQAATPRSASLSAASLLPDWPQAPSPTYALAPIRTSSARASSVRSASSSPRSLTHERSAPYPSSRPARTEMLDVQHPHHPQQAARMHDSELYRTRQALQSHLGVRQSSSSRSAPAQQPRSAEYAQTSSTSSNSPSSNKEAQHKVYLLNCKHCGNFLSDRGMKAVLLLKPNITLYSTDIVPSTCGPFTAASAFHGGADPNEPPVERTCECLTQSLGCYGCGAQVGYNIISPCTRCTSSVMKHSRSSNGHRTVLHCSEIAVRERRYIPGEPGVRAQPPRVIQTVAAHSPMQMYAESRYDAAAADLFRHSNASRRDVYRMNVPSFDDDDLEAEKAEANAALVHQQYYQQREYRQAGHHGRAHQHPGSAGSQRSSAPSGSGRVLRRGDTLFWSDLVAGGERAQPFDPDPILERPTVGR

SEQ ID NO: 38778 - protein, 482 aa, Oryza sativa
MANAANQHTCDGPQPSAPTHFLIVAYGIQSHINPAQNLAHRLASIDASSVMCTLSIHASAHRRMFSSLIASPDEETTDGIISYVPFSDGFDDISKLSILSGDERARSRCTSFESLSAIVSQLAARGRPVTCIVCTMAMPPVLDVARKNGIPLVVFWNQPATVLAAYYHYYHGYRELFASHASDPSYEVVLPGMQPLCIRSLPSFLVDVTNDKLSSFVVEGFQELFEFMDREKPKVLVNTLNVLEAATLTAVQPYFQEVFTIGHLVAGSAKERIHMFQRDKKNYMEWLDTHSERSVVYISFGSILTYSKRQVDEILHGMQECEWPFLWVVRKDGREEDLSYLVDNIDDHHNGMVIEWCDQLDVLSHPSVGCFVTQCGWNSTLEALELGVPMVAVPNWSDQPTIAYLVEKEWMVGTRVYRNDEGVIVGTELAKSVKIVMGDNEVATKIRERVNSFKHKIHEEAIRGETGQRSLQIFAKTIIESD

SEQ ID NO: 38779 - protein, 481 aa, Oryza sativa
MPSHQPVAGMSAVDPAYLSSQPSAASKPHPQEPVRNKAYDPKKPHITETPMTKKNWYKHVNWLNVILIVGIPMCGLVAAYWTPLYLKTAIWAVAFYFATGLGITAGYHRLWAHTSYSASLPLKIFLAAVGGGAVEGSIRWWARDHRAHHRYTDTDKDPYSVRKGLLYSHFGWMLMKQNPKRIGRTDISDLNDDAVVVWQHKNYLKVVLFMGLIFPTLVAGLGWGDWLGGFVYAGILRIFFVQQATFCVNSLAHWLGDQPFDDRNSPRDHVITALVTLGEGYHNFHHEFPSDYRNAIEWHQYDPTKWSIWMWKQMGLAYDLKQFRSNEIEKGRLQQQQKKLDQKRSKLDWGVPLEQLPVMEWDDYVDQAKNGRGLIAVAGVVHDVTDFINDHPGGKAMIKSGIGKDATAMFNGGVYYHSNAAHNLLSTMRVGVIRGGMEVEIWKRAHGENKDFIKDAAGNRIVRAGAQVTKVVEPPASAGTA

SEQ ID NO: 38780 - protein, 383 aa, Oryza sativa
MAPLASVIAGSVLVYLIHGDRHGIPVIGYLKKGINPPSARDLLLSSPHTMVALRTGIITGIIGLAEGIAIGRSFAMLKSYNVDGNKEMIAFGAMNIVGSCTSCYLTAGPFSRAAVNHNAGCKTPMSNAVMAVAVMLTLQFLTPLFHYTPLVVLSAIIISAMIGIIDYKAAVRLWKVDKIDFCVCVGTYLGVVFGDIQIGLAIAVGISILRILLFIARPKTTVLGKMPNSTNFRRMDQYTVAKAVPGLLVLRIDSPIYFANSGYLRERIMRWIDHEEDRIKAEGLESLKCVVLDMGAVASIDTSGTKMLEDLKKNLDRSSIQIALANPGSEIMRKLDKSNVLGLIGEEWIFLTVSEACYYAQQNCKIGVGMGVVQCVVDPEHMV

SEQ ID NO: 38781 - protein, 136 aa, Oryza sativa
MSVPPASHRQVSLRGSSAREITRDALLQKVSEERQLRSHLRRAAAAALSIQRVWRRYSVIRIVSEQLHEEWEALINQPDINLTKQWISSMMLRPFLFFVTQPSSWYKGQQDKTLNSISACFKIILNSINSMGMPFS

SEQ ID NO: 38782 - protein, 597 aa, Oryza sativa
MKYHASLLSGAAVLGSAVASPAHHPNLQDDVALAAAALVPRALPANAPHGYVPQTNACPSNTPSIRNATDLSDEELAWLPVRRNATVQPMREFLGRLNITGLDTNKYIDDHANNASALPNIAIAASGGGYRAMLNGAGVVQAFDSRTENSTGPGQLGGLLQSTTYLAGLSGGSWLVGSLYTNNFSSISDILSYSGDGSSLWQFENSIFEGPKTGSIQILDSVGYYVSIRDSVQDKNGAGFDTTLTDYWGRALSYQLINATNGGPEYTFSSIPAQQWFQDAEAPMPLIVADGRAPGELLIAANTTVYEFNPWEMGSHDPTVYGFAPMKYLGTNFTAGAPNDNDKCVTGFDACSFVMGTSSSLFNQGLLLVNNSESSGAFQDALQSVLTGVLERIGEEDDDIADYPNPFYQWNNATNPNHNSTQLTLVDGGEDNQNIPLNPLIQPNRHVDVIFAIDSSADTNETWPTENSATGWPNGASLQATYRRSLETIQKYTAFPSIPSVTTFQNLGLNAGPTFFGCDPTNSSTENTGVPPLIVPPQRSLRLQLQRLHLRPGLQRHRAQRHRLQRLRGRDPRQRHPRRELGDMRRLRGAFALAVQD

SEQ ID NO: 38783 - protein, 158 aa, Oryza sativa [sequence omitted]

SEQ ID NO: 38784 - protein, 269 aa, Oryza sativa
MDGGSWMLKAAAAGDMHGGAGDTMIRCSWSDMATTDQLLRHHEQEPAMTMMMNSQSQAMQQQLSQIYMLMDMEEHDHQYATPPSPSSSSFRSFSAGTTTTTTSRDDNSSLMLGAAAASCHHQTTEVSSQILLPRPGQAARRSSGGHGAAAAATAFRPYSRYLGPKKHLLRRPGAATTATGGGGGQRAFKRPYRCCQRSTRRGSRSTTRSWRWPRGLRQRPPPAAAAARTSSCSCSTSCRSASAGRSSTIASRLSGTCSHPPPRRTKHQC

SEQ ID NO: 38785 - protein, 126 aa, Oryza sativa
MAASTSAAVKMAAAVLCLMVALSVAAGQLTTTAAAATSTRVDDHVVEDDDDATPTTLQQLETRLADDQDLADLLDGGDGAATICPSNCQKCLVKCAGTCVADIVSPPTFVACFLKCAVVKLCFAKV

SEQ ID NO: 38786 - protein, 451 aa, Oryza sativa
MAEPEFEQAYKELASTLESSTLFEKNPEYRKALEVVSVPERVIQFRVVWEDDSGKCQVNKGYRVQFNSALGPYKGGLRLHPTVNLSILKFLGFEQIFKNALTGLNMGGGKGGADFDPKGKSDNEIRKFCVAFMTELSKHIGADTDVPAGDINVGGREIGYMFGQYRRLRNQWEGVLTGKGLNWGGSLIRPEATGYGLVYYVDHMINYASGGKESFKGKKVAISGSGNVAQYAALKVIELGGTVVSLSDSKGSLIATEGKGFTPEDISQIAALKLKRQALTALEGHSYNYIEGARPWKHVGNVDVALPSATQNEVSQDEAEALIAAGCKFIAEGSNMGCTQEAIDAFENHRKSNKGSSIWYAPGKAANAGGVAVSGLEMAQNSQRLSWTNEEVDAKLAKIMKDCFENCLATAKEYITPAEGEFPSLVAGANVAGFKKVAAAMHDQGDWWGTA

SEQ ID NO: 38787 - protein, 137 aa, Oryza sativa
MLLMSTPMWLLFMSWNSGLSMVSSSTAKMLLSALPLSVTLRMPRYWPALKVESRVLGATTNAMPLSLSTVKLDTMAKTNAAEKDWTAPPAAPPRRRIGVGWNACPAIWFVPLLSTRRPLGATAAMPSSVRLAPPKPL

SEQ ID NO: 38788 - protein, 452 aa, Oryza sativa
MIDLLLLQPDKGGNPQLVKDSQKKRNASEELVDEVLALYKNWVTLQKDLDVARRDVNAVQAEITKLRKAKENADEQMAKKKELDAKVNQLKPSVVQAENEMKSKAMQIGNIVGHKVPISNTEDDNAEIRKWHPDGPNAQVEKKQGILSHHEVMYRLELFDTERGTKISGHRGFFLTGDGVDLNQALINYGLDFLRKKSYKKIMTPFMMRKEVMAKTAQLDQFDEELYKVTGDEDDKYLIATSEQPISALHSDEVFTEPAKQLPIRYAGYSTCFRKEAGSHGKDTWGIFRVHQFEKVEQFCITDPASSWEMLEQMLANSEEFYQSLQLPYHVVAIVSGALNNAAAAKYDLEAWFPFQGEYKELVSCSNCTDYQSRRLDVRCGFKKPGDTKPTFVHMLNGTLCATERALCCVVENWQTPDGLKIPPPLQPYMGGRDFLPYLRELPKNTTSQKKK

SEQ ID NO: 38789 - protein, 335 aa, Oryza sativa
MSQPASPQQQQQQPLQHQQMISFGASPPCSTTQFVVPENAQQQQMLLRYWSEALNLSPRGGPGGVPPWLYQQLLRVPPPPQKLYRGVRQRHWGKWVAEIRLPRNRTRLWLGTFDTAEDAAMAYDREAFKLRGENARLNFPDRFLGKGRAGGKGRTSVSSSAAAAASCSSSSLSPPETPDDANTQQQAPQQREQRDTAGVSMEKKQPQPPAPTSRQEGCSGGDAAAPYPAEMLHAPAACGGMWVAPDESWFSTWGPGSSFWDDYDMDSARGLFLHPRFTGDETSMDHSGTQATVPAVAATAAGMSMPCDDVPVTSSSSDLPPQGTPQTPTFMWKED

SEQ ID NO: 38790 - protein, 374 aa, Oryza sativa
MATPRTLVPILPPVAALLLLLVAASSIPILAAAQPADACGGAPDQAAADGACHDVPRALRLKLIAIPTILVSSVVGVCLPLLSRSVPALRPDGGLFAVVKAFASGVILATGYMHVLPDAFNNLTSPCLPRKPWSEFPFAAFVAMLAAVSTLMADSLMLTYYNRSKPRPSSGGDVAAVADHGESPDQGHRHGHGHGHGHGMAVAKPDDVEATQVQLRRNRVVVQVLEIGIVVHSVVIGLGMGASQNVCTIRPLVAAMCFHQMFEGMGLGGCILQAEYGRRMRSVLVFFFSTTTPFGIALGLALTRVYRDNSPTALIVVGLLNAASAGLLHYMALVELLAADFMGPKLQGNVRLQLAAFLAVLLGAGGMSVMAKWA

SEQ ID NO: 38791 - protein, 646 aa, Oryza sativa
MYSSGMRQFGAASRLARQLQVRNFSRTAPAKKIITPNGPLRAKEASPLLNNKYPIIDHEYDALVVGAGGAGLRAAFGLAEAGFNTACISKLFPTRSHTVAAQGGINAALGNMHKDDWRWHMYDTVKGSDWLGDQDAIHYRTREAPASVIELENYGCPFSRTDEGKIYQRAFGGQSQDYGKGGQAYRCCAAADRTGHALLHTLYGQSLRHNTNYFIEFFAIDLIMEDGECKGVIAYNQEDGTLHRFRSHHTVLATGGYGRAYFSCTSAHTCTGDGMAMVARAGLPNQDMEFVQFHPTGIYGAGCLITEGSRGEGGYLLNSEGERFMERYAPTAKDLASRDVVSRSMTMEIREGRGVGPDKDHIYLQLSHLPAEVLHERLPGISETASIFAGVDVTKQPIPVLPTVHYNMGGIPTKYTGEVLTVDEAGKDKVVPGLFACGEAACVSVHGANRLGANSLLDLIVFGRAVSHTIRDNFSPGKPHKELDAGAGAEAIQTVDQIRTADGPKSTNEVRSAMQKVMQTDVSVFRTEESLQEGVKKINEVDQMFSQVGTKDRSMIWNSDLVETLELRNLLTCAVQTAESAANRKESRGAHAREDYPDRDDENWMKHTLSWQKKPHGKTELGYRAVTGTTLDEAECKAVPPFARKY

SEQ ID NO: 38792 - protein, 217 aa, Oryza sativa
MVISLACFADWALRGLDYGGGSSDLSMLVGSSGGGRRTVGDGGGEAPKLENFLDGNLFSDVHGQAASGYLYSGSTVNGAGGYSNGGCGGGTIELSMIKTWLWSNHPQPQPSPPQHADQDMSTDASASSYACSDVLVGSCNGGGGGAGGTASSHGQSLALSMSTWSVASTAGGSVVVAAESSSSENRRVDSPGGAVPRKSIDTFGQRTSIYRAVRDFH

SEQ ID NO: 38793 - protein, 438 aa, Oryza sativa
MAAMPKPSDSKTGGKATVLLGSQWGDEGKGKLADVLSGQMDVCARCAGGNNAGHTIVADVNGVKTKFDFHLLPSGLVNPRCAGFIGSGVVVHVPSFFAELDNIQKKGLNCDGRLFISDRAHLVFDFHQVVDGLKEVELGGSSIGTTKKGIGPAYSSKASRSGLRVHHLYDQELFASKFRKLVEGRFKRYGHFEYDTEGEIARYRAFAERLRPHIVDGVSFIHTALAQNRKVLVEGANALFLDIDFGTYPFVTSSSTSIGGVLTGLGIPPTAIGNVIGVMKAYTTRVGMGPFPTELHEEIGHHLQEVGAEYGTTTGRRRRCGWLDLIMMRYSCLINGYTSLNLTKLDVLDQLKELKAAVGYVVDGKELPSFPADLEVLAKVEVQYKTLPGWQQDISKAQTWEELPENCRAYVEFLEQFLGVKIEWIGVGPARESMIHRA

SEQ ID NO: 38794 - protein, 311 aa, Oryza sativa
MADDQTTAAIKDEEFEQKKQATSSVKSFLSGGFGGVCSVLVGHPFDLTKTRLQTAANGTYTGGLDVVRKTIKADGIKGMYRGMGPPLVGVTPIFALSFWSYDMGKKFVYAMTPGRTDPKLSTGELAFAGFLSAVPTTLVAGPAERVKVLLQLQGQSGSTGPTYNGPVDVVRQLYKEGGLKSIFRGTGATLARDGPGSAAYFCAYEVSKRMLTPAGQDPQQLNFLNVLTAGGLAGMAMWALAIPPDVIKSRYQGAPHGTYSGFLDCARKTVAQDGVKALFKGFGPAMARAFPANAATFLGVEVSLSVMNKMF

SEQ ID NO: 38795 - protein, 364 aa, Oryza sativa
MAVTPRSRTASANASPSKSNGRKQPAKVAIDFSDEDDPAGTPSRKTGNAKAKANAKDPIEIADDDEEVGEGEGEEEYEIEEVRGHRQKKGKEAYNMEYLIKWKGYADSENTWEPEAQLPQDLVNAYWKKQPSKSQPKKFEKRMLQESEDQESEDDIEPIEADSDEDQYVKQSKRGSAAKAKHSVSPKRNGRASSSTGSKRSSPSRSASGSARGAKKRRTSSSGRGRRASSSDDDQYSEDDEDDEEESDEEDESVLEKEHTALNSIRTRFLKYFVKEKEDWEDEVEGVLNMQRNPDDDELRSHLQFRNNDHWRKAMSKMSFGHKYIDEGPQIWVANKTANERCPQKVIKFYETHLRFADTHKAVR

SEQ ID NO: 38796 - protein, 85 aa, Oryza sativa
MAASAADLRSAMLLSDANTRSLWFRLPILADCEKPPLNLAGSPIEYLRLLGVLDLSAAVHRCDAASGVPLALETRRTLGRCWSKP

SEQ ID NO: 38797 - protein, 471 aa, Oryza sativa
MDLVELTGLKNAMVGLAGATGLSAEQRKRLTIAVELVASPSIIFMDEPTTGLDARAAAIVMRTVRKTVDTGRTVVCTIHQPSIEIFESFDELLLMKRGGQLIYSGSLGPLSSNMIKYFEAIPGVPRIKEGQNPAAWMLDISSRTAEYEIGVDYAEIYQRSSLYWENRQLIDDLGKPEPNTEDLHFPPKYWQDFRAQCMACLWKQNCAYWKNSEHNVVRFINTFAVSIMFGIVFWKIGSTIKDEQDVFNILGVVYGSALFLGFMNCSILQPVVGMERVVLYREKAAGMYSTMAYAIAQVAVELPYMFVQVFIFSAIVYPMIGFQMTATKFFWFALYMVLSFLYYTLYGMMTVALTPNIEIAAGLSFLIFIFWNVFSGFIIGRQMIPVWWRWVYWANPAAWTVYGLMFSQLGDRTELIQVPGQPEQTVKEFLEGYLGLQDRYFNLVTSLHVAIIALFTFLFFLSIKHLKFQRR

SEQ ID NO: 38798 - protein, 95 aa, Oryza sativa
MSAAATTTSNTKASERRSVRFCPGAETSVVRRRVEELVRSLADVEEDEDGSDASSDLFELESLRGADGDELPVYGTTSLATNRAIILRREQLASS

SEQ ID NO: 38799 - protein, 200 aa, Oryza sativa
MGELKRALDARCHVLLEMPTGTGKTAASSSPCARTAGSSSLKRGRRRAPLPSRGRPGAPPRARTPASSSPVARTPTSSSPGVRKAWSSSPARGRPGAPPPARSFPGELLPRCTEGRKLLPRARTPASSSPVARTPASSSPVARAPAPPAARGRPGTPTPRTDAGELLPRRTDSKLFPQHADGRELTCGKDDMWSQLIFVL

SEQ ID NO: 38800 - protein, 77 aa, Oryza sativa
MVHRAAADGARRRLRRQLSMPGSGRPQQQTKEASAALVRLPCNKGKASRFKRSCFSEEDDAASVACVVCAPSLPLIN

SEQ ID NO: 38801 - protein, 103 aa, Oryza sativa
MQELGVPESRLWELAITDYSSTLQSGIVAAIVDELPYVELFLSINCQFRTVGQEFTKSGWGFAFHHDSPLAVDLSSAAEEEEGDVAAEEEEAGERGRCGGNPI

SEQ ID NO: 38802 - protein, 159 aa, Oryza sativa
MRTLQRRLSQLVLRRLLSPPPPPAARRPAPVAAEAVSGGGATALLRRGGGSGVAAGGWSGGGSGLRLARRLCTYDERDDRALEEEAEKKFGWILKIFFIGTAGLVGYQFFPYMGDNLLQQSISLLRVKDPLFKRMGASRLARFAVDDARRMKVVEMGGA

SEQ ID NO: 38803 - protein, 59 aa, Oryza sativa
METPANHDHGAAPPLPAVAHSRLPAASTAGQRRRWWRKRRRRRGRRDDQRQGRELTARA

SEQ ID NO: 38804 - protein, 42 aa, Oryza sativa
MHCWVVLMALVREIPVLGSGGISRRCAPRFSCDLSTDCSNHP

SEQ ID NO: 38805 - protein, 154 aa, Oryza sativa
MASKNSKLSVSSVAVALVALMVVVVGAVVATAAGGEEYYGGVARAADGCEPGQGVVPKDPLPGCRAYLLRRCGGGDPPGVRARCCHQLREVAARCRCDALRAMVEVLVEEEEAPLACKKGAMAAIAEGLPGRDECDLDTRADDGGSRRCHLVIN

SEQ ID NO: 38806 - protein, 104 aa, Oryza sativa
MAGGASSPRVVACVVVALLLLSFAVEPLEAVAAAAAPATATKPIRCRKCDHACKKSCKGYGRNSDCSVPCGDPSNKAGCKSCLQAYYSKCLNYCGQACRAVCIN

SEQ ID NO: 38807 - protein, 259 aa, Oryza sativa
MAPPLLLLLASLLLVAARRALGLGLGQWQPGHATFYGGGDASGTMGGACGYGNLYSQGYGTSTAALSTALFNRGLSCGSCYELRCAGDHRRSCLPGGATVTVTATNFCPPNYALPSDGGGWCNPPRRHFDLAEPAFLRIARHAAGIVPVSFRRVACARKGGVRFTVNGHAYFNLVLVTNVGGAGDVRSLAVKGSGSGSRVGGRWQPMSRNWGQNWQSNAYLDGKALSFRVTAGDGRSLTCADVAPAGWQFGQTFEGRQF

SEQ ID NO: 38808 - protein, 95 aa, Oryza sativa
MEAPADGGYLLGGQPARCSGGHSTGSNGEGFGGHPATSPSSSSWVSLPREHRYDFQMMGGAGQGHTAHSTCRTMAPCAFCFSERIGKLPISLNKE

SEQ ID NO: 38809 - protein, 111 aa, Oryza sativa
MSRCWRRCRSGSPCSWCTWRPSPSPAPASTRRGASAPPSSTTTARHGVISGSSGLGRSSGRRSQRCTTRSSFVPAPGGTAPSGAMLKPQSNVLFLLSEFKVNGKNRAQGDQ

SEQ ID NO: 38810 - protein, 307 aa, Oryza sativa
MATELPTTNGHSAQDGENNFAVKAGLARMLKGGVIMDVVNAEQARIAEEAGASAVMALERVPADIRAQGGVARMSDPKMIKEIMETVTIPVMAKARIGHFVECQILEALGVDYVDESEVLTPADAVHHVDKHPFRIPFVCGCRNLGEALRRISEGAAMIRTKGEAGTGDVIEAVRHMRTVNAEIQRASSMSSTELYNYAKELGVDYNLLKETAKLGRLPVVNFAAGGVATPADAALMMQLGCDGVFVGSGIFKSGDAAKRAKAIVQAVTHYKDPKVLMEVSMDLGEAMVGINCGDLGEKDRLAKRGW

SEQ ID NO: 38811 - protein, 91 aa, Oryza sativa
MVDGGSSVGDGGLEQIRQPCERADLAGVVGRSPTAVTASRVDLQRRRRQWRAALRRRPCRCSPSSFTLPWWARCCFSSPMAVTNYFGERQS

SEQ ID NO: 38812 - protein, 88 aa, Oryza sativa
MGEREVAHRQAEQSSSGSPPATGRWAHLRQSARAAAGCGCSWAARRIRARAGAAVGGPTSSRAGQQQQQSNRLIQSLLFVLSTLKIVY

SEQ ID NO: 38813 - protein, 25 aa, Oryza sativa
MDSVAEGKFLGTNLLYCLLLQCCCN

SEQ ID NO: 38814 - protein, 63 aa, Oryza sativa
MGRCEVADPATGRRKAADPQRWWRGGGGGGRRGSAAGSSRRWRSPGLGSSVVEAEAVEADGAR

SEQ ID NO: 38815 - protein, 119 aa, Oryza sativa
MTSHRHKDLLLPATAPTTPRDDDGAAATLFPPAQPPRDHPQLDLSLSIRIGPPPPPPSHTRTATATAQAQAGQQKKASAAAGFDDGDGDDVRALAASAPPRSRSPATLACSASTPSANF

SEQ ID NO: 38816 - protein, 126 aa, Oryza sativa
MAGLSVLLETHKNDHHPNMRPPQIISKATLHSHPETMSSSSPATATTATMSSFLQRCFLCRRELADGKDIYMYRGDRAFCSVDCRCKQIFMDEDAAAAGGNCAAVRAGRRRAAVPREQTGAGGFAY

SEQ ID NO: 38817 - protein, 136 aa, Oryza sativa
MQGARSAAAMAAAAADEEREVRRAVEEKPVVVVGRRGCCMAHVARRLLLGQGANPAVLEVGDDADPAALVDAALQARRRKDGGDKAAAGDGGGGAAVAFPAVFIGGRLVGGLDRLMAMHMAGELVPVLKQAGALWL

SEQ ID NO: 38818 - protein, 75 aa, Oryza sativa
MWWPRRRMWWSTPDLLSPPPPPRGGGGSVSQGGRAEAEALRPRSLIFFPNSIRSITSLANNKMGLAVLIFACSVL

SEQ ID NO: 38819 - protein, 102 aa, Oryza sativa
MAAEGNASSSSTATGRGCGLALGRLVRKLRRQSRMMLSTATSSRPPAAARCQYDPLSYARNFDRSGLGDDGGDVSAQLYHRYTFASRFVLSSSSTAARRQPQ

SEQ ID NO: 38820 - protein, 181 aa, Oryza sativa
MPLLLQLALAVAVAVAMVGTATTTTTHTRFYMHDTVTASASGGGPAATAVRVVRGVAAAALPGDAVNRFGDLYAIDDPLTDGADAASSAAVGRARGFYMFSSRTDSALLFSATMEFTAGVHRGGAVSVLARDAILDEVRELPVVGGAGVLRGAAGYGLLRTHSFNATTNNAVLQIDLYLSV

SEQ ID NO: 38821 - protein, 131 aa, Oryza sativa
MPLPSPPPSRPPPPSNVSFGERGAAWGRGEREKTMMTTQPPWRRTGPTPERGARGRSAPPLGPRHRRVVGGGGEDAGAAPLDRRRSNPPTGAVAVATPPPLRLAPAPSSCRSALCGWKRKRGRERGEERGK

SEQ ID NO: 38822 - protein, 58 aa, Oryza sativa
MGSCCCMGCNDDDGGSGGGDGGLDPKGFLLALMIALVLFMICHRPQPRRNNYVVYRCY

SEQ ID NO: 38823 - protein, 41 aa, Oryza sativa
MGDGGPQGRQRRRPRTPLRRIRWEGRWWAGSGARGFFWDDL

SEQ ID NO: 38824 - protein, 208 aa, Oryza sativa
MGNCQAAEAAAVVIQHPGGKVERLYWPTTAADVMRANPGHYVALVILRISADKAASAAAAGDNKTNAGGATGGGGGGAKITRVKLLKPKDTLLLGQVYRLITSQEVTKALRARKNEKMRRCEAIRQQHEQLRRGDPLAGVAEEEEEEESASDDQDGKRDRHRSSGAGAPPAAGGRGRHWRPSLQSISEAASQSGGGGGGSSISESAAR

SEQ ID NO: 38825 - protein, 111 aa, Oryza sativa
MRRQRGGGMLRWDERQWQLGGGALPSRLSLAIRGRRRRQRQSRPPLCQIRGGRPGGGRGGAVQWRRKGGGMRRQDKRRWRPGGGSLPPSDLAKCFLKDFCEMICVMFFNVS

SEQ ID NO: 38826 - protein, 155 aa, Oryza sativa
MDGEMDWIAARFVLSAIMGVHPLVAVDDAGADDEHFPVDDAAAVHGHASPPPVALPAAVLAPEEVAGAVVCAVCTEEVAARQAVVRLPCAHWYHAGCIGPWLRIRTNCPTCRAELPREPAAADWRVPRRPAVAETAGSRLRREASYTMLAGTLPS

SEQ ID NO: 38827 - protein, 71 aa, Oryza sativa
MRGGGRPRAVVRRHGEAGGETPAARNDDLDAAWGGARWQLLATTSTADLEGPAMELGAELGGGGDGGRPRR

SEQ ID NO: 38828 - protein, 130 aa, Oryza sativa
MAAVRGVGLASSLLLLIIIIVSAPHLLLASLPPRDASAAASGSTTTAAAAATTPVAASSFPSEEADHGKKLLHDHGESATSNSYDVVPFQPHCCSNHDLPGQLRAVKYRVLCGNHPGPCPHPKTHKDIRF

SEQ ID NO: 38829 - protein, 119 aa, Oryza sativa
METEPSTPMTQSSYFAGCMGSPAWLPAVQRSPARFHLLSRDAAAGRDDGGRRAWSRLLRRLVRESRSFCSLGSRHGGAMAAATTTFHYDAASYAKNFDDGRRAHYAASAQAPPPVAGAS

SEQ ID NO: 38830 - protein, 101 aa, Oryza sativa
MFRRAAMAAAAPSDSEVRVQRVDKLDLVFNILTKPPVYGAGKGNNPPKAPAPRRPAATGGDHGSGGAVAGRKQPGVVSIEDINKRSENYIRDRKRMFFGQN

SEQ ID NO: 38831 - protein, 47 aa, Oryza sativa
MKYEDLFPVESKKFGYDPANAAKASRSRTVEEALDDRVRKKADRYCK

SEQ ID NO: 38832 - protein, 121 aa, Oryza sativa
MTAASSPPLAPPATIPSSTSALRHLLPLSGLRFRRLPAAVGRGYRSRPGFRYRAAAGPSPPSSEPPPRSPHGWQERLSRLQDRIRIFFAVLFWMALFFWGSAWDGNNNSGGTKRQRFRKKS

SEQ ID NO: 38833 - protein, 23 aa, Oryza sativa
MGAAWGPPRRPPRLPTSSARRRM

SEQ ID NO: 38834 - protein, 67 aa, Oryza sativa
MLIHYYRFRVTTSLVFFLFVCIPSISIYKRFRSNTIYPLFHIIRFSSIIHVLIYIYIYIYIYIYMNE

SEQ ID NO: 38835 - protein, 202 aa, Oryza sativa
MEEAEARPAPPDPNDARQRFLLELEFIQCLANPTYIHYLAQNRYFEDEAFIGYLKYLKYWQRPEYIKYIMYPHCLFFLELLQNANFRNAMAHPASKEVAHRQQYFFWKNYRNNRLKHILPRPPPEPTPTPAPAPAAVPPSASVPSTVVPPVAAPPSALLPMSAAGASAMSPMQFAGTPGTNIPKNDMRNVMGGQGGRKRKIG

SEQ ID NO: 38836 - protein, 45 aa, Oryza sativa
MRPHAVAGRRGTTRGGRRGSAWRGRRGRARGGSAPALLSFFFNNL

SEQ ID NO: 38837 - protein, 111 aa, Oryza sativa
MHMAGAGGSNRAVRCAAAVAFIVVVVVVGSADGRGGGRGGHVLHGGGGGDDPGNFRSSMVDCMMECAAEVVSCSSACAGKPRGEAPTCAADCVHGDISCLAGCGAPAPPAA

SEQ ID NO: 38838 - protein, 135 aa, Oryza sativa
MSVEIVDGSTVRSFVDDEAAFNASVDGRFAALDADRDGVLSYADMSGELMALRVLDTHFGVDDGHGGADDGLYRGLFARFDRDGDGKVGLHEFRAEMKEVMLVVANGLGFLPVQMVVEDGSFLKVAVDRELAKAA

SEQ ID NO: 38839 - protein, 86 aa, Oryza sativa
MPVRVFSVPSIAAVPLGRASACGATFSSADAAAVCRYASRLVRHSNLRRQRFLVICPTDCSGSHCFPVVICYYYHFTALLYIPLIR

SEQ ID NO: 38840 - protein, 176 aa, Oryza sativa
MEVEAFPIRFTRGIRSHWGRRKYQRLEAANGGGKTRATQQLGGARRGGAGWGLRLRRLLRVRVRVARAWLSSPARLLARIRDAYVGGMLAVSRKASGMSLPNAPEGLWPRRVPRRKQLPAARPGQLTDFEQRLVVEIYKSIVASKELTTMLHHSTAHLPQQHNTAAPASSGQLLVN

SEQ ID NO: 38841 - protein, 127 aa, Oryza sativa
MSDSLPRPAEKPRRRRSPRLLLPWWCCACVRRRRRRCKHHAGAPASAPALVPAPASAAPPPASRCRRPCWRKAPIACAVEVAGGGVDAGLLERAPHRDSRGGRGERERREYDRWDHVEGILVRQKLK

SEQ ID NO: 38842 - protein, 125 aa, Oryza sativa
MKPLSLLSALALAFHAVNTGVAVYRSRADAAAVALVLASSLALALLFLCLRLYEGAPPAEAARRRWLRRAVWLLSAALTAAFTRRVAGAMPPAGAVLVWAMSAATAGGGFYALVVVDDGRDLGAK

SEQ ID NO: 38843 - protein, 190 aa, Oryza sativa
MAPPPAAAAAVDGVGVGVGAHSVFVCGSLMQDEVVRTIIKRVPPSSPALLPNYHRFNIKGRIYPAILPVQSKKVAGKVITGVTDAELQILDEFEDVEYVRTRVEISLTDTSETMLADTYVWADAEDPNLYGEWDFEEWKRLHMKDFLAMTHGFMDGLEQPESKSRVETYQSFMQEIQQPGTTTTTTQVEI

SEQ ID NO: 38844 - protein, 44 aa, Oryza sativa
MLELLLVGCSSVVLLLHGANFLLRALFARRGAVARPISFLGFVA

SEQ ID NO: 38845 - protein, 201 aa, Oryza sativa
MGSCVSRSTAAAASAITTTTAAKVVFRDGSMAQFAAPGSTVRDALGGERASSSASTCFVCCSDELRFDAPPRAMAAHDALRPGQLYFVLPVSALRRPLSGQDMAALAVKAIAALGASATAAGSSSGVSSRGKNARPAGKQRPQATARVAPLVAAGADHVYGGYDSQKTVRGDRTARINGGGSIARQRTGLQRLSAISEGDE

SEQ ID NO: 38846 - protein, 78 aa, Oryza sativa
MGGRSFLCIFSFSRRSRRYYADDEAAAVSDWERPAATRLRKVRSSDEDNGWWIGERDVDQKASDFIARFHHHQTSLVV

SEQ ID NO: 38847 - protein, 130 aa, Oryza sativa
MKVPLYSYGCEKKIRKALSHLRGIHSVQVDYQQQKVTVWGICNRDDVLAAVRKKRRAARFWGADQPDLGEDSMPADARKHYLQAFTAYRFRKSWKKLFPLIRLLSGTQKFLSREHGPPASAIQERHRGFE

SEQ ID NO: 38848 - protein, 106 aa, Oryza sativa
MASSSLHCHSTTILFVLIFLASSSSLQARMLPSDVHDDDNNVHVKELSAVSSNPTASTTVDSLALMAPPPPPPPAAGKPEMMPAVDGKRWGTAQLQGSVPSPGIGN

SEQ ID NO: 38849 - protein, 204 aa, Oryza sativa
MASAPSVTAFFGLLVSMYATGFFPYVDLQSGGESCFARAPPLDAAVHTMLLAAAAAMVAFHTSVALIYARIGGGGGGAVDRMIRPQVVYLILFLSSGVLHVFLAPQPGAIDGGQDLLPLAVAVVHVLRPAAAATTFFLSMMLIYTHVRAVGRGEGGAGAAATAAGNVPIATTTVELLAKLVLAAALVTVVLTLTSTVLAASYAD

SEQ ID NO: 38850 - protein, 87 aa, Oryza sativa
MARGPVSPASSLSDSPSCPSRLGPLTRPPSAGAEQDEPTRSYSRRHDLLCRCRARHRRIHPDLAAGRGGGQNRPRWHQICRPRLATA

SEQ ID NO: 38851 - protein, 95 aa, Oryza sativa
MAFLDGLYGGGGGRRRMATTAKGAGAGRRRSSAAVAAPRPVRQLYWKLRSRLRSSSSKRHGGGGAAARFGYDLQSYSRNFDDGGLDRSSPASYRF

SEQ ID NO: 38852 - protein, 160 aa, Oryza sativa
MARLGIGVAAAAAAVVAATLVVSCLRASPAEAYSGGGLLQPAAHHGPPRRHLLLVVRRQAGAAVLSGGGGRRRAAPAGAGGEEADEPVRQLLGAGREQGAVQQARPDLLPELRVAAGGESLPPRLLRHYPLLPQHELTMMMMVITSLSIQIPQFPIRPIH

SEQ ID NO: 38853 - protein, 138 aa, Oryza sativa
MLHMPTATCRTSETIISDLQRLQYIYTSSSEHGGRQEGGGEQVPRRTEAAVGQIRGGDPRPGARRLTRLAWHVRHRRGGRASVRPRRIRHEGRYGRAQLPRQDEQHRLFVVIVIHAASSGDDEPPLRRHDGEGGACVP

SEQ ID NO: 38854 - protein, 186 aa, Oryza sativa
MHEYRLADVDRSARKKNTLRLDDWVLCRIYNKKGGVEKPSGGGGGERSNMMSHGETASAGSPPEQKPAVLPPPPPPYAAAAPFSELAAFYDVRPSDSVPRAHGADSSCSEHVLTTSASSGGVVERPEVQSQPKIAEWERTFAGAAAPAGAVSTAGPILGQLDPAAAVAGGGDPLLQDILMYWGKPF

SEQ ID NO: 38855 - protein, 84 aa, Oryza sativa
MVTSRFDLPHCGGRSRITRPHHRTGGGAPLRHPPPLWCVANLQARGRRGRPHGVTATLSRARLPLIRKSDGTVRSLALSAAACA

SEQ ID NO: 38856 - protein, 80 aa, Oryza sativa
MEGGDGRKETTAAARAQKEAAAAGISVRESLQHAWASFLGLVRKVTARSEEEAAEADMRAAKMQVEATDEAEAKRKQLAD

SEQ ID NO: 38857 - protein, 22 aa, Oryza sativa
MRKLLGLLRSKHSRKHQPTCYW

SEQ ID NO: 38858 - protein, 188 aa, Oryza sativa
MSTRAPVELDFLGLRAAAADADDRHAKSGGSSASSSSSIRGMETSAIARIGPHLLRRVIAAAGPPPPPSTAPVPEEMPGAAAAAAPMTLFYNGSVAVFDVSHDKAEAIMRMATEATKAKGLARGNAIVGNFAKEPLTRTKSLQRFLSKRKERLTSLGPYQVGGPAAVGATTSTTTKSFLAKEEEHTAS

SEQ ID NO: 38859 - protein, 197 aa, Oryza sativa
MTTAMASSSSRGVTVPFLMILPLLFVVAALPAEVTVTGDGILLPSCKTVGGGSTYFDVQFCLDALGSVGAGAGARSYRDLAAVAVGLLTANATSTSVKIDALLRGGGGGGKVDAATARCLRSCRALYAGIARRQPGCAAAVRGGRLGEARSSLEESAAAARRCEDGFRGGNATSPVTAEDDAAFKLAKLGVALLGFA

SEQ ID NO: 38860 - protein, 40 aa, Oryza sativa
MWPSSTRSPSSRTRPLVVWICTPRFRLVTLELLHWLVSKV

SEQ ID NO: 38861 - protein, 162 aa, Oryza sativa
MGGEGKSRKRRSSPSSGEEEERERKKRRDKKESRRSSRDEQAEEEEEEERRRRKKKKHGDRGKDKERDSKEKHSKEKEKSKRKHKDDDFKEISKDDYFAKNNEFATWLKEEKGKFFSDLSSESARDLFEKFVKTWNKGKLPSQYYEGITRGPRSAHKWNIKV

SEQ ID NO: 38862 - protein, 42 aa, Oryza sativa
MAPLPLPFSLAPPTAPLPDFRRRAAGLRMRPRWPRTIWDPRA

SEQ ID NO: 38863 - protein, 53 aa, Oryza sativa
MSGAQGAQPKGAFTATTSGRRRPRPPAARRRAGTRRRRRGRSSGRPRTSAGCP

SEQ ID NO: 38864 - protein, 113 aa, Oryza sativa
MAGSSSVGAVHRAGLAVGLLLLAAGAAACHGARAVPGEPEPATYRPQNVYGFGGFYPGPNINWVFPGPNGVTPQVGFGGMPGSSSSVFPGAGGASPLTPGGGVIGIHGATKKP

SEQ ID NO: 38865 - protein, 72 aa, Oryza sativa
MATATGRARRRPASFASRRCQASSATGCRCCSSEISGTLPILQPQPSNPAEIVHTNQKKKYVSFIDLRTFQL

SEQ ID NO: 38866 - protein, 215 aa, Oryza sativa
MLPPALLLVVAVGAALLLAFRPPLPALAARPIVAAAGGKPAPTEAAATARWLAAQNTWGVLSTISSDLSGAPFGNVVSYSDGVPGESHGIPYFYLTTLDPTARDALEDERTSFTLSEFPLGTCGKIDPENPTCAKLTLTGKLKLIDPQSSEADLAKEALFTKHPEMEGWPKNHHLQIFKLEIKNIFLIDWFGGPKPISPTEYLEYEKNRALLKSS

SEQ ID NO: 38867 - protein, 44 aa, Oryza sativa
MEQVKATVTAYMNASKAYLPDSAGEPATTTTLPRPLLLLPSPAA

SEQ ID NO: 38868 - protein, 79 aa, Oryza sativa
MGSSWSKLSVCGFIWEEDLGGSTSKVVGLLLGLSFKVQGGILIQKKMSFLWLCVVVQGPSSSRTTSSSSWTATPRRRSG

SEQ ID NO: 38869 - protein, 84 aa, Oryza sativa
MLVHAVVVAGGGGNATAKAAAAAVPYASRGGGGARQASLRFVASGRRARVTFYSSYYHTSAGDGVSPCGPVLDQVKVQPLMTKA

SEQ ID NO: 38870 - protein, 84 aa, Oryza sativa
MYNIIQPTSCIFSIIHSSMQPPGRACRHASAPLICRLQLSQVFAIMYMAKIVVTGQELLSKLTVSSLGWKAGNRGGGVLAFVGS

SEQ ID NO: 38871 - protein, 223 aa, Oryza sativa
MGPRVVFMFIIAVMLLGDTSLAFDNAVGEKISNMETSLTMKVDPQLCQICEEFATEALFYLNENETQVEIIATLHQACSKFPSFKLECTKLVDYYVSLFFTKVTSLSPEEFCESVSLCHKVTFIRLPRHEDSCDLCHEVVDEILTDLENPDVELKIIEVLLKGCNNAENFVQKCKKLIIQNAPIILEHIKKFLKKRDFCNSIHVCGGKIIPARAGDLGALSAA

SEQ ID NO: 38872 - protein, 41 aa, Oryza sativa
MKHFPVVLIIYAKGSSSSSPIDKRAILQSLRRYHEVSFFLL

SEQ ID NO: 38873 - protein, 211 aa, Oryza sativa
MARPAARRGARRSRARGLLLLAAAAAVAVVVVAAAAAAGEEERHQQQQQQPGGTFEFNLPGHGNVKASWSVADDEESRWLDRLAADAESSSSSASAAGGGGGHRIPFGDDSVKFGSDAYEFIADLLRQGTDDGEGEKPTGYWEKVDEEGSRMLDRIAANARHRAEANGDDDIGGFVHNVFSGKSKQHGEEPSHVESDKEFSNSKLPPHDDM

SEQ ID NO: 38874 - protein, 142 aa, Oryza sativa
MEGACLRLVVNPQQPTTLLAVFLLLLVAAAVAPPHVLAADHVVGGSIWSIPPRPGLYRAWADNRTFVAGDNLVFRFETGMYNVVQVGRREFDDCTADDPYRDWTDGPAVVTLGSAAVRYFICTVGNYCSLGVKVYVASQNAP

SEQ ID NO: 38875 - protein, 106 aa, Oryza sativa
MSPPRLQLTLRSQQGAAAAGRRDRQGRDDGTGADGEVVAAGETGKGTARGQVWPARLQRTCAVAARGQARRRPAIHGELHLRTGGDSQRVRGIAPSPRLQLCLVIL

SEQ ID NO: 38876 - protein, 85 aa, Oryza sativa
MGSSSSNGRTAPAPPPPAAPAPPHPLHVMDADEEDENVKQLSECAALYLSLQDCLVESNRSWKACQAHVQALKACEAKRNKSETR

SEQ ID NO: 38877 - protein, 155 aa, Oryza sativa
MATDELHSAGAPAGVAAAEEGEGEAAQGFSFSIWPPTQRTRDAVVRRLVDTLGGDTILCKRYGAVPAADAEPAARGIEAEAFDAAAASGEAAATASVEEGIKALQLYSKEVSRRLLDFVKSRSAAAAAAAAAAPPEGEAPAAPSESEVVDPQPAE

SEQ ID NO: 38878 - protein, 122 aa, Oryza sativa
MASARRGRRRRVPVAASPLLILLVFLLAASLGACSSARKRSGDGGGAVAEEVYYSSWGSAVAVAGRRRLVGPGSSPPTCRSRCGGCHPCRPVHVAIQPGRSFPLEYYPEAWRCKCGDKLFMP

SEQ ID NO: 38879 - protein, 91 aa, Oryza sativa
MEANKSSKPERSSSQPTHDAVVPASASGGAAASCEAGRTPSSGGLPLSTAASSEKRPGSGGGGELPGWKLDCLCRESGMSAAVISGGFPCF

SEQ ID NO: 38880 - protein, 94 aa, Oryza sativa
MSLRHMSRVGARAAQAVREGAGRSVKDKAQSATTSTSSAAARSSGGGSRAPAAGSVEKGRVSAAAAARAAEEKRRRAEQSLRTVMFLSVWGPNT

SEQ ID NO: 38881 - protein, 101 aa, Oryza sativa
MRLPRAQVEKLMGESKDASEAAAKIMELCAAAGAKSASVTPERPPGILRSPRFAATPEWGAGFMVPPPAPGAAKTPQRWPTLPRTKEKKARFVALPDELIA

SEQ ID NO: 38882 - protein, 158 aa, Oryza sativa
MAGGGGAVGEHYMRVIRGDDGYGDDGGQHQEKPGAAVSVAKGAAAAAAAGSMLALAGLTATGTALALIVATPLLVLFSPVLVPAAFAASLLAAGLASSGALGAAAVGVLAWMYRYLQSPSGEHAPAGAGKVEHARALLDAKAHDVGDWVQHRLDQART

SEQ ID NO: 38883 - protein, 184 aa, Oryza sativa
MDRWEATVFLPPPPPPQPTQPQQQPAAAAVRAPVGGRGGGGGRQYRGVRMRKWGKWVAEIREPNKRSRIWLGSYSTAVAAARAYDTAVFYLRGRSARLNFPDQLDGAGGGGAGAGGAEDHRELTAAVIRKKAAEVGARVDAQHSVVGAAAPVPLQPPQPPPPQRRRTKNPDLNREPTPDTSDDE

SEQ ID NO: 38884 - protein, 93 aa, Oryza sativa
MIELRRRIHEMRVAESGWEPPAEWAAWEKEWYGSYDADVCALVGAVQAFLMSSRPGVGVGIVAAVAVSVPTTAFVLVSGLLHASQSLLSNLQH

SEQ ID NO: 38885 - protein, 225 aa, Oryza sativa
MAAANLHKCIALLVVALAAALSPSHCTATATASPPRYASPPVEAPDEEAPAPYAAEAPLTGQQGPEHGKHHHHESSSSSPPAEPPSSYNATEHKHHGHHHHRRRHHHGEAPQAQPPAHRSPPPHHLPPPPPAHPSSPPPAHASPPPHHLPPPAHASPPPPPPPSRYPPHSPPPPAHKYPPPPPHGKAAAAPPPRGHRKLPPPSPHSVNLAMAPSPSYFSADPPSN

SEQ ID NO: 38886 - protein, 33 aa, Oryza sativa
MYHLTVLGLVGIRGTFSIENSNGAQSLMPRGPI

SEQ ID NO: 38887 - protein, 264 aa, Oryza sativa
MAASALQAAAIAAVLFLLPSLFAAVAAQSKAKAFCISQFAIASQACSILPPSPPDEHDDDDDDDDDDDDDDDDDDDDDDHDDDDDHGGGGDDDDHGGGDHHRVRHRHRHHRDRGRRGHAAVVDLSTLVAGNGSGSTQIAPAVAGNDTAGHRGNRTARGGRGGGRGRRRGHGRRGRLRGDDDDEGGGGDDDDHHDDDDDHEHDHDEHHDEELRAYRDCCRWLQEVSKDCVCDALMRLPPFLVKPQHTYVVRVGRTCKITYRCGGV

SEQ ID NO: 38888 - protein, 105 aa, Oryza sativa
MSAATPDSAAAAKRPIDPSHADPSPAAKLQRSSPPDPSPPAEAQGDATDGGGEVAGVRSGEMAGARNPQAQRYLVAVEYVGTRFSGSQQQLNQRTVVGVLEVKCF

SEQ ID NO: 38889 - protein, 211 aa, Oryza sativa
MAAAAAPTVVVVDARHCAAEATAFAVARVIGTTERDFAVTDAAGAVVMRLEGAVFSLRKRTLLLDAARRPVLTMTDSTYLMSSMWHAFRGDSTSRRSVLFSVVKESVVQVRTKIFVYLGGYRSADQVPDFVIGGNYYGGACTVFAGNSDSDADAAIAQITRPNLAGTLVGLTRSVYTARINPGIDQAFILSLVVILHEMHHCNTSSRNWGL

SEQ ID NO: 38890 - protein, 177 aa, Oryza sativa
MSGGATPRRARSGRRHRALGRIHAGQGSGGAVELRWRLSSRTASDPRRRHHLEGALSPPSSHRCFYAKPRGCRSPDAGSVVETLPGVEGPGEPSRRRSPPRPHRRPEVEGPVRSRAAAAELVTISHSCAPASPSPAPRSNPLRRVRRRPSLEERRAGAGGGEEGSQRRRREEGREPA

SEQ ID NO: 38891 - protein, 129 aa, Oryza sativa
MGEIMVLRRARGAEAEGAGRPAAARRVVPRRGAAALPLAPGEAARAVAAAGDAAVRPRGAALHPGEPQAATRHAGGCPHAAPQGEGHAAAARPVSIHRGEGELDPRRRDEQLIDGLFIIGREQFVVFMN

SEQ ID NO: 38892 - protein, 166 aa, Oryza sativa
MLNLLRGRRSFSCRLEHPATAIAYAEDGAGGDRFVMAAEEKVTVHDSEDARIIHEIDCGKRVLAFAPAKKGILYTGGEERGITAWDLSSGKVTSRIEDAHSTRVKGIVVFDDKNDGSELCNLIASASSDGIIRIWDARMIAKEKTTPLAEANTKARLTCLAGSSLN

SEQ ID NO: 38893 - protein, 149 aa, Oryza sativa
MKIFVILSLLALAASSASAQFDACTYGQCQQQPFMQPIMNPCNEFVRQQCSPMSLPWEQSRRLQLSSCQVMRQQCCQQMRLMAQQYHCQAICTMVQSIMQQVQFDAGFVGEPQAQAQAQVALNLPSMCGVYPRYCSTPCKVATGHCGSW

SEQ ID NO: 38894 - protein, 71 aa, Oryza sativa
MWPEKMRAWASMAEDPLRRASAASSSSTSPLRRYSPATLAAGGLLVGAVAYFMFKGKQGQGRQGDQPVRRP

SEQ ID NO: 38895 - protein, 99 aa, Oryza sativa
MAPHETETGTESAAARQAKESLELAFQMSQILDTGLDRHTLSLLMALCDRGANPEALAALVRELSSAAPPTAATTPASTATAVPSTKAASLFPSGLRQP

SEQ ID NO: 38896 - protein, 65 aa, Oryza sativa
MQILRGGHPAVDTLKTNGKLRAGTKDKRHILLAASCFRMWCWWICQGRGRGYQWWNSSYPCFLRN

SEQ ID NO: 38897 - protein, 77 aa, Oryza sativa
MTSDDNGSPPPPLASLLAASAVRFSSSPPPLPATTSDDNGSPPLPPASLLTAYATGHDGRRRRLASGRRLSSSMQRR

SEQ ID NO: 38898 - protein, 109 aa, Oryza sativa
MPAAGRSLSPEPCRPSPRATTFASMRQIHSPTFPFLFPSEISHHRRHFYRPKLSSYCRRSGRFNLPLYQPPTSPSARRPGTRYAADVAALWPLEARRPARPFLTLSLGS

SEQ ID NO: 38899 - protein, 128 aa, Oryza sativa
MRGGVKLVGGGGGGVAATSSSAAAGGGGGHPGMWRTPTPYLFLGFAVMMGLIAVALLVLVCTRRKNHGDAGSSASAAASVKVLVPLDREPKVVVIMAGDTAPSFLASAKPLSSFVLPPPPPPAAAGEP

SEQ ID NO: 38900 - protein, 70 aa, Oryza sativa
MPQRRSSRWRIPPSPAPAHPPTRSKRRGAEEVLPCRVWGTRTTHDKGGGGGVGARGREGGGKRDEAAAPR

SEQ ID NO: 38901 - protein, 33 aa, Oryza sativa
MTTNDPIRSVVRPSPSMIHPPPAVLISERACTW

SEQ ID NO: 38902 - protein, 179 aa, Oryza sativa
MLRSALRRGGAAVRHAASSSSAAEAAADGSPGALLRRKVAERERARRRPRDPSRDEFFVATPESLAWLDSASLPMVLTAAAIALFTKLLMMEHDAADQERGERKIKNSHPDQGKVRMLTREEWDEIQEVRPRTPFESKLARPHARIRTGEPVRLEDVKDWATDMIMDAFTIAEESAKKK

SEQ ID NO: 38903 - protein, 183 aa, Oryza sativa
MRRQAVVELVVVAAALAALAAGILAASLLLLWRCRRRSAAANRQQPAVVVASDAELTVQSPKKPAPARRRGGGSALRRALLRLLFCSRRRLTRVEPADSAAAATQGEEGEQAAGPDEEEVNTWRDRWFGPATAAASRALYTIDEESGAGSEGEEEPEPETPFYTPPASPPRLGGGGHSPEATV

SEQ ID NO: 38904 - protein, 94 aa, Oryza sativa
MSSQRPGRHQRRASQSVFVLPDNFADLDDVPAGAGGAGEDGRKGAAATADAAGGQQQARPSPAARHRRAMSVAVASSRELEMIKEDMGSYKIGA

SEQ ID NO: 38905 - protein, 178 aa, Oryza sativa
MIDCTFASFPLDLSRHVCFFSCCLRRQCPPGRGHRALGGHRVRRRAPPLRPVSPAAARRRRRRRRRRQPSRAAPPGDPGRQLRARGDQRRGVRAGGRRPGRQAAGRAAGVHVGVFFSGDGGGGRRRAVRGMPRGDGGRRAGEAAPGVPPRVPRRVHRHVARRELDVPGVQGGGGGGGG

SEQ ID NO: 38906 - protein, 43 aa, Oryza sativa
MNSFQQRLAGRFRDPTTPHWSSLRKRGGVELLDFLIMAILLGS

SEQ ID NO: 38907 - protein, 95 aa, Oryza sativa
MARRRWPSLAESAIRRRRTDHPLLAGAFLFPAASPVSVSRRQEMNPTDTTPSAADSRRRTSKFAHWWNMTQILWMASFMKFLCGSRILTVIELIG

SEQ ID NO: 38908 - protein, 92 aa, Oryza sativa
MIRLTRMSSSLRRWLLSIRRRRRRRRRRPARRRKRRRTRRRMRVRRARFMRSRSLEFFIVWCARAYVRVLCYLSTCRNALHAQYAYYRYSSS

SEQ ID NO: 38909 - protein, 35 aa, Oryza sativa
MGDGGILDVVTSLGASLLESRLCGVVVGPAAIGHA

SEQ ID NO: 38910 - protein, 145 aa, Oryza sativa
MASKILLVVIGVAVVSVVASAAPPAQPPRIQADVVVMGYVPCNNGTSMKSGSAPGFPNAVVQLQCAGDAVAAVAAGSATTDGKGWFRMAMNTTAALSSVASGCSLVVTTPLATCDAALPATGTLQSGLRLLVSMVFFPRGFSYVV

SEQ ID NO: 38911 - protein, 150 aa, Oryza sativa
MAADWMWARRSWEKWAGKHVGASGKPVKAALLLNYDPTGPSRLLPVVAEQEGTELKAVDLLPFLDFVRRNNLQMEFFSIGSNRYLVTSIHEHWFCARCVNAVQPEGEGVIVMEIGAYLLVCMMVLLVLLHKQWWLLISLHGTLIEELTNC

SEQ ID NO: 38912 - protein, 109 aa, Oryza sativa
MPPETRLQQRAWLPCAGHNVLSARRKSCRGWAVAHLLRRQPRRPRPLPGIAEAGGRLAAGNIKARSFFIVCLSAWPGKSMLFEHFLLESVGPFLFFLGQSTIVFVRYKC

SEQ ID NO: 38913 - protein, 126 aa, Oryza sativa
MADTKQTQKGRKTRSALNDVVTREYTVNLHKRVHDTAFKKRAPRAIKEVVAFAQKAMGTQDVRLDPKLNQEVWKYGVKNFPRRLRVRLERKRNDDEGAKEKLYTYAMPVLGLGTCKGLQTTVIDQE

SEQ ID NO: 38914 - protein, 98 aa, Oryza sativa
MVQAMARASSRWHALPATSVGCITRRSPTSDLQFLPNASSARAPILVQLLMSRNVTLGSLGATLSTAASLISLRGISSVLSARALAKPPPKFSTKNYC

SEQ ID NO: 38915 - protein, 190 aa, Oryza sativa
MSSFGPVYARRTPALVRPTAGSRAPSLHGRPRAVPPQASRDACALLPVPRAEVLAHVRRAAGAPPGVPRRLDGASGVASRRPAPKRAGAAKATSRVPLVPDAAHDTGSRRPRPVPTHKRDALGRRQPARPPPCPPLPTRGRRRRASDGAGSSRRTCYLVDPASSHMLVSKIKPCMCKYELIRTVKLRMAH

SEQ ID NO: 38916 - protein, 28 aa, Oryza sativa
MRTFSCRKRHRITEPPPSMRLGEYYQMT

SEQ ID NO: 38917 - protein, 106 aa, Oryza sativa
MSGCRRHISHTSCIFLSFYYIKIVKFLNIYDHVKEQSSISASSSPRHMLHSISDDSSRRAAMVRVVRQPDLRIRRRRTGMSTSAIGAAEEEHAHGVQDAAGEGPCE

SEQ ID NO: 38918 - protein, 44 aa, Oryza sativa
MTPAPPLCRRCPLSTAPSTAAEAAAVRYLIVICRRWLARILHPC

SEQ ID NO: 38919 - protein, 35 aa, Oryza sativa
MAKKKNPIVFMDISIGSLKLTGRMFHRIFLMVAVF

SEQ ID NO: 38920 - protein, 195 aa, Oryza sativa
MADPRLFPSGSNFSGDASGPGRRKYNPYHDLSTPYSYQTLYDLPTSPEFLFQEESAAQRRSWGENLTYYTGVGYLSGAVAGAALGLRDAAAGAEPGDTAKIRANRVLNSCGGGGRRLGNRLGVIGLMYAGMESAMVAARDRDDWVNSVAAGLGTGALFRAANGPRSAAVAGAIGGVLAGAAMAGKQLAKRYVPAI

SEQ ID NO: 38921 - protein, 155 aa, Oryza sativa
MYSGFGRGGQGWSPFDAIRGFPSTPEALMSQIDAAIAATEYARSCAQLDPATASSEPQQAAPPPGGEARVEGEASAAAACYDAKVADEAYRAACAALGAGRADAAVRSLRVALASCPPEKAAAVAKVRSMLAIASAQLHKQQHQAQQQLQRGVRK

SEQ ID NO: 38922 - protein, 104 aa, Oryza sativa
MALACASRRLLAGAGTPARSFHSQPYQAKVGVVEFLNGVGKGVETHAAKVEEAVGGDLQRLLETRTLRLKKLGIPCKHRKLILSFAHKYRLGLWKPQAEAKKAQ

SEQ ID NO: 38923 - protein, 154 aa, Oryza sativa
MAPLLLLRLLLLAGAATAAAVAADNATATGGSGDGATGNNNNNNNPTICSGEGCQPPPGQPLPIYGYPSPPPPSQPAGPSSHTPPCPPAAVVCCGGGGGGGQYTPQQPYYYAPPAGYVPYYNNSAASPPVLLAHAAVGYYYYVMAAYLLLWLVV

SEQ ID NO: 38924 - protein, 79 aa, Oryza sativa
MTMVLLETLRLYNPALFIQRKPTADITVGSRTRSCPSRSGRGRASARASRCWRRRRPWPRCCGGSRSASPPGTCTRPWI

SEQ ID NO: 38925 - protein, 140 aa, Oryza sativa
MMIAGDGRGWLLPQIVMAVASAAALALALWRQQPGGRGGSGGPAAILLAAAPYALLLLLLWCLRAFERAAGAGDAAAQGRLRLAVWLLSSALTVTFAARVAPLMHGAAAVLVWAMSAATICGGFYMLDLFPLHRRLDRIN

SEQ ID NO: 38926 - protein, 29 aa, Oryza sativa
MRRPVRRQAVEAGAAMDFFSFFLFSLMRD

SEQ ID NO: 38927 - protein, 26 aa, Oryza sativa
MITRVPDIKFLQKRREKKENKQLLQD

SEQ ID NO: 38928 - protein, 102 aa, Oryza sativa
MGAGMSSGRRPSFYGGGGGGGVGRPRGMLPLLALQVLLEYGRAGASRPPVTAALLAANALLYLRPGSLDALLPSLNRVAFNPHLIIHVRGASPPPTLPLCLD

SEQ ID NO: 38929 - protein, 141 aa, Oryza sativa
MASPAPAPVKVIGTFDSPYSQRAEAALRLKGVPYELILEDLRNKSDLLLTHNPIHKKVPVLLHGDDDHRAAVCESLVIVEYVDEAFPAPLLLLPADPGLAPPPASGPDSSTTSARSRSGWRCGRRTTARCGRASRRRSRRT

SEQ ID NO: 38930 - protein, 54 aa, Oryza sativa
MSRFPSAAIHPTTSSASLGRSIPTTSLSGSSMAPLSPKRKSLISSRNSIFKSTT

SEQ ID NO: 38931 - protein, 39 aa, Oryza sativa
MWWSIFPDRSLIQNVYCLHLLAILLHELTICFRGLHLFI

SEQ ID NO: 38932 - protein, 79 aa, Oryza sativa
MCHPGLPPLPPGCEVKRRRAPPVARVGSPPPVPRREQPHQAQPHHYCVCSPTAHRGSFRCRWHRRGYEWGAGRRRSVAP

SEQ ID NO: 38933 - protein, 131 aa, Oryza sativa
MSLSEKLEAARVAVGKRKERELLAQAPANKALAEPGTNKPAPGPVPNNKLLAGHLAHEFLTRGTLQGRRVEPTKPSQAAALHPGEPVPEPEPDAAKRRRYAEVSWLLMASGARVPGVVNPTQLGRWLQIKE

SEQ ID NO: 38934 - protein, 118 aa, Oryza sativa
MKSGKPPTAGVRVFGGLRYAPLDGMVVDNPLLAALIRAVYTLYMATTVLLYIFGMVTALKEYELLVPLSIIVVMQPFFILMWIAAPFLRTVAIVKYAMGLPDGNNVNRIPTGRMSALA

SEQ ID NO: 38935 - protein, 93 aa, Oryza sativa
MREAPCKASVLFPRSGGNIHSLTAVTPCALLDVLAPPYAEDLGRPSTYFSDIPIPSLPGFAVLEEADLPDGFRVAGAPYVGPELTIDMDSMYN

SEQ ID NO: 38936 - protein, 71 aa, Oryza sativa
MMARNVRLVSVPVICLLTFSAGGGGDGADEAGDLLLPSGTSAPCRRVPPPPRWRRWSSSLYAQPWRWEPPG

SEQ ID NO: 38937 - protein, 196 aa, Oryza sativa
MGSLLRRRRLRQQHGRHLRRPARRARPRPRAQRRRQVPAPPPPPGQATTSRRRRRRRGPGEAACAGGRPAAAAPGSGVLRGGHQAGRRRGVRHLPRRVRRRGHRARHAGVRPRLPRALHRAMARRRPALVVPDLPRAGRDAARRHRYRARGGGALMHACGQLIWPLFLASSPLSLSLSLSLSLSFFASFFLACFHV

SEQ ID NO: 38938 - protein, 149 aa, Oryza sativa
MATTTAALAPPSTSTSSVLLPSAAAAAAARCLGPLPRRARLRTARHVALTPRDLSAEDVAAEEAAVAPKIGKRVRVTAPVRVYHVMKAPDLDIKGMEGVVKQYVAVWKGKRITANFPFKVEFHLSVEGQDKPVRFFVHLREDEFEFIDE

SEQ ID NO: 38939 - protein, 75 aa, Oryza sativa
MTCSGGWPPSSLSRRGAYASLLHRLPPRPATAAAMMLERHPPVHPGLRPAAATVQLRRLPSGLRVTPPPTARWTG

SEQ ID NO: 38940 - protein, 114 aa, Oryza sativa
MLARVSRLGLHALRRATAPGQNSLASRRHEAEAVTSHVNHLGKTFFCSNTNATSSDRSSESEAKISVTFVDKDGEEKLVKVPIGMSMLEAAHENDIELEGACEGSLACSTCHVL

SEQ ID NO: 38941 - protein, 85 aa, Oryza sativa
MYQHSSLILPQHPALQKGSSGPHTSPLLLLVPHQIRASSIQMLNAICITAIRKVILLFFSGCISCLSSRIQAGSLHICTGLVSLF

SEQ ID NO: 38942 - protein, 108 aa, Oryza sativa
MKRRKPRRAVARRRRHGPGDGRRPARAPVMPPPQAPPRAACVSTSKGSCRLPLSAAGGCPRRSPRPAAICGEEAPVQVNSKHPFGRRLGLSVGVLPPTKKTQDHCVLN

SEQ ID NO: 38943 - protein, 92 aa, Oryza sativa
MTPGAASAPDRKMCIDSTSPRWVGYRSTHASGSVSSGVAAAGFTAPSEILVTLKLPVPAMAASPFFFFFSLFFFLSFYDSSSSSGCVQTAWP

SEQ ID NO: 38944 - protein, 24 aa, Oryza sativa
MCEIDRSIDRSSARRRHLHYSIRP

SEQ ID NO: 38945 - protein, 123 aa, Oryza sativa
MNPSARISQVAMAAILPDLATQVLVPAAAVVGIAFAVVQWVLVSKVKMTAERRGGEGSPGAAAGKDGGAASEYLIEEEEGLNEHNVVEKCSEIQHAISEGEGGGLTHPRVLFVFFFLAFFGWI

SEQ ID NO: 38946 - protein, 139 aa, Oryza sativa
MGNSYSNGGSPAAAAGYVQAPELPLHLCFFLVVLLVFLGFSWYTSYGSAAERFADQARLLLMASPLALLLAVRLLSGGGDGERRGVDQLRQLSLPMPERDSIHRAGGSPWGVGVLLALLVVMVSYQSNFRDRWFPLVSR

SEQ ID NO: 38947 - protein, 108 aa, Oryza sativa
MTRRWGRRRQRRGSGVGAAPLPSLPDPAEGGRGARGGGGGASPPSQIRPEGGWGRAAAAAVTVPLPPRSSRRETGGGRRQRRQSPSLPDPTGGRPGKGDSGGDSSHPS

SEQ ID NO: 38948 - protein, 54 aa, Oryza sativa
MVSRHGVVGCAGRTLGTASWEELAGCSDGRAATHRSWGTSSLARNDGSCATRTV

SEQ ID NO: 38949 - protein, 123 aa, Oryza sativa
MRLLSFVPCGCRAGPIDDAPPAALPAATAGDGGAAARRRRRRARSLGGSPQWRPSLGDIYEEYSAAGAADAAAAKLRRPAAARAGRSAARDAARVLPRAHSDEYRHIETAVSMPAFAPAAFLF

SEQ ID NO: 38950 - protein, 59 aa, Oryza sativa
MEIVGASESASYSHDSSFKIQCGRRTDWNEEGGKIRRFARYAIWPTSMRIIYWRNIGPH

SEQ ID NO: 38951 - protein, 152 aa, Oryza sativa
MEGLAKIGPWGGDGGDPQDIALGAGAAPHRLVSIEVRSGGAIDALSFTYAAIDGAKHAAGPWGGSGGEKHKVKLGEAERVAEVSGTLGPWGPHACVVRSLAFVTSAGKTHGPFGEEVGGAAFRVPVKGGGRVVGFFARSGWLLDAVGVYVHP

SEQ ID NO: 38952 - protein, 150 aa, Oryza sativa
MSVARFDVSSSDLTVYAKLVASVRAENPNDMVGIGYGAGSRAAVSYRGTTLCSGRLPAFYQGHRNTTVVRVAMEGRHGFGPGLQGALEESEEADNVPLDVYVSAPVTLRLGDVDLREVTVNVHCALVVDGLSPKKKPAIKSAEYRVNVEF

SEQ ID NO: 38953 - protein, 119 aa, Oryza sativa
MAPSSPTSARRWLPPLPAMTTMTTATPPSPSSPATPSLRHHPQRMTMMARLLRHMLPSSPPPPPATTGDDDGSHPAAGYPRRRDDDDDGADGSGRRGALAGGAREAGGGALWFFFIFLR

SEQ ID NO: 38954 - protein, 22 aa, Oryza sativa
MCCDLVSSSLLLLTAAAAADCC

SEQ ID NO: 38955 - protein, 151 aa, Oryza sativa
MDMGGNGMAMPPPPAPVKKARYMHMTFFWGKNTEVLFTLWPGARGGMYALAILFMFALAVLLEFRGYRVLEARLARRRAPRAAAALRTAVHAVRVGVAYLIMLALMSFNGGVFLAIVAGHAAGFLAFRAGLCGGGPAPPLEEDRKNDPVCC

SEQ ID NO: 38956 - protein, 158 aa, Oryza sativa
MVFDRLCSEAVRPRGAQGAVPGDGAGGLLPVAAGAERRQGLQRRGQRRVGAVQRGGGVAAARDGRAARGPPLRGVRLQRGAAPVHRAAGGVRVRGGAGGVLRPRGHERQDRLHPGQLLLRQPDGLRVLGLLPPDRGHRADAHRRRVRRLAAARLPREH

SEQ ID NO: 38957 - protein, 101 aa, Oryza sativa
MHRSTRQMLEKKARQVGTAACPAATRVSRDDQERALAHPLACYVVPCAPPERSTAPLRARFRHPPRHPLTTNGQRAARRERVIVYARASSFGISSLHAPQL

SEQ ID NO: 38958 - protein, 162 aa, Oryza sativa
MAVAHKNSSRNKLAVAAIVALMSLLVFAAAPSEACGGRCNGGACRSRCAKPTPAPARRAAGAKCPFDALKLAACADVLGGGGGGGGLLNLGHLLGNSSPSSSGEQCCGLLAGLADVDAAVCLCTALRANVLGLVGVEPHVQLSVLVNRCSRKLPNGFQCSSN

SEQ ID NO: 38959 - protein, 98 aa, Oryza sativa
MRPPAMAALFEAAETAAIVAALTRVIADGGRGGGGGVCVPPPAPSLVVPPRAGTGGGRRVDVAREEEMREITPAGQTWPRRRRRWWWRRRRQRAGTAG

SEQ ID NO: 38960 - protein, 96 aa, Oryza sativa
MSPAAEMGAPWPVEFMGAAEGGFGGEAVYCAVILWLSVVAWIIFTSVGDGDEGGGRGSRRRRRRRSSPVFVGAAGICDGTGPGCSGGFGPCGTCVD

SEQ ID NO: 38961 - protein, 166 aa, Oryza sativa
MAAEAAATSRFAAACGALSQYVRAADNVHRARTAAAAAAVRPLPLMPGADVAGDEREEEGGGAAASSAAAQMTIFYGGRVLVLDECPADRAAALLRLAASSRGVPRDDLASTAAAAGESADLPVARKASLQRFMEKRKGRLAARGQPYRRHDAAAAARGDHLALAL

SEQ ID NO: 38962 - protein, 170 aa, Oryza sativa
MYKVGDLDAWGIPPPSKPDVYSRWAKSIHFALGDSIWFLYPPSQDSVVQVTPVAFAACQASDPVLKLDDGNSVFNLTTPGRVYYISAALGHCRKGQRLAVDVPMANGTYLPPTANDLAAFAPMPAEAPAGFESAALGPAGARQSAAPRAAAAGGAGSVLLAALAFAVFLL

SEQ ID NO: 38963 - protein, 95 aa, Oryza sativa
MATAAAARSFLRSGVASSSSIRGAAARAASRAGPAPLPRRLPAAAPRLILRSPVEMSSVCLETLMPMHSATASALMTSLLAAPACRSFGWLSEDG

SEQ ID NO: 38964 - protein, 62 aa, Oryza sativa
MGGKKRKSGSSLWLAVASWFARLGSKVVASSGSAGGRAGYDAAGEMVRAAKHFSSAHKINFG

SEQ ID NO: 38965 - protein, 103 aa, Oryza sativa
MDRVNRLAAQRAVVIFSMSSCCMCHTVTRLFCELGVNPTVVELDEDPRGKEMEKALARLLGRSPAVPAVFIGGRLVGSTDKVMSLHLSGNLVPLLRNAGALWV

SEQ ID NO: 38966 - protein, 187 aa, Oryza sativa
MEARRCRRRTASAAAAAARRRLCSLLALAGDYLKYLLTKRGRFLGRVARRSLAALLLSSGGGGKPCLATAPWPPCALAEREFSCSNSPSPAFLAARRLRSRLKRRAGAASCFGALRSPCGCGPSATEAADQEEEEEDEEVDQYGAWECGGGELIDVDYRAEEFINMFYEQLRAQSFHPPTVLQCRSP

SEQ ID NO: 38967 - protein, 77 aa, Oryza sativa
MLGVKRPSLPEMEAPGGAAGDAEEEVDARIRWVPWWLLWNGGIAWMATKGIDANCLATSTIESRRVGVFFPVITRSS

SEQ ID NO: 38968 - protein, 254 aa, Oryza sativa
MEAGYPGTAANGAAADGNGGAQQAAAAPAIREQDRLMPIANVIRIMRRVLPAHAKISDDAKETIQECVSEYISFITGEANERCQREQRKTITAEDVLWAMSRLGFDDYVEPLGVYLHRYREFEGESRGVGVGVGAARGDHHHGHVGGMLKSRAQGSMVTHHDMQMHAAMYGGGAVPPPPHPPPHHHAFHQLMPPHHGQYAPPYDMYGGEHGMAAYYGGMYAPGSGGDGSGSSGSGGAGTPQTVNFEHQHPFGYK

SEQ ID NO: 38969 - protein, 205 aa, Oryza sativa
MDAMTKQEILLEKKRVITVQGRDKAGRPIVRIVGKNFPARELGGGGHAEAALKGYVRRRVTPAIGDAEFVVVYMHSGVDRRENFPGVGAVRTAYESMPAAVRERLHAVYFLHPGLQSRLFFSTLGRFLFSSGLYGKLRYVSRLEYLWAHVRKGELDVPEAVRRHDDELEQRPLMDYGIEASERCGVFDAASMDTTASLHSLRCAS

SEQ ID NO: 38970 - protein, 137 aa, Oryza sativa
MLRRATTSLSRRAACATLLRRLPPRPATTLERHPPVHPGLRPAAAAAVQLRRLSDFGVSVPRRMARRSPPTRPEGYSTSDSEADGWSVSEDDEEEVEEVQLEPMSVDDVAAGKEWEGFTLEYDHEHDLDADDEDAAE

SEQ ID NO: 38971 - protein, 26 aa, Oryza sativa
MSKGPAPFLNIGKRAKGKQCLCLGRL

SEQ ID NO: 38972 - protein, 90 aa, Oryza sativa
MASAAAAVAAKAWWTAAMSVGAVEGLKDQSGLCRWNYALRSLHGAAMDTLMLQVHGGAGASSPAAAMAAERPEEEGMRRVMYLSCCWGPS

SEQ ID NO: 38973 - protein, 113 aa, Oryza sativa
MAMQRSGRSNMALFFVVTIVAAPLLMHDDLLAAAAQAADGGGSGSGQMQPEGILYAGCFRAGGCKLTPEWCPARCIYLGFSPGAGCEVMDDGHIYCCCGPSRTSTNADPSTNA

SEQ ID NO: 38974 - protein, 41 aa, Oryza sativa
MSWTWTWRSWSGCRGCSTMEPSRTSRVFRASTARRRSRRRR

SEQ ID NO: 38975 - protein, 39 aa, Oryza sativa
MLRHKMGGPQYQDYHKHSPCETACAWPLLAPCTSAAFMV

SEQ ID NO: 38976 - protein, 29 aa, Oryza sativa
MWIWIQIQIRYWSVSIRFGYPLIAMMTKI

SEQ ID NO: 38977 - protein, 148 aa, Oryza sativa
MASKNLLLSAAVLLSVLAIAAAAATASAATTSCQPGMAIPHDPLRGCRRYVLRRACGLAAGGRLYDWSLKERCCQELAAVPAYCRCAALAYFMDGASEGRLLEDLPGCPRETQRGLAAVLTTPGECNLETIHGGPYCLELTDREMPKY

SEQ ID NO: 38978 - protein, 45 aa, Oryza sativa
MSSVCARPVGVGYLVGEAQLAGLQWRAASRETWGSRMRHRQPSPS

SEQ ID NO: 38979 - protein, 54 aa, Oryza sativa
MATISETLPNSEAVSHAYKFASTWEKVGFLASLRGRVGVWSSGSTGGSGGSDLI

SEQ ID NO: 38980 - protein, 191 aa, Oryza sativa
MFSTARFFLPVRPRPDATISGGRKPYLVAVSARPRRGGSRRNRSWGDGGGDDEDGAADDRIDANFFGDARDEPDPEPEDAAASGRRPSSPAPEQEPAGQLRGSDVLRALERAAAAKEAKRRKRAGARPAARRQDAGERRGGELAAAGAARPIEIRREWATRIRELELRVKQLVDKHHHSPPPVEAKRRSQR

SEQ ID NO: 38981 - protein, 110 aa, Oryza sativa
MASSDLAATYAALILADEGLEITSEKIVQLTTAAGAPVEPIWATLMAKALEGKDVKELLTNVGAGGASVAVAAPAGGAAAAGGAAEEAKEDKKEEEKEESDDDMGFGLFD

SEQ ID NO: 38982 - protein, 80 aa, Oryza sativa
MAAQIGKPWRFDGYGRRRRRWIGGGGDSSATADATFLDATAALHRRWRRRIVADCGQRPRCVGGAASLAAAIRRREPGNG

SEQ ID NO: 38983 - protein, 141 aa, Oryza sativa
MDGESPAAAAAALRLAAVARRWLENPRDSLARSREEGCGDAFNTAAMSVATPCSFALRFGLTCLFLVSAAAAVAAAAQDADGRWHAGAMAAAVDNLCAAVVYTADGVHRFTISQAMSFFSPAAHGVRFLHGSSSSSCSLLL

SEQ ID NO: 38984 - protein, 20 aa, Oryza sativa
MYNCGGNIIRIEMVGTKETV

SEQ ID NO: 38985 - protein, 155 aa, Oryza sativa
MASSVAGSVTRRPPPVLLACRSRPNNRRLIRLLPLLFAVVVLLALLPPCVHGARALNDAKEAKVAEASDQTTTTTHAAAAAVARWSVTVREGGGGGGHGSGHAGAGHGHGSGHGRPEPAEHHTGRRSAAAGSVRPPMAASCAALLVAAVVALLRF

SEQ ID NO: 38986 - protein, 288 aa, Oryza sativa
MACSHLAAAAAAASPAAARSPAASSAATASAFARLSATPRVASGGLAVRGQRGVAAVVAAAAGAAAATPVADIEERRATEKQPIIVIDNYDSFTYNLCQYMGELGLNFEVYRNDELTIEDVKRKNPRGIFISPGPGEPQDSGISLQTVLELGPTIPIFGVCMGLQCIGEAFGGKIIRAPSGVMHGKSSPVRYDEELGKALFNGLPNPFTAARYHSLVIEQETFPHDALEATAWTEDGLIMAARHKKYRHIQGVQFHPESIITPEGKRIILNFVRFIEELEKQRAGEKN

SEQ ID NO: 38987 - protein, 97 aa, Oryza sativa
MAPAQGGAMERHLAQEVGQGAEAEAQGGGAPAQGRGPRRGVRRRRRGRARRHRRGELHAGGDDEGDRGGVRGRARRRRRRLTVGTDRPARRRRRRTA

SEQ ID NO: 38988 - protein, 218 aa, Oryza sativa
MAGSGGGVVSGGRQRGPPLFATEKPGRMAMAAYRVSAATVFAGVLLIWLYRATHLPPGGGDGVRRWAWLGMLAAELWFGFYWVLTLSVRWCPVYRRTFKDRLAQSYSEDELPSVDIFVCTADPTAEPPMLVISTVLSVMAYDYLPEKLNIYLSDDAGSVLTFYVLCEASEFAKHWIPFCKKYKVEPRSPAAYFAKVASPPDGCGPKEWFTMKVELKLL

SEQ ID NO: 38989 - protein, 59 aa, Oryza sativa
MSQTDFIIMESAEIPGFGGTSWTDQETLLLLEALVILQAKWGDIAEHVDTKTKAQCMLH

SEQ ID NO: 38990 - protein, 206 aa, Oryza sativa
MAAVAEREVLGMVAAVAAMVVMMAPPAAALVPYGYGYMLDDPFRVLEQSPLRPAGGVAAAAAAGEPAAVALARCDWKETPEAHVVTVDVLGVRRGDVRVEVDEASRVLRVSGERRRAGAAEEEEGERDGVRWHRAERAAGRFWRRFRMPPGADVGRVAARLDDGVLTVTVPKVPGHRGREPRVVAIDGAGAGDMEAEVVKASKAEM

SEQ ID NO: 38991 - protein, 97 aa, Oryza sativa
MFVYCYACMHASGEGDVAEPGREAREVGLGGDGPSEREEVVLDLGPELVVPAAEEGEQGCAVVGEEPAMQLRRQQPAGSPPAACVHACPPALRLLSA

SEQ ID NO: 38992 - protein, 121 aa, Oryza sativa
MAKSGTEEWRRNTDTHKMSAEEVRAAGVEASMRPPGRGHGPGEVLHQRGRMPYGPGTMALAGLGIFGVLGYLVLYHKARPGTPATEVAKVAVGHGDPVAGRDAHKTPDDAAAAAAAARQGK

SEQ ID NO: 38993 - protein, 130 aa, Oryza sativa
MRQMIRRLSRVGDCSSPSSPPPFSPAPRRGGGGGGSSGKRSSSAAAAHEGVPEVHVPVYVVGEGDGGEAAAAERFVVRAELLGRPALAELLRRAAQEYGYDHHGPLRIPCRADVFRAALAAAGDEDDDSE

SEQ ID NO: 38994 - protein, 229 aa, Oryza sativa
MAAAAMDDSFRRAGAIPFKWEICPGTPKHARSASASAASAAVVSPVPPALAKVATRQQLALPPCMTSPRASPSPYYHSPRLSSAAACRSAASASPCRSRYAGGGSAYRPRPTAFLDLAPRATTAPDLYGAAHEADHDEPAAAPAYGCFLLPLLRRKGSSKKRGGGGYSSGSGGSSSSGSFRSDGEPGGGLRRSASSSFSFARGGGNRIRLAAGARQQEEVEAASGSWFF

SEQ ID NO: 38995 - protein, 161 aa, Oryza sativa
MGVAPLGCAPRVMWEGLHAVDGRSCVEEANELVQGYNARVAARLAALRPRLAGADVVFCDIYKGIMDIITHPARYGFDETRKACCGLGPFGGTVGCLTKEMVCPTPQRHVWWDLYSPTEVVTSLLTNWSWSAPSHSNTTICRPITLEMLTGHISLISPSMF

SEQ ID NO: 38996 - protein, 187 aa, Oryza sativa
MAAAAAAAAAKPNLLLPVSVAIPSSRVSLPTGLVCSARSPPPRLRAAAAAAAASQALTSPVAAETPEAKQMRVETEAALEWGGVCARLAGFASTAAGRAACGEGRVPVGRSREESERLLEQTAAAALLPAPLDFGGVEDVSAAIAAAAGARLLAVREICGVGRSIRAARRVFDQLKTLSEETPDGRR

SEQ ID NO: 38997 - protein, 98 aa, Oryza sativa
MAVVVMSVLMMAAAAAANYAAEPEEDCATQTTYFTNCLRRGIREGCCGVVKNHWCLCQVRREAEVKCIPGRRCDVPKALKIADMDLPCMRNLRCSKHA

SEQ ID NO: 38998 - protein, 145 aa, Oryza sativa
MEDVAGVVDAAEDVVKPAAARQPIRRQGSLRLRALAPGSIDVRAGGAGDGSAASEYCHDAVAAAAEVIPLLTPLHAVPAAPAASDQVSGGRTARHLTEVVAGGGRCVAVEKTRLPAWWWHPAMPPFVNDQPASASAVGFVFQNCV

SEQ ID NO: 38999 - protein, 69 aa, Oryza sativa
MASRGAVLVAVAAAVAVMFASVASAQVDGGVPPAPAPVTGAAAGGAASAALAVACSAVLSILVAGGIMH

SEQ ID NO: 39000 - protein, 157 aa, Oryza sativa
MFAAKGLDAKDLVVLSGGHTLGTAHCALFSDRLYNFTGLVNDGDVDPALDAAYMAKLKAKCRSLSDNTTLSEMDPGSFLTFDASYYRLVAKRRGIFHSDSALLTDPVTRAYVERQATGHFADDFFRDFADSMVKMSTIDVLTGAQGEIRNKCYAINI

SEQ ID NO: 39001 - protein, 73 aa, Oryza sativa
MPLGIYVVILLMKCLLSIQLLCLRVGMWFICGIRFQLFLQQFSARSIGDVFLFISSYRVQVWGVTFSLDSGVN

SEQ ID NO: 39002 - protein, 136 aa, Oryza sativa
MAGRASCVLILLLAIAGFADVLAAGGATPSSSQVSTTTAAELKEVNGMLACMIGCFTQMFGCAFGCMAKGPDTTLCVVSCNQNSIVCMVRCALTPPPPKPKPTPPPPAPTPKPPAPSPSPPPPKAAGHGVAGDPLA

SEQ ID NO: 39003 - protein, 146 aa, Oryza sativa
MRTPCEIRSSSRWTRSASGMRARAAISPPRFPSRWRPGSSLSAATASTLLSVRLLRVNYLAEQSAAIKLSYAESDARKAYALVDGCRGHLDAALLLLDHVGRLPDVQGMINAERLAAVADLEAAIVAVQRSAEMATAARQDVSGAS

SEQ ID NO: 39004 - protein, 83 aa, Oryza sativa
MAESHANVRVLAPRRPRQLLRMVVALQCLGLTVLHLNVTTTADHLALYSFSLKMEDECRLSSVDEIAGAVNQMVTKIAGECIS

SEQ ID NO: 39005 - protein, 67 aa, Oryza sativa
MDDRRYGYSYPPPQGYYNGPPVMAPPQYAAPPPRRPEPSFLEGCLAALCCCCLIDECCCDPSVIFVT

SEQ ID NO: 39006 - protein, 197 aa, Oryza sativa
MAMPRSPGAGSLRFLGLLKQPESGPDGAAPPFELDESDVVWPAGGVGDDGYCCPAPPHPEGPPRAPRRAHTVPQSFGLSSLLANGGRGGGSDDGRQDGVAVPVRAAAAPGGGAAAPRRSAPVRVPMWPGKGAAANNVVGGEESDDNEDDEMGPPHVVAARRHARSSSVLEGAGRTLKGRDLRRVRNAVLRQTGFLDL

SEQ ID NO: 39007 - protein, 110 aa, Oryza sativa
MMMGKSSPSTSPVYAVAAALLLVYLMVAMGAGVVEAAVVPPSRCNPTLLTPCAGPALFGGPVPPACCAQLRAQAACLCAYARSPNYGSYIRSPNARRLFAVCGLPMPQCS

SEQ ID NO: 39008 - protein, 169 aa, Oryza sativa
MAAARFPLLVLCLLPIIVCSVVDAELTHLHFYFHEVDAGTPNATVVNVASLHRNSSTFGDVNVLDNALREGPDPASRLIGRAHGLAVHASLDETGGLTAINFVFSDYGAYSGSTLATQGHFITTGPSERSIVGGTGKLRFARGYMTSKLLSSTDTAIVVVFDMYFTLDH

SEQ ID NO: 39009 - protein, 132 aa, Oryza sativa; identical to SEQ ID NO: 35926

SEQ ID NO: 39010 - protein, 107 aa, Oryza sativa
MPPQLPPPGGGGAAMLRLRHRGGGGGSRGMGVAGLLAGVVLLGVQHHGQLARKRSIRAARRRRRRRPACHASSMARSLDHHQVFDCIIFISIHETCCLLDRRSPFAR

SEQ ID NO: 39011 - protein, 194 aa, Oryza sativa
MVRALAVTAGNGFGAVPTAPAAGWILIGFGFAAALAVVAIAVFGCADGPKDSPRRKKDKRRRRREDGDGGGGDGGDGGGDGPDGGGDGGDGGGGDQPSSDAHGGHHHHGHGHGGDNGGGHHHHGHGHGGDHGGGGHHHHHGHGGDHGGGGWHHHGGDHGGGGGHHYSGDHGASSGFSGGGCGGGGGGGGGGGGF

SEQ ID NO: 39012 - protein, 148 aa, Oryza sativa
MDQAGSMEERVITERIRRKLEEVNAAAQKHLAGVQDHVNFTMQQAYFKCAYECFDRRRSQEGINNCVENCSVPVLTANNVVETEMAKFQERLNRSLMVCQDKFEAAKLQKMKTHATEELEACVNRSIDDSIRVLPHLVDQIKSTLSMN

SEQ ID NO: 39013 - protein, 52 aa, Oryza sativa
MIATRAVLPLSLTASASGLYGARTKKRRKLLLLPRLPCRPRCPGRCPRSRRC

SEQ ID NO: 39014 - protein, 109 aa, Oryza sativa
MLTERSGRPRWGRHASCSMIPMWWKARCCRRLWSMARSRGVSPLVSPDPVPASFSPSASHVPLSCAAIASLRHRKCLDMAFCASAVYGVAAPNPITESKKFTTICIWSQ

SEQ ID NO: 39015 - protein, 99 aa, Oryza sativa
MQARVQACVWAMHAPAVHSPPQSHLHLPYPPTPLFLLFAFEYSRPIEEHQGPAWSFCAGKKKGLQEVSWGRRGLKLKRKKKPGRKCRIRWPQAPRQQTW

SEQ ID NO: 39016 - protein, 97 aa, Oryza sativa
MPPPPATTPLPRRRLALILCLAWALWLHGGGGGISLADAFQAPTPARLSSGSSYAVGSRPVPAAAPRWSSSSASEAAARFADDKRRIPSCPDALHNR

SEQ ID NO: 39017 - protein, 47 aa, Oryza sativa
MRTWRITGSSTPTTSRRSRMLTSRTSTTTPKVWLRQTLRVHLLASIK

SEQ ID NO: 39018 - protein, 137 aa, Oryza sativa
MQERRHRHHPLSPSVRIWEGGVLLPPPPPPPPPPSPGLPPSGSGREGYCRRRHRPPLASLRSDLGETGTATAATSRGSHRHPSSPSPLRPDLGGRRREPCRVWMPPSPSVAVADPMPRRCRCRPRHHRSLMELRKRG

SEQ ID NO: 39019 - protein, 29 aa, Oryza sativa
MSGRPGTPLSSSPPSRKFQSSDMSCVHDT

SEQ ID NO: 39020 - protein, 167 aa, Oryza sativa
MKAGRKNLRRACSEGAVTLGEGESIMQVLALRGSNVIEVMDAKGVKSLALFPAKFQKSFWIKNGNFVVVDASGRDQALESGSKIACVVSQVLFHDQVRAMEKSEEWPAIFKSTSKEGSEAGTQEGTRPQIEEEPDSDEDDDLPPLEANTNRQRPFELYADSESDSDS

SEQ ID NO: 39021 - protein, 11 aa, Oryza sativa
MASGATAAPAS

SEQ ID NO: 39022 - protein, 58 aa, Oryza sativa
MYTHTLLMYKKYVYMYTKFVYNVYKIYKLCIHTYTKFIYVCIKKEKIYMYTNLVYVYT

SEQ ID NO: 39023 - protein, 49 aa, Oryza sativa
MRLPWCRPSSGHYPPLHRLARAEPRFCRRSCAMARPRCPLPPSAPTGRR

SEQ ID NO: 39024 - protein, 95 aa, Oryza sativa
MAVTRTALLVVLVAGAMTMTMRGAEAQQPSCAAQLTQLAPCARVGVAPAPGQPLPAPPAECCSALGAVSHDCACGTLDIINSLPAKCGLPRVTCQ

SEQ ID NO: 39025 - protein, 109 aa, Oryza sativa
MGGSELAVARRLGGGSCGAQGGGGRQRLLWEGMWRAPPPSDPASPPPDLAGGEAAGGGDRCGRGGGGRAPSSGGGRCGRRAPMRHEGGGRQRRPLWERRQRQSPLLHWM

SEQ ID NO: 39026 - protein, 71 aa, Oryza sativa
MGFVLVISLPFIFFSILLGFGCYFLGRHKGREEMRTGVGAQVYGTPLPPPGVGAPPPEPFTAKKDGPENLV

SEQ ID NO: 39027 - protein, 106 aa, Oryza sativa
MMSRSALLIFLLFVLIVTSQLEWKQQLVNELESTSHKQKHISSRGELVKEKIILSQEKMIRLLNEHIQNLQQQLLQCRVNNRTANSSGSSLTSYIGEIQRQQMMDD

SEQ ID NO: 39028 - protein, 110 aa, Oryza sativa
MFGRSGITAAVKVEEEDDGKTPAAKRAGEYVTLKVQDTDGRAVYRTMRWTEQLQGLMDFYYDRAHGRVQRGTGRFLYDGRRLSGWQTPAELDMEDGDEVDFFEELIGGAA

SEQ ID NO: 39029 - protein, 105 aa, Oryza sativa
MGFRCFCSKAQAQLILLLPLLVLASASSSAAKQQPHTACSNTSPATGQPPCSGHRGQVPAPPILGLLGRRRAIRAPPPPQPHPITSPTSPFPGRPVPPPPPSPCL

SEQ ID NO: 39030 - protein, 78 aa, Oryza sativa
MAARLISGVAATRRRGSSPAQRRVDGSPVAAAAQDLAPELGTSTAARRRGGGSARSSGASGSTFPLLSSSSCVDILSR

SEQ ID NO: 39031 - protein, 164 aa, Oryza sativa
MEVSKLAIALAMVAAMALPSQAQNSPQDYVRLHNAARAAVGVGPVTWDTSVQAFAENYASQRSGDCSLIHSSNWNNLGENLFWGSAGGDWTAASAVQSWVGEKSDYDYASNSCAQGKVCGHYTQVVWRASTSIGCARVVCSNGRGVFITCNYKPAGNFVGQRPY

SEQ ID NO: 39032 - protein, 46 aa, Oryza sativa
MKDMKPWSSSTGDSGRAKEERQRQASLGGAATASERGGRSSDSGRA

SEQ ID NO: 39033 - protein, 58 aa, Oryza sativa
MFFSRFDPWPVFFRREWKRCWPFLTGFAVTGAIITKMTAGFTEEDLKNSKFVQAHKKH

SEQ ID NO: 39034 - protein, 87 aa, Oryza sativa
MLKRRGVAAQQRAPEAMVLAAVLLLMIAYGVARNEAAVPDSSLSCLSMPRQQDGATTPNRRSLSVHPSCCTSSPPPSCYKPQPCPPS

SEQ ID NO: 39035 - protein, 150 aa, Oryza sativa
MQAGKNAMQSTKEAAANVGASARAGMDKSRAAVQGQVEKATARNAADKDAAEVRRQERLQAAEEEKQHAMAANAAAKERATGGAGAYHPSQGAPGVDPRAAQPTGGHVQDGVAESRPVGTATGTARPSAAHNPHVGSDFSQAHGTGGQYQ

SEQ ID NO: 39036 - protein, 91 aa, Oryza sativa
MALRGAASRCFLAAVRGRAASASRVRAAPAPLPSAPPRRAAFSPFAAAAARPMAAAAMMGSPAAVAARLTGHPSASVRACCELSQGNGDDA

SEQ ID NO: 39037 - protein, 63 aa, Oryza sativa
MGPREGLIVACGGRRWRPPFRWEGRRRIGAVSFPPPDLAVGRAQWEGSRRWPGVPATVAAVRR

SEQ ID NO: 39038 - protein, 104 aa, Oryza sativa
MDSIQRQDSFDDLINLADDVVVEAPTLSSEEMDRARREALEILRNNSPEEAFRIFTQGLIGQVVQSPVVGNATTPPTTNQAVTVSVPPKAGDGEPKTAPRPPNN

SEQ ID NO: 39039 - protein, 150 aa, Oryza sativa
MQQDPLHRLAPADAAAVAVPGRGARGGGGGAGGARGGVRGRGVAAVRGAGGAPEPPGVQGAAPAGGGGVRLPVGRLLWPHRAPLRRGPLRARPPAPLLAVLRRAVRHPRGHPERRPLLLLRRRRRRPPAPPRHCHRQGRVVNAMCDPTPS

SEQ ID NO: 39040 - protein, 227 aa, Oryza sativa
MCCCCCECGCYECYDACCDRCCCGCVSYDTRETIFYCAVCLLLVAAVVLLAVLLAAYGFIRHVSITVESASLTRFNLSSPSEATALAYNLSLTLAVRNKNWAMSIKNTKDLEAGYSFDGQRFERVKLAGEGEKHPAGKTRVYHLDSSSDNAYAALGNAGVAEFKKENATGVFEVEVAVTGEVRYQAHYTKCKLAATCPLKLQLAPPGTPAVVFQKVKCKLAAADKNC

SEQ ID NO: 39041 - protein, 81 aa, Oryza sativa
MAAAKAMKLLQVAAALVLACLALQATTAAAHFTLGVSDDHYTERSQLTPRLHSEPLLLHLIDRIKYRRPLRRSYRDEQPNT

SEQ ID NO: 39042 - protein, 164 aa, Oryza sativa
MGFPLVCYCMAIPKPLIALAKLLAAIREALQLMLFVVGICHHPERSGRPAAVDAPLPDEVKDRLPPLEFAQLLAASEHGCHGCDDDEAVAGCIVCLERLEADDVVRRLGNCAHAFHRGCIDRWIDLGWLTCPLCRSTLLPRARPAAGPRGRLGRLATRLTGVVW

SEQ ID NO: 39043 - protein, 92 aa, Oryza sativa
MERSSSFGTSWADQWDYGGDPSPRAAARRDGHGGGKKQGGVEKTKAAAATGLRKVKEGTAHGFQWIKDKCQKKNAGGGKKQQADEESGIAGY

SEQ ID NO: 39044 - protein, 62 aa, Oryza sativa
MCSCSWRPSAWRLGRGRRRSRRRRRRRGTARGRRRPRSPCRPWRWRIRRRCAPWRRGRRRRS

SEQ ID NO: 39045 - protein, 146 aa, Oryza sativa
MARLHLVVVAMAALFAAAAVAQGPSASPTPAPKAQPPVATPPTRPPAVAPVSPPAAQPPVTTPPPVSAPAPVPAPSAAATPSPQASAPTAEPPVLSPPAPAPGSISQSPTEAPTSPPPPSAASGVSPSAAAVVAAWAAVAAVAAFY

SEQ ID NO: 39046 - protein, 111 aa, Oryza sativa
MATPLVAGLSVAAAAMGSRYMLQAWQAFRTRAAMPRVRRFYPGGFEREMTRREAALILGVRERAAFDKIKEAHKRVMVANHPDAGGSQYIASKINEAKDMLMGKGKSGSMF

SEQ ID NO: 39047 - protein, 82 aa, Oryza sativa
MRERRRRRRWRRTRRMGARRREGTRPTRRRRGRATRGRRGSRCWCRSSAGAPPARPMHTRLCSTRSTPATPFGSSPPPSCRT

SEQ ID NO: 39048 - protein, 129 aa, Oryza sativa
MVAAAEFPSYVSVPPSDLHRHLGKLLTSGDGTDVTLEAGGETYKAHRSVLAARSSVLKAELLGPMAQPRSTAAATPTRINDIEAPVFRAMLHFIYTDHLSSTMATDGFEHLTTSCPAILKELMSKLVVH

SEQ ID NO: 39049 - protein, 279 aa, Oryza sativa
MARRVLEVTLVSAKNLKKVTMFSKMRVYAVASISGGDPRVPTHRTHADREGGRSPMWHAPLRFPIPDAGADMRAIALHVLLRAERVFGDSDVGEVFVPVKDLVAAAPEGGEHRHLSYHVRRPVSGRKCGVLHISYQITDEAAEPASAAGARGASSTRHVSGKGLQLSAITAYPSAGRHSGGRRGAAQSPTLAYHHGSPYGGGGGGAHAQHHHHHHHHYGYGYGPAPYGHGAASHGGGGGMGMGAGLGMGVVGGAVAGMVLADMLADGEMDTPLDAGMSC

SEQ ID NO: 39050 - protein, 80 aa, Oryza sativa
MVAVGGGFCCGTWWQRDVGGCWCARWWWERGFSYNCVYASLNLLDMNLVVGFDFNYVYSSLNLLDMNLLLYLTLTVYMLT

SEQ ID NO: 39051 - protein, 164 aa, Oryza sativa
MSLVAYGASSDEEDAGGEPPAAAAASPAPVPSSFGPRPRPPSPSTSVGAAPQPPPHSQNVSSTSSSNISLPTPSLDLPDVADLFSSPSLPSRGSTSMMDSTSRKRESNGSAFQDPRSKFPRVQSGQSRGARIAAGNTLVPPQLSGRSNVVTEDMTKLFVARRKE

SEQ ID NO: 39052 - protein, 300 aa, Oryza sativa
MLRATQLVVRREKSGAMGALCGLGSHFSTASSCQRLPGKVAVITGAASGIGKATAAEFIRNGAKVILADIQDDLGRAVAAELGPDAAYTRCDVTDEAQIAAAVDLAVARHGRLDILYSNAGISGSSAPAPLASLDLADFDRVMAANARSAVAAVKHAARVMVPRRGGCVLCTGSTTGMLGGLAALPYSLSKAAVVGVVRLAAAELARSGVRVNAISPHAIATPLLVRSLARMNPGVSDEQLKEMVERGMSELHGAVLELEDVARAAVYLASDEAKFVTGQNHVIDGGFTVGKPMDMRVPR

SEQ ID NO: 39053 - protein, 261 aa, Oryza sativa
MAAGAEAAAESMFLPFLAMFAAIYLVGYLVVFRRWGGAQRAEASSCFASLFHGTPAAALALRAVLSNPRGCCVGVAGDLAAPNTRADELALDFSTAYFAVDLAHYLVLLPGERLFVAHHLATLYVLATCRAAARRGACALLVMEVLAEATSLAQNLWTLAGMRRAGSPAAAAAHARLSLPFYAAYTAMRAVLGPAWFVRMVRFYYASDGGGGAGGEALPAWARASWTVVIGAGIVVSVLWVSNLWLEFFRENKRKESSKEQ

SEQ ID NO: 39054 - protein, 185 aa, Oryza sativa
MASSGVGGVPGSPCGACKFLRRKCAAECVFAPYFCAEDGAAQFAAIHKVFGASNAAKLLQQVAPGDRSEVAATVTYEAQARPRDPVYGCVAHIFALQQQLATLQVQVAQAKTQVAQTLAAAGMLTAGNPLLQHQQQQQQAWQIEHESTMTSTQSSGCYSAPRSDGSTSLQDMYCFGEQEEGSYSR

SEQ ID NO: 39055 - protein, 130 aa, Oryza sativa
MSDEATRRLAGGGGGGAALRASSDVDRKPAAAGSPPPGAAAAAGHKIQLKSADMKEEMRQEAFDIARVAFEKHTMEKDIAEYIKKEFDKNHGPTWHCIVGRNFGSYVTHETNYFVYFYIDSKAVLLFKSG

SEQ ID NO: 39056 - protein, 293 aa, Oryza sativa
MAVYIRLDDAVRARLRGDAGSSASSGSEHEASACLSGLVQAFLETEGAAAGEDGAGPASKGGEGYDSDDGDGPERAAAAAESVRELLDPPVEEDPFRVRLAAAVAAAMEAEPALRRYGAAFRRAVARRLRAAGYDAGVCKSRWEASGGITAGTYEYVDVVAPAARGQKSRYIVDADFRAGLEVARATAEYAVVVAAVPASVVVAREEAVGRAVRVAADAARRSLRSHGLHVPPWRKTRYMLAKWLGPYKRSTATSPSAAGAMPMPAAAAGMDVKCRAVGFFTPPPAAPAARIK

SEQ ID NO: 39057 - protein, 192 aa, Oryza sativa
MSSGGNQERTCCGSLFTFIVTGGFVVLIYWAIFQPHHIRATVASADLTNLTVAGAAVSYKLAVRLNLYNPSLRVNIYYDELDSELRFRGERLGHATGATPAEFYQRRKSSDDVTFEFAGTGVAVAGDAAGELGKEKGKGSVSLEVAVDGKVRYRFGSIKIRQKPRIWCSLTIPVTADGGGRLDSGDRCSVKY

SEQ ID NO: 39058 - protein, 186 aa, Oryza sativa
MARPILATALLGAECARWRLAARLLATAVVGAERRWQAEHTRRRLAAQFILVAAMLGTEQRELRRPRSTADSPRRPHSALTPLRAHYASSPTARSDDAPRRCSPTARSDRAPTALPPRRGSSASPHQLRLTLAHRATARAPFQCFASVERGNGYLPSALAATQYTYRICLSRWRLFFLPKISVHDG

SEQ ID NO: 39059 - protein, 141 aa, Oryza sativa
MEAAASPSPPPSGASPLRLNPAAFLLRTTTTTTTVQPTTSADAPPPPPPTRQTAGVDRLISFLSSLIPRRGQRAKQPTSPPPTAAIYRSMCIFGLKTILIPYRTNLVRLQTGPNYADAFADFVKRVASSSGRPTGGNKQRM

SEQ ID NO: 39060 - protein, 205 aa, Oryza sativa
MARRRLAAATTTVPAIGVLILLLALAPSPATATVPARRSAVSYYASVENRLPAAAGMELVCRALGPGFDVYPELSVVPRGRVPRGGARVAEVLIEPGPERVAWVLCSWGYEGNYLANLKLFDTEWPEAAACQDPAASGGELCRLVFEDDAVSVVAPGGERRVVGDLPVKRCRRHWLLFSTGCTYPDHPNPYAGRLLRNALEFFAV

SEQ ID NO: 39061 - protein, 147 aa, Oryza sativa
MAARVALRRAFSAAVAASPSPGLGATASPVGFQHGPLLRRLINSDASAALKNNKHGFSSESRDARMDIKRRCELKEHEFFHLVEEALKTADPVKARLVFEKRKELSDLVREYKANSGLKTANRRLNLAVIISAVVSGYFVAGMIASN

SEQ ID NO: 39062 - protein, 180 aa, Oryza sativa
MDRLTSRPLAIISMDHADDDHRRRRGHVPPPPPPAAAEAEERTGDSEYDDAAAAVSSSSSLTTGEGSSVADDDDDDAESCSGGSGGGYGRKNGNGQYVVGGGEEEEGVESAVDEKAGVMMTPVPWWCWAAEKAPVTAAKAKATDGGARRAPPAAEAVEDSGGHTAESNRLFWEACIAHGY

SEQ ID NO: 39063 - protein, 110 aa, Oryza sativa
MADSGKKRDGSANGAEKKASPTPKPPSSSTSGSSFVRPLPSLLLGTRVLRPACAHRLFALLISRVQRSVCFVVRRRSLFVICHRSLFLQFCCIISSVAVSISRLTLSHIN

SEQ ID NO: 39064 - protein, 298 aa, Oryza sativa
MVKPAAVLLLLYLPLLATPTRIGLSRNPFVPPPNSVPTIDRTEMDVSTSPYRDLIKKWRDLVLLNTRPEVMVPEDHPVLAPQYDDTVPPERLLLPKLVANGDKTATLALRDSNIYFIGFANKAGQWFSFKDRNDLPPSFRARPLSFGVDYASIAGFRKNLPNYPLGRRQTEWAVKVLSEYDPNRTDEATIKRAVVIILLTFCEALRFFPIRNAVEIGWDSVAYITSTDADRLVCWGQISYMLEYSFMSGHSWDSEEQRTRLKNLARDCKIFNEPQALETVDVLEYGAILGAKSTNWLY

SEQ ID NO: 39065 - protein, 167 aa, Oryza sativa
MAAANDGADAGDSKILLISSDGQHFQVTEAEASMSKLVSNMIEDDCTENGVPLPNVASNVLAKVLDYCKKHAAAAAAAAEDVAVKDQELKSFDASFIDVDNTMLFGLILAANYLNVPSLLDLACQHTADLIKGKTVQEIRDTFGIVNDFTPEEEEEIRKENEWAFEN

SEQ ID NO: 39066 - protein, 98 aa, Oryza sativa
MAAGGMLCVSSSPTASASVARGRRQRRRSVEVRCSSVAAAGPGGPVEDHYRTLRLPPGAPRARSRGPSAASRSRIIQTFQRRAIAASISSGSTWPTRW

SEQ ID NO: 39067 - protein, 97 aa, Oryza sativa
MKPLLLTPAARLAAAAPSTLSRLLRLQSGRHHAHASSSSNRLLPPLLRPPRDGFRGGRLIASSSSSSSQMAAPADAPGGSADAFEVIRAHQVRPLAS

SEQ ID NO: 39068 - protein, 152 aa, Oryza sativa
MSLVLSRMLLDRFFPGAGGVVAGEARPPMDWRETPVAHVFEMDLPGLAKDQVAVEVVDGHILRVRAGGEHEDANNAAKAGKASGEEEEENDGVRWHCRERAAGRRRAADEASARMADGVLTVTVPKRKGKKRHAGNGKAAGDDKPVCCRFWP

SEQ ID NO: 39069 - protein, 87 aa, Oryza sativa
MCDASVPWEQGWEALFDEVAGEEAAAVRRRVATMGADDCVAEVAALMTRAERWDAPAPAEICRAGRLRLATRSASANATVTAKPNQN

SEQ ID NO: 39070 - protein, 68 aa, Oryza sativa
MAGLQRSSETFRRSGSSGLVRDDRHLSGEIKPPSPAARPRLGATRRRDPSRARATHRLIICTYMQFPI

SEQ ID NO: 39071 - protein, 119 aa, Oryza sativa
MASLGGGGGGQGPPNGSGVPTNRPVFTIEGRVVEPPTLTAAQLDMIRSMHLSSLGVPPVNGFYPGAVQYPRGVFVPSNEYEAAGATRAAKRAKQTDISAENELAAKTTGTTPPPAAPKK

SEQ ID NO: 39072 - protein, 120 aa, Oryza sativa
MVGPIVIASAGLGMLAGVAMANRTMGGGGDGRQLPAASRWDARPRCATCGGSGRVDCLCNRWSDGDSGCRTCAGSGRMPCRSCGGSGTGRPLPARLIARGHHHHHNPPPSSAPGRGGDYS

SEQ ID NO: 39073 - protein, 23 aa, Oryza sativa
MPLLPRPRLKMLQKFNHHYSPWS

SEQ ID NO: 39074 - protein, 89 aa, Oryza sativa
MRERREQTTSPLRCFSPHRAPAMPYPRPLPPPLHSAPAQRAVLSTPCASAVLPAPAPPLPFQHHPAGSPSPPRAVAGSPLSGCRRYIVV

SEQ ID NO: 39075 - protein, 64 aa, Oryza sativa
MIHPLSRGARKQGQGGICTAQPARSGRPGGAAVCRCEGVRDKSSFAARAAGSVCLLVGGGALCA

SEQ ID NO: 39076 - protein, 35 aa, Oryza sativa
MFSPPPPSRPAARFPAAGSGGGEAARGRRGGGAGG

SEQ ID NO: 39077 - protein, 60 aa, Oryza sativa
MGEKGGATWGLWRTMAVRWCGLGGEVLRRCSRGGRGCSAHEPRDGESVNALAVVAASQRW

SEQ ID NO: 39078 - protein, 103 aa, Oryza sativa
MQAVKEKVKDKVSAVKAKGKVSKAKADEKKEVATARSHAERELAHERAKARVAAAKMELHQDKALHREEAIQHRLHKHGAGTTAGVRPTAAAPAPHLPPASYY

SEQ ID NO: 39079 - protein, 121 aa, Oryza sativa
MPRLLLFCLVSSQLAMTAVMGRPFPLFYGGGGGAAASIADAPTTSSSSDGGGGGGHLLHVYSLLESSFAESPMSSHHRNHSPFDRKFAGGKVILGGLAAAIFAAVFCYIRITRRKKIEPKS

SEQ ID NO: 39080 - protein, 112 aa, Oryza sativa
MLHVDPRWLNRRWLRSHWSSLCRRRFWDLGAVDRRRAARRTIAALRRRRRRVSGDAPPLAPPCAEPFRLGPSHHHAPLLCSVASGRKKTTGRKKRTREGEIMTCGPHFISVQ

SEQ ID NO: 39081 - protein, 131 aa, Oryza sativa
MATPLNLLIALLFIVVSVQGTNGADRCAASSSIDVQTINTGEAAAGGGDTVFEVQVKNLCGCSVRDVRLDGGGFATTVEVDPAVFRAADDGGDYYLVNGGGPIASMATVSFRYTWDHFFQITPRSMEEDQC

SEQ ID NO: 39082 - protein, 110 aa, Oryza sativa
MRRRQRRAVAGGEAAEASDGGGGGGGCGSSRAHIRRRRPFGRADLATPLPGACFFAAMVVAARRQEVVVARRRDEMWRRPPSIGSGGRACGGSPAAGGGGSGGALLSIFF

SEQ ID NO: 39083 - protein, 116 aa, Oryza sativa
MCSGSWNSKNKIYLSLVVFRQDNQQQQQRKQPAHAPMALRRKRLRLRRRRETMRRSDGMEMEMVNLKLYLENRCILEENERLREKASALHRENLALRADLRNTSSPATTAAAASSC

SEQ ID NO: 39084 - protein, 139 aa, Oryza sativa
MGPSPPPVSPLADPRAPPPTPLPVAGSPLSSTPSRCRVAGSPPSLVDGASPHAVRWGTEDGARHRPLLRSTAGRHRRPTPGRAWSTLASSRREREWRRTAGAATREPSYPERPRRVREVGGAAGRRAAAAAGVMSSPRR

SEQ ID NO: 39085 - protein, 279 aa, Oryza sativa
MAGAVATVSVGLAWLGLMAAAASATQFRVGGGRGWSVPDANAEPYNSWAGRMRFQIGDQLLFVYPKEMDAVVVVDQGAYDACNTSSSVAGGGGGRYDDGNTVFTFDRSGPFFFISGNEANCRAGEKLVVVVMADRGGRHAPPPSPPAVPPPVAPVPMPSPASSPPSPAPAAATPSLAPSPVATTPSPSPSVSPMAPAPAPTTSTPSSPPAPAAMAPSPSTTPGGVAQPPPPPGTDGANATTPAAPAANDRSGAAAAAPVVAGVVVTSLGAYIGYAMLAI

SEQ ID NO: 39086 - protein, 87 aa, Oryza sativa
MASRRAAAAALLLVAAVVAAAAVGAGAEGEETTGDAGELDCFCDCMKNQCMTLGAAPNKFDCADACTQGCTQIGKPGQPSDKDFCGF

SEQ ID NO: 39087 - protein, 80 aa, Oryza sativa
MGAAGKASGMDGGGGARASSRRLSRYWSFFLALGFIAAALGMIFSMSLAAVLAALPFRRRPPGFSAAFLRPFAGRPANAS

SEQ ID NO: 39088 - protein, 124 aa, Oryza sativa
MARFAVVAAIVALLAVTAAAQAPGAAPVPAPKMAPLPAPPARSPATAPAPVATPPTAASPSPMASPPAPPTDAPAANAPSAVTPSAVTPSSVSAPTGAPAASSTYTATASFVAVAGAVAAAIVF

SEQ ID NO: 39089 - protein, 276 aa, Oryza sativa
MAVAHLLIQLISMAGNGVGACRVQIIPAIIFLQLLFRALGADGASSFSFTNSCQYPVWVGVLHGASSPALARSGFYLAPSGTYHLAAPSSGTWSGTFWARTGCAVDSSTGRFTCATADCGSGDVACNGRGPSPPVTLAEITLAAPGSGGQDFYDVSLVDGFNVPVRLAPSSSGGGGGDCHAVSCAGDVNAACPSDLRVVSGAGAVVACRSACDAYRSARYCCTGAYGSPAACGPTDYSQVFKAACPAAYSYAYDDASSTFTCFGASSYDVTFCPRS

SEQ ID NO: 39090 - protein, 96 aa, Oryza sativa
MLAQQIQPGGSTNGPDRAKVEEDKMKLEFEMAAKILACKATYKKKITKLNKEADHVKSWFMGSLLVIAILMYKILEYMYELYCYECNFFFLKSQIN

SEQ ID NO: 39091 - protein, 216 aa, Oryza sativa
MAPTSAGNLAPATAILVVVVAVVLAAAAASQDGDALTEFRKGMSDPDGALASWDPDLVNPCTWFRVTCNADNRVIRLDLEEMNLSGHLSADLARLDQLQFMEIASNNIEGPIPPEFGNLENLISLDLCNNTISGPIPPSLGKLRSLKFMRIDHNLLTGPIPNELAGLSNLMILNVSNNDLCGTIPTSGPFDHFPPSSFASNPRLRYPGMDDDDTGR

SEQ ID NO: 39092 - protein, 128 aa, Oryza sativa
MLQGEEKKAGKVKKGWLAVRVGVEGADGGDGGGFRRFVIPIAYLYHPLFRRLLEAARDAYGYDSAGPLRLPCSVDEFLRLRSLVERETHAAGGGGGGSSSPHRVHAGGGSHHHHHYSFSPCTRAKVSS

SEQ ID NO: 39093 - protein, 100 aa, Oryza sativa
MAQQQRRRRRGGSLAVLLLLLLLAALLLSLSLLARVDAAATVSSANLDWNEGEVAVATPLGQEAVAAAEEEGDRPPERVEMESINDYGQASANNRHNPHP

SEQ ID NO: 39094 - protein, 41 aa, Oryza sativa
MDGAVASLECSHGARPARYTHGCRVVVSVTSRAKDMALILN

SEQ ID NO: 39095 - protein, 74 aa, Oryza sativa
MELPLRCFHGAKVAAVAAAGDGGVAGRAAVPAKGGGGGVARGVKVVVRGLVGKAGKVFGRSIPAARFGHLAYIR

SEQ ID NO: 39096 - protein, 165 aa, Oryza sativa
MVRMAAAAASTFLLIAALVVPTASASASAAESAAGPYDPPTVPELMDRFGLPRALLPVTARRYLLHDDGSFQLFLDGGCVAEAGGYRVGYGVKLSGAVAPGRATGLGGVRVRVLFAWVPVTAVEVAGGEVTVSLGPIKKSFPAAGFKSSPRCIAGAATPATASDG

SEQ ID NO: 39097 - protein, 7 aa, Oryza sativa
MYLRCNM

SEQ ID NO: 39098 - protein, 190 aa, Oryza sativa
MAAEAWRSRFRERVVEAAERWESVGESLATALTHLKSPMHAGDEEEAAAARTRIQLAMGELVDASRNLASAMSLMKVAELLALHGGSVNPSTHLGEISLLGDQYLAERNAGIKLLEAGKDARKAYISVDGCRGNLDAILLLLDHPRVPCVDDFIEEELFVAGDNLQGAIGNAKLGTERAVGARQDVSGAN

SEQ ID NO: 39099 - protein, 106 aa, Oryza sativa
MSAVARWRGANAASRSALLRRERAGGGRRCRRGYQEEGLRPMGAEIDRASYLSRRNVFRTSLSMRHGRQDVSTGSPRISSAYCVDVTEQTASISPLACKGRVEIKG

SEQ ID NO: 39100 - protein, 54 aa, Oryza sativa
MVATSPASRPCSCGPSACAHPRAALPPAACARRAPPVEKREREGRGEEEMRRRD

SEQ ID NO: 39101 - protein, 115 aa, Oryza sativa
MLKHMVGRITTKPGGKPEMGEAFVVDQYNRPLPRVRTSRPEPGEGGHRQLPPGTISVAHVHEIIQLYQGKSSNHPGPMSVDKIASKFRVEASVVQNIVQFVSLPQEEHVTKKEEY

SEQ ID NO: 39102 - protein, 201 aa, Oryza sativa
MGKKSKNGGGGGGEKKATTTEVVLTVAMHCKCNGCKDKIRNGVKELALVPGVEAVDKSAVESKGEVRLVVAAATAKPEKLKDRLHRVTGKKVDLLVIAPPKPAAAADDDDKAAAAEAVAALIRQAQAQAGVHVVPGAWAGGGAVAYPAWGMQQPEGGYYYSPSTYPAGGLVYPYAAAYPPPGQQLLGNGGGVVSPWYTHGY

SEQ ID NO: 39103 - protein, 18 aa, Oryza sativa
MTNGYHSRMSRKEGFTWQ

SEQ ID NO: 39104 - protein, 168 aa, Oryza sativa
MACHLLLVAVVAGFAVSLAGATDHIVGANHGWNPNIDYSLWSGNQTFYVGDLISFRYQKGTHNVFEVNQTGYDNCTMAGVAGNWTSGKDFIPLNDSRRYYFICGNGFCQAGMKVAITVHPLKHNATGDGAKNHGGDGAAQEAAAAAMPGAAVWMAVLAVAAAAVAILP

SEQ ID NO: 39105 - protein, 250 aa, Oryza sativa
MSSSDQNPSPTPASGTGTSVPPPGRATTVSSQLLDMGAQAVQALKPVRQMKQHACSFALYAHDLSRQVEVHHFVSRLNQDVLQCAVYDSDKPSARLIGVEYIVSDAIFESLPPEEQKLWHSHAYEVKAGLWTDVGVPEPLQSSEMARMAKTYGKLWCTWQVDRGDALPLGAPALMVSPQAVEPGRVRAELVHGRDERYKIDSSAQGLKGARVEMDEPEWINPNADYWRLHGKGFAIDVTATEMKRHAPFP

SEQ ID NO: 39106 - protein, 104 aa, Oryza sativa
MSRYVELLDMGVRVAARFHSHCPQTARMYYKPPQTTTTADGRRRRGDGAAGKQAAAGFDAVSSATAARPFAAAGEELGGFRATAPSGFDFEFDTAQAVVYDVVA

SEQ ID NO: 39107 - protein, 213 aa, Oryza sativa
MAAMSDTGSSLAQWAELYHDASAAHGGVVANGAAAAATSPASPAGSTGGSPTRAPGVEGPRVGKPARRRSRASRRAPVTLLNTDTTNFRAMVQQITGIPAPPAGAFAGPGGVPVINFGSDYGFTGAVIPFSDHLQPRRPTFQDHQQLLRPQQQYTGAPFGYGNLQQAGGAGTGAGDMFSHALSSAEDRLLLQSLQSAQMPTSAANHSANGYFA

SEQ ID NO: 39108 - protein, 136 aa, Oryza sativa
MHRMPPLISSPNSNKNNKEEINRSRVHFALDIHQEETSSIALKPSMAMGSSSLLRGGAADARVRGGAELGGGEVAAVAVGAGRDGVRGGARLAGAGDGQGQRGFQPAHHHGHRAAQQRRRHQRLSSPLAPATADVA

SEQ ID NO: 39109 - protein, 149 aa, Oryza sativa
MSAAAAADVVHSGGCHCGRVRWRAEAPASVVVWICNCSDCAMRGNAHFVVPASKFTLAAGAGESLTTYTFGTHTAKHTFCRVCGITSFYTPRSNPDGVAVTAACVDPGTLAHVEYRHADGRNWEKWFSRSDISDFSKPKAPPPPPPSKT

SEQ ID NO: 39110 - protein, 58 aa, Oryza sativa
MRRPRDGRTGGRKGGAATTASSRRGRTPRSRPPVISCRHRLMQHPEEQTTILKEGWDK

SEQ ID NO: 39111 - protein, 87 aa, Oryza sativa
MPPASVASPPAPMDDDGGLLALPVALPIGSSSFVLREDGVSRAADEAAAPRCLPLLFDLNLPASSPSAAAAAEVDEMDWCCDTLLHL

SEQ ID NO: 39112 - protein, 102 aa, Oryza sativa
MDDGGGGGGDDSSPASYIRLVQHLIEKCICYNMNKEECMETLEKHANIKPVITSTVWKELEKENSEFFATYKKGQGEEPAESKSSSSSQEAAGSKRSGGDDD

SEQ ID NO: 39113 - protein, 44 aa, Oryza sativa
MREMWWLSTTAAVVTLRLADRSGIAGDSPPASLLLLHLRERGEC

SEQ ID NO: 39114 - protein, 214 aa, Oryza sativa
MAQVQARRPRGGECQGHQVVQPDGGDGDAERRLIAPADASGQAAHCGGPVVEVDDAYDSKVKIGEALEAAARAVGDQPVRGSDAAAISSAEASAGAGVVPGGVAEQAQAAADANAGAAPPAEDTAITIGDVLAWNATAMLPTEKAVTAEDAAAAAGAEVEKDPGEGTRPYGVSAALAAAAKHNREDAECQSKRSAQPRAADECTPALAEQFDQI

SEQ ID NO: 39115 - protein, 10 aa, Oryza sativa
MTNSQSLQNT

SEQ ID NO: 39116 - protein, 212 aa, Oryza sativa
MALAFAVLATFAAAATPTTTTNLTLHNLCTHPVWPLVTANAGLPAIADAAGAATRLDGNGDGLATLAFPPGAWSGRVVARTGCRGNGSSRCDTGDAPPVTVAQVSVHGAGGLAEYSVSLVDGFNVAVVVTPHGFEQGRLCPSLGCAVDLAADCPGDGGRGGCMAAGQAEAFKARCPDTRTTPTDVEVTPQRCIQPAELKVVFCPPDNTSSTH

SEQ ID NO: 39117 - protein, 108 aa, Oryza sativa
MHTPSMDQPAASNGDEAPRMEMCPSLYRAARSGRAEEVMALLLQQRPGDGAAAHRQVAEGCQEDGASVREESDDSWEEEQQGPRGGRGPPMPVAGGGEMAPWFALARG

SEQ ID NO: 39118 - protein, 50 aa, Oryza sativa
MVWPVAGVVRVVCGGGGGENGGGEDGAREEGRRDGGGEVARSRLAEDSGQ

SEQ ID NO: 39119 - protein, 106 aa, Oryza sativa
MFASSRACLLHSAMQRKLLYQITISKVLHAEGRGVDGVLHADGLAVAAAPAAGAVGEVNTELVARLKEAAQEVAVEVAAGIAGHLFVAYTCWWLGRRRGRGNGRGR

SEQ ID NO: 39120 - protein, 74 aa, Oryza sativa
MSWRRGDGGVARRWVLLLCTGSFFLGLLFTDRMWTLPEVTEVARPNGRREKEDELTAGDCNSAKVYHSPTTSNS

SEQ ID NO: 39121 - protein, 84 aa, Oryza sativa
MGGDGALPSAGSGGRGGGGQRRAVARSPPSDPAGGEAAGSGALPSARSGGRVGGGRRRAAARSPPPDPAGGEAQHGPPAMKQTK

SEQ ID NO: 39122 - protein, 108 aa, Oryza sativa
MERVAKLASERAVVVFTASNCGMCHAVTSLLVGELGVNAAVHELDKDPRGRDMERELARRLNGGGGGGRALPAVFVGGNLVGGANRVMSLHLAGELVPMLKNAGALWL

SEQ ID NO: 39123 - protein, 50 aa, Oryza sativa
MAAAVPVPWSPESEFDGAEEAPSGARCRKESPHAAAALITDDAGVEGFEI

SEQ ID NO: 39124 - protein, 53 aa, Oryza sativa
MARARTYLCFDPPAFPAVFVRAKLGAKRGRVPVIWSRSSERERMALSGRFDVI

SEQ ID NO: 39125 - protein, 110 aa, Oryza sativa
MAWCIEKKGPVFLAMSTPLAFVFTVFCCIFFLGETVHAGSVVGGVLMVAGLYSVLWGKSKEQDKLTLATATPTVAAVEQKEAAAAAPDADASNSGSELHHGRLVSLEQQV

SEQ ID NO: 39126 - protein, 76 aa, Oryza sativa
MDPAATSWTLPDPAASGSWPPDPVAPTAPNSSAHTTANGRSGLRRSGRPSDINEAPLLSVSFSVFFSFLFSPTSKP

SEQ ID NO: 39127 - protein, 108 aa, Oryza sativa
MGRIHIVSPESKLECGEIYFLIPAASVPDAKRRTSTGGAAGHGHHVRSKSEGNAAVADWLGSQCSASPETTRMMRVQKQHHHQHRRRMSTGSHASPWQPHLSCITEDP

SEQ ID NO: 39128 - protein, 81 aa, Oryza sativa
MRHVTFFAAVLVAIFLTSGGGRMSSTAARPTAVGGAGAPPAAVAVELAGTGTGTNASSQPSNCTYGNNVGGQCPPTPGAGH

SEQ ID NO: 39129 - protein, 85 aa, Oryza sativa
MAKHHNRRLSVVVALLMLAASIVLLLLAPPCDGRRQLRGSEATRGGGVGEEKASLLPPPIPNLPLPPIVPGNPPARNSVVNNKSP

SEQ ID NO: 39130 - protein, 166 aa, Oryza sativa
MAGVHTHRAFLLCNYLLLGAASGCIFLTLSLRLLPSPCGLLLVFLHALTAVLAAAACSGSFTAPGGGGGTHTAHTASAVLTAIFQGAAALLAFTRTGDFLAELRSYVREEDGEVILELVGGLGAAIFVLEWAALALAFALRLGDDGADGDEHDGGYAKSWQSGYHV

SEQ ID NO: 39131 - protein, 213 aa, Oryza sativa
MGSVLCCLADDGRPVCCFRLPWPIFNAAHNHNHNSGSIARPRADTRVAPDQGRISLTAPSQHDSMDTFRCPPRPLPWDDPRFSHHTEHHPLVGGHDKASTTFHKSGSLGESKNADSISNSKAVKDDGPSTAVKDDGSSVKHHSDGLHIGKEQVHDLFDFEDDCPICLEEYDYENPKMTLQCNHNFHLCCIYEWMERSQACPVCSKVMLFHEDS

SEQ ID NO: 39132 - protein, 133 aa, Oryza sativa
MLSGTVPSNLLPMRSKVFRLDRLEKFTLLRLPLKLFLLRLIVMRCVQLLRADGSSPDMLLSPKWRSCSLLSWPIESGIHPVMLFPSRSRVDRFLRFTMSVPLITPFNSLFGKERYSNEVALKRSPGRFPLRLL

SEQ ID NO: 39133 - protein, 368 aa, Oryza sativa
MDQRKALFRAKLREREAKEKQERRIDPSLVRYNEFDQPICRICNVTLKSEALWPAHQVSRKHHEAKAAAAASAKAPSGAGSRGNKANHEQPAESQKPKSSTLPANFFENQGMKRHSDGAGSEGRSVRREVADVQQKTKEASKTKPSVNFEKIPKKESQANTNVKGVLPGNFFDYNDEDEDPAPTEANSAPGNPPISNRMQVKGVPDGFFDGNKNSNGMQPSEPSQSSKAVKSSETSEVKGSLPEGFFDNKDADLRARGIQPPKIDINDAYKEFEKEIQEDLQEVDDRLEEEEIDAAAEREEYLTLEQEEYRQRVDMLKKQLTESKAARTTKANSKPVGMDMLSSSDSSSDEEDDSTDFAVDWRAQHLK

SEQ ID NO: 39134 - protein, 192 aa, Oryza sativa
MACHRRSASLGAEADPLVGNVVRDGERLLLRVPEDGDGRVVGVGRERQARLRHLGDVEHAGEVEADGGAAGERQLHRGYLRRPVAGEVVARVEDGQRGRLLVLRHGARERRAERRVRARREAGDHRAGVDHRAAGRRERRRRDPDRAAADLDADEVDVVERRRRAVGQRRELRVRRRGAAEGQVAPAARRRR

SEQ ID NO: 39135 - protein, 270 aa, Oryza sativa
MMAHLAPLFLLLLLLLLPLHAAATPSAHPAYPNEPPSCAAAVPVPERREAHGGGRILDITHYYREDMPSWESDGGVGQFLWLPASMRNGSRANNSEMRLPTHTGTHVDAPGHVFQHYFDAGFDVDSLDLEVLNGLALLVDVPRDDNITAKMMESLHIPKGIQRVLFRTLNTDRQLMWKKEFDTSYVGFMEDGAQWLVDNTDIKLVGIDYLSVAAFDDLIPSHLVLLKNRDIILVEGLKLENIMPGIYSLHCLPLRLRGAEGSPIRCILIK

SEQ ID NO: 39136 - protein, 132 aa, Oryza sativa
MFAFRHGRALIYDRSLLQITVWDPVTGDRRAVDIPEPFGRRPAYVSNWAMRCVDGHVHGGCHSSPFEVVVIGFNKYRRRLFTCVYSSDTGNWGKVISNAFNFRGHKTRSSTPGWEFFLLLVPKCYWDRHPSV

SEQ ID NO: 39137 - protein, 297 aa, Oryza sativa
MKAKPWWFLNAGRAWALLSDLRWCNPEWQAYSRACSERRAKMKTPAHRQGSANLHRYHKNLEKKMGTPVHVLKAYAHANRVDPDEGYCDEDSSQNMLLEAYARAFTERHGEDSNWRTEPIDGVAVHMAGGGKKHGRFFLLNGLLKTPDVLADVGRSRCSLDDPRPSRRLRPNPDDSARIEELERQLQCEREEREQERERAREEREQERERAREERERALEEMERTRKEMEQEREQARVERVREHELFQEKTSYFTCALEVLQRKLNINFLPPCTPTLTHPATSGSEVSIGNPVTTTE

SEQ ID NO: 39138 - protein, 481 aa, Oryza sativa
MYDDGPRKGKPGGLSMDAATAAGLAAVWPEYFPEESEFAADGRSARLAADLVDLFSSPDASDLLSRVEDDGDILSLPVDFQQLSNLTWITEALQENPKEALLSMGAAVHLIVCASRDLQLGDINKINIRLYNHTKTIALKNLKAAYIKKLVTVRGTVLKVSTVKPLVLQLNFQCMKCATKFPRVFCDGKFSPPVSCSIQGCKSRTFIPMRSTAKLMDFQKIRIQELASGESHEEGRVPRTIECELTEDLVDCCIPGETVTVTGIVKVLNNYMDVGGGKSKSRNQGLYYLYLEAISVRNSKVHAASGNSDAASGSFGFQAFTEKDLEFISKFKEEHGADVFRQILHSFCPSIYGHELVKAGITLALFGGVQKHSIDQNKVPVRGDIHAVVVGDPGLGKSQLLQAAAAVSPRGIYVCGNTTTNAGLTVAVVKDSMSNDYAFEAGAMVLADRGICCIDEFDKMSAEHQVLTLYKLHSEMLIRKP

SEQ ID NO: 39139 - protein, 376 aa, Oryza sativa
MDKCGDSDDCISTSEAAERAAKLSEDKIKNLPVPGEVEFINGGPPCQGFSGMNRFNQSPWSKVQCEMILAFLSFAEYFRPRFFLLENVRNFVSFNKGQTFRLTLASLLEMGYQVRFGILEAGAYGVAQSRKRAFIWAAAPGETLPEWPEPMHVFASPELKITLPDGKFYAAVKSTAAGAPFRSITVRDTIGDLPAVENGAGKPTIQYGSGPVSWFQKKIRSDMASLNDHISKEMNELNLIRCKHIPKRPGCDWHDLPDEKVKLSTGQMVDLIPWCLPNTAKRHNQWKGLYGRLDWEGNFPTSVTDPQPMGKVGMCFHPEQDRIITVRECARSQGFPDSYRFAGNIQNKHRQIGNAVPPPLAYALGRKLKQAIDAKR

SEQ ID NO: 39140 - protein, 475 aa, Oryza sativa
MEAAAAAAKKRRFGRSTGKGSLGSDGLDHISCLPEAILGEIISLLPTKDAARTQAVSRRWRPLWRSTPLNLDVDSLSTQERKRTMFVSRILASHPGPARRLSLPFFRLRDRYAKLDGWLRSPAFADLQELDFSYDIEDEEALYPLPPSALRFAPTLRVVELRTCHFPNGMAPALHFPRLARLTLYRVTISEDTLHGLLSRCSALESLLLVGNFGIRRLRINSPFLRSLGFSASSWEGYRDANFQEVVIEDAPCLERLMPLYPNHGPATIRVIAAPKLEVLGVLSDGISQLHLGTTFFQKMIAVNLTTSIRTVKVLVLDSNGPNLDVVVDFLKCFPCLERLYVVSRPHKVIKNIRSYDPLHPIECMELHLRKVVIRYYEGKRPDVDFAKFFVLNAKVLREMDFCSPSNRNLKWQDNQHRRLSLENKASQVAQFTFKTTSRTRNELTRNRHTHELSMSDPFDFSSCLCSSCRFFFQL

SEQ ID NO: 39141 - protein, 364 aa, Oryza sativa
MGKLTDVTRSNDIQLKIVGHSLTMAMDDGEFFSSRRYCVGGHDWEIRLRPKDPWVGRRDRPLTLKLVLRGAPRTGSGSVKAQLSCCLVDPTQKLRPSEMKTVSHKFHKPGDYSPRAVFMARDELEASGYLTDDSYVVQCAITVLREQPEIAAAAAAAGDSANAAVAPSSELHAYLGALLESKTGADVTFVVSGESFAAHKAILASRSPVFMAELFGAMKVKASERVEVKDMEAPVFKAILHFVYTDTVPELDHRDGEETEAASTATAMAQHLLAGADRYGLERLKLICESKLAERIDVDTVSTTLALAEQHDCSHLKAKCVEFIAAGTAENLDAVLATDGFKHLEASCPSVLTDLVKVARGRKN

SEQ ID NO: 39142 - protein, 327 aa, Oryza sativa
MASRSSWHCCLLAFFLLSSAAGAAYGQQLSTTFYAASCPTLQVVVRATVLGALLAERRMGASLVRLFFHDCFVQGCDASILLDDVPATSFVGEKTAFPNVNSVRGYDVIDQIKRNVELLCPGVVSCADIVALAARDSTALLGGPSWAVPLGRRDSTTASLSAANSDLPAPSSDLATLIAGFGNKGLSPRDMTALSGAHTIGFSQCANFRDRVYNDTNIDPAFAALRRRGCPAAPGSGDSSLAPLDAQTQNVFDNAYYRNLLAQRGLLHSDQELFNGGSQDALVQQYSSNPALFAADFAAAMIKMGNIKPLTGAAGQIRRSCRAVNSS

SEQ ID NO: 39143 - protein, 133 aa, Oryza sativa
MVRLGASVGEAIAAVVERYAKEGRSPRLDPAAAEAFQLHHSHFCLQSLNKNDKIGDVGGRNFYLHKNDGNNRIYLQSEESGTNLVGGEIAHSFGGQQIVAINHDQFFAIFIKKLDKIGRLTKRIWRLLTCNCT

SEQ ID NO: 39144 - protein, 120 aa, Oryza sativa
MMAALLAGANARHVVESSTSTRRFCADSLSAAPPAKDMVTAGALTREAWPLKHVSRMEYADARDVPFMAAATALLSAEYTLVGRRVITVPESMIVGRLEYADDDTDSGFPATVIPDSLMK

SEQ ID NO: 39145 - protein, 95 aa, Oryza sativa
MASVANEGVVIGLSRLATQTYVRSDSEMLWYHMPRKKLWLEAVGEKKPSAKTLPLEMSTSPGEISRFACVSWSSPLQEEMRNSKEMKTGRQAIIW

SEQ ID NO: 39146 - protein, 64 aa, Oryza sativa
MNHKQIHQKKNPSFSFRGTRQIRDSCKSIIVSINLQMHILYSSSHQCLITLIIYSWRVDYYLHL

SEQ ID NO: 39147 - protein, 264 aa, Oryza sativa
MMSFPYSSGDLGEATTAAAAAVDMITLDQMFRDYDASTGDDLFELVWESCGGGEIDSGAGEVQPAGVPCCRRLLPGSSPEPTSEDEMAAWLSTIVTGSGGGGDDVAAGGDHQDPAVKKPDGEPLTEKMDKKLPTRTEERRRVKHKARRNPGYAETHGLTEKRRRSRINEKFKMLQRLVPGCDKCSQSSTLDRTIHYMKSLQQQLQAMYPTMVRPAAVYPVVQPPPAFAAGGPPAASQGGLHRHRRLMVVVSVHHRCRCFRLGRQ

SEQ ID NO: 39148 - protein, 92 aa, Oryza sativa
MRRQGGVRRGARGGGQGHRAGLRGEVGGGQGRRAGGGDGVPRERDKDLEAAQLALRRGVSRGRRGRGDDEEFAHGAGPRRERRGGGGHGRAW

SEQ ID NO: 39149 - protein, 370 aa, Oryza sativa
MRGLARAGKRASEMAFNAGGGAVNWFPGHMAAASRAIRDRLKLADLVLEVRDARIPLSSANEDLQPVLASKRRILALNKKDLANPNIMNRWLHHFESCKQDCISINAHSTSSVSQLLGLVEFKLKEAISKEPTLLVMVVGVPNVGKSALINSIHRIVTSRFPVQDKNKRATVGPLPGVTQDIAGYKISSQPSIYVLDTPGVLVPSIPDMETGLKLALTGAVKDSVVGEERIAKYLLSLLNIRKTPLHWERLVYRREQFNEDAFNSNEKDYRDSPRRRRRPNNSDALYVQDMVMEVQRTLCSTFMDFADNTEDENELESLIDSQLVALRKVFRIPHKPFDETHGPASKKLLALFRSGKLGPFILDDLPDNQ

SEQ ID NO: 39150 - protein, 479 aa, Oryza sativa
MPMCNEKEVYETSISHVCQIDWPRERMLVQVLDDSDDETCQMLIKAEVTKWSQRGVNIIYRHRLNRTGYKAGNLKSAMSCDYVRDYEFVAIFDADFQPNPDFLKLTVPHFKGNPELGLVQARWSFVNKDENLLTRLQNINLCFHFEVEQQVNGVYLSFFGFNGTAGVWRIKALEDSGGWMERTTVEDMDIAVRAHLNGWKFIFLNDVKVLCELPESYQAYRKQQHRWHSGPMQLFRLCLPAVFKSKISTWKKANLVMLFFLLRKLILPFYSFTLFCVILPLTMFVPEAELPIWVICYVPVIMSVLNILPAPKSFPFVIPYLLFENTMSVTKFNAMVSGLFQLGSSYEWVVTKKAGRTSSESDILALAEAADADARPPPAKLHRGVSEGGLKEWAKLHKEQEDATAAAAAAAAPGTPVKKSKAAKAPNRIFKKELALAFLLLTAATRSLLSAQGLHFYFLLFQGVTFLAVGLDLIGEQVS

SEQ ID NO: 39151 - protein, 586 aa, Oryza sativa
MASSSLVTSLLFSSSSSSNTATSTSSRRSFSLFSKNQYCKPRPLRRSSSRLLVRCSLQQQQEEKAAPAAESHHAGGGQDDAATASHHAVEGENGVADADGGGVKKSKEELEEEEQQEVDWRSDEEFKRFMGNPSIEAAIKLEKKRADRKLRELDREPDANPLAGLLRGLARGQLAREKERLELAENTFKALDLNKLKSCFGYDTFFAVDVRRFGDGGIFIGNLRKPVEEVRPKLEKKIAEAAGTDVTLWFMEEKNDDITKQVCMVQPKAEIDLQLEITKLSTPWGYLSAVALAVTTFGTIAIMSGFFLKPGATFDDYVSDVLPLFAGFLSILGVSEIATRLTAARYGVKLSPSFLVPSNWTGCLGVMNNYESLLPNKKALFDIPVARAASAYLTSVALAVSAFVSDGSLNGGKNALFVRPEFFYNNPLLSFVQAVIGPYADELGNVLPNAVEGVGVPVDPLAFAGLLGIVVTSLNLLPCGRLEGGRIAQALFGRGAAAVLSFATSVALGAGAIIGGSVLCLAWGLFATFVRGGEEIPAQDEITPLGSERYAWGLVLAVVCLLTLFPNGGGTYSGDFLGAPFFRGGI

SEQ ID NO: 39152 - protein, 234 aa, Oryza sativa
MMRPIGVWNICFATSGDQQWRVATTWDRINHRSSTLPFHGKLYVLLRPHSVRGENEVIQIDPPQHCLSEPSPKLIAKFRWPTSDESFRLYSYRLVECNSEILVIGTKWDAVYYSVYRLADLMLGRTVHVTSIDGNALFIGRRSLCVSSKAFPTIVPDTIVMPDTKIYLSQYHLSNGTLSQATDGVIAEEKDIPGPYSIMCHIITCCSPAYWNKGKISCKELPTWRVKKKFRFGA

SEQ ID NO: 39153 - protein, 357 aa, Oryza sativa
MHVKPFLRLYSGRHRAHARAFLDRSVGRELARPAMAAVPEVALRHGAGRPMPAVGVGTADSAATSPETKRGAALAALEVGFRHFDTAALYGTEAPLGEAIAEATRRGLVASREEVFVTTKLWCTQCHPGLVLPSLRESLRNLQMEYVDLYLVHWPISVKPGPPMLPVKREDAVPFDFEGVWRAMEECHRLGLAKAIGVSNFTTKHLDKLLAVATIPPAVNQVEMNPVWQQRTVREYCAAKGIRVAAYSPLGGQNWIGEGNDVMESPVLADIARARGKSIAQVSLRWIHEQGVTPIPKSYNKERLKQNLEIFDWELTKEDRLKISQIPQKKIVTAARMFSPDGEFASVDLSDMEIVEE

SEQ ID NO: 39154 - protein, 52 aa, Oryza sativa
MVAVSWRSAKRPRRRRVLNVLSLWRSPLLAIFLRHHRPFSRRTTSLSPCQDK

SEQ ID NO: 39155 - protein, 158 aa, Oryza sativa
MITCLIAFVPPGEQGAERRVAVPAVLEEHAGDDPVHGLRHVDAVPVDVLGRLRAGGGHLRRAAGGEDLEVVGAAAGAAASLEGLREAVPRRGRHDGEVGGVVVGVGDDGGRVLPPEPAEAGLEAAVVGVALLVDGGGAADVVAVLRAGQRHGQWQATG

SEQ ID NO: 39156 - protein, 247 aa, Oryza sativa
MRPPPRPLLVVIPPRPAKNPGQRRRSGKHPVSFLAAARSASVLCYCSDATVAPAPQAAAAEGEGEEGEKKAEVPPVEEVAALLDIRVGRVVKAWRHPEADTLYVEEVDVGEEQPRTICSGLVNYLPIDQLQDSNVIVLANLKPRNMRGIKSNGMLMAASDASHENVELLTPPEGSVPGERVWFGTEDGKDRQSEAASPNQVQKKKIWESVQPHLRTSENCTAFLGEHPMRTSAGVVFCKTLQGARVS

SEQ ID NO: 39157 - protein, 185 aa, Oryza sativa
MLGYLGVGIPSLQIGAALFHSMRAVRLAAEFRCLKTLALEMVDPQVKPVVDFLRCFPCLEALYITSHMFEPRSMETLKCDNMDYPIECLNRHLKKVVLAGYEGRRRELQLARFLVSNARVLQVMKFLCANDCKPTWLASQKRQLCWESRLSLGPQVIFEVYRKSHTRFRKHASNITLVDPFDVKT

SEQ ID NO: 39158 - protein, 374 aa, Oryza sativa
MEATPISVKPPSPVAAAPPPPPVQVPVPPPPPPPLPPAAAAVEPLPPQPVAVVVAEAEPCSMNQLALTPTPKRQKVEESADGNGCKHCACKKSRCLKLYCPCFAGGGYCSEKCGCQPCFNKALYAETVQTTRKVLLSRQKRMSLKINRRSEANAEAVEDAHHSSSSTPPRRGCNCKKSSCLKKYCDCYQDGTGCSLFCRCEDCRNPFGKNEGIMAEESKRFLYTGADLDHSEDEQDFIVERSPRLQSPISKESSFQQTPPHIRATNRDTHMFPQAISQWQPRSWHCSKRQSNDRVIDDSGEYKNSNHDWQLAKPEDSYSISRCVQILNGMAELSQVEKSVAPDVFLQAGNREIFISLNGDVRALWLKRKIQNLT

SEQ ID NO: 39159 - protein, 62 aa, Oryza sativa
MALRSQPRRRRPHLMQQVAMLLGTMKKKMKMTAKDNLLWQHQRWPIILLDGPSLSPLLWTTT

SEQ ID NO: 39160 - protein, 154 aa, Oryza sativa
MHEIGENPIRPLAAGARGVEERGERRGEPVERLPVKLELVERDVAGGLGAVGEPVDARQWERHEVDELCQLGANRREAGEVARGGDEGHAVAARGEALGEVKAGEQVAEGEPREDDDVQRRLRGMGVVHFRPARTGQHSGVSVCVRSLALMIQS

SEQ ID NO: 39161 - protein, 263 aa, Oryza sativa
MRLPASSSSAAGLQERIWDLHDNLSHAILSLSASAHRCCRRRAPEGRVVVKGWRRQGGCGDCGLEQEAAAAATMADARSLHAVRAALEDLEGHLHFLHNIQLCQVAERDAAIARLQQSRILLATRLAEHRWKKHEVIEEALAFVDDALDKSRFVSPEDVRGTHTHSQSVENQCPKIHDSNFLVRFLSCTLAIAKNSLRFERIGGALGNTAMFAVSMLAFLQLQQVAFGKQTPAVQCRRVNYFHSQMSVKNTKEKHLVVLLARG

SEQ ID NO: 39162 - protein, 377 aa, Oryza sativa
MAKETEFYDVLGVCPAASDDEIRKAYYIKARQVHPDKNPNDPQAAEKFQALGEAYQVLSDPLQRKAYDGYGKTSISKENMLDGTVVFTLLFGSELFEDYIGHLAMATMASSEMASDNDNPEQLQDRLKGVQREREEKLARFLKEFLLQYVRGDQEGFASRAESEAKRLSSTSSGLDILRTIGYVYSRQAAKELGKKAMYLGVPFLAEWVRNKGHLWRSQITAAKGALQLLQLQEEACRQSGKDGLATERDVDLQMRMNKDLMMSSLWKLNIVDIEVTLLHVCEMVLHENNVKKEDLKARAMALKILGKIFQRDKEALPGPSKPTILDDDSSSDESSDDDVARTVPYRTPAVTQGIGRLFRCLCNPAYDVDDDFEPRK

SEQ ID NO: 39163 - protein, 399 aa, Oryza sativa
MAMELERATKKRCGGIDGDNPAADLTDDLIVEILSRLPAKSVCRFKCVSWRWRRLISHRDHRKKLPHMLAGFISHYSVPLHDGIVLIPHFDSIDGGEEDEEEHRLVPDPSLSFLPGYRTIFPKDCCNGLLLCLCCKNSPRDESDYVVCNPATQRWIILPEIDRADPVSTVRLGFDPALSPYFHVFAILEHVDGCVSGVEIFSLETGAWSHRENGWGDEDDHTVHPDAKSAFVDGMVNFISYNSAIIAVDTEGKKWKTIPFLEEMTCECISNGILAFIGQSQGHLYYINFRDWDSSILSVWTLDDYCSCGWSFKYNISTSQLFGWTNMKLEREYSLIAIHPECNMIFYVFRDEGQNTLLSYDMDRGKVNSICNMRDPFWKTWDPCLPYVPVFMESLPDHA

SEQ ID NO: 39164 - protein, 329 aa, Oryza sativa
MAAELRRERGREELLLHHRHRLRRPSREALLRRGLRRARGQEELLLHHRHRLRRPSREALLRRGLRRAGGRRTTAAGCQSGRHPDSDGQGGRRCVTTTAGSSSSDYQGGGGGRAAGSGSGSGRGRRGSCTALLVGHTASRNPRQGSPTRRRFGVQVGEATRHQRPLRRQGHRLLQLRRTSRQALLREPVTPKTNHSPRRRRTRVWNGRRLRLQRRALLLRRAHTSRHHDSANPPHGAKPHSPSHKHRRRPRSDSTRLHYGCLPRLHQFEPAVHGAALLDLHLRFPVGCQAPYQLLATPSLGQSRRCAKPYEQDLVRRPALGTSFLRSVH

SEQ ID NO: 39165 - protein, 436 aa, Oryza sativa
MEALSRTERVGGGGGAMVEVAFASSAGSSAAAPRRLRGELVVRDAIPYAGVAPPPPALPLPQPQLQPQVQATTSGGGGGGKISPAVLFIIVILAVVFFISGLLHLLVRLLMKKQHRRGGGGGAAAGVSRSAAGDDAGGGGDAALQRQLQQLFHLHDSGLDQAFIDALPVFAYREIVVGGGGDGDKEPFDCAVCLCEFDAEDRLRLLPLCGHAFHLHCIDTWLLSNSTCPLCRGVLFVPGLTENNPMFDFDEGLEEGRLSEDCDNGFGYPGHKATEGMQTPGTEKRVFPVRLGKFKNVGTQGAVEGGGIGNANGAVLRREEGESSSSSLDARRCFSMGTYQYVLGTSELRVSLQPDRIRNGGGGVTRARPTGLSSVNAEIMEGKKICARNKGESFSVSKIWQWSNLKGKLPTGSDECSEAGSLPWMKRGGIGDTSNM

SEQ ID NO: 39166 - protein, 246 aa, Oryza sativa
MPKGAKKRAKLKKKQQGDHPAGSDDGGNNNNNKNNAAENGSNDSSRRRDAASDGNHHLPSRPNVPHVDVSEDSMESSEEMVTPRAAASEADEEERKAATSEVPVEVVEAGEEVMVDALPPEAAAGAQEQQGKAEALVVVQEPEVKREELVAKVHPMHDPEPQGEEVLIVEFNGRLLIYLLSADAPDHHVLSSRSTVATGRRRLLSCLSADTAGRWPPTPRPPSPPKPHSGHLLGQIQRRGGWGRRI

SEQ ID NO: 39167 - protein, 108 aa, Oryza sativa
MVVAAAAATTDSIPLLPSTSDTSRSATSPSSSSTSALLLSHQLWYGGKLASWGCRRRLIWSLAAEHKRRASRSATSPASSSTTQCIRRHNINLKCGPPNRLPCFRVLA

SEQ ID NO: 39168 - protein, 83 aa, Oryza sativa
MLPSAIGHPMPGMPIQPSTRLLFVIADQCVVSRAINYLFFVGLRIRPVCFHALTERQESFSFICSAVQSTIDLNVSISSSGLL

SEQ ID NO: 39169 - protein, 145 aa, Oryza sativa
MEEPAAAAAFPDPPEDPSPSPSSAPSPAAAAPPPGPRELAAAMEAVERDVAAISDSYASLFASLRVALANVTSTSAENMECLGDVVGRLQESALEASSKGNKYINSCLRLNEEMRGLESLAMQLKILRKNVDSLDLAVNQLLRLP

SEQ ID NO: 39170 - protein, 113 aa, Oryza sativa
MQRWTRNGMLNFSQPASSSPFGFYDAGHGASSSGGSRSHGCRSQNKDQRNLEKNLTKVRKEWMKVKEEMGYARLLSEHLSETVTETDRKVAAMLEELDRTDKYMQDILSSQQK

SEQ ID NO: 39171 - protein, 196 aa, Oryza sativa
MASLFFGILPIPALAGGERGSWGPRPRCSLLRGLAAPCAGTWTRAQPGASPRAPVHLLAVGAHGNLTVGADPLSAWFGDASRPEGSADLLKRHPMAPRQCSTPRPPQSPGVKPTPSRWGRAREAKTPKALGFSVTCKTLISKTGGDNFEHCSVIITASFEDTASCPASCVAIPPCAVAVAALFRQWVDALWRRARL

SEQ ID NO: 39172 - protein, 407 aa, Oryza sativa
MLSGAMSLASQPSLRSLPSLDVHDLNTSPSLHQFIATIKGHSSASAYVSALAVDGDSLYIASSDGSIRLWALDGARRSQEEQQQDDGCSSSSSSTTVADTDSSVKSLLATGNGGLLLSSHQDGKIRAWRAGSRRRDGETRPQLVLRAVLPTAVDRLRTCLRPWSYVEIRRHRRCTWVHHVDAVTALAVSPDGALLYSASWDRSIKVWSLPGFRCVESIAAAHDDAINALAVSPDGRVYTGSADKKIKAWTRGPGQRKHALVGTMERHRSAVNALALGANGKVLYSGACDRSVVVWESAGGGDGGMEATGTLRGHARAILCLAAAGELVCSGSADRTVRVWRRGGAENNGYTCLAVMESHGAAVKSLALVRGGRDDDGSCSSEGSSALVCSGALDGDVKIWSVFIPCL

SEQ ID NO: 39173 - protein, 106 aa, Oryza sativa
MGSGRRRRSAILCRRRSTSKVAIAVHPSPTYRRPSTSGHRRSRCFRHPSRPSPATRRTSSDAQEPGALFSFWVRRQNPRRSPPTSTSSPPAGEALLLLLFPPLPSL

SEQ ID NO: 39174 - protein, 417 aa, Oryza sativa
MAAPPVSDFACAFRSRAAWVLLSARNPSRLAWAAAVPGAARPRRGVPFPAAAPRAAVPPPPRRRRAAVPRLEPARPGGAALHQPAPPRRAAPPPRRPPRRAVPVPPRAAPGGRLRLRLPLGAARGAPPATRPEKLLLVFARGVGADPARGLAEEFGAVEIDLLVDFVGEADHDSEEEEGWVSVSFHPNEDMRSFRAFEIDVVECGDEMLSSPLPPPPPPLPEMEVKEGSLGGEFSVFVRKMNMGSREMVNLDTTALVAIVSGISNGGVGKLMSIPEAETRARFKCNYKFVMDQAHSELQSPILVELGNAVDGKKCIICETVNSEFKEIVTMCGGPEEQTRSSQLLKRLIVVPDSPSARMMDLPTTRKLAMKNKVVFGTGDHWRAPTLTANMGFVRAVSQSGMPLLTIEHRPRALIGL

SEQ ID NO: 39175 - protein, 76 aa, Oryza sativa
MEKVSMRLVMVALVLVGIVLAASQEVVDASTCVATDSPELAEERKKLEKLTAIFSRPRGVCHASEGCRDEPLLIDD

SEQ ID NO: 39176 - protein, 507 aa, Oryza sativa
MSRRGLPWQSPAGERWDATSLAGALKAAAGVRSATHVMPLYAVLLKLGLSASAILATSLAHLALRCGLPGYARRVFDEMPHRDVVSWTSLITGHAHQGLYQDSLALLRRMVISGVVPNGYSLSGALLACAGIGPGALAAGKEIHARVVKMSLHGSVDAVVENGVLDMYTRCGKIDYARKLFGVMLVRDIVAWNSMMAGCLRSGQAEEALGLFSSMVSSGVDADGFSFAISVDACGELALLKQGMQAHARVIRGGFDSDVVVRNSLVDMYAKCGCVDSAGLVFRDALSSDAVLWTTMISAYGKFGRVHDAICMFDRMSQLGIKRDGVAYLAVLSACSHSGLVKEGWNYFKLMFHGQNSVKMQPEHYGCMADLLCRSGYLEEALDFITNMPFESSIAAWSALLNSCRIHGNAKLGQLAASRLVQLDPENHSNWVALSNVHASESDWHETWMIRESMSIECVKKEPGCSWVELHDGVHVFLMADQSQPELVDVLQTLDSLKEDIYWLMPT

SEQ ID NO: 39177 - protein, 493 aa, Oryza sativa
MAGGGGGGRASAQRRAALAALITLLLLASLAFLLSATGTASAPNSAPFRLAAIRRHAEDHAAVLAAYAAQARKLSAASASQTESFLSISGHLSSLSSRISLSTVALLEKETRGQIKRARSLAGAAKEAFDTQSKIQKLSDTVFAVDQQLLRARRAGLLNSRIAAGSTPKSLHCLVMRLLEARLANASAIPDDPPVPPPQFTDPALYHYAIFSDNVLAVSVVVASAARAAAEPARHVFHVVTAPMYLPAFRVWFARRPPPLGTHVQLLAVSDFPFLNASASPVIRQIEDGNRDVPLLDYLRFYLPEMFPALRRVVLLEDDVVVQRDLAGLWRVDLGGKVNAALETCFGGFRRYGKHINFFDPAVQERFNPRACAWSYGLNVFDLQAWRRDQCTQRFHQLMEMNENGTLWDPASVLPAGLMTFYGNTRPLDKSWHVMGLGYNPHIRPEDIKGAAVIHFNGNMKPWLDVAFNQYKHLWTKYVDTEMEFLTLCNFGL

SEQ ID NO: 39178 - protein, 45 aa, Oryza sativa
MHGELREIEIGEESGGFSLHGCSSNMTLFPTIWSSIYIIAARRWL

SEQ ID NO: 39179 - protein, 216 aa, Oryza sativa
MGGAVSGGGAGAAGAGAGAEGEGAYTVVLNVYDLTPLNNYLHWCGLGIFHSAVEVHGSEYSFGAHDHPTSGVFEVEPKCCPGFMYRCSIFIGRTSLNPLEFRDFIQRMASEYHGDTYHLISKNCNHFTDDLSTRLTGKPIPGWVNRPAKLGAFCNCLLPESMRLESTGTKHLADCHFSDDSRTSSNEHFEDEDLEDKHLLSQSSVSEDAIVKEVHR

SEQ ID NO: 39180 - protein, 185 aa, Oryza sativa
MLSLLPLRLPFSAAATHPNSTFLLQRAVRLPILPISPRASMSATAATPDSSASAAAAAVGGEVGKEAEDVVVQYVVLRRDLADAWPLGSVVAQGCHAAVAAVWAHRDHPDTAAYCGPDNLDRMHKVTLEVKGETQLKNLAEKLETAGVRHKVWIEQPENIPTCIATAPCPKSQVSSFFKKLKLCK

SEQ ID NO: 39181 - protein, 223 aa, Oryza sativa
MVGVHRRGALLLHAVQGGHHAGADAQHPGHREGGRHQQLGGHDEGDGGALLDGSTLALSMVVITAVATPLIKLLYHLSGRFGRAKRRTMEGWRPNAELRVMACLFSEDHAAPLLNLIEESGSSRDAPMSLIVLHLTVLVGHATSVLKPHRKSRSSCGNPTPLPTSSPSSTSSIPSLAASPSTPHSSPRRWSCSWCCASPARWWGRRGALRGTRPGSRPHLPPR

SEQ ID NO: 39182 - protein, 355 aa, Oryza sativa
MVPVRPSAAALLLAATAFLVVAVGAQPLSPDSPILRDPNVIPIYMTPGSSPTVASCYNQNNTASGPDCTVEPRACPRGCRDMCYVHCPTCKLVCLCELTGTECYDPRFVGGDGNKFLFHGRKDADFCLLSDANLHINAHFIGKRNAAAARDFTWVQALGIRFGGHRLYLGVRRTVRWDAAVDRLVITFDGAPVELDAVPAASWSPASVPALSVFRTGPANGVVVRLDGRFRIVANAVPVTEEDSRIHGYGLTADDSLAHLNVAFKFYSISADVHGVLGQTYRPDYVSAGVDVGAKIPVMGSAGKYAVSDIFATDCEVARFAGEDGALASSVGMVDAPADALFGSGKGSAGLVCKK

SEQ ID NO: 39183 - protein, 136 aa, Oryza sativa
MARTKQTARKSTGGKAPRKQLATKAARKSAPATGGVKKPHRFRPGTVALREIRKYQKSTELLIRKLPFQRLVREIAQDFKTDLRFQSSAVAALQEAAEAYLVGLFEDTNLCAIHAKRVTIMPKDIQLARRIRGERA

SEQ ID NO: 39184 - protein, 391 aa, Oryza sativa
MVQHHQAAANDDHQAIPLLTPYKQAGRPGSKLDLSHRVLLAPMTRCRSYGNVPQPHAALYYTQRATRGGLLITEATGVSATAQGYPETPGVRTREHVEAWKPIVDAVHRKGALFICQLWHVGRVSNNGFQPDGLAPISSTDKAITPDGYGMVYSKPRRLRTDEIPQIVDDFRLAARNAVEAGFDGVEIHGANGYLLEQFMKDSSNDRTDEYGGSLENRCRFAVEVIDAVVGEIGAHSVGIRLSPFLDYMDCVDSDPEALGSYMVEQLNKHEDFLYCHMVEPRMAIVDGRRQIQHGLLPFRKQFNGTFIAAGGYDREEGNKAVADGYADLVAYGRLFLANPDLPKRFELDAPMNNYDRNTFYTQDPVVGYTDYPFLDEHHHDDDDDSNAPSA

SEQ ID NO: 39185 - protein, 345 aa, Oryza sativa
MRLARQQQQVVVAATMEHDVHHHRQMMQQQQQQEMDLPPGFRFHPTDEELITHYLLRKAADPAGFAARAVGEADLNKCEPWDLPSRATMGEKEWYFFCVKDRKYPTGLRTNRATESGYWKATGKDREIFRGKALVGMKKTLVFYTGRAPRGGKTGWVMHGYRIHGKHAAANSKDQEWVLCRVFKKSLELAPAAAAAVGRRGAGAGTDVGPSSMPMADDVVGLAPCALPPAHVTCFSNALEGQFLDTPYLLPAADPADHLAMSSASPFLEALQMQYVQDAAAAGGAGMVHELLMGGGWYCNKGERERLSGASQDTGLTSSEVNPGEISSSSRQQRMDHHDASLWAY

SEQ ID NO: 39186 - protein, 145 aa, Oryza sativa
MPRATVRWRTSMGWSLGNPGAARSCALARRSTRCSRWFRTLSAWNPKVAPSQSKMSARCGSQTRASGGAGKSDACDSASTAARTSGTCSDGWSPCITTSWIGMMLYAACTTVCSPEPAAAAARRFRSKLISPSHAASCKKITRRV

SEQ ID NO: 39187 - protein, 208 aa, Oryza sativa
MAQNWKIQQIYHNGVLKGWKKILVLYKGSKKNKIVQANWVMHQYNLGVEEGGEDGELVVSKVFYQLSSKQTGTPEMDSVTEEASDALTIRSDPITPITNPPLPRCLMNSPCDTEQNGTISHDQEGECSTSTLRPMVEAGNRAGCSAGASTAGDFNEDLLQRCEFPEDPVPTLDDTLPFLYTDETDLFSWEDFQFGSQESFGWVDGDHT

SEQ ID NO: 39188 - protein, 130 aa, Oryza sativa
MPNISPFDFILSGAANRRERCRAHRSSGARSAHRRSDIVAVAINLDRAGASHHATSFTSTSSPFPLKNLEEWCYECGDRPPSSPPPVAVAIVDSASSAVAVFPELYTVAGPSSSPLPLSRLSGASFKMIA

SEQ ID NO: 39189 - protein, 255 aa, Oryza sativa
MDYHRIHPVGVGSPAPAPDSQQQVGKGRSTASYGEKEQLPITAPRPYAPAPLPPPPPRRRSRGRRCCRCVCWTLLAVLVLAVALGATAGILYAVFKPKIPDFHVDRLTVTRFDVNATAATVSDAFEVEVTSTNPNRRIGIYYDGGEVTASFNGTELCRGGFPALYQGHRSTVRPVILLAGETRLDSAVALQLARQQQAGFVPLTVWARVPIRIKFGTIKLWKMTGKATCNLVVDNLVAGRQIRIRSNSCSFKLKV

SEQ ID NO: 39190 - protein, 194 aa, Oryza sativa
MSSLRKCSRALEELGPSLPTNEGTSTAATENRLYPAHGPVVEEGRKMLKQYLDHRLEREAQVVELLKASPDGNSITTSSVTVGGIEYQLGAPWKIRQMVLKLYSNYPENLFPAAARGLYLHLRTLSSPDPEQGKASRVRCLQTTSFARRASAEAAADVGNCPPLPQSDHEWIEAMELEWALIAPQQASSNHQHL

SEQ ID NO: 39191 - protein, 50 aa, Oryza sativa
MSRSPTSVLTADLCNGEVASLRRRRSLLPRRRRGWTRMHSPKDIVAKNTL

SEQ ID NO: 39192 - protein, 249 aa, Oryza sativa
MELSPPSPAPAPEGRWADLPGDIAISVASRLQEADVCALGGCSRSWRRACDADCVWEALFRRRWPLAAAAGGGGGGEGEGASGVQGWKALYINHHRRTAVAISGVAEFVENNLRNGSLEAEYYLKAIANLASMRDIGFIDAQFFLLSRNYSAIMNLIGLHYSISSLNIPPNEVYKALQARKVEERKVCVSLYKLGRWFYGFRLPDESESHEISLSELTMSEGATILAILKRGAVHEVFRLQVSLVDINK

SEQ ID NO: 39193 - protein, 147 aa, Oryza sativa
MLPPPPVVIPLHHRQIRPPWRRRRRRHPTTSAVGSVLALVLARSSANLAALSSAASASKLRRHPRQTQPPERPSPPGLAGRRGFGRFPPPNAGQSPCPCAVRRSEAPPPLSLWPYGFAGSCSGGDEVEEGGRWATANGAPPVSPERR

SEQ ID NO: 39194 - protein, 149 aa, Oryza sativa
MSDGEEVPQQEVEAAEEVEVPADNASGSMSVLDALKGVLKISLIHDGLARGLREASKALDRRQAHMCVLNEACEEEAYKKLVVALCGEHKIPLIKVPDGKQLGEWAGLCQIDREGNARKVVNCSCVVVKDWGEESQERSILLNYFQTEQ

SEQ ID NO: 39195 - protein, 280 aa, Oryza sativa
MASESASASQWVSPSTRPEHIEQLISGVDRYNPQNLDVLHDYLAQQLDDGSYDLLANLAILKLYQFNPADFNYVVVINILLKALVAAPFPDFNLCVSLLGEAPLSTVPVKAEKEATAGDDAGSLAGDEEEAVAEKPKDIASAGHLTDALIVRLSQLSTLLFQARFREFWSTLNSAEYSDVREYAAKISEFEDAARKVALNSVKGSFTSISEKRIGSYLNLSGSELESFVNAQPGWKLANGTVSVPANPDNEIKATVIREEISLDQMHKFLSQAQSPILRA

SEQ ID NO: 39196 - protein, 122 aa, Oryza sativa
MSYVAKDKDVDASAPAAKIHKIRITLTSRNVKNLEKVCTDLVNRSKDKQLRVKGPVRLPTKVLSHTTRKSPCGEGSKTWDHFEMRIHKRLIDLHSPSEIVKQITSISLEPGVEVEVTILSSN

SEQ ID NO: 39197 - protein, 171 aa, Oryza sativa
MPPVNAGTAAPDSGTGSIAANDGDGDLHGEQSKLVAISDEAPNVDRALATSRPATADGAGGGDDVSPRLRRRQRRRLLEIKKRGLEVEEQTLALEQRRLRWAAADAEARREEDAELEKMRVENGVARAENARLWRRLLRRRRERELGVGGVRSNKCRDGAAAMEGEEKSVP

SEQ ID NO: 39198 - protein, 82 aa, Oryza sativa
MVYAENKEMPAPLTIGIRLRGVLPIPGCSARGTSILVAEVEIMVSIEERFVREVNFWVMQPDYRPRFVSIDDGLRYLQQFLL

SEQ ID NO: 39199 - protein, 294 aa, Oryza sativa
MADRTTRSTPPPQWAELPTDCLVHVFRRLDLDELASAAPLVCRGWRRAAADPSLWRALDLRRDHLVRFMPWGALAGALARLHGVHRFTLAGFLRLCVARAAGTVADLALPPLLSSSELDHVAAECPALRRLALPELPPADDARLPSLLPRWRRLTHLELDSKPSSFPAVAAALALHCPDLAVLRVTSGSVKPEDAAAMAAASPLRGRLRSLCLDRCYLPRQELLAILAGCGGAAPLREFTARFCVGFDDKDEEVLARGAAIERFDIGGSRLLDEPDGDATNGDDYCDSSYVDVI

SEQ ID NO: 39200 - protein, 51 aa, Oryza sativa
MVGVVMPIESSVASSMRTSSTAAIFLFQDRHATVLASSPLPLAESCISYRP

SEQ ID NO: 39201 - protein, 157 aa, Oryza sativa
MTMSVSGMAWAHAVMGWAAVAFALFVLAITTADASSSQGPCAAYGGGSGGATFMRAGAALVLLSATAQAVAATAARAAANGARFLSGFFALVAHFAGAYTAAVLSELVPVVVAAAGGVCAASGYKHMLVAHYVVLDIPLIVFYLAGFVALINQYHLE

SEQ ID NO: 39202 - protein, 184 aa, Oryza sativa
MAGQVFVHHLGGGSGGDDPTHPWLSLKSSHEMDDAVASWREKLADMAAADERAGRYPCPLCDRHFPTEKAVHGHMRSHPGRGWRGMEPPREPSPGDLALAADGKRYRYVCDRCKAPFETRQALGGHRASHSTKKGCSWHAKQLAMAKPPKNDFDLNHLSLEAIQAAAQEEQAAQEGNKDEEPKN

SEQ ID NO: 39203 - protein, 170 aa, Oryza sativa
MKEMRAYLKKNSRIGKYLNLHPSSYRPMPSSETAAKRKQAPDALQFGRPTPKQTTSVASMLCKAPEEVDEDIHAKGPSQSTIEQCTRQYNGKQMVHQQIANLFSEFDIPFAAAHSRSFETMVQSIIQFGPGYKPPSHQDWWVPLLVGAKETTLGASGNMGDLNESDDDIW

SEQ ID NO: 39204 - protein, 330 aa, Oryza sativa
MAAADGTSGTDPAHELIRCLAGLPTSELARFTLQRPEVARVFAASLNALAVHTASSLVPPANVHSHAQSYVEILARLIERGDPSLARTFVPTHGALVDLAIVTPPTATPLLVAVLERLLDTSNAQQILAGLHAQLESIAGSLSEDGSAVVLTRTLARLAYAFLSACPARLLKDSADTLAAFARTCFQLYDQTLPHAASLAGGAGARGSAGEVLSLDAAQVDTGSWQAQWLTCRVDVLQLLVLVLASLESYIALTGELKQALVVTQQLLVRGGSSALINSTALLDVAATADAWLAVRAQILAALANDRSYGETLSSIEALTSTVPRFSGAA

SEQ ID NO: 39205 - protein, 292 aa, Oryza sativa
MAGQGPVVPKFGSWDAENIGYTVFFDKVRENKTAPTPATAAPATHDDDYEFDPYEHYENLSRKAASRPPSSHGHGHGHAPPPAHHHHHHRAPPPPQQQQHHHHYPASQRSGNGYHRRSGSNGSSAASEASSRGSKFSPPKPYQPRYSSNSNSGGGGGGYGYGGPGAGAYAAPPQMHHHHQQQQHAAQPRVAASPPRHALPQVSRAAKAASAVPKFGVWDEQNAAAAGQGFTVQFEKVKRHREVAKAAAAAGPDVTPRMSPAQAAPARHPRRKAEKRSFLSKVYRCMFPRVRE

SEQ ID NO: 39206 - protein, 204 aa, Oryza sativa
MAIISIAGHLLALILAVAVPASAGGLPVRLRLYMHDITGGPGQTAVQVVNGTGPLHPAMPPGSHFGDTMVVDDLLTDVDDSKPVGRAQGSYTLACLRAPVFVVSITLVLTDGPYKGSTILIAGRDDISEEVRELAVVGGTGKLRRATGHVLWTTARRESPVHMVLELDVYAWVPASSSPARRWSSLLRGTNVVTADVDDADSYF

SEQ ID NO: 39207 - protein, 317 aa, Oryza sativa
MEFVSQQFNSTVGSLLNPATTQLAADLYKNTDLASLNVFEKAWANWYLYWGNPVLATGIMSFMLHEVVYFGRAIPWIIIDAMPSMRKYKLQDDKVPTPEQQWKCTKYVLLSHFTVELPQIWSFHPICEYFGLATHEVPFPHWTKIAWQIGLFFLFEDAFHYWAHRALHWGPLYKHIHKKHHEYSAPFGLAAEYAHPLEVLILGMGTIGGPFMLCAFTKDMHILTVYIWIVLRLFQAIDAHSGYDFPISMHNWIPFWAGADHHDYHHQAFVGCYSTSFRWWDSFMGTDLSYKRARARQAEKKRQALEGSAKAATAKAQ

SEQ ID NO: 39208 - protein, 164 aa, Oryza sativa
MASTARVAAALFLLLLGLSATAPLAARDLMSAAPSAKKQPAGRKPSVQPGYPGTNPGGGGGGGIPTIPGFGSIPGMGGGMGGFNVPGMGGGWGGGYGTPSGGYSRGGVVVPTVVCSDKGPCYRKKVTCPKKCFSSYSSSGKGYGGGGGGGGCTIDCKTKCTAYC

SEQ ID NO: 39209 - protein, 108 aa, Oryza sativa
MANCRRRMTSPLSSLVAVLLIVVAVQSRAWALDQLDDMVPMKTAKPVVVAIAGGGGSGVVGTLAAPLCLQCRCCSKANPSNCQLTSCSSTFNCDPAGKCTLVQQRCGC

SEQ ID NO: 39210 - protein, 485 aa, Oryza sativa
MKCVVFCLAVVLGAASAVPKWADYPCPGACPQVYKPVCGSDGVETKTFSNECVMRAHGCLESQRFEVKSSDVCPEEHVPEVKAERPTRLCGACLMVWEPVCASNGQITKTFSNKCALRVHNCKHPEEAQFVMSRSGECDGQAVAQPLAAVEVERPARLCGACLMVWEPVCASNGQTTKTFSNKCALRVHNCKHPEEAQFVMSRSGECDGQAVAKPLAAVEVERPARLCGACLMIWEPVCASNGQTTKTFSNKCALRVHNCQHPEEAQFVMSRSGECDEAQAVAQPLAAVEVERPARLCGACLMVWEPVCASNGQTTKTLHNKCALRVHNCQHPEEAQFVMTRSGECDAQAVAKPMSFNVNLEKPVRDCGVCPLLYAPVCASNGQKMMTFSNDCSLRVYNCEHPLAAKFVMTRSGDCETDEVVEPIVAEPVAERKPDCGICTFIYLPVCASDGKTTRTFGNKCTLDSYNCENPNSAKFVMTRAGEC

SEQ ID NO: 39211 - protein, 398 aa, Oryza sativa
MSFATPAVRWQDTVASHLPQPLKDSGVPPQYFVLVPATLLAVLLTYTLTRSSSKSAAHLVSAGGSTDDEYTTKRSHNRASTVVLVGLSETGKTSLFSSLVYQTTPATLPSQKLSQGIVAPSSLDGGLKPVTLVDVPGHARLRPLVDEHLSQADGLVICVDAVMASKTSLSSRPGDAESITDVADLIHATLTALAKQRARSSSRTAPPSVLVLFTRADLSPLLGGAGAGTDAAKDDKRRAQLLARCRTALESELGQRRANMGLGTRRAGNVKIAGLGKVAEADDVVASGGVFGWIRSKLGLGASGSNVSADAQEEDDEHDDEVVDYIDWAAAQRAQASDGAGIGAAGFSLDRLDEQVVFGGKLDVALASVGKVRSWAQDATPDTDPLADFKTWIADLQS

SEQ ID NO: 39212 - protein, 322 aa, Oryza sativa
MASTDADADAVAVELLPFIRVYVSGRVERLLGTDTVAASLDEPTGVASKDVTVDPATNLSVRLYLPPAVAAGERLPILVYFHGGGFMVESATSPTYHRYLNALASRARVVAVSVEYRLAPEHPLPAAYDDSWAALAWAVATAAAPGAVDPEPWLAAHGDASRVFIAGDSAGANIAHNVAMRAAAAPLPGGAGITGVLLMHPYFWDASNTMGPALEDRIRREWRFMCGSPDVRVDDPRLSPTVQQGAPSLAALPCRRVMVAVAGDDFLAGKGRAYHAALVASRWHGEAELVDTPGEDHLFHLTRPGTAAAAKMMDLVVDFVTR

SEQ ID NO: 39213 - protein, 367 aa, Oryza sativa
MVAALVVPLLVGLLAVAAAPAPASAERAFFVFGDSLVDNGNNNYLITTARADAPPYGIDYPTHQATGRFSNGLNIPDIISEHLGAEPALPYLSPELRGDKLLVGANFASAGVGILNDTGVQFVNIIRIGDQLQYFREYQRKLMALVGEEQAKRIVNGALVLITLGGNDFVNNYYLVPMSVRSRQYAIQDYVPFIISEYRKILSRLYELGARRVIVTGTGPLGCVPAELALHSRRGECAAELTRAVDLYNPQLVNMVRGLNRAIGAEVFVTANTNRMNFDYISNPQNYGFTNVQVACCGQGPYNGIGLCTAASNVCDDREAFAFWDAFHPTEKANRIVVGQFMHGSTEYMHPMNLSTILAVDDEERRL

SEQ ID NO: 39214 - protein, 180 aa, Oryza sativa
MTVRSETGGAATTTTVVVAAAVDAPPPWRLRRQRSVPAAVVATFAPCVGIGGHHAPRRVLRLGGNKAAAAAAVHHRRGEAEEEGEYFDSGGGVGVLRALWRRIVRGRRWKVMSRSGSSTARRREQYAQDEYEQNFDEGAAAAGGEPEPEYLSRSFSARYAAAGGGRRSAGLARFGVSRAN

SEQ ID NO: 39215 - protein, 383 aa, Oryza sativa
MRALVVAVLALAVAVAATTSDDQRKKRGIYGEGLALGATGYASGYALGGAALGLGHGLALGGHGLALGGHGLALGAPALGAAPLALGAAPLALGAPAIAAGPALALGAAPAFAAAPAIAAAPAPLALAAAPAPVAVAAPAPVALAAAPAPVAIAAPAPAVSVAPAPSVSYGTPTTTVRDGGPTVREGEQIGQPYLISIHRDTIRRYGIPVAKPYPVPVHRNVEVRIEKQVPYNVDRPYNVQVNVPTPVAVDRPYPVPVDRPYSVQVPQPVPVPVPQPVAVPVAQPVPVPVPQRVVHVAPPQVIRTAIAAPAIAAAPAYAPAIAAAPAIAAPAFAAPAFGAAIAHAPIGLHAAGIAHAPLGLGLGLHAPLGLGYAAHAHAIHLK

SEQ ID NO: 39216 - protein, 167 aa, Oryza sativa
MGGSAAAAPPAPAWMAAGARRWLEEAGVAFDGSDRRAFNALPLAGARVSLAEAGRAVCSLRVTAELTDAEGNWHPGAIAAAADDVCAAAIMSVEGIIKVSVHYDISYFSPAKLHEEVELDGRVVEQKGKMTAVTVEIRKKDSGELVAIGRQWMSTTRPKKDQASSKL

SEQ ID NO: 39217 - protein, 33 aa, Oryza sativa
MVAVATIMAEEETAALSCRLRGVRKWRAASRGD

SEQ ID NO: 39218 - protein, 122 aa, Oryza sativa
MAVTTAGAGAAEYTHPTPGSSRSLPPPEAEAAVEATTGAAARRGNSGDVGHAPRRRRPAAWSELVRLAAAAEVPPAGVVRGRHARRVPQPSRRQTGTHGQRHARRPPPGCRTAARRGSRRSA

SEQ ID NO: 39219 - protein, 100 aa, Oryza sativa
MSGRITHRNGAPAAASPRANSPTCALPITVMLPKLAYTTAASAWASSHAAHRPSSLYRLEAREGRYDGGETSGPMGPRRWCWGGGRGWRRARRAPGRRRC

SEQ ID NO: 39220 - protein, 316 aa, Oryza sativa
MAEQLVLRGTLEGHSGWVTSLATSLENPNMLLSGSRDKTLIIWNLTRDETSYGYPKRSLHGHSHIVSDCVISSDGAYALSSSWDKTLRLWELSTGQTTRGFVGHNNDVLSVSFSADNRQIVSGSRDRTIKLWNTLGDCKYTITDKGHTEWVSCVRFSPNPQNPVIVSAGWDKFVKVWELATCRIQTDHIGHTGYINTVTISPDGSLCASGGKDGTTMLWDLNESKHLYSLTAGDEIHALVFSPNRYWLCAATSSSIIVFDLEKKSKVDELKPEYVEVGKKAREPECISLAWSADGQTLFAGYTDNKIRAWGVMSRA

SEQ ID NO: 39221 - protein, 265 aa, Oryza sativa
MLPGRHTPRRADAAAAAAAMEPLVPGATRAALSEFVATAVFVFAAEGSVYGLWKMYRDTGTLGGLLVVAVAHALALAAAVAVSRNASGGHVNPAVTFGVLVGRRISFARAALYWAAQLLGAVLAVLLLRLASGGMRPMGFTLGHRIHERHALLLEVVMTFGLVYTVYATAVDRRSGGGDTAPLAIGLVAGANILAGGPFDGAAMNPARAFGPALVGWNWRHHWVYWLGPLIGAGMAGALYEFVMAEQPEPPAAADTRLPVAAEDY

SEQ ID NO: 39222 - protein, 248 aa, Oryza sativa
MRSHLAGRKHKSMAAATAKAKGAEAAASTTMAAAGKVGGNLEAGAMAVAEGVATNNVADNTCPEKGTVDIVVGGEHHAVKQIGEFLGCASCNVMATSESGMRLHLAGKKHRNKSMAEKAAMDDMEIVKARSKETAAAAAASSPSSAPRAVVAAQTGDGSVAPMEVDQTAEARDGGAPVAADAAAAAAATGGQQQVKVQVEGRMLAVLREANGALLCEPCGVRCSGKTDMVLHLYTKEHSDKCGAHPPA

SEQ ID NO: 39223 - protein, 201 aa, Oryza sativa
MGALLPAPAPAGLPAPADDVGWVRRRLQGGERRSQEAGPGAAVGAVAGAAAEPRAEGRRAAADSGRARVDAQGAGGGVRRRRQPRRVAEVRGAGGVLQPPHVRGASEGGRGGVRLPAPRRHHHPLRRVAVRARRRRGGRREEGVRQVVASGGGWGWCKYAFHQNGLILFSCSVLCFSMDLASHLEANFFLDMCVPGSSWNH

SEQ ID NO: 39224 - protein, 142 aa, Oryza sativa
MPPKPAEKKPSSTAGKAPASSAGKAPSEAAKKTSKAPAKSGEKKKATKVRKETYSTYIYRVLKQVHPDTGISNKAMAILNSFVQDIFERIATEASKLASYNKKSTISSREIQTAVRLILPGELSKHAISEGTKSVTKFSSSK

SEQ ID NO: 39225 - protein, 241 aa, Oryza sativa
MMRKSRGGRVPNKIVSINAAGDRLVCGDVAESVTYIVFKPKANRMIPFADDTIQRWTTASAMVDYETTVGGDKFGNLWVLRCPPQASEEADEEGMNGFIVNERPYLGGAPYRLDCRAHFFVNDVPTSIKRTPLVAGGADVVFWSGISGTLGILVPFVSREDVVFFQSLEQALRTEEPPLTGRDHLMYRGYYQPVKGVIDGDLCERFMALSYDGKARIAAELEREPKEVEKKVVEMRTRVAF

SEQ ID NO: 39226 - protein, 216 aa, Oryza sativa
MSAAAKAKASGGGRRGGAKDPTDALRSDKKRRDMDDSDDAELDSDMKEIVLLLRQIKDKAHKDGQKKTEQTLSSVATEIQTIVQDAKGKFEKERQNYLKVLSKTSKECEGLLKNEYTKFQATHDKFCKEKAAHMQTLKDLFSKFEDAKEKLLIQYELQRKKEKATLSELEKTFSEKITNAEESLKKMKQDDKSIVNLRKSIGSFLDPDDEFGADDD

SEQ ID NO: 39227 - protein, 199 aa, Oryza sativa
MAMVMLPAASAAAAASVLALLVLTSLQPRAARAQVASSPWAAPAPWPGELDCTGALLNLSSCLTYVEYRSTLTRPDKGCCGALAGVVDGEAACLCGLVGGYGAYGVRVDAVRALALPTICRVDAPPPRLCAALGVPVAEPPGGAVPEESGLSGGMPANAPSTAATGSSGGGGPATHRPTRRHLILLLLLLVFPASLLLL

SEQ ID NO: 39228 - protein, 189 aa, Oryza sativa
MGAGRGSNGAVLGIGVAVVTALLAWRCAAAAAQAPPVASTDGGGSGCMPELVSLSPCMGYMSGNATAPAAACCSALSGVLRSSPRCLCMVLGGTAASLGVAVDTARAVLLPGACSVQAPPASQCNAAGVPVSSPANPTTSGGTPATPAGTPGSKTTPASTTQYSDGSVNRSRVILVILVAAIVVFLDHF

SEQ ID NO: 39229 - protein, 85 aa, Oryza sativa
MAVAVASSPPLWSSPRCPPRLRRRASLPSLSVLLSSWVWMRIFDFSVESCFPLTRYSESLESNKVTRTWLRHGPHPFSPPRMQTV

SEQ ID NO: 39230 - protein, 199 aa, Oryza sativa
MASSVGDSTAAANGGGGAAASAAPPEAAGKGSATISVTVVLLVLLVASVAAFLMSPQPGGGKPPVEGVSGGGDSDGTRGGGGGLEGVKGAEPVEQAVGPGAAAIPGFNSRLDAFRAWAKLTWMKLRRPHSGEPRRYDDDAGSSGSAADAAKRSLEMTKETVEQAAASAARAAGNAVGKASDKVKGAASPAKRAPSDAEL

SEQ ID NO: 39231 - protein, 127 aa, Oryza sativa
MARKMIMVLLVEDEEINRVVARAALKAAGGGDVVDEAENGEVAVQRVRDAAAPYDLVLMDKQMPVMDGHEATRRIRGMGVTTPIVAVSSDGLPADVDAFITAGADDFTSKPLSKEKLGVILAKFRLA

SEQ ID NO: 39232 - protein, 207 aa, Oryza sativa
MATRLLLLLLLLLGMSLKGSEGAWCVCRPDVAEAALQKALDYACGHGADCAPVTPSGSCYSPNNVAAHCSYAANSYFQRNSQAKGATCDFGGAATLSSTDPSSGTCKYPATASAAGTSTGTGTAGAGTGTGTSTSTSTSTSSPGSSTAATGTPIMGGTFATPIGGGASGPTTSALNPDSSEAPSPSLGRHLLLTCIASMLLSNFLLA

SEQ ID NO: 39233 - protein, 169 aa, Oryza sativa
MARFAGSLQLYCLSVLLVILTQLGGGSAMGLPRPPPNVNFTIGVEGAVWCKTCRYAGYVKSKDASPLPNAAALLRCRWGKWALSVWGATDARGYFLIQTGTQVAAFTSKDCRVYVPRSPSRAACGVALQPGRKTGSPLKFRRFVALPDGLQGRYSAGNFVFGPRDPKKC

SEQ ID NO: 39234 - protein, 51 aa, Oryza sativa
MSAAGLASHVTVPPVSPAAVPSPLSLASPASLRRTPLSPLPRIACLPSPLP

SEQ ID NO: 39235 - protein, 388 aa, Oryza sativa
MRHPGAGGGSGDAGFVRADQIDLKSLDEQLERHLGRPAERAASQHGGSGSRRGESARLGLGEEPPQAPHHQRRREDWEIDPAKLVIRGVIARGTFGTVHRGVYGGQDVAVKMLDWGEDGHRSEREISSLRAAFAQEVAVWHKLDHPNVTKFIGAIMGARDLNIQTEHGHFGMPSNICCVVVEYLAGGALKNFLIKNRRRKLAYKVVVQLALDLARGLSYLHSKKIVHRDVKTENMLLDKSRTVKIADFGVARIEASNPSDMTGETGTLGYMAPEVLNGHPYNRKCDVYRFGICLWEIYCCDMPYPDLSFSEVTSAVVRQNLRPEIPRCCPSSLANVMKRCWDANPDKRPAMAEVVSMLEAIDTSKGGGMIPTDQPQGCFSCFGRHRGP

SEQ ID NO: 39236 - protein, 117 aa, Oryza sativa
MRAISSAAGGMLRARLRGGARVRGGGGHGEGGGRWTTPGHEEQPKGYLFNRPPPPAGESRKWEDWELPCYVTSFLTVVILGVGLNAKPDLTLETWAHQKALERLQQQELASGEAQAE

SEQ ID NO: 39237 - protein, 107 aa, Oryza sativa
MLSESTVSKDLDPPAPGAPRWRRQSSEAYSPQSSESRTSNLAAAASASTAAAAAAARRRSSPCSPRPAEGERRERERKREGRKSGGRRRERMACGPHMAVGPTLYNF

SEQ ID NO: 39238 - protein, 301 aa, Oryza sativa
MSRRAVACAGYAGMDDGGGGEGMMIMARRRRLVVPGIIATAGGGVRLRPATKGAYTCARAQRARGPSLATDQSLDIERANVHVAYQGSPGTAIEEMVFKAFPDCIAVPCKKFVAAFEAVDSSLADIVVLPIENSSTGSFHQNYDLLLRHKLHIVQEVQVEIELCLWALPGVQKNDLRTIFSHPEEFAQCEHSLSSLRVIKKNVDHCAAGAEIISMQNLGDAGVIGNAQAAELYGLNIVECNFQDASPNLTRYLVLAKTADIPKEYGQYKGRREYDLLHFPIKCPVLQVSCPDLSDKHRFRS

SEQ ID NO: 39239 - protein, 467 aa, Oryza sativa
MSLQTPRIGRLLSRQALHAPIRRRAFHRSSRLDVVKPFLLADIGEGITECQLIQWFVQPGARVEHFDKLCEVQSDKASVEITSPFDGVIKKLYYEPDDMAVTGRPLVDIDMDGDEAEAEAEKLGEAETSADKGENTKVNTASHETESRPTERRRNGNGKDDFSSLATPAVRHLMKELNVNITDVEGTGRDGRVTKEDVHRFVSQKTQQQMEVESPSTSPASTSASTSTLSTATQDQKLPLTPVQTQMFKVMTKSLSIPHFLYSCSADMTSVTATRKKLNAMKTSEKLTHLPFIIKATSLALQQHPLLNSALDTSDPKKPSLTYRSSHNFGVAVDTPSGLLVPVIRDVQNLSIAQIAQQLKALSEKARNGKLAPGDFSGASFTISNIGSVGGGVVAPIISEPQVAILGVGRSKVVPAFDENDQLVRREELVLSWSADHRVVDGAECARCAEKVKGLLEEPTAMLLEMR

SEQ ID NO: 39240 - protein, 403 aa, Oryza sativa
MSAAQQRHGKKNILAEHDDDVVIVSALRTAITKAKKGGLAQCAPEEMLGWTLKGVIAESKIDPKLIEDVAVGTVLAPGGGSTQARMGSLWAGIPNTAGCNSLNRQCSFGLAAVNQIANQIALGQIDIGIGSGVESMTLNYGAGVMPAKMSDAVMENEEAADCMMPMGITSENVAKKYNINRQKQDTFAAESFSRAAAAQKAGKFKSEIVTVKYTDDDGNERTVDADDGIREGVTVESLGKLKPAFAKDGFTHAGNASQVSDGAASVLLARRSAAKKHGLPIIGKFVTCAVVGVPPNIMGVGPAYAIPRLFELTGLTKDDIDIFEINEAFASQALFSVEHLGIDKKKVNPVGGAIAMGHPLGATGARQIATGLAEAKRQGGKKLIVTSMCVGTGMGCASLIVSA

SEQ ID NO: 39241 - protein, 305 aa, Oryza sativa
MAQQNGTPSNDFTVKAGLAQMLKGGVIMDVVNAEQARIAEEAGAAAVMALERVPADIRVEGGVARMSDPAMIKEIMEAVTIPVMAKARIGHFVECQILEAIGVDYIDESEVLTPADDVYHVTKSTFKVPFVCGCRNLGEALRRISEGAAMIRTKGEAGTGDVVEAVKHMRTVNSQIARARAILQSAADPEPELRTYARELEAPYELLRQAAELGRLPVVNFAAGGVATPADAALMMQLGCDGVFVGSGIFKSGDAKKRAKAIVQAVTHHKDAKVLAEVSEGLGEAMVGINVQRMPEGDKMAGRGW

SEQ ID NO: 39242 - protein, 258 aa, Oryza sativa
MDVAGGGEEVEEVEAVDGGEQQPPMEIGWPTDVRHVAHVTFDRFHGFQGLPVELQPEVAGNAPSASKTVFGVSTESMQCSYDARGNSVPSILLLMQRRLYEQGGLKAEGIFRIAADDAQEQAVREQLNSGVLPEGGVDVHCLAGLIKAWFRELPGGMLDSLPAAEVTRCQSADDCARLCARLPAAKAALLDWAVQLMADVAREERSNKMGSRNVAMVFAPNMTHAMDPFTALKHAVHVMNFLTMLIDRALNDVQTCNN

SEQ ID NO: 39243 - protein, 208 aa, Oryza sativa
MDMISGMLRPAFDRITPSIASAAVFSFSRVVSFTGSFNSRTGLLTAADGEEETPLSPQAIETTASTGGVGAFDIEAPAAMTTTPDQAVLRDDVRGDDELIRRLSKSVQPVCLFCAAASLTMSVNLPASGGAGGALYGATLAFVCLGLFASLGLSMYTIVSRPGDAAVARVQKWAMVLALAFVLVSFTLRMWPVLVSSSSSPAPPPRST

SEQ ID NO: 39244 - protein, 447 aa, Oryza sativa
MRATTGARHLHPPWRRGLRHHRQSTMPPRASRGRLADAALFTAGAVLGSVLLLTLASPFSSSSSPSSGVGSGEVDRLGGGRTFYDDPGVAYTIDRPIVGWDEKRAEWLRAHPELAGGGGERVLMVSGSQPEPCGSPAGDSLLTRLLKNKLDYCRLNGVQLLYNTALLRPSMDRYWAKIPVVRAAMVAHPEAEWVWWVDSDAVLTDMDFRLPLSRYRDHNFVAHGWPHLVYESRSWTSLNAGVFLIRNCQWSLDFMDAWAAMGPDSPEYQHWGAVLTSTFKDKVFNESDDQSALVYMLLQSGSPWRDKVYLESDYYFEGYWLEIAGRLGNITERYEAMERGAAPLRRRHAEAEHASYAAARDAALAGAGLAESGVSGWRRPFVTHFTGCQPCSGHRNEHYTGKSCDEGIRRALSFADDQVLRAYGFRHAGPLSDAVSPLPFDHPTQTA

SEQ ID NO: 39245 - protein, 314 aa, Oryza sativa
MRYAVASSIAFAAAVVATPVAQGVTEQIKPDTSAPSGCSPSYDGDFEIQVVNVTQSASKRSLNKRQQADAEKLEIALKDGVLTDSKDRTGYIAANHQFQFDGPAQTGAIYTAGWSACSNGSLALGDTTVFFQCLSGDFYNLYDESTGEQCNEVHINIVKGGASGASQAPDGQPQETPAVSAPVSQIGDGQVQASTSGAPVSQISDGQVQASTAAATGAPVSQISDGQIQASTSGAAVSQIPDGQVQAAPTVSPVAQIPDGQIQAPYSNGTTTKPATPSGTGVGEQPAPFEGAATKAYTAGAAAVVALFGLVVAL

SEQ ID NO: 39246 - protein, 164 aa, Oryza sativa
MADAGHDESGSPPRSGGVREQDRFLPIANISRIMKKAVPATGKIAKDAKETLQECVSEFISFVTSEASDKCQKEKRKTINGEDLLFAMGTLGFEEYVDPLKIYLHKYREMEGDSKLSSKAGDGSVKKDTIGPHSGASSSSAQGMVGAYTQGMGYMQPQYHNGDT

SEQ ID NO: 39247 - protein, 230 aa, Oryza sativa
MEMDIGEGESCCGRRKQQQQQNISSSKSRKCCPLRRSRKGCMKGKGGPENQRCPFRGVRQRTWGKWVAEIREPNRGARLWLGTFNTALDAARAYDSAARALYGDCARLNLLLAAATAGAPPAAATPSVATPCSTNDDSNNSSSTTHQQQLTTMLQLDDDNYTLQPSSSDQEDFETYVTRLPKAEDFGLEGFQEVPLDVLDEAGGGISIWDLSICPADFMATAATTTAKSS

SEQ ID NO: 39248 - protein, 176 aa, Oryza sativa
MGFPSVCYCVILPQPLVLVLQLLDLLRHAFLLCLSALGLAAPPLPDEHPAYAPPPPPPASMAALPADLVWAFQPAPEPAAIKARLPAVRYADFVRCRRAAAAAAASCVVCLGALEARHRVRELGNCAHAFHKACIDKWVDKGQATCPLCRAALLPSADDADAAAIAATTRHHLPSF

SEQ ID NO: 39249 - protein, 215 aa, Oryza sativa
MDAASCVGVAPAALLSRSFSDAAAIARALHFSLCDSSPLPEPTTHQYVAATDVDLGACGVAVAAPTPAVSSENAVVLKTRASLSPSARCRLGPAGGGRAGKRRPRPSKRAPTTYISTDAATFRIMVQQVTGAQVEPQDDACLGLLMPPPPFDVVDPAALLPADTAACAGAAHVATCVPHPLHAAAAAAAAVAAPEQPCFPTLDSWNVMYGKDEVV

SEQ ID NO: 39250 - protein, 143 aa, Oryza sativa
MGICMSSVAVWKEKVVYAGRRRGEVAGAEDVGGVGAGGGCGGPYGLLGVDADADVLEIEEEAAEKVVKCGAEAEAALTVAAGGTPARPIWQRKVLMGVKCQLPRFSGMILYDERGRPVCSGVRDRARDKEKHAAAIMVLRDML

SEQ ID NO: 39251 - protein, 66 aa, Oryza sativa
MSCSSKPVKARISTSGCPSLRTAPPSRCTVRTSTPPRSSTSPATVSRAPVPSSASTPASTSKPTPA

SEQ ID NO: 39252 - protein, 76 aa, Oryza sativa
MRGNSASFRLRIWFGTKGECPYARIPSLVDVFKICSRYLPRGRDESCDGEGPSFRARLLATDVCGESCLLDVVEMP

SEQ ID NO: 39253 - protein, 87 aa, Oryza sativa
MENDRGELVDLYVPRKCSATNRIIKAKDHGSVQISIAKVDENGRYTGENQVYALCGFVRAMGESDDCMNRLTQRDGYLKGVWNASGN

SEQ ID NO: 39254 - protein, 156 aa, Oryza sativa
MIISKENRKTIYASLFKEGVMVAPKNFTVQHPELEIPNLEVVKALQSLTSRGYVHTQFSWQWYFYTLTDEGVEYLREFLHLPAEIVPATHKRPARPARAPVGGRDGAYRAPRGDRDGGDREYRRRDGAAAGDKKDGAPSGEYRPRFAGVGRGAPRQ

SEQ ID NO: 39255 - protein, 187 aa, Oryza sativa
MAISAAAAAAAALSFPRALPSHSNLAATATAGAARSHPPARTPSAGSPSTRAPHSTAATAPRAATSPSSRPPSTAAPPAPPPRSSASTPCAAAASARSATWRRSAPTSSGPTTPPRRSAPSSSATSPASSGRRTGGGRCRTSTPPGCSRSATSAASTSTSSTWTRSAATPRTSGRRCWRSELGAYCI

SEQ ID NO: 39256 - protein, 431 aa, Oryza sativa
MSADLVTVLAEGTFEEQIVEVSAFLSRSQAEASRNDFIQRFQQLALEAEPAAPAAADAAEDAAVSSSDAGKKKQTVQQLVSEVRSLGEGTDRELEGVYNLLASLITSTFGDDAAQSAQLLSTLVGAVGKEGAADKNNVRYRILSNLFNSLPATSAQRLGIFNALLALAAANDDLDYLTSSLTALPQWLSQWEVSEADKAACLESVAKALEGAEKEHGQTNKAYQFLLLHLRFISNSAGGADTKQAAERTVAAALRLPKLYEFEELMQIKAVLALNGTPVFELLKIFVGGNAKDFAAWNKANGAELARLGLDHDQLVHKMRLLDLADLCALSVSSDVAYADIAKTLEVGADEVEVWVIDVIRAGLVSGKLSQVNEAFRVYKSTHRQFGKPQWQQLEARLVQWHTSIANIIDTIAATRGGKLPDAIADTAVQA

SEQ ID NO: 39257 - protein, 241 aa, Oryza sativa
MEELAPELIGPRISFSHDGVVATAGAATPAARSDTSLVVVMSSWRRLPEPEFDFANAAAADVAPADRLFAGGKLLPVPPLPPVHPKPSPCKQQQATSGGGVKPTSYQRRPGSWTSPFTRSCSVNSATTAAPRSGSGSFSCPSFPLMRSRSAGSAAAAQGGGLGGVVSGGGHHRPPQHKKAGATAAAYYYGGSRNGSSGHGVRVSPVINVPSIGTSMVNMLSYLLCDCGNKTTKNRGFGLNC

SEQ ID NO: 39258 - protein, 402 aa, Oryza sativa
MAPPPPPPCSVRAAGSNPIGCLEVAEPWSGAAPPPLPPLPGHLHVAAPAAEDDDDALAAAAAAVPSEQRVHDVVLKQAALAAAAPEMRRPAQLAERERVAGGLNAAFDRCGEVCKEYAKTFYLATQLMTPERRRAIWAIYVWCRRTDELVDGPNASHMSALALDRWESRLDDIFAGRPYDMLDAALSHTVATFPVDIQPFRDMIEGMRLDLTKSRYRSFDELYLYCYYVAGTVGLMTVPVMGISPDSRANTETVYKGALALGLANQLTNILRDVGEDARRGRIYLPMDELEMAGLSEDDIFDGRVTDRWRCFMRDQITRARAFFRQAEEGASELNQESRWPVWASLLLYRQILDEIEANDYNNFTKRAYVPKAKKIVALPKAYYRSLMLPSSVRHCSSLTSS

SEQ ID NO: 39259 - protein, 198 aa, Oryza sativa
MVAGPSQDGSATEGRRRRRITRVRRRRRRRTAASRHTASSLSLLFSFPSLSLDARRRAALPVAGAHEAPPLPLRPPRRRPRRRGVRLHRALLKAPHAPPPPPRRGPPWQQRCHAGAGPCRGVRRPRPPLQCVRSPVKEGLVMTASDRHRGRGSRSPCLLRLRLGFLGGLGGEIKAVLMARWLVLIWSTAARTPRSTWR

SEQ ID NO: 39260 - protein, 163 aa, Oryza sativa
MSGMADGSFLDRMVSQLRSACRYYTGYPKDLGPSRIIPFTSERQFVQLLHEGRPVVVAFTIKCTYTHHLDKVLEEAAATFHPHVKFVRVECPKYPGFCLTRQKNEYPFIEVFYNPEQAASPGKAVDPNVTKYSVKVLPFNYDQSVYGFREYFKKHGFKYFETN

SEQ ID NO: 39261 - protein, 99 aa, Oryza sativa
MGFVRCGAELERSDIYSGADGSGLAGAAARGEMDRDDEWLRRALAEFGGGGGGVWELVDAALACAAHDRPDELRARRDGIVERLYARRRLQQLSRRTSC

SEQ ID NO: 39262 - protein, 307 aa, Oryza sativa
MSMRRLGSGNAGGGAAVAGEWDGGGIAGRMRGVNAGIMDEKVLELVFRALNWDPRELCVVARVSRRLRAVAERVLWRELCVSRAPRMVSALSGPTAAVAAAAGRIGGGWPAMAKLLFFCCGAAGAAVPGHFAPVSRFSKTSGRSFLSRRCAGDLLFVSDPCEHAAGAASDDDVVGAYRGVYRGFMRSRTRAFLVGHRAPLEPRVRCPYCGARVWSMTAAGLAPRSACRWLGANEGRLEYFVCVSGHLHGSCWLARLSSSSSSSDGERSADSDSNHSDDETFAAADVSLPLPPAGRVPARRLRGRPAM

SEQ ID NO: 39263 - protein, 162 aa, Oryza sativa
MTEAGGERRIGVAMDFSPSSKKALQWAADNLLRKGDTLVLLHIRHHGRDEAKNVLWSHTGSPLIPLEELMETAVRQRYDIPSDEEVFDMLNAVSREKELSVVLKMYWGEPREKVCEAVGELNLESLVMGSRGLGQIQRILLGSVTNYVLSNASCPVTVVKAK

SEQ ID NO: 39264 - protein, 137 aa, Oryza sativa
MHRDQFDHHLFLTNHRMNWRRKEVRTLSGRQTSTAMVLIAHAHTSCHRALAGTAGQRGGGEEAVVGGSTQGPSVARRRGCDVDVRLLAQRRHAARRWLCLRTAHHRCPPETCAALAGDGCLVTLAPQESPPPSSLFV

SEQ ID NO: 39265 - protein, 294 aa, Oryza sativa
MAAATSTAAYWLAEHPAIVSFRWSPTGLWFSTWAFLLGFLASYVALCLALDAILAALLRRRRPLPLGPLPAAHALLMAAVSAAIFAGTLLSALAEIRDTRWSWRGRSRTTPFRWLLCFPPGTRSSGRVFFWSYAYYLSRYLHAARGLFAVLQRRRGAAARVFAHAASVAMAFLWLEFSQSFQVLAILASTLAHAVAFGFRFWVGAGLPAARGAPVALACQCALLGCNLLCHVGVVWMHFGGVAGGGCSGIGAWVFNTLLNAALLWVFLHCYGKRGVCDDDGGATAASARHDKDL

SEQ ID NO: 39266 - protein, 208 aa, Oryza sativa
MAGGVVDGLTMASSRADGREARSSAAAVTWSWRAPVATPPAARAPPVGAPPLHSWRHPITLPSTLSGTGANTVSRAEKPRRPAVEELPRRRGDEHRAEQRAGLLDTEQRQRPLASSASAERSSKGPSRRRAVAVRNSFVPSGDGDGRISAAGFSQVGDLDEASPAWENNGGHTSRRYNISQLFSSPSPHQVGPVPEFFARGVRSFGCV

SEQ ID NO: 39267 - protein, 563 aa, Oryza sativa
MAPTAAVAGGGVEAEALLGLLQRVQSEALRAFGPNDFDPKLYVDLPLAADASAAAALASLPRAAPSRGEMEAYISRYFALAGSDLVAAADPPDFERDPPGFLPRVERAEARAWALEVHALWKDLTRRVAPAVAARPDRHTLLPLPGRVVVPGSRFREVYYWDSYWVVRGLLVSKMYETAKDIVLNLVYLVEKYGFVLNGARSYYTNRSQPPLLSSMVLDIYMATGDMAFVRRVFPSLLKEHSFWMSEVHNVAVMDNHGRVHNLSRYQAMWNKPRPESATIDEEFASKLSTAAKEKFYHQVASTAETGWDFSSRWMRDSTDMTTLTTSCIIPVDLNTFILKMEQDIAFFAKLIGESTTSEIFSEASKARHNAIDSVLWNADMEQWLDYWLPTDGNCQGVYQWKSISQNRAIFASNFVPLWLNAQHSGLEQFVDEAKSVRVMRSLQKSGLLQPAGIATSLSNTGQQWDFPNGWAPLQHLIVEGLLRSGSGEARELAEDIATRWVRTNYDAYKATGAMHEKYDVVTCGKSGGGGEYKPQTGFGWSNGVILSFLDEFGWPQDKKIDC

SEQ ID NO: 39268 - protein, 188 aa, Oryza sativa
MPSLRIGRPRRPNCSLERRQKNLFRTPPLPSPPPRLASLARAAAARRRRERPPPLSSFPNPPSRLSLSDPRGTRREERDEASTGGHVQPEPVGDGLRHQPPQRQGVHRPRQGRRRRRPRRPRARAHRLRLRGPLPRAGHRRPRMGVLEGHFVWRLYGWHLVQHRNAGYFQECTVQLPGVLLKQQDSHD

SEQ ID NO: 39269 - protein, 241 aa, Oryza sativa
MASMQKSREERAEAAAHRAADELHAARRDEPGGGGGGMLGTVQESARSLLGAVRDKIPGPGSGGAGAGAAAGEGKAAEAKGFAADKAEGARRALAGSAAARKGETDESAWQHGEDVRRRAAEKAEEARRRSEPQPSSEEKGRSATENIYGSAASAAEAFRQKMTMPEDVVEQKRAEAAAGGNKGTAAATATATNTGGEAAAEEVMMRVKAADQMTGQAFNDVGKMGEEGTGMAAGDGGRRR

SEQ ID NO: 39270 - protein, 352 aa, Oryza sativa
MEAGDGRGGGAEEEEEEQVMSEVHLGCPPRFSGLYVSRFSFSSRPLGPSAGSDGGECSGVREQVAASSSSCGSPDAVTVDEDGDLVLDRRRRNRGRSDHVLTVQHGITSSLRSVGLQVWKAALLLTDFVLHKSFTSSEFNGVTAIEIGAGTGLVGLALARVAKKIFITDRGSDILDNCLANVQLNSSMLKFDEAKACVRELDWKMSWPPPVFKCDSSDPSSKYLWYTSEIEAAEKATTLFAADVIYSDDLTDLFFSIAKKLMSHGAEKVLYLTLEKRYNFSMDELDVVANGYKHFRSFFTVQDESGALDDNSCRPDFVGEQMDLAEVPQYIREYDRGKDLEMWKIMYNPNPE

SEQ ID NO: 39271 - protein, 234 aa, Oryza sativa
MGSELPAAAPPQPKRSTAAAAVARRRIGRELWQFWLDPPPYCRPGPSPVKDHFHWEVVIDGPAATPYAGGVFPVDVWFPYDYPFRPPKLFFKTKVYHPNIDGKGRMALDIFQDNWSPALTINKLLLCFVSVLFDPLLDRPTNRCIAKQYKHEYEAYEEKARAWTQKHSSTPIVSHYPPYAVIGSTPPAVPYFPATAARRKAAASSASGSVSSSRIPLLMKDESIWRRTMKFFQG

SEQ ID NO: 39272 - protein, 144 aa, Oryza sativa
MFHQANLRQTDVDTITVGSQTGKLSLIQAWTETVMQEMTRLTNWPLVSQKHDDLAQVFIDRMARDNCNPKLSYTYSTDGKTITAVTVTTTGNRCGTSIPVTFPGNAPTVSGSARTDKVGSEPVIMWATLSGSAVKFTLPTPVKV

SEQ ID NO: 39273 - protein, 254 aa, Oryza sativa
MGRVIRNQRKGRGSIFTANTRLNKAPAQFRTYDFSERNGYIRGVVKEIVHDSGRGAPLARVTFRNPYKFKHNTETFIANEGMYTGQFIYAGKNAALTIGNVLPLASVPEGTVLTNVEDKSGDRGALGRTSGNYVTVIGHNPDEGKTRVKLPSGAKKVLPSSCRGMVGIVAGGGRTDKPLMKASRAKHKFAAKRNSWPRTRGVAMNPVDHPHGGGNHQHIGKASTISRYAVQGQKAGLIAARRTGLLRGTQKTKD

SEQ ID NO: 39274 - protein, 211 aa, Oryza sativa
MDEEKEADSPQPPSKLPRLSGADPNAGVVTMAAPPPPVGLGLGLGLGGDSRGERDVEASAAAAHKATALTFMQQQELEHQVLIYRYFAAGAPVPVHLVLPIWKSVASSSFGPHRFPSLAVMGLGNLCFDYRSSMEPDPGRCRRTDGKKWRCSRDVVPGHKYCERHVHRGRGRSRKPVEASAAATPANNGGGGGIVFSPTSVLLAHGTARAT

SEQ ID NO: 39275 - protein, 203 aa, Oryza sativa; identical to SEQ ID NO: 34875

SEQ ID NO: 39276 - protein, 439 aa, Oryza sativa
MVSQVASPRPRRVRRAGGGGSDWASLPADLMSSVLRRLAGDRERARFGAVCKGWGAAAARLPSRPWLVGSRADDWTGLSGATMSSFWLSLGQRGLVPFAVDVPAGSEYLSSSRGYLALSNPTGNPRVITLFNPVTGRRIPLPPIGFFKKWHDVATIVLSADPDTAEAWSAVAVGFPANCLAYYSSATNDWKPIRFNYSSGYAGVEHFRGRFYVAFKSEISVLEVDVATPAAIKIEIAHDDDDEDADVFDIDLNLDHETSNSDDDDDDDDDCADTLAGLGDEDYPLKCLVETHLVDCGGELLVVSMHDEVAYKKPSPESAVGRKPRSHDDERWVDVHRVEWLESGAARLVRMEDLGGYALFVGRNHAFSLSPEEFPACQPNCIYSVEQQGHPDGLVRVVNFNDDTTEWACPDEDIFPDDDMRGSPTAGWARRGWVFPKYS

SEQ ID NO: 39277 - protein, 331 aa, Oryza sativa
MKTAASILALAVAVRAHYTFDKLQVNGETVGQSWQYIREHTRGYMPTKGQQILENDFRCQPGGDSGANTDVYTVGTGDKVMFLGAFGMTSIEHPGPAQVYMSASSDVKADDGSGDWFKVRDALFCSSPENDGALKNAWCTWGQPGIEFTVPDTIPDGEYLVRVEHIPLHGAQGTSTGAEYYYSCAQLKVEGSTVDAMPAFDTIKIPGGVQPDDEAVKFNIWTQVKEYPYTVGPELVPGGTTWGSADGSSKEVVVKGGSAPAAASGSSSSSAGSSSSSSAENTTTIAQPTNSENTLTVEPVDSSANQGGAAGSGKDCDVQYVERSVRRSFSA

SEQ ID NO: 39278 - protein, 55 aa, Oryza sativa
MATWSRVGDWESFSAGHRAWIDDSVPLPPGSGVGGSGRWIRWGLQQQSNGVAGHR

SEQ ID NO: 39279 - protein, 338 aa, Oryza sativa
MEGAAAAAAVIRHRTVEANGISIHVAEAGGEGGDGAAVLFLHGFPELWYSWRHQMEHLAGRGFRCLAPDLRGYGDTDAPPEIESYSAFHVVGDLVALLDALGLAKVFVVGHDWGAIIAWYMCLFRPDRVTALVNTSVAFMRHVFIRSGADAIKTTDHFHKAYGPTYYICRFQEPGVAEEEFAPAHARHIIRRTLCNRFTVHKAGKPESEESPPPPPLPLPAWLTEEDIDYFAAAFERTGFTGGINYYRNMDRNWEMAAPWADAKVQVPTKFIVGDGDLTYHYAGIQDYLHKGGLKAEVPLLEDVVVIPGAGHFIQQERAEEVSDLIYNFITKFIPQPN

SEQ ID NO: 39280 - protein, 256 aa, Oryza sativa
MAAAPSVKSALSWTWLRDSRDSVVLPSRGSRMRTLLEYAGLGGDAKHVKAEFEASTGRHFSPLAWLFPSMASSAEVPTSLMGSAAVGKEEGEVVGEVAQGLHSIFTTLTLRTGVVHALGSSASHLSDRFQLGGPTSVRMFRHSLLGPKNGQDSLGGDASWSLGLSMFSPIPNKPHWPLMLHAFANAGQLAQLPTDAVSSRVGAWKELAQPSTAAGVGLVYTQGQLRVELNAGVPLTARRGDGMAKGLQLGIGIDFL

SEQ ID NO: 39281 - protein, 76 aa, Oryza sativa
MACGVVGRCVRDVSCLWLGGGGRKAQMRDVLGRTHQRAVAWASCCHVGFGLCGLWASLGTREGLGKGRVSLNREIA

SEQ ID NO: 39282 - protein, 281 aa, Oryza sativa
MMSPGVSAKKRHAGAGFTLGCGCKDAKSVSVSASAAGTPSTTATRRRSAGTNPSGSTTTDTLTMTSASSSFLWEHSVVEFDHDGGGGCGPESFSGLLRELSELEQSVASWGRKSHHQHHDKKHSPAPSSPLPPQEDRKEKNGGNGDATDKPGDCRDGGGGGDGVGVALDGSVAVVKQSDDPLGDFRQSMLQMIVENGIVAGEDLREMLRRFLTLNAPHHHDVILRAFAEIWDGVFAATASLVHHHHPPPSSRREPVAPAARPPAPRTPPRHRHPSPRAWRV

SEQ ID NO: 39283 - protein, 317 aa, Oryza sativa
MGTVADPAKTKKTMSGFATDFLMGGVSAAVSKTAAAPIERIKLLIQNQDEMIKQGRLAAPYKGIGDCFVRTYQQEGMVSLWRGNTANVIRYFPTQALNFAFKDFFKSLFAVPKTAPYWKSLTANLASGGAAGASSLLFVYSLDYARTRLANDAKSAAKGGGDRQFNGLVDVYRKTIASDGVAGLYRGFVPSVVGIVVYRGLYFGMYDSLKPVLLTGNLSNNFLASFLLGWGVTTGAGLASYPLDTIRRRMMMTSGGKVHYKNMFDAGRSIVAAEGVSSLFKGAGANILRGIAGAGVLSGYDKLQEVMFGKVYKGGSG

SEQ ID NO: 39284 - protein, 176 aa, Oryza sativa
MRTEMLIRMQASSEKNGNAKAMKVAAAMDGVESVTLAGEGRNLLRVVGSGVDSNHLTSRLRRKVGHADIVELRTLHDTYPRGAAAGSYAATSTSGRLGSSNGGYYYSSQLSAGRGGAYSSGGHQLYGGGYDSPYYHQAPQHPYDGGYYPSPYGAAAVQHEYYTTSSNDDPNGCSIM

SEQ ID NO: 39285 - protein, 276 aa, Oryza sativa
MAAAGAALRLRLLYRMLRVGELLALVVFLSWSSSRVPAAAAAVVRLAGSLLLNARFVFVLGNAIVLLLLALSRHDLSISSNHGTTTTAAAAAVSSDSAGAGSTPASTTAPPAASFPLFIVPQPSPPPPHATEAPVVAAPPAPVVPCAPSVAPAAPAAAAAFEDKQAVRVNKARAPRRSRSEKMGSRGAFRRAVSPELRRSESDNGRRRRSSVTARDAEVCWGADDAEEFRRTVEAFIAKQTRFHREESMTMTMSIVAGVGHGEVAPAIAGALAVVE

SEQ ID NO: 39286 - protein, 205 aa, Oryza sativa
MLVDSRRLYAATPCLLLVSSVAHLSCCIHRQHTTSRSNRTSTANIYMVMSSARFRQRRTSERRGQKGAWWMCGRLAAAPAPVQWARTVACARMSACMLCSMAAACRRTRKPRTSACSFTSALSARSTFFACTNTWHDYSIEAELGHEHPLLTRKPLNAVWILIAALMRRGREGAAGSGSDGGARRGQRRRTEGVTTVACRSCSTH

SEQ ID NO: 39287 - protein, 156 aa, Oryza sativa
MEARVAGVPEDEESGLLPRPSAAGRRPSVAAARRAPPPPVWATVDGPLGLPLEEAEGHARRFFLWGFACLPFLWAINCCYFWPVLRSPATFPSSAAFSRIRPYVVRSAIGFTIFSVVLLTWATTFIIGGERLFGPGWNDLVMYNVADKLGISGFMG

SEQ ID NO: 39288 - protein, 119 aa, Oryza sativa
MRPPPSCLHLLRVVPAQVGDSDRAARLAVLLSRKASDGIDNDQVMSCTGCQRQRPDRPKLLPPRSLTDEVTATCLDLLLHAVPAQVNNFDPSLAWLMTPSAAASRRIGVSGAAAVGERG

SEQ ID NO: 39289 - protein, 255 aa, Oryza sativa
MESSLWSVAAHKVSKLMAKSVLAVLARISITFGAYVPGLPLLTVGRAWALRRTSGPLQQAASPAAAIRHSAPIFRQKDTAFSASESIKPPASTVGGSGMELRYANMIVCAEMLLRQLWPTIHSNEVDAGMDLSKRDELYKMLPVTIRTAVKAKLRESWRGQPVDEAAAAASMDAVDRMLRWLGPMAHDTVRWHDEHSMERAQRFSMRPRVLMVQTLHFADRHKAENVIVEVLIGLSCVCWYDDERRRPADWDDDD

SEQ ID NO: 39290 - protein, 207 aa, Oryza sativa
MRVRSHPQPTLAMAAANKIPLLLAAAAALSLAASAVAAAPGPRRRPVRMRLYMHDVIDGPGQTAIRLIWGAGPPHASMPGRAFGDTVAVDDLVTEGPSIASAAVGRAQGTYMLSSQREAVLVVAITVALTSAGGPYNGSNLVIAGRDRVRDETRELAVVGGTGALRGAAGYVLWRTAKVWSEIHMALELDVHASVPATADDDAVATE

SEQ ID NO: 39291 - protein, 342 aa, Oryza sativa
MSGGRSCARVYPGVNEKFGRPWWDYDNLAVQWGTQDNYEILRKVGRGKYSEVFEGVNIASASGVPEKCIIKVLKPVKKKKIKREIKILQNLAGGPNVVGLLDVVRDPQSKTPSIITEYINNTDFKILYPKFSDFDVRFYIFELLKALDFCHSRGIMHRDVKPHNVMIDHEKRKLRLIDWGLAEFYHPYTEYNVRVASRYFKGPELLVDFQEYDYSLDMWSLGCMFASMIFRKEPFFHGHDNYDQLVKICKVLGTDELYAYLEKYDIDLDPQYDDILGRYQRKPWSRFITSENQRYISNDAIDFLDKLLRYDHQERLTAKEAQDHPYFEPVRAAAARGEVVAS

SEQ ID NO: 39292 - protein, 252 aa, Oryza sativa
MAGVVPMIIVLAMGGGALGGPEALRLLLTFAGRSPLVDIGIVVFVIAALAAPALGTMLLACFYRTPRGARGAAAAAADLLAKMTLAVSMAVALLVSASLLALPLFQSGNVVVGLLALAVPAFVVGASAARVRGVAHLRRARNASGAVTDAGRAAVTTLTVSLAAVCILLGSCVAVGGLDAHHLFTSFALKNPIIHAPTGVATAAVVGTTLLALFFRKAQNAAAAAAAAAPLPATERAAKIISDGANPGGGCT

SEQ ID NO: 39293 - protein, 140 aa, Oryza sativa
MASSASWPAFGVSPEEAGKGKWYIATAATNHMTNDKSLISDLKPVADGRNIIADGNGAGLKVQGRGAVNTETVVLPAEVWYVPEIDENLVSVDQLNELGLSISIGRGVCTVTRVSDGSVVGKARRSGGVYEVEFLKVPLN

SEQ ID NO: 39294 - protein, 291 aa, Oryza sativa
MAADGGALKRLFEKPLPENPTLLEALSAWNHTHRKKLVDPASFTEIFGELHFQEKPPVVDSLARAAARPSPSPPPPPPPRRTVSWLDITDAATADNDNDKSKDDSSLDALLKPPRPASGGATVKRSASFCLKSSTSLLLCTEGLGSESTVDADDMVKDGDGSGAVVDSGMDVDDDASDVAAAVAGDDAFGAGGKENRPPPPPPSFPPPIRSIGRGGKPSVCFRSVRAEGRFVLMEVVIPGKDLLRATREGGRLRLQFSNAAAAAAAAVGVIDDEEMHGQEAAACVGGDTFA

SEQ ID NO: 39295 - protein, 251 aa, Oryza sativa
MAMAVRVAAGLVVALLLAGDASAATLALYNRCAETVWPGIQPSAGKELLARGGFQLAPNRATSIRLPAGWSGRVWGRQGCSFDAAGRGRCATGDCGGALYCNGAGGAPPATLAEITLASTPAAQDFYDVSLVDGYNIPIAMTPSHGSGANCVPAGCISDLNRVCPAGLAVRGGGGDNRVVGCRSACAAYGAPQYCCTGQFGSPQQCKPTAYSRLFKTACPKAYSYAYDDPTSILTCSAGASYIVTFCPHRR

SEQ ID NO: 39296 - protein, 28 aa, Oryza sativa
MSTDAPELDADADADELTRPHRRNLSIV

SEQ ID NO: 39297 - protein, 239 aa, Oryza sativa
MKLNISYPANGSQKLIDIEDERKLRVFMDRRMGQEVPGDSVGDEFKGYVFKITGGNDKQGFPMKQGVMHPTRVRLLLADGHSCYRARRTGERKRKSVRGCIVAADLAVLALAIVKQGDADIPGLTDTVHPKRLGPKRATKIRRFFGLSKEDDVRKFVIRREVQPKAEGAKPYTKAPRIQRLVTPQRLQHKRHRIALKRRQAEASKDAANEYAQLMHKRVHEEKAKKEEIRKRRASSMHK

SEQ ID NO: 39298 - protein, 214 aa, Oryza sativa
MATQLSATFAPAATTTATPLPAPQQRLRHGRRCYHALSLRPPRAASGDDGAGGEVEPAAPAAPAKTATATDDGGDDFEERVLRIKSRVGPKKRGSAAARKRKGGAGASSKSKAAVTLPPVPLREARSSVGVPVEFGFSAYSERLNGALAAVGLAALLLVELGSGKALVKYHQPATLFLQVYTVAAAGAVFVKYEKERISVWPGPPATKPPATGE

SEQ ID NO: 39299 - protein, 267 aa, Oryza sativa
MAQFSSRGPNVNEPNILKPDVTAPGLNILAAWSEASSPTKLDGDNRVVKYNIMSGTSMSCPHVSATAVLLKSAHPGWSSAAIRSAIMTTATTSNAEGGPMMDADGTVAGPIDYGSGHIRPKHALDPGLVYDASYQDYLLFACASGGAQLDHSLPCPATPPPPYQLNHPSLAIHGLNGSVTVQRTVTNVGQGSARYSVAVVEPMGVSVKVSPRSLSFARTGEKKSFRIKIEATKGRGGWRVNGQFVAGSYTWSDGVHVVRSPLVVLVA

SEQ ID NO: 39300 - protein, 352 aa, Oryza sativa
MATEALLPIGAAFDGATQHDLDRAKAEAGEAYFPTVFNPATVERKGHVVIGKGRAGVAKRTQDGFKVYYEVHGKGAIKVAFVMGLNNTSFGWLPQVDHLARDERYSCLVFDNRGVGNSETPAGWYKTSDMAVDTFEVLEQVGWTGERNVHVAGVSMGGMIALEMARQRPELLASLTLISTAPGKRFHTPTYGLTSLARVLAGRTLGFDSEQYRLNRLISTLFPESWLAEKSEKDASRTNREVLYDMFKWRYAFTIRQQLHGAVSQMKAAVTHYIPDADLERIDTAVPKISTLTGDTDFLVDPRNSAYLRDKLPSADFHEFPNAGHALGNQIADQVNAILEKAFADAIAAQRN

SEQ ID NO: 39301 - protein, 105 aa, Oryza sativa
MSGPGNGPGASWHTSHCATHLLGSSSSLQRHCGGLVFVGSRSMLSQHFHGFFFVGACCADPPSVGRRMVLVVVSSSAVPRAAAVRPARRRKRRVEVVMAVFIFFE

SEQ ID NO: 39302 - protein, 129 aa, Oryza sativa
MGNCMVIQDRNREIKIMSMDVDGEILKLPPPPPPLNGVSSDDDDEALRPATADMADDPPGGAVVRVKLVVRKQELKKMLLHNDAAAISLNDMVSLMQKQAEADELLHQQESCGSVWQPTLQSIPEGSVF

SEQ ID NO: 39303 - protein, 311 aa, Oryza sativa
MILRRTLPRLASAKDGSGGGFADGHFPSLRGHPAARANARDAAEKQAALAAKEEEIRDHRRGDAAAASPAPSTVKEFRVYRWSPDAPSRRPHLQSYHVDLATCGPMVLDVLQKIKAEHDATLAFRRSCREGICGSCSMCIDGVNTVACLRPVDTDTSSATTVTPLPHMYVVRDLVVDLTSFYQQYKSVEPWLKRKTKTKTETTEHAQSPEERKRLDGLYECILCACCSAACPSYWWNAEAFLGPAALLHAYRWVSDSRDEYAAERVQALAEGWDKLYRCRMIKSCTATCPKSLDPAAAISAMKTLHQLGKP

SEQ ID NO: 39304 - protein, 214 aa, Oryza sativa
MSPRTAITGENPPPPPLGTLPLLRWRARRLHLKGAPARRGGVDAERGGARRRSRSAPPPPPSSSLRLLVATERGGARCHSRSAPPPPSSSLRLLVAGAALHSSPPLSLSSARCGVRGETRGGARRRRRRCPGDVRSSGWRGRRASPRATTTRRRWRRRRLPPPRTRRCRAPRHSATRTALCRRRTPRTSSSPSPSWSLLCGGGRRPGAGKGKVG

SEQ ID NO: 39305 - protein, 390 aa, Oryza sativa
MRCSMAAMAVVMAVMAAAAASPAEGAGAFFVFGDSLVDNGNNNYLLTSARADMPPYGIDHPSHRPTGRFSNGLNIPDIISEHLGAEPTLPYLSPDLRGAKLLVGANFASAGVGILNDTGIQFVNIVRMSRQLQYFAEYQERLRALVGAARARRIVNGALVLITLGGNDFVNNYYLVPFSLRSQQFALPDYVRFLISEYKKIHQRLYDMGARRVLVTGTGPLGCAPAERALRGRGGGCAPQVMRAAELFNPQLSRALGEMNARVGRPGAFMAANSFRVHFDFISNPAAFGFATARDACCGQGPNNGLGLCTAMSNLCADRDAYVFWDAYHPTEKANRIIVSQFVRGSLDYVSPLNLSAALEIDAAEEAAAAAARRRRQRAVARLVGDKPHA

SEQ ID NO: 39306 - protein, 393 aa, Oryza sativa
MALRRFAVAGRVLLHRVESLPPPRPPLAFLSSESRGHLVRRFSTPSSTPPHFMVQYLVSKCGLSPAAAAKAAPRFAHLDSASRPDAALAFLRSQGLTRAQVREVVSWKPELLLSDVDATLDPKFRAVRALGLGRADVARLFALYPPALTYGIHTNLLPRVLFWIDFLGSAKLLMKWLAKTWLLRYSVDALLRNLSTLRSLGVQQSRITTTVRMQPTLITQTPARFQKLVGRVEACGVPPSSGMYMWAFFALHNVSEGSFRAKKAAVVGAAGCTEEEFDAMFRRAPCLVFVPAALLRRKVEFLMAEAGCDATHIVTNPVLLTLSLGKRMAPRCRVVEALRSRGVGIGKKANLGSVMRYPEDKFVERYVLRYKEEVPELLELYPPRLCKGSSQTR

SEQ ID NO: 39307 - protein, 91 aa, Oryza sativa
MEGWRKKVAFRARRAWAALVSGRLRARKQGSRGLLKLHEDVQTCDYKDVQVMFEMLTSELEAQKQQQQLLPPSPRKPAWPGSSPSPAPAKQ

SEQ ID NO: 39308 - protein, 71 aa, Oryza sativa
MVPAALPDLIPHPISADSRVALPRTPGRCFHGLQGGGKRSEGRRFRGLQGKGKRSEGRRSRGVLTVKSRAD

SEQ ID NO: 39309 - protein, 169 aa, Oryza sativa
MASMKRKCPDDETACGSGAGAAMCVTGCGFFGSEATNNMCSRCYREHSADNDAVEEAAAANSDLELVGVAETTTKKARMSAVVPVAVASSSSAAAEQPAAKAATAPNRCAACRKKVGLTGFKCRCGGNFCGGHRHADAHGCGFDYKSAGKEQIAKQNPLVVADKLATRI

SEQ ID NO: 39310 - protein, 93 aa, Oryza sativa
MSCLLGRAAVPVKRVWLGLSARLGLRRTTGLGKLRNEVRTCEYSDVHVMWEMLSSMDAAAPPRHAAAAAGRKRRRPAATAAWSRLVSCCCCAF

SEQ ID NO: 39311 - protein, 159 aa, Oryza sativa
MQIFVKTLTGKTITLEVESSDTIDNVKAKIQDKEGIPPDQQRLIFAGKQLEDGRTLSDYNIQKESTLHLVLRLRGGAKKRKKKVYTTPKRIPHKRKKVKMSILKYYKVDGDGNIKRLRRECPSPECGAGIFMSWHKNRQYCGKCKLTFMFEEGTKPPTA

SEQ ID NO: 39312 - protein, 189 aa, Oryza sativa
MVPPAAHAPKNLGLRGVRRRLWGRWAAEIRVPRGHRAAARLWIGTFPSPAAAALAYDAALYCFHGGAPPGNRAFNFPHAPRLRIDDRRRHALTPGHVRAIAERYAHDVGSVLFRPLPPPPPPVAAAAVPVFAAPAPPMAPAPANHAADPYYCNEPDTTTDEDVMAAADRLLSMDIEEVAALIAIVQQGE

SEQ ID NO: 39313 - protein, 164 aa, Oryza sativa
MSSSSAAALARGKSGISAAKFEASKGLGAKPKRSASATGSRGKTEKKVYSLPGQKFDPPEEREPLRIFYESLSKQIPSSEMAEFWLMEHGLLSPERAKKAYEKKQKRQQQIRSGTPIKPSVKKDKPESSKKPSSYNSSDSKAKKRVDYSDDDDDFIVKLKRSRG

SEQ ID NO: 39314 - protein, 197 aa, Oryza sativa
MASAVVAKPPAAAPASRRRCFVFVERAAAAAVGVNAAIAAVDDHRPVPAAAAAAMDDVVGRVARPARPSARAIMEGTHKQISSGGASGGYCTVPWCSICTGNNPFAIAEFLLCCNLCGVPLAGRPSFIYIGEKAFCKEECRSRYVVEEALREAREEKRRAAAAAAASPEKKKEAAAARKGGEECREGSIFFICADDL

SEQ ID NO: 39315 - protein, 118 aa, Oryza sativa
MGARGRRDRMGSAGGGGGSPPVVVRRYNRSEAPRMRWPEELHRRFVHAVRRLGGCHEATPKRIMQLMGAKGVSISHVKSHLQMYRNSNNSSNVNRRHPVPHKSIGRRRRSRMNSRDDR

SEQ ID NO: 39316 - protein, 50 aa, Oryza sativa
MGMAPAAGRRRGRCRRTVAWRGLGLGGIEMAQGEVANTSDYWAGIGLGPY

SEQ ID NO: 39317 - protein, 90 aa, Oryza sativa
MAAKGQPVNVQKEQVNMQKEQMFGLAEKEMEYRVDLFNRLTQTCFSKCIEKRHKEAELNMGENSCIDRCASKYWQVTNLVGQLLGNQPQM

SEQ ID NO: 39318 - protein, 118 aa, Oryza sativa
MADAKIGELGEVGEGEVPGEQVAEAVAVGGPLDDLARRPALAAPLHRRPQALRQAPLHGVDEPLRRQPRVPGVRLHQLRQRHPLLLPHPDRRPDVLLPRRLQLLRQPLRAQHPHLPSP

SEQ ID NO: 39319 - protein, 106 aa, Oryza sativa
MDGDPAGRGGGEALELPRRLDLRRPEEEEEGRRSSRPTDQHRRAPDLPLASSPHGPPGVGVAAQAVRAIVTVRRAASRRRHRSPRRAKGNLTGRAGGGRGGAAAGE

SEQ ID NO: 39320 - protein, 400 aa, Oryza sativa
MKGTTFLATAIAAGTASAGVHKMPLKKVPLSKQLENANIGDHMHALGQKYMGIRPENHAEEMFKETSIKPEKGGHPVPVSNFLNAQYFSEIAIGTPPQEFKVVLDTGSSNLWVPSRDCGSIACYLHSKYDHSESSTYKKNGSDFAIRYGSGSLEGYVSQDTVQIGDLKVKNQLFAEATSEPGLAFAFGRFDGIMGLGYDTISVNGIVPPFYSMINQGLLDEPVFSFYLSDTNDEGAESEALFGGINKDHYTGELTKIPLRRKAYWEVDLDEITFGDQSASLDNTGAILDTGTSLIALPSTLAELLNKEIGAKKGYNGQYTVECEKRDSLPDLTFTLTGHNFTIGPYDYILEVQGSCISSFMGFDIPEPAGPLVILGDAFLRKYYSVYDVGNNAVGLAKAK

SEQ ID NO: 39321 - protein, 312 aa, Oryza sativa
MPPPSGPTNKILTPSSIMGIRSSPGSQAQSPNSRASGAASLSALKGKARDELRSQPPQQQQQQQQQAMVQQQLQPEGTGMASQPTHQMYPNIAPFPSAAAHMGAAPKVTFNLPQMGGMPIQPGGLSQAERDAWLSYKSAGGLESRRTSHKAAEQKRRDSLKFCFDELRGLLPAITLDEDAPNGSLLGPDGVEEDREAERFNPADVGDPEMARSANKAISKVALLRHSNEYLIRLKKRLDRRDQALAVCRNEIHELREKLGLPPSDDPSVSGRGAPLGWTDADDYDEGMGNHSAAMSAAQSPSDAKPEMDQTA

SEQ ID NO: 39322 - protein, 227 aa, Oryza sativa
MNYNPEKFKLSQPLMEVLGVEVDTRSRVIAALWQYIKAKKLQNPTDPSFFMCDPQLKKVFGEDKLRFAMLSQKISQHLSPPPPINLEHKIKLSGNGAHASACYDVIVDVPFPLQKEMSAFLANTEKHKDIEACDEVISASIKKIHEHRRRRAFFLGFSQSPVEFINALIASQSKDLKLIAGEANRNIERERRADFYNQPWVEDAVIRYLNRKPASGNEGPGGGAGGS

SEQ ID NO: 39323 - protein, 279 aa, Oryza sativa
MKGHHTGLADWAKIRAVKEAVGVPVFANGNVLYPQDWQDALEQTRADGVMSAEGNLYNPAVFMSSLPTEPSAMFPNAPQLPFPSLARMAHEYLDIVTQLRTPTSSSAIKAHLFRLCRPGLEVHRDLRESLGKSHYDHTATGEARIATYRAFVTELERRLNLDRAEDKWNAPQDPPLPGSVSFLTPPDASNPDVHRPAFIPHWLAQPYFRPPLVTDEQQDDDAKKARRERVAETAQGKVKAEAKTARQRSQSAEPAQGDEKRPRTTLPHDTAPPQAMPAL

SEQ ID NO: 39324 - protein, 120 aa, Oryza sativa
MPPSSRLPRRSSSRSAAAPPCLPRRGGTPGTPRAPPPPPLAPSLLLRELKKLAGSHGESRIRPPMDDVVTDASRLLPGRPRQLHRSTDASRLLPRDASSSPPPGRRRGREGSAWPGAWRR

SEQ ID NO: 39325 - protein, 617 aa, Oryza sativa
MTRSTGRLGLLVGPLALALQPCRAEREAVHHDASWQPEYVLVATAGNITLNCESRYSVTYNGTSPGPTLYMREGKTTWVRVYNNTTDQNVTTHWHGLSQRLAPLSDGSPLVAQWPTAPGEYFDYEVRPEIGDAGTYFLHSHVLLQAMTAHGLIIVESANQTEPYEYDADIPMGFYDFYRREDGDMVAGLYATPFKWVGEPDALLLNGYSGTASFSHASDATCQPYVIEVEPGKTYRLRFVGGMSLSFVFVGIEDHSELTIIEADGQYTKPVTTDHIQIASGQRFSALLRTKSQEELLARGKYTFWVRYESRDRPTMVTGHALVRYKLPAAGLNGPSSVVALPEDLPSSPPAHLTTDLTEYTQWLEYTLESLVPDKAFPTLAEVTRTVYITMKQVIVDGNYSNGQISGNVQWSMNGLPWQEEVMARDNHAPYLINAFLTGLTPNYSAALANQGWDPVSKAFPARVGEVLDIVWLSNSGSTGGWDTHPIHMHGHHGWDMGSANGTYDAVENEKRFANGYVPAKRDSLQLYRYAKGGVPHTTAGWRTFRLRITEENVGAWMMHCHVLPHMVMGMVTVWVFGEIADILKEIPQPYISGYLEYGGSAYGNASFDPLVMSYFD

SEQ ID NO: 39326 - protein, 136 aa, Oryza sativa
MARSMRTCLHSGRLALLAILVSGGIVLQILACALYNNWWPMLTVLMYLILPMPLIFFLGSNSPSMMSNDGDTWVSFTKFLTGASIVGSIAIPSILKHAGVIGWGALTMELSSFLVFGVAILWLIQMNSEDEYSSAF

SEQ ID NO: 39327 - protein, 217 aa, Oryza sativa
MATSGDVEEVPEPGMDHPAEPCMGVGGDQLVPTTEEISLPLAAETTSDHHEAAQLEQSAETSTSESESEEVAAKTTSDSSEAAAVIPKHAAEGSSTASEEEQVAKKELKEAEEDDGLQGESARERLKRHRREMAGRVWVPDMWGQEKLLKDWVDCAAFDRPLVPPDLLTARRALVAECCARRPDRTTTPPGPDDDAARQIQPSPGAKKLLLIIELDY

SEQ ID NO: 39328 - protein, 132 aa, Oryza sativa
MESPPRPHFSPPSSYLDRERSQRRWFGDELDGENDDELFNPWPPSSIVAVPHLLPPPATRSGRVAGSEQWGKRGGCSGDQRSEWRTVAASRAGGGQRRPVTGAAGGGRRRPVRRRRVAAMTSAASGGRWQPA

SEQ ID NO: 39329 - protein, 108 aa, Oryza sativa
MLFATREPASGVISRLEGVAARGGGRMRVTKSGARGVRLEGAERGGAKGRLAVAADIFSVAPSVLVVDVKKDGGDTLEYRSFCSEELRPALQDIVWGAAADPTPTAAV

SEQ ID NO: 39330 - protein, 110 aa, Oryza sativa
MTFTFTVVRKHSAAPIAGTNKSRSKRKPRTTPPSSPPRPHPAPPSTRTSSWPACSSRHDLTLPVAWTDRLNLSSPPQVVQIFFPLVFYQGIDQDDRITSSHCYLSSVCCF

SEQ ID NO: 39331 - protein, 171 aa, Oryza sativa
MTITREEAESKEMESLRVHASALLSLSSPAASASQPTSSSSTTEGVFECKTCSKRFPSFQALGGHRTSHTRLQAKLLSDPAAAAAAAAERDRARVHECAVCGVEFSMGQALGGHMRRHRGETGTTTVVLADADDSGGATVPQPPEPMPDLNYPPLEDAGDGSEPELLNLLV

SEQ ID NO: 39332 - protein, 84 aa, Oryza sativa
MRVGQRGSRRSLVAAGWRPPSSQPQPQMAPSLLDAASPFLLYGAAAAGGSSRLLAAATTGHRAASSLRVSALKYCRIYKPYHRI

SEQ ID NO: 39333 - protein, 149 aa, Oryza sativa
MPCVYMILSVWKDVLPEQEDLEEKLDQAQGAEREPGAQHLDYPANRRRRPHHYRWRKHRSCCYSSCCCCCCRGDKEGWHHRQLWTWRQHGGRALCQLPPPRHALQVLPILSQLQVRAAVGATAAGPAAPQARRRQAAGDLEPSPLGQSS

SEQ ID NO: 39334 - protein, 264 aa, Oryza sativa
MDPHHSSHVHAGAATPNCTCRLPKEEDLAAAVVVVDVEAAPHYTSLKAAEADVVPRGVGGGGGGGEGDGGEEVNYMARAQWLRAAVLGANDGLVSVASLMIGIGAVNENNKAMLVSGLAGLVAGACSMAIGEFVSVYAQYDIEVTQIERDGDIDGADAAAAREKLPSPTQAAFASALAFAIGGLLPLLTSGFIKPWGPRVGVVCAASSVGLAGFGAAGGYLGGANMVRSGTRVLLGGWLAMLITYAVLRLFATIFHGMNISSSA

SEQ ID NO: 39335 - protein, 170 aa, Oryza sativa
MEQKESSLIIAVDLCCCRSLTKIRKTLCKLQESEDIRAIMYDDKAGTVAISGGFDPLVLPCKLRRKAGSVIKDIHLKKEREKNRVPPPPPPPPPQPAPAARAAFGTICGAGVAPGRACLCLGQCRCHCGGGYGCRCCGAAPPCYCVPIGGGGCSVVQFTYDEPSPACSIM

SEQ ID NO: 39336 - protein, 260 aa, Oryza sativa
MATASSINKRFSLAGATALVTGGSKGIGRAIVEELASFGATVHTCARNQAELSRCQEEWTAKGLAVTVSVCDVAVRADREALAGRVSAMFDGKLSILVNNAGTAYLKPAADLTPEETSRLMTTNFESCFHLSQLFYPLLKDSGRGSIVNISSVASVLAFHSLPIYSAAKGAMNQVTRNLACEWASDGIRVNSVAPGYIQTPLLTAFVAGNDFAQVEFNRLPLGRLGKPEDISSLVAFLCMPAASYITGQIICVDGGRMLS

SEQ ID NO: 39337 - protein, 171 aa, Oryza sativa
MAPKIPIFFFLLALAAGVQGETGGVGGGGGNVEYNCVYTVFVRTGSAWKGGTDSTIGVEFAGADGRGVRIADLERWGGLMGAGHDYYERGNLDVFSGRGPCLPAAPCWMNLTSDGAGAHHGWYCNYVEVTATGPHGGCAQRRFDVEQWLATDASPYRLTAVRDQCRGHAAA

SEQ ID NO: 39338 - protein, 77 aa, Oryza sativa
MRRVQRRRRRRRRRRQAGGAGVVVPVPDVPGQRALPRLRARSRRRPAVLLLWPMRVRRRLLRRLRRVGGQRHGTLHP

SEQ ID NO: 39339 - protein, 186 aa, Oryza sativa
MLAQRIAQQSLRRLAAQTPASRFAAPAAIAMGTAFTTQRRHAATTPMSPTQASDEILAKQRLNRPVAPHLSIYKPQITWYGSALNRVTGVALSGGFYAFGILYLIAPTVGWHLESSVLAASFAAWPLALKVLTKFTIAMPFTYHSFNGLRHLAWDTASMINNKQVQQTGWFVVGLSVVSSLALAFL

SEQ ID NO: 39340 - protein, 80 aa, Oryza sativa
MVTVPPPTHAPFRSTSTAVPGGSSGGSGVSFFFFFAFLLPAAAAASPPPRGCCDPFVFHGGGLFFLATIARDRSIASSDQ

SEQ ID NO: 39341 - protein, 570 aa, Oryza sativa
MESINVAPGTTATPRMAPPPPPPCITNLQSTLRYNNLLLHRKTKGWKPRNVSCRVDRRDVLLGISGAAAMVATQGGGGALAAPIQAPDLGDCHQPVDVPATAPAINCCPTYSAGTVAVDFAPPPASSPLRVRPAAHLADRAYLAKYERAVSLMKKLPADDPRSFEQQWRVHCAYCDGAYDQVGFPGLEIQIHSCWLFFPWHRMYLYFHERILGKLIGDETFALPFWNWDAPDGMSFPAMYANRWSPLYDPRRNQAHLPPFPLDLDYSGTDTNIPKDQLIDQNLNIMYRQMISGARKAELFMGQPYRAGDQPEPGAGTVESVPHNPVHRWTGDPRQPNGEDMGIFYSAARDPVFFAHHGNVDRMWHIRRGLLFPGDTDFTDPDWLDASFFFYDEEARLVRVRVRDTLDPSALRFTYQDVGLPWLNAKPSTGAASTPAPAAGAFPATLDKTVRVAVTRPRASRSREEKEEEEEVEIPDHSTYVKFDVFVNAPESGDGAATCAATCAGSVALAPHGIHREGQLSPRKTEARFGICDLLDDIGADGDKTIVVSIVPRCGCDSVTVAGVSIGYAK

SEQ ID NO: 39342 - protein, 460 aa, Oryza sativa
MIAGSFTASRLSRGSLSGIGRLALRVPAAARCYTAGSLKINADRMMKTLHETCEWGAAHRYGDGPFETGMARLTLDKDDATARRWLWKEAEKLGCSVDVDEMGNMFMIRKGKKDGRPTAMGSHLDTQPTGGRYDGILGVMAGLEALRTMNDHKVETEYPVALVNWTNEEGARFPQSIVGSGVWCHDVPLEKAWNLQDVKDASLTMKSELAKIGFLGSTRCSHEATPLAAHFELHIEQGPILEATGKKVGIVQGGQAYKWFDINVRGRECHTGSTPFDTRSDAMLCASRIIVESNRIAKQHKGLASTGILRLSPGSVNTCPGHVFFTLDVRHPSTDKLAALCGEIEAAAQRIAAEESEKGCSLEWVETFDSPAITFHRDCIDSVRKAVEANYGSDAGVDIYSGAGHDTCSTSKVCPSSMVFITSKEGISHNPREYSSPQDCATGAQVLMDAALLYDSQRQQ

SEQ ID NO: 39343 - protein, 192 aa, Oryza sativa
MGLKLSCISRRRGSPVPAPARVIAADGSLKELHAAASPAVADVLRGEGESFFVCNSDTLYFNEQPPAMAPGEALRPGQIYFVLPAAMLGQPLSTADMAALAVRASAALAAVKAPRRRGARRGGDRKMKTVRVTPLRDEGLDGGDVLLHEKLNERTLGEFPASWSPPKSGGEKLAAAARSRLKRVLSIIQEDA

SEQ ID NO: 39344 - protein, 223 aa, Oryza sativa
MAAAAVDPMALGLGTSGGGGGGESAVGGDGAEPVDLVEHPSGIVPTLQNIVSTVNLDCRLDLKKIALQARNAEYNPKRFAAVIMRIRDPKTTALIFASGKMVCTGAKSEDHSKLAARKYARIVQKLGFPAKFKDFKIQNIVGSCDVKFPIRLEGHAYSHGAFSSYEPELFPGLIYRMKQPKIVLLIFVSGKIVLTGAKYRKEIYAAFENMFPVLTEYRKTQQR

SEQ ID NO: 39345 - protein, 410 aa, Oryza sativa
MTDWKNPVVLGHGFYAATALMWLCVGLFFYDTLRFLRFDVSILLGRRPRRWPQLPYLFSRVGLWTYLLTNIYFVVAGTEFNCNGVLQAVEMQMGWIAVSSSMLLAFRAVCVYSGRARTLVSLLLTILTLGMLATWMVGVKDTKAAWVVGGGNPWQEGSCAFTYMSKQYSIKYIVTIVFDMVVMLLTVAGVVRMNGGSRIGAVLVNQGIQYFVLTALINALVTGLTLADLNPVMSLIGAIPSATISVMCSTRLYVELAEEAAPKPEGVNSSQLSSSLSGSGAEKIARFFKRSSQNPSQLQPSMAMRSTSSSNNGTAVAGLTSLSYIARNESQSRDDKSFAISSHDDLEAQTTRAQPGTVVNIVEERTIVREPMPDHLAGVLYGRTSDTADEGVADHPYSTVKGHFPRLSKS

SEQ ID NO: 39346 - protein, 537 aa, Oryza sativa
MSHMIASAMSVAQQTLGSGSTTNDSSDHQPGLSPPLSPVGEQDIELTAPTPAAARASRRPATAPNSPMPPHLQSYRNNLGNDITIDLNIGPSTSSAYARAQGSAAFHHAHKHHPHSPSPSRAPLPSTAAPTEAAGQSADGKSAHLADPSQDTEAAAGPSRSRASSLGYGGLAPATPGGETDPLLLRSRVVEESEVRRRHSGKGRNRRNERQIRDFYEAQNEHIERLLKPISKHADEGKQDRESSALKVKIAVYASIGANFVLAILQLYAAVSSLSLSLFATAADSVFDPFANLVLNWLHRKSENVDERKWPIGGSRFEPIGNITYAALMGMVSAILVVESIQELATGDGDKKLFIPSLIAVGVAFVTKAILAIYCYGLRKYSSQVEVLYQDHRNDLFINGFGIFTSAAGATIAGWIDPAGALIISVAIIVSWTRTAFGEFKTLAGAAAPTDFLQLVTYNAALFSDEIQAIESVRAYSSGPRYIVEIDIVMHPETPLWKSHDLSQALQDQLESLPMVERAFIHVDHEVEHAFEHRKNI

SEQ ID NO: 39347 - protein, 84 aa, Oryza sativa
MDTESCTSPSRRPPTSTISPSWFIDTSSTRAGLPNPKSAAPYAPNRGLAATFAMREKGICITRAIADPSAVPASGAASISATAA

SEQ ID NO: 39348 - protein, 203 aa, Oryza sativa
MRASRPVVHPVEAPPPAALAVAAAAVAVEAGVGAGGGAAAHGGENAQPRGVRMKDPPGAPGTPGGLGLRLVQAFFAAAALAVMASTDDFPSVSAFCYLVAAAILQCLWSLSLAVVDIYALLVKRSLRNPQAVCIFTIGDGITGTLTLGAACASAGITVLIGNDLNICANNHCASFETATAMAFISWFALAPSCVLNFWSMASR

SEQ ID NO: 39349 - protein, 401 aa, Oryza sativa
MTPFSPHLVAAAAALLGVLATAVAGGGTGAYTRVFSFGDSLTDTGNALHLPSTGGGGGPASRPPYGETFFRRPTGRASDGRLAVDFIVEALRLRHPAPYLAAGGETAAEFRHGVNFAVGGSTALPPEFYEGRGLKPFVPVSLANQTAWFYKVLQILGSSDHGRRKIMASSLFIVGEIGVNDYLVSLVGNLTVGEVETSVVPHIVAAIRSTVNEVIAAGATTVVVPGMIPLGCEPQLLALYQGGGGVAGDDYDPESGCMTRLNGLAEHHNRELRRAVAELRGAHPGASVVVAYADLYRAVADIVASPGRHGFGGAPLAACCGAGAGAYNFDMAAFCGAAGSTACADPSAYVSWDGVHFTEAANRHIACAVLEAGGGAPPAVATPLATWSAAAEAGRSRIGCS

SEQ ID NO: 39350 - protein, 279 aa, Oryza sativa
MDFDDHDDGDEEMPPMPVSSSYETPPQHGLAGGGMAPKPPGEIGSRVKGPSCGGGRYRECLKNHAVGIGGHAVDGCGEFMAAGEEGTIDALRCAACNCHRNFHRKESESLAGEGSPFSPAAVVPYGATPHHQFSPYYRTPAGYLHHHQHHMAAAAAAAAAAAGGYPQRPLALPSTSHSGRDDGDDLSGMVGPMSAVGPLSGMSLGAGPSGSGSGKKRFRTKFTQEQKDKMLAFAERVGWRIQKHDEAAVQQFCDEVGVKRHVLKVWMHNNKHTLGKKLP

SEQ ID NO: 39351 - protein, 178 aa, Oryza sativa
MAISPAGPGPLRGPAPTEAGAGGIFHPRVRWGRGPAFGRGGDGGNISLAGHISASPLASHHLPSPPLQSPLRRPASRLPSPPRLQLRAAATHRARRQRIGRQGAVGRRDRQGHAARLRRPARHARAWRGDGRSRRGCSAQAWRRPAIHVSNTPKYSRRFTCEVLLHLQYSKSPTVPCE

SEQ ID NO: 39352 - protein, 210 aa, Oryza sativa
MESSPAATVTPAAAAMSEAPAVAAPRPRDPGLFGSFDLPAAWGCRRPMAFCRDLDAAALVGSEPNAAAAAAAAGDAVEPKRNASRSPPKGGDAPVAAAAAQEAPRKQWNLRYRKGGRDGGEDALQNKKLWNMEAAGGGGGGGARASRGFSVELTRQEIDADFFAITGRKAPRKPAKRPRSVQRQVDSICPGNSLWEVSRDRYKVNEKGGF

SEQ ID NO: 39353 - protein, 255 aa, Oryza sativa
MASREHLLLDPAALAVSWADPAAVEIPPELLAALGEYLSARRSDGEAEADAEAEADDEFMMYEFKVRRCARARSHDWTACPYAHPGEAARRRDPRRVAYTGEPCPDFRRRPGAACPRGSTCPFAHGTFELWLHPSRYRTRPCRAGVACRRRVCFFAHTAGELRAGSKEDSPLSLSPKSTLASLWESPPVSPVEGRRWVDGIDECDADAEMEELMFAMRELGLRKVRPSASSVTPVLPPVTDEDGPDFGWVSELVM

SEQ ID NO: 39354 - protein, 220 aa, Oryza sativa
MDAPRLHHSARALLLVAPSASPAPAAVPPGVAGALPVAENGRGGPLAVSSLNTNTIVLLVLLVCGLVAAVALHVVLQCALRVTRRACYGAETAAAAAAGGGGEGGRARRGGGGGGRKRTPPLSKTIPRVAYTEGLELAGSSRSECVICLAEFARGEHVRVLPGCNHGFHDRCIDRWLAARPTCPTCRQAPFAAAAADPVAPPDPAPAAVQVVRVIVLTSQ

SEQ ID NO: 39355 - protein, 245 aa, Oryza sativa
MMRLVSLLLALVTLFFTSGVVAPDPPSFTPGLSTNAPAASGTSAQGSATSTSANIPSSAPVGGITVTQPIQTADPSYYKIARGVDVTFGWNFTSVLQYPRTLTVQAYCSDNLNTYNIATDLPGTATSVVWSPYNYSTSVEVSNPNLPQLIAASYRLLVYDERGMNVGASPGLMQPNTKVQFALYNPQAYTPLASGWICAACSGATGLKATHPAFVGLLATVVIAVVSGWNLLSRQTGMAGLVDDE

SEQ ID NO: 39356 - protein, 201 aa, Oryza sativa
MASRRSLHLLTASRGIFSTPHLASLGWFDKIKSTFTGKKPDEATDPSANFTLLQFADSMEKARKLGTFKNFVMGRCSEATVVNAFEKHSAVLRYLGTIDPTGEKLKNSDKIGATKHCNCTIADVEHILAKYTWAKEAQKKIVKLKEEGKPLPKNFNEVKNLMGSTPLDVGRSNLEKSGQISRNAMCPCGSKKQYKKCCGAS

SEQ ID NO: 39357 - protein, 209 aa, Oryza sativa
MGEVCKRVAPSVREEEEEEENGDGGGVDPAAESSSAKLYEDVPEMPLMALNHISRLCKSIDASVRFYVKALGFVLIHRPPALDFNGAWLFNYGVGIHLVQRDDARRAPDVNPGDLDPMDNHISFQCEDMGMMEKRLNEMGIEYMKRTINEEEGSPIDQLFFKDPDGFMIEICNCENLELVPAGALGRLRLPRDRHNPPLRMAAAGNDEA

SEQ ID NO: 39358 - protein, 134 aa, Oryza sativa
MAAYTSKIFALFALIALSASATTAITTMQYFPPTLAMGTMDPCRQYMMQTLGMGSSTAMFMSQPMALLQQQCCMQLQGMMPQCHCGTSCQMMQSMQQVICAGLGQQQMVKMAMQMPYMCNMAPVNFQLSSCGCC

SEQ ID NO: 39359 - protein, 107 aa, Oryza sativa
MSAGSERAHAAFASPSPVSGAFFSASGSILSGSILSGSILSSSSAAVTTTTSAGRTPSSSSGAPTKKKKKPPFRPVADDTKPVLRDPISRSDPVETEQAVLRLPPFP

SEQ ID NO: 39360 - protein, 205 aa, Oryza sativa
MRAGGMLCRSQAATAVCVPGDARSMIVSRRADRTIAEDARLAHDVRYARLGAAASAGGARVPSRRFAAPRQALTPPPPPPPPPQPPKQHRRPRRGAGVAVTFPMVTKSPKETPAREMAAAAAAAKRAPLAAASPGDQVLQVVVMKVAIHCQGCAGKVRKHISKMEGVTSFSIDLESKKVTVMGHVSPAGVLESISKVKKAELLFL

SEQ ID NO: 39361 - protein, 328 aa, Oryza sativa
MGASLSLVPLLDYFARREFAAAGLSPGAVTLPYPGDGGEATCTVHYWASTGEPLLPPLLLVHGFGPRATWQWRCQVGPLSRHFHLIVPDLIGFGGSSFGGDSAASPPSEATQAAALAALLDALPGMKGRRVAVAGTSYGGFVAYWLARTAGAGRVGPVVIASSDLLKTAADDRGFLKRAGDGWSGVEEVLLPAEPAAMRKLLEMASCRPPPPVLMPDFILRDFIQKLFTENREQLIQLFKGITVGTDKFPVTPISQEVLIVWGEQDQLFPVEKAYAVQSSLDGKARVEIISKTGHAPQLEDPTRFNKILLDFLLATHKPDPSSNGASQ

SEQ ID NO: 39362 - protein, 60 aa, Oryza sativa
MVARLRPRPREDVSFRAALRKKTARWAHASSRLSGRVLKTNGPSAHDRHVLNVRSGTSSS

SEQ ID NO: 39363 - protein, 275 aa, Oryza sativa
MKRKRPAALRGGEEAAAAALKRGPWTPEEDEVLARFVAREGCDRWRTLPRRAGLLRCGKSCRLRWMNYLRPDIKRCPIADDEEDLILRLHRLLGNRWSLIAGRLPGRTDNEIKNYWNSHLSKKLIAQGIDPRTHKPLTAAADHSNAAAAVAATSYKKAVPAKPPRTASSPAAGIECSDDRARPADGGGDFAAMVSAADAEGFEGGFGDQFCAEDAVHGGFDMGSASAMVGDDDFSSFLDSLINDEQLGDLFVVEGNDHEHGNGEIGHGDVMESKQ

SEQ ID NO: 39364 - protein, 113 aa, Oryza sativa
MVRMRWPPASSPLPARARALHAGSAIHIPRAAPCHVETASGHNPPRRAPPPGLVSFGLVCFPLLRSDADPSPWLAAECVTLHRTGWPPCQPCTCSGYFWLLRPPGALSLSRCL

SEQ ID NO: 39365 - protein, 206 aa, Oryza sativa
MNGAGGAGGAAAGKLPMVSHRRVQCRLADKRCELREEEMEYIRQFHRHEPSSNQCTSFVAKHIKAPLQTVWSLVRRFDQPQLFKPFVRKCVMRENIIVTGCVREVNVQSGLPATRSTERLELLDDNEHILKVKFIGGDHMLKNYSSILTIHSEVIDGQLGTLVVESFVVDIPDGNTKDDICYFIENVLRCNLMTLADVSEERLANP

SEQ ID NO: 39366 - protein, 184 aa, Oryza sativa
MAHADQMFRDGLLLPLRAVRRQGGGGGGDDDGGGGDVSGAPKRDAISVLLRPRYVDSAQRITTTIPASKRHLLPRLASPSSPRSSLRVAAAPGWSPSSVLGLGASNKLRLPSLGRRCGRVLPRRLSCKCLTFLEPLYQKMASCCVGRRITTRHAYGRAAADESRNIKVCEDAIRDAILHCKTSL

SEQ ID NO: 39367 - protein, 108 aa, Oryza sativa
MSPAADYHSTSTLQLLHSRLTTAATQPSSRARQGRARRQADIERGGMAAKEQGGAGGHGARRRQLQIVVGGRGAVPASSDESFGFPGGHASAFRSTMLVLFLNLVCES

SEQ ID NO: 39368 - protein, 225 aa, Oryza sativa
MPAGRWSRHRQLHLRLRGSRGIRVLRAPVRWPRPRRRGRGWHVRRRRGILRREAPSAAALIRKPRGSGSAPAAPLGLARRCHDGVVRQRLQLALRQPERELEQQQQQLRQPEHLTEERVLRHRRPKQPAVQGRLVRRPPAAAAAAAVGQPVLRAPEPVAASVAALERRWRRLGRAAQHRVRAAGIVGPPTPGRRRRPRRLPASSRSRRGERREPQREVRAAESRR

SEQ ID NO: 39369 - protein, 58 aa, Oryza sativa
MCLATVDDGRHAMAASIRAFYLRLSSPAPAELTLVYLPAIGGAALELGVRLRVRDVRG

SEQ ID NO: 39370 - protein, 386 aa, Oryza sativa
MITCLARVFEFARASGPDLCDFLRSTSPAVLIIDFFCYSALDVGAELRIPTYFFLTTCIASLAFLLYLPVIQEENTMSFRDLSGDLVHAPGIPPIPADHLPMSQLDRDSVSSRHFLALSEQVCNSHGVMVNSCHSLERRAADAIVAGLCTFPGRRTPPLHCIGPLIKPREEDSTERHECLAWLDAQPKASVLFLCFGSLGVFSVEQIKQVAVGLETSGHRFLWVVRPPPGLEHVTGPDLDALIFPEGFLRRTKGRGLEVISCSPQREVLEHGAVGGFVSHCGWNSVLEAVTAGVPMLAWPLYAEQRMNKVFLVEEMRLAVGVEGYDKGIVTAEEIQEKARWLMDSDGGRELRERTLAAMREVKEAPSDKGESKMTLLELVSQWKSD

SEQ ID NO: 39371 - protein, 265 aa, Oryza sativa
MAPAAAAACAASVRADPPGILDYGAIHACLLGGDRRASLPALALLLLLHFRVLAAAAGTHFSPAVSRLAARLRLSPSMAAVTLLALGNGAPDAFASAAALGGAGGMRRAGLAAILSAGAFVSAFVVGAVALIAAPFAVPPASFARDVFFYLLAASGLFYIYLSAEIYLWQAIGLVLFYVFFVGLVVYMDLDAEGKAVSTTELEVVNGIGRVVMDLPVTVEDRKQQHPTLCTMFSKLLQSNGSFRWGWFTRCKMPPGCNTTSYLGS

SEQ ID NO: 39372 - protein, 185 aa, Oryza sativa
METSLRLRGGGSRPQSKSQEGLRIHAKEKLPIASNALLQAHGEIHAATGAPTYLALLFRNFYPRLSANLGLGLAIHFRNNQPLPLAWDNFSYTLRASKAIIPFPSNALLGINLKGRLLADKYFNPTARTAAVELAWTILDLKRGQDVRLKLGYQLLHKMPYFQLRENNWTFNAYMDGKWDVRFDL

SEQ ID NO: 39373 - protein, 88 aa, Oryza sativa
MAPSYRPYSGEYQYGNGNAVVPYGGGGERRMKAVCRWVPGAWWLSDPEMKRRRRVAGYKSYAVEGKVKASIRRGLRWIKAKCSHIVRR

SEQ ID NO: 39374 - protein, 115 aa, Oryza sativa
MTAPRTTTTSTSTRTRTPLHSRIRAAAVVLSRRRRCPPTPPLQIRATAVLLAPLSHCRREIRGDDARRRGRRRRRRVGGDDGDLCRRALRLCRVGGSESRRGKGERRERGKWKRE

SEQ ID NO: 39375 - protein, 106 aa, Oryza sativa
MCVEESEGAERLDFGEPAAAAADAGKSKSKSPDELPSPRVRLISLHGVKEGRTMMMRLGRKEGRKEAKHALLGACFVHTPLPFLETHGVLLEVIVILFSCLIITAS

SEQ ID NO: 39376 - protein, 346 aa, Oryza sativa
MAAAADAAPKTMRAVQYDKYGGGPEGLKHVEVPIPAPKEGELLIKMEAASINPIDWKIQKGMLRLFLPKKFPFIPVGDLSGEVVELGGGVSGFKPGDKVVSMSFPNCGGLAEYAVAPASLTVARPPEVSAADGATLPAAAGSALQQLKAAGVRFDADADAAAAAGGPKNVLVTAASGGVGHYAVQLAKLAGLHVTATCGARNLAFVRDGLGADEALDYRTPDGAALRSPSGRRYDAVAHCAPPAPWPVFRDALADAGGVVVDLTPGVAATVRSFLHRVTFSKKRLVPLILMPKKEEMEWLVDMAKQGKLKTTIDSKYPLSRAQEAWAKSMEGHATGKIVVEMGGTE

SEQ ID NO: 39377 - protein, 248 aa, Oryza sativa
MVMDKSSLPPPPPPPASSASAAAASSALKALNKSSYKISKQTSSSSLASMKASQSPPPPPPHPRRPSPPPLPPPPAPPSSAPAAVDHPPPQPPVYNIDKSDFRDVVQKLTGSPCHLLPPQAQPPAPAAAVSMLPPQPPPPTIMAPPPPPPPSAIPTRLHRIRPPPLAPPRPPPILQPAPPALSPLPPLPAVCMTAESPISAYMRRLRGMPSPIHVPTSPLGFGCLPSPRTPPSPGVPMPATSPRVRDP

SEQ ID NO: 39378 - protein, 181 aa, Oryza sativa
MAVQAQYGGGMAAGMCLPDHEVEAQMRELGAMFSAAGGGCYNGGGGGGGYDCAAVVSGAAQSELTCNNGGVCGGAVGMGVGAGRKREREVVEQYAAVASSAALLPIPGMMKVAAPVSRLVESGMTSTSGRSAAAVGDALVSELCAQSAEIDAVVRMECEPKLDACPVCLAAKNASVHIAIN

SEQ ID NO: 39379 - protein, 84 aa, Oryza sativa
MECMASTEESLPASSSMDSCSGELPTTTTTAPAQSTASSGCRPPATAAKRRSLISTDLRLGLTLSSVVHIDGNNPSTPRQDFDL

SEQ ID NO: 39380 - protein, 366 aa, Oryza sativa
MAALAQLAGAAVRVALAALLALLLPAYRVYRLTASFLGALLAAAADDDVAGKVVLITGASSGIGEHLAYEYARRGAYLALVARREESLREVGDAALAAGSPGVLVVAGDVSSPDDCRKFVDDTIRYFGRLDHLVNNASIWQVGKFEELTDVNHFRKLMDINFWGHAYPTRHAIPHLKKTRGRIVGVTSNSSYIFMPRNTFYNASKAAAANLYETLRMELAGDGIAITEVIPGVVESEITKGKMLTKEGDMRVDQDERDAILGAAPVERAGEFARAAVRGVCGGERYVFEPRWYRAAYTLRVCFPEALEWCARLLTVWRLGPATTDTAGRWLLLGVPGQRWLSSRRRSGRRRSRLGEGWSCVLPGFG

SEQ ID NO: 39381 - protein, 287 aa, Oryza sativa
MNNLQSEMASPRICCSALLVLLLVSSCNAGDHPACPAAWSAAVGAELFHGGVGGGGGGEAQCSAAAPHTPVAVFAHDVDPVRFALNLEFAEAEFFLHAAFGVGLDHLAPNLTLGGPPPVGARKAGLDELTWRVCAEFAYQEIGHLRAIQRTVGGIPRSDRPERTQLRQGNGRGGRLPPRPALRPRRQQPQLPPGRLRHPLPGHQRLHGHQPADRRLRHQAPRRRPARRRVWPGRRRARPPLRAPPRDSVPLRCHGGRAHRPCVGAAKQARAVRSEGRGAHRARAARR

SEQ ID NO: 39382 - protein, 187 aa, Oryza sativa
MDPAGGGRPRMDPAAGRPPPPRIRRENRLPSPPLPGSNGSARAADLAGRRATTGGSGSSHPSPLPSPPWRQREHAGGGTNGRVSDDGRPAAVPARIRRPVALPPPRIRHGRLAGGANDEAGAATLPPPPTRRERRRRPDLGFSFFFEFFSVFCFSVRWHKQPQISRFSQAICSRQAKSLHAKNRFTA

SEQ ID NO: 39383 - protein, 267 aa, Oryza sativa
MFTDGMSRLAVGVSLMLALSLALFLTIAVLLLADLFCSHLRRRWMRAEEGEALSRRRAKLGLAGTSRAAAGDDDAASVATTATTTTAREALSSTPPFYYAHGVMQAAADTKDLLLAIPKLESAVWRWSPARRSSPSSSSSANSDRFVCISNPVYERGAAPPADVRGDTDTPFETPDASPSPFGITEEVEEEGGEFSPPLSVMRKLPPLGVVACPPPSMGFIDGRPSLGFTDGRPSLTAWSGTVTDTNRASSSSSNLTAHFFSSWSPK

SEQ ID NO: 39384 - protein, 172 aa, Oryza sativa
MAVSLWRAVMGAAGGGGSSSSSAAGGDAGGGVEFWHGGERTGWLNKQGEYIKTWRRRWFVLKQGRLFWFKDAAVTRGSVPRGVIPVATCLAVKGAEDVINRQFAFELSTPTDTMYFIADSEKEKEEWINSIGRSIVQHSRSVTDAEVVDYDSRPNSKPPPQPKTSEESEPSA

SEQ ID NO: 39385 - protein, 115 aa, Oryza sativa
MEAGGVRRRRSPMEIAAFFTPATAAAEAVVAITRNWVFYFCMRTIVFAGGLLALFIGYVMAAYSKTWLDSLSLLPLLFAAVILPVYAAVAIQDARRLERERVVWIVRKALEIEGL

SEQ ID NO: 39386 - protein, 236 aa, Oryza sativa
MRAPSPRRRHRLAAAAAGLGFGFGPLDGPRAAGAHGAGAGGDHHGALRRQRLLHRAHRALRLLLRRRRAATARRRRVVVGAPRAVRGDQARARRDPGARGPDAAPRRRRRRRRRGGRQRRLRGVPGGVRRRGRGARAAGVRAWVPQGVRRPVAAHARAHLPRLPRTRRRARRGPGRRRQGGLLRRRRERREARRRRRRHWLPVRRRRVPRASCDLILLRVLISCNRVLSRCLAQFC

SEQ ID NO: 39387 - protein, 276 aa, Oryza sativa
MEASSNTNAMAGVMAPLMLHGRVAIVTGGAGGIGSAVSRHLASLGARVAVAYIGDPAPANELVSGINDGYLRAEEEEKRGPRAIAVEADVSDAARVRALFDAAAAAFGGEIHILVTTAAVLDFAYPALAETSEAAYDAMFGVNARGTFLCCREAANRLARGGRGRIVTFSSSGVGSLRPGYAAYAASKAAVEVMTKILARELRGTGITANAVAPGSTGTPMMYTGKTEEDMARYIAEAPLGRLGMPDDIAPLVGFLASDAGGWINAQVIRCNGGTI

SEQ ID NO: 39388 - protein, 70 aa, Oryza sativa
MRRSSSGARVSSEGGSGGGGEIEGVGLPTCDPQSAAGRREAARARALQRAVHCIPLVLILCALLLWLSAS

SEQ ID NO: 39389 - protein, 213 aa, Oryza sativa
MTEGKKTKTKPHRRACCLLLAAVAVLGALVLALYLVYRPRPPRVVATPVDVTIELFSLVPPKLKAAVGVHVVVTNPSNSAYRYGESLASVTYHGERVGASVVPRGEVEARSTRLIEPATAVDVVRVAESPHFAHDAAAGVLPFVAVTTVEGKALVLRSFEVSVSVEVVCFVQMYVFHGESTSRCVSTVRTATETVSSEPSGARGARNSVPSYD

SEQ ID NO: 39390 - protein, 126 aa, Oryza sativa
MSTVEQEELSECEVLWPETRHGAPGSPYGPSTAAPGGASRDHRRQRSAPVDIPRPAHLPRGRADLDDEEEEEEHDGAMVPPHLMVSRRWSEGKAAAFSLRSGPGRAHRDLSHLRNSVLRMTGFIEG

SEQ ID NO: 39391 - protein, 232 aa, Oryza sativa
MKKIFGAKKSKDPPPSIQDATERINKRGESVDDKIKKLDEELGRYKEQIRKTRPGPSQDAIKARAIRLLKHKRMYEEQRNMLYNQTYNLDQVAFAADGLKDAQQTMNAMKAANKELKGMMKTVKIEDIDNMQDEMTDLMDVSNEIQESLGRSYNIPDDVDEEELMGELDALEADMEFESSAVPSYLQPDKESDFDAELNLPAAPTAPAAVPVSRQQVDELGLPAVPRASIRS

SEQ ID NO: 39392 - protein, 168 aa, Oryza sativa
MADRPPAARAALPGPPRPLRGQAHTDLPLRRRIQHHAYDSARLVGFLALAVTLAALLVLAGVTLTVAFVALVVLSPLLLLTSPLWVPMAAAVFVSGAASIIGWCLAVGAVAAGTWAYRYFTGRHRRPVGAHRVDYDVGAGTASGWMGYYAREYGARPRVHVKDAAPGA

SEQ ID NO: 39393 - protein, 51 aa, Oryza sativa
MQRRREGERAGAPPPSPPRWTPAPHRPAWYAPLRFHGDETTSSHARTRAAG

SEQ ID NO: 39394 - protein, 185 aa, Oryza sativa
MAELVGYASSARGLIKMIMATVQTAKRNKKQCRELEERVRMVSAVLSRHRRHELQPSTTETTMAARLPPGAREAADGLDGVLREAHELAVAFSQSGGGGGKKTVRRRLVCWARRVVGARRDAERLASVLSRIDFYLSLYPAIAHADTACRVDRLLWTTTVNVVVSAAVAFAGFVVVSISMVSRKK

SEQ ID NO: 39395 - protein, 151 aa, Oryza sativa
MPGVSVRDVQADKFINAYAAFLKRQGKLPIPGWSDTVKTGHLKELPPQSIDWYYIRAAAVARHIYMRKTVGIGRLRKVHGGTKNRGSRPSHHVDASGSVDRKICQSLAKIGVLENDDDKGGRRITQSGQRDLDRIAQTTVEAEEEEDEDDE

SEQ ID NO: 39396 - protein, 199 aa, Oryza sativa
MGISRDSRHKRSASGAKRAYYRKKRAFEKGRQPANTRIGPKRIHLVRTRGGNRKFRGLRLESGNFSWGSEGISRKVRIVGVAFHPSNNELVRTNTLTRSAVVQVDATPFRQWYEAHYGQPLGRRRQAKTEEEVRLSKSVESKQHERFVASGKAAAALERQFEAGRLYAVISSRPGQSGRCDGYILEGEELAFYQRAIRK

SEQ ID NO: 39397 - protein, 108 aa, Oryza sativa
MLGCGEQDAEVEQTLRDLREAEVDVVTFGQYMRPTKRHMKVHEYVKPDMFAHWQKRAQGLGFLYVASGPLVRSSYKAGEFFIENVLKQRKAQQATAPVDKENEVRATV

SEQ ID NO: 39398 - protein, 54 aa, Oryza sativa
MLILIRKNLKFSTLNLELILIFFIKIYFLVFASRSLETHIKVFIHSYFSFTVRE

SEQ ID NO: 39399 - protein, 122 aa, Oryza sativa
MTKKRRSGGRNKSGRGHVTFVRCSNCARAVPKDKAIKRFTVRNIVEAAAIRDLSEASVYQEYALPKLYIKVVYCVSCAIHAHIVRVRSREGRRNRLPPPRVRYNKDGKKINPAVAQIQAQRA

SEQ ID NO: 39400 - protein, 70 aa, Oryza sativa
MNSLRNLSRLVRNGDSRRLQSVRNLSPLSHSCWSLSPSFACSCSLHRPLLPSAAAALLASALPTPPFEEP

SEQ ID NO: 39401 - protein, 109 aa, Oryza sativa
MRAAGKPTSGGSGTSRSSNIRGLLQDFLEQQHRLDVRRQEALERHAQERAAIEQQWRQSMQALERERLMLEQAWMEREEQRRVREEARAERRDELLTTLLNRLLQDDDL

SEQ ID NO: 39402 - protein, 330 aa, Oryza sativa
MAEAAAAASNSTPASPPPPPAAAAALGLPDLSVPYELATRGQWKSLLSHLDDASHPRHRLLLSALSALSLAKLRRYADAAALIASLRPDPGCPPPPFLLRLLHALLPLFLPADRPLALDRLYTLLSSVRARPDASHPEWRRRESLVTSLLAADHLAHREFDVALALLASVAALDPGNPAVLSRLGYAHLQIGNLAAAAAAFRHVESVAGGDPAHASLLARNRALECVVAKDYAAAVREYERCIEADAADAVAVNNKALCLMYSRDLGDAIKVLEAALEGHPTAALNETVVVNLCSMYELAFVNHADVKRSLTDWIARVAPDDFDPSCTRM

SEQ ID NO: 39403 - protein, 265 aa, Oryza sativa
MATAQGQISKRRKFVADGVFYAELNEFFQRELAEEGYSGVEVRVTPTVTDIIIRATHTQDVLGEQGRRIRELTSLIQKRFKFPENSVSLYAAKVQNRGLSAVAQCESLRYKLLNGLAVRRACYGVLRFIMESGAKGCEVVVSGKLRAARAKSMKFTDGFMIHSGQPAKDFIDEATRHVLLRQGVLGIKVKIMRGADPEGKAGPAKSLPDSVTIIEPKEEQPVVQPMSQDYGAKAIAAQQAAEQQRQAEQGQAEGEAAPAEGYSEE

SEQ ID NO: 39404 - protein, 339 aa, Oryza sativa
MLVQPPNAVAVRATAAGKEPLFSFGVIADVQYADIPDGRSFLGVPRYYRHSLTILQRAVRSWNAHNHKHPVAGGGVRFCVNFGDIVDGFCPKDRSLAAVQAVVAEFDRFHGPAYHMLGNHCLYNLPRSKLVSLLRMPSGRAYYDFSPFPGYRFVVLDAYDFSAVGWPRGHPVAAAARRFLDERNPNADKNSPSGLAGVDRRFVMFNGAVGEAQLRWLDGVLRGAARRREAAVVCSHLPLHPGAASPSGLMWNYEEVMRVVHRHGCVAACLAGHDHRGGYGVDARGVHHRTLEAALECPPGTDAFGRVDVYPDGLTLVGAGRMGSTDMRLQLHSPVTELS

SEQ ID NO: 39405 - protein, 90 aa, Oryza sativa
MAELTVVPWGKDVRLSEDLRDLLVSELQQGTAKVSVEMKLHYYANFGMAAFAPSSGTTSISQELLLDSWEDNMNSSLLKTKAGLPGRQDE

SEQ ID NO: 39406 - protein, 223 aa, Oryza sativa
MAPAVKVYGWAMSPFVARALLCLEEAGVEYELVPMSREAGDHRQPDFLARNPFGQVPVLEDGDLTIFESRAVARHVLRKHKPELLGSGSPESAAMVDVWLEVEAHQHQTPAGTIVMQCILTPFLGCERDQAAVDENVGKLTKLFDVYEARLSASRYLAGDSLSLADLSHFPLMRYFMDTEHASLVDERPHVKAWWEELKARPAAKRVTEFMPPNFGFGKKPEE

SEQ ID NO: 39407 - protein, 171 aa, Oryza sativa
MDTDLGGGGGASGMDEAEAAFFARRGRRCCCFPWPSSASSHQRVGGAEEESWWQRAVDAVLKVREWSELVAGPRWKTFIRRFGRGGGGGGGGGGPRPHNYGRKLNYDALSYALNFDEGHGASPEGDYTGYRDFSARFAAPPASAKSSMDLGGRDAPPLFNPPPPHDGAGRA

SEQ ID NO: 39408 - protein, 181 aa, Oryza sativa
MRAFMPTYKNLTADGKASLLLFHAVPVYYSLRSLKSNNGVMNTLATDGSAKNFNFTVQNEGDKVTIKTDASDGVARIKDTVYDKDPIAIYAVDTVLEPVELFEPAESPAPAPAPVADAPKASKSKKASHRHVADAPGPAGDDAPPADQRKSSKKNDAAAGASCLRWLAALPVAVAVAAALA

SEQ ID NO: 39409 - protein, 166 aa, Oryza sativa
MGFVTAAADAVVALLSLTMAVAAPLFDAQVVLPRGLYPAPLVGIHRWFAAEFGHYLVADPPPFFRGLVWLDLAFLWPVCVANLYGILARRPWSAATSIMAGVYVLTYMSAIFGEMLGSGRTTPKLIQLYVPFALAAVTAVLRGFCSCSAQATAVASHAPTARKKRL

SEQ ID NO: 39410 - protein, 158 aa, Oryza sativa
MHGGLSPDLQSMEQIRRVMRPTDVPDTGLLCDLLWSDPDKDISGWSENDRGVSFTFGPDVVSRFLQKHDMDLICRAHQVVEDGYEFFAKRQLVTLFSAPNYCGEFDNAGAMMSVDETLLCSFQILKPAEKKQKYAYGGINMGRPVTPPRKQKKKSDGK

SEQ ID NO: 39411 - protein, 137 aa, Oryza sativa
MSQFDTVSNPLRTQAGSNSPGQYPLNVTAEGQQVNISTGVVNATVGNALYTGDNLVVYQVDKVLLPMAIYSTPAPAPAPLSPATKKKGKTPATSVADAPEAADATPDATTPSLAAARVTAGAGVGVVLALASVWLGL

SEQ ID NO: 39412 - protein, 358 aa, Oryza sativa
MITGTSQADCAILIIAAGTGEFEAGISKDGQTREHALLAYTLGVKQLIVAINKMDTTKWSEARYQEIIKETSGFIKKVGFNPKHVPFVPISGFNGDNMIDVSTNCPWYKGWEKETKAKATGKTLLEAIDAIDSPTRPTDKPLRLPLQDVYKIGGIGTVPVGRVETGVIKAGMVVTFAPAGVTTEVKSVEMHHEQLPEGLPGDNVGFNVKNVSVKEIRRGNVAGDSKTDPPKGCDSFNAQVIVLNHPGQVGAGYAPVLDCHTAHIACKFSELLEKIDRRSGKSIESGPKFIKSGDAAIVKMVPSKPMCVEAFTDYPPLGRFAVRDMRQTVAVGVIKSVEKSDKAGAGKVTKAAQKAGKK

SEQ ID NO: 39413 - protein, 208 aa, Oryza sativa
MRRFVGALRPLRTLTLSPIPTALRVLSTASASSSSASAAASSSDSDSAAAPDADFDSSEFALPPSGPTPPPPPQQARNPVSALRKLRFDPSLRARADEALFGKERGGVDDAVEEERSREVALALLEAALEPPADDLGPGEVREEDQMSLSVGIVGAPNAGKSSLTNTMVGTKVAAVSRKTNTTTHEILGVLTKGITQIVCSVTNICLC

SEQ ID NO: 39414 - protein, 185 aa, Oryza sativa
MNTPNSWLFADNSKYSTRARLLFMGLSFSIGILSFLVYLAIWYTCTRRRRSRQLRGGGSASADQEAPEANSHGMSAAAIAALPTFGYEASAAAAAALDCAVCLGQVDAGEKVRQLPKCGHLFHAECVDAWLRAHSTCPMCRAAVEGPATAAIAKKASSGGGATDTPPVVAPAPPAAAEALPLPPV

SEQ ID NO: 39415 - protein, 218 aa, Oryza sativa
MLVSLALYDRVLVPVARRYTGRRSGITYFQRMGAGFAVAALGVLAGALVEAKRRAAAAEHGLLDAPGAVVPVSVFWLVPQYALHGVGDALATVGHMEFLYDQSPESMRSSAAALFWVAGSLGNYLGTVLVTVVQSASRGEWLQDNINRGRLDYYYWLVTFLLVLNLAYYFVCFHFYTLKSFEVDAGDEAQRRRDVAGSAEGETELSAGCVVASRNGVL

SEQ ID NO: 39416 - protein, 306 aa, Oryza sativa
MLSTAARPAFRAGAAAMRSAPVSAPLVAQSANYATLREIEGRLKSIRNIEKITKTMKIVASTKLTRAQRAMNESITYGKTSQKTFEEAGTVPAEGEGKKSLLVICSSDKGLCGGIHSGLSRYVRKQLTTDGLPSDIDIAVIGEKCKAQMSRSNPKNMVLSFSGVGKAVPTFADATSIADQLCLLNTQYDSIKILYNKFINATSYEPTIIEAFSEEAIKESANFSSFEIDEAVLPSLREYALANSLFWALAEGHACEQSARRNAMDNASKNAGEMITKFQILFNRTRQAVITGELVEIITGAAASEE

SEQ ID NO: 39417 - protein, 221 aa, Oryza sativa
MSPVKVFGSAPFTNVARVLLCLEEVGADYEIVDVDFGDREHKGPDHLARNPFGQVPAFQDGDLMLFESRAICRYILRKHRATDEANLLREGDPSESAVVDAWLDVEALRYEPSVHAVFVQRRVVPALGGEPDERVIAESVARLRETLAVYEARLEATRGYLAGGEVSLADLSHFPYTRYFMEMPYEVPVFGAYPRVTAWWERLLTRPSVRKVAAMMSGGEG

SEQ ID NO: 39418 - protein, 280 aa, Oryza sativa
MAMHHMHDVFAQTTSIIGHEEEEVTIDPTKWGAWAHRGHRLWASMSEDFWIHVYKVQRCPRSSSHDWTSCPYAHKGERARRRDTRRFAYAAVSCPDYRPREAAPGAVPSCAHGLRCRYAHGVFELWLHPSRFRTRMCSAGTRCPRRICFFAHSAAELRDDPNSIASAILTPMPMPMPMSIPMRTPDADHHPRVSAMRDQLDLIEEAMRNRLRLYSNANANANVGSSSATAVATTTIPVSTLANGEGSTGKRCGCRRCVEEEDALLNGYPHYDLIMDLVDG

SEQ ID NO: 39419 - protein, 287 aa, Oryza sativa
MPTPTPQSIVVTGANKGIGYEAVKHLAQKLPDATIYLTARSQSNGKDAVDKMKKEAPEADFSNVRIILLEITDTSSIREAVATVQKQSGTLDVLLHNSGILQVPGEKGSKGVFDVNVRGAKACIEAFAQILTKDTGKVIVVSSEVGSWSTAAQEKALQDKLLNGSKTDWKQVEAWMNDWLLHEQGGQGVQEPWKPLDQLENSGYAVSKLFLNAYLRNYVLQSQHPRLAVVCPGYCATDLNGFSGHRPASQGGESVCWPVFNEFENGHFYQDGKDLPFLYPKPEGFNV

SEQ ID NO: 39420 - protein, 214 aa, Oryza sativa
MSPAPIRRKLVIVGDGACGKTSLLCVFAIGEFPQEYEPTIFENYVAEIRLDGKPVQLALWDTAGQEEYERLRPLSYSQAHVILIAFAIDTPDSLENVQVKWMEEVRQICGPSVPVLLVGCKKDLREDAIAKGKPVEGHYVDRNHAKQVAAQIGARSYHECSSLKNHGVDAVFEAATRAAMLVRNAGASSGGAISQSKTKEALHNDAGSCRCVVL

SEQ ID NO: 39421 - protein, 231 aa, Oryza sativa
MGTLLRPRPLAHAAGAGDATPSTAHAVVVSGGRGRGVECQPHRVRRRPGPQVAVATASWRRRRETVVRSDFAAGGAATMGDSPQALSDIDVVSRVRGVCFYAVTAVAAIFLFVAMVVVHPLVLLFDRYRRRAQHYIAKIWATLTISMFYKLDVEGMENLPPNSSPAVYVANHQSFLDIYTLLTLGRCFKFISKTSIFMFPIIGWAMYLLGVIPLRRMDSRSQLDCLKRCVD

SEQ ID NO: 39422 - protein, 173 aa, Oryza sativa
MLHHHYHGEVASLHCLSPPSLPFSSHYHSNMITMAPSPFHFPAATCEPIQELLPVVAGNRPAGSGSTDDAYQMAAEEERRRRRMISNRESARRSRMRKQRQLSELRGQVVHLRDANRRLLDELNQAMRGCSDVHCENARLRKERAELQTKLEHLMQAQKNNTSPSSSQPCENI

SEQ ID NO: 39423 - protein, 220 aa, Oryza sativa
MALDGKPPVPPPSTPPMDSWACGGRRSKRRGGGGGSSGGSGSSGGGGGGESEEEYLAACLLMLAHGVRDEAEVVGVAAATAKPQHGYECSVCGKVYGSYQALGGHKTSHRKPPSPAAEPAAGEEPSSGGVAGEAKVHRCSICLRTFPSGQALGGHKRLHYEGGAVGDAVKEKNSLKTKAAVATAVLKDFDLNLPAAATTAGDEAESSPPEAKRARLLLLV

SEQ ID NO: 39424 - protein, 221 aa, Oryza sativa
MAKPKNSDRIVVDNSNLSELKSTCDEAVERILSRQVDDGSHAKQLGYAPFKPSHRHADLRLALGFTASAVMIGTSIWSYFVEKEWSRNKYACGVAVVVYAVLSAIQMLDSYIQGNTIFTGTRKMLSNRIETERIVLQSPPLPKATKKPPQSPDAKPLLTPPAYTLHLHYTRKSNKGKSLLGSKNASLPLGHLGECFTEQGEFVEDIFEHRLLSALLKAIGQ

SEQ ID NO: 39425 - protein, 160 aa, Oryza sativa
MSHGGPFQPRSPPAGDDLSPWAAFEGSSWAAFQEGSSSSPAWHAFQPRSTVGPSQAPFYLSPGGHILSTPAGDDRSPGGSSQPRRSLADRSPGNRSELRSTPAGYPSPGRASQPRRTLENRQGPPPVRCHKHPLDHENEVECKCKTKAGLFVSWKTMYCL

SEQ ID NO: 39426 - protein, 212 aa, Oryza sativa
MQIFVRTVTAGPLAVEVNPWDTVGKVKAKIQAKGGIPAAQQRLMFAGRHLEDGRTLAEYGIKKEANLHLALRLRGGGAAGGGGDARAADSGGWGHWATTVGLFVTMVSLAVAVNAGDAGDLQLFFLWALAVAGVNLITAGVYLSSRDDVSRSCTVVLAMAAAFARRNLAVLGTIAASSAATGVMFSATQPVLCFFFFALFVSSLSLVTNHCC

SEQ ID NO: 39427 - protein, 421 aa, Oryza sativa
MAQQLRTPAAEEALLRGHAAGDKDDAVAGESKDAKRARAGLCGVLRERKVVELARAKRRLVEVPYTATLAHTANALLAARVSAVAVAAPPGHWIGAGGSMILESDPATGAVRKHYIGMVNMLDILAHIAEAGDDNDAAADAAPSEAVDLDRRMAVPVSSVIGHSLEGLTLWTLHPNTSVLDCMETFSKGEHRALVPLESAAENVVAAELVEAAPGYRMVTQMDVARFLRARAAELGDAILSRSVRGVGVGGVVLAVASGTKVIEAVRAMRAASLAAVPVVDAAPADDADARRILLQLQDGRGKRVVETFSATDLRDCPVAELQAWLGVAVAEFKKKVAMYRAGVLAADADEDEERRREMVTCSPESTLGEAIEKAVAHHVHRLWVVDEEGLLAGVVSLTDVLRVVREAAIGEDRELHDILS

SEQ ID NO: 39428 - protein, 136 aa, Oryza sativa
MTKINSHLHSSRRKSRKEHFNAPSSVRRVIMSAPLSKELREKYNVRSIPLRKDDEAVIKRGSNKGREGKITACYRLKYVIHIERVTREKTNGQSVPIGIAASKVEVTKLHMDKDREAILERIAKGREAAKEKRTKA

SEQ ID NO: 39429 - protein, 141 aa, Oryza sativa
MSAAAAAAAGQEVNPGVVVAAVVEVEWAECACCGLREECTPTYAAGVRARYGGRWLCGLCGEAVGEELAAAGGGAGDDGSVVVEVEAAIARHAAFCRALGCRSPAAAERLIAAVRRLLRGAGEGGRKEKAKAVVVLEFHDA

SEQ ID NO: 39430 - protein, 232 aa, Oryza sativa
MATEEENFVDDDADVKSMSSSSSLSSLFDLDLTAFGDRWVVSGGKEEVDFAGADDGGGGAVNVASDEDEDGRGGGVAAALGPAARLRELLLRKLRKPKAAGGGGAVSPEGRSGRFLAKVRADSMPRLEARAIAGGEEERRAATTTNPKEAARKYLNKIATSLARRRGGPDPAAMVVAAPTTTGKTKTSRSSMAAPPPPRRGIDGSAQHLQDGIESAIAHCKLSLRTATAEPS

SEQ ID NO: 39431 - protein, 86 aa, Oryza sativa
MEPQRLSRRMKTGRRQARVQKLLQTHTMLRRTSLKCCNTSVLSSPHQRSQTLYHCPPPPTPAPGTHGAATEQRSWERIVRSLRLNP

SEQ ID NO: 39432 - protein, 201 aa, Oryza sativa
MSAQALNKIAPNSPSRAKPSEVEQQIATALYDLETSVPEMKAALRPLQFVSAREIETGHGKKAIVIFVPVPLPQGWHRSQQRLTRELEKKFSDRHVLIIASRRILPRPKRSNRSRTTQTQKRPISRTLTAVHDAILADLVYPVEIVGKRIRTKEDNTKVLKVVLDEKERGGVDYRLDTYSEVYKRLTGKGVNFEFPQHTEH

SEQ ID NO: 39433 - protein, 138 aa, Oryza sativa
MRRKGSECTRITPETTGGGKPTISLQASSWSSRMEPSDPDRRSRLARGACGSRLLRSARWTATRFYRRARASVARAFRPASTKKGPASCAASRSPDCTPARNSSRRHSLAPVVADDSHKSEAVEECIRFMNSSSRKYR

SEQ ID NO: 39434 - protein, 255 aa, Oryza sativa
MPPSAAAAAAMAQSPRSLHTLISFGRGADGVDDDEATPASVDVGNAEGAGLDLDFASAPPVSAAELAPADDIFAHGRIVPAYPVFDRSLLDLSPGDASTAAPSADTYCAWTPRSAPGSPGRDRFPKSASTGGESSSSSRRWRLRDLVGAGGRSRSDGKDKFAFLHHHAAATPSSKLKTPPPPQQPQQKKQSAVKTKPAAKKGVVTEMDMATAHRLFYSKASAGGDRRPQQASYLTYRPAFSGLFALGRSQHHTAY

SEQ ID NO: 39435 - protein, 184 aa, Oryza sativa
MVMNAFVFASLMAFVAASPVPVPNPTFGELGAGLELANSITKLVGAGVQVGAPVVAKLANGIVEGVASTHISASPGVSAGVDIGVNPHVGANVGVGANVGANAGVGANAGVGANTGAEGGAGADADVGANTEADTEVSNGSGGAQDPPIYTPTSTCTSSSVPSPTSSIPQYSNEDNKYGAPASY

SEQ ID NO: 39436 - protein, 122 aa, Oryza sativa
MKRTLKRESKRKSSNRASQHSLARHMQRAAPASARRCTRTCTGLAGVTAPPEYLPCSHPAPDLLVLLQAAVSVPTDRRRRASREEQPARRRQRRGAWWSSAGYVGDEGWRRLQGHNSQQLNL

SEQ ID NO: 39437 - protein, 195 aa, Oryza sativa
MGGSRRKLKRSRAQVKVGLPRKKPREFKPAFDLPEALAAAAAAEGGGHAPSWDAEGSVVKNYAAFGVVANPNLLGAHARGTPRLVQSAPLQAPDIDAARAPVDEFEPVDSGSDLESDDLKSALGKQRRDGKSAPLEPLTKVQRIYIGRLIEKHGDDYKAMFMDIKLNTMQHSVGTLKKLCERYHVVGKSIIHPLK

SEQ ID NO: 39438 - protein, 66 aa, Oryza sativa
MRSLHRNATDESEAAERGERTKHPRRRRRRGEAGDGERRRAAVERGARPVVQGVQFHRSETRGARR

SEQ ID NO: 39439 - protein, 79 aa, Oryza sativa
MGSTEHPIPAQSPACPTVSEGGSAAPAPATDSKPKKKICCACPDTKRLRDECIVEHGESACTKWIEAHKRCLRAEGFNV

SEQ ID NO: 39440 - protein, 76 aa, Oryza sativa
MENGEIEGAADDGVPVPAPPNGRRYRPVGSSDRAVIQMTSMEPGSSSSTAVAAVSGITPQPPRYMEASLQILEIEF

SEQ ID NO: 39441 - protein, 166 aa, Oryza sativa; identical to SEQ ID NO: 39409

SEQ ID NO: 39442 - protein, 164 aa, Oryza sativa
MGCALPPYAVKPASAAADHHHRPSAYRAPEARAVGARPSQKSDVYSFGVVLLELLTGRPPEHHASPSASTSSSASFSGTTTTVCGGGGGGDQAQAVPEVVRWVRQGFEDARPLSELADAGVLRDGGARKEVVAAFHVALGCVEADPERRPRMKAVAESLDKIGS

SEQ ID NO: 39443 - protein, 164 aa, Oryza sativa
MPNPDMGVFITVDEVFDNDHRVVSQRSKGSGKFIFTAADAGDHRLCFTPTNVPATSGFLFHGGSAGGIKFELDMAIGDTSKIESSDKDKIEDVVKKVRDLNARLQDVKREQVFQREREAEFRDISESVNARVVRWTLLQLAVLGITCTWQLSYLRAFFIKQKLT

SEQ ID NO: 39444 - protein, 166 aa, Oryza sativa
MATTRPARSDPHLPPEEAARVEAEVRGYFDSMAPRRPSKPPRSDPSDAGEGGAEADADADLPELRRLRDLEAKPQKLVLDGGDVNGEEYVETQYYNGLNCIDKQHHTTGTGFIKVERPNGSSFNVTTVAYSSDSIIRCMSNPATNDWIPSSETVIPVSNKPSRSDS

SEQ ID NO: 39445 - protein, 140 aa, Oryza sativa
MAAPITAATSPLSPASRVQVMCSMLNPTSASFSRQTASFPSIRLRPVPSRFQALSCSAKQDTIDKVCEIVKNQLAVDEGTAVSGETKFVDLGADSLDTVEIVMGLEEAFQITVDESSAQVIQTVEDAAVLIDKLVAEKDA

SEQ ID NO: 39446 - protein, 184 aa, Oryza sativa
MPCRSAPGQHGRRPEAAPPPAFSPSPPPPRRRLSSRRQSRTAARTAAAGPSTPSNTLRLGPRRERHGPGYAQRLRLWLPLFRHRLPQSGFGLSGEGGRIPSGGSSAVDDATRAAVRGQQEAWVAAAGGRVLRLVWRSARAVGDGLGLIAKGTMQPTGDDHSCANWVCGFGREIAGESLAVPLAG

SEQ ID NO: 39447 - protein, 219 aa, Oryza sativa
MDRSRHKNSPSSERFLGSFLPSAAAGDQPGSAAFELDEDDLFASGAGSPERPQPSRRPLILSAVRAANPSPLPRLRRPPEGILDALPERRSPFSPPPSSSSNSSTTASPAAAAAAPPRLIPTIPRPAAALAPHIPQSAPVNVPVAQFRRLSVEALMDKAEDDDDDDEEMLPPHEMVARARARDSPMTTFSVLEGAGRTLKGRDLRQVRNAVWRKTGFLD

SEQ ID NO: 39448 - protein, 89 aa, Oryza sativa
MGGAMDDGGAARRRTMGVLPFQTRLKKEAQKERPTVWAPERTTMSSRVRNLLAKNVSASCCAVALGGGRLWRASVPLDTLPSRRPAGTW

SEQ ID NO: 39449 - protein, 102 aa, Oryza sativa
MLVVTYTSDHNHPWPTHRNALAGSTRPSSSNSSNIRLQDSTPVHHQSQTGHDRLTTTHLKQEDVIISPSLLQPDHHQLCTIIDTKHHLLFHQDYPHSFGLFD

SEQ ID NO: 39450 - protein, 261 aa, Oryza sativa
MPQINLESLFCGGGEAGSRVACETIALPGCSDAPAESRCVRIGDGAIWAELAGGAVLERDGSTKGSSNPKAAAASGKGKKGGPRPSSAESRRLPVTGKAAVVICGLPAGKMVAQKKRLSPCLGRGWRRAPAAAGARVFASEAVETDPGSPKVSCFGAVRSERSPATAAAAPAPPVEDEERNGGCWASVAATLRHLCRSSSNPLEGELETNEWNATATSSPTVAALSPPRPVAVGLGEMKRLASRRWPETMAVAGQGPVSAA

SEQ ID NO: 39451 - protein, 289 aa, Oryza sativa
MAPLPTPPPPSAPSSAPPFKSNASSSRPNRAPPEGAPTSPAAATRPPPFAMVPAVSEAVLAVFDVSTTLRSQGYLAGQELPSITLPEDRAPEVFERLLGSFLAQSHGPGVLPPRPMPPLLGDGTPVGLLRLYLAVRACGGFEAVRSWAAAAEMAGLNPAMDVPIMLVYHKYLCPLEASFLRAQKLREEAGSSGGSAKKGKFLAPAARDAEGVEEVLDLKRKRENLVGMLNWVRQVAKKPDRRRSGRNAADNHLSMALMFRRQMFVDDGFSDKPHGCASPEPEATEPEVM

SEQ ID NO: 39452 - protein, 98 aa, Oryza sativa
MERIIAMSVVGAGPGNVFGPGMSAGALESFVPRRQAGATDNAAASAAAAAEGTGRGATRPAEQATAAAEGRRAGGDGVARFDPARDGLLYCFETISPH

SEQ ID NO: 39453 - protein, 272 aa, Oryza sativa
MAMASSCSPLVAVLVALLLVAATVPAPCAAVDPVNTYCARNLSGAPAQASVAQVLSELVPRASAGYYATATAGRGGDGSAIWGLAQCRGDIPAPDCALCASAAARQLAGACRGRADARVWYDYCFARYDDADFVGLPDTGYALILLNTQNATDPEAFEKAQRKVMARVAADAGDAGGGGLARETARFKDGVTIYGLGWCTRDITAADCGLCVAQAVAEMPNYCRFRRGCRVLYSSCMARYETYPFFFPLDGGQSADASASAAGDYDRVVLNP

SEQ ID NO: 39454 - protein, 54 aa, Oryza sativa
MLAFEFANPADYDKVRSDDLVDIIGVTELAEGSKVSLVCKHKDGSKDELPSPTP

SEQ ID NO: 39455 - protein, 392 aa, Oryza sativa
MGVKWKGGGALLLLAAGLLLVAVAAAAAEEEGRRDPKEELRWCKKQCRWEAGQDQRQLRECEEQCLQRQQEDDDDDENTHGGGGKECRRECRGYRDEPWRKQECMRQCEWRRHEQHHHGGGHGGSRPDCREQCEHQQDWWEKQRCLMDCRHRRQEVDADDDNHHGRDPCYKQCRHHHDQWKKQQCMEECRYHQRQQDAAVDVDEEDDNHGGDRCRKQCQHHHDQWKKQQCIQDCRYHHRQEDDVVEEEDGHGDQQCRKQCQHHHDQWKKQQCMQDCRQWRRQEEEEAAVDEEEDHNYGGEREQHCRKRCQHHHDQWKRQQCMQDCRYRRQEEDDVVDDDNHHGGGGGHGGDHCRRQCQHHREWHERQRCMRDCHERRHGWATVAAEAILQAV

SEQ ID NO: 39456 - protein, 149 aa, Oryza sativa
MAIGRRQERRATPRPRRRTFLQLVSAGSSTAATRARARGVSHRDVKPQRSRRPAASTPASRRTYGGRPQVHPIRRARPSPTSTSLSCTPRRRPGRTRWCALPCPRFSPPSFALPCRAASVWQATRRPRPLNLVVWPSASRQQHPILILV

SEQ ID NO: 39457 - protein, 344 aa, Oryza sativa
MSVASKNIYELLGNDPELDPDRPADPPTKAIEKPVMRHGKRDGTDAPRPAPERLGNQNRVKQTASANENAFRDRGVGADKNRGRGSGEAPASGERGNYRGRGRGGRGGRGGAARGEGDRRSRTGIGEQEKQAAHGWGGNDGNAELEDEQAGEAIAKAEEKDAVADAAEGENQAEPEPEDKSKSYTAYLAELAEKKLSLGSQNVRKANEGSSKKFPEGKALSRDEEEDFMAGQGGKTKRERQRKEKVHVELDGDRMLAPPPREGGGRGRGRGDGARGRGEGRRGGGEFRGGEGRGRGEGRGEFRGGRGRGEGGRGRGEGRGRGGRGGNQANINLTDSSAFPSLGA

SEQ ID NO: 39458 - protein, 204 aa, Oryza sativa
MGLRDPPPSPEDEDLAGHVRDGGGRGTRVRRGGADHVRPARAHQLPPRRRRRGRAAAAAAQRRRSLLVVPLRGARRQAPPLQPRLRPGCAARQQQRRRLHHLLLRRRVVARRDSVPSRRRRRIGQCGGDGGVERRVPRGAVRGPDDRGAPRLQLLHGDLLLMCPVHLPVLLCSISCFFLSLFFFFLFFCFFSLVSYVRKNSDRG

SEQ ID NO: 39459 - protein, 374 aa, Oryza sativa
MMPSGFASGIAGAPAHLSPGNVPAHMKGELNTAFIGLGDDGGYGGGWVPLAALKKVLRGILKYLGVLWLFAQLPDLLKEILGSVLKDNEGALLNLDHEQPALRFFVGGYVFAVSVHRVQLLLQVLNVKRFHHQQQQQQQTPQNNGQEELTVPEISEICDYFSRRVASEPYDASRVASFITLLTLPISVLREFIKLIAWKKSLPQAHADNATTHRARIEIYLEKHPRLVSDDYTASSSSSKSNIHHDRANNSVDFALTFVLDQALVPHMSISGGAAWLPYCVSVRVRYTFGEDSHIAFLAMDGSHSGRACWLQHEDWERCKQRVSRAVETMNGSAAVGDMSQGRLRMVAEMVQKQLQLSLLQLRDSPVSTGSAAS

SEQ ID NO: 39460 - protein, 37 aa, Oryza sativa
MTTTRRRCRCLWGWRRTEESCHRHEREAGGSGVELGT

SEQ ID NO: 39461 - protein, 327 aa, Oryza sativa
MTSAVGPPSMWHYRSRPDRTTRAVNIYTGEHRGFDYLSPKIRLEPSDLLACSPCAPPALPQWIHLICSPERALETIAQINAVLNAEKSPGARSASSFPKLVYEPIPDSCVFDNLDECLRVLPSLAVFSPNHEEAAALLGLSTEWEHICQQAAADPTGGTQSIIDFVTSKLAGGFVAHLQRTHAPPDGTAGEAFGPIMCIRSGAWGSVVGRAGLGFQHVPAWHSASARKAEAEGGLDCSPERIRDVTGAGNSFLGGFSAYLVQTESQSQLDPGTRMREAAMYGAVSASLVIEQLGLPHFDVVDGKKLWNGHTAAQRLELLRDRQTPAS

SEQ ID NO: 39462 - protein, 312 aa, Oryza sativa
MEPDADELVFDSSYLRIYKNGKVDRLHRPPLLAAGVDDATGVVSKDVVLDAGTGLFVRVFLPKVQDQELGKKLPVLVYFHGGGFIIESADSATYHNYLNSAAAAAGVLVVSVDYRLAPENPLPAGYDDSWAALQWAVSAHADDWITEHGDTARVFVAGDSAGGNIVHDVLLRASSNKGPRIEGAIMLHPFFGGSTAIDGESDEAVYIASKVWPFACPGAVNGVDDPRMNPTAPGAPALEKLGCERLLVCTAQEDWLVARGRAYYGAVAASAWRGSAAWHETEGEGHVFFLRDPGCDKAKQLMDRVVAFIASA

SEQ ID NO: 39463 - protein, 83 aa, Oryza sativa
MHRINVHRILCMWITNQFDTKAEAFNIQGSYLSLSSRDAEHLLDLPSQGEEIFEPPKTKNMDLFDEFKTASKQGAHIKLSSLQ

SEQ ID NO: 39464 - protein, 201 aa, Oryza sativa
MRHLLQSSEHLTAATATAAASGGRGVHTDTFLILAAVLCFLLCVVGLALVARCSRLCNPSSFAVEAEEAMPPAPCKGLKRKALLSLPTVSFAEAAAAEEEEERPECAICLAEFARGDEVRVLPPCGHGFHAACVDVWLVSTSTCPSCRRAIVVLAAPSPAVTAAATDPPPPCCAADAAQASSQPPQPTGASDRGGCRTSVP

SEQ ID NO: 39465 - protein, 121 aa, Oryza sativa
MLAREVLRLRGTLASREAEWDVMTDLYFYRDPEAEENKDSAGVEEAKVPGADEVGAAPVEAGFTSEWEVSGASAGAFTSQAAQPGASWDADGTDWAASGDAQTGNEGWGAETTAQPTTSQW

SEQ ID NO: 39466 - protein, 220 aa, Oryza sativa
MEAKDVSPLVTVPPAGGAAPPPQGGNVMGMGELMRKKRGRPRKYAPDGSMALALAPISSASGGAAPPPPPPGHQPHGFSISSPASDPNAKRRGRPPGSGKKKQFEALGSWGIAFTPHILTVKAGEVNPDLKTKRLSFLPSFLLDPSVQPAIAESAAAVQQVVMDLCLLFLRSGFGARTNSTPLHSSHDHDHHWLGWKGTNQGCETRTSCGVRQIPSMAVG

SEQ ID NO: 39467 - protein, 31 aa, Oryza sativa
MKRCCEVVSYCTILCVNSGVPSDFHHYGVVN

SEQ ID NO: 39468 - protein, 168 aa, Oryza sativa
MLSPATTFSSSSSSSSPSRAHARAPTRFAVAAPARAARFRPARAMAASDDPRGGRSVAVVGAGVSGLAAAYRLRKRGVQVTVFEAADRAGGKIRTNSEGGFIWDEGANTMVSALWCASLLLFDHNLGLCWSALLQMLLLYILDCGALALLRLFEGWSTLASSAPWCAG

SEQ ID NO: 39469 - protein, 67 aa, Oryza sativa
MCRRRPSTRPASATCSAASTSRRRSGHGPITSTSTDRSIHGSNQPTKQPLATTNYLAVMKRSTVCTG

SEQ ID NO: 39470 - protein, 272 aa, Oryza sativa
MWEFFRVLLDKGYCTDVRDYHLVVSFLGKAGKVREAYDVLKEVKRKRPEPDISSYNSLMESLCRKNLLRPAKKLWDEMFTSGCSPNLQTYNILITKFAEINESEQAQQLFDRMFQKGVSPDVTTYTSVINMLCQEKKYEQAVEIFTKCVVQDTEVASSVLTVFILALCKQGNFKGALSVLSCIPSNVESVNSHVILLKCLIDVGEVDLAIEHIKSIRSNFSSSFQNIINELMASLSTSASLQPVTRLISYLNSQGIVHDVGPWMGLMEHNYA

SEQ ID NO: 39471 - protein, 63 aa, Oryza sativa
MCRAVDVSRCGAVTGGRCRVVSAVGCGSVEVAHAVVNILEEEQPQAAQHPVSPSHSSRSSDSE

SEQ ID NO: 39472 - protein, 272 aa, Oryza sativa
MADAAAPGEDDAAWERAIAAAVKNAPFSAPKTLTLDGAVKSTTGRLPSPSLLGRYPSLEELSVAGARLSSLAGLPRLPALRRLSLPDNRLSGAASLAAVAESCGATLRHLDLGNNRFADVAELAPLAPHGVESLDLYQCPVTKAKGYRDKVFALIPSLKFLDGMDAEGNDCLDSDDEEDEEEDEGEEGEGEGDEEEEEEGGEEGEGDEDDEEEGDEEEDEEEGEEEAEDEEDEAGADEEDESKVANGSKGSSGSAQPNKRKRDSEDDANGDN

SEQ ID NO: 39473 - protein, 73 aa, Oryza sativa
MAQIMLRHSECKFTRIADFVEFTLLTASTQRRSCHLSSSSTFLFRRHRPWSNHGDGFLITKVASPRRYHCAPS

SEQ ID NO: 39474 - protein, 195 aa, Oryza sativa
MADTGAAQPPPPPLRAPAAVPETLRRLLALVTDVLVCCFLAAMWVTPAASAAAVFSRWACGEGSPAADVAAKVSVASFLATAALAPFASPVVAWRLLGRPRRGGRARERGRGDVTGERRRRQEGGLGRVVLFALFSVCFAVVGLLLQELAPEEKGSIQEKVGSVLADIGLFANSVMVCFVVAPNLLIFLARDRWR

SEQ ID NO: 39475 - protein, 53 aa, Oryza sativa
MSHKTKITDAARRRSSFTTGPTSLDLLSEKKMTSIYKYSFHNYVVILFGTDLY

SEQ ID NO: 39476 - protein, 251 aa, Oryza sativa
MENVTGSIDFNNVSFKYPSRPDVQIFSDFTLHIPSQKTIALVGESGSGKSTIIALLERFYDPDSGNISLDGVEIRSLKVSWLRDQMGLVGQEPVLFNDTIRANITYGKHSEVTEEEITAVAKAANAHEFVSSLPQGYDTVVGEKGVQLSGGQKQRVAIARAILKDPKILLLDEATSALDAESERVVQDALDRVMVNRTTIVVAHRLSTIKGADMIAVLKEGKIAEKGKHEALLRIKDGAYASLVQLRSNSE

SEQ ID NO: 39477 - protein, 247 aa, Oryza sativa
MLEKSDKMPWWKGPTLIDALDAMPPPVRPVEKPLRIPLQDVYKIGGIGTVPVGRVETGVLKPGMVVTFAPVNLTTEVKSVEMHHEQLQSAVPGDNVGFNVKNVSIKDIRRGNVASDSTNDPAFECEFFNAQVIILNHPGQIHAGYSPVVDCHTAHIACRWKEIVSKIDRRTGKVIEETPKFVKSGEAAMVNMYPQKPLCVETFANYAPLGRFAVRDMRQTVAVGVIKAVTKKEKAEGKVTKAAAKKK

SEQ ID NO: 39478 - protein, 144 aa, Oryza sativa
MDGSDPPAAASPSAAAAAGDDDDERAAAPAAQPERCEALAGAIAGVLGGALQEHEACAAATARSQGELAAAVDRLNGELDKLLENAPSPIIMQQATRICSIRKRVLALNMLLRSIQRRIDNIDRIVSTGVTSDHSSHVQLHRQN

SEQ ID NO: 39479 - protein, 232 aa, Oryza sativa
MAGGGDELKLLGMWASPYVLRVKFALSLKGLSYEYVEEDLMNKSDLLLSSNPVNKKVPVLIHNGKPVCESQVILQYLDEAFPGAGATLLPADPHERAVARFWAAFNDDTLVEASQAASWGKTEEERAEGEKKVVEALEKMEVGLRECSKGKPFFGGDTVGYLDVVLGGFLAWVRATDVMRGVKRFDPATTPLLAAWAERFVELDAAKAVMPDMDKMIEFGKVLQARAAAATN

SEQ ID NO: 39480 - protein, 173 aa, Oryza sativa; identical to SEQ ID NO: 34910

SEQ ID NO: 39481 - protein, 192 aa, Oryza sativa
MSVEFLTKALTALFGYAMPALECFKAIEQRPGRTDHLRFWCQYWIILVILVIFDDIAGVLTSKIPMYSELRLAFLVYLWYPQTRGTDIVYDTFLRPLVMQYQPNIEERLRYLRANAGDILIFYLKNFTDRGYDLFLRGMEYIRSQTSRGSRTRRWFSFGGDRAERSSYVDDYVAGGGDRRSTARHRRPRDDY

SEQ ID NO: 39482 - protein, 102 aa, Oryza sativa
MDPEKRGYRLRILFFFFFLLLLRRWVALLFARFLIRFGSEEEGIVVCRSNLGRHLLERLRGSIISPPSNSSLVLLWVVSWSDSGGLEKIFATFFFLGNLRQG

SEQ ID NO: 39483 - protein, 307 aa, Oryza sativa
MDYSPPEAKQLPRQVSQHDIIDFFLKNMISENLGRICNAHVVHADLSEYGAMDEKCIHLAELAATAVDFPKTGKLAIMPPHLKPKVYPDFMGKEDGQSYKSEKILGRLYRSIQEASNGDVVSQEVCTPNDLPYDIDLEVPGASDFLASAWQCKCSYDAQLSALLSQYRVRTEAELVTGHITFLVKNSSKKQGDIKDRLKTAYSALRKEFKSTFESIASDQCEIGDDEKNLLYEMKASAWYQVTYHPKWVEKSRGILGPDGEEIPASLSFAWIPVDYLARIKLRCHGKVRVEGQKPVERLAAYISERI

SEQ ID NO: 39484 - protein, 187 aa, Oryza sativa
MITAAVAAVVESASPSPSPARKRCRLGGPVVANGEGGAASNTTASSEFQLRHWRPAAAGKRAGLGMRRRWAPPEIEIPGGGSGVGVGARGYTSLRDILSSPKYAASSKSSSPADGGSGGGGGGGGGGGDVHMIRHPLVKHAAYAYLQLTPSARDAADAAGRRRRRSRGPLCRLLLGCLGFVGALFGR

SEQ ID NO: 39485 - protein, 519 aa, Oryza sativa
MGDMVLLATRQGVVCHRHRLPVISCATNTKPSRLKLPPGPSTLPLIGSIHHFVSSSESVHSVMRRLAREHGPVMQLWFGEVPTVVASSPEAAQEILRSKDLAFADRHLTSGTDAFSFGGRDVALAPYGERWRHLRRLLTQELLTAARVRSFQRIREEEVARLVRDVSAAAAAAPGTAVNLTEMITRLINDIVLRCSVGSRSKYSDEYLAALNDMVGQTFSLSVADLFPSSKLASMVATAPRRALETRNKMERVIQQIIQERRDQIEADMASGDQVTAAAGSKSCSLDVLLRLQKEGGAPMPITNDVIVVLLMDIFAGGTDTSSTTLPWTMAELIRSPRVMAKAQAEVRQAFEGKNTITEDDLAQLSYLKMVIKESLRLHCPAPLLAPRKCRETCTIMGYDVPKGTSVFVNAWAICRDSKYWEDAEEFKPERFENNNIEYKGSNFEFLPFGSGHRICPGINLGLANMEFALANLLYHFDWKLPNGMLHKDLDMREAPGLIAAKHTSLNVCPVTHIAPSCS

SEQ ID NO: 39486 - protein, 246 aa, Oryza sativa
MTPPFPPSSSTPRASPPAVGPRGPTSFSSPPLPSKTAAHTPRCRPRHRRLPPCLRLSLARSDLPSPIKTLPSLPSLVSPNSRASPCPKSRSRRESELRRSSPCSGRPMWPLLATSRRASASTAFAAPRGTPGRHSFFPLPPRNTVPTVHPKPPPLSPPPAARHHRPSRRRAAPLPPTASPRGAAHRPQLRFPKSPPQPPLHRRPEPPPPLADSSRVVPLLRSSPTHAVASLGSARTRRTSATSSHR

SEQ ID NO: 39487 - protein, 237 aa, Oryza sativa
MATKRKCPANGDDGGVADLEPVAGGSFASPPPEKKAKLTVAVAVAVAPSSSSSATTAAAGEATAKREHGGFFAFARPENNTRLSVAVASSSSSASAAAEKAMAKLTVAGVAPSSSASAAAAGKATAKREYGGFCAFARPDDKTRWRVAVASSAAAAADASYSSSSPATGEQPEANRCATCRRKVGLTGFKCRCGGTFCGGHRYADEHDCGFDYKSSGRELIAKQNPVVVADKLAFRI

SEQ ID NO: 39488 - protein, 292 aa, Oryza sativa
MASPKSFACSVIALLFAAHLVSAQLSANFYDKSCPNALSTIRTAVRSAVAKENRMGASLLRLHFHDCFVNGCDGSVLLDDTPTFTGEKTAAPNNNSLRGFDVIDNIKAQVEGICPQVVSCADILAVAARDSVFALGGPTWVVQLGRRDSTTASLDTANNDIPAPTLDLGDLTKSFSNKGLSATDMIALSGAHTIGQARCVNFRNRIYSETNIDTSLATSLKSNCPNTTGDNNISPLDASTPYTFDNFYYKNLLNKKGVLHSDQQLFNGGSADSQTTTYSQTWQHFSLISAQQ

SEQ ID NO: 39489 - protein, 125 aa, Oryza sativa
MAACDGLGRAIPCPDPAEAAVPRTDPLLADGQIQEERRRGGWLRGGGVFPTPPLPRRLLGWWWRRGGGGWCSLLRIGSGVVGAGGCPLHQGPSLLLSPTSANAKTMGRRRTLDAAPILSLARPMV

SEQ ID NO: 39490 - protein, 30 aa, Oryza sativa
MVFGFTTSKVVLVLAGTIGGHGTFLRNTFL

SEQ ID NO: 39491 - protein, 129 aa, Oryza sativa
MADAACNEGSHCRLVIVVLLLILLLPLQTFCQQSTTKKLYVVYLGDKQHEDPEQTTASHHDMLTAILGSKEEAHDSMIYSYKHGFSGFSAMLTESQAQEIAGNFCRNMTNSFHLERRKKYQENQEQSRC

SEQ ID NO: 39492 - protein, 277 aa, Oryza sativa
MVELCGGEGEGQIMLATELAQLRAMARELEAKMDPDRVAARELCRALASSVDRSIRLAASCFPPPEHPPPAAGNAGRDAAFKKRKGMAKVRRQVRVTSVQDTASLDDGLSWRKYGQKDILGAKYPRAYFRCTHRHTQGCNATKQVQRADGDPLLFDVVYLGDHTCGQAAVAAAAQSAPPEHAGQEQQRQSSLLAAGTEGIHQQVVAEPMAAPFLFTSTAAGGVDDGYFSFISPANSDCQFSSDFSAGSVGVDMDHEARFEDLFSSTLEFFQSEIQNL

SEQ ID NO: 39493 - protein, 207 aa, Oryza sativa
MDRHVLQGGGAAAVPVPDQSSYGGGGAGGHQADVVVVDGAFLMELLDDTPAAAVAAEQQPEGDDADDRLSRVMRSLEAELGGAGAAPAPTSAPPLGSSSGDGGSPASGDGGRLDQLDDVLSLSDFDGGGSSRPGSCSAPPFEYWARAELPPAMGHDMGGGWCVDGDGDGLAAAVAGYEFVREPCYYTYGYGYNESSHVEQPYSPLWE

SEQ ID NO: 39494 - protein, 323 aa, Oryza sativa
MDGGGSGAGRKKLKHRLAAILSVFTRRAGDRKRRGEEGAAAPPPPPPPLAFPSYSRLGGAGGKKAAAGKHERRLSLSVPRPPPLVNITIDCAGRRSVDAADPSLLAPLDLDARKMERRLTGTGLPYETGEWEGRKCPPSTPFAAAPPLARWKERASVSSRRLSTHSSRRLMSSSSSDDEYDEDSRNLFSSRSFSSDSSDFYNCPRKNTRARASVSGPCRAPPPSSRRGTSQSCRYSFELPRGSTASAATDGGFAVVKRSSDPYEDFRKSMEEMIAEGAACGGGDGDGELSAERLLETYLVLNSPRHYPAILAAFADVRETLFP

SEQ ID NO: 39495 - protein, 180 aa, Oryza sativa
MPLQLRRAAQLRRRRRRRRRRLPAARTAAVLVAADHLLDELREDSDERGAALALDVLEWALPRPSHGHLLRRRRRQRRERRGGEHLEAGEALGGEDEVRPPRHQLLAGGHHRDREADVEGVGRADDVVTGELRRDVPRHGAHPAIVVQHPRLPAPVHQLHPRRRRRRQVHARGEAVAHGN

SEQ ID NO: 39496 - protein, 282 aa, Oryza sativa
MIVVWLTTLVPCTIWAQVNTLFVKQGTTLDRTVGGVRIPAASLGSFITISMLLSIPVYDRVLVPLARRRTGEPRGITLLQRLGVGSALQVAAVACACLVELRRMRAIRAASATAAHDTVPMSIFWMLPQYILIGVGDVFSSVGILEFFYEQSPQGMQSLGTTFFTSGLGVGNFLNSLLVTAVDRATRGGGAGKSWIGDNLNDSHLDYYYAFLLLLAVINLAVFVWVATRYEYKKEYLSDGGDVVAGMASRETEMAGGGKGKVVERSKVIDAPLVVVEEVRAV

SEQ ID NO: 39497 - protein, 178 aa, Oryza sativa
MDGREQQQQPRVSSPPPAGGGVMMPQHPYGAAPAMPPGSANVMHGVPLSFNPMASPTASSPMKPADMSGTMYRTDPVVQGMQQQPGSGGGGTAVGGGELVKKKRGRPRKYGPDGNIGLGLKPAAAAGTEAGGPSGGAGSNSNPDGKRRGRPPGSGKKKQLDALGKPASFLCFGFISEL

SEQ ID NO: 39498 - protein, 191 aa, Oryza sativa
MKALAGLRRINLDGLRWRVFDAKGQVLGRLASQIAVVLQGKDKPTYAPHVENGDMCVVLNAKDISVTGRKMTDKIYYWHTGYIGHLKERRLKDQMEKDPTEAIRKAVMRMLPRNRLRDDRDRKLRIFSGNEHPFHDRPLEPFMMPRRQVREMRPRARRALLRAQKKEQDRAAAASTKDEENAKNAKSEITA

SEQ ID NO: 39499 - protein, 49 aa, Oryza sativa
MLVLALGDNNKPRSSEYLGGLANMIIDNDMVRSSGDDLASGSGGLVQQA

SEQ ID NO: 39500 - protein, 137 aa, Oryza sativa
MVGCSRGGGGLPAWMTAAAARVDLSSAGGGGGIPGSGASSSSSCSSQPGYSGPHQQAGVAGAAADQELGMAERALSAAGAAFVSAIIVNPLDVAKTRLQAQAAGVPYYQPSQMASLGPDAVTNLMISMRVPCGWFAI

SEQ ID NO: 39501 - protein, 337 aa, Oryza sativa
MAASDVHHGGATPAAAATAVPCVTLNSGHAMPVLGFGTGSSTPPADLAATIAHAVRLGYRHLDTAAVYGTEGAVGAAVAEAVRCGAVASRGELFVTTKLSMADAHPPRVVAALRESLSRLGLDYVDLFLIHWPVAIGKKDAAGELTWDDLSRGLVPFDMEGVWRGMEECHRLGLARSIGVSNFSAAKMSRLLALAAAPPAVNQVEMNVGWRQEKVREVCGEGGVVVAAYSPLGAHGAHWGSDAVMNSGVLHGVAAARCKTIAQVALRWLYEQGVCMVARSFNEGRMKQNMDIFDWELSDQDKAMIAGVPQRRACHGNYFVSPDGPYKSLHDLWDGEI

SEQ ID NO: 39502 - protein, 66 aa, Oryza sativa
MATRAHGSCGGTAAWLGGGPTRALCAVVRCTGGRCEAAWALLARPGAMWCTRYIGSNGWQTMYSSA

SEQ ID NO: 39503 - protein, 53 aa, Oryza sativa
MVKSTKFVSVPMLRVRLLLTTQAMSIFTTFQPSTNRPRASCTTNRKVMLWNGF

SEQ ID NO: 39504 - protein, 105 aa, Oryza sativa
MRLVAGRKEGLGGMGDDVGVEEVVPGVGEAREAPVDAVGVGARVGLLLRGQQLALPQRVHRRVRVLAKLRQRRDVHESHAHPPHRPQHTARHPVQPPVRPDVQPP

SEQ ID NO: 39505 - protein, 146 aa, Oryza sativa
MTEKAWKLCDPDAENVFKALRKAGVKTAVVSNFDTRLRPLLHVLKCDHWFDAVAVSAEVAAEKPNPTIFLKACESLGVKPEEAVHVGDDRRMIYGELEMQAAMPGYGEVMFTLSRRLQRGSGLRWPSDGQWFSGALIDIYGLGVRS

SEQ ID NO: 39506 - protein, 437 aa, Oryza sativa
MPLHFDTLQLHAGQLVEQPHRSRAPPIHATTSYVFNDSEHGANLFGLKEPGMIYSRIMNPTNGVFEERMAALEGGIGALAVSSGQAAQFITVAGLAHAGDNIVSTSYLYGGTYNQFKVAFKRLGIETRFVNGDKPEDFEHLIDDRTKAIYIESIGNPKYNVPDFEKIVSISHAKGVPVVVDNTFGAGGFLVRPIDHGVDIVVHSATKWIGGHGTTIGGVIIDSGKFPWAEYPEKFPQFSKPSEGYHGLILSEALGNAAFIGHARIELLRDLGPALNPFGLFLLLQGLETLSLRVERQSQNALKLAKYLESSPHVSWVSYLGLPSHESYELGKKYLNTEHAGGMLSFGVKPIDSGDKSPFKEAGPRVVDQLKIASNLANVGDSKTLVIAPYYTTHEQLSQEEKVASGVTKDLIRVSVGTEHIDDLIQDFEQAFGEVYK

SEQ ID NO: 39507 - protein, 62 aa, Oryza sativa
MEYKNREDFRHDVAQIALNAHTYNLNRHPHIPPLADELLELCDYLLEESADVLDDAEYAIED

SEQ ID NO: 39508 - protein, 287 aa, Oryza sativa
MRIFSGIALPILAAASAAYGASWGFEDATLTVQEKGAGVGGGAKEKLSLTSALSPAVFLSATDTLKIVLTATEGKTGKKPHQAFLTLHDPSTGLEESFPFSLKDNGKGKVELTQKDLPFQFLTSSQSARASIVLASFGSTTPLRKHVFDLEVTRDTATPLALPPAPERYTSKPEIKHIFKADAQSPPVIVSGVFMLAVIFTLPALLGLWAGLGGNLDHAGKAFGANPVAHGLFFGSVVAMEGVFFLYYYSWTLFQTLPVAGLVGVVAYVSGSRALTEVQERRLAGQR

SEQ ID NO: 39509 - protein, 211 aa, Oryza sativa
MASASPSSNSVVGGAGAGAGDVCCMCGDRGLPEELFRCRLCRVRLQHRYCSDLYPRATAYRRCNWCLVREPAPAAAAGAAGHVHAMVDKPTTVRRKTASSSSPPPSSSMTDQETSPTTMSSEAERQRRLQEAAGWSASRRAPDTAGLGRPVKKQKAAADDDEGEEAPGARAAPAAKGNNGGNKEEMQAAGKKTGVKVRVRRYKLLAEVISC

SEQ ID NO: 39510 - protein, 55 aa, Oryza sativa
MGIRWIGLEVGQFCKKPSAISLANLVLLLQITSAATPSSALGRVVRFASFRLRLP

SEQ ID NO: 39511 - protein, 392 aa, Oryza sativa
MLQRNLPNLSLRISPPAVSSAAAPVSSGTPTTAARTTLPTGVITDAEGGGEVAAFFGNPSSGSEPPGLSLGLGPTTPAHADAGGGRHGDHHLQPQGCAPFKRAAARASQLPAGSKRSVRAPRMRWTTALHARFVHAVELLGGHERATPKSVLELMNVKDLTLAHVKSHLQMYRTVKSTDRSSHIASGEAQLQQQAGMEVAMEAAAGGGGNGGGGGGGVVLPMMPACDDMVGICSSPAPPAAATSSAAAYFLCATTTSTATAPLAVVPSPPAPTIPTRRTDQTPALEKGVAIVDSLHRCQKHNYSPVLQDALHQGAEEDHLITGNLPMGGASAQASIEAMATTNSSSPASSSPSLASLEQLLPEDSFAPNLEISLGRHNWNMDHPEELSLKYL

SEQ ID NO: 39512 - protein, 31 aa, Oryza sativa
MSSRFHPNYLRCNSQIISLSTLSFLKVSVKT

SEQ ID NO: 39513 - protein, 57 aa, Oryza sativa
MSVKCHEKFKNCMRKVKKAGKIGFSRKCPYEMAMATMTSGMDMAIMLSQLGTQKLEL

SEQ ID NO: 39514 - protein, 214 aa, Oryza sativa
MFDKNVQRETNSPVLPYVQKILFCFLVATLIRLVKTLLLKVLASSFHVNTYFDRIQEALFNQFVIETLSGPPLVDENQFLAEMHELQRAGATIPAELRSTVPTKNLSGQRSIRMSGVIPKGEGSKQLSKEKGEHQIEEGITIDKLHKLNQKNISAWNMKRLMRIVRFGTLTTMDEQIQQATGEGDESATQIRSEYEAKIAAKKIFHNVAKPGSK

SEQ ID NO: 39515 - protein, 267 aa, Oryza sativa
MSDHTTVHVSGIASSTSDKEVQDFFSFCGKIVNISVTPTSSEANAPKSASVTFEKDAAAKTALLLDQTQLGPSVVTVKAAQSLEDIAGEQGTSAAQAKDENHNDIEQEDKPRSRILAEYLAHGYAISDQALQRAIALDQKHGFSSRFTSVLSNFDKKTGATDRARGLDESYKLSDKAASGWRGLHSYFEKALGTPSGQKLRDFYSQTDKQVRDIHNEARRLADLKAGKPEKTEGEGAAATEAAAAPAPAPGVEPQAAQAAPAATEKA

SEQ ID NO: 39516 - protein, 318 aa, Oryza sativa
MDELRAPACGGGVGTVIEDLPTDVLALVLRRLDGASLAAVGCACFSFRELAVDQETWRGLCLALWPSVRDVLGCGGGGGGDGYRAFFADAFPFPEAAAAVASAAPAPVPGSLPSRLVSAVDLHHGGVCIMSRVVETDTSSAWFLGSPFRVDALVQEGFSAPSPITPSSLTLSWILIDPASGRAMNASSRRPVAVDRKWLTGETVARFTVMLGGGVALDAAVTCDDRYGHVREVSLCVEDGEGGGVSGQDGLGAVAAAMAGARRGKGAEAAARQRYEEFVKGKRARKEWKARREGIVDLCCSGVGAAAFVGFLVMLTFR

SEQ ID NO: 39517 - protein, 229 aa, Oryza sativa
MPCIPASSPGIPHQHQHQHHRALAGVGMAVGCAAEAAVAAAGVAGTRCGAHDGEVPMEVARHHEHAEPGSGRCCSAVVQHVAAPAAAVWSVVRRFDQPQAYKRFVRSCALLAGDGGVGTLREVRVVSGLPAASSRERLEILDDESHVLSFRVVGGEHRLKNYLSVTTVHPSPSAPTVATVVVESYVVDVPPGNTPEDTRVFVDTIVKCNLQSLAKTAEKLAAGARAAGS

SEQ ID NO: 39518 - protein, 135 aa, Oryza sativa
MAGSGSARRRRLCSPPPLPRAGAAERRHWPLPPCLSRGQAAADPLSRGSPAPDPHLVVENHRRFLPRATAAPPSLRRRPLPHSAMESEGRLAAVEKEGRLAAMEREGRRDRGGRQRDRALPRTCLPSPSPPRAAA

SEQ ID NO: 39519 - protein, 107 aa, Oryza sativa
MKHPPMNPVEESCQEFPGASSADDVIDDASESNWSLTHASGIHVDGRIILNLWRLMRAEIKLNNYSLEAVADEVLRKVPLVPTKILNRWFATGPGRGRYRCIEYVNN

SEQ ID NO: 39520 - protein, 26 aa, Oryza sativa
MVWNTGSTCLVLLTVARRPCKMALQL

SEQ ID NO: 39521 - protein, 413 aa, Oryza sativa
MEEQQQVEVEVEVPSYFVCPISLQIMRDPVTLPTGITYDRDGIERWLLTAGTCPLTKQPVPPDCDPTPNHTLRRLIQSWCALHADHGVDLVPTPKPPADRARVADLVSRLRAATSSAALLDALRELRDVAAESERNRKLLAAVPGAVDVLAAVVVASCRDAKAACDEALEIVCSLELSERCLARLVERNEELVDALVATLQRTNTTSRAHAALLLEAVTAVMPSNRLVSLPEEVFGEAVQLLRDRVSSPATRAALHVLVGTTSWGRNRVKAVDAGAVAVLVDMLLDGPVERRGCELALAALDRMCGCAEGRAALVSHGAGVAVVGRKVLRVSEVASEKAVRVLRSVARHAATAAVVQEMGQTGAVEKLCVVAQSEQCGERTRERARETLRLHARAWRNSPCLQPHLQALYPSC

SEQ ID NO: 39522 - protein, 301 aa, Oryza sativa
MSRLINPEFSEEEIAKLGSACEDWGFFQLVNHGVDGELLQRIKDDITEFFRLPLQEKMSVAIPPNGLQGFGHHFVFSKEQKLDWVDLLFLTTRPVEDRTTEFWPTKPPTFRDSLDKYSLEIANVSAKLFKFMAINLGVDEEALLAAFKPEQPQSVRINHYPPCSQANKVLGLSPHTDGVGMTLLLQVNDVQGLQIRKDGRWFAVKNLPGALVVNVGDVLEILTNGKYKSIEHRAVINPDKERITLAAFQSVPLSSTVGPLQELLMKGEARYKTVDGAEFTKGYFAAKLEGRRYLESLKLGV

SEQ ID NO: 39523 - protein, 304 aa, Oryza sativa
MFLSVLSPPPPPPPPALAPALPRADPGCPAGASCVGRALAHVLSVASRLPVASRKYELVRGLAERLLDDNARGGGARIGAVNRAALSGAFARTLRQLDAAAGGEWPGMELAVRAVRTGMRWWRPTAAALDDGFGGPAAEKLAAELLWLGQKMAECGAAREAAAQFGAASRLGSRALVAEPTLQVALLRLAVFLFKHANSREFEPSPGGNEDKGAIAEQRVSLLRSWLPLLCRGSNGTDAPVLSSKERTEMVAVLDELIGKLGWEQQEEILALWLHHFAACPDTDWPNLESCYTRWYAESRRLLE

SEQ ID NO: 39524 - protein, 151 aa, Oryza sativa
MGRLHSKGKGIASSTLPYSRTPPAWLKTTPDQVVDHICKLAKKGATPSQIGVVLRDSHGVAQVKIVTGNKILRILKSNGLAPELPEDLYFLIKKAVAVRKHLERNRKDKDSKFRLILIESRIHRLSRYYKTVGVLPPTWRYESATASTLVA

SEQ ID NO: 39525 - protein, 161 aa, Oryza sativa
MKKLFCSRGGTVARRSERAPMAEWCVFCPIARRDPACDTALLYSDDRVMAFKDINPSAFRHYLVIPIEHIPTVNNLQRTTEDHQLVSHMLAVGRDLLNRDAPNSEEQRFGFHQPPFNSVDHLHLHCLALPFTPSWRQVKYTPLGPLGGFIEAESLLERIRP

SEQ ID NO: 39526 - protein, 95 aa, Oryza sativa
MATGRWRTGPADRGLRRRRRRRGAQLRDAPRRRRGAFTRVRGVHGELLQRGELLVHHDRPSHHHRRRFPTPQPAEAAAAVEVGWGFQKPFIQSSW

SEQ ID NO: 39527 - protein, 225 aa, Oryza sativa
METTSYAIIKLKNHMAQQLLVVQGIVKLYETHRWSFYAEHMGIILETLSAIASHASEVSSESTLLMKFHKACSLLEVSEPAVIHFENESYQSYLKLLQALVHDHPSISEDMKIESHIMLVSEKILRKYLKCAGRERSNDSSGRDPALRWKLPLGTAKKEELSARTSLVLHVMQLLGGLERDCFRRNLPLFFPLLTNLIRCEHSSGEVQLALYDIFQSSIGPIIST

SEQ ID NO: 39528 - protein, 306 aa, Oryza sativa
MEERIPEPQDPTADVAADVLPAEASSSDVTTTGVEEESDSDGEFEFEFPFVSRDSPAGTAAVADDLFADGRIKPFYPVFGRAGAGGGGDRQQHLAKDDAAATVPPRTRGPLGRLFLEESRGSFDRWSTSTSSSSSSSAPASDEGGLDGAPPESYCLWTPGAGAGSASASASPRPPRKSGSMGSMARWRRISELVVGRSHSDGKEKFLFLPIPPPSSKENDVEHFKPKPKPPKPTPASGRKTAQAAAAEIDTVAAIHRIAYGAKGGGATGTSAGGGTPRRTFLPYREELVGLFANVNGISRSHPHPF

SEQ ID NO: 39529 - protein, 239 aa, Oryza sativa
MLHACATEREDDAAGGAGGGGGGVFATLRSMWERRWALRRLAVIMTASFGVGMVYYGMPLNVGNLGSNLYLSVTYNALAEFPSSVLSWLLMGRINRRSSVVALTAAAGVCSLACVAIPEGTGGRMAAEVLSFFATCTAFNIILMYSIELFPTSVRNSAVGMVRQALVLGGVAAPMLVALGRERSFWSFGVFGLAVGCLGLLAVCLPETRGRSMSDTMEEEEHKEAAAAIGDMDSNADLV

SEQ ID NO: 39530 - protein, 248 aa, Oryza sativa
MNSPRNLSKSPRTSSSFSQPKVFDPLQIFSGVEHPALSSSSPSVSRAPPLVVSLFSAIRCVSDQAIAPPLSPRCKEAARGRNQAEELPITRSPSSSSSPAAGSPLRFLVLGTTVGWSYRRRHTDFCRRRNILHAVIAIQASPAHVRPSVSLQERRSPVATHACTHSHRMKTSRSLTCLSMPRTTSACATVSADSDHRSPRDHHHQLRHLPLYIFLFSPRRLSRRRSPSPPPQRSPAASALSLLLLFLS

SEQ ID NO: 39531 - protein, 190 aa, Oryza sativa
MDFSNISIQWFRVHPKESNKEIISGATRSVYAPEPHDVGRYLEAEINYGGEIAIAKTAGPIDPDAGLVDYVETLVRKRETEFNVVVLQLNGIDQPKESVHVLNIGKLRMRLSKGKTVVAKEFYSSSMQLCGVRGGGEAASQAMFWRPRNDLSMVLAFETTRERNTAIMLTRRFAIDCNIILAGPGDKTPW

SEQ ID NO: 39532 - protein, 337 aa, Oryza sativa
MVPKVGINGFGRIGRIVFRNAINHGGVDVVAVNDPFIEVHYAAYMLKYDSTHGQFKGTIEIDGTSGLIVNGKKIRFYAERDPASIPWSETGAAYVVESTGVFTTTEKASAHLKGGAKKVIISAPSADAPMFVMGVNNDSYKSDVNVLSNASCTTNCLAPLAKVINDKYGLVEGLMTTIHSYTATQKTVDGPSAKDWRGGRTAAQNIIPSSTGAAKAVGKVIPSLNGKLTGMAMRVPTANVSVVDLTCRIEKAATYEDIKATIKAASEGELKGILGYTEDDIVSSDLNGDDNSSIFDAKAGIALNPNFIKLVSWYDNEWGYSHRVVDLIAYIAKVDGQ

SEQ ID NO: 39533 - protein, 235 aa, Oryza sativa
MVANALVYHPALAHWLRFVATTVGRDKLLRTLQYFSRFYAWYLYRTNRPQSAIDPYNAVKKQFGTTRKIMRIGKFAEHLKAASVAFDNKSPIDPVLRYLAVGRQLGYAGYLTLDTVTVVDAVGYRKLESVKKIQEYAYRSWGAGLLCSAIAGIYTLYTLHEKEKTIDRKEGEGVVEAKKIEKERAAARIQLISDLFDLTIPASAVGLANLDDGIVGLAGTVSSLIGTWSQWRKTA

SEQ ID NO: 39534 - protein, 337 aa, Oryza sativa
MVPKVGINGFGRIGRIVFRNATQAGTVDVVAVNDPFIEVHYAAYMLRYDSTHGQFKGTIEINGTEGLIVNGKKIRFYAERDPAAIPWGKEGADYVVESTGVFTTTDKASAHIKGGAKKVIISAPSADAPMFVMGVNNDSYTKDVNVLSNASCTTNCLAPLAKVINDKYGLVEGLMTTVHSYTATQKTVDGPSGKDWRGGRTAAQNIIPSSTGAAKAVGKVIPSLNGKLTGMSMRVPTANVSVVDLTCRIEKGATYEEIKATIKAASENELKGILGYTEDDIVSTDLNGDDHSSIFDAKAGIALNANFIKLVSWYDNEWGYSHRVVDLISYIAKVDGQ

SEQ ID NO: 39535 - protein, 282 aa, Oryza sativa
MGPTDWPEPAAGDESSAVVSDTDEHSEESSADANADETATRVQRRLDEGADAEAEEMAARMQRRVEALPGKAHESEPFTIFRVAGPMRGRNRHLYEPQMVSVGPFHRGAARLRAMEEHKWRYLRDLLARNNPGGDAPLAAYARAARELEPAARRRYAEPVALPPREFAEMLLLDGCFIVEFFLKGEDRAADALVDAAWAMQNVYNDLFLLENQLPFFVVERFYDIATGGLGRDYLVTSLLAKYLTMDTPQDAATARPPDGEILLLLTVVQTVYTVLPYYHPT

SEQ ID NO: 39536 - protein, 153 aa, Oryza sativa
MPEMCAGGIQARCLARGATSAGEDEGSLGKTRVQSTHERATTMEGCEGTQGRLRPRRRRGSGAGGCRLLQMGGRPRRHRWKLHAAPPPSMEAERSAAVDGSRVYRRMPNMPRRAAAAAAAGRSTASTAGRPMPSPPHYHVGQGTKLPSNGLWR

SEQ ID NO: 39537 - protein, 175 aa, Oryza sativa
MEYDIHTVLDTATLAATLFVIYMIRFKLRPTYMVDKDNFALYYVVVPCAVLALLIHPSTSHNIVNRISWAFCVYLEAVSVLPQLRLMQNTKIVEPFTAHYVFALGVARFLSCAHWVLQVLDTRGRLLTALGYGLWPSMVLLSEIVQTFILADFCYYYVKSLVGGQLVLRLPSGVV

SEQ ID NO: 39538 - protein, 208 aa, Oryza sativa
MTTSEREPCPDRIRDDVGGAFAMGAVGGTAFHFLRGAYNSPNGHRLSGGSQAVRMSVPRTGGNFAAWGGLFSAFDCAMVHARQKEDPWNSILAGAATGAVLSLRQGPRATATSALVGASLLALVEGAGILLTRTMATLPQEDHAYPFPVVPPPEEVSAHESSPIAWVRGIFGRKEEKPAAAGGDRKSDVLESFETPSPPIPSFDYRDI

SEQ ID NO: 39539 - protein, 27 aa, Oryza sativa
MSSESCHISLFFRLHQCVFDASVANDA

SEQ ID NO: 39540 - protein, 229 aa, Oryza sativa
MYSSDHTRWALRSFHPARVPAVAQRALRVHGRRDVLLSPPAPPRRLVVAGVAGGATPGRRRRRLLAADREHERAHGHVVVDGEQRLERVDDVAHAGARLGHALQALVRHLRGGVRGARRVLQLEAGVHDAVQPVGAAEVGARPVHEVLLPAAPPLVDGAAAGEQLQQNDAEAVHVAPRRQVARQDVLRRRVPVRAHHPRRHVRRVPLRPLLRQPKVRQLRRVILQIFPI

SEQ ID NO: 39541 - protein, 264 aa, Oryza sativa
MALFAAARRAATSTLPLLRASASAAGTTRGAAALLRPLAAAAAARPQPRSMPFSSAPSTRPSSDGELLRIIDAEIKFAEESDDHDRVEEIPDNFPFKISDEKGFNSITLTRTYQGENIEVLVSMPSLVTGDEPDRENEADEDRNEDDQEEETQKAPKSSIPLTVTISKGEEGPSLEFICTAYPDEILIDALSVMPSESGEDEMITYEGPDFNDLDEDLQRAFHKYLEMRGITPMATNFLHEYMINKDSREYLIWLRRLKDFVRN

SEQ ID NO: 39542 - protein, 267 aa, Oryza sativa
MAPRPAMSHSSAFLLPSPSAAAAGADADGAAYALLVLNQRLPRFAPRLWDRAQVRVCADGGANRVFDGMPELFPGQDPDEVRRRYKPDVIKGDLDSVRPEVKEYYSNMGTQIVDESHDQDTTDLHKCVAFITENSAIPNKSNLCIFALGALGGRFDHEMGNINVLHLFPNNRIILLSDDCLIFLLPRTHTHNIHIERSIEGPHCGLIPIGAPSATTTTTGLQWNLDNTSMSFGGLISTSNIVREESTVVTITSDSDLIWTISLRHHS

SEQ ID NO: 39543 - protein, 89 aa, Oryza sativa
MAFLDGLYGSRRRMATAKGAGVAGRRRSSSAVAAPRPVRQLYWKLRSRLRSSSKRHAGGAAAARFGYDLQSYSRNFDDGVGLVVSGHRF

SEQ ID NO: 39544 - protein, 174 aa, Oryza sativa
MMQPFTTSPVAHAPRAGRLSWTGASCRPSRCWVRVRSMRNGSTESLDHLQRASKARPRQQQGTPSARRRVIQTTPFELLRLLKLLMLLLSPLLFRPLSAKISRQRSTLAVCHLVSDARIKVSSLGTAPVYLRGSQARSPHRNLGISSSVRNSCLPTQFCLHLRILIARDRHLRH

SEQ ID NO: 39545 - protein, 52 aa, Oryza sativa
MTRSDGTGAQRLKETLKLVNVLKSSRRAAAECKSPTWTAPSSTASRPMESVF

SEQ ID NO: 39546 - protein, 173 aa, Oryza sativa
MQKTNAKNTNPPAISSATIPRAKKPAAAAVSPSSKLASSNKVTKVSPPPPQLSALWAAASSSDEEEEAVAVAVAVVPAPPPPQPASKKGKYVKGRAASKNKYLVPRRGEEDQAAEGGGNSGSKLMSGAPEEFGLPAGTFDAFADAEGEDAAAAAAPAATTCTSACSSAMGGRR

SEQ ID NO: 39547 - protein, 240 aa, Oryza sativa
MAASPPGAIVINMASNTNGESTAVTTNNLAPSTPKAVDESTTSSKTDVATKTVTDKVMASTANLAQLLPTGTVLAYQALSPSFTNHGECNAANKWLTAVLVGVLAGLSLFFSFTDSVVGQDGKLYYGVATRRGLNVFNMSREEEEAKKLSHSELRLRPLDFVHSFFTAMVFLTVAFSDVGLQNCFFGQNPGGNTKELLKNLPLGMAFLSSFVFLIFPTKRKGIGYNDNTPNRKAEDVTKN

SEQ ID NO: 39548 - protein, 347 aa, Oryza sativa
MIVRPFDDGTGNIKANTAFLCPSFEAERARLLGMPFTEAIQIVPWEEHWDPYITLQQSDVFSDLTRKPRLMVDEEMRDFIQRGLSSVGFEVVGLSGRVEEVRQIKSSSEIEILRAVNTGTVEAVRQVRKCLYPGLTENEIAEALDSALRAAGMDPFFDIVLFDENASNPHGGTNGSKVLEAETLVLIDVGAHLYGYSSDICRTFFPPFFEKPLTEEEKQTFAPHIAEKLNVWNIVFDAQTQSIHQFRENETAASVDIAARTVIDQAGYEGTFTHRVGHGIGIKAHESPYLNKGNHKTLLKTGMTFTSEPGIYLVDKFGVRHEDIFVVQGEGEPELLTGRRATGPWDP

SEQ ID NO: 39549 - protein, 205 aa, Oryza sativa
MAPVVSRGGGGGGRAMGAKERKEAAQREKEAGDEAYGEELYKRAAAHYAAAADLDPGDTSCLIKRAAANFSMNKVSSLPIPHAIPRRKPLRFTSPLAAGAFQCKECVADCDEALGRRRRRDARCGCDEKLAADALFLKALALLNLAVCAADHEPAITALEGSLELRPGSKETRAKLDMAKRNRDAFAEQERLDQEAAKTHRDRGL

SEQ ID NO: 39550 - protein, 79 aa, Oryza sativa
MAAARFAGVPRRAAQSSSSSSQAPLDEPPPPALTPEQVGLCREALEYFEGMCGRPEAMSDEFRRLQVCMYCVRPISSSS

SEQ ID NO: 39551 - protein, 114 aa, Oryza sativa
MAAKRKEPETAAAEEDPSDWIGAVASVFRMLGEMREREKREEEELREERELAAWVAATRAESYARFNMRLPTPEEEAAFARDHAHEIDLSVLRPEDYGESKRGVGNDGILRRLD

SEQ ID NO: 39552 - protein, 377 aa, Oryza sativa
MIIVSMLFMISPDLRGVDYYPYCAWIHADCSHLEVRFLTVHDPRHRDPQRRNDHDNIQGQGEAVAAPGQLEVAGDLHHRHRLRHLPRRHDRPLLLGHEEHRFLHQHVPCEATDGEGRDDVGTVPAGEHHQPGAHLRDALPQLVLRRAPRHAALRRLRRRADHRDAGDGVRHLGVRPHQGHRLGVGRRHLALQHRHLPPPRHLQVRRPLRPQRPRLGHPHRAQDCLHEQEGLRERGEGGAVGDGAEDAARAADAGDGGPPRRRRRRRAEQLQGALGDRRAGQAPRRGGPAARAQHAQGPDGVHRQAQGPRHGQRPAPLHRLKSTAGELARRRRRRLRRARSPRLFSGAACMQLSLSSSSSSSVIPFFFILNFKLWFEV

SEQ ID NO: 39553 - protein, 209 aa, Oryza sativa
MGNLISSGAVVGASGGGKVVMADGSVRALSEPVSVAELMMDHPRHFVIDARDLQQQRRHKGKAGAPPPPGGKVAPLPADHVLGAGGVYVLLPATTRGKVSAEEARRALTASRSLERSRSMPGRLRRKLSSKKMTQEADNDGNASENHAAAAEAERREETAAAARPPPADGFEEHRPEFLSRELSSRGWKPSLITIEERVAPKKVSHWLF

SEQ ID NO: 39554 - protein, 183 aa, Oryza sativa
MSAKESDTWSKVIRQEEALDRRLKTSLHITLLDADGGEEDDSDGLEDVVRGAAAQDKRKREYTRSGSGSSSGNSGGGKFPRGGSGGADHHQLAVMLPELAAAADQEGRSPINELMKLYYSCLQQEEGAADGGEAGGEGCDVAAAALAVPPEVLAGVDEVAQDVLFDLIGSYPEVDDVLHFMDE

SEQ ID NO: 39555 - protein, 289 aa, Oryza sativa
MGRAPCCDKASVKRGPWSPEEDEQLRSYVQSHGIGGNWIALPQKAGLNRCGKSCRLRWLNYLRPDIKHGGYTEQEDHIICSLYNSIGSRWSIIASKLPGRTDNDVKNYWNTKLKKKAMGAVQPRAAASAPSQCTSSAMAPALSPASSSVTSSSGDACFAAAATTTTTMYPPPTTPPQQQFIRFDAPPAAAAAASPTDLAPVPPPATVTADGDGGWASDALSLDDVFLGELAAGEPLFPYAELFSGFAGAAPDSKATLELSACYFPNMAEMWAASDHAYAKPQGLCNTLT

SEQ ID NO: 39556 - protein, 338 aa, Oryza sativa
MPPALTSNPPSFRPLSTPLTRRRAATTFLCRVGPGKPSKDTGADDEPKKRSFFADFGKLSDGRSLIPAFPPAAAGSLFAGGRGRKDPQTVFVAGATGQAGVRIAQTLLRQGFAVRAGVPDLASAQELARLASAYRLISPTEARRLNAVESDFEDPEAIAKSIGPATKVVVTVGAAEKGPDGGVVTTDEALRVVQAADLAGVTHVVVVYDLGAGDPSGESTYNVLDGFTSFFSNLFSRVQSLPLNEFLAKVVETDVRYTLIKTSLTDDYSPESTYGLVLAKEGASSTTSSTETGKVSKLQIAGLVADVFSNVAVAENKVLVYMCHMFNLCMPTHLKASL

SEQ ID NO: 39557 - protein, 204 aa, Oryza sativa
MGGATNLPPGFHFFPSDEELVVHFLRRKVSLLPCHPDIIPTLLPHRYNPWELNGKALQAGNQWYFFCHLTQSRTSSNGHWSPIGVDETVRSGGRNVGLKKTLLFSIGEPSEGIRTNWIMHEYHLLDGDCVAGGSSNLTSSSSNRRSHRKRGHSSMESNNWVLCRVFESSCGSQVSFHGGGTELSCLDEVFLSLDDYDEVSLPNK

SEQ ID NO: 39558 - protein, 326 aa, Oryza sativa
MASSAVASRKRAAPYDLEPRACCGSSPASGPKRRRYNFGSADDYERLDVVGQGGFGVVLRARDRRTGKVVALKRLIGADEGGRFAPDFDALRVEAACQHACRGHPNIVQIKDVVADAKTGDLFLVLEFVGSSLRDEFPRAHPEDIVRAMMRPLVDAAKKMHASRVIHRDIKPENILVSFSGQLKICDFGAATLMKPAGKPYDLCRPGTLPYTSPEQLAGNRCYGPAVDMWALGCIMGELLTGAPLFGGDMTEEELLADLSANLDDQLNELFYDVLPELSPAAREVLSGLLAFDPEKRLTASEALEHRWFAEEPKKAEFPGFVPLFG

SEQ ID NO: 39559 - protein, 189 aa, Oryza sativa
MTIFHPWKNITDRTSAYELSHIDNLVNHEDDETKRQKEQSVHITLLYEINLINEELFDTVISITGHKHGGTVIKFSYNAVSLAQDMELPFAAYGTSPLKPAKLFVPADYPRSSPVYEDGDEQHQGMYSVISGMVDKVFQRALRKLPVPMSIRDMARQWGISVRTVTNGGGTFGSGYGQWESCTDEFASP

SEQ ID NO: 39560 - protein, 253 aa, Oryza sativa
MATAAENKNEPARPFAVPSPSVHPAATGVGEEEEAQAATGWRSMQYLRKRRRALCCCGCCVTTLVVVGLVILVLALTVFRVKDPRITMNGVWVTAISTGPGTGAGIGSTVATNATLTADVSVKNPNAASLRFSRSETDVYYKGKTVSVAYVPAGSVGADRTVRMNITLDLLADRLASVLNGTGLILGQEYDLTTYTAMRARVSVLGIIKKSLDVRMNCSVILDVAGIAGVLLPGDGAKSGVQTRSVDCVAIVS

SEQ ID NO: 39561 - protein, 171 aa, Oryza sativa
MLIFISLLEWLQLKLLEVQPLTLFLEEGTHQFAREKDVFLMRRKGKAHPERSGFDGAWTKEPLKFDNSYFLELLREESEGLLKLPTDRALLEDPEFRRFVDHYAKDEDAFFKDYAESHKKLSELGFAPRSSAKSDGSTAAATLARSAFGVAVAAAVVVIAGYLYESSKKTK

SEQ ID NO: 39562 - protein, 172 aa, Oryza sativa
MSALSEPSPRLLLSSQSPIPVRLLLPPLRSRSRWNPELRGWCFTAGVEFYYSRVWGRRSRRREEAFGHGERRAHEPGARADRRRGPGHLPRPPVSHISPSPVTVTVTLLFCSVLTSSTINMRTHNSALRPTHAGSIVVSIFFTPSCFEPTGCLICPKRSSDCLLRCDFNDFN

SEQ ID NO: 39563 - protein, 169 aa, Oryza sativa
MVSQYKIKPRVEHYGCMIDLLGRAGCLMEARGLIQDMPFKANAAIWGALLAAARTHGDTELGEQALLHLIELEPLNSGNYILLSNIYAEQERWDAVRELRISMRDRGLRNVPGASSIDVDGMVHEFTSRDGSHPSLHKIREVLCAINSNIKSVGHIALLPESLHDVEEG

SEQ ID NO: 39564 - protein, 169 aa, Oryza sativa
MIIRQKIVKIQAHVRGHQVRKSYRRIVWSVGIVEKIILRWRRKRRGLRGFQPVKQLEGPSPIQQLEGPSQIQPAKEEEEDEYDYLKDGRKQAEGRLQRALARVKSMTQYPEAREQYSRIANRVTELQEPQAMMIQDDMQSDGAIADGGDFMAELEELCGDGDAPMPTIL

SEQ ID NO: 39565 - protein, 218 aa, Oryza sativa
MITHLALNSHPNPKKVLVIGGGDGGVLREVVKHASVEEAILCDIDEAVIRLSKKYLPGMSVGFQHPNATTHVGDGFEFLKTHKNEFDVIITDSSDPEGPAETLFQKPYFELLNDALREGGVITTQAENQWLHLSLIADLKKSCKEVFPVAEYAYTTIPTYPSGQIGFMVCCKDANRNVKEPVRSWTREEEEKLCRYYNQDIHRASFVLPNFARKALGN

SEQ ID NO: 39566 - protein, 137 aa, Oryza sativa
MDGRDVAGEPVADAQLGGDAGEEADGGARPAGVAGQVDADGVVVEGVLGAERGVAVLVHEHAHELAAGVGRPPLGVRLLEEGHQPHELVAEAVDLAADANQRPPLAQGHLLKLANQRQHHRLRHREISRHSTDSLAS

SEQ ID NO: 39567 - protein, 237 aa, Oryza sativa
MEPGFGKRLMHVLRAVYHMLRRGLCRKRLMMDLHLLLGRGKLAGRALRDVLLAHQPHGGAAAVAVMGGGAGVARGGDSSSSPLSVSFFHHNPRDVEFSCTTTPSYAPGVFPFRFRGRGGSRHAGGGASNYGGLDASAVARVFEMLNANAAAAAGAGGETPLSSMPGATPSPLLALSLGRSPAGTRQLRVTDSPFPVEPPEGAVDGRVDDKATDFIEWFRRQLLQQQASAAPTPDYRG

SEQ ID NO: 39568 - protein, 132 aa, Oryza sativa
MDSMWQTILQSGRARPVTVPKSETWATTTDEQQPRRRERAAAAAVARREIRKSATATNMTPPPSPPHVRAPPAPARRPWRTRDVLPAMPNDELMRRAESLIRRHHEQLRLQRQESEQRQALELQRRRPLIRV

SEQ ID NO: 39569 - protein, 280 aa, Oryza sativa
MAPPQQLVFAASSTDAGVAAWDLRTGAEAIRHRTCASRPRALTVVAGRFLAASQAPAGNSAPIHYYHWDKPQVAVKSFPVEPIRALIADPEGSYLIGGGISGDIFFWEVASGELLVQWHAHYRAVRCLALYDFLLVSGSEDGSIKVWDLLTMLDEQSRLEAKTQHIYSFNQHALPVTDVACCHGAIAVSSSEDHTCKIWSLSEGRMLRSISFPSITDSVALDPRSHIFYAGGRDGKIYVTAMGIDVTSPSSDDSTINGALDDHRFAYSLLSLAPLIYPVM

SEQ ID NO: 39570 - protein, 282 aa, Oryza sativa
MAGGGQAAASLLTKLAQAAAGLGIAASAASTALYTVDGGQRAVVFDRFRGVLPETSSEGTHFIVPWLQKPFIFDIRTRPHSFSSTSGTKDLQMVSLTLRVLARPDIDRLPDIFTSLGLEYDEKVLPSIGNEVLKAVVAQFNADQLLTERPHVSALVRDSLIRRAAEFNIVLDDVAITHLAYGPEFSQAVEKKQVAQQEAERSRFLVARAEQERRAAIVRAEGESEAARLISEATAAAGTGQIELRRIEAAKEIAGELARSPNVSYIPAGDSSQMLLGLSGAR

SEQ ID NO: 39571 - protein, 196 aa, Oryza sativa
MSLDEFEEGKQWLNETFHLIRCEDDCLPSVNWVLELAKAAVLRYGVRGLVIDPYNELDHQRPSNQTETEYVSQMLTKIKRFAQHHSCHVWFVAHPRQLHNWNGGPPNMYDISGSAHFINKCDNGIVIHRNRDPNSGPLDVVQVCVRKVRNKVIGQIGDAFLSYERVSGEFRDADKDTAKKAAVAAANVAKAPQRKG

SEQ ID NO: 39572 - protein, 314 aa, Oryza sativa
MKFIAVVLAALLCVAFAVDQMVIDQALIKTVNSHPRATWVAGENEVFKGKTMSQIRNMFGLFLLDKEFQQSRDGKYSAGVNAQDIPKEFDSGKQWSQCKTINGIRNQGQCGSCWAFAGSEVLSDRFCVATSGSFNEPLSPQDMVSCDKSDYGCQGGYLDKEWTYLETTGIVTDKCLPYKSGSGYVPACPTKCDSGSGAEFKKYKAKQGSTKEYASVADAQADIIAHGPIMTGFKVYRDFFSYKSGVYRHVSGSFAGGHAVKITGWGVDAKTNTPYWIVANSWGNTFGLNGFFWMERGNDECDFESNLIAGDADV

SEQ ID NO: 39573 - protein, 84 aa, Oryza sativa
MDSFSSSSGSPPNTEALMDQIKAQLAQAYAQEFLETVGNKCFAKCVTKPGSSLSGSESSCISRCVDRYIEATGIVSRALFSSTR

SEQ ID NO: 39574 - protein, 150 aa, Oryza sativa
MTSSTLTIPLFDPFRADRICAIPVRGAACLHRDCFDLETFLSQCRREEPGYPCVPDCWRCPICKGDVRPQTLVKDGFLMEVREELGRRGMLGTRAIVVEADGGWRPRAEEKGTGVRSASLEREEAGVEALGDGVGKGKRKGRVVEVIELD

SEQ ID NO: 39575 - protein, 265 aa, Oryza sativa
MNSMHDAATNFSTELSSLEAMISEKEKALCLSNEENRMLKEKIAELEQCLIQDKQEDPEVIKQESTEIILRDIEVAPHISPRRSHETPKQDMQYDELVKLNSSLEIASAALKEVENKNIDYNGIFTKNEQEKQLECILISIMKLSKEFVEIEQKLSVERSASRSEDLSDHCNHMVRQAVVLTKIGLWYKQMLETRRSELQKAEAKVVILGDKVNSHLNLLQKIYVTLDRYSPTLQQYPGLLDAFLKTCKLVAGLRSNQNKDDTTA

SEQ ID NO: 39576 - protein, 217 aa, Oryza sativa
MDDSHDLASPTSPDTASSSSSSTSTSSSSATVAPKKRPRNDGRHPTYRGVRMRSWGKWVSEIREPRKKSRIWLGTFATAEMAARAHDVAALAIKGRTAHLNFPDLAHLLPRPATAAPKDVQAAALLAAAAADFPSVSVDANAKSPDTCSVASAASPQPPPPDAEADPDSTLFDLPDLLLDLRYETSSSLSCGASWAVDDDVAGGVVFRLEEPMLWDY

SEQ ID NO: 39577 - protein, 273 aa, Oryza sativa
MSTAPVTTPVTTPNKAMLTWQDPARTGKVFGGIVATLIVFKTVNLFNVFFHVAYLGLTVAAAAEYAGRLVTGQGFVTKYKPAAKSYAKQFNSEVLPQVARCSEKFEEQIQKVIYAHDIEVTLKAAGLSYVLYKITSWFSLYTLVFAGVVLTFTLPAVYVHNKKEIDAAVTQYTKLAKDKASELSAAAHKKAGPHFDTLVKKTGPLGSFINSKIPVRTAGSTVGTETNGYKEPTSAHTTGASKFPEVPSSADDSILDEFDDAADTSKAEVPVRL

SEQ ID NO: 39578 - protein, 197 aa, Oryza sativa
MEVDASAVARALPRDFPPIENLSFEGFPRYTFKIGNRIHCTNLMYRPGSRTLLTQEEAHEIIREGLRSDIRRGRIQLNADFLQQLVDQVRDHILQRQRRGTATAMDGVVEVEDAYRNGGFGAIPASSKAMAELQEAMASDARERGCAVCLEDFEAGEKLTRMPCSHCFHATCISDWLRLSHRCPLCRFPMPTQDQSY

SEQ ID NO: 39579 - protein, 302 aa, Oryza sativa
MKEEAEKQAADEKKASDASQEVDSQENHETVQEDESKVAEHHDGHATSHDNHTPESESSVEQHDPESQDDISIKAAPADESPPEETSAAPTKEQESTPADSEGLSREELGRLVAPRWTGEKVDEVSKDDKNEHEAEHDMPEHSEETHEDESDVPESAEDSYAGYHSEVEDDRHKYDDEDFSHESDDEYVDDHDEHVASYKSDDDQKGDDHSDFTASGQASWLDKIQQTVQNVLRTFNFFKTPVDLSEASRVRKEYDDASSKLSKIQSRISTLTDKLKHDFGKEKEFYYFYDQCFESKEGKYV

SEQ ID NO: 39580 - protein, 271 aa, Oryza sativa
MPQIKPTALRFYGSSNVTVTGITIVNSSQCHLKFDSCQGVMVHDLTISSPENSPNTDGIHLQNSKQVSIHHSNLACGDDCVSIQTGCSDINIHNVNCGPGHGISIGGLGRYNTKACVSNVTVRDVNMFKTMTGVRIKTWQGGSGLVQGIRFSNIQVSEVQTPIIIDQFYCDRTTCRNQTSAVAVLGVQYENIRGTFTIKPAHFACSDSSPCSEITLTGIQLKPLIVPQYHLYNPFCWQAFGELSTPTIPPISCLQIGKPSGNNVMSDYDLC

SEQ ID NO: 39581 - protein, 223 aa, Oryza sativa
MASSPSMPLQQTPPNVSAPPRPPQHRPHPRPYHAPAISHPQNALLTQQQQKLPQHQHLQQQQQQQQQQQKLQQQQQQQQQKLQQQQQQQQQKLQQQQQQQQNQPQHSSQQSQQTTTLRNQQQISQQQTARTPVSMAQKLDSPAVLKATNVQSGDMASVDVDAGGSGNRLLSKRSIHELVAQIDPSEKLDPEVEDVLIDIAEDFVESVATFACSLQQNIESQAF

SEQ ID NO: 39582 - protein, 258 aa, Oryza sativa
MAATGAGEGKETAAVAGGGGGGSLHSKTLLKSEPLYQYVLESTVFPREPDCLRELRLATANHPMAVMAASPDQVQLFGLLIELISAKNAIEVGVFTGYSLLATALALPDDGKIVAIDVSRESYDEVGAPVIDKAGVAHKVDFRVGLAMPVLDELVAEEGNKGRFDFAFVDADKVNFLGYHERLLQLVRVGGLIAYDNTLWGGSVAAPPAAADEAVPSGRDRSLAALAREFNAAIAADRRVKPCQLAIADGVMLCRRVA

SEQ ID NO: 39583 - protein, 186 aa, Oryza sativa
MYPPDPSKSGESSAAAPEPVTGIPVGMFYPAPPMERVVSCRMAPAAGGAWTTALCDCADDCNTCCMACWCPCIPVGQIAEIVDRGSSSCALNAVLYCLVFHVSAGMCQWVYSCAYRARLRAAYDLPETPCSDCLVTFCCQTCSIAQMHRELKNRGHDPNLGWEVNSRRTMMTPPQHQAMEGMTTPS

SEQ ID NO: 39584 - protein, 187 aa, Oryza sativa
MAGSEEKKEMQDPRTQAIASTIRVVPNFPKPGIMFQDITTLLLNPPVFKDTIDLFVERYTGKGISVVAGVEARGFIFGPPIALAIGAKFIPLRKPNKLPGEVMSKEYELEYGADCLEMHVGAVQPGERALVVDDLVATGGTLCAAIVLLERAGAEVVECACVIELPELKGRERLNGKPLYVLVESHS

SEQ ID NO: 39585 - protein, 192 aa, Oryza sativa
MGSGSGSFLKVVVKNLDVLAGPIVSLAYPLYASVRAIETKSAVDDQQWLTYWVLYSFITLFELTFSPVLEWLPLWSYAKLFFNCWLVLPYFNGAAHVYEHFVRPMVVNQQIVNIWYIPRKDESDRPDDVISAAQRYIEQNGSRAFESLVNKFKASNTRRSILEEVEAERRAKAELEAEARDENPFFNQNYRY

SEQ ID NO: 39586 - protein, 259 aa, Oryza sativa
METVASLSRAALAGAPAATRATASPVNRAVVPAASRPRGGRLCCRRSLTAVSAAAGASPPVSPSPSPDGGSPGVWDALGGVSVLAAGTGEAVQLRDLWDPTEGVAVVALLRHFGCFCCWELASVLKESMAKFDAAGAKLIAIGVGTPDKARILADGLPFPVDSLYADPERKAYDVLGLYHGLGRTLISPAKMYSGLNSIKKVTKNYTLKGTPADLTGILQQGGMLVFRGKELLYSWKDKGTGDHAPLDDVLNACCNRTS

SEQ ID NO: 39587 - protein, 169 aa, Oryza sativa
MTKQTDRTGHPSSDPLIADCNICLKSATSGTLDTISPSSPPPSSSPPYNLMPHSGEVQVVAVITDWDVRDRLRWGRRTARGGSLAAAGGGAAAGPPGRHALQPSGRACTMQEREIVPSSPGGWPGEIPALVQTLPPLTRRCTSSIAGRVAGKAAGGGTWPRPRLVFAAT

SEQ ID NO: 39588 - protein, 48 aa, Oryza sativa
MPVGDRRPPVPLTAAIDPILAPLHILITVQSPFIPRPVSVASPSGARG

SEQ ID NO: 39589 - protein, 99 aa, Oryza sativa
MAAVSCRCSSVVFVGNVSYRATEAELRDACEEIGPVESLRLAVDEDAGNRRRGFAFVEYLDDETARSACRNLDRRALRGRALRVDLADLGCGGGGGETD

SEQ ID NO: 39590 - protein, 89 aa, Oryza sativa
MDPTLSEVDLAFPMQGRRRRWRLAAGEKVVAAVAVVPDLELPDPVRQWRCDRRKRTAPADTTTCGRRSAWRVRHLLWGSRGKTMMMALA

SEQ ID NO: 39591 - protein, 223 aa, Oryza sativa
MDERPALPPPPSAPQSPPFSAPASPYSALHPLLLLSPNPHLLLKPKTLTLSLSSSSLGSMPSSSPPGPAVTDAWELVTPTATVVAVGAAAVDDGGLDDCDVFPPRLHEGLGVEGEAEEAAAKEGEEDDGEEDDDDDDDEFGDGEWLWGWGRCRAAARRAWAAGVGAVREGLMVHGTCGCPAVRPAVWSAAGAAVVVGALLYARRRDRRERDLLVLLSREKDKV

SEQ ID NO: 39592 - protein, 7 aa, Oryza sativa
MDCSWVG

SEQ ID NO: 39593 - protein, 247 aa, Oryza sativa
MEGEEEEVESLVGISNALESLERQLASLQDLQHQQRYERETILSQIDRSRGCLLNKLKEYKGQDCEVIHEAASFAGEKIEHDDGLMLPPYSNHVTNSFVLDDLYPPSYLAKLKCMHNGLGSGGTNQDVTKTNRLENRNGSMPNGNSQGGIRSFVGWLAKTAVMVVGAVSIMKAAGYEPVIGRHSIKLDMAGLFSKEATSGKDQATVQCPPGKVMVLEDGRAHCVVKERVEIPFDTNLASPNASYGLG

SEQ ID NO: 39594 - protein, 394 aa, Oryza sativa
MAPSGGGGGMGSQSPSFSAPMVVLLVALIAAFFFIGFFSIYIRRCGGEASTGPTIPAAALAALSRQEQRSRRQRGLDPAVVESFPTMKYAEARELRDGGKDAVLECAVCLSEFDDDEELRLLPKCSHAFHPDCIGEWLAGHVTCPVCRCNLAPDAAAAEANVVSGEVDGEQQEEEVVVAIDVDREGEEEDEERRREAMELERIGSQRRAVRSRSGRPLPLPRSHSTGHSLATTRLGDAGDLERFTLRLPEHVRREMVAAAGEESLRRTAVREGRVGGGARSARIGRSDRWPSFIARTFSSRIPFWSASRRVLDAAEAGADAAATTTTTTPTSTARTKRDKTAAAADGSVSSAKGSVRFDCLGGGGGGGGPSNRVVAFANDDEEDDDEKPIARQV

SEQ ID NO: 39595 - protein, 445 aa, Oryza sativa
MAANAPPSAEMLSGAHPSDVTPQYDLLPRLIPYLDRHLVFPLLEFSAGNDEDENEITRAKYELLKHTNMTDYVANLWKEINNSDSIPDEFVKKREEVLAKLQHYQDQSEKITELLQDDEVVGNLRSDKAANLRFLEEQHGVTNEMVNSLYDYGRFQYSCGSYGNAAELLYQFRVLSTDNDKVASATWGRLASEILTTNWEGAMEEVQKVKDSIETRLFNNPLGQLTNRSWLIHWSLFPFFNHDPARDVLTDLFFSPAYINTIQTSCPWVLRYLAAAVITNRSRPHKHNGAYQKQLKDLIRVVRQEDYEYTDPITDFVKALYVDFDFEEAQKKLGEAEEVLRSDFFLVSAADSFVEAARHLISESYCKIHQRIDIKDLSTRLGLNQDEGEKWIVNLIRDTRVDAKIDYQEGTVIMNHPPQSVYQQVIEKTKGAFFRTQVLSSAVAK

SEQ ID NO: 39596 - protein, 327 aa, Oryza sativa
MRNPPGRHLLRVATRAVRSSSALGSGGGGGGASTSATSPVAASSSSGGRPRTRSGGRLLRATSPPPPSAIAAAACWESRTMRREGEEEWEEVVAGAEEAVHGAPVPVAEEEEEYRVVFWSPPTGDEVRAAFTSIEEVFGDPFRAHSYETEEQSALSTSVHSSSGNSSGSDDWIEPAAYALNSTALLTREHRNVLDAFRLLQKDPNVQKMVMSLSCDRAVWDAVMNNEAVQEFRRSFQDDKEAAGRKGNPGGPAGVLKWILGNTQAKIMEFMNNIMKIVNMLFHSDDDEAKPDLYTDAVKVSFMLSVFIFIVVAIARINFEPWDFKVW

SEQ ID NO: 39597 - protein, 442 aa, Oryza sativa
MEEAAAEVPSYFLCPISLEIMRDPVTLATGITYDRSSIERWMFGGGGGDGGKGTCPVTRRQLAPAEREATPNHTLRRLIQAWCAAHAVERFPTPRPPVDSCRVAALVDEGTTTMLGGGGRQRQLAALREIKAIAAESDRNKRCVEATPGAVEFLVSVVVQSHAAASTSASSDDDDLFDSVIDSPMSTSSPEEEALGVLYSLKPSEPTLRRVLGKDNGVGFLDTLASVLRRPSYRSRAYAILLLKAVTSAMPPERLMAVSPELVEEVVRVVSDGVSSKAVKAALHVLCRLCPWGRNRVKAVEAGAVAALVGLLLDEEGGGGRRRAAELAVVAIDHLCGCAEGRSELVAHPAGLAVVSKRAMRVSPAATESAVRALHAVARNAATPAVLQEMLAVGVVAKLLLVLQADGGERARARAREMLRANARVWKDSPCLQAHLKASYPS

SEQ ID NO: 39598 - protein, 86 aa, Oryza sativa
MLRSEDRPTMKQVEMTLQFLRTKKLNSCHATPENDEELQQLLPRRSEASCEQVAVNLGNSANSESRNSLKCYSLEQEFISSVGLPC

SEQ ID NO: 39599 - protein, 69 aa, Oryza sativa
MQQVLTDFQENPKAAQAHLKNPGVMQKIQKLLPPVSPQRARSGCAVGRRRTWRAASCKTRAPWSFLSAC

SEQ ID NO: 39600 - protein, 212 aa, Oryza sativa
MEIAKKARRSTGSVSGRGGDDDDDDASAATGMWSISVPDDLLGMIAAQLDDVVDFVRFLGVCRTWRETGASSPAATKPNAFLPWLLAPHHRHDPLLHSRFVFSGTTRDCPWPPSLAAGPAQTMVIGASGRLLAVGASHEACFIDPLAGAVTPLISPLPRRLKLDGLTCTVTPDMSTVVVSSIPSPCSSRRVPAGETSNCKYINAYVKSDKTE

SEQ ID NO: 39601 - protein, 395 aa, Oryza sativa
MLLPIFLRLLSRLSGVPTRSGIELDLQGRFAAFQIVQNFLFLTLISSNASQIATYVAQVASQPTTFPGLLAKAIPKGSLFFLSFVALQGLSGGASLFAQLPGLVVYYVKKFLLASTPRKVWHIDHDTNGVAWGTLFPSMTLITVIGTGYVVIAPIINGFVAFTFLLFFFGYKYLFLYVYDTKPPSETSGLFFGKAIRHIFAGLYVEMVMLTAIFFLAQSVDAAGNKTQSAIPEGAFMVVLIVIVVGFHYFLNDSFRELETALPLSLTVGESQAAAGNSRTSNETALNEKRALNGQGKFSMEATPASQGTGYDNGVPNGEKKQEALSDEHDSAFYHPWLTGDQKPIWLPNDKFGIGRAGVASARKAGLDATYEHTSVTEKGQVETDAYEPPGEPLV

SEQ ID NO: 39602 - protein, 165 aa, Oryza sativa
MAAEKRTIGLGMDYSPSSKAAAKWAVDNLVKAGDRIILVHVLPKGADASHKELWKSTGSPLIPLLEFMEMNVQARYGINPDKEVLEILQAESKSKQVEVLAKVYWGDAREKLCEAVDDLKVNTFVLGCRGLGPLKRALLGSVSNYVVNNATCPVTVVRAPTVSNA

SEQ ID NO: 39603 - protein, 272 aa, Oryza sativa
MAHLATVVLLLVAAARQAPLAAGDHSANPRLPTCAAAPDVAAPQEHGDGGGVGGGRRILDITHAVRAELPVLGSCDGVGALVRLKKSMANGSRSNLSELRMSVHTGTHVDAPGHMWQPHFDAGLDVDTLDLGLLNGPALLVDVPRHSNVTAEVMESLNIPRGVRRVLFRTMNTDKRLMWQKESDLSFVGFTEDGAQWLVGYTDIKLVGVDYLSVASYEHMIPAHVVFLKSKEIVTVEALKLDDVEPGMYMLHCLPLRLAGAEGSPVRCILIK

SEQ ID NO: 39604 - protein, 66 aa, Oryza sativa
MPLLGVAPNEVTYTALMHGYFIHGQRENGLSLFEEMRIEEGWSRAKPLHLKLLDRRVVHKGIRARP

SEQ ID NO: 39605 - protein, 281 aa, Oryza sativa
MSPSLFYKPDDPSTHNIEYASKVSGYDFAANADRTSSDKSMRSKPDDTEARNPPSNGSTTRDTTQGSATDPDDENYHTDSTNDEPKPQNGRQPTPPTEHSQHPLEPPAEFLKPPPRVGKLASTPDSHTPKGPICLNLNCRLTTWGRAPSNTQVYPDPTDTRVGKRALLLWFHAKDIDKVPEGDDSWTRLPDLHCVIATESSAGVFVNGVHLKRGDDGKRLFGRVYSGDEIVVWKEPGKALKFSCEFYQGEGKDARPSGAPRFKIETESSGWKGKGKERAAE

SEQ ID NO: 39606 - protein, 199 aa, Oryza sativa
MEQHSHCWYYGGGMAVTAAAGAGAASSTSSESQPSGYDYETAGSAEVSAPGGGGGLHRRAEAAVGEVRGGDQGLHAERRAGVARHVRDGRGRRDGLRPGRALGAGRGRGAQLPRGTRARVAPRARARRGRRLARAGAEGAALQAKAAEEIRAGRCHGDGEQDDDDDVRHDRRGAQADRPRAGGPRRRLPRGAPLDVRAN

SEQ ID NO: 39607 - protein, 157 aa, Oryza sativa
MSTAAAPSASAPRRPTRRSPATPRRPTSGCAASAPRPPPPRAAAGASSSASTASGSPATTSGRRWRPRWPSSSSAPATAASSCSCSTSPAPAGSRPSSGTSSPTRPSASSASASARTPPSWPTATACGARRRWTWRTSATAASGASPARGGWGSRDT

SEQ ID NO: 39608 - protein, 33 aa, Oryza sativa
MCWLQFRGIEKLHSLTAHWDASRVSYLFDLKTF

SEQ ID NO: 39609 - protein, 174 aa, Oryza sativa
MGLVVSAAASCGRLRRSRSRSPPPAVLDPSQSPLSLEREAEPELIRVFRCFDTDGDGLISAAEMREFYGCSVDEAEEMVAAADRDGDGFVSIEELRAVMEGGGLDALRAAFDEYDEDGNGVITAEELRRALRRLNLDGMDLTAEQCAEIVAAVDSDGDGVISFDEFKAMMSKQA

SEQ ID NO: 39610 - protein, 81 aa, Oryza sativa
MTRKQEREKGEKLAKEAASAPSPSSRADGERGGRRQRGERRVPPRPPPSQRATLAAGRRAPRSAPAGTRQPRRPPIRKRRR

SEQ ID NO: 39611 - protein, 53 aa, Oryza sativa
MYLIVGLYLPQVSNVMLYLVVQILPPSRYNEKEFTMVSAVRFVELIMPLRLSS

SEQ ID NO: 39612 - protein, 19 aa, Oryza sativa
MLDPPLVICNQQVAGQWSD

SEQ ID NO: 39613 - protein, 205 aa, Oryza sativa
MEPKSTTPPPPPPPPVLGAPVPYPPAGAYPPPVGPYAHAPPLYAPPPPAAAAASAAATAASQQAAAAQLQNFWAEQYREIEHTTDFKNHNLPLARIKKIMKADEDVRMIAAEAPVVFARACEMFILELTHRGWAHAEENKRRTLQKSDIAAAIARTEVFDFLVDIVPRDEAKDAEAAAAVAAGIPHPAAGLPATDPMAYYYVQPQ

SEQ ID NO: 39614 - protein, 565 aa, Oryza sativa
MPTRAAAVAEVAHATVESVVVPSSVSEDLSPAVNLSSMPPRLRCKNKGFLAWYGACPSSRQPSSVPPQEPRDIFVCSEQLSANPILSPPQDPDSTRSPPPTLSGPSAAEQIRRALAGLSPEGSIHSASLSPGRVPVITSDDTTAAQDFAFGEPDPVNISGDSDDDILDIFIPFVDMRVTAHYATAYVTPPCECPGRVIRKAMQDAHPRFQFTLISACRGAMTLRFIHSQDRDIAVDHQENLTAEGHLVRLERPEDSAARFIQHNTMLSELDCIDFPPEMLFPNKIRNAFENYGELMEVDDQCLYGDEQSSLRLVVLHYPGKRMSPRFRLRYNLGIVCTVYVRVLRTWELAMNVDEDGNYIKHYEQFLFPHQLDPPRSGPTVGPEAELGNLNQAPSNQISNNQRLQNRGRLLAILPAASTVFIEEISDTPEFFVPPSIHSAPSSIHDCLQDLVPSDTENEHELSARKRRRQKKRTIDSDVKRRYSERLAAKEGHLYISMESKAARAKKLKEQLAKCSSKLNDAVHKHNLLDLNFKTTPKALEDLAIACSLNDHDIAQLRKVFSSVD

SEQ ID NO: 39615 - protein, 196 aa, Oryza sativa
MRKLQCEIRAAVGVPGASGGAEVTEDHLGELRLLRAVVKETLRLHAPVPLLVPRETVEDTELLGYRVPARTRVIINVWAIGRDAAAWGDRAEEFVPERWLDGGGEEVEYAAQLGQDFRFVPFGAGRRGCPGAGFAAPSIELALTNLLYHFDWELPPHADGAAAATAARLDMGELFGLSMRMKTTLNLVAKPWSSDV

SEQ ID NO: 39616 - protein, 193 aa, Oryza sativa
MDTRVCGDDQAAEAAPVRGGGEDAVVVVVSGEGAASEAGAASTTAVAGDGVVEASASVDLTGERGRRRDDEAPTTAAAVAEEEASAPPAVVVAGAGDGDDDDEDGYVTPTSPRQRLQPPTVCPPAPKAARSAPTRLPARRFEGALVMAASASPPGRKRVQANPDSESDEVVVAFIRSLRQRLLPPEDEKKNPM

SEQ ID NO: 39617 - protein, 237 aa, Oryza sativa
MQYLAYQDLCAVSECNLEPWRRAAFFEESGETYKRIVTACLKPLEEFTSKIAEALEGFSSEKPELLSQQFKLAAAFNDSQICTWCARTLSSLTARSRQEDRYGVAQLTGCNAAVMSTLLSALVAVEACLGKKTNPQPAHSLGPASIKWANFSTGRKGNVTAIASTQRGGLHTKAFSMADVIRTSIYQMVSAFEHDMRANAKASSLEKNWISEGRKPVFGSQAVLVQKLSLFIEYRAV

SEQ ID NO: 39618 - protein, 198 aa, Oryza sativa
MAAEAGMRVNVASLLALGDDTVELLGERKDGEALAQACAGARMLRSACRSESDDLEVQMKEYQEKIKSCKEKIEKTKSETIADDELNALQKEMEEKLQDEQRLRQDLRAVRDELDNLDSQRDSIEQRKEALRKMEKEMMKAQNMLSMCVSVTKIMPNFEDKDKISGYIVDKNMKKLERFEFDKTTPPVDICNNLWKMV

SEQ ID NO: 39619 - protein, 96 aa, Oryza sativa
MYAVVISADLMAAGDHVGCTALTTATMPETCGHDMDVPESKFHVTERLSSGITVGDDMGGHAARMFTPGAVTSGCTRRITNQNTRINGFAIYPIFS

SEQ ID NO: 39620 - protein, 121 aa, Oryza sativa
MSPCRRRLHLATAGTSTSPLLASSSPTSPSGFISSPAPHPSPRVSVGGDAGRAPPGRGRCRRRGVEVDAPCASSSTTRSSSGRALWRWRSRSSRSRAPSTWCTATRGAAVYTSPWRPAPSR

SEQ ID NO: 39621 - protein, 153 aa, Oryza sativa
MSSAMASSMAKNSSPFKVVLGSSSPARREILADMGYEFTVMCADIDERAIRREKPEELVKALAEAKAEAIKLKLHGEDSAQERDQPTILITSDQVMVSKGMIRERPKGQEEAREFIKGYSGDKAFAVNYVLVTNLSNGASKGGWDIPEVAAHS

SEQ ID NO: 39622 - protein, 494 aa, Oryza sativa
MAALLLWLSWLLLSLLSIYLLDLLAHSRRCLPPGPRPLPLIGSLHLLGDLPHRSLAGLAKTYGPLMSLRLGAVTTVVASSPEVAREFLQKHDAVFATRSTPDATGDHARNSVAWLPPGPRWRELRKIMATELFSTRRLDALHELRQEKVAELVDHVAGLARDGTAVDIGRVAFTTSLNLVVRTIFSHDLTSLDDHGASKEFQRLITDVMEAVGSPNLSDFFPALAAVDLQGWRRRLSGLFARLHRLFDAEMDHRRLHGMKEKDGDFLEVLLRLAARDDDTARLDGDTLRSLFTDLFTAGSDTSSSTVEWAMAELLQNPISMAKLCDELRRVVGSRRRIEESEIGQLPYLQAVIKETFRLHSPAPLLLPRQATRTIQIMGYTIPKGTRVLINVWAMGRDEDIWPEAGKFIPERFLERTIDYKGGDLELIPFGAGRRICPGMPLAVRMVHVLLASLLIHFKWRLPAEVEGNRIDMTEKFGVTLAKANHLCAMAAPT

SEQ ID NO: 39623 - protein, 147 aa, Oryza sativa
MAAAGEEKPLPAEEIQGINDEAEPHPPRRKRNDDLLHDEEFQRVVRGIVIGPDNVPGGGHALRIIRDPATAFEELLECYRKAGLLEGQVWKRCNIFKGLEGLDNLQDEVKMEETVKEEEEEATGCRGRDASPDRPDELAKKRRLDGP

SEQ ID NO: 39624 - protein, 156 aa, Oryza sativa
MPFLPRTTAFAPRFVARAAAPRVALASRTPTRSYGIGSNMSDNDPERIEKEKKKTLSGDVDSPHGEHAPQFNEKLASDSEAGVKADRNPVSDPSQLQRDTTQRAQKEHNSQGSEGKKPTASPNDAPTHSEDAVHADRYSTSDPNKLQKETTDKLHG

SEQ ID NO: 39625 - protein, 246 aa, Oryza sativa
MSSLYPSLLSLSESPAEYRQVGGGRYAGEDVVDDDDDMAAVADAVSSYLSFDMDDVEYYTPEVGFHSKQHNPPPVAAAPLEAGGGREQSRREAAVNLGKMDRGPAPVSGGAATGGVPRSKNGSKIAFKTRSEVDVLDDGYRWRKYGKKMVKNSPNPRNYYRCSSEGCRVKKRVERARDDARFVVTTYDGVHNHPAPLHLRPQLPPPGGYSIAGAPAVVAPHGRLGLEEAEVIALFRGTTATSLLLP

SEQ ID NO: 39626 - protein, 226 aa, Oryza sativa
MRVSSASSTPPPPAFAAAAWAVVLLAMLRSDVALAAAASSNDDTGLSPLMPPPPLAAPVPAAVSPAPATPPAVLSPRKLLRPQGADVVGVGFVSGSGGGGGGDGVRTRRVDDGCAGADDIAIYQGRATPLPSGVPAYTVDVMNRCAGGGGGDEECAIAGIHVRCGWFSSVSLVDPRVFRRLGHDDCLLNDGRPLLAGETVSFEYTNSFPYKLSVSVATCVVDPAAP

SEQ ID NO: 39627 - protein, 142 aa, Oryza sativa
MGTQATTEEVPAYEDLYDERPSNAATGVIYLSSRPNTFKSTIRSLFSSMGQYSRIATDPGADIEREAHEHLAPPSPIMLAPQPRPEGHGHCEVCDKMMEKSRARQGRAMICRIVSRTLIIAGLWLTIFGIFAVMFLGGRHRY

SEQ ID NO: 39628 - protein, 33 aa, Oryza sativa
MAGPPAPLNPLPFDHATSAASVMHAELASLKKP

SEQ ID NO: 39629 - protein, 59 aa, Oryza sativa
MTSVASLIISGLLVGGAIVAVHGAFRVPEDLFLDDPSVGSNGNTTSRLLSFLGAPGSGV

SEQ ID NO: 39630 - protein, 218 aa, Oryza sativa
MDALSCLAPHAALLPCAAFTDADITRALHFSSSMPDTSSSPSSSSSAAFLADFCGGGAGGGFVVSAPPPTMPAITCESVLVADSARPSPAGPARRHQQQQLGLGPAGGRAGKRRSRASKRAPTTYISTDPANFRLMVQHVTGVQADPASLADGAAGILPTTTTTAPFDASSGLHMLDTFAAANPLLQAEQAAALQQQPCFPTLDSSWSAVMYDGSDLL

SEQ ID NO: 39631 - protein, 381 aa, Oryza sativa
MKIGPKMVLALSVLVSSIFTIALPWFARFSPIALSVCRFIIGAAHGVIWPAFAGFWASWAPSNERSRLIGTGNAGAQIGNVIALPLGGFLCINGFDGGWPSIFYVFGALGLVWTVIWFVFASNSPEENRFIGEAEKEYILEETKNTRSSFEESESGAPWCAIMKSIPAWAIFIGHSCSNWGTYLFLTSLPLYMKEVLKFDIKSNGALSALPYLVFWAFILLAGNIGDYFLMKLKWSKTKVRKIFNSLAFFVPMLAVLGLAFVTCEIKYVGVALLTVGLAFTGCAYGAGFLVNYNDISGSYSGVVFGIGNTFATIPGIIAPSLVGLLTKNNLQEEWRIVFIITAVVYLIGAIVLLIFSSGELEPWAQKNKKNQVEEELPLRA

SEQ ID NO: 39632 - protein, 273 aa, Oryza sativa
MAPRCSNAVFAAINVVTLLLGAAVLAAGIYYGAPHRGGGGVTECERFLRAPALALGGAIVAVSLAGLAGACCRATPLLWAYLLLTGLLILAAACFGVFALVVTNAGAGRAVSGRGFREYHLGDYSTWLRRSVEDGGHWARIRSCLVDTGVCRSLKSNQTLDEFVNSNLSPLQSGCCKPPTACNFTYQNETYWIKPPTPSNYSDPDCNSWSNDQSELCYGCQSCKAGVLGNLRSSWKKIAFVNAAFVALLLVVYSLGCCALRNNRRHKYSLVGK

SEQ ID NO: 39633 - protein, 195 aa, Oryza sativa
MTCLAVSATAHLLACHSRRFSRLFWQLDYAGIAVMIVASFFPPVYYAFLGRAVAQVAYLSAIAALGALVVAALLAPARSSPRLRHIRAGLFVSMGLSGVVPALHALWLNWGHPECYLALSLELVMGLVYAAGAGFYVARVPERWRPGAFDCVGHSHQIFHVLVLAGALTHYAATAILIDWREAAIAAGGGAAAFL

SEQ ID NO: 39634 - protein, 264 aa, Oryza sativa
MFSAFSILLGLQLALSLSTKETLPSSHRNWNICHVRTSLSDNLRKQFSNLRTAISEEQIFYPLMWIMTSFAVVPILSGTMFCFQTQYLKLDPSVIGLSKVVGQVMVLSLTVLYNKYLKKIPLRRLVAGVQTMYALAVLSDLVLVKQVNLMLGIPNEIHVLCFSALAEAIAQFKVLPFSVLLSSQCPPGCEGSLFAFFTSGLVFSAIVSGVFGVGLSSLIGVSGGDYTSFPLCILLQSLAALVPLGWISFLPEKWTADDKILKPR

SEQ ID NO: 39635 - protein, 139 aa, Oryza sativa
MAGIHPRDQRFVFNARQLDDNQSLADCNITHNSTIHFVFGIPCFYATPAYEQFNRLPRSESSDSSSTSKGDRSDSSSTSKRDIAPANVKTVHCPDCQVQANVYYCNTKEDNEGCVFYRCPYFSIHTGWWLPVRPVRRHG

SEQ ID NO: 39636 - protein, 44 aa, Oryza sativa
MHNHNQLAKVQLQVLRATNHHDAIPFGRCSMWLSSRFDPQIDMM

SEQ ID NO: 39637 - protein, 238 aa, Oryza sativa
MKGKTIRVPDEVKKAICQTLMANKTELTQGKPLPRTASMLQRYGRHPTAIETIVVWHVATCHLQKLVDESQRKSYEVATRLSKYCAYLLFYKPKLLGSVGNNSVRYTCKTLVQEAAAARGSGSGSGDDNMMMRKGKALADKLKARGRVDWTELAEFWSELLISLAPSGSVSAHEKGLGDGGEFITHLWALLYHAGIDDKFTWSTATGSTAGGDSGGTADNSTFQNGTAIVEPHTVSTA

SEQ ID NO: 39638 - protein, 172 aa, Oryza sativa
MGNEFGHPEWIDFPRAPQVLPNGKFIPGNNNSYDKCRRRFDLGDADYLRYRGMLEFDRAMQSLEEKYGFMTSDHQYISRKHEEDKMIIFEKGDLVFVFNFHWSNSYFDYRVGCLKPGKYKVVLDSDAGLFGGFGRIHHTAEHFTADCSHDNRPYSFSVYSPSGTCVVYAPAE

SEQ ID NO: 39639 - protein, 226 aa, Oryza sativa
MEASSSPCKLLLLLLLHVVLLAFAPLLQARPLGHQVVVAPLMLPSDGGEVVGGVGRPEDHIPPSPFAPGGPITLAGGWLVGRPVGPTPPPPSHPVVPTPTQLAADDDGGLLRRPGGPTPPSPWHPGVPTQTQLAGGDDGGVGGLLGRPWPKAPPPPDPNTPPVQPLSNYGVSRCCGRPGPAPPTPAGNPPGETNVAVALAPPIPCAAFLRVIRDAVQYMVGGGLGA

SEQ ID NO: 39640 - protein, 279 aa, Oryza sativa
MRFSPVFHLEDFLDRYPGLTMDGAHVLLVDMGDNTLAGSSPVDQQSQFYQKNIPPPVQTHALYNSAPTPQSFLSIQSADSGRVNPHSRPLNLETPNPSSASPRMQFHQSPNNTSHPSPSLSSLFPVPGSGDLHNPTATHENNHLVPPTAFSPSAFGLSPTPYLGDSTFNIAPTPPPNPQYAIFPFDNVNSNFDGASHLAGQNASVVTPGAHSQASGSHKAPSDAGNQEKDPFLSLLEQLAENENSQGGPSELDFLLTGAVDQDSDMGLIEEKTDSGPTA

SEQ ID NO: 39641 - protein, 227 aa, Oryza sativa
MAEKEECKVLIDQASNEAGDPHQDDDCEDEDDDDSSSLILLTNLILSGTARLNVLLPTATILAFAIFAPLLTDDGKCTRLNRALTGALMLLCAASCVFFTLTDSFRSPTGRLRYGIATTSGIRTFCVGGRRRRRGGGKAGPWEPERYRLRWSDLFHTALALVAFVTFAASHHDIVLCYYPGVPRKVVNTVPLVIGFVVSLLFVLFPSKRRGIGYPFLLSTDLVYLRR

SEQ ID NO: 39642 - protein, 277 aa, Oryza sativa
MKFGKRLKKQVEESLPEWRDKFLAYKRLKKLVRLVSSSSGDVGGGGGGEAEFVRLLDGEVDRINAFFLEQEEEFVIRQRELQETVEKVAGGGGGGRRPAAAEMRRVRKEIVDLHGEMVLLLNYSAVNYTGLAKILKKYDKRTGRLLRLPFIEKVLRQPFFTTELISRLVRDCEATMEAIFTSSVATTAMAGDRRTWKGCSGDAGMAPMADQQGIFRNTVAALATMKELRSGSSTYGRFSLPPMAAPASPESDVLQSIRSDPHLKENGRIPSLQFFYA

SEQ ID NO: 39643 - protein, 231 aa, Oryza sativa
METTRRRGRRLSSGSPRMGGRRASGGGCARTRGGGRRRLQQGRSCVRPPPPRTCRHRRRRRPPPPHPALRRRLRAPQPRRPSPTRRSPSRSGLPRRPQFAPLPFPRRPPFPSTPPPPPPPTSPSPRPTSTPRREPSSRATAAACVTRLRRVGPPRSFSTRRRGRCRVARRRIVAAVPLPRGRWPVGEPARRFSPHRLRAAPRRLRATPPRRPSARCSSAPTRRLSPPPARP

SEQ ID NO: 39644 - protein, 212 aa, Oryza sativa
MRKARATAAASKPKPRATARAKPKPKPKTKPSPASLLSGGSSPASGDAADDLSFLSPSSPVVKPKPRSPLAAPASSPISPYASPASASVSTVADLRILAASHLDSLKRRLDALHGDSARDLEASHSRISKRFKMQTQSCLQLADEAEKEHRKMADKISEHAEAVKASYKKFVAEVQASTSRVCKVTIPEMAKSADRAIDGLRSRYNIPATAA

SEQ ID NO: 39645 - protein, 373 aa, Oryza sativa
MAAAAATALAAVILLLVLATTAEAACSVSAIYSFGDSIADTGNLLREGPAVGAFASIGTYPYGQTLRRPTGRCSDGLLIIDYFAMALNLSLVSPYLEKGARFESGVNFAVAGATALDRSYLLQSGVVMPPASVPLSSQLDWFRSHLNSTCSSHQDCAEKLSGALFLVGEIGGNDYNYAFFQGRSIESMKTYVPQVVRSIMDVAKEVIELGATKIVIPGNFPIGCSPSYLSLFSTAISGDYDDRGCLKSYNSFAMYHNDQLRAAIDDLRKVNSDVAIVYADYYGAFMHLLQKADLLGFEEDSLLKACCGAGGKYNFDMNLMCGAVGTNVRADPAQHISWDGIHLTQQAYKAMALSLIMEGFAQPADIVQKIWSC

SEQ ID NO: 39646 - protein, 187 aa, Oryza sativa
MFSQKVAQQSLRRLAVQQPLSMQWSMMRASPAAMALGKGLQSRPATTASNTEDPTQILAKQRLNRPVSPHLAIYKPQIGWIGSSLHRITGVVLSGPLYLWATAYLFSPALGWHLESASMVAAMGALPVAAKIALKSILALPFTYHSLNGLRHLTWDLGRGLTNSAIIKSGWTVVGLSVATALGLAFI

SEQ ID NO: 39647 - protein, 226 aa, Oryza sativa
MAAVTKKGGKREPKVKAAPAAKKLPKKPNHEGGIFATPVALFNKWPTDSVTVEDNSLRDYLPIKDKYAVFVPHTAGRYAKKRFRKAQCPIVERMINSMMMHGRNSGKKLMAMRILQQAFEIIHLVNGENPLQVFAKAVQNSGPREDSTRIGSAGVVRRQAVDVSPLRRINQAIYLMSVGARNNAFRNLKSVGECLADEILNAAADSQNSYAVKKKDEIERVAKANR

SEQ ID NO: 39648 - protein, 567 aa, Oryza sativa
MSAIELINPRAESVRRTQALQVNTAGAIGLAQVVRSNLGPRGTIKMLVDGSGNLKMTKDGKVLLTEMQIQNPTAAMIARTAVAQDEQCGDGTTSVVLLVGELLKQAERYIQEGVHPRVISEGFDLAKTGALDFLEKFKKSPDMDRATLVKVATTSLSTKLHSKLATQLAADIVDAVLAIKPATTTTIEAPKPTADGSSESVSEWNIKDPIDLHMVEIMKMQHKTDTDTQLVRGLVLDHGARHADMPKRVENAYVLTLNVSLEYEKTEVNSGFFYSSAEQREKLVESERRFVDAKLKKIVELKQAVCDAPTEGSNEKKKNFVIFNQKGIDPMSLDILAKNGILALRRAKRRNMERLQLCCGGVAQNSVDDLSPDVLGYAGLVYEHTLGEEKYTFVEECRDPKSVTILIKGPNAHTMTQIQDAVRDGLRSVKNAIEDATLIAGGGAFEIAASNHLTTSVKKAAKGRAKLGVQAFADAMLVIPKTLAANSGFDVQDALVALQDEVAEGNVVGLDVQTGEPMDPVSLGIWDNYRVKRHMLHSSAVIASNLLSVDEILRAGRSSLKSEAPMG

SEQ ID NO: 39649 - protein, 130 aa, Oryza sativa
MAPFFWPGPPGAQPVGDLQVAKLALLVAGNGFISPSSYLRRCCDDDGPCFVDGAGERCLHLANLVTAMLGLALVLGQMAFFSAAAFRPQVASVTVAARWIVSLAKLATVGTLQLWVYVFCLCLKMLCIRY

SEQ ID NO: 39650 - protein, 328 aa, Oryza sativa
MDFADAPSHGDSLVVVRDALLSQLQQDRLRKDIIVAELAKIERAMALRDVSQSPTPRHAAAAAAAGKTITTVATPAKKPSPSEKSEPAVQKSMPPSAWSCAVCQVRTTSERNLRDHCGGQKHQSKVAALEKTTKAMARTTAKPSPGAAARWGCSICNISCNGECDFDTHLKGKKHQANTQALLEQNKKSSVNPESQGTKAAAATLICRVCQAKFTCQSDLQSHLKVMKHQLNLRAPSSDGSSFTSATSESLSLELYSCKVCSVKCTFERMLAYHLTGKKHLKQENLQLSCEICKLQCNSEKVLSDHRYGKKHQAKLEKVLQAKLNATE

SEQ ID NO: 39651 - protein, 257 aa, Oryza sativa
MSCFGMASGSSAGWPLSPSPSSTRGRRRVSVKPWRLWWRRCAGVAAVIQSKIHRRAVRWPGGHGGGRRRREAATASTREREGWCHHRSFAPVYVDELYSHPKTHHVAVHEAQAQQPNTTAAKTNAGAASGKARAVAAAAANNNNNAVAATNASAMFAAKNAAADAATNAAAGARGKGRVGGGKKAAAAGAATNGGGAKAARGGVRSLLMSPLRGGGACGMGEVDVRAEVFIRKFREEMRLQNQKSAEEFQAMLARGL

SEQ ID NO: 39652 - protein, 179 aa, Oryza sativa
MATVRPHPPAPPSPVQAPAPAAPPPVSVAARPQAPYYYYCHGWKEGVAESRCPTTDAAAAAAAANGGVIELSSSDSSGGGGGAGRWDDDDDGCSSCVDGDDGAAAGGGGAGRRRDEEEKGRSQQFGSWWSRHDSSSSSSFLWPPPPNDNGDDEDPAAAAARRQEEDRKFWEACLASGLP

SEQ ID NO: 39653 - protein, 574 aa, Oryza sativa
MADEAKAKGNAAFSAGRFEEAAAHFTDAIALVPDNHVLYSNRSAAYASLHRYPEALADAERTVALRPDWAKGCSRLGAARLGLGDAAGAVAAYEKGLALEPSNGALKDGLAQARQARRPAPASGAGAIGKVFQGPELWSRMAADPTTRPYLDQPDFMRMLRDVQRNPSSLNNYLSDPRMVQVLSLMLNLRLPNNDAPPRPPAQSTPPPPPQQQQHQPETKAREPEPEPEPMEVTEEEKERKERKAAAQEEKEAGNAAYKKDFETAIQHYTKAMELDDEDVSYLTNRAAVYLEMGKYDECINDRDKAVERGRELHADFKIISRALTRKGTALAKIAKCFKDYDVAIETYQKALTEHRNPDTLKKLNDAEIAKKELEQQEYYDPKIADEEREKGNEFFKQQKYPEAVKHYSEALRRNPKDPRVYSNRAACYTKLGAMPEGLKDAEKCIELDPTFSKGYTRKGAIQFFMKEYDKALETYQAGLKHDPNNQELLDGVRRCVQRINKASRGELSQEELQERQNKAMQDPEIQNILKDPIMQQVLTDFQENPKAAQAHLKNPGVMQKIQKLVSAGIVQMK

SEQ ID NO: 39654 - protein, 95 aa, Oryza sativa
MKLRGQPRPQPVRLPRARVRQPARRRRAALRGDREHRGGPPRRRRLGQHRRRRDRYRRALPRGCRPAGGDRRQLRRGAHGRRGGRGEASADEIRA

SEQ ID NO: 39655 - protein, 53 aa, Oryza sativa
MDFFLSPCYVLFCRSCNSYPVASNSLVLISGLPHISVNQEHALLVRKLHFKNI

SEQ ID NO: 39656 - protein, 188 aa, Oryza sativa
MAQLPPKIPVAAPGHHQHWASAGGAGDAAWADEFAEFAASRRGAHRRSLSDSVAFVEVAPAGCGAGGEFDRLDDDQLMSMFPDEGGSSAPGSDNGGSDSDGGGDKHAAAQSDDGQHAAGEPTQEQAAATSPTELIRDPKRVKRILANRQSAQRSRVRKLQYISELERSVTTLQNEVSVLSPRVAFLDQ

SEQ ID NO: 39657 - protein, 274 aa, Oryza sativa
MTEMTTSALHLQVLALTVFLVCAAAVTPAASAQQQQLPGCPDKCGDISIPYPFGIGARCARDQYFELECNRAYSPPRLIVSTHRQHLVNLSLADGEATALINARRQCYNSTEGLIGDANNYVNKDITLVGSNAYRFSAARNRFVALGCPNMGYFVDTYGYYVSGCTSICRPSQGNGASGASTGGCTGEGCCQSRIPTNTDYYELYVQTFKPGEGDPILRGGTTACRYVFLAEDKWIDTTYRGHPDFDRNDDFAVPSCSTGPSGTSVTAAPLPVT

SEQ ID NO: 39658 - protein, 245 aa, Oryza sativa
MYMAAAAAGASTPFNFCRHGSHAEYDAVFSGSWMARRPSAAPHGGGASGSGSGSGYGAASYVAPTFGAAFRQQHLDLLDYLSDDQGVPAPPPAAVPSASYVTPAPAMAPAEPVVPDAVAAAGGYPRSVAAAAAAVAGEGRDRTTTDKIAFRTRSDDEILDDGYKWRKYGKKSVKNSPNPRNYYRCSTEGCNVKKRVERDKNDPRYVVTMYEGIHNHVCPGTVYYAAQDAASGRFFVAGISHPDLN

SEQ ID NO: 39659 - protein, 69 aa, Oryza sativa
MLFFYFVSNWVVPELIMKDLQEPKKAEESEEAASSPAATMSVAGDGQPEAKIRLKVKKTKKNKKAAMKV

SEQ ID NO: 39660 - protein, 214 aa, Oryza sativa
MLGCFSRLRRPASAGAAPAPMAQSDDASTSTSAGGGGGCTAETSPCSSSSSLRCKNSGGVGGEDDDDGVGGGGAVVAENASALSDSGLSSAIASRRFFLSSPGRSNSIVDSSAHGAAVGVGAAGVAVPTYSPDPHADFLRSMEEMVAALRLDARRRGDRARLHELLLCYLALNDRRAHKYVVSAFTDLLLRITAAANLDDGEPPRHGRHLHESH

SEQ ID NO: 39661 - protein, 142 aa, Oryza sativa
MAAAAGVLLVLTAAVLLLLVEGGEPPYSCGPRSPSSGYAFCDARLPPARRAADLVSRLTAAEKVAQLGDEAGGVPRLGVPPYKWWSEGLHGLSYWGHGMHFNGAVTAITSFPQVLLTAAAFDDRLWFRIGQVRVCLAKGVNG

SEQ ID NO: 39662 - protein, 382 aa, Oryza sativa
MGKPKPASATAAPRGHKRRPKRTRPSGKGGGPEPREEKRKRRELDGVGLAEESPPPGSSLGKILSTESGAIGLEQSDEDDMEDEHTVPGDDETNDMINNKDDAFDEMEASCSFHRHVSRIITNEEVNALLKQKCKFKWEVPAEDIPKSKWVGTGEKMEGAYVDLIGGVKGKLRDHWQNTLSDQLNSRLNFFSLCSSYRDIMHCNKKPFYLKGGSTVDSSTMDSYLMHALNHINRTREIVVKNDAKLRSDPSKDILDDNSFLDQGFTRPKVLFLLPLKSIARRVVKRLIQLSPLSQKDIIAKFEGKFGESDDEVEEPVQSNKPADFDLLFAGDTDDEFLFGIKYTKKSMNLFSNFYSSDIIVASPLALIKLNRWEPGQSDSLW

SEQ ID NO: 39663 - protein, 137 aa, Oryza sativa
MASKVIAPFLALSLLLFAVIVQGCTPNCSGEQVVPTPPIAVPTPSHHGGHGEHGRCPINTLKLRVCANVLNGLVDAKIGHGTNDCCSLLSGIADLDAAVCLCTAVKANVLGIRVNLPVDLSIMLNKCGKTCPSDFTC

SEQ ID NO: 39664 - protein, 104 aa, Oryza sativa
MVDRIQDDKAIFMLHSLRLLYGERNLCMPTRVPCMIFERSPKWIFLKRFFCTSNATCTKFAYNELEKKCRWLCLAITIDHCLTTSLSYLSAIFIEPMPNQPCFL

SEQ ID NO: 39665 - protein, 220 aa, Oryza sativa
MTLMASRPRALTSNASSTSSCENPNRWVMSGFTSILPLRRNSMQSGHVSLYRNIPTTSTSLIAADVSGTVISLCPIPTRHTFPPPRVASSAVATVLLNPAQSRLTSMSPPIAALIRSTSSPTSSARADTLTAASAPRDRATERRCSSTSTITTRVAPNARAASRVTRPIGPAPMISTPVSGPTSARRHACTPTLSGSHMAPSSRLTFSGSLKHRSPGCTI

SEQ ID NO: 39666 - protein, 115 aa, Oryza sativa
MSPTPASRSSARPGSGGSPRTGCCRARNGAPPSMTEPGRSTRGRRRAPARRPCTPATWTGRKPGSGGARGRPAAWVSRRTSWWPGCRRSSSTSAPRRRRCYPSAGGRGAARCTSW

SEQ ID NO: 39667 - protein, 78 aa, Oryza sativa
MSYSGGCSTCLETIFSVVLPPLGVFFRYGFCSSEFVVSSALTALFYVPGIVYSVWVVILKTPPEPPGIDGERPYYILA

SEQ ID NO: 39668 - protein, 240 aa, Oryza sativa
MDSRGVAKDLHSYSIYMDALAKSGKPWKAFKVFKEMKQKGMAIDVVAYNTAIHSVGLAQGVDFAIRLYRQMVDAGCKPNASTFNTIVKLLCKEGRFKEGYAFVQQMHKFGIEPNVLTYHCFFQYLSRPQEVLGLFEKMLERGCRPRMDTYVMLIKRFGRWGFLRPVFIVWKAMEKQGLSPDAFAYNSLIDALLQKGMVDLARKYDEEMLSKGLSPKPRKELGTKIPGAESDSDNALSGVL

SEQ ID NO: 39669 - protein, 153 aa, Oryza sativa
MRDGSLLGDQILRLGGDRRRDPVPALPDRDSLLPDNRRPAAAEPRRVARPPQPPQQLRRRRRRARGLQLRRQREGIRQHRPRRRRRRPPLLRAALRAFCHPDLIGDWRFSSEAKMFVFARALNLAERYVSRFLKRCVSQKKGSSEFGRGVSLL

SEQ ID NO: 39670 - protein, 377 aa, Oryza sativa
MRSPRDLVVAVALLQLSVLLLLLSGEPAAAAGKSKVAAIIVFGDSTVDTGNNNYLSTLVRSDFAPYGRDLQLAGAGVSGGGNGRPTGRFSNGRLAVDFISEAFGLPPLVPAYLDPAVNMSSLGAGACFASAGAGYDNATSDLFSVLPLWKELDYFKEYAARLRSFRGDDDAAAAAAAATLSEALYIVSMGTNDFLENYYAVARGHAAEYSTAAAYGDYLLGVAEAFVRELHALGARKVDLNGLPPMGCLPLERATGGACTEEYNAVAGRFNAGLQDMIARLNGELGGGARIVYGDVYGAVAAVLADPAAYGVENVKAGCCGVTGVFEMGYMCGAGARSPLTCTDASKFAFWDAIHPTERLHRAIADAKMNTTLHVFL

SEQ ID NO: 39671 - protein, 154 aa, Oryza sativa
MMNMMTDLSCGPSSMTELTAAAAPAGSGSSAAVAAGSSEKMGRGKIEIKRIENTTNRQVTFCKRRNGLLKKAYELSVLCDAEVALIVFSSRGRLYEYANNSVKSTVERYKKANSDTSNSGTVAEVNAQHYQQESSKLRQQISSLQNANSLTRLA

SEQ ID NO: 39672 - protein, 411 aa, Oryza sativa
MAIDLAPLAGELEVAGAAVGGKKEEGEGEEGGVCGGEAVVVAAADAEVEGHPYDFHVSGPRNLPPPNWREIIRSSWKDPNYKRMVMACFIQAVYLLELDRQDEKGEEDGLAPKWWKPFKYKVTQTLVDERDGSIYGAVLEWDRSSALSDLILIRPSGAPRAVLALRGTLLQKPTIKRDLQDDLRFLVWESLKGSVRYIGALEALKTAVERFGSANVSVAGHSLGAGFALQVCKELAKQGVFVECHLFNPPSVSLAMGVRSMSEKASYLWKKVKASLPLTEEALPDSTKEEGSAKKKLRADKKWVPHLYVNNSDYICCHYNAPNCSTTTTTTTTDGASDEQQQQRKASEIAGDVVAKLFVTSKGPQKFLEAHGLEQWWSDGMELQLAVYDSKLIYRQLKSLYTATAPSPPAK

SEQ ID NO: 39673 - protein, 225 aa, Oryza sativa
MRYLYFHGNASQARPIRHHLLAYLDACASRAHLAELHGRLVRAHLTSDSFVAGRLIALLASPAARHDMRYARKVFDGMAQPNAFVWNCMIRGYSSCEAPRDALAVFREMRRRGVSPDNYTMAAVVSASAAFAGLKWRSNGDAIHALVRRIGFTSDVFVMSGLVNYYGAFRSVEEASKVFEEMYERDVVSWTSMISACAQCGHWDKVLKMLSEMQAEGIIPNKVTI

SEQ ID NO: 39674 - protein, 384 aa, Oryza sativa
MWWYKPNNEWSKVYDSIGFGQEDSKDVRNTRKILPFSYYDLPIQLRTCLLYLSIFPEDYWIEKYQLIWRWIAEGFVHEEKGLVLFEQGERFLDELINRSLIQPSDRYHSGIVNGCRVHDMVLDLIRSLSSEENFCAMLHKEQTMLSQNNIVRRLAIHKRILEHNPKMNVRMAQVRSFNAYMCGHMDCMPPLWSFKVVRVLVLDLCNFTGSPHLEPIGKLLHLKYLGLVNTAIAELPKEVGNLTLLQTLDIWRTSIEELPSTVGKLKRLICLRADSNTRVPAGVIGSLTSLQQLRLHSADKSPSAVVELGKLVELRVLEIQFCKMDQNSRRSLVESVCNLCNIQVLEVHYDHSGPTEWAYLGSSWEGWVPHPRLRQFLLRAISLP

SEQ ID NO: 39675 - protein, 109 aa, Oryza sativa
MAAAAAAEGLAAYRAVLRAARRTFAGDRLMLAESAVEIRRRFEEHRGLAPGSGEAARALSDAREAAHFITHMIVQAQRAPSGSFVVKPEKEHAGATLEVPSEEILSKLK

SEQ ID NO: 39676 - protein, 191 aa, Oryza sativa
MSRRPSPWMKLVYLAPGSSLPLPYDGSGSASGQLLVSCVDVNDTTHHQEEERKRKTWPWRWRGESETCVALRTAPLARKRVMWLVRLKLPVSHVPAGTSSVVPPRRRWCWMRYTALWNAHVFTVRPSPTPPNSAMDTVSGRGLTGTAPAHVVASAASHCTNNTTSSTVTAKPCPCNAAIKEKMRGNCLRLN

SEQ ID NO: 39677 - protein, 147 aa, Oryza sativa
MAGLADGRCPTNGRRWNPGRRDRPAPAPPPPPSTRSARISCSPSSASRLLRCSSAPPSPAARGAASPAFRARFRATHRAPFLGLFFAPSAPRPGHGRRRPWRRLLPHLPATGTWPPPSVAATSSSPPCKIAPHDEQQCRSAAATACS

SEQ ID NO: 39678 - protein, 156 aa, Oryza sativa
MSICARAEPPRGGGTLGKRKERDRPSSEEQRAPPPPPPPLFPAMSARPQPPRPAHPARFVKPMPPPPPPFPKGGGGSSFKLMAGYLAHEFLRSGTLLGERPESNSKAPAPAASAGPAAPDPRTRYAEASLLLMAGGARVPGVVNPTQLGHWLRIKE

SEQ ID NO: 39679 - protein, 315 aa, Oryza sativa
MEGGRGGKRWRFATPNLAVAAAGERSIRRYLLQLHACLDENGPRPVIPLSHGDPSSSACFRTAPEAEEAVAAAVRSGDYNGYSSPATSLPARRAIAEYLSCDLPYKLCTDDIFLTSGGTQAIEIVMSVFGQPGANILLPKPGYPKHEAHAVFHRMEVRLYDLVPERGWEINVEAVEALADENTVAIVITNPNNPCGNVYTYEHLSKIADTASKFGLLVIADEVYGHLVYGSTPFVPMGVFGETVPVLTLGAISKRWVVPGWRFGWIAICDPKGILKETKVVDSLRSFRNLTTGPATFIQVILWTHKSHIKLSVPW

SEQ ID NO: 39680 - protein, 430 aa, Oryza sativa
MDEWEELARTVPATLMQVGSGMEAVRKIQVAHRKIQGRAGLMRNIRFGMPAAIAMSLFDDPAPVGVCPTVTLEEARCEISRGAARHAMADHVFVRYVELLGIQHEPPCTSRDTHHREAIRFTAMALEKVREAASLAEAAKDAVDIAETLLPQPELKMEWALAAQDLAERADYEATQALEFVKRARDVVALEFFDTWKILRRGRARSAEMKEWRELALKVPGTIMLIGDAELETLELIQAAVSKFQKHVELLQEVRHGTATATAVDNFTDPDPEGALPTELLENARRGMSKSAVRHAKAHHIFARYAAFLGIQGDEEYRSWDNKHQEAAGSMVAALKKVIDAVSDAEAAKDAVAMVGILPYQCPLWELWALRAQNQTSLSSFNATLAILDVRQAREAFFVEVLRAWLILRRYGSLQLLDDSASLWSSSTPA

SEQ ID NO: 39681 - protein, 96 aa, Oryza sativa
MRPFTDVQIRGLDEMTGECGSLWPARLSWSPRSPRGANRGWFYHVRILKHVACFVQICFSVSYSSLALNSSRLIYSEIQLSYIVEELISYKQCSYV

SEQ ID NO: 39682 - protein, 417 aa, Oryza sativa
MGKAISLLRPPREPQPRESEGEGERGRMMELRKRPRPRRVDPDFVSSPPASLLLPPPRKRARRQAAPPAAPAPAPAPARPSPAARRRPTCARVIIQSPVAGLQPSVCCPCEAPLRACRLPRASFLARRRPPFDWYEADMWTEVAKYLFGAELVRLSSTCRWFRRLLADEFIWRHAFLRDLSLLPAAADRYPPRPLHRSWRLLYAAAFNGAHSYWFRRSSRHIGAYRIGGFLLESPYMLLTAKLAVPQWLPPQEDGPQIAIEMTGACVLPNARPGIWITDFHLVRCPNCTLNKCAGVLQVLDARHCELFLEQGFWNGTWEYEDLGDHYNDEETPTAACAIFNASTRAHESISCVLHSKSWVRRCDDPQPKAHCRPYAVALNSNLLSNSNQGLVSRFQAMRDTTGNGQIVSIRIIQQIY

SEQ ID NO: 39683 - protein, 375 aa, Oryza sativa
MLERARDTANFRLVVLRGRAYVERIAPAFQTRDLFTIWGILQLLRRYPGRVPDLDLMFDCVDWPVVQADRYQGENATAMPPLFRYCGDDETLDVVFPDWSFWGWPEINIKPWDALQKDLDIGNKRVKWVDREPYAYWKGNPDVATKRKELVKCNVSSKHEWNARIYKQDWIKESKAGYKQSDLASQCTHRYKIYIEGSAWSVSEKYILACNSMTLVVTPKYYDFFSRVLMPTQHYWPVRDDNKCSSIKHAVDWGNSNKKKAQKIGKQASNFIQQELSMDYIYDYMFHLLTEYAKLLRFKPTKPPEAIEICPELLACQAIGRERKFMEDSMVKSANDAGPCDLPPPFSPEEFKELQQRKEKSMKQVETWQQKASQT

SEQ ID NO: 39684 - protein, 510 aa, Oryza sativa
MIPLSLLAVVLVFGIAGAADGLSGYQISCGATSEKVVGDVTWVPDGRFVSVGNVSDVRSPGVLPVLSSLRYFPDTSARKYCYVVPAERKRKYLVRTTYFYGGFDGGSAPPVFDQIIEGTRWSEVDTAGDYARGLATYYEAVVLATEKEVSVCLARNAATKSSPFISALEVSPLEDSVYNSTDFESYALSTIARHSFGHDGSAAVSYPGDRFNRFWEAHSDGMPVVESQASVSQAAFWNKPPEDVFRRGVTTAGGRGESLELQWPPAPLPAASYYLALYFQDNRAPGPLSWRVFDVAVNGETFFAGLNVSTAGSMLYGDKWPLSGRTKITLTPAPGSPVGPVINAAELMMVVPLGGRTHPRDVIGMQALARGFDNPPADWAGDPCLPQGNSWTGVTCTQEPLARVVSLNLTNFKVGGSISDGIANLTAISSIWLVGNNLTGPIPDMSLLHHLVSLHLENNRLTGQIPPSLGSMPRLRELFVQNNALQGAIPISFKNKTGFMFQYAPGNNLS

SEQ ID NO: 39685 - protein, 413 aa, Oryza sativa
MSSETAASPPPPPPNPPAADSTHSSPASMTDETHGAGAHPDESQPHRSSSSSSSPPVAVDGETRVPLPVRSLPQPSHPSPPPSGEDEDDVVITGQIAVGDAAGAAMEERVKGPWSSDEDTLLSNLVEKLGPRNWTLIARGIPGRSGKSCRLRWCNQLDPQVKRKPFTEEEDRIIMAAHAIHGNKWAAIAKLLVGRTDNAIKNHWNSTLRRRHCTGGRCTQGGVMKRAIPERPRSVSEEPWPLGNLSSLNVREAMEAPAQTVSESYVGAWQIGDQSCKTEVVDPPYLARPVAKVGAFKPYNVGPAQSSQKEMLSFATKFDSNLHPFKPENGVCKFVDPTSFAAEVPNKCGHGCCSSHGQLRKNSLLGPEFNEFEDHPPISDSSFASLVSEISSIAWMKSGLQSSDTLARSVPPA

SEQ ID NO: 39686 - protein, 71 aa, Oryza sativa
MMTIRIIMHQRRMKLKMTVLLKKNQKMPNQHLTRTKFPPMLMSRWQNPVRQIEIRRETKIIVLAVTLVKLR

SEQ ID NO: 39687 - protein, 198 aa, Oryza sativa
MMRMDKLVRQCDMEVMKMAMLKHEETFRQQVHELHRLYRIQRQLMSDLTMAELSSGHRRRQPRRSSKQPRRALNLQLPADEYIVSADAADDNDDTAELDLTLAVGGGRSSRKCNAAIAAAAAAGGSSPFASDCSGSGLSSSPSSAEYSDGAAMFLHAPPPMPPPCQRAMAFDLAMGDAMKQQQSPWLVQCQYLSLRMT

SEQ ID NO: 39688 - protein, 300 aa, Oryza sativa
MVSIYDAVVAAIPQNIKNDTPVHLLAWIPGKSPISTVPALVAAVITYLAVIFGGRELMKNRAPLTTSIKLPFLLHNLALTFGSGLLLALMLEEIVPIVRRNGLFYGICGEGAWTMKLETYYMINYYFKYWELIDTVFLVLKKKPLAFLHVYHHSATAVLCFSQLHGKTSVSWVVICLNLAVHVLMYFYYALTSLKIRCPWKKSVTTAQITQFVIDLFVVYFASYNYFAYTYFPNVPHVGTCAGKEHAAFSGIICLTSYLFLFIAFYQKTYAKDKARKLAAKQNGKANGKAANGKVNGKAQ

SEQ ID NO: 39689 - protein, 103 aa, Oryza sativa
MVSQLFYYNLEYICDVTVHKMDFSKHQWCTAEDIGGRTFLIAPCYFGASRSANECGLEKDCVYAIFVRYKYFEVSKVEDGETEEYDLIEAPNSDIGMWILPTV

SEQ ID NO: 39690 - protein, 295 aa, Oryza sativa
MMAAQASSKRGMLLPREAVLYDDEPSMPLEILGYHGNGVGGGGCVDADYYYSWSGSSSSSSSSVLSFDQAAVGGSGGGCARQLAFHPGGDDDDCAMWMDAAAGAMVENTSVVAGGGNNYCHRLQFHGGAAGFGLASPGSSVVDNGLEIHESNVSKPPPPAAKKRACPSGEARAAGKKQCRKGSKPNKAASASSPSPSPSPSPSPNKEQPQSAAAKVRRERISERLKVLQDLVPNGTKVDLVTMLEKAINYVKFLQLQVKVLATDEFWPAQGGKAPELSQVKDALDAILSSQHPNK

SEQ ID NO: 39691 - protein, 434 aa, Oryza sativa
MEGHRRGEADDEEEELGLRLGLASAGASAAAAAAGEPPSVGMEFPTSEAAREFYCAYADRAGFAVRTDKSRRSRRDDSVIMRRFVCTREGFHPTRHDDLTESEAAAGKRRRKRLIIREGCMAMCEVTKKEPPLRWVVTKFVAHHVHPVSLPLCPRPPPAGESDGLAGEHAAALDEPTQAATEPSDEPTGAPAAVGNGAPNGGPSFCNRLVRANPAGVRAEVQDLLDYLRKMQAESPGFFYAMQVDSGNCVTNVFWADAKARMAYKSFGDAVTFDTTYRKTKYMMPFAVFRGINHHLQGIIFGCCLLMDETKSSYTWLFDTWLAAMGGRQPDLLVTDQCKAMEAGIARVLPNTRHRFCQRNILSLCKQKLSAVYIQHINLKADLRECVFEAETIEEFQARWDYVIHKYNLEENTWLQSLYDTRQQWAWVYQKGPR

SEQ ID NO: 39692 - protein, 431 aa, Oryza sativa
MEEETAVADWSALPEDIIITVMGCLSVLGDLVRSGAVCSTWRDAYATFRRLHLPSTTAQPPWLLYACDAHGPAAAALYCPATGKSLRVPLPAALLDGRPVIGASQGWLVTVDEAPNLHLVLVNPITGATAALPPITTLHNVERFTSKKGKTRYRVYDDMGYSEASLEYSPAQAREWVYHQVVLSRSPAEGSACVALLLHRPDGYVSFARLGDERWTPVAYPGQDCSTGCRHAIYDDADGLFYTLRYDGSVYAIDVPRAAAASSPPATREVMRSVTNADNGSKYLVRVPCSGDLLQVWRFVDYDDGDEVEEDEDAEDLPLGTKHLQIFKVDGGEQKLVEASAASLEDHVLFLGHGFSACFPAEHFPALKPGCAYLADDHELVSVSKHCRRDIGRWDMKRGQMERLSGEDDVAAPSQPWLNWPSPVWITPTFY

SEQ ID NO: 39693 - protein, 485 aa, Oryza sativa
MAGFPLITSAITCAVGIIFFSVCYLHPAPVAALYFNYSTFSQDDGNTIRLEGDASFGDGWIDISANRYGHRGHSKGRASYSARPMLLWSRDTGEVASFTTRFSFNITPPKEDGGIDNKGTGMAFFLAAYPSMLPSGVDELGYNIGLTDQGPDAVATGDSRFVAVEFDTFNNTMVHDPDATYDHLGIDVNSVVSNKTLTLPSFTLVGNMTAVVEYDNVSSILAMRLHLGYGLSGPRHRPDYNLSYKVDLKSVLPELVSVGFSASTTTSFELHQLHSWYFSSSLEPKAAVRGRVVAGATVGTVMFVILLFAMVAVLVRQRQSKKRETEEAKNGGMDGSDDDDDDDGETIVEIEMGTGPRRFPYYELVEATKSFAAEEKLGQGGFGTVYRGYLREQGLAVAIKRFTKDSSKQGRKEYKSEIKVISRLRHRNLVQLIGWCHGHDELLLVYELVPNRSLDIHLHGNGTFLTWPMRLLTLANFVLIFVVST

SEQ ID NO: 39694 - protein, 583 aa, Oryza sativa
MPPPLPHSPPPPAAADALGQILQALLPALLLAAESVKALHARWRAVHGTLLALQTSLAAAPDSAVSHPLFADLVASLLPALRSLQALSARCQDPSLPGGRLRLQSDLDIAASSLSLLLHDLSLLLRSGILYVDPSASSPNAIVLQVPAPAASRADKSLFIRDAFARLQIGGLDLKLKALASLLDLLANDIAAESAHIVATDGDVAALLRLLDASSHSALRDRAAATVAHLATACVASRKVVFDEGGLGPLLRVLDSGSAPATRERAVAAIEAITADVGSAWAVAAYGGVPILINACRPGSGSPVVQALAVAALKNVASIEDVRSALVEEGGLPILVDLLASGTIDAQKGSALCIWSLASLGDHEIQYQIVQAGALLPLLQALHTASGLDLHDTVLRAIHALAVVPAAARTLCSSPLFFAQLTDLMCRGGSILLQQMAADMVAELAPGVSDDTKRCMAPCICMLVKMMETAKPATVQESAGRALLALMTLKFNRKELVRDEKSVTRLLHMLDPRNEEIDKKYPVSVVLALALGGGNGTRRRLADSGICQHLQKLAEAEVPGAKKALQRISGNRLKSLLSRGWNN

SEQ ID NO: 39695 - protein, 84 aa, Oryza sativa
MDEEKLKWCESGCKGCMQVKQVPRGSPSCWWGSIPTKTSCWGRNRQPQLPASQIAHQCYCALNARAAASQSDHHRLQSNRRRPG

SEQ ID NO: 39696 - protein, 346 aa, Oryza sativa
MERWRCVSVLALVLLLSNASHGRDISVQHSQQTLNYSHTLAMTLVEYASAVYMTDLTALYTWTCSRCNDLTQGFEMKSLIVDVENCLQAFVGVDYNLNSIIVAIRGTQENSMQNWIKDLIWKQLDLSYPNMPNAKVHSGFFSSYNNTILRLAITSAVHKARQSYGDINVIVTGHSMGGAMASFCALDLAINLGSNSVQLMTFGQPRVGNAAFASYFAKYVPNTIRVTHGHDIVPHLPPYFSFLPHLTYHHFPREVWVNDSEGDITEQICDDSGEDPNCCRCISTWSLSVQDHFTYLGVDMEADDWSTCRIITAENVRQLQKDLASNIIVSKHSVDVTIVEPSSQTY

SEQ ID NO: 39697 - protein, 147 aa, Oryza sativa
MRASDNTPPSHGSGRHERREKGRSGDRRRDLGSSPPSTAARAPSPSAAIIRYRRRHSGSSPPSGLVAATRACRRHPLSLGLRPHSSQLLPAVAAAGSSRAGSTGREKSISNVGPTNGKAIWAGQNWPLREEFCQSFGLALLVERLLE

SEQ ID NO: 39698 - protein, 151 aa, Oryza sativa
MEHTGVPYDSQVVGLQALHRTRLSRAGGSSTIVSARPANQVDKAMVLCDRAAQIGDDDDDPDTVSDAGTSGVGVVDEEETAGDDEEDEVASLDELFCDERIVRKIDALAQLVGMDGAACQPAAVLGEVVRLIQETERKNGRCVCASGAVRS

SEQ ID NO: 39699 - protein, 126 aa, Oryza sativa
MSSPAAAPPGDLVLPPLPPIKTTAPPPPPARTSSSTASPAPSDEARAPLKKEEEEEPTTPTSEESRLRAPTVCPPAPRKPARTAKRKSPPPPSSSPSPSTLVFFPVQRDLAAVFRSLPPKKRIRAG

SEQ ID NO: 39700 - protein, 40 aa, Oryza sativa
MGGLEEIKNEAVDLVRKSLAATSYLLLLLPRFLPLACWVA

SEQ ID NO: 39701 - protein, 299 aa, Oryza sativa
MPAIADCAADPPLADSYYTLLRLGGDDDDDACTKVTTTPQPVSECELPMIDVGCLTAPTGAAAAAAVGQQHQAEERAACAAAIAAAAAEWGFFQVVNHGVAQELLEAMRREQARLFRLPFEAKSSAGLLNDSYRWGTPTATSLRQLSWSEAFHLPLAGISGKSCNYGDLTSLRDVTREVADAMSRLARALARVLAESLLGHAAGERFPEGCDDATCFLRLNRYPPCPFPPDDAFGLVPHTDSDFLTVLCQDHVGGLQLMKGSRWVAVKPIPGALIVNIGDLFQVHPLTPTLYKHLNTNP

SEQ ID NO: 39702 - protein, 283 aa, Oryza sativa
MDLSPFKLDIDELLADYTEANCTAFADFKRLWMAKKFSYIYEGRPKTNSGAFMQSLFLHCIGHMTSQSCMPQRLAGLYCLYCLYESQPYKPHFKIYLSLEELKKLKDFVVEAKQNGMAVVPSLVKRMLDKGMILFGFINLLGDSGVKQVNELTASQNKRVKFACDKLFMNTQIDSYMHMDLDSELELDKIKKSSLDYAKAKELAFAEASNIIDVEDARHIVQNDKLLGDRVDEIVKEWDAQKEAFYEKTGVRRDELAVVEHDESGVLPHENDEFDEIRQLLLE

SEQ ID NO: 39703 - protein, 70 aa, Oryza sativa
MTYKSLGEAGRYKMVSEPGAYVAVAQAWCAWLLWTWSGHSMAHALALDTRTWPRGDVPGLGLIDGGVDLS

SEQ ID NO: 39704 - protein, 269 aa, Oryza sativa
MGDHLALLVDRLLTESTLDAAIRKQVADLQAETVAIDYCCDGDGDGGSARKMVECRICQEEDWDTSMEAPCACCGSLKYAHRKCIQRWCNEKGDTVCEICLQQFKPGYTAPQQLFHYGSIPMNFRGNWEIARQDLHDSQIITMVPSERDFMDGYEDYLPIRTRSSTLCCRTVAIIFMSLLVLRHTLPLMIGGDGEYSLALFSLLVLRTAGILFPILVMVRALATFHRRRRQQERREMYMTSSDSEEEEDYSDTDPAQPIHSQTRLVPIY

SEQ ID NO: 39705 - protein, 443 aa, Oryza sativa
MELPAAKRQFSTTSQGKEVSGISSCKPTYQRYQSCPPEVYRRQASSYSVPSSEISRSSVRSSGSFRAAAQSLAGVFSCFVPRKSRNEDELEISRTTISQGSRSTGYQVSIDPGTGYPQESTELTVAEIFKATSNFSDKNIIKQGSYSSIYRGKLRDGSEIAIKCARKLNSQYASAELRRELEILQKIDHKNLVRFLGFFEREDESLTVVEYVSNGSLREHLDESCGNGLELAQRLNIAIDVAHAITYLHEFKEQRIIHRNVRSSNVLLTDTLTAKLAGVGLARMAGGESSESEDTQGKSAAGYVDPEYLSTYELTDKSDVYSFGVLLVELVTGRPPIERRRDLDPRPTTKWALQRFRGGEVVVAMDPRIRRSPASVATVEKVMELAEQCVAPARKERPSMRRCTEALWSVRREYHRRQDAPAAAAAVAAAPTQDRSSDWVKVV

SEQ ID NO: 39706 - protein, 306 aa, Oryza sativa
MGSWVIGPAPEISELDERAAMYRDKRKAMDYVRNWICPGCRKEYEPIKNMLVDLPPFGCVDCGLKNDAAYEWKITQCTLNGISLDFKTYDQKLEPHCTLYAITAVIDCTRRLEGAQKGFVFSAPFDINEMVETYNKRTGFKLGNEPQDKLYETYDNCPIVMEVLKSDGIAILIGASDVTTTPVPRLKIQSYFRVDPKDVLYITRLLAGGFPLVAGIRHGLLFNYLSDGQYYCAPTCENTSDAHAVALIGCGVGSNGNKTETFYKVRNSHGIKAHSHYQKREFGGDFIVWSSDVTDVWGLYLAQHEC

SEQ ID NO: 39707 - protein, 230 aa, Oryza sativa
MTMPMEQVFEHYDKDTLKMAMLKHEETFRQQVHELHRLYRIQKLLMRDLKRELKNQSNMSTSSPNGFAEYSRAALDAMRSYEQCYGAATRRGAAVHHAAAAARAALSLVPAVEYAQSPEEEDAEETDDEEEAAAAELELTLAVGDAASAKKRYSRNEHHSPGQSFSSSSTESDVLVTGVRDADAASPPYHHKRRPGPAAAFDVVQVDDGAVQAAPPPPPLLFHWLSLRMA

SEQ ID NO: 39708 - protein, 298 aa, Oryza sativa
MADEHFFPAGGRLSRVSSSKSLGGAAAALDSSEADMNPTTAAAADQPSKPSAAAAARKRKSSAKPKASSSSLPTATATTNASPKRSKVAAGAGDDGDADADAAEEKPEPAKDYIHVRARRGQATDSHSLAERVRRERISERMKLLQSLVPGCNKITGKALMLDEIINYVQSLQRQVEFLSMKLATMNPQLDFDSHYMPSKDMSHMPVPAYPSSDPTTTTAFSYTGSPATADPFTVYNCWELDLHTAMQMGATTGLSQDGPIATMAPSPSPLPHHPPLHGFYGGQQQQGTTVNHMKAEP

SEQ ID NO: 39709 - protein, 252 aa, Oryza sativa
MTFTCDDDAWLALTMKLLDCFNSSLAYTSSEQEWKILIGILCLILNHSANKVLIEPAKAIILNNCLALLMDGIVQEACAKGPSLFQHNQETTFGELLILMLLLIFFSVRSLQAILEASIDWQEFLQYSDDTESSSVLGIPCHDLCRLMHFGPSPVKLIASQCLLELLNRISDQRSCLNAELRCSAKYLKSMIAVTEGMVFDQDSRVAENCGACLTVILGWERFGSREKAVIRESKWSRLILEEFAVALTAPG

SEQ ID NO: 39710 - protein, 400 aa, Oryza sativa
MNTTSANELMMHRHVQAAPYAAAPQQQGGKQRAPGLPPTPPPPPAAASSHSSHGDVCMDDTARGGLLPPRKAHRRSRSDVPFGYFQPLPPPSPKMEAGGGWALPGCGGAGDVDLLNAYMSLEGMGGADGLNNSDGDSRGSSMRTNGADSSENESEDYVGADSQALLWGGAGGGEAAGKKRRNNAAGEKAARHARSLSMDSLMGKLSFAANGEPAKFSLEFGSGEFTPAEMKRNMADEKLAEMALADPKRVKRVLANRQSAARSKERRMRYIAELEQKVQILQTEATTLSAQLTLLQRDSSGMATQNNELKFRLQSMEQQAQLRDALNEALTAEVQRLKLAANEVCDTSSSSNLAHQIQLRRQNQMLDLHKQQQQQVEQIPFYQLELPEQQNGAARNHESK

SEQ ID NO: 39711 - protein, 56 aa, Oryza sativa
MLCPERLILRLASDPKGHQHPPSISLSILPLVLSHSFSHFSLAMEELFTTRMRKHI

SEQ ID NO: 39712 - protein, 118 aa, Oryza sativa
MSRRFLFQKFSVLSGSMPNRPTSAQGGDVSAIHDALRRFSTVLPNYHGLPVSQAKCLNSIQSPHAATKLNHPTIGVVPFASRTFFSYTKPYHLPSLGETNYPDYVAADIKAFALLSKA

SEQ ID NO: 39713 - protein, 40 aa, Oryza sativa
MSFAWQRRLGSFVFLPFPITVLFHGLHGSIKILHDQLRRG

SEQ ID NO: 39714 - protein, 152 aa, Oryza sativa
MQARLMAFASEAFRKVLIPGYRFLPTKNRMSWGMDREIKRGLVRLIGRRSGGDSGEEDETTTELKDKQDNGFNTRAIVLLAVHPDWQDRTRGSLQGGAVGGFRPLGRHSRCRCGVPARVPPRRGLRSGNAAAIPARVTPRRLRSEGGALARV

SEQ ID NO: 39715 - protein, 286 aa, Oryza sativa
MVTPEGLLLLFRKDAPHGVRLLNPLTRHLTELPPFATVLTPEQRNDPHQGLRGEDFRVRGVAIADSSSTSTSTVVAYLKSPTTLAVAKPGDKRCTKIDFDHRLMLYSTVPFAGRIYHATAIGIMTPETTTSSDQPPRMLTAVDTTIDPPFSFCSMSDSLHLVDNGGRELILVYRTVSHDEFRREYAVYRMDLDSRLLIPARSLSGRAVFIGLSRSVSISPSTFPSVTGDTVYLGFDCGERTKISGYHVGDGSIEHSQLIKHASWFKPSTLVDCLSWCIKSNGKQLG

SEQ ID NO: 39716 - protein, 469 aa, Oryza sativa
MSSPEQPRGQNTRMRKMTASANGDTDETSGLTTPRSCEVPLCSSYENGITRIPEETRLRDPEAYHPKAVCIGPYFHSGRNSPSFRRMEQHKHWCVNRLLERSNHSLEPLVQAFLLRLSKTIKTKSFQQLYAKPVDMTEEGIGMMLLFDGCFILHFLLRHDPNKGAEHEYWTKLDAGLLDHEYETLQWERPWEWSLVAIDMLLLENQIPFVAVRILFDILKTEHDKAVDLTACARNMFNKYLPAGMCTSTRPIRCQDVRCLLQLLYRSLLPNPKLHSDLMKTPPKPPRTGIDPAKKLDTDGVRITRRQQWYWWPLSHFQEPFTFLDIVFSHGKVRIPQLEVSDASIQLLQNLIAFEKCYQGTTSHVANYAAFMDALNSDHHDTELLRKRSIFDVQFTPAQPELSLRRRCKQDVDPSSENYLSRMMVDVVLYKEARASRKKTQTPISDTAFFAVLAVTAYVLLAFCWYIVS

SEQ ID NO: 39717 - protein, 94 aa, Oryza sativa
MAAAANGGGAALFSEEELRDVSGVRRCEDFVEVTCGCTSHRYGDAVGRLRVYASGDLEVSCECTPGCREGPCSPLCIISTPRPFCLLACLSRCS

SEQ ID NO: 39718 - protein, 429 aa, Oryza sativa
MARGRRRRRRQRRKRASTKQLTAAATVQDVPDHVLEMILLRVDSSACLVRAAASCRRWRRVVADAAFLHSFRTLHGAHRVAGVYRTVDPAYGRPLPGGNFVFVPSTPLAAGDSCCFALDFLPYGGRNSWELLDCRGGLLLLSKKRPRFGGVATSRRFTDLVVCEPLTRRYQVIRCPANLKFFMCLGVFLLDDDAATGGVSNFRVIAVLFDHHRWLDYRGMPMSMMFSSSGSGGDGTWQVVQWETIDDVDLPHWIEHITFVGRANGRIYWGIDNEDGATLVLDESTTEFAITMFPENVWAPYDKYTFRVIGDGDDGALRVVRVINNDLKVFTQLAGGGEWVLEKTVSLPEATRGLPGREEGLFFQHGEAMIVAASAAYVLVTPREKAWMFSVELDTMEVEREHDRNWYPGPAYQYESLPWPPALQVCTDG

SEQ ID NO: 39719 - protein, 500 aa, Oryza sativa
MMSERALLKERYQEVLDKQRQVENQLQVQLKQLQQRREEEMKNHQEILKAIQAVTIKREETKKKMEKEKKEFLQKEQDLKAEIEKLCEKGRRLLKEQEEKENKIASLIAEQSDEKQLWEMELDKLKNQHNEINRNILEETERAWKAEILSLESRKELLVLKLEEAEKEAELHLTYLKSAPPTLETMRPKQEWEMRLNRIRMTKESVRDQFNDHIQMVRNGTKLSSLPQIPTPTLPPPPSETDFMLTAFQPNPSLTPRLPFPIGPVPVPMVMPSADPRALSFPLLNPAISRPNQPSPPLPASQGRNSPVVASLIGTHSPHMTPAASIPPPPGLGGVKVTPEFHRPQPADKLEKLLEKLLTRFPQCNKAQLTNILQQIKTARRTMAGLTMEELNQLVAAKLAEQQERAAAGAQPLSRIRAPMFSAPLPQISTPMFLPPAQVAYPGTASHTPAACKLCLMCQKLVQPSDLHPMACSHVLHKECIKFWAQTNTNDTCPFCPSLK

SEQ ID NO: 39720 - protein, 352 aa, Oryza sativa
MAVLAEIAGDESPPPLPPSEGGEASGAPSTSSPSDADGGGKPSPRTSKPGRKRLVLTASVLLSFLIGLPLLLKSTEIHRSPLPSDAIAALSRRLHSNPPSFPCGLHAVFLRSGRDPSEASVANRIEREISTQLVDLPDASTAGKISVSVTVESAGGCSSSSKVASPWRCGAVTTADLGRGDEVFDELLDSALGDGGGDGMRVYTVVFVDSDDLKRIVIGKHRHAWVVGKVDEAEVVSIIGKVFVKYFMNGGVEEGEASTVKREFMPVGSDGNIVLSFSLLNADPSDWVYDWEFENIGQRMLTPVIEALRPIANINIESQVLYHTPKSSYSYSDDKLGGNVLSVGDIPFFVCF

SEQ ID NO: 39721 - protein, 350 aa, Oryza sativa
MERTAAEAAAGGKGAWRDGAVTYLHLLFYIAISGGQIFFNKWVLSSKEINFPYPVALTLLHMVFSSVVCFAITKIFKIVKIEEGMTTDIYISSVIPIGAMFAMTLWLGNSAYLYISVAFAQMLKAIMPVAVFLLGAAFGLEEMSCKMLAIMSVISVGVIVASVGEITISWVGVVYQMGGVVAEALRLIFIEIFLKKKGVRLNLISMMYYVSPCSALCLFIPWLFLEKPKMDESASWNFPPFTLFLNCLCTFILNMSVFLVISRTSALTARVTGVVRDWSVVLLSAAIFADTQLTFINIIGYAIAIAGVVAYNNRKLKPKPQGNEQQSADSKANPGSPQDVETSISTKEAS

SEQ ID NO: 39722 - protein, 125 aa, Oryza sativa
MGGGAGGGGGLGGGGGGGMGGGGGGGMGGGAGGGFGGGAGGGAGQGGSGGLGGGGGGGLGGGGGAGGGLGGGAGGGLGHGGGLGGGLGHGGGLGGGGFGVGVGVGVGVGFGGGAGAGGGAGGGGR

SEQ ID NO: 39723 - protein, 322 aa, Oryza sativa
MQYGGAGGDYRYGNKCTAHPYNGVTGRCAPGDLTRTALAADATNGSNPLYPVTFPAVASCAPGSLLASLPAGAVGVAGLGRSDLALHAQVAATQNVAKKFALCLPSVAVFGGGPFVLIFPYSRPDIMQKLSYTALRRSPELAGGNGGGYYITAKSIEVNHHQVPLPNHGAPLVVQLSSMVPYTELRPDVYGPFVKAWDEILQWPKKVAPPVAPFELCYESRTIGSNRLGYAVPDININLEDGAAWYIFGGNSLVQVDDATACFAFVEMRPEKVGYGPAVVIGGHQMEHNLVVFDEEKQQLGFSGLLFGLQTTCSNFNFTVAA

SEQ ID NO: 39724 - protein, 300 aa, Oryza sativa
MGRAPCCDKKGLKKGPWTPEEDKLLVDYIQANGHGSWRLLPKLAGLNRCGKSCRLRWTNYLRPDIKRGPFTAEEQKSIVQLHGIVGNKWSMIAAQLPGRTDNEIKNYWNTHLKKQLRRMGLDDPPPGPAAGCPAARHMAQWETARLEAEARLSLLSSSGVAATTTITAATTTTSASSSSTTAGPVAAAATSPADVFLRLWNSSIGDSFRKLAVVAAGSSSPSRADVTKDAVKQEEEAAPAGDDSSAASNEVEAATMAVDEYQMFLDFAGEELGLFHGRYGGFSLFPPVDLLEASLETAFK

SEQ ID NO: 39725 - protein, 188 aa, Oryza sativa
MNRGGGVGVGDESGSDYESGGGMRKPLLMHTGSWYRMGSRQGSLTGAGTSSMAILRESHVSAFLCTLIVALGPIQFGFTGGFSSPTQDAIIRDLDLTLSEVAARFFFFFGSSHYPPPPFFCPESERRAAAAVLGVRIAVQRRRHGWGDCQWSDGRVHWAQRGENFFSFFGYTSYAVISCAFVGLPVSF

SEQ ID NO: 39726 - protein, 105 aa, Oryza sativa
MGWERAGSRRSRSASRLLPPAATRRTIASETAAAAGAAAEATLLVRGLAGLEEKVARGEARRRRRKTAAARWSGGRRNIEKESGEWTRTQLYRRAREIAKVTRMS

SEQ ID NO: 39727 - protein, 323 aa, Oryza sativa
MASSLAARRLLSRSAAAASRRLVPCASSATPRAAPAALRRFFSAEASTPPPTPPTPPLPPPPLEPTVEPPKSEGASSSSASSSAGAGGAHRSAPGASAGARRAGGTGYEEEQEKVLRASLLHVPRMGWSESAMIAGARDVGVSPAIVGAFPRKEAALVEFFMDDCLQQLIDRIDAGEGELLKNLVLSERLSKLVRMRLEMQGPYISKWPQALSIQSQPANISTSLKQRAVLVDEIWHAAGDAGSDIDWYVKRTVLGGIYSTSEVYMLTDNSPDFRDTWTFVSRRIKDALDLQKTFQEAAYLAEAVGAGMGGSLQGVLNRLFKK

SEQ ID NO: 39728 - protein, 385 aa, Oryza sativa
MNNTMSLLLLLLGLSILAMNSTAATTDNGQFIYTGFAGANLTLDGVATVTPAGLLQLTNGTSALKAHAFHPDPLHFRDLPVAGGGGSGNGNGNDVHSFSVSFVFAILSIYPNLSSHGMAFFVSPTKNLSAAAPRSYLGLFSNKTDGDVANHIFVVELDTIQNTGFMDINNNHVGVDINSIRSVRSYPTGYYDDGDNGNLKNLTLNSHEPMRIWIDYDQETTRIDVTVAPLEISKPKRPLGSVIYNLSTVLTDSAYVGFSSSSGDIDSQYYVLGWSFAINGAAPAIDISKLPKLPREGPKSSSKVMEITLPIATAMFVLVIGVIVLHLLRRQLRYAELREDWEVEFGPHRFSYKDLFDATQGFKNKYLLGSGGFGSVYRGVLKSSR

SEQ ID NO: 39729 - protein, 448 aa, Oryza sativa
MLERFVFRRDDDTRATVLRASGSGSHGTPFTIAFRIADPPAISRLYVRWPQGPDPEEMVACPLVATHRNLVLVCFCYIVESPSGPACPQDYFIFTASGSGDGDVDHHPVPSPLLKALPPCTYHDEGDGNDLSMRYPLEFRSVGILCRGEEFAVAELQVLRTASGRVKARLCVLRSAISSSKDEDEAEDGDHGGGGRRPWDIMELPIVYDGDEERCDIFYWTTDAVIAFQDHLCWVDYDRGMLLCDVLRTSPRVAFLRFPLDSSIIPTGRRSRRNFSQVYRGVSVTTAATGGAALKFADVSRHDGKLLGSLEQGRGGYTITCHTLRSTLGAAAIDDEWSWSKDFAIASDEILRSFEGAPELEPREVLLFPTVSMDTPSVMHFLTCDYDRMIRKMSVVTIDIASKIVLSVVPYVNGEEDLSGEDADMVRAKSGYPQSFLPSEFSKYFNSI

SEQ ID NO: 39730 - protein, 67 aa, Oryza sativa
MLPGRPGHKAATGEVSGQGAAGDDMESPAEVVVCLGPLVEQVVGNEGGAGADRINHHHGWIRRLAPT

SEQ ID NO: 39731 - protein, 165 aa, Oryza sativa
MEMELQGVEHVVGLTVASSTEGDDSGSHGRGPKRTRHKWCRQGHPFARQSRSTRRNEATPPGRAPSAHCGGALQGSSDERRGPQPRAMVTSRFDLPHCGGRSRITRPHHRTGGGAPLRHPPPLWCVANLQARGRRGRPHGVTATLSRARLPLIRKSDGTGFVVLI

SEQ ID NO: 39732 - protein, 42 aa, Oryza sativa
MTCSGGSCSRRWWLRPAAATVAAAVVTLEDNGSTNLGPKRRL

SEQ ID NO: 39733 - protein, 314 aa, Oryza sativa
MSASFPEAGASTRSRPWLLDDAGGRWTTKTVWMDDPRRPPPVEIPINARRLNHHITTTTITLGGELAGAMGWVDLWTGILIYDLLHDDKDQDRPTLRHMPLPLPMHAITGNHGMGDKLALGCPRSLRGIASVTRRGKACLKLAGVHVTGERLPYNDAETQLPAFAVDDWTVTTWSNDKMKGYFEDWQEDFTIRGSEVRISNAMRSDLLRSGLLYRKPSRGDGDEATVEELALHNLWVSHPTPSLDGEEDVIYLLAKPKCFHPKAWVLALDTRSSTLLGVVEFGTETAPSAGVTYRPSTISKYMSLVTSPVTGRT

SEQ ID NO: 39734 - protein, 403 aa, Oryza sativa
MAGEAILFSDDIIANILAWLPPKNAARMRLVCKQWHAVTSEHHFMHTNFSRSRDGHSVAGFFLSNELHKKFSYNPLRDSSATHPAAPDLSFVPESGSTVPRKINVTSSCNGLLLCRRPMDSSVASGARWCCYYVCNPATKRFVEIPTPPDGRGRHLNLAYDPSRSPVYKVVALGLAGVHVYSSQARSWRAALRYERGSNPFAGIHHSRGVHWNGSLVWVTSRSRSLLRFAVDDGEGELSSLPMPPARHLQPENRWICGYLGVGESAGAGRGHLRMIGYTEEEKLAARFDVVGMAGDCREWRVLYRVDLTRMKELYPDIQRKTRKHHLIWPRRARLVDCLDLWPLHVAEHGSLLLFGIPGKIMAYGMEDQAISVVWEDAAPPQPRFFRYAWFDFYPYTAGLFAV

SEQ ID NO: 39735 - protein, 68 aa, Oryza sativa
MRASAIKSRSPCFKAPASMSSSLASSFGSSCRQASTAVLLLISVFLAEIWDHAIGKKSDLEYHHFNWS

SEQ ID NO: 39736 - protein, 377 aa, Oryza sativa
MTKVIEASGMGNETYFPPSLHHIPPAATHGEAIREAHMLFFPALDDLFAKTGVPPSSVGAVVVNCSGFCAAPSLSAIIANRYGMPSDVRTCNLSGMGCAAGAIGVDVAAGLLRAHAAMSYAVVVSAEIVTVGWYSGKDKSKLLLNCYFRTGCSAALVTTKRGGGGVKYRLVSVTRTNQTANDRSYRSGYRDEDDEGITGFTLGHGVGRMVSELLRAHLLTLSLSILPWREKLRYVAALLRHRRHDKKAGSGGGIPMPDFRAAAEHFCLPSSGRPMIWRLGQGLGLGEGEMEAALMAFHRFGNQSAASLWYQLAYMEAKGRVRRGDTVWQLAVGSGLKANSLVWERVADDDHFATERHGRTTLGPWADCIHKYPVTEG

SEQ ID NO: 39737 - protein, 296 aa, Oryza sativa
MDLGPVHFFLGIQVRRTADGFFLSQEQYAGNVLDRASLADCKPAPTPVDTKAKVSSTTGQPYSDPTFYRSIVGALQYLTLTRPDLSYAVQQVCLHMHSPRDVHWTLVKRILRYVRGTTHKGLQLRRSSTPSLTAYSDADWAGCPDTRRSTSGFCVFFGDSLVSWSSKRQSIVSRSSAEAEYRGVANAAAECCWLHHLLGKLHVKLDKAMLVYCDNISAVYLSKNPVHHGRAKHVELDVHFVWEKVAVGDIRVVHIPTRQQLADIMTKGLPTALFEDFRSSLCIVDDAPTAGGCQDG

SEQ ID NO: 39738 - protein, 377 aa, Oryza sativa
MALAAARPLINVYDDKKGEASGTKVLLPSVFRAPIRPDVVSYVHDQVIKNRRHAFAVGELSGMKASAESWGTGRAVARIPRVRGGGTHRSGQGAFGNMCRGGRMFGPTKTWRRWHRKVNIKQRRYAVVSAIAASGVPGLVLAKGHQIDETPEVPLVLNDKVEELKKTKEAVKLLKKLKAWKDVEKVYATKRFRAGKGKMRNRRRIMKRGPLVIYNKDNGLTKAFRNIPGITLLPVDKLNLLKIAPGGHLGRFCIWTESAFKRLDDIYGTYKSKSTVKNDFSLPQPKMTNSDLGRILRSDEVQGVLKAKSFDSKRRVLKRNPLKNTRTLAKLNPYAITQKRIALKRAGKRVQPLPAKKTGAKKAAVAKKTTAAKPAKK

SEQ ID NO: 39739 - protein, 506 aa, Oryza sativa
MVLWIGGEARYLRQNILNLSMYLGLDISAEAEKERGRIRSFEEQEHDAFQRVKRELFRDVPYLLIIDNIDNERDWWEGKDLHDFIPRNTGASHVIVTTRLPVVMNIEPMQLLQLSFPEAVILMKRKMKEDYPSEEIEVLRKFDERLGGLSFGLWIVSSLLSELMIAPSTLFEAVDQISLSDTMLALGANDESLWQNNLFLIKVLVFCFALMDRVKGGSLALRMITAGSWLAPAPMSSTLLATMASKLPTKANSIQLWGESLKTALLCGTHCFLAPQAKKAEVESSLLLVKLGLARRTTHHPGFWIQFHPIMLLFGKIRGGLAPATAAVSGVIRSRNISVYSDHMWASAFLVFGFKSEPPVVQLKPGDMVLFIKKMALPLAIQAFMTFSRCGSALELLKVCTNILEDAEKSLASRIQDLKQGPLCWKKKLQTNSHADEFIWQEVTLLKATLLETRAKLLMRGGLFDSGEELCRTCISIRTVMLGHDHSQTLAAQETLAKLVRYRSKI

SEQ ID NO: 39740 - protein, 588 aa, Oryza sativa
MSPLDGGGLLGVFTNSTGMNPSAAAPIVAVEFDTFQNEWDQSSDHIGIDVNSINSTAVKLLSDRSLSNVTEPMVASVSYNNSTRMLAVMLQMAPQDGGKRYELNSTVDLKSLLPAQVAIGFSAASGWSEERHQVLTWSFNSTLVASEERRENATRGRPAAAVLAGVVVASVVVVGASICLFVMIRRRRISRRRTREEYEMGGSDDFDMNDEFEQGTGPRRFLYSQLATATNDFSEDGKLGEGGFGSVYRGVLSEPAGVHVAVKRISKTSKQGRKEYASEVSIISRLRHRNLVQLVGWCHGRGDFLLVYELVPNGSLDAHLYGGGATLPWPTRYEIALGLGSALLYLHSGYEKCVVHRDIKPSNIMLDSAFAAKLGDFGLAKLVDHGDASQTTAVLAGTMGYMDPEYAASGKASTASDVYSFGIVLLEMCCGRRPVLLQEQSIRSRLLEWVWDLHGRGAILEAADERLRGGELELDAKQVECVMVVGLWCAHPDRGVRPSIKQALAALQFEAPLPALPPTMPVPTYSSLPSLALYCDAAAASSSSSSAGFSSSTSGERSSTSSSAATAESSWLLKHNNRGSEKIVLGNN

SEQ ID NO: 39741 - protein, 136 aa, Oryza sativa
MEYFIFLSVSTRAKLSLQRKMPSALPPRHTQAPAPPAAASASACLLRRRRGRLRVSLCYCRASTEPLVFASPSSPSLLRSSVAVPVPSSPRHANRGPGDGGGLLVVTVAASAVRPPLLPTLTHLISPSQSSDMTLG

SEQ ID NO: 39742 - protein, 142 aa, Oryza sativa
MAAVVAATALKGRGARNARVLRGILSGATANKASQNRTRALQSQSSPECKEEPEPLPPELEYIPRKRGKNPMKAVGLAWAIGFPCGILLFILTKREVDKDRLKQMKARQNMRASNTGEYESQRFRASSHHAPSPEAVSGVQS

SEQ ID NO: 39743 - protein, 63 aa, Oryza sativa
MAPASSIPLALLTAAIAVLPISFVAPMITTFSIYHQILPSEEVAVLLEKNIHNVITHSTLIVL

SEQ ID NO: 39744 - protein, 242 aa, Oryza sativa
MPFSAIISSMDSRKSLLGSDDVFTTAKLCASGGCVGVVVVARAVGLPFLHAARRGLLVRVLRRRRDDTDERLGLPVLMLFSEEAEAELALGVISSARSTCFTSAGSHQSSSLLAGLVTTGRSTLSGVSSSSSAPRSMIMSASDVITLTSTAASSSGPSTVVARRRNSTPRPPSLPMNMSRRHRELPDASATGGSWWLQPSWSSDGASTSSPPSISVEPNLPTLCRLLLFLVGNGGDSVREGN

SEQ ID NO: 39745 - protein, 132 aa, Oryza sativa
MRRQGGNCEVNSSIALLQERFRNLQKVREMREGREQLLQTPPSPTATATAIAGATTTGAAASSSGGEQPRWFSHPELVRPSSRPAAAQRATADDDAAAVRQPPAVSVGRAAAMVLQSSGCRSDVEVDTSLHL

SEQ ID NO: 39746 - protein, 294 aa, Oryza sativa
MGMEDDAAGRGTTVPFLVAVRFVVALAVGAVTFAVIVMVIAMVSRPEEIQLSIDRGYITVYDDYGSEVLPTATTSLAAILGGFVQSRPSTAQLAVSLTASYSSQRGHKDKIINCSDITIGLVDMTLSPASWASGQMPAKINDTIVWFKLNNGFTLLKDTSHTEAMTVTITNSSQIMEYIEHRLKQEDVFHVLVMVHIITPSTNPNSPSPPPPPPPPSPAPAPAPSNAQSPSNNGPAHTFYCWPITIGYGYSALQDTDDVGCKSIGSSVVPGNQTNRANATSVTSGESMPVQIGG

SEQ ID NO: 39747 - protein, 333 aa, Oryza sativa
MVKVGVNGFGRIGRLVTRAAVLSGKVQVVAINDPFIDLNYMVYMFKYDSTHGHFKGTVKAENGKLVINGHAITIFQERDPSNIKWADAGAEYVVESTGVFTTMEKAGAHLKGGAKRVIISAPSADAPMFVMGVNHEKYDKSLKIVSNASCTTNCLAPLAKVIHDNFGIVEGLMTTVHAITATQKTVDGPSGKLWRDGRGAAQNIIPASTGAAKAVGKVIPELNGKLTGMAFRVPTPNVSVVDLTCRLEKPAKYDDIKRVVKAAADGPLKGILGYTEDQVVSCDFNGDSHSSTFDAGAGIALNDHFVKLVSWYDNEFGYSNRVVDLMVHMASKE

SEQ ID NO: 39748 - protein, 256 aa, Oryza sativa
MALCLMLLASGGHGERAPDAEAVAAKEAKFRSRRPADGAGAGEFVYECKTCSKCFPSFQALGGHRTSHKKPRLVAPPAAMEPAADDKIKPTIPETAAAAAEEKPPKPSPPRPPASRPIATDPTVLAIPVIPKQEVLDATNSAAIASVSKQPRVHECSICGAEFASGQALGGHMRRHRPLIPASASSAVVSVLDAVDAPRQKEKSLLELDLNMPAPCDDATAETTTTSSAATSPAFAFAVSDRSPLLVPAALVGCHY

SEQ ID NO: 39749 - protein, 135 aa, Oryza sativa
MNYPPELLWLTELSPEPENQTFFTLNFQYRTIYPLRPKPERFCPTWRMRGNPVSIFSFFLNGGAHLSYIPSHLLLHNTSLSLQAGAARDGGWSARAEAGSRRRAAAEPDLDSYSPPPGMLRRRQRGTEPAARWRS

SEQ ID NO: 39750 - protein, 324 aa, Oryza sativa
MFHPSSSSSPPTYSDSSMHHALSFSSALPTAPTEIPGSGGGFVDDKGSMFSLPNVAGSAPPPSYYSSLPSFYIHRSTSSHSLLHHRLSDLLNSNAAFSYSSAPACQLQPLPPVSSSTSSSSGDLLEFSSGTLRRVFSTGDLQAMNVPPSPPPPPPFSGDICIQEVGGPFSQKVGRYSAEERKERIERYRVKRQQRNFHKKITYACRKTLADSRPRVQGRFARNAETEADAEADAVAGLDTEVYGNGYGYCAYSGLTNSISSNCYDNQSQSQWWGTPAGAANWQHQQQKQQLGFDVAVDGDDEDYELCCGPASLTCAQGPDPELI

SEQ ID NO: 39751 - protein, 114 aa, Oryza sativa
MLRKPLRLPPPTCKSCASCRRAPSLIANHVIPPQIAASPASVEVRARFLPSYSDVKRICLPSYLVLFLNLRGSVLSRCFSAGRGGACSSFNLSVHNPWFRLLSPPTSHPSPPRR

SEQ ID NO: 39752 - protein, 417 aa, Oryza sativa
MWVKSRQASNKKKKKKQGGSRSWFKLPMLSSQQASYASEEQQGEEDDGDGDEVLIPGLPARFTYAELEEATEGFKSQIGSGGFGCVYRGELTDPERSAVVAVKRMNNLGSQGRREFLTEMAVIGNAHHVNLVKLRGFCAEGARQLLVYEYMNRGSLDQCLFRAAAAPLEWPERMGVCVGAARGLAYLHAGCTRKILHCDVKPENILLNDRGGVKIADFGLAKLMSPEQSGLFTTMRGTRGYLAPEWLTNAPITDKADVYSFGMVLLEIVRGRKNCRSGKGSGGEASSDSDGYFPAMALELHEQGQYEAVVDQRLEGRADVAQVERVVRVALCCLHEDAALRPAMTTVSAMLDGSMEAGVPRTELLDYLRLYGRGLVDVRSGLHAAGKGGSDFTSGGAGSSSWSPTSCVSAQQLSGPR

SEQ ID NO: 39753 - protein, 266 aa, Oryza sativa
MATYYYVCCSYCSHLLAVYTDGERAVRLRRVHLRHDVQLRCRVGVPRRRPGGAGAGQDSHHRHRRHHLPRRLHAHLPGVGRPGAGPPHRSQHGEARVRRGGLRRGLLRRPHGGGGQVGGVQERARLQGVRGLSRPRDGRPPHGRFGFRHPYDQYAKVGAAMRQCACCVEALISCAGASSRQRAPPPRLLGDACTRVGAWCARVLKEASACVATMTTSRGLGFAVAEMDAAVRELQSDLRALPPILAEEASETSLAEVISTSPLLCC

SEQ ID NO: 39754 - protein, 379 aa, Oryza sativa
MASSLLHCSDKLPFMNVETVLHMKEGLGETSYAQNSSLQRRGMDTLKSLITNSAADVYLSQMPERFAVADLGCSSGPNALCLAEDIIGSIGRICCRSSRPPPEFSVLLNDLPTNDFNTIFFSLPEFTDRLKAAAKSDEWGRPMVFLSGVPGSFYGRLFPAKSVHFVCSCSSLHWLSQVPSGLLDEMNRPINKGKMYISSTSPLAVPVAYLRQFQRDFSLFLKSRAAEVFSGGRMVLAMLGRQADGYIDRRTTFLWELLSESFASLVAQGLVEEDKVDAYNVPFYAPSIGEIEEEVRREGSFRMDYVQTYEINLSSSGDARRDGRTVSMAIRAIQESMLSHHFGPEIVDALFAKYTELVTASMEREEVKSVQIGVVLTRL

SEQ ID NO: 39755 - protein, 153 aa, Oryza sativa
MCKVITIQSLVWLRRTVRRWRSRAAARPAGSKMERDGDAVPAGHVAVRVGGGGEDARRFVVRVAHLNHPAFRELLRQAEEEYGFPSGASGPVALPCDEDHFRDVLRRVSSDERHDLAFCRPAATCGVTKRRAESSSSSSSRAPLLQGMDSLVW

SEQ ID NO: 39756 - protein, 60 aa, Oryza sativa
MAKLAGRGSNGATDEALREWRHHGSKFYDTFTVSGLRVDAIQPGRVLCSFTVPPRLTVRY

SEQ ID NO: 39757 - protein, 96 aa, Oryza sativa
MNIVYKLTVIYIFFTLDVTFIICICILSAITFRIFLFFFLFKHIIFRMCYWFCFNGFTFDSIFTENRREVTIINCSVIQCSHDMLILLACFRTRLI

SEQ ID NO: 39758 - protein, 547 aa, Oryza sativa
MGAGPSLDAEIAQAKDIMAKFLEKFAKNYSMLYLVAMAKASIKEQVKAAAGPKWSLLKCPKEPDAPDRKTGHMLKRSKHLKKWNKRFFVVRGNWLVDYWETEDQQKAGKKPRGTLNLSGMRIIRDPNDTYVKKILDLAKKCNLNVDDLPKPEVLPDFSLEIHHETREIVLLQCENADDHKSWCDILDDCRWYSRGLNISDDKIHNQIFQWALWRSRWQSGIWGYWSSGGGEEQYITDCINEAIVDAVMPSVDAKLTMPWAVRSKIRNTFTSNVNTFVSTGVKPAWAAAYEGVKKVRDEVKAKIAEGVAPIADAQASVQAKILEMVDKPSKDAIGEKVAPHLNPLLDIIFAPVNEAFKIVLSAYDTALTRGKERYTTREDRMHMVMHNAWNSEFWDADRKLWDLFDPLWAMRTVFSDVSPWGITGKARRRLRKTLNNALFTFETRLEEAGGKDHWDRIAAETRETLKADCRASIGRVLGKILFGVVEVFWDTLIIRPSRALVGPLADAIPDAIKQFVDPEDILERTLNNILLQCCANVFQPYTERIQL

SEQ ID NO: 39759 - protein, 558 aa, Oryza sativa
MAAPTSMANADGESTRTGYCAATKSFRSLRPPVPLPPPDVPLSFPEFAFSLLPRSSSSSSSSLLPANPALVDAATGEAVSFQAFLSRVRALAGALRSRVGLRGGDVAFVLAPAGLDVPVLYFALLSIGAVVSPANPALTPAEVSRLVSLSGASVAFAVSSTATKLPAGLTTVVLLDSPHFRSLLMDCGQAQGQEPLPVVVVRQSETAAIQYSSGTTGRVKAAALPHRSFIAMVAGFHALRAKAREVRTLLGAPMFHSMGFLFVLQGVALGATTVVVTDAVARAGIRGLVEAAERWAVMDMTASPPVVLGMTKQRCRLPALERITCGGAPLPAPAIERFRRRFPHVDLCMGYGSTEAGGISRMISQEECNHIGSAGRVTENVEVKIVDHVTGKPLPAGQQGELWVRGPAVMTGYVGDNEANATTFNSEGWLKTGDLCYIDQDGFLFVVDRLKELIKYKAYQVPPAELELVLHSLPQIVDAAVMPYPHEEAGQIPVALVVKQPGSKLTEAEVMYNVAKQVAPYKKIRKVLFVDSIPKSPSGKILRRELVNHLRLCELSRL

SEQ ID NO: 39760 - protein, 280 aa, Oryza sativa
MAMLGSSSAVVLELMTMGYQSAAYLGELLRAASPAQAGDEQQELAAEILRCCDRVIAELNRGGATGATTGKKRKAAESAAAAAVTSPSLPVTPTKRRARGAEAVREVRSGTTTDGFIWRKYGQKEINGCKHPRLYYRCAFRGQGCLATRRVQQSQSQDDPAAAFVIAYYGEHTCGGDAAAAAACRDGELMPPAVINSGASSFAAAWNMASREPASSLAVERRSCDGDAPSETSQGWSPSFSSEVELDVVGFDLAGADSSASPVWEFLNGSFDWEFVINSL

SEQ ID NO: 39761 - protein, 123 aa, Oryza sativa
MTATTEERPPTPRGSGSSSRASRCSTRRWPTATSFASPTSPRPPKRRRRSVLRTPSSASPTATSPSVSRCSAGSIPPPSPSPTRSVGSASASRRSRPPPRSARPRSSPCCRRASPCGPQATSS

SEQ ID NO: 39762 - protein, 136 aa, Oryza sativa
MNTHDDLGIKDLWKIISILEKDGVETVDGSHKARISGITHVPLDFPVICKEIAEGHPLLAIIRTGKGFDDLQYNQIYKPPKVSRIVDGKSAGLHCITLVGGAMRKGRKMHYKFVNTYGEDFCKLRSLNRDDGIKGG

SEQ ID NO: 39763 - protein, 378 aa, Oryza sativa
MGMLKIGKNCSVCKEWQEHCYWSHMADHSKHFLKHMVGDFTESMTVPARFANNFNGHISEEVNLRSPSGETWSIGVANSDAGELVLQPGWKEFVDGNGIEEGDCLLFRYSGVSSSFDVLIFDPSGCEKASPHFVGSHGFGRAENSAGAEQGGRNGRRTPPIVDGDNGHRHHLEMTLHRNSCRSIPRACKRSLFSDETEAKENDGEDEDVVAAAEGGRYGEYYFSRHGRVAEYNLREEDREEISRVPVPVQPGNPVFVQVIHSSHVRSSKYCIVGVSPEFAGKYLGAVEREVVLERASRGGEWHVPFVHRQNTRGFYGAGWRQFAGDNRLVAHDVCLFELTMVDAAASGGGNRRRRWSRRPTMTVHVLRRVRGRFVLLR

SEQ ID NO: 39764 - protein, 396 aa, Oryza sativa
MASSSVSSDDVNPFAAGSVAISAATAQLIHIKSHVPVILDLGDSTFGTWRTFFTIAFRKFGLLDHIDSTTNARLKLDDAEWTQIDTCIVSWLYATLSPDLLSAVIQPDDDAYTAWNAISSQFLDNVVQRTVQTRQAFHALHQADMTITEYCGKIKVLADTLRDVGSPLTNQDLVVNLLSGLNDKFAHCVSTISAARPPMTFLQARSFLLQEEVWIANRAQKAATTALLAASRSAGASSNAPAVGSSTPASAPPATGATGSNGGTGGNGRPYKRKKQAGRADGTSGNSGPSGNSSAPMASWVNPWTGVVQAWPIAWFPLTSSAPGILGSRPGAAPQQSMVVQQAPAGTLPPALYQALTGLSLQSTPPSATDWVFDTGASTHMVGNSGSSQQDGSSPQ

SEQ ID NO: 39765 - protein, 116 aa, Oryza sativa
MSRSNKKSSRGIDLKLNLSLPARGDSSSRRAMAADEESSPSSCLSSENEHGLQWSNSPEATSMVLAACPRCFIYVMLPQDDPRCPQCKSPVILDFLQQDNGNNNANSNSSRKTRRG

SEQ ID NO: 39766 - protein, 554 aa, Oryza sativa
MSSLDATTPRYDEFKRIYHLFLFHAHPFWLQLLYFLFISLLGFLMLKALPMKTSMVPRPMDLDLIFTSVSATTVSSMVAVEMESFSNSQLLLITLLMLLGGEVFTSILGLYFTNAKYSSKMIATLPDDDDHGGSGKPPPPTTSPSSTLVELELAPPMDVVVVNPTTTATTHDEVELGLGRRNKRGCTCTTTHTSSSSSASKTTTTRLLMFVVMGYHAVVHVAGYTAIVVYLSAVGGAGAVVAGKGISAHTFAIFTVVSTFANCGFVPTNEGMVSFRSFPGLLLLVMPHVLLGNTLFPVFLRLAIAALERVTGWPELGELLIRRRRGGGEGYHQLLPSSRTRFLALTVAVLVVAQLALFCAMEWGSDGLRGLTAGQKLVGALFMAVNSRHSGEMVLDLSTVSSAVVVLYVVMMYLPPYTTFVPVQDKHQQTGAQSGQEGSSSSSIWQKLLMSPLSCLAIFIVVICITERRQIADDPINYSVLNIVVEVISAYGNVGFSTGYSCARQVRPDGSCRDLWVGFSGKWSKQGKLTLMAVMFYGRLKKFSLHGGQAWKIE

SEQ ID NO: 39767 - protein, 406 aa, Oryza sativa
MSAAEDPAKPPPPPPPQLEASGSDPDDPLLRDRVVVIAPPPPPPPPPPPAPAPALLAPAENASAEAAFAVPPAAIAAVVEANGNSEKKKKRKTDEGEGCKSCSCKKSKCLKLYCVCFASGSHCSESCGCDPCYNKSIHGVPRSTPALPLKAVQTLETGQDSVEQLIRSPMDFGRRKCTCKKSGCLKKYCDCYQGGAGCSINCKCDDCKNPYGRKVGVILDGKNILAGPTPNERNGTEADSSDDEEDDYYMNRPLSPVSPSPVSRESSFQQETLVGVEVQTMNGHLYPKPLTQVRPESWQLTRRPTEEVRGEAWHYLRRPSEDGTSDVTEGHADPKFQRDNKQLENHVDRYSIPRCIEVMNAMADLSPIEKSLAPDVFLDPSNREIFLSLTVDIRTMWLKRKMKSLV

SEQ ID NO: 39768 - protein, 203 aa, Oryza sativa
MAGAGTDGCTNLQLGHAGEDLQSMTRRWQLTHGTATIGPNEPTPPPPPAILASSSAMAAAPPELALPAPTWKVDGIVEMLSSRSRVLLPPCSSMGLTQLFLMVFLFRSRHCSQSMGRGSLRWRSRLAWDTASSQAKCFLLFLLPSSLLPSDSDDDELLPAPAPTPKPSNVGPRESSGCTSIDRPILNIFIFEVLNEGSSLRTP

SEQ ID NO: 39769 - protein, 591 aa, Oryza sativa
MASRRLKATHSIRRRCASRSCRHQKAGRRRQQCGLSRRPLCSASSLPPLVSAAMASPSSSPQPRTSPPGSPAHTWDSSTDQATATTEITSSRLSLIPSRAPNSPTSTTTTSASTSIALCLQMPLMPATMMTTPIDVRLAPVGIKKPMKPLVSTRSNLSTVITDEAYVGFSASIGTMTSQHYVLGWSFGVGTQAPAIDMDKLPKLPGRRSKKSYPPKTMVIALPIVSVVLVIVVAAGVFLLIKRKFQRYVELREDWELEFGAHRLSYKDLLQATERFKNKNLLGIGGFGRVYKGVLPTSSSEVAVKRVSHDSRQGIKEFVAEVASIGRLRHRNLVQLLGYCRLKEELLLVYDYMPNGSLDKYLYSHDDKPTLNWAQRFQIIKGIASGLLYLHEEWEQIVIHRDIKPSNVLLDNDMNGRLGDFGLARLYNRDTELQTTVVAGTFGYMAPELALTGKASPLTDVFAFGAFLLEVTSGRRPVEQDIEGHRLLLTDWVFENCSKEQILAVIDPRLNGNINISEASLVLKLGLLCSHPMSNVRPTMRQVVQYLNGDMPLPEMSPMRFTFSLSALMQNQGFDSSLKSLGTISNLSIGR

SEQ ID NO: 39770 - protein, 96 aa, Oryza sativa
MVPKREYSSNIRDNLIRENLADGAIPLRTRAVTLWLPFFFSPHPFPFSFAHRRREHASKASQQREGASNSEGEPTTGACEHGRADDVRARARARPS

SEQ ID NO: 39771 - protein, 282 aa, Oryza sativa
MAPPQYADLGKAAKDLFNKGYNYGTVKLDVKTRTKNEIDFNITGEHNNDVQKSLGTLEAKYKSPQHGLTFVEKWNTDNILKAEITLEDSIVKGLKVALDSSYSPATGKKSGVLKTSYKHDKLVLNTDVDLDLAGPVVHNSLTVGHLGWLLGLQTSFDTSKSQLTRNNFAVGYAANDFTLHTNVNDGTEVGGSIYQCVNDKTELGVSLSWSSVNNQTRFALASKYQLDKYASVQAKVNNLSQIGLSYSQQLRDGVKLILSALVDGKNINGGGHKLGLGLEIDA

SEQ ID NO: 39772 - protein, 134 aa, Oryza sativa
MQLPSRAMLFQVDIFPFTNIQPVFQNHIFVSKPCLSTGFGDVKRSSEIRAFAPVEEWLVDLTMEPTVVVVVQIVPIPMSRIDLIIRHEMKSQFSLHISIMKILLRSMFEACTASSQCCRASFWAFSSLDRPLPT

SEQ ID NO: 39773 - protein, 369 aa, Oryza sativa
MIQSNVYKYLSTLLEWRECFEDEALEEEKELGMSNHKGDGEPKAVQSTSSLYSLNQRLMHFANWLLEIVALGNLDAFFPAATREYAPIVEEVWKDPAIQATYKRKNELHFLPDVASYFLDRVVEISSNEYEPTETDILYAEGVNQWNGLSTLEFSLDDRGPLSDSYADKAGNPAIQTKYQLIRMNSKGLTGGFKCLGMLEDIRAIIFCISLADYDQTWVQSSGEPCNKMIASRDLFEDVIRHPSFEDTPCVLLLNKYDAFEEKISRVPLTVCEWFADFSPVRPHHTSQTSLASHAYYYVAVKFKDLYSSVADGRKLFVFQTKALERRTVDDAFRYIREVLRWDDVKNSDAGYCSADESSYSVDMTTSPS

SEQ ID NO: 39774 - protein, 370 aa, Oryza sativa
MASRSISSCTTETAKGIHRFEIFSYSMMNTEAEDDSIRSGVFNVGGFDWALLYYPDGIDDDSKGYIGVYLELISKNGEPWALVDVNLINQLQPGQPRQLFTKTDVPTPFRSSSFQESTLGSLKCMKRSDIESTPGFIVNDCIVIECNVTVIYEPKVSKTRALCDAETSSALREIEVPPMEISSDFAKMLKDGVGADVTFRVGEDTFRAHRAVLAARSPVFHAQLCGPMKEKKETQMQEITIQDMQPSVFEAFLYFIYTDCVPRMDDLGNGEKMHLMMHLLKAGDRYGLERLRIMCERFLATNLDTEHVSAILGLADLLDLKKLKEACREFMVPSERMDAVAASQGYQQLKRAFPSLAFEVWERRSRVRRN

SEQ ID NO: 39775 - protein, 121 aa, Oryza sativa
MSSSCVPRREPKEKGAMASGCAPASNHGTPLHACPTKIPSTAAIAHRPWISSASLYHLRNAGSLPSPSGSKPKSPGSLPVPYTRRARVVSQPNTMRRREEEEEEEEEKREEELTSHRATAG

SEQ ID NO: 39776 - protein, 189 aa, Oryza sativa
MTGSSCPADSSQLLYPRRGAPTTTTTSRPPLHPLIAHAPYDVVLHRSVVLSISSARDQAELASFWCYIRLGGGASAKRAAGEDDRSRSSLTAARGGGGETMSGRGRGDPLVLGRVVGDVVDPFVRRVALRVAYGAREVANGCELRPSAVADQPRVAVGGPDMRTFYTLVMVDPDAPSPSDPNLREYLHW

SEQ ID NO: 39777 - protein, 490 aa, Oryza sativa
MEPHVLLVSFPMQGHVNPLLRLGRRLAATGLLVTFTTVRLAAGGGRLRDVPEDGACADVGLGRLRFEYLRDDDDDGDERCQQLAPNDVLSHVTAVGPSALAEFIDGQADAGRPVTFVVNNIFVPWALDVAAGMGIPCAMLWIQPCSVLSIYYHFYESPEAFPTAADPDVPVELPGLPVMAMVELPFMVRPEYAQCLWGDTLRAQVGAIKRTVSWVLVNSFYELERSAVDALRAHTTVKLAPIGPLLEHGHDNGGGDDGAPAPALGAEDNDRCVAWLDAQPPRSVVYVAFGSLVNIGRDETAAVAEGLVATGRPFLWVVRDDSRDLVPEAVLAACRGDKAGKITAWCPQGRVLAHGAVGCFVTHCGWNSIMEALAAGVPVVGYPWWSDQFANAKFLVEDYKVGVRLPAPVTGGELRACVDRVMSGPEAAVIRKRAMHWKREAAAAVADGGSSDRSLQDFVDHVRRSKGPEELARLAQDIQIMNGPVNPVLV

SEQ ID NO: 39778 - protein, 91 aa, Oryza sativa
MHDGSGTAASMRDGISRLDARRRQQPRCVTAAWRPRCATVAAARRPRCTTAATTSMRDGGAMASMGDGGRWKRGDLIFVSPIIPLLNQRLD

SEQ ID NO: 39779 - protein, 401 aa, Oryza sativa
MRRLIVLFKAVGAKLLPSEQLANLITPSPSTYIYPHTHIVQDKLRQNRSEVEMVRAIGPLLLLAHVLVFVVSIAAAAAPVRRPRCDAGDRAALLAVKAAFNNASYFQSWTPDIACCHWYGVDCGGDDYDYDPTDGDRVLSLAIIRDDNVTGGIPGDAIARLTRLQELMFFKVPGVTGPIPAALATLTALRELTISRTALSGSIPSFIGDKFTALQSLDLSFNSLTGAIPASLAKPPKLISIDLSRNQLTGSIPRLLLSKAGQQAFLTLSHNNLSGRIPAAFGAVNFVQIDLSRNQLTGDASMLFGSGKKELGSVYLSRNALSFDMSELRLPERLSFLDVSHNAIRGGIPAQVANLSNLQLLNVSYNRMCGEVPTGGNMARFDAYCFQHNKCLCGAPLAACH

SEQ ID NO: 39780 - protein, 96 aa, Oryza sativa
MDDDDDEVAAGEAGPAPAAAATGGHADRVFRALALASLYILFRRWRAGGAGLAERPSPAEIAVAVALCASVAWLYALPAFGIRRSSEISTRRWHQD

SEQ ID NO: 39781 - protein, 449 aa, Oryza sativa
MEEQETSIGDLHTDAFVEILRRVAPSARRRLRLVCRRWRNVINSRAPVWRGHAKTLAFVYHRPGPATAAYAIDGLEEDDEGCYRKLWDAAADPSLPAIYSRLRMIGSCNGLLCLYDEGVTGDIALLNPVTGETLDVAGPPGHRLRRQEPYGHVPYGEAFSFTYHEATERYKIVHLAVSDGRLEAVEVLTLVDGAPSPSWRRVAAPAGSSCWLPAGVVSDGQATYWINHGGGDRLMSFDLTDERVATITSLPVAAKNLNAGCLRKARGRLCVGNRIHHDYQNNTEIDEMWLLERDGCESLERWYCRFYLTTRLCMEVQQVVGPHFTQGEHILAHRHGSLYVHRCVSSATRPQCSVAQIHEHWPYHEPMFTCGHASNIRAFSYIETTEPLNVYQCNGGSKIGSVVNNDEEMATGKTTSLGQMLTSMFNDLPSPHPKRPVARRRKRRTNRFK

SEQ ID NO: 39782 - protein, 431 aa, Oryza sativa
MAPTTNQSSGSAPLTVNPVVQRAVVGAQLPTTSPCRTPKSPPPSYGSIVTVLSIDGGGVRGIIPGTILASLEEKLQKLDGADARIADYFDVIAGTSTGGLVTAMLTAPNDQGRPLFAAKDINDFYLKHCPKIFPPRSIPIVGLFQSMAGPKYDGKYLHSVVQSLLGDKRVNETITNVVIPTFDIKLLQPITFSRFDAQIDVSKNALLSDVCISTSAAPTYLPGHRFQTKDKDGKPREFNLVDGGVAANNPTLLAMTHVSKQILLGKQDDFFPIKPADYGKFMILSLGTGTAKIEEKYDAVQSGKWGMINWVYHDGSSPLIDSFSQASADLVDIHASVLFQALHCEKSYLRIQDDELTGDTASVDVSTPENLNRLVDVGKALLKKRACKVNLETGKNEPDMSRGTNEEELENFAKMLSEERKARLQKKAFLQ

SEQ ID NO: 39783 - protein, 446 aa, Oryza sativa
MDSIMEPYVADLLADDITASMVELLPGDGGAAQMDVGVLDAYLRAIGALPAHPAAPGADLAAAAEVESMASNDDTNGVLYDWDTKVDVKVPCALLPPPPGFPPLPVPGLADEPVYAAPARHLPPPPGFPPLPVPGLADEPVYAAPARRLPPPPGFPPLPVPAKAEPVYAAPVDEGDAIRAFMQQLEWSEQYNGDNDAPAPDNSTASRPQLCAPYDDDIDANLRDMEKDAAQRPSPDYLDTVQGGQISAAARASLVAWMGRLTHRYELAAGTLHRAVSYFDRFLSVRALPSYTAHQLSLVAATAVYTAAKYEDQGTVFKLDAREIASYGEFASAQEVLAMEREMMAALGYRLGGPNAETFVEHFTRYSKGKEELRVQRLACHVADRSLESYGCLGYLPSMVAAAAISIARWTLNPPGALPWSSELQELTGYSSQDISSCILTVLNTQ

SEQ ID NO: 39784 - protein, 194 aa, Oryza sativa
MSPEEAAGVIPRRLLDATDERPPLRRVVGVASRRAAAIRCRAAAPCHRLRFASVSVDLFRPPPPLVGEPPLAPRGLERSAVRRAAALVFATSIFRRLSLFLDDSWVTASSLRAFLPAERHLWAAVLAAAMPLPLLCFPDAGACLGLLLDMGGGATRDAPAAMLTSRARGEGDAARGVDPERATELAPRLVAAGC

SEQ ID NO: 39785 - protein, 218 aa, Oryza sativa
MAAMASSAPTAAKPVALLPAPICRCGGGGLRSTLLALMPPAAAAASRFRVSASASDVPDFLSSDWLETRKKKPFGPRLNFNAEEAVEYQLEALKYNDQPRQDYGIEVMYRFAGFDPFERSTYFGRQFDLGQFERFRRIFHHSTYRVLLAHKERTILSSLWVEENLYKQRVWVRGSRPEEEAIFQFTMVQRVGGSWDGYWLTESLINDDGDALSGGLAY

SEQ ID NO: 39786 - protein, 364 aa, Oryza sativa
MASSTLALDFLRRLLCAHAAAGNAGGGDDDGAVVVQVQVQQEEGMSPCVVARLMGLDAMPPPPPETECQPLRRQRRRRRSRSVSSAEGWPPPPAPYLKEEGDEFIVLSFSPDAASRHDNGEPDGKSGHVGAKKQSGGCPRRKLHYGGDDDDDEAQHPGHGRRRAAATERGMPSSSPVSVLHAQHSSSSSSSSSTTTTTTTTTTSSCSSEEVGPSSPSPTSEEIRLANNQQSSRRKLQPDFNDDLDNPLSPETSSCHVSKCSESGMRNRSVMNKSEVFIPGVSGTLQFICRLVEEDLNSVIWLTSDSENIAADMVSEILDQLTSETADELMQTGSETVHSSPGRLISMKHPSFRVDRNMQAIRSN

SEQ ID NO: 39787 - protein, 107 aa, Oryza sativa
MLPCLPPFQSNPTHAAASNGSERPPAGEGQALGRRRRCHADAEELPPSPTSGPDPSKARRSSIEGTTLAGSLLNSRPMLRPPGAVVAWKLFDEMPTRAEQWMESFAT

SEQ ID NO: 39788 - protein, 152 aa, Oryza sativa
MEARGGRTSGRKNGARSPAATGRPQIQKYPGTGSWRRRSGVGAGGGRDEVSTSVHRGNREALPSASLLGGGGCGWKKFVVAGGGGGERRGAQVGGERIWCGRAGEKDILHTSPCILYDYCATLNKTKILFSLYSILLNNNEGLLILQLPQYI

SEQ ID NO: 39789 - protein, 390 aa, Oryza sativa
MAALAAVAVLVVAMVISGGGGVAAAVTSKKPVIYIFGDSMSDVGNNNYLILSLAKSDYPWYGVDYETGFPTGRFTNGRTIGDIMAAKFGVPPPPPFLSLYMTDDEVLGGVNFASGGAGLLNETGIYFVQYLSFDNQISSFEEIKNAMIAKIGKKAAEEVVNGAIFQVGLGSNDYINNFLRPFMADGIVYTHEEFIGLLMDTMDRQLTRLYDLGARNVWFSGLAPLGCIPSQRVLSDDGGCLDDVNAYAVQFNAAARNLLERLNAKLPGASMSLADCYSVVMELIEHPQKYGFKTSHTSCCDVDTTVGGLCLPTAQLCDDRTAFVFWDAYHTSDAANQVIADRLYADMVSAGAVQGNGNATTAAAASTPAPRVVVGGGASPSTHAAPPPKP

SEQ ID NO: 39790 - protein, 405 aa, Oryza sativa
MELHLTSRGALPLSPPLAGQRRPHLSLSTPSLPIKNHTYSVPPPFSKAHCAIGCQASLATNYMETSAVADLDWENLGFGLVQTDFMYIAKCGPDGNFSKGEMVPFGPIELSPSAGVLNYGQGLFEGLKAYRKTDGYILLFRPEENAIRMRNGAERMCMPAPTLEQFVDAVKQTVLANKRWVPPTGKGSLYIRPLLMGSGAVLGLAPAPEYTFMIFVSPVGNYFKEGLAPINLIIEENFHRAAPGGTGGVKTIGNYASVLKAQRIAKQKGYSDVLYLDAVHKKYLEEVSSCNIFIVKGNVISTPAIKGTILPGITRKSILEVAQRKGFMVEERLVSVDELLEADEVFCTGTAVVVSPVGSITYLGQRVEYGNQGVGVVCQQLYTSLTSLQMGHVDDCMGWTVELNQ

SEQ ID NO: 39791 - protein, 64 aa, Oryza sativa
MAHRGRRSASSSSTRVTVAICRIHLLRGSSRCRLPGALHRRRTIFFTAAVVQTFPRLVQASIIA

SEQ ID NO: 39792 - protein, 414 aa, Oryza sativa
MAESYHKEVIAGLKDKSLFIQEAFIDGQWVAKDNKFDVFEPSTATVLGQVANCALEDFQTAIKSADVAQTNYFDSTTGASRGALLRTWYDLVLANQEDLANILSLENGKTYSEALGEVLYSASFISWFAEEATRSYGVTIPSSAPHTTLMTVREPVGVCGIITPWNFPAAMITRKIAPALAAGCSVVIKPPSETPYSALAFTKLAIDAGLPPATIQVLPTRDRQAATELATNPLVKKISFTGSTGVGKYLAKLAAGTLKKLSLELGGNAPFIVFEDADLDLAAEGAMFCKFRCSGQTCVCANRLYVQKSVAKEFTAKLVEKVNALKMGSGLDKSTTQGPLVNKAAVDKVKEHIADATSKGAQIATGGSTPAAPVSSTSPPSSLASHKRWLSPRTRPSDLWLPSSSSTPRRMLSV

SEQ ID NO: 39793 - protein, 82 aa, Oryza sativa; identical to SEQ ID NO: 34199

SEQ ID NO: 39794 - protein, 345 aa, Oryza sativa
MPSAGAGAAFLLRPISATTHPLISLSCTGAGDSANHKSHLLFRLHHSCRRLPVPRLSLTPAPTGSNNSPPSPPPASPEPPPPPFSRWSPPRAIWRGLLALLLAGQVFHRVLTGRVHRRNLLAQLRRVGPGSAGVSLLTAAFVGMAFTIQFVREFTRLGLHRSVGGVLALALSRELSPVVTAVVAAGRVGSAFAAELGTMQVSEQTDTLRVLGAQPVDYLVVPRVVACVLALPVLTLMSFALGLASSAFLADSIFGVSTSIILESARRALRPWDLISSLLKSQVFGAIIAVVSCAWGVTTHGGAKGVGESTTSAVVVSLVGIFVADFALSCLFFQGAGDSLKYAMG

SEQ ID NO: 39795 - protein, 38 aa, Oryza sativa
MLLVPHAPLDIKMMRPHPPLDMERIFCIKLIFSQVTSP

SEQ ID NO: 39796 - protein, 256 aa, Oryza sativa
MGLSTIVIKANPTTQHQIMSRVFSSLSAFAGYLLLKKDVLLFFEIIGEQLTECLSLSGTLYREMQHGETINQIEKLWLKIIMCLKMSKLINDCSFLQKQQMLLQAAVSHPHRPISVATTPAWRASRYDISTLQHSSFSLSKLDKLPMERRKDLTDPCTPHNAIALEEIDILRKFKHPISELEKNDESIKISVGLGRKRLKIMKYSMKPREPGKSTVPPGNFSSKKDTDADAFSSHYMESKACRKPELILEMLKRKR

SEQ ID NO: 39797 - protein, 422 aa, Oryza sativa
MDDAGEICSFSRSSSSAREDDEEDQRWAALEKLPTYDRARTALLAMPPDGELREVNVQRLAAVERRALLQRVAGVADDHARFLAKFKERVDRVGIKLPTVEVRYENLNIEAESYVGRRGLPTILNTYTIIMEGLTNALCITKKITHKIPILHNVSGIIKPHRMTLLLGPPGSGKTSLLLALAGTSTLKVSGTITYNGHSMEEFVPQRSAAYVSQHDVHMAELTVRETVNFAAKCQGVGHHYDLLMELLRREKEQNIKPDPEIDIYLKAATTGEQKAEVVTNHILKILGLDICADTIVGNNMLRGISGGQKKRLTTAEMIVTPGRALFMDEISTGLDSSTTFQIVNTIRQTIRILGGTAVIALLQPAPETYELFDDIILLSDGQVVYNGPRDHVLEFFKSVGFKCPERKCVADFLQEVSFTMV

SEQ ID NO: 39798 - protein, 187 aa, Oryza sativa
MSCPRTPPGAATPAPPRRGPQAVSSSPRPPRPARARPRGTSACSSPAPRRSPSAAPPAPSSRSRSRGRPRSAAAARPATLGTPASPLRLRALRRPMGRRRIISARARQGGGSRLVLPSRRGAPATRTCSPVRSSLWPAARRKRWLPCTGPCRGRAGALPASRTPESDGLPGCAARSAPSARRTRRIA

SEQ ID NO: 39799 - protein, 205 aa, Oryza sativa
MPRLTSTSTSLPAVRSASQYSRLVSRMRSCSATATSSGGSGTDSSGGAFGPIGHVYGWSLVAPSGSAMARNLSSMSRVKNTESGLGSSSDLLRVACTNPGWSGMPPVTRRGAQLSAPSSPTRAPTWWTRLPPELSPMRNTREKSAAVRRSSAAGSPRAAASDSAMERSRRSPSTPVSMCAGRRRSGAKGSSTATTTAGSAHARRA

SEQ ID NO: 39800 - protein, 327 aa, Oryza sativa
MGECGFRWREEFLETLGEAQRKASRFGVADLFPSSRLLRAVGSTAVRDVRALNAKLFELVDRAIEQHREAAATTAAGGDHDDGGDDDARDDNECLLNTLMRIQKEGGGTLSMSTVKAVILDMFAGGSETTSTILEWAMSELVKNPQVMQKAQAQIRLALQGRSRITEDDLINLSYPKNIIKETLRLHPVAPLLMPKECQESCKILGYNIPKGSIMLVNVWAIGRDHRYWDDAEVFLPKRFEEITVDFGGTNYEFIPFGGGRRICPGITFAHATLELALTALLYHFDWHLPPSVTPDGLDMEEEFGMNVRRKRDLHLHPVIHVGVKKV

SEQ ID NO: 39801 - protein, 214 aa, Oryza sativa
MFSAQPGYNDWFISFYNVAFTSLPVIALGVFDKDVSSRVCLEVPSLHQDGVNNLFFSWSRILSWMLNGVCCSIIIYFGALHAVLIQAVRQDGHVAGFDILGVTMYTCVVWTVNCQLALYISYFTWIQHFVIWGSILIWYTFLVIYGSFPPTISTSAYHVFWEACASSPLYWLSTLVIVVTALIPYFLYKITQSLFCPQHCDQVQRPNSKELVAQ

SEQ ID NO: 39802 - protein, 396 aa, Oryza sativa
MAATERRTSGAPVRSFKRARVSRPPSHWEQTSTGNRADLPLLKHWQKAATETASFAKYNVEPEVPTFDDAQYEEHLKDPNWTLEETRYLVDTYKECNGKWTVVIDRYDKPERTMEDLKARYYSISAVMLQLETPIQSMTAPQYKMYETLKDFNPKQEMSRKRLAEGHLHRKKDEVDEEAVLLAELQRIMANQESLDNLREDLRKRLDYPKAGTNSYQYSTSQALHTLWQQLVNADRQRKTQRLRTGTGQTATSIETPGAGQTPAGPGRPRESNAGTTHEPSPSTSNTKLTAKDKLRFGVTEVGPGEKLPSGVSFASDKLSKPRIAKSTLQTEKIAAILAHVGVPELIPLPTAPVIEAFDSLMGKLHTLLDMRKIAEKEEQELKVREAEAAALVKSE

SEQ ID NO: 39803 - protein, 354 aa, Oryza sativa
MAATDMSPKAGKPLVENDAGSYLAWSGKDQPAVAGEKLGCGLLVLKPLGFALPHYADSGKFGYVLGGSAVVGVLPAGVDARERVVRLEAGDVIAMRAGEVTWWYNDTDGEDVTIVFMGDTAGAVSPGDISYFVLAGPMGVLGGLDAGLLAKASGLTSPEQAATAFRSQPAALLTRLNGKLHGVRPREHDRHGLVVNAARVPADSNTGGAAAGTKTVTAAHLPVLAQLGFSVGLTRLDAGAAVRGPWVLRDAAAQAVYVARGSGRVQVAGAGGASTLLDAEVAAGSLLVVPRYGVSLAAADDAGGMELVSLIKSPRPATEHFTGKGSVIGGLTAEIVQAALNVSPEFVEQLRTKY

SEQ ID NO: 39804 - protein, 41 aa, Oryza sativa
MNAILASIAQVDSGDILEKKKSIVVMRKAQEEDKRTSEAAS

SEQ ID NO: 39805 - protein, 301 aa, Oryza sativa
MTTTTRVAAAAAGVLLVAAALAGVARGEDPYVFFEWKVTYGTKTLLDAPQKVILINGEFPGPRINCSSNNNIVVNVFNQLDEPLLFTWNGMQHRKNSWQDGLAGTQCPIAPGTNYTYKWQPKDQIGSFFYFPSLGMHRAAGGYGGISVVSRLLIPVPFDPPADDHMVLIGDWYTKDHAAMAKMLDAGKSFGRPHGVVINGKSGGLSRLSRRRGKDGGGLGRLSRRRREGRRQETAVVGTGAGSGSAEKKRCGRRGKIADRTGGRENRGESGGAHDWPGLFGWLYLASARGTLASRMAWPAG

SEQ ID NO: 39806 - protein, 367 aa, Oryza sativa
MSPSAAAKMRLGGGGGGGGFMLGCGCRDAKAVAVAVSATSPCSAATETSTATTATWRRARTHPSASASASTGTLTVPSASSSFLWDDADAEADGEEVDFKRESSATTPSFSGLLRQLNELEQSVMTWGWKSPRRGNHFSPPPPPPPPPPLPLRPVVLHRAVDAGGKRSNKEDDAKFSSPPPSSHCPTTQLHRKVKSVDQRNREDDEAHFAPPAPPPLPLPPQQLRNVKGVDKGGSKEDSKHCPPPPQAPKHRKTKSCDNNDGFTAGKLDGSLAVVKQSEDPRGDFRRSMLNMIVENRIVTGDELRELLHRFLELNAPHHHDAILRAFAEIWDEVFAGPDEPRHGPPRPPPRQRTPPRRRHPLPAWRL

SEQ ID NO: 39807 - protein, 300 aa, Oryza sativa
MLPYATAAEAEAAVGRGLTWAEAAWFRYSAAIPDYCLYCHNVPILLLVYTLAPLPLALLELRRHLPLPHKLQPGVRHPPAAFLRCYAATARVLLLAVGPVQLASFPAVRAVGIRTGLPLPSAGETAAQVAVYLLVEDYLGYWIHRLLHTPWAYHHIHRVHHEFTAPMGYAAPYAHWAEILILGFPAFAGPAIVPCHMTTFWLWFVLRHLEAIHIHSGFKLPFDPTKYIPLYGGVEYHDYHHFVGGHSQSNFSSVFTFCDYIYGTDRGYRYHKASLSKLKEMAGNHVEKGDENGFGNGKQD

SEQ ID NO: 39808 - protein, 179 aa, Oryza sativa
MAMAGCYCVREHQLEDDDAVGHRLLPPEILVEIGIIAAADHTAAVHARRDAVVEELAARLVGILGLTSPPSAGAGRLGEKRAAAATTTTSSGGATPPYGRSHVRRREQHLAAGGGGGGVIDGGMARYHAPGFGTTQWLAPPAWCGGGGGGTGVFLPRGEVYPTRTLNPPRKQVRNRRVC

SEQ ID NO: 39809 - protein, 49 aa, Oryza sativa
MGHSFLMLVGWLFSSRRQQITQSNQYLGLLEVCLRRFNKSKLGISKILI

SEQ ID NO: 39810 - protein, 170 aa, Oryza sativa
MPPKLRSSKGVAPSPSTGEGGESHTSKKNPAPATAPTAGSVTRSRARDTTERARASGGGTALDPKKRKRTEESAASSAAAAGPVPRKMTTAGSTTLASRPLPLRYPPYPTLPPGTRPTSRQYLDPVLDRKYLDSVLEWAKERRRIAKLSKKGSIQYFFPSFYNLLPIPPA

SEQ ID NO: 39811 - protein, 91 aa, Oryza sativa
MPRRSSSSIHLPRNLFHRITDQAATNSKRDRLRPPLPPPKSRTTLRLLHRRRHPQTRRNPNLTASANSRELAAPETRPSSEIEVTSIFYTR

SEQ ID NO: 39812 - protein, 255 aa, Oryza sativa
MGRQPCCEKVGLKKGPWTADEDQKLVTFLLSNGHCCWRLVPKLAGLLRCGKSCRLRWTNYLRPDLKRGLLSEEEEKLVIDLHEQLGNRWSKIAARLPGRTDNEIKNHWNTHIKKKLKKMGLDPVTHRPVMSLAQPDPLKQQQQQHEPSVSGGTGADDKEEEEEETPTSAQPQGVACAASSASAVSSSCSSSAPASAATPGADVDWPGLFEVDAILDIDWAGLLSACGDDGGCSAIGVDMLFDQCSDVGFDQDVWM

SEQ ID NO: 39813 - protein, 261 aa, Oryza sativa
MEEMLNLVALFDKWDDHGEIGFCSSNVEIMFNAVYNTTKRIGAKAALVQKRCVIDHIAEQWQVMVRAMLTEAEWAAGKHIPATMGEYMSVAEPSFALGPIVPVSAYLLGEELPEEAVRSPEYGRLLGLASAVGRLLNDVMTYEKEMGTGKLNSVVLLQPLAAGGAASRGGGGAPAPAPASVEAARAEVRRAIQASWRDLHGLVFGSGGGSSSSIIPRPCREVFWHTGKVASVFYQEGDGYARKAMRSMANAVILEPLHLQE

SEQ ID NO: 39814 - protein, 419 aa, Oryza sativa
MALYAFAAVWICWVVWAYNMSFGDRLLPFWGKARPALGQSFLVAQSELTATAIRYHNGSAEAPMLKPLYPVATMVYFQCMFASITIIILAGSLLGRMNIKAWMAFVPLWITFSYTVCAFSLWGGGFLFQWGVIDYSGGYVIHLSSGIAGLTAAYWVGPRSASDRERFPPNNILLVLAGAGLLWLGWTGFNGGDPYSANIDSSMAVLNTHICASTSLLVWTILDVFFFGKPSVIGAVQGMITGLVCITPGAGLVQGWAAIVMGILSGSIPWYTMMVLHKKWSFMQRIDDTLGVFHTHAVAGFLGGATTGLFAEPILCSLFLSIPDSKGAFYGGPGGSQFGKQIAGALFVTAWNIVITSITCVIISLILPLRIADQELLIGDDAVHGEEAYAIWAEGELNDMTHHNESTHSGVSVGVTQNV

SEQ ID NO: 39815 - protein, 424 aa, Oryza sativa
MAPASKDGLDIIILGGGIAGLTTALALTKYAPKGQVPRIRIYEIRPVPATIGGAVNLTPNALRLLDDLGALPIIRERDYGRTIDYLEVFDVYSTRLATSDFSGPDGKGIGNPPYKALRITRGDALKGVLAAVEQQENISLTCGKRTVDIKETTESVTLTFEDGESVSADLLMGCDGIHSVTRLKHVDPERKASYSGLCNAFGFAPVEPDFPVHFECTAINFARRGMLLTSYHNSRKNSVYVGALMQLPELESRDGWKAAGADAKKIRADIMDRFGDAKIPSIKPLIEKTEDFYLWPVFTLSKHGKWSTERVMLLGDAAHAMPPQGEPTGIVFEDTVLFSRCLTRWIEKGKPNTMKEAFDAYEKLRRSRIEAAFEESKSVVSTVSDAGYIGHTIKTYIIPWYLWFSRASREKHFVEDVTSVDIGY

SEQ ID NO: 39816 - protein, 335 aa, Oryza sativa
MASSPTMLVVMCSSLAMAVILSSSSPAMAQLDVGFYSKTCPKVEEIVREEMIRILAVAPTLAGPLLRLHFHDCFVRGCDGSVLIDSTASNTAEKDAPPNQTLRGFGSVQRIKARLDAACPGTVSCADVLALMARDAVALSGGPRWAVPLGRRDGRVSAANDTTTQLPPPTANITQLARMFAAKGLDMKDLVVLSGGHTLGTAHCSAFTDRLYNFTGANNAGDVDPALDRSYLARLRSRCASLAGDNTTLAEMDPGSFLTFDAGYYRLVARRRGLFHSDSSLLDDAFTAGYVRRQATGMYAAEFFRDFAESMVKMGGVGVLTGGEGEIRKKCYVIN

SEQ ID NO: 39817 - protein, 493 aa, Oryza sativa
MAVPASVVVASCLCVGASACVSSGLAFCATFAVSLPFVARELSPEHIDGVFAAVDACLQKGACYARAAVEAETRRLRDPARCHPALAFLYARAEGGARRARALVTDAVDRLETRAAESKWRDMTDASAAALRWLRLIAGAINLAVAVLITMSERRAASGLRRSGAHGIRTTPNSEAMTTSSSKLDATLFVVWITATFTYSTPVFFQCAVTSGMASLAACFACFATMCCFALMQANKVHLWSSRDAAGRNAVMAEVPHAWGLLWSEITLVTYLVDACLLCITLDSRASRPVALAFLAACNLATLKVASQVEAIGSAGVIRRRGHAVAVCAMGIAKVFVVCFVLDFRLGALRFAFLCSVIAFLLNKAAGSLPDVSTPVDASAGDADVAGDVELLPEYVSNSEELSNHATFNHKVEEDSSSPAAGDRENEHDSSNSATIDGGEDDTTTKEYFDGSDSEEQRQEEEEEDYGGGMDEWNLVEIDPVMPINVNGGAKRW

SEQ ID NO: 39818 - protein, 344 aa, Oryza sativa
MAPLPSPPLLAESLATLRTASPSPPIPCSPRRTRPLVSARFARTAGRRSRSTGGRRDLRSCAYAAEAEYGSAEDEVADDFYSVLGVMPDATPEEIKKAYYSCMKACHPDLSGDNPEVTNFCMFINEVYTVLSDPVQRAVYDEIHGYTATATNPFFDDSAPKDQVFVDEFTCIGCKYCANVCPNVFRIEEDYGRSRVYSQSGSTELIQEAIDSCPVNCIHWTSAAQLSLLENEMRRIERVNVGLMSAGMGVSVDVFRLASVRWEKRQSKVLEKIRTRMTNKKYSDISSSWTDIWGSPTRYQGNEEEGTERAKRAAAAARRWREYSRKGADRPPEYKLPEAAGNKE

SEQ ID NO: 39819 - protein, 385 aa, Oryza sativa
MYATKPLSAFAGHPDATSRPLPPAAAEGGCSGYLAVKSDEEGTDETRCWGLRSQPRVRGLPFPQNRVVTVSDPALGKYADAYADAVVFVPVPGAPPSSNRYYAVLAAGKHRGLVRACSREDDAATHCFCRCVRDAKPRPFDPADVYQQMEIVPNRGGFTARSVAADGLPYFLYRSKRWLAYASRPKHFDLAEALGLNDPLRSRSLTTPPPATATATAATAVAVGRWYTPFFYIKEDGVPLKAQMDRSTFYEIVLEQRWDEAMGGEASKRVLVGGSVEGKQEAVGAAASARTGGGSGDGYVWFSAATTTWPAGQRVGVHASLWEKMVWEEQRGGWVADEEVGGGGVRKTMSGGAGGRSVLVERFAVRRLDGSVVVAFDFSHVNKIN

SEQ ID NO: 39820 - protein, 63 aa, Oryza sativa
MSLVFFHLVCLSCMQLLGIVLKDDFLVVHVSLCKKEAKASECDNPVIQLHETVTRVFCMMQEH

SEQ ID NO: 39821 - protein, 111 aa, Oryza sativa
MALRKYGGVPHWGKNRNAAFDGAIAKYPKSGEFLKVKGSYDPEGLFSSEWSDKVLGVAGAGGVSVVRDGCALEGLCVCSEDAHCSPEKGYLCRPGRVYKEARACRRVAGDH

SEQ ID NO: 39822 - protein, 305 aa, Oryza sativa
MVCTVSFVRIPLFEQAIDDGAVRHHIRRAVSSIIRHHVQQLESFLASALMTESLEKNVVGEDMRRAAKLCHSAEHYVHCVARPLLGTEALEQRSKDDGFHSISLLNNIAQSRETEVQTARAAAAADEDAIGVQGGSHRAVAGSCHAVEAGHGGRGAVARDGGEGAVQAADDRGAPAPAPALPEQFVEHVECVLGATPAGACCSGLWSGSRTLGARAAADGSCSGGDAACHACADGARSNLRVAPRRAAPEQLTDPREGNRRQGKGGAKQHAKNGVRILCWRWRRRAGDGDGVRGRRAHRDNWLRD

SEQ ID NO: 39823 - protein, 102 aa, Oryza sativa
MDMAMAWTPAAPTPRSEAALAGELRGRRTTRHHAGRQALGQCSGLRLGGAFFRWYIELEVIVPAWRSGEGNIQSVVFAGFFSLFFFLLFFSRSFSSAPDCSR

SEQ ID NO: 39824 - protein, 57 aa, Oryza sativa
MQPKSGGKLRPRLNTGERPIANKYREGKMKRTLKRESKSCVIPLLFVFLGDSSCVLV

SEQ ID NO: 39825 - protein, 108 aa, Oryza sativa
MGGGAAASRVSSAMAVAVAAAAALVVMWAGTATAAAAVYEVGDKTGWTIMGSPNYTAWAASKKFHLGDTVGTYVSWRVYPSRSRVLRSSCCIPAFYLLRNIGANDTRL

SEQ ID NO: 39826 - protein, 447 aa, Oryza sativa
MAPDLNMLAQPARDEHSQPTRRTSLSARSGASSRRTSQLMGPPTVPASAAGPNHTNSDRVHMPHRVSSSHEHDGPLRHPRPLTAAELYAECEKEQEAVVNRLTRELTALRAQSASVASNHSQSSTSTSASLLPVDISDPNPTHQILGATHPTPSRRDRSSSSVSSRSIPTPSTSMSATGSSMGIQAQGGSAQHSHPGTHGGVSQASFDRAAAATGGTGSATISRQPSISAQSGTSTPARQSFDNFRNPSIGGGIASGGTIYTLPHRPSISRDHSYAGSTTALAGTPHQVPQPLPSPAQSPSQSIHASTQNYTDAAAYKSEMELVKAENENLRQRVRALERALRARRRDSSTSQADGRAPDSTLRATRERDHGAVSPNATSPNTAAAAGIAAWAAGDGGVRGVAGPRERSESQSTTASSRRGLGGGGVAVGDDEVRFGESAGNVGYGR

SEQ ID NO: 39827 - protein, 249 aa, Oryza sativa
MTGGGSGGAGACAVCKHQRRKCEPNCELAAYFPANRMNDFRALHLVFGVANLTKLIKANATEAARRRAAETLTWEARWRERDPSEGCYREVSCLRRDNAALRAENAALRRQADQCACCAGAAGVRHASSPTTLQHQLLLVSAYNGATAARPGNVVPHNATVVPGGFVAAAAGVRGANGNGAMSSVRPPPHHVQAPATQTVTGFVAHAQDDRYRAVSVCPPAANAAAVPRSGAAVRGQGDYRDKISDAAR

SEQ ID NO: 39828 - protein, 57 aa, Oryza sativa
MKQESLVIAGQPYGGESVPGPCTHRPSHYRSWPCLKSLPLTVRRGMPKARLATGVKS

SEQ ID NO: 39829 - protein, 370 aa, Oryza sativa
MSDVKGGHMLSHPHNIQSAPGQATQHPQTSLPVLGSNNIHARPLPRPVGGPIVPLRPQMADSSQRGQLVQGAVTSVTGSMAARPTLQTNISPWQQVNKEQKTKSFPPTEHTNKGVGVPENQPSTSGTSKSFNTTNSSQPHRSHGTQAEPNMQIQPATQTPPPAAASKTPQKKASAGQKKPLDALGSSPPPSSKKQKTSGGYHDQSIDQLNDVTAVSGVNLREEEEQLFSAPKEESRVSEAARMVVQLEEEKLILQKGPLKKKLAEIMRKCNLKSIGSDVERCLSMCVEERLRGFISNTIRLSKQRVDLEKSRHRIYPLSSDVRSHILRVNREAREQWDKKLAEDAERIRKQSDVSSACCFSWNFSISFHT

SEQ ID NO: 39830 - protein, 69 aa, Oryza sativa
MALISRASVLVMAIVAMLATLVNAQAPAPAPTSDGTSVDQGIAYVLMFVALALTYLIHPLDASSAYKLF

SEQ ID NO: 39831 - protein, 333 aa, Oryza sativa
MSQEGADLSQDVDESPYHTAVVTTNNLVRSIKAEKSNSSSSSGKPVETDIGLKVASPTMFGFNTKIEGTGKNMAVKREEGEGGGRPGVSSGVSTRDTNGKGKNAMDMEHALHIWTERERRKKMKNMFSTLHGLLPKIPGKTDKASIVGEAIGYIKTLEDVVQKLETIKTERVRAHQWAAAAAAAVAANGGGEGSSHSHSQPPRHATAVTVAVAEPAPVAAAVNAQAPQKKAAAAAAPTLQTWSAPNITLTMAGVDAFINMCLPRQRASFTTVAFVLEKHQIDVVTSTISADHDKSLFSVHVRLNEASLQSTEGLTPEAKYKLAVSELMVRLAE

SEQ ID NO: 39832 - protein, 229 aa, Oryza sativa
MGLVLLVQELLEMMAAAAPWPAWVWRWRACGGAAAVAAAGSTGSRRRRRSSPAPPSSPAPSAARPSTDTTTSRCTCGGTGRSTGEAGRRRCAGRSRRRCSGCRATAARRGAATTSTTRGRGRSRTSAPCRRTTAAATAPATSPAAAAPSASPSAATGAPTRRTAAASGAAPAAPTSDTSAPSTTTHGPSAPPTPTPAPAPAPKTTAAPPPPPPVCCDDLNLYICECEIN

SEQ ID NO: 39833 - protein, 523 aa, Oryza sativa
MLLGAMSGGGVVVAVAVAYAALAVVALRMALSYKSALYAVRRLWRWADEWAQAYQYHEVPRFACDGGGAENPLFRKAAQYVAVLPSLEDADAASVLSSASRTNGGFSLQLGPGHTARDAFLGARLAWTNRGDVLVLRVRRHDRTRVLRPYLQHVESVADEMELRRRELRLFANTGVDGSTGTPRWASAPFTHPATLDTVAMDPDLKARVRADLENFLKGRAYYHRLGRVWRRSYLLYGPLGTGKSTFAAAMARFLGYDIYDVDLSRAGSDDLRALLLHTTPRSLILVEDLDRFLQGGGAGDAEARAARVLSFMDGVASCCGEERVMVFTMRGGKEGVDAAVVRPGRLDVHIHFTLCDFEAFKALASNYLGLKDHKLYPQVEESFHGGARLSPAELGEIMLANRSSPSRALRNVITKLQHVSGAAAAPRPPHRRNTSWSGAGGPWEEQAARASADAADGGEEAITATAACGVFAKDAPMREFKKLYGLIKIRSRKEGSSGFMPLHGGEAPSPANGRGSEHDKER

SEQ ID NO: 39834 - protein, 396 aa, Oryza sativa
MVDVDSRMAGLAHPAAHAAGLRRLSTRAAAGPPSASASPRHGLHSFDGVAAAVLSHLRKTGVVVLPGLSDAEFARVEAEMGFTFPPDLRAVLAMGLPSGAGFPDWRGRAWLRAAFDLPIAAASLQIAKGALWPRCWGRRPSDPDRARRLARSAIRRAPLLVPLFDRCYLPCRPCLAGNPMFFITDDRVLCCGLDILHFFTRESSFQPLDVSSPSATPSSGICTPHTRRSLDAVCGGQALRWIEFWSDAASDRRRRVSSSSEASTASSSSSSSGCPSPPPRSTPLWVDNYLDKLGSVLKKGGWRDREVDEMVEVTASGLFDGEEAPPADADAVLDALFLKTDRCSDSLRRAGWTSEDVSDAFGLDLRRRKEQPRPAVQIPPEIAAKVQRLAQAVARP

SEQ ID NO: 39835 - protein, 332 aa, Oryza sativa
MAASNIGMMDGAYFVGRNEILAWINTTLQLGLSKVEEAASGAVACQLMDAAHPGAVPMHKVNFDAKTEYEMIQNYKVLQDVFNKLKITKHIEVNKLTKGRPLDNLEFMQWMKRYCDSVNGGFMNSYNASERRESSKGGKETNRRTSVPSQAPAKSSSATHKAQASSHGAKKANGHAPNAPPSRSAKPSPANSAGPAYDEQITELKLLVDSLEKERDFYFSKLRDVEILCQSPEVEHLPIVNAIHKVLYAAEDDPSMVAEAQAMISQQQQSEQPMLSPILEASEERPAKQEVHKRKSISDLELEEFGMASSSRQRLSDISDVQLCGSPLTSFT

SEQ ID NO: 39836 - protein, 212 aa, Oryza sativa
MWIVLGVLDGGGGGGDTEDQEGEAGVTVGAGAGRLRHARQRLRRRRQLPGAGVDHRQRRHHHPRRLPLHGRRLRRLRPRQAGPPRRHHRRAPPRGHPERGVAGERRGGAARGRVHRGRRRQLPALQEGRVRRAVRDAAQPRRHRRRLRPGGGGGGRRRRRRRQVLDHQELVGEELGRPGIHQDEEGRRRQAGGALRHRHPAVIPAHVISTFF

SEQ ID NO: 39837 - protein, 328 aa, Oryza sativa
MVSASSLLLPSSVRDFASCIGDGAACTAPSSTRTRRGSAAVQAQPSTLSVTASYRVALASSSSPPLQLRLTWAHSPLGPTLSFSPSASGRKVLVRRRRGSCSVLSSGEDEAVESESELSASSPRLALFWDLTAARFDPAASPEPVSGYYVVVAVESAEVVLALGDLAAEFVKAKFEGTTQIPMAAPFARGERVVVAVSSDAAAAVTHTARARFAEGGAEHEVSVGCAPGGGGGGGGDELWVSIDGKRAVQARRLRWNFRGNQTVFVDGQPVDVMWDLHGWWFRREPPAPGWAVVMLRARSALESRLWLEEEAAAPAFSLLVEAFKSPP

SEQ ID NO: 39838 - protein, 422 aa, Oryza sativa
MAMMAAAVTVPLGVLLRREVTSERMERPDVLCGEAARSRKGEDFTLLLAEAGERVAGDPSTSFSVFALFDGHNGSGAAMYAKKNLLNNLLRAIPSGLSRDEWLAVLPRALVAAFVKTDKDFQAVAETSGTTVTFVVIDEWVVTVASVGDSRCILESADGSLYHLSADHRFDSNQDEAQRVTACGSKVGKLNLVGGPEVGPLRCWPGGLCLSRSIGDMDVGECIIPVPHVKQVKLSNAGGRIIIASDGVWDDLTFEMALECSRGFPSDIAANRIVNEAIHPRGLRDDTTCIVVDILPPEKLAPSPPTKRQGKIVFNNMFRRKHTDVSFILDREYAEPDEVEEIFDDGSAMLSKRLAAGYALQSMFEPFSCAVCQVQLKAGQGISVHSNPLQHEKLQGWQGPFLCQSCNEKKDAIEGKRPPRDS

SEQ ID NO: 39839 - protein, 147 aa, Oryza sativa
MDMNAGFGGFAAAMSEYPVWVMNVVPANLTDNTLGIIYERGLIGTYMDWCESFSTYPRTYDVLHANGVFSLYMDTCGIPYIMLEMDRILRPGGAAIIRDAPDVVHKVKDAADRLHWHSEIVDTENGGLDPEKLLIVDNSLPFPDHPA

SEQ ID NO: 39840 - protein, 97 aa, Oryza sativa
MFAWLLRGCRDECSASDQLKQARDVFVAKEAVLQKKISQEMERAKEFTKSGNKQAAMQCLKRKKYYESQMNQVGSVQLRINTKEKMIADHSGNKEDK

SEQ ID NO: 39841 - protein, 232 aa, Oryza sativa
MAGRATATATAAGKDRSSFAVTCSLLSQFLKEKKGGGGGLQGLGLGLRPAPAAPPAAGAGGAFRPPPTTMNLLSGLDAPAVEVEPNTAETAADELPLIKAPADQQSDESASEAAGEKAQQLTIFYGGKVVVFENFPSTKVKDLLQIVSTGDGVDKNTGTAATQSLPRPAHNSLPDLPIARRNSLHRFLEKRKGRMNANAPYQANCTAAPSKQANGDKSWLGFGQEMTIKQEI

SEQ ID NO: 39842 - protein, 348 aa, Oryza sativa
MSSPPSDPSSGGGDGGSAVPGTASSNFTLLYIIIAVLVGVILYMAIRYGRSVMSEWRQLQAGGGGGEPRAALLGLSSDDIDALPTFTYRARGAAASPLVGGGGRRGGGSGKGKGATTVVVECVVCLQELADGDVVRVLPACRHFFHGGCIDLWLRAHSTCPVCRAHPEPDGVRLSDVVAVSPPLPQLRRCGLSPERPTAASRALADILARSPLRGNTTSTTTITTTGGPITSTSSKSPSSPVQAAIINYVQASRSPSPTAYHSLNERWPSSPTPVVVVRSKSPSPSSPPIGGLSLQTTTAAAARGVGVVEGVDAGATTSASASAPTQVVALSREGGGSRSKSPSPVPH

SEQ ID NO: 39843 - protein, 151 aa, Oryza sativa
MIDLYARAGLLEKAEEMLDHTPFPPTSTMWAALVGACHDRGNIEIGERAARKLLEMRTENAGHYVLIANMYAAAGCWDELATVRKLMRDLGVTKAPGLAWTDLGNGFTPFLVGDRSNPLAPEIYVVLDELSEQMRNINNCSDLDILAENIE

SEQ ID NO: 39844 - protein, 185 aa, Oryza sativa
MEGWDKGTKSVVGEIPLLSTRAGPRDGEAWRQRLKEEYRALIAYTSVNKSKDNDWFRISAANPEGTRWEGTCWYVHNLRRYEFPLQSDIPVAYPQVAPEIELPTLDGKTHKMYRGGKICLTVHFKPLWAKNCPRFGIAHALCLGLAPWLAAEVPILVDSGMVKHKDDEAAPADAAAAASGSAAAS

SEQ ID NO: 39845 - protein, 175 aa, Oryza sativa
MEGEEEENVGPFRRTSARTRRMATRMASALASSDNRAQAALARLEALESDNAGPEVVDLNDDDEYGSADEEDHVLMQRKQSKNMKRKTRQGKALEKKAARSFMDVLQEANLESLPPHVPTYSRAAVGPPSTSSRRHYCSVCGSTANYTCVRCGTRFCSCRCQVIHNDTRCLKFVA

SEQ ID NO: 39846 - protein, 531 aa, Oryza sativa
MMFDLLPDLGHHHQVAHTNSGTVSDIPSGREKYQFNRGRHYYSAFKKSLRPSGSLKKRTSSGVEKHFKAQSLDLSMDTSHIVESETTTLGRLLDFQCSDVALTLFSKIQKTRPHPSNLDILSIARSVCCKTSLRAALKAKYGILPDNIFVKAAKLCSDVGIQIDWHQEEFFCPKGCKSRSSSNSLLPLQPTQVDFVMSPPIGDEIWGRDEYHYVLDSEHFGWNLKNEMVIVCEDVSFGREKVPVVCAIDVDAKEFPYMKPGEILQSENSLPWQGFHYVTKRLMDSSLVDSENTMVGCACSHAHCSPEECDHVSLFDSIYENLVDLHGVPMRGRFAYDENSKVILQEGYPIYECNSSCTCDASCQNKVLQRGLLVKLEVFRTENKGWAVRAAEPIPQGTFVCEYIGEVLKMKDDGAIRHVEREAKSGSSYLFEITSQIDRERVQTTGTTAYVIDATRYGNVSRFINHSCSPNLSTRLVSVESKDCQLAHIGLFANQDILMGEELAYDYGQKLLPGDGCPCHCGAKNCRGRVY

SEQ ID NO: 39847 - protein, 205 aa, Oryza sativa
MTTARRRRGRGGIEGDLAAPPRRRPPPAAAPPPRAVALLLPLALSSLPAPGPLPSSLALLAKVAVVLARCSRRLLAGERRWLLLRRYRSRRIWRSRCLGHCNAGGNMLWNLYLLSILIPGTLVSVGTRYLWYRLIPLVPGTRLVPSIWYRVPVISSTWWPGGGERGGGSRVVEQEKEVARESGGRRGEAWRRQRRIRWSARRGSR

SEQ ID NO: 39848 - protein, 379 aa, Oryza sativa
MSSGGGGGGGGDRHGPYHQHGHLGRGEGADYVYSSSDMESFFFSQPGGVGIGGGGGGVVGAGGADEIMPYSSITDYLQGLLDPSGLARHLDVACPSSQDTVVKQELSVDVTSHDSQGTGGVAGEGVAQATPNSSASFSSSDGEAEGGKSSRRCKKGQAKAEEEDDKDEEDGENSKKPNKPKKKAEKRQRQPRVAFLTKSEVDHLEDGYRWRKYGQKAVKNSPYPRSYYRCTTPKCGVKKRVERSYQDPSTVITTYEGQHTHHSPASLRGGGGGVGIVGGHHHHHLFMPGVHGLPPSHLMPAGFHPELMGLMHHHPAMAAAAANPSMYFPGVAASAPPPPAVAGGGAMPPNDHPPLQQHHFTDYALLQDLFPSTMPSSNP

SEQ ID NO: 39849 - protein, 248 aa, Oryza sativa
MQNLLWQLLMGLKACHDRNITHRDIKPENMIICFEDLETGKCLREIPSEAKHNKLNMRLIDFGSAFDDFTLKHLYDSGPTRSEQTFEYTPPEALLNSSWFQGSKSARLKYDMWSVGVVMLELIVGSPHVFQISDRTRALMDHRLEGWSEQTKELAYKLRSYMELCILVPGISSQHQGSGDSEHGQFRPASWKCSEESFAHQVKIRDPLKMGFPNIWALRLARQLLIWHPEDRLSVDEVLAHPYFQEPP

SEQ ID NO: 39850 - protein, 44 aa, Oryza sativa
MAGVVVAPSPALPLPWLPCTPLSLSLSLCVLVYCFYVLVIIFLP

SEQ ID NO: 39851 - protein, 50 aa, Oryza sativa
MRRHCQKWCKRLHHWKMKLPYLILLERLILQNIINWGLIYRNLKRKSCRR

SEQ ID NO: 39852 - protein, 178 aa, Oryza sativa
MPIPSPHHAMAASPALAPTRTVPVLPPRGPSRHRNAAAPPCRPATARIGASPGDGAAAAAAAAVEQGSRSEEKDRKRCLRCGSLYLDEDNSPTDCAFHGHVTGEKGLFSLSPPHQGIDGEWSDKSGVIVYRWNDRGSRPNTGRDNWKGRWSCCQERDEGAPPCRRGRHVSYDDGFTLY

SEQ ID NO: 39853 - protein, 240 aa, Oryza sativa
MGLTNLNLAPTYGKIALFVFASLVGSDGGVIAGLAACGVIMSIVCSTADLMQDFKSGYLTLSSPRSMFISQMIGVALGCIIAPLTLWLFWTAFDIGDPDGEYKAPFAIIFREMAIIGIEGFAALPRHCLEICCGFFLAALIINLMKDVVPNHVSRFIPIPMAMAVPFYIGAYFGVDMFIGTLILFAWQKIDRREADDYAVVVASGLICGDGAWSIPSAVLSILGVDPPICMSFRPSSASV

SEQ ID NO: 39854 - protein, 543 aa, Oryza sativa
MLARSAGIATANLARSAAVPVARRSVANAVRTYATAKPAASEVSSILEQRISGASAGGDVQETGRVLTIGDGIARVYGLRNVMAEEMVEFSSGVRGMALNLEADNVGVSIFGSDRLIREGDTVKRTGQIVDVPVGPNMLGRVVDALGNPIDGKGPIEAAERRRASLKAPGILPRQSVKEPMQTGIKPIDAMVPIGRGQRELIIGDRQTGKTAVAIDTILNQKRWNDGQDESKKLYCVYVAVGQKRSTVAQLVKVLEENDAMKYTIIVAATASEAAPLQYLAPFSGCAIGEWFRDNGKHALIIYDDLSKQAVAYRQMSLLLRRPPGREAYPGDVFYLHSRLLERAAKMNDTHGGGSLTALPVIETQGGDVSAFIPTNVISITDGQVYLESELFFKGIRPAINVGLSVSRVGSAAQSKLYKAVSGSLKLSLAQYRELAAFAQFGSDLDAATRATLNRGVRLVELLKQPQFVPMATEVQIPIIYAGVNGLIDSIPADRIVEWENSFREKLQTEDALLAEIAAGKPSDELFSKMKALVTEHVKSFLA

SEQ ID NO: 39855 - protein, 73 aa, Oryza sativa
MQEVTGFFGHWVQGFKLASSACITEAAEVAWSNGSGLRVSRRPRHRVDCRPSCHHQLRCLRLRSPATSGSAMR

SEQ ID NO: 39856 - protein, 171 aa, Oryza sativa
MEKPSPPPPGKSRPDCVNSSNPYHECSDYCLRQIVKSREDNHRWSRVHPHCINASNPYHACSNFCFRRIIHAKPSPSGLERPVQEPPASEAVPAQADDDDDAQTDDDDEEDAAADDDDGYLKMTVTENQKLVFELRVRPSTILRFVVAAVCALLVIHLLGVSLVVVAHALI

SEQ ID NO: 39857 - protein, 55 aa, Oryza sativa
MSFWSTEGNSGRTGRRILLEMQKFQNMKSGRRSSFVKDCHLLSKSCPVAYTRRSL

SEQ ID NO: 39858 - protein, 280 aa, Oryza sativa
MFPSPGRAVMALGHHGAARQPPTTMAAAASSSTTSAAAAPATATTTVAFSFQHPTPTPSHHHHHHGVLGYSPLVLDHHHPTTAAASSHAPSPPTLHHHHGGGLHAAAPPPRSSPPHPWSCEEGDHRGRPQMGNKGEAAAAMGAMGINDAGNNTAAAAAAQHHLGVGAVRMKKVGGGGGGGGKARRKVREPRFCFKTMSDVDVLDDGYKWRKYGQKVVKNTQHPRSYYRCTQDNCRVKKRVERLAEDPRMVITTYEGRHVHSPSRDDDDAARASAEMTFIW

SEQ ID NO: 39859 - protein, 255 aa, Oryza sativa
MVRKLPLSSVLYTINSARDIPPSSPPPPAATPPAWMWPSCKHPRAHSFRSPSAASAAAAAKTIASIFLDSGESSFANSSARMHHDCASDSLSTESDVSATAEDMADAIVRGLRSDRLLFEPRAPSSSILDKKPVRRAAGGGDDDDDGAASFGGGVAVAFDSEDPYEDFRASMAEMLAAHGVGDWGWLEAMLGWYLRANGKETHAAIVAAFVDLVVSTAARGSSSSRHSSFTLAGTDLESSSAGGGAAGHISFRLR

SEQ ID NO: 39860 - protein, 215 aa, Oryza sativa
MLIAREVQVACRHGVEVSIVVGGRNIFCGDTWVSATGTDRASTYSIGMMASVMNAVLLQASLEKIGVETRVQTALMMQEVAEPYIRRRAIRHLEKGRVVIFAGIGAGIGNPLFTTDTAAALRASEINADVVLKGTAGDDDYGCPPRGNNNPPFEHISFRELAARGFSRMDMTAITCCQENNIPVVIFNMLEPGNISKAICGDQVGTLVDQSGRIT

SEQ ID NO: 39861 - protein, 213 aa, Oryza sativa
MAERSSSSSESTGNDEKKSSKPQGSSNDHQGFLPGGSPANTFDFASLHSLLNDPSVKEIADQIAKDPAFTQMAEQALEGEGEQGMPAIDPYIETMQKFMESPHFFTMAERLGDALVKDPAMSSLLENLTSPMHNAKIEERVSRMKEDPAVKSIMDELETGDPAALIKYWNDPETFRKISQAMGPLGGPDFAEPSGTEGTEEEGEYGDESIVHW

SEQ ID NO: 39862 - protein, 382 aa, Oryza sativa
MLALASTFLYALLTDRVLLVHAPPEFDGLFCEPFPGSSWTLPADFLITDFDGVFTMWSPTSYKNMRQAGTISNATAEQSLPAYVFLDLIQSFTDAAFCDDDQQVLAKFNWMVIKSDVYFAAMLFLMPAYERELTQLFPEKEAVFHHLARYLFHPSNDVWGIVHRFYEAYLARADELVGLQVRVFPEMPIPFDNMYEQIIRCSEQEGLLPKLGQTVVVTAANGSSVVAPSTKLTSILVTSLFPDYYDRIRGVYHARPTETGEYVAVHQPSHEREQRTEARGHNQRALAEIYLLSFCDRVVTSAVSTFGYIAHGLAGVRPWVLLRPPSPVARAEPACVRSETVEPCLQALPRRMCGAAEGSDIGALVPHIRHCEDVQKGIKLFS

SEQ ID NO: 39863 - protein, 59 aa, Oryza sativa
MPRRPSCWSLALARARGRVPGWPSRTPAPPRSIAWMAIPMRCKAQVCLMTSCLALIACH

SEQ ID NO: 39864 - protein, 308 aa, Oryza sativa
MRTHGEKVLDEAVVFTTNRLRSELKHLKSPVADEVSLALDTPLFRRVRIIETQNYIPIYESATTRNEAILEFAKLNVNLLQLIYCEELKTITRWWKELNVESNLSFIRDRIVEMHFWMTGACSEPHYSLLRIILTKMTAFITILDDIFDTYATTEESMMLAKAIYMCNESATVLLPKYMKDFYLYYLKTFDSFEEALGPNKSYRVLYFKELREQAGDHYASTIQCYMLQHGTTIHEACIGIKELIEDSWKDMMKEYLAPTNLQPKIVARTVIDFARTGDYIYKQADSFTFSHTIKDMIASLYVEPYSI

SEQ ID NO: 39865 - protein, 51 aa, Oryza sativa
MDARALRRKDAFRGERPWGERASVIHGSPIGKPYPSSVASLRSLDFSNLAN

SEQ ID NO: 39866 - protein, 342 aa, Oryza sativa
MFARQALRSAQATSPRFFSTSASANRAVAVLGASGGIGQPLSLLLKQNPLVTDLRLYDVRLAPGVAADISHVNTPSTTTGYQADQLGEALKDVEVIVIPAGVPRKPGMTRDDLFNTNASIVRDLAKKAAEVAPNAHLLIISNPVNSTVPIVAEVFKKAGVYDPKKLYGVTTLDVTRASTFLSGISGKKPAETIVPVVGGHSGVTIVPLLSQANGGDAVAKGEQYEKLVHRIQFGGDEVVKAKDGAGSATLSMAYAAAVFSDSLLKALNGEQGVKECAYVESPLYKDQGATFFASPVTLGKNGVEEIHSVGKVSAEEEKLLEAAIPELAKNIKKGVDWYAASP

SEQ ID NO: 39867 - protein, 50 aa, Oryza sativa
MSRNALAASPLRSAIVAACGRVMSSAGIQGGSSTWSASSTWHQMCNWDGF

SEQ ID NO: 39868 - protein, 42 aa, Oryza sativa
MTKKLNTGGSSSSASIGTAGRRVAWAGACPPSMDGVRAAAAA

SEQ ID NO: 39869 - protein, 176 aa, Oryza sativa
MSASQSMNLGEEAHMLMKKSLGLTESSSEQQTSATASGDDKQPHFYDKNVSFFDRISCEANEKTQKKPVNWKEERKINAETFGIKENQNRNYNNYNYNYNRSRNMNMNSRPQGNKPGQQQSQQQRSSQNQQPRYNNNNQNGMRQTGVVASGRTGYGQQSNNSMQQRNGSGRRYGSR

SEQ ID NO: 39870 - protein, 133 aa, Oryza sativa
MLVISGPLYWSRRTLSLSKYRKWLPDWETNLFSLVRRCDGSRVSVGQSKLCHTILSSESDAFITILPLLSRATVVCLPQPVLLSQTVVPLTSVKARLPSWLRDILEPWPFTGRPESAVQTTVLSVAWVNQMEK

SEQ ID NO: 39871 - protein, 521 aa, Oryza sativa
MEGGNHGGGGYPYPPPQQYPYPYGQYPYQYPPPQQQPPPPSAYLSPSRSFHGYPSAPPPQPQPQPYAHHSAPLQPYPPPPQHHAYPPPQPHPPSPYVYDPYHAPAAAYPSYPSPNPSPSISPSSSFHHHPEPPSPSPSAPSYPSIADGLANMHVSDRHDYPPPPSPAAVPAASSPSVLPPSASFPGGGSSHGGGGMQMVPYGPPAGGSQHGGMQMVAYGSPAGGSQHGSVRPSLKVVLLHGTLDVWVYDARNLPNKDLFSKRVGDLLGPRLIGAVGSKMSSANMTSDPYVTIQVSYATVARTYVVPNNENPVWTQNFLVPVGHDAAEVEFVVKDNDVFGAQLIGTVSIPAEKLLFGERINGIYDVLESNGKPCAQGAVLRLSIQYIPVAQLKMYHHGVIAGPDSLGVPNTYFPMRRGNRVTLYQDAHVPDGCLPDFCLDHGMRYQHGQCWRDIYDAICQARRLIYIVGWSVFHTIHLIREGVEKMPSLGELLKMKSQEGVRVLLLVWDDPTSRSILGIKTV

SEQ ID NO: 39872 - protein, 36 aa, Oryza sativa
MMQGLSQSRRIIKKISVSACLLLYSTRTSVLAMQKK

SEQ ID NO: 39873 - protein, 374 aa, Oryza sativa
MALLPCIAIAVLLSSSLAAAVTGPPGTIERVVKQQILASIPPGGHGAGDVHPPVLFLTSPSGKYAAYFVRSHTVPGAGGLGADFCYVEVVVNKGGEGDAAVAAGGGMSVWESECRPVSTVNTCTLLFSWHGLEVFDGSQEVWHGETNTDGTNFLQRLELVDDGDMRIRDKDGELAWRASDEPRHAQHCGAPGSPGLATAFPPFAEPIGAHSSDLPFGMFPGGNGRAAELPQAADAAAGALGGVGAVAPLPGAVGGAGAVAPLPGAAGGDAAAAPLPGDMGGDAALAPLPGALGGVDPAFSPLPGDLPDPAAAAAAGGAAAGVGGVGAGALGAGAVGAFGSQPLVDNSPYDSGAWKVDGHLVAIVVALGVVLGAI

SEQ ID NO: 39874 - protein, 267 aa, Oryza sativa
MARAPRDRTLSSRRASSATSAVPSYYQKTKKASKENGLQLTSEKKDWKRATCSICLEHPHKAVLLLCSSHSKGCRPYMCDTNRQHSNCLEQFKNAYSRGKPACELSGAVAQASKKPQEMELVCPICRGDVKGWTVVEPARRFLNRKRRTCMHEGCSFGGSYRKLRNHVRSNHPSSNPREIDSASLAEWKELEYEKDRQDAISIITALNPGSTIMGDYFIDPNSDSNDSFDYSSDSLTFSDSDPGTQLNGSTSSRRPARIIPNARVRY

SEQ ID NO: 39875 - protein, 304 aa, Oryza sativa
MACKNASSSAMPLLLVAGTVVLALLASPAAAFNITRILGEFSDFSTFNHLLTQTKLADEINRRQTITVLALDNGAAGGVSSLPSDEQRKVLSVHVVLDYYDTEKLGGMKMKNRSAVLTTLFQSSGQATDRMGFLNYTKRSDGIMVFGSAEPGAQATSQMVKVVVTRPYNISVLQVNSPIVPPGIASVSNSNTGAPPPHPAKSSAPAPSPSKSKGKKSDAPAPGPSDDVDDDTAADAPGPAVDGPTADGPAADGPAADGPTEADAPAHDKGDVADAPSAAGRAVASSAGLGVVALVVLIFPSVSL

SEQ ID NO: 39876 - protein, 142 aa, Oryza sativa
MGEMVARRGWKRRLGFCRVRLRRSPFRQEEMLPLLLKWWRKHMILLLLSMPRPNPMISKKTMLIEEKIMAWRWRTVTTKCRIMWRGAPRSKKMMELPHLSSRMMSLKCPCLLVCRILNYALDTAFLLLIKENFEFLTLSGVK

SEQ ID NO: 39877 - protein, 213 aa, Oryza sativa
MVPGERVADERHGLAPEEVQERRRVEPRELAALRAPPPPEEAEVGAAVLHAVLVLLDLPAGGVRVVRRRAVVGGGGGHPLTAEDVAVRRRGAPGGPRQRRDAGLEPPEERRAACRRREQHDDGERRERRRCRGVDALKQLHRRQPAMCKQASSSEQLQQQRRRSAAADARAAGRGREKGIGGFSFFVFFLGFVSTDAVEFKGDRGEQNQFVNC

SEQ ID NO: 39878 - protein, 67 aa, Oryza sativa
MHPSKLISSRLAPFGLPGRIFIPFCQQPKGYVTPSPIDDQLTATDREGERYRINTIRDGCVCIFFFV

SEQ ID NO: 39879 - protein, 141 aa, Oryza sativa
MLEERKLFVAGLPQQTREGDLRGHFARYGEVVHTRVVLDMASGNSRGFGFVEFADEAATLRALADDEMPNHVFRGRKVMVMEDLLIIHVMLMEDQLDISMILWVLTIMLKIIAKLLLSTSIPQIPQRNDLLRQRRSWMGRR

SEQ ID NO: 39880 - protein, 367 aa, Oryza sativa
MGKVPHAMRAAKLPLAVLAKPTHASASQPPAPPRPSNPRHRKTPAKASKTPAPATAAAPPPVEKRPIKTASDLAAAIRAAADADVDAAVDLARSAARTIPLPPHSLSLLLRRLARHRSVAAARGLLAELHPSPASPPPRPALLALSDAVCRRGEPREIAQLLPVLADHGVKADAPVYNALMKAHCAASDPAGVLGVLRRMKDDGVEPDLVTYNTLVFGLARAGMVTKARTYLDAMAAAGHFPDVITYTSLMNGMCVKGDAMGALALLEEMEAKGCEPNERTYNTLLMGLCKNKKLDKAVDVYKSMVGAAMKLEAPAYATFVRALCRAGRIPDAYEVFDYGIESKSFAEVTLYTELENSLKWLHRMKS

SEQ ID NO: 39881 - protein, 129 aa, Oryza sativa
MIAAVQSLEKQGIWKRKNVCAAAFPIEQTKGVFPRSCREKQQFVEMEIQPLLPATWLVDMQQHKKLVDITLLRLEFPSCPLDVGLAVLEVLADRHVLPAEETRAAMVTTTTTATKNEHLPRPCSANNLN

SEQ ID NO: 39882 - protein, 322 aa, Oryza sativa
MNMEVAVKRVAANNKSSSNRGEQEFVAEVNTISKLSHRNLVKLIGWCHEGGELLLVYEYFPMGSLDKLLYGGARPAELTWERRYKIICGVASALEYLHHGSSSRILHRDVKASNAMLDEEYSARLGDFGLARVIHLDEVTHHSTQAVAGTRGYMAYECFFTGRASLDTDVYAFGVFVMEVLTGRSPSSSVTYHNRQQEHDHDGRRQPMYIVDWMWRHYGDGTVLEAADAVLGGAYDEAQVERAARLALACCHPSPRERPSMRTAVQVLVGGAPAPEPPFEKPAFVWPPDGKRQEIELPHVGVLFTGGQLSFCSMTSTPITGR

SEQ ID NO: 39883 - protein, 285 aa, Oryza sativa
MSAGGRHRDDCSASPPPSPSPPPSTLLQLLEVTVISAQDLHRRLGRRVRAAYAVAWADAAHKLRTGVDLAGGADPTWNDRFLFRVEEAFLRSDTAAVTVEVRAPRRFGGDAVLGVTRIVVSTFVGSASSSARGTTGRQVAALQLRRPRSLRPQGIVNVAVAVLDATDARAVPLCSSPDSPDAFSVKDLLVRRPGSLARIVEVSETEEADDEPPAAAAAVVEHSGAMDTRGSAVEQRKLELLLEKWKADLSPDQQKEKANSRRSSGPRRHRRRSSCFGGGSAEWER

SEQ ID NO: 39884 - protein, 384 aa, Oryza sativa
MGPGSEQRGKDLLGRKIKKTTELSSGSYQYPFAFRLPDAIPPTYSCPYGEIEYEIKVIATSGNKNVSDLTSIAPLPVGGSLFDLSFLGNNSTPVQVKEAKTFLLTKGTLDVSVNLESRVFLSGDPVKIRCDMMNGTGKTISNITIQLLQKIDVIMYGRTAKQEEYALAKISLGNLESKQQKHPAVDILIPTTAPESVFQKSFAGGGKVGKQLLISYEIYVHGEVSLGTDLKMNIPIFIVRRARHQALLQQAGIAQNPQQSQVPPQQPPQQIPQQPQQPPQQALPLPPTHYAIPQTAPQEGSLYPSLYAPTQGTLPPAYGSNMSYYAPQQAPPQYPQQAYAPPAYSAPAQQITLPPPPTMTRSVPQQQPAMAPQGSSNNYDEFFE

SEQ ID NO: 39885 - protein, 417 aa, Oryza sativa
MFVSNDSIVVVDVNVPAAHVALHHWQPNTPDGQGTPFLFHHGRNAANSTGGALMRIFKGSASSGEDYDFPRAIAFAASGIRSSAVVAVTCDKEIITGGHADGSVKLISPDGAKTIETATGHLAPVTCLALSHDSNYLVTGSRDTTVILWRIHQAGSLHKKNAPEPPPTTPTTPRSPSVSNLTEIRRRRIEGPMHVLRGHLEEVTSCSVSPDLGLVVSSSNMSGVLLHSLRTGRLIRKLNVAEAHAVCLSSQGVILVWNESKKRLSTFTVNGLPIATTVLSPFCGRVSCIEISTDGHFALMGTCSSSNYKCEDSTETGDHEPNEPNGKDGISKQAETRQSVHVPSVCFVDLHKLKVFHTMELGKGQDVTAIALNKENTNLLLSTADKQLIVFTDPALSLKVVDQMLRLGWEGDGLLQS

SEQ ID NO: 39886 - protein, 296 aa, Oryza sativa
MEFGGAIDDQSEMWGWQSQEYDLQKDLLAEEAADPSSCLWSEANQNAGDAWTMFDEQTPIKHCTDIDFQFCDIGDIIVKDFDEGKETLQAKRRRMLQFCSDNVEMDCAMAADGLSENLQLNLGFSGDQCLLNCDGTEELPEEWLVDCSPQESEPQCPPEDMSVHLSSPAVAMEEANLSVHKNSSSREQGNTVQKNTVQARPTPLKAGKNIIRARKVKTSVVYPFELIKPCGFHGDVTLHDINQRIHAPPPYKIKHKIDEEQLSYQTSAISGKPVVHKTKIHTEGGKGSITITRTRG

SEQ ID NO: 39887 - protein, 62 aa, Oryza sativa
MDVRYSDRFSMCWVLFSEFVVVIRCSEITALYLGPMQSAKSLSCQKDVHGFSIICKLEDGLP

SEQ ID NO: 39888 - protein, 222 aa, Oryza sativa
MMENDNDEGHILEHTTNTKIPLLYQDITVVNYKGGTLMFTKILTTFKVIDLSDNSFGGPIPKSLGKLVSLRGLNLSHNAFTGHIPSQLNSLTQLESLDLSWNKLSGEIPPELASLTSLAWLNLSYNNLTRRIPQGNQFGSFSNSSFEGNVNLCGKPLSKQCDTPGSTSPSASAPSGTNSFWQDRLGVILLFIFSGLGFTVGFILAVWFESLCHIERWNRKKR

SEQ ID NO: 39889 - protein, 166 aa, Oryza sativa
MKEGGGGGGERRNILAKTIDRCRSSLGHRTTRRPASAAGGGGYGGAAVPAGFFAVLVGPEKERFAVRARCANHPLFRALLDQAETEYGFAGCEGPLELPCDVDAFMDVMWEMEQADPAASPRCGARFGGPAAAGSGRGYGGHGHHHQHQGYQMMSTPARLLVAGRS

SEQ ID NO: 39890 - protein, 117 aa, Oryza sativa
MSAAWMLSRAVSQRLLRHRSRSFCSSLSSSSSGKVKRIERFDEFEEMVQREIVEDVEKVERAKTEDRDCINRLLTSCGMPKGEFRDKLMWGCNVAAIFVASGAVGSLIAKIKIDGSV

SEQ ID NO: 39891 - protein, 411 aa, Oryza sativa
MVFTRSALNLARPAGSLLAQRAAPRTAFSKLGGVRTLTASSSRQGKVLLCLYDGKEHAKQEPRLLGTTENELGIRKWLEDQGHTLVTTSDKEGENSVFEKEMVDAEVIITTPFHPGYLTAERLKKCKNLKIAVTAGIGSDHVDLNVANETNGGITVAEVTGSNVVSVAEHVVMTILTLVRNFGPAREQIARGDWDVAEAAKNEFDLEGKVVGTVAVGRIGERVLRRLKPFDCKELLYFDYQPLSAEKEKEIGCRRVENLEEMLAQCDVVTINCPLHEKTRGLFNKELISKMKPGSWLVNTARGAIVVKEDVADALKSGQLRGYGGDVWFPQPAPKDHPLRTASYLGWGGSAGNATVPHMSGTSLDAQKRYADGTKAILQSYFSGKHDYRPEDLIVTKGDYATKAYGQRNKK

SEQ ID NO: 39892 - protein, 373 aa, Oryza sativa
MIKSCFNNILLSDQGHSLTVGIVQPRKLIVDTGSDLIWTQCKLSSSTAAAARHGSPPVYDPGESSTFAFLPCSDRLCQEGQFSFKNCTSKNRCVYEDVYGSAAAVGVLASETFTFGARRAVSLRLGFGCGALSAGSLIGATGILGLSPESLSLITQLKIQRFSYCLTPFADKKTSPLLFGAMADLSRHKTTRPIQTTAIVSNPVETVYYYVPLVGISLGHKRLAVPAASLAMRPDGGGGTIVGSGSTVAYLVEAAFEAVKEAVMDVVRLPVANRTVEDYELCFVLPRRTAAAAMEAVQVPPLVLHFDGGAAMVLPRDNYFQEPRAGLMCLAVGKTTDGSGVSIIGNVQQQNMHVLFDVQHHKFSFAPTQCDQI

SEQ ID NO: 39893 - protein, 350 aa, Oryza sativa
MAALPKAGKPLVENDAGSYLAWSGKNQPALAGEKLGCGLLVLKPLGFALPHYADSGKFGYVLGGSAVVGVLPVGLDARERVVRLEAGDVIAMRAGEVTWWYNDADGEDVTIVFMGDTARAASPGDISYFVLAGPMGVLGGLDAGLLATASGLTSPEQAATAFRSQPAVLLTRLSRKLQDVRPREHDRHGIVVNAARMPADSSTGGAAAGTKIVTAAHLPVLGQLGFSVGLTPLDAGAAVRGPWVLRDAAAQAVYVARGSGRVQVAGAGGASTLLDAEAAAGSLLVVPRYAVALVGVDAGGMELVSLIKSPRPAMKQFTGKGSVIGGLTPEIVQAALNVSPELVEQLRMTK

SEQ ID NO: 39894 - protein, 222 aa, Oryza sativa
MCTTTRRRWPSASRCQCRLAANPASRTGHPCASGVLGRFISLRLLLRSSGLHIHHIVSDYKDRNEEEYEGMNISLLEEASVQKADAKPVYCTKFLSDWVCSLRNFKWKVVAGIHQALVPNEYSWEEVMGSPIIQYAGGCSLSACSVCIDRLAFERIHGRGSFAWRVESPPAKLRKECLKRNAWSQESGGKSDRVLDVIIDNGGLPTTDGIIMLPWLLCSVKW

SEQ ID NO: 39895 - protein, 124 aa, Oryza sativa
MGLSSLGSLKFLKIHRCPYLQLPSDKPLSTQLQRLTITKCPLLADWLEVQISHQQCQLHESKDAWYEEQQALNELNDASEDEHREEFGLLYEDDNGEDNDEQDHEQSEDEEIQYGSDDSSEEDE

SEQ ID NO: 39896 - protein, 238 aa, Oryza sativa
MAMKTLSIKLLIDTKAQKVCFAEAGNDVVEFLASLLCLPMSTIINLLTKERMVGSMGNVLDSMEKLEDKHVTTNQSKQRYLSPTAAPNALCPLQQLLDTELNANTSFFTCEGKLNSTSYNATRFACGYFSVVKGSICPLCYTPMHKAIPHVNTSRVMAGTGTYTIKDDLSMTPASSVSSISLLAQCGVKDLTTLQERTMKIGKEEALEILLASLKSKTVLTDVFLPKKKESCKREVSA

SEQ ID NO: 39897 - protein, 60 aa, Oryza sativa
MAGRPPGRMVAEPDQQPLASKGEVGSSAVSRAAQLRRSPETKWPQERLPMSQSALCGLYL

SEQ ID NO: 39898 - protein, 392 aa, Oryza sativa
MLHLRQCLLPLLRAAAAAHPHTSAASSSSLHLSRRLFSTAAGPDTAPPFSVEEYLVATCGPTGAQALKASKKLSHLRSPAKPDAVLAVLSGVGLSRADLAAVVAADPMLLCARARNVARRLHSLRDRVGLSDADVARFLLAGGAMGLRKCDIAPRLEFWIGFVGSFDKLLPALKGNNGILMSDLDKVVKPNIALLQECGLSVCEIAKLSTLKWTVLSLSPERVKASVLCVEKLVVPRSSDRFKHVLKSACWISEDMLAMKMEFLRSTLGCSEDKLRAAVCISPHIFYLSDKNLCRKIDFLISEVGLECEFIVERPWVLGYSLEKRMVPRHSVMKILRTMGLMKDAVDFSSSLVYSEKKFVARYIDPYKQAAPTLADSYAAACAGKMPAHVHR

SEQ ID NO: 39899 - protein, 290 aa, Oryza sativa
MQQLTESEAANAHLRSELKAEKDRFVREKKELSEQMLEMENQLEWVRSEKDEQIVKLTADKKNLHDRLHEAETQLSQFKAWKREELKKITKEKNALAERLKGVEASRKRVDDEFKRFVAEAQTREEIRKSLEGEVRRLTQTVGQTEGEKKEKEDQITRCEAYIDGMESKLQVCQQYIHTLETSIQEEMARHAPVYGVGVEALSLDELETLTNIHERGLRQIHAIRQRKGSSHRLSAPSLPHVPGLYSSPPSMAVGLPSSLIPTSSVAPNGAGIHGNGHMNGSMGSWFNPT

SEQ ID NO: 39900 - protein, 349 aa, Oryza sativa
MTRTPASLSLAVVAVSVAAAALLLAALVAADGQKQQGYVQPAYRRPAAGLKADYYHQSCPDMEGIVQRAVKKAIAADSTLAPALLRLFFHDFAVGGIDASVLVDSPGSERYAKASKTLRGFELIESIKAELEAKCPKTVSCADILAAAARDASTEVKVDYWPLMYGRKDGRRSSMVDADQYVPMGRESVTDLIAFFESRGLTVLDLAVLSGAHTIGRATCAAVKPRLWDYAGTGRPDASMSPRYGDFLRRKCAAAGDGGYVYLDADTPTEFDNGYYKNLLRDMGLLETDQKLLPDSRTGEFVRELAGARPELIRHQFADSMRRLGAAQVLTGDEGEVRLKCSAINSNSY

SEQ ID NO: 39901 - protein, 330 aa, Oryza sativa
MSYLQKPSYYTISLVVVLLLPFTILFASFLLPFSAYLRGPPPIAAGSVVAGGCRHGAADGGGGGGGGGGVRPEISILVGVHTMAKKHSRRHLVRMAYAVQQTAALRGAARVDVRFALCARPMPQEHRAFVALEARAYGDVMLIDCDESPDKGKTYDYFAGLPAMLSSGGGGGGGGEGRPYDYVMKVDDDTYLRLDELAETLRRAPREDMYYGAGLPFLDKESPPFMLGMGYVLSWDLVEWIAGSDMAKALAIGAEDVTTGTWLNMGNKAKNRVNIFPRMYDFKGVKPEDFLEDTIGVHQLKQDLRWAQTLEHFNVTCLDPSSKMTNSLLS

SEQ ID NO: 39902 - protein, 387 aa, Oryza sativa
MTNKNLELQRLVGVQTNMLKNSGVTIIEGRGKVVDPHTVSVDGKLYTAKNILIAVGGRPSMPDIPGIEHVIDSDAALDLPSRPEKIAIVGGGYIALEFAGIFNGLKSGVHVFIRQKKVLRGFDEEVRDFVADQMSLRGITFHTEETPQAVMKSDDGLLTLTTNKGSINGFSHVMFATGRKPNTKNLGLEEVGVKMDKHGAIVVDEFSRTSVDSIWAVGDVTNRVNLTPVALMEGGALARTIFGNEPTKPDYSAVPSAVFSQPPIGQVGLTEEKAIEKYGDVDVYTSNFRPLRATLSGLPDRVYMKVIVCANTNKVLGVHVCGEDAPEIIQGIAIAVKAGLMKQNFDATIGVHPTTAEELVTMRSPTRKVRRDAVDEAKMKDEATSQK

SEQ ID NO: 39903 - protein, 43 aa, Oryza sativa
MRTMTCHSLLKRKNPIIKKHHHHHGPLIPFDKKRWLKKGRKCS

SEQ ID NO: 39904 - protein, 74 aa, Oryza sativa
MIIPVRCFTCGKVIGNKWDLYLDLLQADYTEGDALDALGLVRYCCRRMLMTHVDLIEKLLNYNTLEKTETTAGN

SEQ ID NO: 39905 - protein, 335 aa, Oryza sativa
MVVLAKGELEQIALPAAHPPPADMRAIDLSATGPARAAEARALVAACEEQGFFRVTGHGVPPGLVRAAEAAAARFFALPQPDKEAAAGAPLGYASKRIGSAGDLGWIEYLLLCLAPAAAAAALPCAATSPTPPCPLRELLREYSAAVRRVACGVLELMAEGLGVGPADALARLVAREDSDSILRVNHYPPRPDQLGGGGGPNLTGFGEHTDPQIISVLRSNGAPGLEISLRDGARASVPHDGDGDSFFVNVGDTLQVLTNGRFRSVKHRVVVNSEKSRVSMVFFGGPPPGERLAPLPALLGDGGRSRYREFTWKEYKGSGCKGRLADDRLCRFEN

SEQ ID NO: 39906 - protein, 59 aa, Oryza sativa
MWLVEFTPERPQLVQTVLGFTPFRCTVMFSLWKAITVVSNLVTQFYACKLYMNGILQET

SEQ ID NO: 39907 - protein, 356 aa, Oryza sativa
MERLISKSVAARISLPGGGSPSRRLAVAGLGGGGGVEPWAGRLRAQPRLGPIAARPHDGVSAPPREAAPAAAVGPPWKLLWSLLPKASRAALFLLVALVTGTLQSSIPYPAHASVQSITKTGGLFTSEILSSGWAGFIAGCLHTLSGPDHLVALAPLSIGRSRLESGLVGALWGCGHDAGQVIFGLLFLLLKDRLHIEILRTWGTRVVGLTLLIIGGMGIREATEVQESSLALEGVDCNITSSEPLQTPAAPRKKKVGFATFATGVVHGLQPDALLMVLPSLALPSRFAGAAFLGMFLMGTVFSMGSYTAFVGSCSEALKEKVPRITEKLTWAASLVAICMGIALLVGQFFGFSLY

SEQ ID NO: 39908 - protein, 204 aa, Oryza sativa
MRQSRFKRICVFCGSSQGKKRSYHDAAIELGNELVARSIDLVYGGGSIGLMGLVSQAVFDGGRHVIGVIPKTLMTPEISGETVGEVRPVADMHQRKAEMARQSDAFIALPGGYGTLEELLEVITWAQLGIHHKPVGLLNVDGYYNSLLTFIDKAVEEGFINTSARRIIVMAPTAEELMDKLEEYVPYHDRVASKLNWEMGHLGY

SEQ ID NO: 39909 - protein, 221 aa, Oryza sativa
MVDNDIPPKDQTNNIATEDKPSTQETSEAHKMVVVEVSANTGIQISQGDSAGTEENLHTEVTSVPHMINDVAMATNAGTPICPSNNVAIEEKPKSTVISEVCTTKDTEMTTDATLDQNTNVATEEIPLPESISATEDADMTTDTGIPTNQRQEVNGLAENGRKEHPLGETDKHKSDHSTMPDMSTAPQITSNGVMHSKDEAACGHEGEIVDISAAATEENN

SEQ ID NO: 39910 - protein, 168 aa, Oryza sativa; identical to SEQ ID NO: 39104

SEQ ID NO: 39911 - protein, 1070 aa, Oryza sativa
MAASDDGQLRTWVSDRLMALLGYSQGLVARLVVRLARECASAGDLAARLVDLAGFPPSPDTAAFAEDVYGRVPRSCGGGGDDAGVSEYQRQMQEAAAMAKKQSTIKLLDDDGEIGVSASPSSGGRKRFRRKAVGEDDDDAGRNARRRRSPDDEEEDGDAGEEEEMERDQIERAQLERNIRERDAASTRRLTDRKTTKREQGELARRSDAMDKNDTSGLRRLSRRAYLQRRKEKKVEEMRDEIVDHEFLFPGVQLTAAEERDMRHKKQVYGLVHDRDDYYRMPDAYDAAANVDQEKRFSVARRRYEEPAEAARDGKTANALSEQEAWEEQQIRKSRLQFGSMDRGRRGDEYELLFDDGVEFVRSTVMAGTAPADDDDTAAAAAADEYHAEAMDAKATLQDERKTLPAYKLKDDLLKAIDEHKVLIVVGETGSGKTTQIPQYLHEVGYTAGGRKKVACTQPRRVAAMSVAARVAEEMGVKLGHEVGYSIRFEDCTSEKTVIKYMTDGMLLREFLSEPDLGSYSVVVVDEAHERTLATDILFGLVKDIARLRPDMKLLISSATLNADKFSDFFDAAPVFRIPGRRFEVGIHYTVAPEADYIDAAVVTVLQLHVTEPPGGGDILLFLTGQEEIETVEEILRHRLRVLGGKVAELVICPIYANLPAELQAKIFEPAPAGARKVVLATNIAETSLTIDGIKYVVDPGFCKVKSYNPRTGMESLLVAPVSRASAEQRAGRSGRTGPGECFRLYTEYNFVSDLDDDAVPEIQRSNLASVVLALKALGINDLVGFDFMDPPPAESLLRALEELFALGALNSRGELTKTGRRMAEFPLDPMLSKAIVASERYGCSEEVITIAAMLSAGNAVFYRPRDKRVHADAARRAFHAGNAGDHVALLNVYNAWAESGYSPQWCRESFVQHRTMRRARDVRDQLGALLERVEIAPCSSAGGGDLDAVRKAVTAGYFRHAARLQRDGSYRAVKSRQTVFVHPSSGVAQAPPRWALYHELVLTTKEYMRQVTELKPEWPVEIAPHYYERKDVDEPEPKKTAAATTPQEQTTAGSTPTKQTPNLNSFFDV

SEQ ID NO: 39912 - protein, 507 aa, Oryza sativa
MALKAAQKQTVATGKAQGARVVAPRVIKGSRMARVVVQARASSTMQAPLVARRGATHVSRSRSNLVVYAVKDGASLGDRKLRVAVIGGGPSGACAAETLAKGGVEAYLIERKLDNCKPCGGAIPLCMVQEFDLPQEIIDRKVTKMKMISPSNREVDVGRTLSETEYIGMCRREVMDAYLRDRAEKLGANVVNGLMMRMEQPEADGPITIHYNGYTDGSKIGTPQTLEVDMVIGANGANSRVAKEIDAGEYDYAIAFQERIRIPDDKMKHYENLAEMYVGDDVSPDFYGWVFPKYDHVAVGTGTVVNKTAIKQYQQATRDRSKVKTEGGKIIRVEAHPIPEHPRPRRCKGRIALVGDAAGYVTKCSGEGIYFAAKSGRMCAEAIVEASENGKKMCGESAIRNYLDKWDRKYWATYKVLDILQKVFYRSNPAREAFVEMCEDSYVQKMTFDSYLYKTVVPGNPLDDVKLLVNTVASIVRANALRAADSKSVDVNFGSKATEEFQARATA

SEQ ID NO: 39913 - protein, 133 aa, Oryza sativa
MSDGSTPSSRNIGRRSGNAARLRSTPAAAACAEESGQPATRGHGRCGVPRVRGERAQRHERLLGVGAAGLQRVAEVGHHGPRHLRQEPARGPWRPRTRTRRARTRPSRVTPAGSLPSQASRPRWTPCRRCRRQ

SEQ ID NO: 39914 - protein, 259 aa, Oryza sativa
MVSSSFPAEIIHPARLGCMLRLHVVEHPTGDAAAVAFQCDGCMLPGEGTRYTSVVDNHPTHLALHTSCALATPTLQHALVKGTMELRHEAPAGGAGVCSACFETVRGFHYYGSRKTGKGEHPKLHPCCARLPVSIAVRGGLTFELRAEVSHRCTGCRAMEWYYRPWCYRSTNSPDHRVYLHVKCIREIMESPGGGGGGGAGDEDDRVVARLLERADQSSKLERRVCKILVILVRVVVRMLIGDPTALLTEGVSAIVSPW

SEQ ID NO: 39915 - protein, 390 aa, Oryza sativa
MPSMLKVALPALAAASTAYAACSASATTTIQNAGDATALASCSTFSGSIAIATGTTDDIALNGIKKLTGNLVATENENIKRISANDLETLDGELQLDGLVRLYGVDFPKLKTVDSIKWNALPNLQNIGFTAEVEQASKVRIENTGLRSLKGINIEEVETIFIANNAYIDEIAMQLGNVSESLDFVNNNENVKIELTNLIWAKNLTFRFCGSVSMPSLETCNGSLGLYNNGFEQFSAPNLTEVGEALALVANDNLNNITFPKLEKIAGTLQIANNTNLKEVTGFPELTRVEASFDVSGNMSDIETPKLDFVKGTCNIQSSENVSESCGYYKSLKEKKLIQGKLFCKGQLDDPGMEGHNPTSSNGDNKDNAATAGAVNVALGLAALAAIMLF

SEQ ID NO: 39916 - protein, 172 aa, Oryza sativa
MSFIQDLWESIFTPGPTPSLLIATNVTFAALQAVLLALLVATYSIHFLILSGLCGGLWWAINWFARELKEAQRREEQDKAKRGGASGPRSAAPATPSDTETEVETVAAHGTTAVKAAAASSEVEPVEQTGELKHRAAAVAEPFASSAPSTRSGVSTEDEWEKLSENEHEKDR

SEQ ID NO: 39917 - protein, 1223 aa, Oryza sativa
MSLPRRPDDSSRGSRDNRHVFRESTSRRRRTSDLENTRSHDRSNSKSGAQAHARPLPSPGTPVPMERDPIMRSQNATPAQDLGRKRSLIRPERQRMDPSHPNYHYRKHAQRMNVQPSTTGNDPILEDHMEAETVSSDSTDLKPPHLRNASGGGYNDKQAPLDDDAPHMQRRLTRSKTAEAREKQRQKENDKLRPPSLWNVYCAIITFWCPDAILRCFGKPAKAQQRAWREKVGLVSIILMICTFVGYLTFGFTETVCPSGGNMRMQANKVDNGSLIIHGKAYALAESKHPPARNILSGANALFDLPEKYGGMDASFLFQNVNGACKGLIKPKDGADIPNSNGNMAWYFPCRLYNQDGSSKPNTTFEEYNGYMCHTSDAARRAYYGLKDAGDVYFTWDDIRNSSRNLMVWGGDVLDLNLLDWFNRTQVEIPPIFDQIKVNPAVRGVDVTRAYSSSYEKQVARCFTETIKVGSIDTESIGCIASKVVLYMSLVFILAVVVAKFVLALAFQWFISRKFGAAKTSVGKMDSKQRKQQIEEWSDDIYRPPPKLSDPAAGSDRSSKRGSTFLPSTSRFTSPYSVDKTAKTRAPPTTMTSQSNTSRLLSSNTGMYRQLNNSQGTMPTFDGKHSMQQSVQESRTSLLLSGNTDSNRYSSMVGGDGPGPAGFIHEAVVPQPPPEWQPFGYPLAHSICLVTAYSEGADGIRTTIDSIATTDYPNSHKLILVICDGIIKGKGEDLSTPEICLGMMKDHAVLPHEVQAFSYVAVASGSKRHNMAKIYSGFYDYGENSRIPIDKQQRVPMMVVVKCGTPDEARKSKPGNRGKRDSQIILMSFLQKVMFDERMTELEFEMFNGIWKITGISPDYYEIVLMVDADTKVFPDSLTHMISAMVKDPEIMGLCGETKIANKRDSWVSMIQVFEYFISHHLAKSFESVFGGVTCLPGCFCMYRIKAPKGGQNYWVPILANPDVVEHYSENVVDTLHKKNLLLLGEDRYLSTLMLKTFPKRKQVFVPQAVCKTTVPDEFKVLLSQRRRWINSTVHNLMELVLVRDLCGTFCFSMQFVVFIELIGTLVLPAAIAFTFYLIAIAIKAAILHTAAPVIPLVLLALILGLPAVLIVVTAHRWSYIAWMFVYLLSLPVWNFVLPTYAFWKFDDFSWGDTRKTAGEKTKKAGLEYEGEFDSSKITMRRWHDFEQERRLKAPSGGFSQQPTSAGGWPQQQQQGYDPYYDN

SEQ ID NO: 39918 - protein, 417 aa, Oryza sativa
MAAADPPPPPTGMGFLGLLSFRRSATAVASFDPAQDDELQVLHALQAHVADRLAALSHHPPLLSLAFLSKLLDAVLSSDDAFREVLGIGPVAAALSRPPADRLAADLLDRTVKTLDILNAVSLTLASLRGSHRAALTAASCLLAPPLHRAHFGRARRAISRLFPDAAKLAAAPSPSCRAGPARALSFSVSRNWSSGRHVHAMAAHLAPPPQSPTSASPGAGCGLGLALYTMSSVLVFSMWALVAAVPCQDRSSAATNPPVAPPKQVQWAAPMCALQERIADEWRKKDKKGSSSGSAAATGLLAEMQAVERAARELSSLLEEVAEEEEEEQLVMGATDERARDVVERAEALAAACRALEEGLAPLERQVRAVFHRVVASRGEVVRIMEHSTRSNSSATASAAAAAASGSGAPPHHHSF

SEQ ID NO: 39919 - protein, 375 aa, Oryza sativa
MRVATVVLAVAVMAAAAAAMRSVEIKHESEYPFERYVRDFGKNYDAHEYVRAFKTYSENVAKIARHNADARQTYRKGVNKFTDMDAAARKRFLGFSMAKKLSDYVEARAPTTEEVPAVPLEALPKSVDWRNKKNPSVITPVKDQASCGSCWAHAATEQVEYAVAIATNTLSPLSRQNIVDCAPNPDHCGGTGGCEGATAELGFAYVKDKGMASEAAYPYTGMDGTCDESIPKSGQVNGWVVLPSNNYTAVVTAVANVAPLAITVAADTWFDYSSGVFTGCGTDTDLNHAVQLVGYGTQGSQDYWIVRNSWSAGWGEAGYIRILKHSDGSSQWCGIDTTPGDGTGCENGPSQVTVCGSCGILYDVCWATGGSIPQF

SEQ ID NO: 39920 - protein, 235 aa, Oryza sativa
MHSKFIALALPALAAAYPQSGSSPNPDDIQIVSTTYSGNGCPQGSVSTSSSEDKTVITYGFDQFQTYIGPNIASSEKSKNCQLHLNLKYPGGFQYAVVDATYHGWARMDAGVTGSFITTYYFSQDAGKTQTTRSSFTGGGKLIDGQVYTKQDSVETTATIWSPCGSNGILNINNRISLTSKDAKAYGELSNDDATVAFNQQLHVAWKKCTPGSGSGSGSDDTIGIGMPSSDVIIN

SEQ ID NO: 39921 - protein, 387 aa, Oryza sativa
MYLQTLTTTLLACASSSLAAPTNVTRPFSTWMSSSWLSKGQQLNNHYVMAVIHEGIQKAATTQNDAALLSYASDAVSSLVTENGTLIGWNATFYTLDDIRMGNNILYFWNAGGRKEKKYEIAAKGLRDQLDRWPRTETGGFWHRAPIYANQMWLDGIYMADTFYATYTSYFEPDNTTAWDDIELQFDLVEEHCRNHTSNLLAHGYSEDKSAVWADPVTGASPHVRDRALGWYFVALVEVLEVFPKSHPGFAKLLGYYSTLADGIKKAQDESGGWWLIMNEPYPGQEDNYIESSATAMFAYSYLKGIRLGLLDEEYKTTALKAWDLMVNDFVQYENNGTLSWTGTVEVGSLKGDASYEYYVSVPLSLNDGKGLGAFVYAATEIEMAGL

SEQ ID NO: 39922 - protein, 593 aa, Oryza sativa
MATRTYGIRNAPVGCIEAVAVMALLTAIAAAIRRRRDLRLIGGLLGLMPALFAITAAGVTCIAVVAGVHTAYSDAANALDSTVGDHGRRTVSVLVSAASVAEALDGVQRAVAFQAIALSPSSAAVSAAVSNAQSKIVAHGTIFTSGSDGAASASLIAWLETIRTASAAAAAQVGSFIAGTITYDRNAAGTPPSTTQQLLSPRAVGCVAAGADMTFGWLSSLATLQLTNSDISTFGAAANITSNNSAAIPTIGMDPEVEGASAALARAVRGALSLSKPFSAATLLVYGATPSANTTVTAARAAIVVNLAVASTAFSRALRVLTPALQQSSVGRVNEGAATDALSACQAAKTASTTATTTVAALLQNAALSANAAASLNAILANVSSNADRLVTTAGALYSVARHVTGGASAFVNVSTSASALQAVVGGGDAVYLALTTTLSVTQIQAQAQNVGASMRNLRPDDVLGATLASFAAYSPSASSTSVSAAAAASGKRTPSSAGLSNVLRANAALLSSLTKSDTGVSLQTYLAQTVQAEAIAPWTDFVTQVANSFSNPPVSTLGTAEDFSQRIAAGGTWIIACIAALLAMANRLGAVQ

SEQ ID NO: 39923 - protein, 517 aa, Oryza sativa
MAGGVIVANDGDGSAVDHGGRLTFSVVITCLVAASGGLIFGYDVGISGGVSTMEPFLRRFFPGVVRRMAEARPGNEYYVYDSQALTAFTSSLYVAGLVASLVASRVTRAMGRQAVMVMGGALFFAGGAVTGFAVNIAMLIVGRMLLGFGVGFTNQAAPLFLAEMAPTRWRGSLTAGFQFFLAVGVVIATVTNYFASRVPWGWRLSLGLAGAPAVVIFLGALFLTDTPSSLVMRGDTARARAALLRVRGAGADVEAELKGIVRAVEVARQGEDGAFRRMAARREYRPYLVFAVAMPMFFQLTGVIVISFFSPLVFRTVGFGSNAALMGNVILGAVNLVCLMLSTLVIDRYGRKVLFMVGGAIMIIAQVGVAWIMGAQVGKNGSEAMARPYAVAVVAFTCLHTAGFGWSWGPLGWVIPGEIFPVDIRSAGQAMNVSIGLGLTFVQTQSFLAMLCRFRYGTFAYYAAWVAVMTVFIAVFLPETKGVPLESMATVWARHWYWKRFAREQPKTSADEPTGTY

SEQ ID NO: 39924 - protein, 715 aa, Oryza sativa
MRPERQSGEEAMDVVQARLPDPVPSPILRHSPSTSRSLRSVGDMPSVTFAGDMRSGSCRAESTASSFESFRRAGSRPQPVGAVARMPTRRSASERAGSQRDLRDEDARFVYVNDAARTNAPPAKFPDNSVTTTKYSVLTFIPRNLYEQFHRVAYVYFLILAALNQVPQLGVFSPVASVLPLAFVLGVTAVKDAYEDWRRHRSDKTENNRTASVLVDGVFQPKPWREIQVGELVRVVANETLPCDMVLVSTSDPTGVAYVQTINLDGESNLKTRYAKQETMSTPPEALAGLIKCEKPNRNIYGFLATVDLDGRRAVSLGTSNIMLRGCELKNTAWAIGVAVYTGRDTKVMLNNSGAPSKRSRLETHTNRETIVLAVVLTLLCTLVSLLAGIWLSDHSDELGVIPYFRKKDFSNPNEAEKYKWYGTGAQVVFTFMMAVIQFQVMIPIALFISMEFVRVGLAYFMVQDEHMFDDKRQAKFQCRALNINEDLGQIKYVFSDKTGTLTENRMEFRCASVHGGDFSETDGGDADGHAVAADGVVLRPKTAVKTDPKLMAMLKDGTGAKADAARDFFLTLVTCNTIVPIIVDDDEDNDDPAAAAAKLVEYQGESPDEQALVYAAAAYGYTLVERTSGHIIIDVFGTRQRIIMGYLGFSMIAGTNECGTRAKQQIRIKVVANVTKSWALTADDPLLNALHPISKKYSQLLHLATSQTCVAAGC

SEQ ID NO: 39925 - protein, 122 aa, Oryza sativa
MQEFIDFEEIAEQANSILLSFKCPLSDEREVEWRTLLVNGVLYVDIPTSVLPEGSRDSFVSLLEFAEDKLDCEKVFVCFKRNRPDRSALMRVFMFLGFTVVPPDCKLCPQNDDIMSMVYNIQ

SEQ ID NO: 39926 - protein, 190 aa, Oryza sativa
MASTSGLLATVLAMAVLLAGSSRSCQAARHLADATPPAAVPVPTVPAVTLPPMPAIPAVPAATLPPMPAVPIVLNTALPPMPAVPKVALPPMPAVPAVPTVPAVTVPPMPAVPAVPAATLPPMPAVPAVPAASLPPMPAMPAVPNAALPPMPAVPKVTLPPMPSMPAVPKVTLPPMPSVPMPFLAPPPSA

SEQ ID NO: 39927 - protein, 361 aa, Oryza sativa
MAADHELRAAAVVMVVVVVLGMVSTSSAHVFVGAYNTTCPNAEDIVYKEMTSILAKSPELAGPVLRLFSVDCFVGGCEGSILLDSTPGNKAEKDSPLNKGVKGYEVVDAIKAKLDAACPGIVSCADTLALAARDVVRLTKGPYIPLPTGRRDGNSSNAADVAANSPAPGATVNDLLTIFAKFNFTAKDLAVLSGAHTIGKAHCSAFSTRLYSNSSSNGGPTLDANYTTALRGQCKVGDVDTLVDLDPPTPTTFDTDYYKQVAAQRGLLATDAALLLNADTKAYVLRQANATSDDEFFADFIVSFVNMSKIGVLTHSHGEIRHKCSAVNPPSPPSSAAASMLATSLAGSLLFLLAGVLVLLF

SEQ ID NO: 39928 - protein, 685 aa, Oryza sativa
MPAYNFKSMQVVPPAKDFIDIVLSKTQRQTPTVVHNGWAIQRIRQFYMRKVKFTAQSWNEKLTQILDDFPKVEDIHPFYSDLLNVLYDKDHYKLALGQLNTARNLVDRLAQDYVRLIKYGDSLYRCKELKRAALGRMCTLMKGQDASLKYLEQVRQHMSRLPGIDPNTRSLLLCGYPNVGKSSMMNILTRADVEVQPYAFTTKSLYVGHMDYRYMRWQVLDTPGILDRPLEERNTIEMQSITALAHLRCAVLYLVDISEQCGYSLAQQAALFHSIKPLFANKPLLVVANKTDVRPMEALSAEEQQLLQGMADEAQRISSGGAAPAVAAAGESSEPHMMTMSTLTEDGVMAVKQVACDRLLNFRVDMKVAGKRINDVLNRMHVAVPKRSDGVSRPPVIPPSVAAARAAAAAGKQPSKRKTEKELQEEGGGAGVYSADLRKHYDLKDPAWRYDIMPEFMDGHNVADFIDPDIDAKLAELEREEAEQEAQHQAQLSGVMDTDELTEEQAADLAAIRQRKKQIIAAHRLKKSSAGNRPVMPAKHGGSGKLQASQLRQKLDAMGIDTAAAEQRLRERSQSRGRKRSRSEGPAGDGDAEMGEADAAAAKKRVHSSKSRGMSRGRSASLAAPAAGSGLKDAVQGNKAVKLADKAQRRMNKMAKVGEADRVIPTKMPKHLFSGKRPKGKTDGR

SEQ ID NO: 39929 - protein, 380 aa, Oryza sativa
MRTALISLAVAAGAAALPAPPTSPAPLTGLVSEVTGALATVFSEICEALPLEAFNNTKYRHDPMPIEAQKTKLANWKILTPPQADPAPVSSFKPYKVSGYQSGGQCANVRVRKEWDRASDSERQAWVDGVKCLLNKAPSGQWPNAKNRYEDIVALHQALTPNVHTNDKFAIWHRGLMFLFETMMRNECGYNAPLLWFDFTRYAGRFAQSSLFSSRWLGGIAVNGNCVRDGQFANLVANVGPGDSNTVHCLARNGVGSSTAHCSQEYVDLCQRYPDYAGWRQCVEFGYHGWGHMGIGAVMNDVQASPSDPVFFIFHAWIDRNFRIFTNANKQWERQINGVDRNGNALTLDTTVSMAGMMPDLKIRDMLDTTGPTLCYRYDY

SEQ ID NO: 39930 - protein, 212 aa, Oryza sativa
MAEGAELVGESAHQDMPRVVAALAGILERVAGRNDAAATPAELAAAPASPFRATAKPGISVRAYAARIARFAGCSPACYVVAYIYLDRLLRRGRRCLALALAVDSYSVHRLLITAVLSAVKFMDDICYNNAYFAKVGGISLAEMNYLEVDFLFGVGFDLNVTPETFADYCAVLQSEMLCAAPPTRLHYCCLSEDDAGSSSSSSLREAAMEAS

SEQ ID NO: 39931 - protein, 299 aa, Oryza sativa
MDRADIYCIAFNTASTYIACSSDKGTIHIFSLLAPPPTKTEGSGGPPGSSLPASPSPAQPRWASLDSTPPPPGSFSQSPLPAGDMRSISISSRHDASRHDPYSFRPSDASSHSLMPKGGYSGKGDIEEVSLGGTANSAGGNNNNNNNNNKSMSGMGINFLKGILPSGFVPKYLESEWSFAQVRGIEGKAICAFSKDSTKLHIICSDGNFVIANVEEGECSRVSTMKYLKSIDEIQNEEEEFEWNNNHGASASNSTQQQIAQGRTKSSSNTDLASLASNLNQVSLNNHNAHNAPGKLYDI

SEQ ID NO: 39932 - protein, 318 aa, Oryza sativa
MDPARYWILARRKLGDQKAPLFPTPHITIGAGGSSTSYYESWEERAFAEDSAGHLGGCIWPPRSYSCSFCGREFRSAQALGGHMNVHRRDRARLKLSGVVEDGTGGESHGMPPNQNYMIQPCPPQIGTLQHAYSPNPRSGSILAADTNPNSICDVVAYPARSLLQVAAARTALGKQVLNAPLVSSKSPSAGREHGKRETLFLGAVRLAQDHDTVSSNLDLRVGKNELKITTVLGCRSRRDFMYDNDRADDEKTVEASHKKRRIDLEVNPLILTSSTSNHQQQDGGDDQHHEKILKLYRSSSVEELDLELRLGEAPKEQ

SEQ ID NO: 39933 - protein, 225 aa, Oryza sativa
MDDSSFGSEPTTSSSGGEAPASPPSTASSSSDGAGGKKKRPRKDGHHPTYRGVRMRSWGKWVSEIREPRKKSRIWLGTFATAEMAARAHDVAALAIKGRAAHLNFPDLAHELPRPATAAPKDVQAAAALAAAADFPASSANAGASNNPDGSDDASAGSASPPPPPDAADDALFDLPDLLLDLRYGPPSSGLSCASSWEDEVGLISGAGAAAAGVFRLEEPLLWEY

SEQ ID NO: 39934 - protein, 356 aa, Oryza sativa
MPIRSDWSLSREGVTRDTFVNLVKLTAFNPALTLPLFLLARYTQQGSALASEHSAAFKHLKTLLGLGLLNTTSTWLSNGVTNNWTSDKYDWDREVVVVTGGSDGIGKIVVQLLAEKGIKIAVLDVQDLTYEAPPSVRFFKCDLSSPKAIAEAASSIRSTLGNPTVLVNNAGVARGKTILDSTEKDINLTFRVNSMSHYYLVQQFLPHMIKNNHGMVVTVASLAAYLTAPSMVDYASSKAAALAFHEGLAAELVDKYNAPKVRTVAICQGYTRTALFEGFDPKGALYPETVAESIAKAVLSGKSQHIMLPESGWGFVPKARGLPLWMQYGLRKKLGGLMKGWKGRQVEQPSEVEGEK

SEQ ID NO: 39935 - protein, 117 aa, Oryza sativa
MPPTTGGQDGNMELGLRLNLSRVPRRPFCCPLCILFACQDGREADLARCREGAIRHGSSGQRRGLRRSSLASYWFRCRMLLGRSIEEDVSSTLHDHHDLGNSAHRVPGSCVVFCVYP

SEQ ID NO: 39936 - protein, 312 aa, Oryza sativa
MYKQATQRTTEVLSMPPKWLGMYSDFITKNSSAVSQIESALRSLTYIIPGRFRESEIASESLHSGVQLLSLYHDSLLSKAMAQMPGTRKHPLTPHHRYTKFWTQKSPTYKRIALVLQMIQYTELLWEMAAKRKGEKVRWRVIVLLEVVKAVCRLLLLRLTNSRPLLSPPLPQREVDPSSLEDSSASADGMDTPPSERSVEAENWTMPRTGLSMPSLPDSRDISNYLLSKVLTADDIKPPKALLHRVNGKGEFAEALYILRPVIYALAMQHFSGDRKSWRPWLIGVSIEYGARQLAKNDFQERLAGGLRGLTG

SEQ ID NO: 39937 - protein, 339 aa, Oryza sativa
MFAARQAFFQAQRRCFSASARQNSKVTVLGAAGGIGQPLSLLLKLNPRVSKLALYDIRLAPGVAADIGHINTKGEVTGHDATPSGLAEALKGAEIVLIPAGVPRKPGMTRDDLFNTNASIVRDLAKAAADHAPEANILIISNPVNSTVPITAEVFKSKGVYNPKRLFGVTTLDVVRASRFISQLKNTDPASENITVIGGHSGATIVPLLSQSGYNLEGTKLDEYVKRVQFGGDEVVQAKDGAGSATLSMAMAGARFAESLLKAAQGEKNVIEPTFADSPLFKDQGCDYFASNVELGPNGVEKIHPVGKITDYEQKLLDACVSDLSKNIKKGVEWAKANP

SEQ ID NO: 39938 - protein, 392 aa, Oryza sativa
MKGLLSATVASAVTGAFALPSPLEKAARQSAPCSSAVTLSGNPFATRTLYPNKFYSAEVKAAVGKISDSTLAAKAAKVADIGTFLWIDTRDKIKIVEEGIKDVPCNQIAGLVIYDLPGRDCAAKASNGELAVGEINIYKTQYIDPIVAIIKKYPNVAFALVIEPDSLPNLVTNNNLQTCQASASGYREGVAYALKQLNLPNVAMYIDAGHGGWLGWDNNLKPGAQELASVYKNAGSPKAVRGVATNVSGWNSFDQSPGEFANSSDGQYNKAQNEKKYVELFSPQLTAAGMPGQAIVDTGRNGVTGLRKEWGDWCNVNGAGFGVRPTSNTGDSLVDAFVWVKPGGESDGTSDSSAKRYDSFCGKDDAYKPSPEAGSWNQAYFEMLVKNAKPAL

SEQ ID NO: 39939 - protein, 134 aa, Oryza sativa
MALEAQPSPSPSPRRSPEAAAGGAGAAGDPPVTPMHSAAGDEWAAEEKRPPTPPQSSSASPPLMVLVERRPHRQTVSPPAAAEEEAAIPATPAAAAGMGSIPASSSSSASGACAGASACSRTEAGSGSGTESAG

SEQ ID NO: 39940 - protein, 238 aa, Oryza sativa
MHSKIVALVLPALAAALPQSGSAPSPEQITIEGTTYSGNGCPQGSVSTSTSTDKTVITYGFDQFQTYIGPGIAASEKSKNCQLHLNLKYPGGFQYAVVDATYHGWARLDDGVTGSFITTYYFSQDAGKTQTTRSSFTGGGALANGQVYTKQDSVETTATIWSPCGSNGILNINNRISLTSKKSTATGELSNDDATVAFTQQLHVAWRKCTGSGSGSGSGGDNTIGIGTPSSDTTIPSN

SEQ ID NO: 39941 - protein, 260 aa, Oryza sativa
MAPKKKAAPTPAAVKKAAAPKKETNPLFEKRPKNFGLGGQPAPKRDLRRFVKWPKYVRLQRQRRVLSMRLKVPPVLNQFVTRALDKNQAETLFKLLLKYRPEDKKEKAERLKAEADARAAGKEPEKKKPLVVKYGLNHITTLVEAGKAQLVVIAHDVDPIELVVWLPALCKKMGVPYCIVKGKARLGAIVHQKNAAALAVTGVKNEDQREFGKLVESFKSQFNEGARVQWGGGIMGIKSQHKQKQKERILAKELAQRMTV

SEQ ID NO: 39942 - protein, 764 aa, Oryza sativa
MADDSDPPRPADDAVSLHTIADHEIYATQEQEDADFALALSLEEEEQDRAQRVSRLTAEAQEREALIARERGQRGRPNTDGAPAPYRDDPDDGDAIPFSDDDLPPYRDDPEAAIEDTDRRAEVPVKVRWWRRCIGRCADWAGNLKQRPTARLSRPAKIVLGIAVILIFAFPTLYGISLLFEAPEHPRPQPSPSAKELAFEASGSRNGYLVLRELYPDLENGVSKECRAAWEEHASALRCHQGILSSVWDRGDGDLIKKTGMDIWAYGQLVCDEYKTCEKQTHLLEKRIREACTLRSDRFDLDGFQSRELKYFEDSEVESSPRQVAQNLKARYESLCDRPANRPYKWNQIILGTYPAQLWKIWGIADGKDAAKHLRYLDTFLDATSEAKTINRTKLNVWAQVEGKTLREDSHMPERRVGPGKGETTCYRSIVSWLDRKMSSFEYGAVMDPKAGIPLSLTKFNEKMENALRRCEEPEALQVVERVHEMWKEYGWCSSRSQCREEFISENIVRLLHGLKVNEYPLPQIREVAKRPSTKPITKQALRAMYDSLLQTPCSIWVSPQEILSGIIPSDYRIHKYCSNECRNDVVDRMRQKTAAIFDKLSHDDEGSELIWDWQRALKAQNMTCKGPEYNEIVTETTVFCAPGYAAIERPAWLLFPKSVPSKKFILKTFAPHVDALATSMPEYMRRPEEDQETQRRLARRMSESVCNKCLRPLLLGGKKDQDSGLDEVEYKRVKALYSMTCAKMEVGSTLAKEPQVRRRLGLQ

SEQ ID NO: 39943 - protein, 786 aa, Oryza sativa
MAQITTGTFGFPRIGARREMKTALEKYWANSMSQNDLMQVYQQVTAADWELQAKANIARIGIDGTLYDQMLDMTFTLGLTPVRFANFNGLEAYFAMARGASGVGALDMSKFFDTNYHYLVPELEGGFSCKSPNFAQLLDKVARAQALLGKKRAIPMLIGPVTYVLLSKRDLALEHAVERLLPCYAQLLRKLQLLGCPEVQLHEPCLATDAGAAARSVYEFAYAQLAAVGCPIDLVTYYDDLGAAYPWAVKLPVAAVSLDFCGVPGSAAGNATLELIRQHGFPSDKRLGAGLIDARSVWADDLPAAAAVLHELTTSLGITNVSVQPSTTLQHLPYTTAAEEGHLPADLLPKLAFAVQKLEALAALASGAVTPASPAAAQAWGQPPDGAAAAKSGTLPGVDDALLARSESYEVRRPKQPQFHAYPTSTIGSFPQTAEVRRLRTLLRTGKLSRTEYERQVDQQIAFAVGVQEAVGLDVLVHGEPERTDMVEYFGVQLGGLAFTLQGWVQSYGSRYVRPPIITGDVAFLQPMTVREFIVAQQLTAKPVKGMLTGPVTILNWSFPRKDISRAAQAAQLGLALRQEVEALQTAGCKIIQVDEPALREGLPLKVERWAGYLGWAVDAFRLSTSIAKPSVQIVTHLCYSDFEDIMEPVDAMDADVLTIENSRSSDAMVSALAAANYGRDLGPGVYDVHSPQVPDVDWLVEKLQGFVDSGVLKGRPEHIWVNPDCGLKTRRWSEVIPSLRNMVQAAAIMRDRLAAPAAAPADTANGSKAAASAPRGGCTAGGCCH

SEQ ID NO: 39944 - protein, 847 aa, Oryza sativa
MNTSGSAYTTLESLLLFQCLRAYGVGHSVFGRISDILKKNPDIVGHKGYHSGRLSPDALRNFYLERLRREIDHEHSDANEDTNGDGANPRKRKKATPPLPGVQESLQHSHLIPKLVNKLYASYRHEVTEQIRAEEERYDRLQRELQSIERGEWDDTLKERAKSKTAASRSPSQAKKSPRLQQNESQPADGPQPASNGTRSQSGSDSTPDGALQAEGPAAPVSQNGHTATSPRKKRVALEQRPTTTPQPLAASASPQPNLAQPLAPPPPRFQQSPHPPYNGQPYPNQHYPQGPQPHHAQSPTVGHGPQLQPQPVPYNNNNGPPQYGHPGAPAPYSPSPGQQRYQQYPPGPQSPSVHVPYQQQRPPYQHPSQPQPPTHAPQYAPPPPQAGFMLPPFQVSPQDPARVHPQSNATPHHSQVSTPVSNRHNQGARSNVNTPGTGRPGVPPMHPLVTQARQSFSTPLNSRSPHSAIGTPTSAKSMWKKSISHAGTPAASPRPIPEPIDDFVPLVTPKHSPSKPKSQRKSRAKGKGKEKEPDQTPAEDPVPDPVPASEPHAEETIEHETRSGRSRRRAPPKRNRPGSIASSRAGGSVRDRSRSHSILSHTETVAADNESQAGHRIKSERATSVDAIEEDSVETPSQMTTRRRGTASRRKRNAREASLDEGDDHLSTPGPPRTIIAPRYFARSCSNIMQDIQSHKHASTFSSAVRPKDAEGYYDIIKRPTDLKSIQKAIAFGAKQVASAASDTPAGSPGGGGGIVELPMISENMPPKSIVNAAQFEKELMRMFVNAVMFNPGEEGVVEDAREMFETVQGSVSSWRNVEGPGGRTEVEDTPTIEEGEAPLGKRRKV

SEQ ID NO: 39945 - protein, 1273 aa, Oryza sativa
MDDYPAFSLDHNIPCIILFGLSPPSTPQPALPADVKDQGVLLRSEAPYVESKHGAALLEYITGRDASKLPWNAAPGARGYRFRVKTCGGTFMLPPRRARLPEHIDASEPRGALHSPFSPLSPSCRLYPDGIIDSRWLEKQQELVPSIFLCFYHLASDPTLATLHDNKIKIDISSMRNALLQQGYKSKIIVVILSDLRTASLDGTRDRLDNIRKGCALDSKCFFFMPSAYSPEEFKKQTDNLLVTVYGHAVEHYRDLGRRARKKKGRGVVPQPTVPPTSGTSQTLSLPGWNVRYDFKSAVFAEFRQEMDQALRSFDQAYDTLTGADVLDIIPSWSPRWNEARQLADIISIRCLRCLLWVGQTSAAVRRWQAHRDRISDLIDRRGRGTESYGWAAWEARWAIIMAELIEKAQITDLSPTSSNLFLQPEKASLGNRLQPWEFLHHPGYWYKAASQHLYARRAFALKMPEEDRERPGNSPAARVASKAFTYDTYMCPEPHEEYPLPSAGNGVNHSQLIAQCLDAARVEFQRRGQTRLCADVTLQLAKEFSSAHKWQSAADFLKPMWLDMSFRADGWTDISQELAWLLRSAAREIHDAELLISIEWELLNRKYQQRPKWEYDLSRALDGVSTKEKPAVDIIDESSLPLISSSFVFRSEEGNAGRTSKGQLSITSNAQPSSAALVFSGIQITFDGSIKTIQLKHDSAQAEKRQYGRATVSSLGLREQVPEARRGDDPDKEKAAPAAVSVLVGSCDLTLPPGQTVVYEMDVPLREPGDAKALAATLSMDNDAFSLECEVLYKETSIAGTWYTPGNPRRVPRPNSHSIRILPRPPNVEIKLKNALEQYYANEAIGLELDIVNAEDASAELRLNVVITGEEPPDFRLAAGNDEKSSVAQLDAAGEYKEMTIPLGTVAAAGTVRATIHLDPVDFPSSYDVTFMASYHLVTDPATPIIQTEDFKLVLVNPFEANYDLLPRLHPDPWPSVFDHEGVQSLFVEDGTYIQPRGLFQAWCLVTRYASFASEDLVVLDVDVSITPTTGVQTRTSGKQTLPEGGHTVKPKTIEEAQFDITAQKFSLDERDPVNLDVSFVINWRRASDDKSRVNKTTLPVPRLDIFGPEPRVLASVSYDSAGGDQTQLGLAHLHITIENPSSHFLTFGTNMEPNDEFAFSGSKMSTVHLLPYSRRVVTYSILPLVWGTWVRPNLTVRDKYFQKILRVIPTEGMKLDKEGFLIWIPPLEEDEEESGDDGDDDEEEGDEDDDEEGDDDDDDDDKDDEDEDKEA

SEQ ID NO: 39946 - protein, 320 aa, Oryza sativa
MKSPLLRLKGFGHHQQHRERKSRQPQPQPTPAKLDELADAAQDVEEMRNCYDGFISAAAATTNGVYEFAEALEELGSCLLAKPVLNDDDDDSGRVLMMLGKAQYELQKSADRYRTNIIHTITTPSESLLKELQTLEEMKQQCDMKRDAYETMRASYSDKGGSRHSKTESFSTEQLDASFLEYQEDSALFTFRLKSLKQGQFQSLLTQAARHHAAQLSFFRKGLKCLEALEPRVKAISEKHHIDYNFSGLEDDGSDNDGYSTYDSCSDDGELSFDYEINDRDQDFLTSRGSMDVSSIYIWLLSFNLFVCLTAEAMDVKHFH

SEQ ID NO: 39947 - protein, 262 aa, Oryza sativa
MASIQLNFTLRTSSNCKTVHLLGSWDGYQGQLPLSKDPKKSGGWNGCFKFNGATLQQGQRYWYYYIIDGYHVSHDPAKDHTTEPTTGRKLNIIDIPAAKSSSKSSSSDRKSRRVSTASIPKGRGVSPERIVAPKPQRPGQTRQVINTQYDKTTLEELNRRFAKQSMEESSDEEDDDSEYDSGSDVPSLTSRSTNSSSPSSISSGSSCCTCERFGITRSGDRVKLDCGGARCGYSDDSSDCSSEDEYVYEEKTTRRQGVVIRS

SEQ ID NO: 39948 - protein, 315 aa, Oryza sativa
MGTLVGHVAPGAGFLLVGLWHLYNHIRLFLLRPTAYVAPVWFPVRRARYLELALVIAGAVASILMELVVGPARHQPFDADGTVPSDHLHNFEHASISLALLVYAAAAAALDVARVPHGRAVSQLVAAVAFAQQLMLFHLHSADHAGVEGQYHLLLQGVVAVTLAATVLGVAAPRSFAVSLVRSASLVLQGVWFLAMGVMMWTPALLPKGCFLSREDGHDVARCRADDGGDALARAKALVNLEFSWYLSGTVVLVVALYLRLCRLYPEEPRYMPLVRGDCRDDDEDGGGDGDDNDVEAGKGGAGHVLREPLEIARP

SEQ ID NO: 39949 - protein, 507 aa, Oryza sativa
MAIESAPARNERRGQHVVLLASPGAGHLLPVAELARRIVEYDGFTATIVTHTNFSSAEHSSTFSSLPPSISIAALPEVSVDDLPADARVETRILTVVRRALPHLRDLLRSLLDSPAGVAVFLSDLLSPRALAVAAELGIPRYVFCTSNLMCLTSFLHNPVLDRTTTCEFRDLPGPVLLPGCVPLHGSDLVDPVQDRANPVYRLVIEMGLDYLRADGFLVNTFDAMEHDTAVAFKELSDKGVYPPAYAVGPFVRSPSGKAANDACIRWLDDQPDGSVLYVCLGSGGTLSTEQTAEVAAGLEASGQRFLWVVRYPSDKDKTASYFSVSGDGDGEDSPTNYLPEGFLERTKGTGLAVPMWAPQVEILNHRAVGGFVSHCGWNSTLETVAAGVPMVAWPLYAEQRMNAVMLSSSRAGLALRPSNAREDGVVTRDEVAAVARELITGEKGAAARRKARELREAAAKATRAPGGPSRQAFEAVVGGAWKKAAAAARGGRAGEPDDNGTAVTAQ

SEQ ID NO: 39950 - protein, 59 aa, Oryza sativa
MAMPWELAEYLMAVTWVALGRWVAACVSLADGIACSLRCRRRRRRPSPASSTVVVSTFL

SEQ ID NO: 39951 - protein, 282 aa, Oryza sativa
MSPWRPGTPPRRAKHRLPPPPTTPISRGPRSMAVSGVGAGAARGLLFTSPSTAPAPPAPALSAPRSCHLRCAGQGREGCHQEQGSRWEAAVAVVQLLVLHRHRRRAPAVQQQRRGGRRGGGDEVVDALLLPQHLLRLHLRFLQQHRRRVKAPPQEPTSPRASPRAAERRQCRRREAARRQQGRREESRRQARRRRRRRGRGGQHGGGEAVAQPVRRLPELDGGDGGGAAHLWRRRHGRPPDVVPVAQLKAPPPGHPRRLRGRLGSRLRHALIDRSIDRSPSL

SEQ ID NO: 39952 - protein, 164 aa, Oryza sativa
MAWQSLMPPTQLPVMPFPPGTMAYAGSSSGLVGAPTNTICAIGFISANSGATGCHADTVLRIPSMVPAAAAIWPASRLTRNSSAPRCSSASRRFPGDVLMTVTRIPNALTNLTATWPSPPRPTTPTCFPGAFSPWITIGLYTVTPAHSSGAAPSSGSPAGTRST

SEQ ID NO: 39953 - protein, 168 aa, Oryza sativa
MMFLGELEEVLELTDMAEFQKCMVPLFRRIASCLNSSHFQVAERALFLWNNEHLFDMISQNRQVILPIIYPALERNTRWHWNQSVLNVTLNVKKMFLDMDERLLLACQNNFQAEEEKRAATEERRRLMWEQLERNAAAACHPHPVITTTDSSFPSPPSSTPLVAPTVT

SEQ ID NO: 39954 - protein, 185 aa, Oryza sativa
MDAPRRRSNGAWEINLVRRSPATARTDRCSRLLLLWSGFVGVVVVLYLFVGHVWASVATAVLLAAAGWFTWYYFGAAPAPPVLPDHHQPAAPVEARGLSQEDIEAIPAFEYRRGSSGSGVAQCAVCIAAVKDGDTVRRLPACGHAFHAPCVDGWLRDHATCPMCRADVVKVAGETTPATEEEPPV

SEQ ID NO: 39955 - protein, 272 aa, Oryza sativa
MSHNHGDTIPLHPSSAQSDMDEIESLIYAAPSATVLPARPPSPPRASIPVSTSPAPLPAPAKPSLPGASVPIIVPQAPPASVSVPIASDGFGPPPNTLTEPVWDTVKCDLARIVSNLKLVVFPNPYREDPGKALRDWDLWGPFFFIVFLGLTLSWSASVKKSEVFAVAFAVLAAGAIILTLNVLLLGGHIIFFQSLSLLGYCLFPLDVGALVCMLKDNVILKIIVVTVTLAWSSWAAYPFMSAAVNPRGKAQALYPVFLMYISVGFLIIAID

SEQ ID NO: 39956 - protein, 238 aa, Oryza sativa
MDRTSAVPGRVSDPGSAWFGGGERSSSAGPGRNVRLIATAVAAFVSVLGLALFLHLYVCHVRRRNRRRAAEAAALATVNAGAPPKQVGLDPSAIAALPTAAYGKVAGGDAAGGTTECAICLGAMQEADAVRVLPACRHVFHVACIDKWLASSSSCPVCRAGVEPPPPPPSTAAARCVHEKQDAEKEEAAAGSSAPVRVLGASLMKMLSRERPSPRRQPGVHAVEMEDLESQLPRPQQQ

SEQ ID NO: 39957 - protein, 287 aa, Oryza sativa
MKLSLLVLACAVALVVAQPAPTNGPTNEQPVAWNYAKGGADWPGLCSTGKAQSPININTSATTCVRAGEPDAKPFRLDFHYKPAEGLTLSNNGHSLQVKGDLGFITIGGCNPCDGQKYHVKQVNFHAPSEHTINTEPYKDGHYVMETHIIHQKEGSSGLNDLATVVILWYKQQPGGFPNPFLESIDWANAPADTTRHTTIQNKVRLGKLKEAFDGEYYSYLGSLPVPPCTESVQYFVMKRPLGITEKQLDTVQALFQKNPNFANGHGNHRDVQPVNDRKVWYYRKHH

SEQ ID NO: 39958 - protein, 612 aa, Oryza sativa
MLRMDGTDLSSPRCNVQHLQNAEELKDQNSTNKRLPRTTELPCSLIQEVQHLEKRLNDQFAMRRALEKALGYKPCAIHSSNESCIPKPTEELIKEIAVLELEVICLEQHLLALYRKAFDQQICSVSSSCDMEINKQSARSFSGILTGSSELDFSTPRKHQLLQSSGMVMARKSTPTTLTSETRTSHYNDKTGIGRSHSSLLQRSICSARVSPSANNLARALKPCHTLPLSFVEEGKCMDPGIVSLADILGTRIADHVPQTPNKITEDMIKCIASIYIRIRDFNAVQHPFFPSPCSSFSSASGLSSKYTGDIWSPRCRKEGYIEAWQDDASGTGESRYFSQQYDSVIEVSALCKGAQRSADVKDMLHKYKSLVQLLESADLNGMKNEEKIAFWINVHNAMMMHAHIEYGIPQSNSKRILLTKLSYLISGQRVNPELIEYHILCCRVHSPTQWLRLLLYPKWKSKEKEDLQGFAVDRPEPLVHFALSSGSHSDPVVRLYRPERLLQQLEAARDEFVRANVGVRGGRRGRGRRVLLLLPKLLEPYSRDAGLGAHDLLRAVESCLPEPLRPAAQQAARSRGGGGGVEWRPHNPAFRYLLARELVGPPAPTAHLSST

SEQ ID NO: 39959 - protein, 391 aa, Oryza sativa
MRTSALALVVAPAVVLGQGNLYDQCGGIGWGGATSCSSGVCTKVNDYYSQCLPGSAPPATTLRTTTTASTPAPTGGSGGGSGGGSGAAGGLHEKFKAKGKIYFGTEMDQYHLNNNPLTTIVKNSFGQITHENSLKWDATEPQRGTFTFTNADAVVNFATQNGKLLRGHTLLWHSQLPSWVTQINDRNTLTTVIQNHVTALVTRYKGKILQWDVVNEIFAEDGNLRDSVFSRVLGEDFVGIAFKAARAADPDAKLYINDYNLDSATYSKVTNGMVAHVNKWISQGIPIDGIGSQAHLAAPGGWNPASGVPNALKALAAANVKEVAITELDIAGASANDYLTVMNACLAVSKCVGITVWGVSDKDSWRKSDNPLLFDSNYQPKQAYNTLVGAL

SEQ ID NO: 39960 - protein, 187 aa, Oryza sativa
MSSSTDAPVSPRSQFALACFEELLETAVVDVASECHRIARLGLDRGVDAEEEELRAWAARDHPGAEEGGGAVGGGGGNKGVVDVFGQVLPAVAADLVDCMNCGRPVAAGRFAPHLEKCMGKGRKARTKTTRSSTAGRTRNNNGSAASSYSPYSSPAIANRASLPNGVTDGSASVTGEDHSNHILPEP

SEQ ID NO: 39961 - protein, 96 aa, Oryza sativa
MGGRGKKKSVLASLFGFKSGGERRRQQQQEEMATAAAAGRKQQQRSYYCPERRRRVWPSDEDNDNYYAERDIDRRASEFIDKVHRGMLIAGGEQDG

SEQ ID NO: 39962 - protein, 549 aa, Oryza sativa
MFSRAIRQSSRRVAAISASGRIASTRAPAFANAARTYASEAKATPTEVSSILEQRIRGVQEENSLAETGRVLSVGDGIARVHGMNNVQAEELVEFASGVKGMCMNLEAGQVGVVLFSSDRLVKEGETVKRTGEIVDVPVGEAMLGRVVDALGNPIDGKGPIKTTERRRAQLKAPGILPRRSVNQPVQTGLKSVDAMVPIGRGQRELIIGDRQTGKTAVALDAMLNQGRWNKGSDETKKLYCIYVAVGQKRSTVAQLVKTLEENDAMKYSIIVAATASEAAPLQYIAPFTGCSLGEWFRDNGKHALIVYDDLTKQAVAYRQMSLLLRRPPGREAYPGDVFYLHSRLLERAAKMNDKHGGGSLTALPVIETQGGDVSAYIPTNVISITDGQIFLEAELFYKGIRPAINVGLSVSRVGSAAQVKAMKQVAGSSKLFLAQYREVAAFAQFGSDLDAATKQTLNRGERLTELLKQKQYSPMAVNEMVPLIYAGVNGLLDSVPVNKILQWESDFLAHLKSNEQELLDQIEREGALSKDLESKLKEVATSFTKSFS

SEQ ID NO: 39963 - protein, 242 aa, Oryza sativa
MENFPILFATQPTSSSTSSSYHFMSSSSGSHDHRHHHGLQAGGNGGGGGGSLSHGLFMGSSSSSIRMEELSNSKQAGDVVVDGGATRSPHGGDGDGAAGDDGGDAQAAAAGGRKKGEKKERRPRFAFQTRSQVDILDDGYRWRKYGQKAVKNNKFPRSYYRCTHQGCNVKKQVQRLSRDETVVVTTYEGTHTHPIEKSNDNFEHILTQMHIYSGLTPSSAAHASSSSPLFPSAAAAASHMFQ

SEQ ID NO: 39964 - protein, 119 aa, Oryza sativa
MSVLLRKTSKNWCVLHVHVCLSRAAKQAGSVTLSGRLLQCRACCMQFLCACMRLAAAAAGRGVHDDRRFSRACRNGSRVLGSSAPWDINRQCTASCVVRAKQQSSAAAWTRHGANSGSV

SEQ ID NO: 39965 - protein, 298 aa, Oryza sativa
MMAQAPMSTGGGAMELGGGGHESVERRRRHQHHFVLVHGLCHGAWCWYKAAAALRRAGHRATALDMAASGAHPARVDEVRTFEDYSRPLLDALAALPPAGGDGDDEERVVLVGHSQGGFSVALAAERFPERVAAVVFLTAAMPPVGRPMSATTVEHVNYVGVEFFLDSMELEQQNADIPGNPVIFGPNFMAQILYHLSPQEDLTLGLSLIRPTNKFTGDALMRDPGLLTKERYGSTRRVFVVVEDDRGIPVEFQRRMIAENPGVEVVDFAGADHMAMISSPAKLAELLVRIADKAHEP

SEQ ID NO: 39966 - protein, 202 aa, Oryza sativa
MSFAGLSFWFWRIFQIITLIPTLGMLAYFVDFYNTRGWLTPRSILILFIVSVLAAVWAVGTLFLYAKAKHSAKFVAFIDLLFVGALIGAVYELRGIADADCSDWRRNGSYSQDLGLFTISGNTWGLDVNKECAMLKASWAFGIMNIIFFFITSILALLVAHHHRHDRDRVVKREVHRSRHGHRSRSPRYSTSRHSHSRRSYV

SEQ ID NO: 39967 - protein, 87 aa, Oryza sativa
MFLARTLHVAVFWLCCVVTCRALLERRVLHQPGTARMLCCVCVCVCVCVCVCVCVCVCVCVCVRACVRACVRACVRACVRACVRACV

SEQ ID NO: 39968 - protein, 477 aa, Oryza sativa
MSLCQNVDAGASSPLSFSLSATESPQAVSTPDTQKSVLFDEDVAADPLDIGGNAPSSFIMVVGGLGYIGSHTVLELLKANYNVLVIDDLSNSYESVLTRIQTLANEHFATINKPVPALHFQQLDYRSPLMRSILTSYSSYRVCGKPEAAPAVRFPYSALQRTDSGIDLQPEDTPEPTITRESRISGVIHFAAYKSVEESIRMPLKYYMNNVCGMVEFLGLLEEFGIKNFVFSSSATVYGEGANCGVPLREELCVHHAETFCDENGVERQVIPGVMGLTSPYGRSKLMCESILADIAKSDPSWSITALRYFNPVGCHESGLLGEDPRQKPSNLIPVIATVLTGTKLVLDIFGTDWSTPDGTAVRDFIHVVDLAQGHIAALAASTAGRVKAPFRAYNLGTGRGHTVREVHESLQATSGRTIPVREVGRRAGDVGFCVAEVRRAESELAWKAKKTLADCSVDVWNFTKGRCPGSDEMDCQ

SEQ ID NO: 39969 - protein, 247 aa, Oryza sativa
MFSKTSIAALFAGLAAAQHAPVGEPSGNPITAPLTQIVPACKEFTITWQPTTPNPVSLVLLRGPAENIKPLSTIVTGITNSGSYKWTPSSGLEADTTHYGLQLIDDVTGQYQYSNQFGISKGAECNGVAPSSAVSTPYGGGYPVSTPAVSSKASSSAGYPVSTPVVKPSTTIITKPSAVSSTGYPVANSTVIQPSKPLSVPSSLLSSPTASGSPTKSSGLPESTGAASSLQAGFSAAGDLALFALVL

SEQ ID NO: 39970 - protein, 344 aa, Oryza sativa
MELLRDSIPMVSLASSAAALYARVASAFLRPGLPRLAALLPVVALLAAAPLAFTSSAMLRGTSAFFLAWLGAFKVVLLASGLGPLAVDGLPVLSFLFTALLPVKLRRGGGCPGAAAKSVSLVSCAAKVAAIATILHLYESKIQLLHRYIRLAMYGIHIYCFLDLLLPCIAAAGSALGMELEPPFDRPYLASSLRDFWGRRWNLMVSAILRPSVYDPVRARAGKAAGVVATFLISGLMHEAMVYYMTLRLPTGEMTAFFLLHGVCCVAEEWCARRWVARRWPPPPRPLGSLLVMAVAAGSSFWLFFPPICREGSEEMLLEEWAAVAAFFQDAGRKLRRAPVRFTD

SEQ ID NO: 39971 - protein, 263 aa, Oryza sativa
MATAQGQISKRRKFVADGVFYAELNEFFQRELAEEGYSGVEVRVTPTVTDIIIRATHTQDVLGEQGRRIRELTSLIQKRFKFPENSVSLYAAKVQNRGLSAVAQCESLRYKLLNGLAVRRACYGVLRFIMESGAKGCEVVVSGKLRAARAKSMKFTDGFMIHSGQPAKDFIDEATRHVLLRQGVLGIKVKIMRGADPEGKAGPAKSLPDSVTVIEPKEEQPVVQPMSQDYGAKALAAQQAAEQQRQAEQGQGEGEAEAAPAEE

SEQ ID NO: 39972 - protein, 388 aa, Oryza sativa
MQKLVNYFTTEAPLETSNISEKENSFTFKVDDVKPNKMNTHQTYSPSAVLRERVDKKNFLRIDDFSHKKDIKTRIIMSNRNGLMSAAHFAYVNHYPLKISVSDFILMIGQGIATHLEIHAEDVRPFFVNHEGKEQIVIQRPGFRTEGGNDWSTVFGEFAEGVQKRVKMDFYDIMIDDTSVATKLSRISSEIAIMDTFKHYFEYVVMMGCAMTEITLVGSKDDWEKLRSKVNKLKEFNVDDRLQLDWWLDRLVPLVDKIVDQAVSRKIDRSFWSKIYQSQDKKGFYEPTPLINGWLSVFNPYVLKSESRQKTPARSNFGKIHPDELMNGVSKAPVTLEHMLTKKKYPMTVYGGFLGAKFNDDGTIGTEYFYAATFDDCPENKDIKGIKI

SEQ ID NO: 39973 - protein, 349 aa, Oryza sativa
MDRLTISGPALAALLSVFTKSNGPCDGLLFGSVCSTTTTQKQDDSDALLVEEHEGRIAATCACTGTHTLYTNSGAIAGDRLQQLVESITDSSSGSSSSKGGDSSAAPLQLLGWFSYRPGAPCTPSMREAALSQHLQNWVCTQSSSSSSRSTNAVRTPVVFGLVTTQPDHNAATICVQHRFFKVKDRSSAGPGKGGSSHAQISSSSSSTQHASGRPQAPEHPLLQPLGLQVHNLGASHAAAAGRSSSQWGAAALPALAAALQPPAGAAAGLLSEQQRQHVLSAAAGLSGGVMAAVDAVYGSLLDELQVAAAQVAARQSRLDMLRSRHVALQQQVLAGRLGVSVELPNSEQ

SEQ ID NO: 39974 - protein, 364 aa, Oryza sativa
MKVTSAILAAACATAALAEGSVKPRALLTIEVAPGVTRQITEEDRYELGKQGGCGSHFFDITDFNSEVRAVKEQPAYPKKFKYGENIKRLIPQLNWENIKKNLEHYSSYHTRFSETETGAEAAEWLFSQVADVVKKSAKNGVTAEMVPHAAFPQKSVKVVVPGRSNRTIIIGGHLDSINSADRLNGRAPGVDDNGSGSFVILEALRVLLSDKDFGPSKLQNTIEFHWYAAEEGGLRGSQDIFTQYAAAERDVWAMLQQDMVGYTKATLDAGKPESFGLITDFTDAPLNEYLSRVINEYTDITYVESQCGYACSDHGSATRNGFPAAFVFEAAFEYRNPHIHTVNDTMEHIDSKHVLQHGQLILG

SEQ ID NO: 39975 - protein, 302 aa, Oryza sativa
MKMPGRLLAAGAAALLVAASVMVATLLTAPLPFLPSLMPCLPAVTAPSGSGYSPPGLAALADAAVRYATTPTVPQQSRAEISLSLAVLRRRAPLRLLVFGLGHDSPLWHALNPGGATVFLEEDPSWYSVVRGQSPFLRGHLVAYRTRLDHADRLLATYKDHPSCLPGGGGNGGGDVPRVRGNAECPLALHNLPAEVYEKEWDMVMIDAPKGYFASAPGRMAAVWTAAAMARGRRGEGDTDVFLHDVDRRVEKAYAEEFLCERFRVGATGRLWHFRIPPASRRGNGTAAAGGAGAGDGRRPFC

SEQ ID NO: 39976 - protein, 228 aa, Oryza sativa
MAASEQSSESSSTASTSSCGKKQQVAGKRKREDVGGGGEQAAAVAYRGVRMRAWGKWVSEIREPRKKSRIWLGTFPCPEMAARAHDVAALSIKGARAVLNFPDLAPALPRPASLAPRDVQAAAALAAVMHHHKHPSSSTSTSSPPAAPPPDEHHPRHEPQQPESSREDDQQQQPAAAAAAQMAVAELVFDELAPLWVEDVVEFGTSDHCWTAYDALDPIGFQPLLWEY

SEQ ID NO: 39977 - protein, 631 aa, Oryza sativa
MCEGGRAAASMARTASASRRQPETTSLAVDEAGGRASRRPRGWKAVGFMIGLYLAIAMALNAFAQPVTNYLIKRYNMKPNAATNVANVFSGTYSFSPVVGAFVADAFCGRFWTLLFGAVAAFVAMVVITLSATIRQLKPPSCSDVARQAGTCAGPSGLHRAVLYIGMALLVVATGGANPTSLPFGADQFDHDDASSGSSSNEADERRRRAEEPAGLKRFYNWYYVVTMMASFMALTFIAYIQDKVSWGLGFGIPTALVAATFAVFLAGTPLYVRVPAEGSIFSSVARVVVASCRKRRLTLPHPRDARQQEAVLYNPPVVVAAGTGTSRVFKLPLTLQLSFLNKAAIVTADADEIRPDGSPARPWSLCSVQQVEEVKCLVKIVPVWISGVMWFISVAELTNYTFLQALTMDLHMGRSFTIPPVSIAAIFNLAIVLFVPVYDLLVARAAQRVTGVEGGITVLQRQGVGVAISGLALVVAAVVERRRRASALDNGGTSPMSVFVLAPQLAVMGVSAAFNMIGQMEFYNTEFPDQMRTLANAAFYCAQGASSYLATAVVNVVNARTRRRGGGQGWVAEDINAGKLDHFYYAMAVFAAINFVYFLVCSYFYRYKGEPEVAAEDSPPATPEAVLLKH

SEQ ID NO: 39978 - protein, 70 aa, Oryza sativa
MSGTPSGSVANQTSTIHSSVATGASLKPNGTLATPTNSKPGQPQFTGAASVLNVNAYVAALVAGVGYLVL

SEQ ID NO: 39979 - protein, 187 aa, Oryza sativa
MQAVPTSEPEFDLAEKPRVHGDVPVATAVGPQVIYICDGSVQQARRPDPWHTGLFDCCLDPASAAEAVFCQFCQLSRQYNVVTTGENLIHWPVCLTTFAADAVASMVVGMRLGTLALSFITRQRIRQRYNIMGDDLTDLLAAGCCTCCSIAHSYRELSVRGEWSNGNCFIKEPFVLPANTAVMGVSE

SEQ ID NO: 39980 - protein, 262 aa, Oryza sativa
MATAATTTTGGDVQIPIGQQATVAATATATSDGIRDSPGTSSPFRGGGGSTTPTPQRPVKAGSSSSPPPPPTTAMDKTLSSVANLAKLLPTGTVLAFQSLSPSFTNRGACLTSNRYLTAALLYLCVLSCIFFSFTDSFVGGDGKLYYGVATAKGFLVFNYDAGSSSDGDDDDQRRRREVFKDLRRLRIRWVDYVHAVFTALVFMTVAFSSTAVQSCYFPEAGDNVKQLLTNLPLGAGFLSTTVFLVFPTTRKGIGYGGQSTN

SEQ ID NO: 39981 - protein, 416 aa, Oryza sativa
MQLQANRSLRASSARAPHAARINLRAGVRAAPVANAAAVDTKVDWSALAKELDPKSPLEIMDNALKTFGTDIAIAFSGAEDVALVEYAHLTGRPYRVFSLDTGRLNPETYQLFDAVEKHYGIHIEYTFPDAQETMELVRTKGMFSFYEDGHQECCRVRKVKPLRRQLKTLKAWITGQREDQSPGTRMAVPVVEVDPVFEGVEGGPGSLIKYNPLSNMSSAEVWSFLRVMGVPTNKLHACGYVSIGCEPCTRPVLPNQHEREGRWWWEDATAKECGLHSGNVKKADGTTEERKAERDLWIDGSAIETLDRAAAEKLAGGARDKDTLAVLYAPWCPFCQALEPNYEALAADLAGSHVRVAKFNADGDNKEWAKANLGLTTYPTIVMLPKAKSGFVKYPSERRDVETLGMWVKTMAGSA

SEQ ID NO: 39982 - protein, 670 aa, Oryza sativa
MTSTAAMPATSAAPATAAPVESSNASNAGSTAAANAAANAAASASLYVGELHPDVTEAMLYEIFSQIGPVSSIRVCRDAITRRSLGYAYVNFHSPADCERAIESLNYALIKGQPCRLMWSQRDPALRRSGVGNIFIKNLDKTIDNKALHDTFSAFGNILSCKVVTDDQGASRGFGFVHYETREAADLAIDKVNGMLLNGIKVFVGHHISRKERISHLEELKAQFTNVFIKNLDEAVTDEELQALFEPFGEIQSAILQRDESGKSRGFGFINFVEHEDAQKAVEALNDVEVNGKRIFVGRAQKKSERTEELRRQFEALKLERMSKFHGVNLYVKNLDEMVTEDQLRMEFTPFGSISSLRVMVDEKGVSRGFGFVCFSAPEEAARAISEMNGRMVNGKPLYVALAQRRDERRAQLEAQFAQRTQQMRMQAMAAAASAGMPMGMGIGIYQQGPLFYPQGPSAGRFVGPAGSYGMNRPAPMGYQTNPGMNGPMGAYASGAGQSGMMATGPSSMHMRPNRPMRGGYHHARGNGPMNGGNSSFVPPQTGFRRPYNGNGNGNGNSNGPRYGGPSARGPRPEYGAFGPGAPLTAAALAAAPPEQQKRILGERLYPLVAMRDAEHASKITGMLLEMDNGELLHLLESPDALASKIGEAQEVLRQHQQSQQPAADAASKN

SEQ ID NO: 39983 - protein, 190 aa, Oryza sativa
MVSSMNKTPSQEEIASTLSHLKLSTKAPQKPAHPPKSKPVADSWDDESSGSDTETDEPALPTSKSSPHDSLDPISTVTSNEIPPNPPPPTPASPTPFDFPDNSNGVPYGGAVRGGGRTANMDKRPEKTTAVAGRLIAGALGVRAPKRTEEEREYDKAMREKERKRRAEDKERERREAEETAARKKAIWDD

SEQ ID NO: 39984 - protein, 179 aa, Oryza sativa
MAVVQMLSWLSSGAAWFVFLNVIVGAIAVVSWLGQGVGGTTSTPSSAARRRLAPRSSPVAAATAAAIKNEEEEAEAEEEEESISLDEAYALAQQAQARSPRSAPDAAAAAKAADAKPRRARAEEVEEGKAEVNARAERFIKQFREDLKLQRINSIINYTNALRRRGAGGVAATAPAPAR

SEQ ID NO: 39985 - protein, 329 aa, Oryza sativa
MSPPAATFENPLAVSDITVPVQKNLAVKAPTNGHAKTLAEMENKWESFTFSPIRESQVSRAMTRRYFTDLDTYAESDIVIVGAGSCGLSTAYELAKKRPDLKIAIIEASVSPGGGAWLGGQLFSAMVMRKPADAFLNDLGVPYEDEGDYVVVKHAALFTSTLLSKVLSFPNVKLFNATAVEDLITRPAPTAENPAAVRIAGVVTNWTLVSMHHDDQSCMDPNTINAPLVISTTGHDGPFGAFSVKRLVSMQQLEKLGGMRGLDMRTAEDAIVKRTREVVKGLIVGGMELSEVDGANRMGPTFGAMALSGVKAAEEALRVIDERKAENVD

SEQ ID NO: 39986 - protein, 216 aa, Oryza sativa
MSKVSSDVLKEGIAGIMEGACAKPRKFTETIELQIGLKNYDPQKDKRFSGTVKLPYIPRPKMKVCVLGDVKHCEQAQSIGIDSRSVEDLKKLNKNKKLVKKLAKSYHAFLASEAVIKQIPRLLGPGLNKAGKFPSPISGGKTVEDCVNETKASIKFQLKKVLCMGVAVANIDMEEAQIRTNIMYAINFLVSLLKKNWQNVKCLYIKSSMGKPFRLY

SEQ ID NO: 39987 - protein, 424 aa, Oryza sativa
MLTAAEVLGITSSASKAEIKKAYHKAALAHHPDKVAEDERVEAEVRFKAAKQAYEILNDDDKRHLYDTHGMAAFDPSNGMGGGAGPDMDDIFAQMFGGMGGMGGMGGGFGGMGGGRNVPRKGRSVEQEYEVTLEELYKGKTTKFSNTKNTVCSNCKGSGGKQGAKSNPCGSCSGRGMKAVLRQVGPGLVTQETVPCGNCQGSGQVIPEKQRCKKCKGNKVVEAKNVLELYIPRGAREGERIVLAGEADQLPDQEPGDIIFTLKETEHETFERAGADLRAELKISLVEALTGFNRVVLTHLDGRGIQLNVQQPNGKVLRPGQVLKVEGEGMPMKRSDAKGDLYLVVDIEFPEDGWLKNDAAVQKIKDALPAPDHEEEKHEDVEEVELEFDADMEDFGAGSGDPRAGGGEWEDDDEGEGGPQCATQ

SEQ ID NO: 39988 - protein, 59 aa, Oryza sativa
MVARSSSRSSTSTSCLRGSDRSVLGGRSNVPNFSTAFLPAHSNQTTLVQVNQCPMQRLP

SEQ ID NO: 39989 - protein, 257 aa, Oryza sativa
MAIAVRSAAAVARHSLRPPLAAPGSIRGASLLPPQRARGVGPCRARARAASSSATGGGGHLPPLFSVAPMMDWTDNHYRTLARLISKHAWLYTEMVVAETIVHQKDNLDRFLAFPAEQHPIVLQIGGSNLDNLAKATELANAYSYDEINLNCGCPSGKVAGHGCFGARLMFDPEFVGDAMSAIAANCNVPVSVKCRIGVDDRDSYEELCEFVDKVVSKSPTRHFIIHARKALLSGLSPAENRNVPPLKYVTPMIFFV

SEQ ID NO: 39990 - protein, 648 aa, Oryza sativa
MGGPANKKAEKKAEDEKKTKEKAERDEADRKKKEAEDEAKRKADEEARLPESYKGKRDIRANIALLRRAVEQKDASLYSRVLRQTVVIRRQLRYDTLVSVTKPFAHALETDPLRFVKPVLARVTAVDADVERKAAEKLAKEEAERQRVEAERLAKLAEREAKEREAKAKSDKSKAKLTGAAAPAAAAAAATGDKKAGDSVSKMELDDAEAGLKDAKAKAEKLQKETADKKAKEEAAKKKLEEEAEAKVDGPVLPEIQTYLHLLVIIYLIDHSAKEEAVAAATALNDFLAKHNRRSLDALSAKALYYYVLTHEKVGRANAIRNNLLLAHRTACLRHDEPGQAVLTNAILRNYLQNNLYTQADKFRLNSHFPTHISNSQHARYLYYIGKIQTVQLHYSDAYTSLSQSIRKAPTAGAIGFRQTVTKLLVIVQLLMGDIPERSLFRTPQLKRSLKPYFQLTQAVRVGNLAAFGTCVASHEAIFRRDHMLTFIARLRHNVIKTGLRRINISYSRISIHDICDKLHLTEATAHAGSPHHAASVGAAAAAGISVGSSEEDAEFIVAKAIHDGVIEATIDRKQHFVFSKDNADVYATNEPQQQFHKRIQFCLDSYNAAVKDMRFPPDAHKPQAVLNSAADDTEDAADFGDVGDDDD

SEQ ID NO: 39991 - protein, 315 aa, Oryza sativa
MAEQSAKFTYQGNLKGQGDWVTCLATSQANPNLLVSGSRDKTLITWEITREQGNYGFAKRALKGHSHFVSDVAISSDGQWAVSGSWDKTLRLWELNTGVSKAFVDHQKDVLSVAFSPDNTKIISGSRDKTIKLWNILGECKYTLTEQGHADWVSCVRFLPSAKKPVIVTAGWDRLVKVWDLSKWKLQTNLVGHTGVINTITIAPDGSLCASGGKDGVAMLWDLKKGEHLYSLDATDPINALVFHPTRYWLCAATQKSIKIWNLESKQPVAELVPEFKNAKTKSRAACVSLAWSSDGSALFSGYDDGLIRVWGVLA

SEQ ID NO: 39992 - protein, 205 aa, Oryza sativa
MPPPLDPILACMLNLRRATAAAAVDGLWFSFFSTTTTAGGAMEEEKAASPVSRHIMPHLLNIYGSCATARDFEIYAAHATFEDPLMRAHGVKQIKSAFYTLPKLFGESKIVEYTITENETAPGKVEILIDNKQHYKFLGRAIDLASLITLDVEDGKVVKHQDWWDKKPLKNRDTVSFPVVGRLAEATRRGAMLLTHALMGCGKDP

SEQ ID NO: 39993 - protein, 230 aa, Oryza sativa
MARSCCLLLLLAALAVASAQEIRSYTKKELFAAQICGDDGPGWEKLYIGACPQGYNGLRNWAKQQGLLSPGAKTYSTADFSTQTTWPYCNPCNQGQKCFEFKPGVAKCITEFLQEGQVCLDFSGSNKKWSPKDLNPVLYGKSCQWPQFSCNWDATKNNGVYTCQRVRDNKGKPSTDCYRAAGGRWWGGTDQWYTLVGDKFTPCGGPNTDYKSCKEYAGCGKLAATPFAGQ

SEQ ID NO: 39994 - protein, 164 aa, Oryza sativa
MASPERRSSTTTTSSLLGSFRTAVKKVRFLLSFSATRWILSSIVGSRAGPRRRVSFGPAARPPSLLDYGGSAIVSPPARSGAPSRTASLGPSPARTVTRTSSAASSELLRTSSAGSSSSSPAGGGGDDDIDRRAELFIANFYKHIQMERQVSLQLRYLDRTPSR

SEQ ID NO: 39995 - protein, 573 aa, Oryza sativa
MQTSLRAPGKAFGPARVVSKSRKHHVVRAAKDLHFNKNMEALKKMQAGADKLATVVGVTLGPKGRNVVLESKYGSPKIVNDGVTIAREVELEDPVENIGAKLVRQAAARTNDTAGDGTTTATILSAAFIAEGLKIVAAGTNPVQLTRGMDKTVAALVKELAGLSTEVASDRDLANVASVSAGGNAEIGQLIADAMAKVGRQGVVTMEESKTAEDNLVFVEGMQFDRGYYSPYFVTDPERMVAEYENCRVLLVDKKISTARDVIGLLEAAIRGNYPLLIMAEDVEQEALATLVVNKLRGTLKVVAVKAPGFGERKTSYLEDIAILTGGTLVKDELGVTLDKADESVLGVAAKVVISKEACTIVGDGRSQADVDTRVKQIRNLAEQTEQEYEKEKLNERIARLSGGVAIIQVGAQTETELKEKKLRVEDALNATKAAVEEGIVIGGGCTLLKLAAKVDTVKESLSNEEQKVGAEIVKKALTYPLKLIAENAGTNGSVVMQKVIDSQDPNYGYNAAIDKFEDLMQSGIIDPTKVIRCALENACSVAKTFLLADVVVTEIPERQPAAAAAPADDYGY

SEQ ID NO: 39996 - protein, 417 aa, Oryza sativa
MVSGTLYTYADSYRGTKCRVAAAYGGATLKVVEVKSDDQSHHHVPAFESDDKKVHLIETNAIAYYLANEQLRGGSSVEDRSRVLQWLNWGSQDVYSAVASWVYPALSLVDSTPAQVNAAKNDLKNIFEFLNGYLKTRTYLVGERLSLADVSLAADLLLAYEHVADEQWRKPFANVNRWFQTIVNQANFKKVTGEVKLAVKAIEYDPKKKAAEHPKKEEKKKEEKKKEEPKKKEEPKKKEEAKKDEEEEEDDLHADEPKNDPFATMPKGTFNMDEFKRVYSNEDTATKAIPYFWKNFDKENYSIWYCEYKYNHELTQVFMSSNLIGGMFQRIEKLRKNAFASMAVFGENNNNLIAGVWFWRGHELVFPLCPDWTIDYESYEWKKLNPEDEKDRKLVDNFWLWEGDVKGKKFNAGKIFK

SEQ ID NO: 39997 - protein, 533 aa, Oryza sativa
MGPKHDGTTSVKPAASQHVSLQTVAVVLGVLAGFLIGHLYQHHSEVVLAEHLYSRGGSTAHPKPIKTSYGYKLVVHDFSDLVDGSFVTMDISGSSDRITSSGTSSSSSSSSSSSSSSGAGAVTEHRITLAQLAAAGGDSTSSSDSSSSNSGTSSSSTSQTGPRFYKGSGKGTSIMYSLSNMTNLSVADKQRISGALKKRAAELPGSSVHALMTGNGSPYQNIQGRIMYASMKLIQQMPGGDNIKAFTRIMHRTTDDDLVGEFPTFRAYPLQPECDTWCEFPVKDRANAVVQWLMAAAANPELIQGAWLLLLESDYVWMNPLQLPGSAHDVAVRGYGFTYDYIDPQYPSAAMVVKRMCPECKISEVPHSGPSPVLIRPHELALVAPDWELYSAWIERNELAKKAFGWVREMYAWCVAIQKNGVQLQHEAPPKSKLLSQPPHDWVQGEACMLHYTWGTLYNKDGKEFWRFDKRDWTAKEHELKLPQFTLPPQPWEDGWKLQDGVKISKDLHNLTTAMLMQMNKASGMLPVLSPKQ

SEQ ID NO: 39998 - protein, 183 aa, Oryza sativa
MTHTNNGLTASCNVVISSGTQTFGGPISYALLYPVLQPVLGTFHDLLYGPDDAIELSIQLSTGWHRLPGSNILWSGDHLEGTPSVPLVGSLLAMGVDSWIPASLLFPFASRQSRNRGAVPDRQQHLCPCLNTTRRLVLQPRFSIALVSISLFFLRIVCPCFAFRLEGTDDTASTIHKGPGVSP

SEQ ID NO: 39999 - protein, 269 aa, Oryza sativa
MSLKTLATLAAASGLVAASPMPMSRRNIVNPFGDGFNGAFVNQFNGNNGAFNLIDGFNGFNAQPQVLQIQEQNLVIDNGFGQQIVQQVEQTLVVDSINNGFNSNLNNLFRSANFANNFADQSTVMLVVQEIVTSVDNGFGQQINQNVFAQNALVANAGLFNTQTVMLFDSRTLIANDILGNNAFANIGQFGGIAGATAAFDNLLPTKTLGIILFNTKPTWSAVVADPAATLGAIWQNAILGLQSNQFDQNLISLNDQLALQIFQGFSKA

SEQ ID NO: 40000 - protein, 169 aa, Oryza sativa
MASNSVLFATVLAMAVVLTGSSSCQAARLLADATPPAVPAVTLPPMPAIPAIPAATLPPIPAVPTVPNAALPPMPAVPKVALPPMPAVPAVPTVPAVALPPMPAVPAVPTATLPPMPAVPAVPNAVLPPIPAVPKVTLPPMPSIPAVPKVTLPPMPSVPMPFLAPPPSA

SEQ ID NO: 40001 - protein, 178 aa, Oryza sativa
MQLKNILFAAALSTAAVADFVIISDLPVPTNVPDLSNIASYISGLENFVTSKFDELTKSLGPSAASQAVSAQTALASFVATASYSIPADVTALGAYETFTSAPAWYTALPSDLKAYYDRRNAAVQSIVKEAVNGGATDNATNTAASKSQSTNAAPAPTAVVKALGAGVAAAMVGVFAL

SEQ ID NO: 40002 - protein, 665 aa, Oryza sativa
MTIPDEVDIIVCGGGSCGCVVAGRLANLDHNLQVLLIEGGENNLNNPWVFRPGIYPRNMKLDSKTASFYYSRPSEWLDGRRAVVPCAHILGGGSSINFMMYTRASASDYDDFQAKGWTTKELLPLMKKHETYQRACNNRDIHGFEGPIKVSFGNYTYPIKEDFLRATETQGIPTTDDLQDLVTGHGAEHWLKWINRDTGRRSDPAHGYIHSTRAVHQNLHLLTSNKVEKVILEGDRAVGVKVVPTKHLSNAQVPSRIIRARKQIIVSGGTLSSPLILQRSGIGDPEKLRKAGIKPLVDLPGVGLNFQDHYLTFATYRAKPHVESFDDFARGDPATQERVFQQWNINGTGPLATNGIEAGVKIRPTEDELKMMDSWPCPEFRSGWDSYFKDKPDKPVMHYSVIAGWFGDHMVMPPGKFFTMFHFLEYPFSRGSTHIVSPNPYEAPDFDAGFMNDKRDMAPMVWGYVKSRETARRMDAYAGEVQAMHPFYAYDSPARAKDLDLATTNAYALPGNITAGIQHGSWTMPMEKGRAPEPNFLNSNCQEVLPDLEYSKEDIEHVINWTKRHVETTWHSLGTCSMAPREGNSIVKHGVLDERLNVHGVKGLKVADLSICPDNVGCNTYSTALLIGEKCAVLVGEDLGYSGSALDMKVPTYHAPREVVGLSRL

SEQ ID NO: 40003 - protein, 211 aa, Oryza sativa
MSLVSQSDFFGGAQGECRLPELEHLVGVIRQDAPGRIGGAEEILPRGQRRRPRRVDHPAPDQLLDRREPPEVAAEHDVDEPDAVAAEEGLPPGALPERALQRLQRRVGLRHRRRPLLLRLAPEQDPQPRQPHLVVDVCRPEPRHGALVGVGGQHGGGAVGPGLVDVLQDDLRLVDGAAGVEEDGDGLVDRVGGEEEVALVAQVLLHELVRQ

SEQ ID NO: 40004 - protein, 211 aa, Oryza sativa
MDREALRMVCSREFWRMAVLWTVSLLYSYILLFFLRRGAPVPRLRPMPEPDDDAARRRRRRPVCVITGATSGLGRAAAAALAREGYHVILAGRSSQLLSETVQQIRDQQPDAHLEAFQIDLSSYKSIKKFETSLNQWIKDSNMEHSIQLLVNNAGILAKSYRITEDGLDEMIQANYIGPFVLTNILLPLLKNSSTPSRVVNLTSFTHRCVS

SEQ ID NO: 40005 - protein, 108 aa, Oryza sativa
MEKQKPAGHDARLLLALRCSRASLLLSSLRHPRAAPPRRATTPRRSSSTAAGGSVLRDAGLLRAELAAARREATMHAANSGAEVLLVLSLVPVLLLLLGFLAAAAVAA

SEQ ID NO: 40006 - protein, 315 aa, Oryza sativa
MSAPAATGKKQQAKLGFVENFLLSGAAAVISKTAAAPIERVKLLVQNQGEMLKQGKISEPYKGVIDCTAKTFRSEGFYSFWRGNLTNCIRYFPTQALNFAFKDQIKAAFKSKKSDPYMVAFGKNTASGGVAGALSLCFVYSLDYARTRLANDTKSAKKGGAERQFNGLVDVYRKTLATDGVAGLYRGFVISCVGIIIYRGCYFGFYDTLKPMLLGDNSSLLLSFSLGYAVTVTSGLISYPVDTIRRRMMMTSGQAEKYNGSIDCFVKIMKKEGFMSLMKGAGANILRGIAGAGVLSGFDKLVQLYLGVKVDTSGG

SEQ ID NO: 40007 - protein, 297 aa, Oryza sativa
MQAAMPAAVTHDDLSLRKAQERRAARSSGRAAVALVSLSVLCGIVGFILCLAAEGSRSEASHYLMTVGGGGANAAANNGQVDVCFYNSSGRAPLAFAIGAFLMLAVAMFAEHAYMLLAVAAPDSSAAGLAVAEGHPRVPSDPARLTWQTCCLFFVTWICFGLAEVMLMVGIAVESGHVSDWRKPRAVCHRVRPGVFAAAGILGLITVVVGFVVYVTALQTNKLRAQHPVGGYYVGHGAPHPGMPPPPMPYGPHPHPHQPPPPAAAATAPSAPEITPAACQVQPSRAACVTKQCADAV

SEQ ID NO: 40008 - protein, 210 aa, Oryza sativa
MANCFGDVVDNYKLDEMERYVGKAKRQEDRAREAMNLVNEDGKDKKAASYVQGVKDWYGNGESTLCLVYNATGATLRHVADHDWWGFIGRTPYPTEIGNGQWAAFHHVHKSGDSSGSEAAVVYRGTNADGVERDLLVAWSTPWSSFYRNKAYCAVGGVDSFQGDWEQLYDKVNNAAYTCNADSDGFKIDASTATGDSPVFTATIKIHFSQ

SEQ ID NO: 40009 - protein, 193 aa, Oryza sativa
MASVRQLIDLDAGLFQLAGRGVQLAEFYRSHKYCGYCGHEMHPSKTEWAMLCGHCRERYYPQIAPCIIVAIRREDKILLAQHTRHRNGVYTVLAGFVEVGETLEQAVAREVMEESSIRVKNLRYVTSQPWPFPQSLMTAFTADYDSGDIKIDPKELIDAGWYRYDQLPLLPAPGTVARRLIEDTVARCRADYE

SEQ ID NO: 40010 - protein, 309 aa, Oryza sativa
MFGTIPAGLTYYWRMKMPETARYTALVARNAKQAAADMSKVLHAEIEERPEVVESQVVAGETWGLFSRQFMKRHGMHLLATTSTWFLLDIAFYSQNLFQKDIFSKVGWIPPAKTMNALEELYRISRAQALIALCGTIPGYWFTVAFIDIVGRFWIQIMGFFMMTVFMLALGVPYDHWTHPAHHTGFVVLYALTFFFANFGPNSTTFIVPAEIFPARLRSTCHGISAASGKAGAIIGAFGFLYAAQDQHNPDAGYSRGIGIRNALFVLAGTNFLDMLMTLLVPESKGLSLEEMSKDNVVDETAQEAIAQA

SEQ ID NO: 40011 - protein, 211 aa, Oryza sativa
MYGIPGQFPPQGPYGQPNNPQFIAAMQQIQQSALGGGRGVPAARGPGIQGGLPGSMPGMPGAANMPGYPPNARQQGAGAGAGRGAGGRNQGPGFAGAAPQGGRGAAPAEGASVLQTQLAAVGDNPGQQKQILGEVIFPKIQAIHPELAGKITGMLLEMENSELVALIENEGSLRAKVDEALAVYDDYVRAQGGEAGDANGPAKEEKADGKA

SEQ ID NO: 40012 - protein, 254 aa, Oryza sativa
MENLQLQGDDHDDEALPHFPYFAVPSPPPLAVAPAASATTSDGHQHGPLEVLEQPPCSNNLHPDGLVDGPQLAATTAVPMMLPAMTSLDWQSLLQTCLQVPPPVLEQQQPAAAAQADQYSGENDHGDLQAAESSGAGNKEKQVMAKGGAGRPSGTKKKASRPRFAFQTRSDNDILDDGYRWRKYGQKAVKNSKHPRSYYRCTHHTCNVKKQVQRLAKDTSIVVTTYEGVHNHPCEKLMEALTPILKQLQFLSQF

SEQ ID NO: 40013 - protein, 247 aa, Oryza sativa
MAETPRRIRRGGAGLSLVVVALLLAVAARAQQEYEANQQNACYATNASSTLGYTCNATSASAAAAAPCDAYLVFRSSPPLYASAVSISYLLNVAAAAVADSNAVDPVAPVAADRLVLAPVPCGCSPGGYYQHNASHTIRDTGVETYFIIANLTYQGLSTCQALIAQNPLHDSRGLVAGDNLTVPLRCACPSPPQAAAGVKHMVTYLVTWGDTVSAAWRRLPARPGHGRGVAGGAVRGEAARRAAGHG

SEQ ID NO: 40014 - protein, 379 aa, Oryza sativa
MHAALAGATQWQINRSAMPGAYGCPGFTETTYDYLGLSGYPIHAYGAFIHLAAMRAAQRIGDLLQDANMRDSARLSEAKCTQGIETHLWRGDYWLAFQDQNEAAPSVVMSGSLHGQTWASTLGLGWLVPVENITTHLQAERSGNCAYDLTNCEFGLLTIPQLKPSDPNDWRVHATPSMSMDYTSVDIYLNGAQQLQNSPAEATMRLYQERMNDQWDWRDLHIGPGGLSCSDAQLNGTFLAGAPFVNSHYARQLQGWHIQRALVGQQWDAHRRVLQLRPARLVVGDRLPFFTSSAVGFLEVNIDASELHKHSRASLCAQSNGALRSRLQNAVRIQLVDGHLEGAVHVSLDHQAVGLHGVTLSRKVRLTRRGSVASLQLQC

SEQ ID NO: 40015 - protein, 379 aa, Oryza sativa
MIACVFLLIALASATTYFSDDFSSGDLSKWTQSTAKPAGERGSIGLSEGKWATDKAAETGLKTLEDARFYVYSATFPEFTNAGKDLVLQYTVKHEQQIDCGGAYLKLHPAGLNQASYTGDSVYNIMFGPDICGGTKRTHFILTKKDKNHLIKNDIPCESDTFTHTYTLILKPDNTFRVLIDGEEKRAGNIEDEFDILEPKQINDPAQSKPADWVDEAQIDDPNDVKPEGYDDIKPTIIDPEATKPEDWDDELDGEWEAPTISNPEFKGPWRAKRIDNPAYKGPWVHPQIPNPAYAPDANLYSFPSFGAVGIEVWQVKAGTIFDNILVTDSIAEAEAARAKYAGRKDTEAALEKAEREAKEAEAKAAEASKDDAEEKDDL

SEQ ID NO: 40016 - protein, 410 aa, Oryza sativa
MYHMLSSRSAAASPAAAALYSSLQVTNTIVPMVSMSTLVARSALRLTQNRQPFVAALNLKPASPPYLATPASSAGRALYLSTHTTTPASARAFHCRRGPLGDAGNKPPPGDGWHEHPRHGYYCRSGPFGGVFGPRSVDPDRFEPPMRGLMKFGAAAFVGMTVFSMTKPLFFLIVGGALGYGSYRMVRAYLDVKFPPYYRPMSGGGSSSSGADGAKGNQSDVGVNDPMLDWIQRDLGVRPPLGSAARYTPEDAKAWIETMAGPFRQGILEFAQRVSQPTTQLRKMTIAQLTADDSQFKQAMPRSYEFAPIRFAVQRGAVDSITGRSGSIEIEFDVLDKDSGKLIPIKAYGEVDRDRVSAAVGGLVVRWIEVGNGPRVSVNAEFPKFNQEAGKRPDVVEGKATDVTPPGSRK

SEQ ID NO: 40017 - protein, 584 aa, Oryza sativa
MKYAFVTAALVGSVFASQHKAHAGFHQRRHEYPVAPQADVCTVCTTVYVTPEHPAAHYPTATPETPKPSAPAPVPEVSKPVYPAVPQQSQPGYPAVPPQSQPAVPQQSQPGYPVVPQQTKPAVPESTSCTEETPKPTGPAPVPQQSQPGYPAVPPQSQPAVPQQSQPAVPQQSQPGYPSVPQPSKPAVPQESKPAVAESTSCTEETSKPTGPAPVPQQSQPAYPAVPQPSQPAVPQQSQPAYPAVPQPPKESKPSQPETPKPNQPSYPAVPEQSKPATSPSAPAGKPTPSQGGDKPKPTAPAGGNGHIVTNGDKWSITYTPYARSGQCKTAEEIASDIKKISELGFTTIRSYSTDCGVFEHVVPECEKYGLKIIYGIFLEAGGKDGKGCFSQYADEQLQDIKNKAPKDSVAMVIVGNECMFNGNCKPEELASYIDHVRQELQGAGFPSSVAVTTTEPVNVWEEKGAALCDHIDVFVCQVQPYFTSSISSDMAGDFAAQQLEQAAKVCPGAAAKGKYIGEIGWPSSGQANGKAIASPEDQKTAMKSIQDKVGAHASVFSFQDDTWKPAGEYGVEQHFGCVDALSS

SEQ ID NO: 40018 - protein, 305 aa, Oryza sativa
MAFVKLVKNKAYFKRFQVKFKRRREGKTDYYARKRLILQEKNKYNTPKYRMVVRFSNKNITTQILYARIEGDVVLAAAYSHELPRYGVKVGLTNYASAYATGLLLARRLLKKLKLDGVYAGAKDINGAEFHVEDIEGQPGAFTAYLDVGLARTTTGAKIFGALKGAVDGGLNIPHSVKRFPGYSNEKKEFKAEVHRQHIFGVHVANYMKALKGEDEDAYKRQFSQYIKHGITAETVESTYKKAHAEIRKDPEAKPKTKKTTPEGQKHKRWNRAKLTKLQRKDRVKQKKESFLKKLQAVAAGVGSA

SEQ ID NO: 40019 - protein, 372 aa, Oryza sativa
MTAVRQRPLRPLSSATDLTDYTDVTHSTLEVDSDPMSDEPADFESETQSLTPSIWDYVHSHGRTYHRYMAGAYMFPNDEVENERLDMQHAIIKALFGQRNYFAPLKRPKRMLDIGCGTGRWCLEMAKEFPKARIEGIDPSPIQPDVTPANVDFFIDDIRRKEWWHCTQPYDYVHTRMSLGIFRDFREIIQKGFNNLEPGGYMESHEMYSKVYCDDGTMPSDFKLLEWTRLHDKAAMTLGTPLRIANKLKTWYEQAGFVDVREETHSIPINSWARDSRHKLLGKFMLWNMCQGVHAWSVEYFVKALGWNDTEVEVYLAHLRNALADRSVHAYYKVWVVYGRKPFPSEPPSQVPKPSHWPKEPSSDDEGDDDDE

SEQ ID NO: 40020 - protein, 258 aa, Oryza sativa
MSVLDDQADGTSSRRAAPTRRTGCGARFRRARSCHGSRTVSSGGSACRARATGGTMRCASASAWTATAATTSAALRQRLQRPAWERPQRDAGEVRRAGGRAAARRRGGGRDRGAGAHGQPGGRAGHPRRAGQARRGGRRAHLDHRAGRERARRGAPRRRPGGGAARGVRAPGRGGRRALGVHGGADVAPGRLPRRRRRHRQRGRAEVPPAPEGVEVGRARHCRRRWPFQVQGLPRHVRRAGDDGDGEDAQDVHRGERG

SEQ ID NO: 40021 - protein, 163 aa, Oryza sativa
MQPSATPSASRRGRHVSGDHDHRDRSRCYRNAPPPCLLPPCHSSRCCRCHRGHSSRGGRRHSHSHRQTPQTPPPSPHGSRPFLHVAAPCRLTTAATSAAVTLSLGRGGGSSHLLHPAPHHHGLPLQFWLAVTMENGYYFLEVLLDERYLLLCTLGQLAAVTTH

SEQ ID NO: 40022 - protein, 193 aa, Oryza sativa
MVSLRSTLVATAALVAGVQADYFIQPSSVPLSTRNSWCTNQKTQCPPICLDMDPASGRPIKNTCDAATLTFECVCGNNIAPNLTEYSLTMPYHKCVQFQENCVTNCGLANNGCADSCRKDIKCGASSPKGATNATASTTPGSAATTTTSSGPKLETGFGNAGGGPAGSYATSLQASLSLAVAITGVLIGPLLL

SEQ ID NO: 40023 - protein, 175 aa, Oryza sativa
MARAILLHLHSDETVPLLVVIVAAVAAVALVIVSLCTSSKHGKLWKQQQQRSGSSLPQLKAEESAGGGGGASRKQLLATLSGIGGKAAAMAKMVSWNRRSSRQGCSSDDDDEAGGGGLAVEEEEALWRKTIMMGDKCRPLQFSGHIAYDSDGNQLPATTISKEAANADAVNNIYV

SEQ ID NO: 40024 - protein, 332 aa, Oryza sativa
MSEPIRVLVTGAAGQIAYSLLYAIANGDVFGKNQPIILHMFDITPMLTAMGGVKLELEDCSLPLLKDVVVSDQDSIAFKDIDVAIMTGAMPRREGMERKDLLSANVRIFKAQGEALDKHARKTVKVLVVGNPANTNCLVLAKYAPSIPSENFSCLTRLDHNRAKAQVALKLGLTSDKVKNVIIWGNHSSTQFPDLAHAQVTLNDGSNKGAYEALKDENWIKNEFIPCVQKRGAAIIAARKLSSAMSAAKAICDHMRDWWHGTSGDEWVSMGIISDGSYGIEKGLVYSYPVRIVNRKWTIVQGLAINDWARSLMDKTAQELIEERNDAFDATK

SEQ ID NO: 40025 - protein, 188 aa, Oryza sativa
MAPSLLAPRLAVPLLLVLAAAAAADGVADAGAGAGMTHLHFFFHEVFTAGPNGTTATVAPPARSGDGSSLGFVGVVDDMLREGADPASRLVGRAQGVTAGTSLAAADGAGAITTMLSLAFTEEGPYAGSTLQVFGRAVLGTVMERPVVGGTGKFRMARGHTLSRRVNSSDPDNLLVIEYDAYVTTSPI

SEQ ID NO: 40026 - protein, 365 aa, Oryza sativa
MLTSEKTKRAAMLREAVVPLVELWDLMDLPEEERRSFRKATAVLRPAREEALSSGVLSIATIKKTEEEVERLTRLKAGRMKELVLKRRLELESICRSMHVEPDTSTVPEKSIALIDSGLVNPSELMASIDEQIAKAKEEQQSRKEIMDKINKWLLACEEEKWLEEYNLEENRFNTGRIARLNLKRAEKARLIINKIPAMIDNLMSRTLVWETERNKPFLYDGARLVAVLEEHKQARLRQEEERRRLREQKKLRTLFSEKEAMPHLKRPGSSFGRATEPCNMSRKRVDAAPPSVRSSSGSSGSSGGGAADPFRPRSSAAAGSGAGHCGEFFRSGGARRLSAAAPFNYVAVSKGGGGGGGLSSSMMS

SEQ ID NO: 40027 - protein, 213 aa, Oryza sativa
MDVEQLQQHARRLLSNGRVVSAAAAAGASPGPAGRVLEGGAAAAARRPAPFSSLDATVITVLSLLLCVLVVGLVLHAIARCAFRVTRRMCYGQEPPGDHGDEAAAERCARVARKKPGRAIAEKIPAIVCPAGGLDRLAGCGSTECAICLSEFAQGHRVRVLPRCGHGFHARCIDRWLAARQTCPTCRREPFAAAAAVQLQVYPDAAGGQHETP

SEQ ID NO: 40028 - protein, 313 aa, Oryza sativa
MRAVVVLLVLALAAFARADTEAVSQAVSAADADEQAVADFAVDMDVAEDEAVEEDAAEDESEVEAEDEAEEESEDESEEEEFSLIEAEAEAEADEERKGAKKPLKKRVKVVRAPKPLKAKPFKFHPERVRADTSKPTDPALEKLDLALAAVKEDILSTNKQITDERKWVIAVAKIIAAYNDKMKRVEAHIIALRKEMKSLYRKKKQIENLKLQKALEAKLKEAKAEHQTLLDSLKHVKVKSTELNNSGLALRNTIAGITAQLRKLRGQTVRKPRAAVRGGKKCGKGKRYSRRAKKCVARKSRRAAKKVAAKKF

SEQ ID NO: 40029 - protein, 121 aa, Oryza sativa
MTRALHKMDSPTGMSLSGQPVNGTTRTKPLHPSPNIPGQSLVTQTSRRPPRRLTVSVSATPLLNSTCLLSVLSRRGMSLWRMPRPCFTPASLADSTGCLHDLSFPLPLRTLVIGPTHLSAP

SEQ ID NO: 40030 - protein, 647 aa, Oryza sativa
MSHYNFKKVTTVPTAKEFIDIILSKTQRKTPTVIHKHYKIARIRSFYMRKVKFAQQSYHDRLTLILDEFPKLDDVHPFYADLMNILYDKNHYKLALGQINMARHLVDNVGKEYSRLLKFADSLYRCKCLKKAALGRMCTIIKRQAQSLEYLEQIRQHLARLPSIDPNTRTLLICGFPNVGKSSFLNKVTNADVEVQPYAFTTKSLYVGHTDYKYLRWQVVDTPGILDHALEERNTIEMQAITAMAHLRASILYIMDVSEQCGYSLEEQVSLFNNIKALFANKPLILVANKVDIKKIQELPQEKLRFFEQFKAENIPIIEMSTLNEDGVMTVRNEACERLLARRVELKIKSSKMNDVLNRLHMAEPKKRDNIERPAFIPPQVKAKREAQAKRLEAGEMEVEEAAAKTLKKTERDLELELGDEYILDLRKHWDLKNDEEKYDAIPEIWNGHNVADFIDPEIMEKLEELEKEEEKLMEAGFYDGGKVEKLDDETKELKKLAKKIRTKRKLGILESRYNKTHRRASHVPRKAQKVPRSRLESTMEDLGLDMSDKDGAHYNASRARSESHKPVKRARTDSEGRVRSSSRVPRDKSGIRDEAMASKVKTLKKKAERKLLHKESRVSEADRTIIEKKPKHLFSGKRGMGKTDRR

SEQ ID NO: 40031 - protein, 225 aa, Oryza sativa
MDAVFDTPEDVPEEVRANKRYAGAGQFTVSEVAERVKADIGNIDVVVHSLANGPEVTKPLLETSRKGYLAAMSASSYSFVSMMQRFGPIMNPGGAAVSLTYIASEDVIPGYGGGMSSAKATLESDTRVLAWEAGRKYQVRVNTISAGPLGSRAAKAIGFIDDMIRYSYANAPVQKELAAQEVGNVAAFLCSPLASAITGHTCYVDNGLNIMGLVVDSKTLDREAA

SEQ ID NO: 40032 - protein, 353 aa, Oryza sativa
MSGGFAEGHSTAAANSLASHEALLKSRWFFDWYLSNPVRSKLHAMAAKKLRDNFHLLVWEADMDSTTGTYLTAPGVMDNINLPPSTKYEEVLDRILIAFGAAASQIELAVSPLQLEGCKDDKERLTQALERQLRLSPMWSVTLDFYRGTQLSPPVSIRNNRQYFVDGIVVLLEKATTDIRGILLDETVLNVLFPQTVSSATSGQVVTYPVMLPHEQYLIKKDFRACQMILRVMRAVPLAFGLLPIDATQDEDDDSALVRSPDRMEFGRADTAEMTEAEDWIAYHWTREVRPTLLRMVAFLAAVDFRQVALAFVVSFCKAHGNSSQISSDIRTYIEPYFSQADAAKIDRTLPTW

SEQ ID NO: 40033 - protein, 267 aa, Oryza sativa
MNVFLCMLFTAFFSFSCVVAHSVCFIVCVRDGSRRELGHAAIDREAGARGHKAPGVPRHPAPQRQVGLGDPRAGQVQQDLARHVPDARDGRRGVRRRGIGAARRRRRAQLPRHGHVAPGASLRLPRRHPRSGRGRRRDDRLRSPWQPARRRREHVSRGDGGAGGRRRRWGGRSEARRGRGRRLRDAAAAGEHGRGLDDEPAEAEPLDGRRRRRVAGGRRGRGRHEPVEPFLKWAYGCIAFAGGHHVFSMCSYEFCAYVQYVLGTYAR

SEQ ID NO: 40034 - protein, 188 aa, Oryza sativa
MADTTFKSIGDVLKLLPTATVIVYEVLTPIVTNTGDCHVANKVVTPVILVLCAFFCAFSQFTDSYVGADGKVRYGLVTARGLLPFSGGGGADGGDAAGRDFSKYRLRFGDFVHAFFSVAVFAAVALLADANTVSCFYPSLKDQQKKVVMALPVVVGALASVVFVVFPSTRHGIGYPPAKPATASLASL

SEQ ID NO: 40035 - protein, 142 aa, Oryza sativa
MLAGISVGGQPLSIDASVFASGAVVDTGTVVTRLPPTAYSALRSAFRAAMAPYGYPSAPATGILDTCYDFTRYGTVTLPTISIAFGGGAAMDLGTSGILTSGCLAFAPTGGDSQASILGNVQQRSFEVRFDGSTVGFMPASC

SEQ ID NO: 40036 - protein, 290 aa, Oryza sativa
MIPGTLADGGGGGGAVGPAKPMSMSERARLARIPLPEPGLKCPRCDSTNTKFCYFNNYSLSQPRHFCRACRRYWTRGGALRNVPVGGGYRRHAKRAKPKPASAAGSASAATTTAGSTPAGSTTTTTTSSTCATPNAPALPAMLGGNLSILPPLLRLADFDAMSLGSTFSGMAAAAGKPPPVDAAGCYSVGAATGLEQWRLQQMQSFPFFHAMDHQAAMAAPPPAMAMPGMFQLGLDGDGHGSGGGEDGGELHHAMPSSKREGYPRGMYGDHHLAGGYTSYSSATTGNHLL

SEQ ID NO: 40037 - protein, 662 aa, Oryza sativa
MSGLPEGWTAHTNAADGTSYYYHAATGTSQYQMPTADQQPPSAHMAVSGSNSPTAAAASGASGAALGDSFVVVPPPSPPIPAAVEPLPVPVPVPVPVPVSGGPPPPPPHTDGVVAAAEITLVAGADLLPQPIGAPTPPQAPAPAPAAAIPAVELQPISKPPPPPVAATGGAPPPSPFAVAAKPVPAVAVAVAPASPGLAPVPDTLYFNVETQNTADKSIHKGVLTVTSVREGLVSGTLRWAHLGGRVTRISGMLTAKDWLWKEYQKELDPALETYQYLCENKSGAVTLAGLHRGKFFMGMYAREDANGVAGPSLGAVILSPGKAPLSVETSPRTGPGTGPQTPVSPISQTRPPAGTIAGTAPLLALGDSAVSGDYKSQPMMASLAPTSPLASAAAGSGGSMTSKADAALLPAAGSRTLVSPSAVFLVLETKNKHTAMVFRGRLFVNSVDRETGRVSGCLVRPPYQLEACSVTGTALATEFQFTEWQKQTLVNGIDYEYRCDTVGGAITMEAIGAPGFRISGQYRPVGTNEWSGDVTLTLADEHARAELAAERSLAGKTPHEQMTEEAEKYPRDKHTDISYFYCEKCNHFVSKADNAKQLAAGVKECWHHPYPLSSRLRDPITGEPLFACCRRPNDARWRKMGWGGNGCSVSVHDTGACCTLM

SEQ ID NO: 40038 - protein, 280 aa, Oryza sativa
MKEARDSGRIATAGQALAAQARKRRSQFSSAAAALAHLSQKPPVAGMHPQAAHLYVLHGVRPVQQQQPQQASWEQQHQPGLDQQPVQLVCSPLVEAAYYEALDPPPAVPLPGPGCPLLLMVAGSPSTQGQFSTHAAVKAWLLQASHKQQASSGLPPGSLPPGKGAAGGSTAAPGSSSSSSSSGNLSKEGAGLHAVLQVLNAELAAALPLSQLEEVSGVSHFGPLERPELIADIAASFCQQQQQQQQQQQQRQLGAAALASSSKTQSDFCVEGHQGVSSKL

SEQ ID NO: 40039 - protein, 259 aa, Oryza sativa
MQPPPRTRDPAIAIAGDGAARRGPPPMQPPGPPPVRHGPPPVRQQHGYYYEEEQRPLHLHVRTARSSSSALASCLVAAAFLALAVGGAGAALFVLFRPRPPDIAVAAVRLPAFASGPNGTVAFTFEQTAAVRNPNRAPLAHFDSSLRVAYAGGELGSVYIPAGLIDGGRTKDMSASFAVPAFAAATPPSLPQEQMAAAAAASAQQQQPAAAAAVMEVDSLLVVKGRVTVLRVLTHHVEAAKVCRVGVSPVDGKVLGFRC

SEQ ID NO: 40040 - protein, 27 aa, Oryza sativa
MRRTQCSYGPYQLFSPHRLGNTPRRTR

SEQ ID NO: 40041 - protein, 222 aa, Oryza sativa
MDRFRPLRRIQVDPEPAAAAPPPPAAAAANGGAGEDVSAAPAAGLLMASRVRRRSAVYRDCKGDYIGVPNDPCLTKILSKQGDNKVLFADKVLKFTQSGKMKRRILVITDFALYLVDPDADILKRRIALAAVDKLCISKLSDNFFAIIVPTEYDCLMATTRKKEIVDIIIKAIKSNSEYQPQVASSNRSEYHAAAEVIKEVEFEEAEGGVKTRITHKAKAKS

SEQ ID NO: 40042 - protein, 456 aa, Oryza sativa
MKITSTAMLAPVYGTPHPLAGAEVQLTVFDRAAFDLYVPSVLAYRAPAPSNEAIKEGLLRAVAAYPHLAGRLAVDHHGRRFLHVNDQGVLVVEATVDGADLDDVLANSGRAMATDVADLYPALPEDNVGAALLQVKLVRYRCGGLVVGSICHHHTADGHSMSAFFTAWATAVREGEGFTAPTPFLDRAATAVPRTPPVPAFDHRSIEFDGGEAAAAGGGRSSYAAVSLDKIKDLTVHFTAEFVGELKARAGGRCSTFQCLLAHVWKKITAARDLSPEEFTQVRVAVNCRGRANPPVPMDFFGNMVLWAFPRMRARELLRATYGAVVGAIRDAVARVDGEYIQSFVDFGGAAAAGGGGGGDLVATAAAAGTMLCPDLEVDSWLGFRFHQMDLGTGSPAAFLPPDLPVEGLMVFVPSRAAKGGVDVFMAVAEHHVEAFERIIYSLEEGHGHHVGPCHL

SEQ ID NO: 40043 - protein, 289 aa, Oryza sativa
MFKRSFRSQDPGRVDKAARLKRSGAHREQTKMSKLQRSLNEQDTIPQKSAPTAAPAPSPIVTLTVGRDGRLFAAHEEVLRQSPFFEAALRGNHFEAQSKRISLPDEEPEVFSAVLEYLYKGDYYPRLLHNKQRNSWELEDQARTPHTSPNPETGGGRAGDTSEATIYLSSLDMAILRDTVVYCAADRYGLEELKRLALRKQGLQSGIDVGTIIRSAQYAYAHTPDSDSRLRAHYLALIIRCRKTFKRSGTMQSEMEAGGSKLFFDLFVAMCNHLDDVIDVSNARTPKTV

SEQ ID NO: 40044 - protein, 272 aa, Oryza sativa
MTSASELFTARRARAARLSDPDPDPDPPADALHDPHGLADRRGRRRGCRPRRQLDAAGDVRQHLHTGAPPSRRRASYTDRVLSYIDNSNIGDSATRRNRLDRLMFRTNERLPGAVLQAQARVLERLRGISIGSSVSRPSITLDEFSATDVFRIIDFGNRDAPYEANRSSSSLAHPSSESDEERSPIDTSSLKRSRGLSKAAFLRLQIEIFEASKDDNREASPECSICLDGFYDGDELIKLRCGHRFHSNCLEPWVRKCADCPYCRTNIQSRS

SEQ ID NO: 40045 - protein, 267 aa, Oryza sativa
MLLRVSCVAILIAVACFQFSSAETKLMDKLKENAEMTQTETTDLKERNKRALYYQNDLISNKERQIRKAFPLGPIGGIGLGGIGGIGGIGGIGYGLYDYAYGLPFYDYLAYDYYPLYGGVYDYGLYGGGITDSLPARAAAAPAIASSNAKAVQTVVNPALQAAVEYDDDDDLTMLNARYAAAHNAAPIQQHGARPLAAQIQPSQWSGYAQQQQFAIPQQYGQQQFAHQQAIAPQAIIANPQAQQYAPSQRSALNAIRAASSRSAKKN

SEQ ID NO: 40046 - protein, 231 aa, Oryza sativa
MPNVEENQNEEGCCRPGSKVVMLVFLFVAVHLVLISVILGPLSVISKQVANECFPSSSNNWICDEVWDRGADLELPAIICGSIGGAFLLVAMSIYFARRNCGASPPVSSIVWARDCCNNRCNLTDVNRVGWFFAFSAYVLVITGIVIVCYAASLGSSFAWWGASEDAWALAEFIDNLTFSGICIFFPIGFGFLFISFILFGTEHAYRKAAPAEALPEYQLVAREELVVEKL

SEQ ID NO: 40047 - protein, 220 aa, Oryza sativa
MAGVEVSKPSRRLSPKGSFKLSLPSLLACGQCKATAVSPPESPTGVGARSFSSSASSSAGTSRGRERDRLAELREIFGHFDRDMDGRISGDELREFFASMGDDSGAAAAAAAAMGLDGAAGGGESGGGGGGLMLAFEDFVRIVERKGGEEEEREDLRRAFGAFEAVKGSGRITPRGLQRVLSQLGDEASVAECEAMISAYDDDGDGELDFHDFHRMMSQD

SEQ ID NO: 40048 - protein, 321 aa, Oryza sativa
MKFSSTVAAAASLLAGVHAHGGVDTYTVGTTVYQGWSPYNSPSGQKSLQRQYSTCDPLFIKDLSTVNIRCNNAGALGTGVSGTVAAGQKLKAHWKQWTHRPAAVMVYIAKCPSAGCDSWDGAGKVWAKIAHEGLVSGTANAGVWAGDAIVDTLEYTVTIPESLVAGDYLIRHELLALHQANNPQFYPECAQFKITGSGTASPPSSLLVSFPGAYSASDPGVAFNIDSDASKTSTTYVIPGPAVWTGAGGETTPEEPAASETPVATPTPTTLVTSAAPSKTAVPSCTVPRYGQCGGKTYTGCTFCDAGLTCSSGGEYYSQCT

SEQ ID NO: 40049 - protein, 75 aa, Oryza sativa
MQIGSIHTIRFTCAFLSSIRDYLLPHLSITRWQPTSRNLLGGFGLGCVGYLSYCSSHGLVRALCVRLNHVLLYLT

SEQ ID NO: 40050 - protein, 33 aa, Oryza sativa
MRVLGGAWSQHFPPQISSLLPRLKWWRFRHRRS

SEQ ID NO: 40051 - protein, 423 aa, Oryza sativa
MSWQSCTAKGSCTTKNGKITIDANWRWLHVKGGYTNCYTGNEWNTTACKDNKSCASNCAVDGADYSGTYGITASGNSLKLKFVTKGSYSTNIGSRTYLMASDTAYEMFKFTGNHEFTFDVDLSNLPCGFNGALYFVSMDADGGMKKYSTNKAGAKYGTGYCDAQCPRDLKFINGEGNVEGWQPSSNDANAGVGGHGSCCAEMDIWEANSVSTAVTPHACSTIEQSRCDGDSCGGTYSADRYAGVCDPDGCDFNSYRMGVPDFYGKGKTVDTSKKFTVVTQFIGTGDAMEIKRFYVQNGKTIAQPNSAIPGVEGNSITTKFCDAQKKAFGDTYTYKDKGGTANMAKALSQGMVLVMSLWDDHYSNMLWLDSTYPTDKDPASNPGTGRGECETSSGVPADLESKNGDASVTYSNIKFGPTNSTFG

SEQ ID NO: 40052 - protein, 95 aa, Oryza sativa
MTPQGNKPSSHDVITGRWAPSPADAAAGRAPGYGVITNIVNGGLECGHGPDDRVANRIGFYQRYCGAFGIGTGGNLDCYNQRPFNSGSSVGLAEQ

SEQ ID NO: 40053 - protein, 127 aa, Oryza sativa
MLRYSGEPFFGEVDAEHRAVVPPARVLRGADRSADLDREVSRLMKRLTRTAYLSPLLFAAGEAVAVGGAQRLHGMAQCTKDLSGGDCKMCLESAIDQLLARGCAKEGGKVLGGSCSLRYDFYSLSDS

SEQ ID NO: 40054 - protein, 269 aa, Oryza sativa
MRLFEEPPAKLTHWAHPEHELTLAATAGAPFRCDGCQEPGGDGPRYRCAPCNFDLHTDCALPPATLQHPLLFKGGGCTFVFLREPPAPAAASRQCDACGDDVRGFVFHCADRDLDLHPCCASLEDRIVTGGGGDGDGRVFELTKAASSSSSRRRCGVCGDKSRRTFWFYRGRFDGEDVFIHVACVKELAVRRWEASYRRRSGAGQIALAGAPLMEGALQSLPRRTRRSGGFERFSKIVGVIVSAIIAVIFGNPMGLIAAVAGPDGLLRG

SEQ ID NO: 40055 - protein, 480 aa, Oryza sativa
MPSHQPVAGMQAIDPDYVKQPSSMASTSEPNRNPKYDPKKPHITDLPITRSNWYKHVNWLNVIFIIGMPLAGCIAAFWTPLQWKTAVWAVVYYFWTGLGITAGYHRLWAHKSYNASLPLRIFLAAVGAGAVEDSIRWRSRDHRAHHRYTDTNKDPYSVRKGLLYSHLGWMVMKQNPKRIGRTDITDLNEDPVVVWQHKNYIKSVVFMGLVSPTLVSGLFWGDWMGGYIYAGILRIFFVQQATFCVNSLAHWLGEQPFDDRNSPRDHVITALVTLGEGYHNFHHEFPSDYRNAIEWHQYDPTKWSIWLWSKLGLASNLKQFRSNEIEKGRVQQLQKKIDQKRAKLDWGVPLDQLPVIEWDDYVEQAKNGRGLIAVAGVVHDVTDFINEHPGGKTLIKSGIGKDATAMFNGGVYFHSNAGHNLLSTMRVGVIRGGCEVEIWKRAQRENKDVGLVKDNQGNPIIRAGNQITKVAQPIESASAA

SEQ ID NO: 40056 - protein, 331 aa, Oryza sativa
MSETDLEDVVFTKGEPVSYQRPTSIHHWQLRDLISAADTEHEFYCVHDTKIYCYDTDTKQSKLVSNLGFTPNSMTCRGDFVAAGGLHGELEVRQLACGEVCFKGAVGTTVNNALHLARISGGEARLFVCCNDNTIKVYKLPSMESATVIRCPCPINYAALSPDGRHLVAVGDCNPTLLYQATPTGFVQLASFTEASDVGMCCAWNAHGTSFSSCAQDGAVGVWDQRSGACIARLSCSTATRCVKFSAAPLDLLAVSEHEERVHLFDARRWASRQTLGLLGGGAAGVPPGAAGISGIAFTQGGRLWVGLEAGCVGYDMDSLQRRTFSCADIL

SEQ ID NO: 40057 - protein, 108 aa, Oryza sativa
MRTQTSHRSPAARQTALARPVSALAAHAARANATASPALVTASSLTAVVRDADTLMTLQIAPPKTSTCTRRRPPAVRVSSFALKSLLFLPLPDWTAICPQSFTVTALK

SEQ ID NO: 40058 - protein, 257 aa, Oryza sativa
MGRRERTPSPPPRPPMGRPPAPEGTYSFEKYENGKPKWAPAPDNQQDYRDYRDTRRDQRRPRRAETYDDAAPPPPRDTPRHRPRRYSSSSDSDSAPPPPRRSKRHDSPRRDRRREKDSYDSYDEHYPPRRPRRDRDGYVSDNRYNRPRNDSRDRYRRDDRDRRDRDRRGDDRYDDMFNSGSRRDTRRYDDRDRRDRYDDDRYRDRPKSSGGRGMGKPGQPEWQRQAISMSKDYAMPIIKKEGQKYIQKQMSGFGSKR

SEQ ID NO: 40059 - protein, 764 aa, Oryza sativa
MSSVESYDIHLGFWTNWSHGKIQGGTITITRQHGNFLIAFLAIFIGAAGKSFWRLGCFMLHRYLSTSAPEDGLHHQRQVILRNSDTAQDGAWRLLLSMLAWRSGRRARRPVWRLLPIIIVAFAVSAAFGVASIFSSNVTSETLNQVLLKGTRCGSINAGKEKDPDKQLALLMPYWASQTTKFLNYGMQCYTNQTSTDGCNLYIKPRLPLESKRGIPCPFGDNICKSDNDNLLMDTGFLDSREDLGINSATEDRFQMRIVQKCAPLKTQPYVADHNDTEYGVLRRYNYGKIRNVRGVLNFTYELPISFAFLPDDNSTSANIPRLDYDLGVERHWATDNETKMADMNRWYPIRPLYLDDADVQLAFLAAPEIRYSAPINDPWFSARRKASEIHDQRSGKEFASYKQDESLGVMGCSQQFQYCNPNLPEGQRCEPLRGMIDPRASAAVKKIFTSESQFDVVRWADSLWTGSISTISSTLSYAGAAALRARYSLSYGYSGPLPDNQWQLEAEHWSYAMLASLQHTFVRASNGPPETLEVFREPPAADEQVAQKMCTNQKIVSNKYSSFNVLGVSLILVFGIIIIVLDMGLEPLIAKMQQGKYSKAKQDDESIDYSEKGEHPLYSVVEWSQNNMLQLQRLGQEEAHFGEWSKCDQDVPVTEPGQLLAPLDLRKITHPRLQQPKGTPNSSEWDGIVPPKPWGMRRSDTGMDTLIEEAQAEKSGKKLESEDKIQVVVRAVSERNGTEGLGLHVDEQSRTHAQEGQNWRALR

SEQ ID NO: 40060 - protein, 184 aa, Oryza sativa
MSSQETGLPQGWEVRRSNTKNLPYYFHADTKDSRWEPPAGTNPEQLKQYMAQHHSSKGVAPANFAHSGDKIRVAHLLVKHRESRRPASWREPNITRTKDRANEMIKEYQAQIQDFEEGKGGKSLSELATTESDCSSARKGGDLGFFGRGDMQKEFENAAFALQKGEISQPVHTASGVHLIQRLE

SEQ ID NO: 40061 - protein, 235 aa, Oryza sativa
MHSKFAALLLPALAAAYPQSGSAPNPDDITITSTTYSGNGCPQGSVSTSSSDDKTVITYGFDQFQTYIGPGVASSEKSKNCQLHLNLKYPGGFQYAVVDATYHGWARLDDGVTGSFITTYYFSQDAGKTQTTRSSFTGGGALKDGQVYTKQDSVETTATIWSPCGSNGILNINNRISLTSKDSKASGELSNDDATVAFTQQLHVAWKKCTPGSGSGSGSDNTIGIGMPSSDVIIN

SEQ ID NO: 40062 - protein, 56 aa, Oryza sativa
MPSRSRTRGGDGDGDGDGLPAGDLKPGVIRNLPTFSRLLINKWPPVFRQRFSYPFR

SEQ ID NO: 40063 - protein, 120 aa, Oryza sativa
MPPPPPSPYTPCSSILYSKSSIRASSDPPRQAGNPHTPATFVAVVNILSARARSLRSTLMPPPSLCDSLPWNCGHATSALLSIPSPPEPEARDTRPEVSVHFCLCSRAWRGADSGRRHLV

SEQ ID NO: 40064 - protein, 248 aa, Oryza sativa
MDRRPPLAVSPRRLRPRPHRAAAAGAAPRPPVACSVQTPPGSIKKATTPMRSSFCALPTSRLEPTPRAKLDFAAAPSPARAAVAAGKENRHVDDEVSLDLTAMAMPTPMPTWTASPLPPPTSPLFERGRLYDLYSARRNERLKRKHGFPAGEEEAEAMAADPCVAVELSKRRGAKKMTGAESVRRSVPAAADFSAAGRAATSTLGLRSSLRSSKEMKKTSAASSSFAGAKSPAAKERRASTRSSARRF

SEQ ID NO: 40065 - protein, 312 aa, Oryza sativa
MPWGLQTHTYAPAGVDLRNKWQICGNQPGEPVEPRELGLGAPPDGLYLREDIEIKCNVTMISFVKKEMQAASKKMVERMIKKAELLDAGVIQGMMENGKLKTHNPQDRRAADHKSPQPSPTLPYQMPMSPTRQSTFPNQMQMGQPAGGDSKYVPPQHLLGQNNIVMELPGDYYHPQQSPNLLHPNRASTASDSTAGGAHSPAPPSDARWSQVSSTSSRPSSYAPSEGMRSPGLEQKAFAAELPTMEETREEHEARRERDNNAPGGGHKYVYNPADYQNLQAQYQPAPPYVPHANVTGQQGGYGQGAYQGYQR

SEQ ID NO: 40066 - protein, 488 aa, Oryza sativa
MDAAAREAQVQGSLEWRVTVPEGSSVTVEHEAGVAERAWAWVVRMLVAVRAAVAGFARKVWKIGADDPRRAVHSLKVGLALTLVSIVYYTRPVYDGVGGNAMWAVMTVVVVFEYTVGGCMYKGFNRAVATASAGLLALGVNWVADKSGDKLEPFILSGSLFLLAAAATFSRFIPTVKARFDYGVTIFILTFSLVAVSGYRVDQLLDLAQQRMSTIGIGIVICLAVCVVIWPVWAGQELHLLTVRNMEKLAGAVEGCVEDYFAAKPAAAKSEGYKCVLNSKASEDSQANLARWEPPHGRFGFRHPYAQYTKVGAAMRHCAYCVEALNSCVRAEVQAPEHVKRLLGDVCTRLASQCARVLREASTSVAAMTSPKTLDFAVADMNTAVHELQGDLRALPPVLALEPAAEMSLMDAMPLFTVASLLIEISARIEGVVDAVETLASLASFKQVEDDDDKKGQTEMKVHPLNVPDDHDASTHESQTTTKHPEQV

SEQ ID NO: 40067 - protein, 254 aa, Oryza sativa
MGRVIRNQRKGRGSIFTANTRLNKAPAKFRNLDYAERHGYLRGVVREIVHDAGRGAPLAKVVFRHPYRFKQVTETFIANEGMYTGQFIYAGKKAALTVGNVLPLGEMPEGTVVSNVEEKIGDRGSLGRTSGNYITIVGHNPDEGKTRIKLPSGARKVVHSGARGMIGIVAGGGRTDKPLLKASRAKHKFAVKRNSWPKTRGVAMNPVDHPHGGGNHQHIGKASTISRYAVQGQKAGLIAARRTGLLRGTQKTKE

SEQ ID NO: 40068 - protein, 44 aa, Oryza sativa
MPDGTTLALYSDGLHVGKTVVPLSPEYLAVLASKNIRLPAAPLI

SEQ ID NO: 40069 - protein, 561 aa, Oryza sativa
MKLVSVLGSFLCASTALAANTPHKLGAFSKVKRIDDINRVPKTVPVVERRIAGRGFRNAEIQKRAESFFATEKTKPFAVNGTGIPEVNFDVGESYAGLLPISDDPHETRKLFFWFFPATLDKRPEEIVIWLNGGPGCSSLSGLLTENGPFTWMEGTLAPTQNPYSWSNLTNMLWVEQPVGVGYSEGVPNITNEIELGNEFRGFYKSFVDTFNTHSWKTYITGESYAGMYVPYIANSFINAKDKKYWNLAGISINDPIIGDETVQQQVVMQPYVEFWQKLLFLNDTYMERSRKHNKECGYTQYMDKYFRFPPPKGPFPVLPPPSNANNYSCDQFDNFYGAIQEVNPCFNIYHITDMCPFRYSQLGIVNQGDYSPPGAEIYFNRTDVKLALHASPNSNWQQCTNVNVFGNGTDNGSDTSMGPANNGVLQNVIEKTNNAIIGSGDLDMLLSTNGTLFAIQNMTWHGEQGFSQYPSKNLYVPYHPEYNGGALAGAGYQGYWTKERGLTFYTARLAGHELPGYTAGVGYRMLEILLGRVKDFSSTDNFSGQSGNFTGETPLYKREL

SEQ ID NO: 40070 - protein, 144 aa, Oryza sativa
MPLLFCGGDLLTLDCCACMATLCTMYYARRRHNLIGVVTTCGVVMAGAGFSLSTARRCTSVYTLLFSLLMGHVGSALLFFCCNTILHCLVLDRIIFLDHIIFRTSIEAVYKTVDGGGVLRRALWLVLYILIIRAVSLRSVTIDC

SEQ ID NO: 40071 - protein, 226 aa, Oryza sativa
MLSNHLSGYATIRKFYDLRDEEVLATNGSKPAHRPMARKRAAAHALSVIIASAASSIRGGLYDPDIETVVQVDVLLPLLGEALVFVNQPKRTLTLRHLYDLLAAVEDIDTAPSMIRTQCEEVLATTLSAAHDSAATSQRNLQKSISNLTTTSSQFSLIEFGSTADGGSAENSAMLVQGGGVDDAQRGWDWRRGFKKGASGQDIISILRLGIAREIGRAFAEGEVRA

SEQ ID NO: 40072 - protein, 381 aa, Oryza sativa
MRETGATDEGHACEVVVAGGDGKAAAARRRRRLELRRLGLAAEDDAAAKRIRSVKDGSSSDDSSTEVVPRSWPACVSHGSVSVIGRRREMEDAVAIERTFMASTGDGAGAIRGGGEGEEDFFAVYDGHGGSRVAEACRKRMHVVLAEEVSLRRLRGQSASGGDVRWKEAMLASFARMDGEVVGSVAAAAPRVDGTEPSGFRTVGSTAVVAVVGRRRIVVANCGDSRAVLSRGGVALPLSTDHKPDRPDELERVEAAGGRVINWNGYRVLGVLATSRSIGDYYLKPFVSAEPEVRVVERTDKDEFLILASDGLWDVVSNEVACKIARNCLNGRAASMFPESVSGSSAADAAALLAELAVSRGSRDNISVVVVELRRLKSRAA

SEQ ID NO: 40073 - protein, 196 aa, Oryza sativa
MSSTGLSRGRRCTIASRLNASAEAAVAATSSSRGEKQKAAVARRVEYYDEEDARGEARYDVFINHRGVDTKRTVARLFYDRLVAAGVRAFLDNQSMRPGDRLDERISEAISQCGVAVAIFSPHYCDSEYCLRELALLVESRKKIIPVFYNIKPSDLVLPQAVVESVAHHPRDIERFKFALREVKNTVGLTYDTATG

SEQ ID NO: 40074 - protein, 247 aa, Oryza sativa
MRAAVICVLALAFVAFAAASVRAADVEMVEAELVAPDHPALMEVQRKRVRVGDRGIDGVAKKLKNAAGKAGKPKGAKGKGKTKVAPKNKAKPLTGKPPKFNGNTGIAGGIPGASKVPGQPSGSKGKPEAKNKRRFGLGAKGGQKSDKWNPYAKHKPTPKPKDNKHYPKPGDGPSKTIGGHGTGAFGGQAADHWDPNAQDAEAVNKDATKGGPIGGAYEKLFGHAMGAKKPPVPSGPLTGKPPQFRKP

SEQ ID NO: 40075 - protein, 76 aa, Oryza sativa
MRPGRMRNGFGWSADRLGAWTVVGRAGGQSPGAPRPRQPSSAQPVTARLWRAPRGAAPQRPAGSPSDPSCNTDQGV

SEQ ID NO: 40076 - protein, 333 aa, Oryza sativa
MACTIEDITDNFDPLDYDKALGDLLVGHEGNVQQYLVTVFDFVKRKTNFFKEPDAKRRILDAYKQVTGETDGFKAGFFGSAKPAAPKPADKPVPKASPSAGATLSSSEPEAASASSSEPPAAAAAAAVDNAAAAPEAEPQQQPEAGSSQDTELAAEKPDQNKGLKPNAGRGADLEAYSWSQTLQEVSVSVPVGRGLKAKQLDVAISKQHLRVGVKGQPPILDGALAEPIKADEAMWNLVDGVVELTLSKAEGMHWWSAVMAGGPAIDVQAVEPENSKLTDLDPETRQTVEKMMFDQRQKALGLPTSEETQKQEMLKRFMAAHPEMDFSNAKIM

SEQ ID NO: 40077 - protein, 335 aa, Oryza sativa
MPSLTTTFLTTAVTLTSFVTVTAAQPPSGGKYQPPEIISPIETLPQCVQTIVFECLQNSPCAPGDYSCICKDLKTLGFGDRVKAYCPKEDYPAYEKFEYWVCNPKPPKSSSSSSSYKSSSTISIPPCTLERCKTPTPTPTPIPPKYNTTTIVIPTPVGYNTTKLITQTTTINGIPTVIVVPGGAGGGGGGGGGGGGGGGGGAGGAGGNANVNVSNNNSQSQSQNQNVNPAPAPAPAPAPAPAPAPAPAPAPAPAPAPAPAPAPAPAPAPAPAPAPAPAPAPAPAPAPAPAPAPAPGTPVAPEVPAFTGGAAQFSSVRAVALAGAMGLMGLVFAEL

SEQ ID NO: 40078 - protein, 94 aa, Oryza sativa
MARKAIIVFALVVVAALCLVASAQDPQANKQGGGGPPGYGHYPPWNGGYPGRPDRPWDRPDRPWDHRPHPGPGGHCRWGCCGHRNHWGECLRCC

SEQ ID NO: 40079 - protein, 95 aa, Oryza sativa
MAARTYLAVFAFCAILMLSAVARSASARALRERAPEEAAVVAGRAGVAGMMKVPAAAAGEAAGRRSGGGAVVVVGGAAAHESKRLSPGGPDPQHH

SEQ ID NO: 40080 - protein, 443 aa, Oryza sativa
MPRPPEPVHVLLLAAIAVQVFVRCTAQAASDQKPLVSRLAKDYNTSLYTISVKNGAPPLVVDLAGALVWSTCPSTHSTVPCQSAACDAVNRQQPRRCRYVDGGWFWAGREPGSRCACTAHPFNPVTGECSTGDLTTFTMSANTTNGTDLLYPESFTAVGACAPERLLASPSLPQAAAGVAGFSGTTPLSLPSQLAAQRRFGSTFALCLPVFATFGDTPVYLPNYNPYGPFDYTKMLRRTPFLTNPRRNGGYYLPVKRISVSWRGPGDVPVSLPAGALDLNARTGRGGVVLSTTTPYAIMRTDVFRAFGKAFDTVVTRGTESRMARVARQKQFELCYGGAGDTMLSFPMMKRTGFDAPAITLELDAGATGNWTILNGNYLVRETCVGVVEMGPEGMPVDGEPAVVLGGMQLENILMVFDLDKRTLGFSRLLEWDLTNCYSASFL

SEQ ID NO: 40081 - protein, 320 aa, Oryza sativa
MSDCSGCVYRALKKVDPEMGISAKGMAVVNSLVHDVLARLAVEAGRLARYNARKTVTARHIQTAVRLLLPLGLDKGAVVAGTEAVEAHRSKKVGKAAATAAADAEEDEEEAEEEEAGGAEAGVEAEEPTAQASLAFPLARMKRAIKDKTKMLVGAEAMVYLAAVMEYCVGLVLRPACECARAQSMLRITPRHVQLSIRNDKSLGRFFADAVAPPTLPTGLAGAGALPGLPSLLPSFHVPPAAAAVPTEAQAPVAEAVPGLRRALAAAGMERCDESSAFFANPSQAALPALAAAVAAFEISQDIDELKDTLTHTLRHFSTS

SEQ ID NO: 40082 - protein, 347 aa, Oryza sativa
MQWATLIAAAAFAQNAAAQNMLRFACSQLVVERTDPLVNPGMKYTPHLHQIVGGDAFNVTMDPATDLAQTSKCTSCSFVQDKSNYWTAVMFFKAKNGTYIRVPQIGNGGPQGKLINDGGLDVYYIPSGKTTAFKKGFRMLVGSATNTDNSKVKLANICHRCWTSPSESTFVGGAPCTGSDTVAIPKDPKCKLIRQTLIFPTCWNGKDLDSPDHQSHVAYGQGSGANGGGACPSTHPVKLPQTMYELMWDVSKFADKSLWPTDGSDPFVYSMNIGGSAAHGDYVFGWEGDSLQKAMDNQCNLNNACPKAGLTTQQPAQYNACKKKQQAPEEVDGWLKEMPVGNMAIKA

SEQ ID NO: 40083 - protein, 233 aa, Oryza sativa
MVKAVALLALLAPLGANAHYIFNRLIVNGQSVGGEYAYTRKNSNSYNPAFTNDIVNSNDLRCNKGAQPGNTPTYTVKAGDTIGFKLFNNEFIEHPGPGFVYVSKAPGDVKSYDGSGDWTKVMQSGLNNPSTPGVDTAWASWQKDRLEWKIQQSIPAGEYLVRVEHIGLHEGHVGKAQFYIECFQLKIESSGTGKLSPTVKFPGAYKTNDPGIAFNKWNNPKSYTFPGPAVWSG

SEQ ID NO: 40084 - protein, 198 aa, Oryza sativa
MKRFAFEDSDMARVLMLMSSHGQQEQALALPVPVQLPLAAARGDRAPERAFVCKTCNRVFPSFQALGGHRASHKKPRLDGDGDLSLSKPKLHGCSICGLEFAIGQALGGHMRRHRAMTGGMPRAIVVDKKPDVVDVHVHGHDDDGGIKRGGLWLDLNHPPCDDAGDDDAECGHNAAGAGITFHQFLDTGAMAVDCVGY

SEQ ID NO: 40085 - protein, 249 aa, Oryza sativa
MSRQMLPPALALYLQLSLLLAASSTMLSTCRRPLTLIAGALKHNLALRPTPSILSTIIWMITLPPGFRTSTFHNSLVTMSAALKAQRPATTRASKTPNPLSSSPTLRIKSLQKLLTSSPILARPLLDATMELLRLVTEGHDDRVEGLADGSPGIKGDRGRGPLLWPDGASLPSREVLLTLMWAIRVEERNMKARREAKISPQPAPTRRPVSNVPQDNKSTNQNYILSVASKKRKRDTNTTSNKRLRPGY

SEQ ID NO: 40086 - protein, 205 aa, Oryza sativa
MATWSNASSLIVAAVILLGLSSASVAHGRRGRRSFVSSYDEPCMEMRLYLHDIIYDYSNSTSNSTSAAATKPTPLSTAVSNPGYFFGEMVVFNDPMTEGRALPPSPAMEEETAVRAQGVYLYDKKEAPNAWFAFSVVFNSTGRRGTLNLMGADLMSEKTRDLSVVGGTGDFFMSRGVATLSTDEASADLSYFRVKVDIKLYECYV

SEQ ID NO: 40087 - protein, 171 aa, Oryza sativa
MDTIMSPNSPRLAVMSSQLTDGGGEEDEDLRPDDTTLLSRNDGGDEEGAEVERRTRTRKRSVAAKAPPATPAWRCRCHSSRGLTKKSLFLLFGSIFISVCPRYLLICWSGYWHEEITGGVEAAARRCGRRSTAAHDGSGYLASRGGPGFSTWLFEIVKDRKIFPTQDLIVV

SEQ ID NO: 40088 - protein, 250 aa, Oryza sativa
MAWKDSYLDLVLIPAGIVFPIVYHVWLWHVVRRRPLSSPVGINTATRRLWVLGMMKDNEKKAVLVVQSMRNVIMGSTLMATTAILFCTGVAAILSSTYTVKKPLSDAVFGAHGEYMMALKYVTLLLAFLLSFLSHTTAICTLNQATFLLNTLSSSSSFAADIAGLPVTKDYVADVLERGFLLNLVGNRLFYAGVPLLLWIFGPVLACLCSVVMIPILHSIDVVYVDGSSKGEANARVEMVYESDESVMQV

SEQ ID NO: 40089 - protein, 153 aa, Oryza sativa
MHHEQMQEAVPGDNIGFNCKNISVKDVRRGFVCGDAKNDPPKGCADFNAQVIVLNHPGQIAQGYCPVLDCHTSHIACKFSELVSLIDKRTGKATEENPKAIKNGQAAIVKLVPSKPLCVETFTDYPPLGRFAVRDMRQTVAVGVIKSVTKKEK

SEQ ID NO: 40090 - protein, 247 aa, Oryza sativa
MMMSSRSSVSLGVLLLLAVILSAGAADPDILTDFVVPSDTDPSGIDGAFFTYKNLVTGNSGDPAKLTVTKATHAEFPALLGQSVSYAALVFGAGTVNPPHIHPRASELLVVVQGPLLVGLVDAARNGTVYTQTLQTGDMFVFPKGMVHFQFNNGTDVVARAFSAFGSATPGTISLPAALFGSGIDDTILDKSMHTDQATVDQLKQDQAPPSPRPSPGSSSSAAAALLPSRWAITLLLCFAASYYFYF

SEQ ID NO: 40091 - protein, 407 aa, Oryza sativa
METGAAGQAGGGGPAAAAAAGEYWSEALKSFLDHIPVSSVNGAIQPSPSPALEIRLDGSVPDAIDSMYRSDVAGAVIVDDVRTSFGKFVDRDIGFVEFPSLVLWAIEEFDKLGSGAGDKNSDFLTSLKQHPQIAETKIAWLAKSFLWEPFFPVRSHDTLFHAMLLFSKHRRINVVPVVELMNSSVIGFVTQNAVMELLLSSSGLEWLDKIADKQLSEFRFANTTKPVSVYSDQTLADALHILSKEKIGVAVVDRKTSCLIGSIQCSDLYQLLDDSSLFRNRKTLSAEEFVKLKSKDEDISTENSSASGGQNVLSLRTGQRITAGLPVTNRKSDTLKQAMEKLTASRSSCSFIVDEHGRVEGVVTARDIISVFSPPCMDSRIDGGTFFSAALAQTGCRVEHGQMIQNS

SEQ ID NO: 40092 - protein, 345 aa, Oryza sativa
MAATLRWGGGGLAVAAFAAVVALSGLLGVAANYGGGGGFLFPQFYQHTCPQMEAVVGGIVARAHAEDPRMAASLLRMHFHDCFVQGCDASVLLDADGSGRFATEKRSNPNRDSLRGYEVIDEIKAALEHACPRTVSCADIVAVAARDSTALTGGPWWEVPLGRRDSLTASLSGSNNLIPAPNDTLPTIVGKFRNQGLDVVDLVALSGGHTIGNSRCVSFRQRLYGQLNSDGKPDFTLNPAYAAELRERCPSSGGDQNLFALDPASQFRFDNQYYRNILAMNGLLSSDEVLLTKSRETMELVHRYAASNELFFAQFAKSMVKMGSISPLTGHNGEIRMNCRRVNHF

SEQ ID NO: 40093 - protein, 249 aa, Oryza sativa
MTEKPKINIPEQEVEFENLGTTIEVIVNGTTTVAGSDFQLVQFHMHTPSEHHINGEYHPLEVHMVHQGVADPTQIAVVALMFQVASGESSSIIKSLASSVSTISTPGTKVAIPGGIDFTDVLAKVESSQMLQYSGSLTTPPCAEGVTFMIVKDPLDISVADFNAIKSVVKFNSRYIQNSLGQVNMLEVGNRAGTAEAFPAPPVVQPGEAVANGTEPVRAMTVGQRFTVTELHGQPTAIAAVVVARKRKY

SEQ ID NO: 40094 - protein, 167 aa, Oryza sativa
MANYHHQEYYQMAAAAAVAWPREPDSPQLSIMSGCSSLFSISTLRDDDDGGGVRLAGAALPATPVSLAGIAGGASTPGGDGVDMEVRQQSGGSGDDRRTIRMMRNRESALRSRARKRAYVEELEKEVRRLVDDNLNLKKQCKELKQEVAALVMPTKSSLRRTSSTQF

SEQ ID NO: 40095 - protein, 393 aa, Oryza sativa
MKGLFATAFLATGAFALPSPVENGPITARAAAACATPVTISGNPFASRSIYPNKFYSSEVVSAAAAMTDTALAAKAKKVADIGTFLWIDTRSKIDVVEDGIKDVACDQIAALVIYDLPGRDCAAKASNGELAVGEINVYKTEYIDPIVAIFKKYPNVAIALVIEPDSLPNLVTNIDLQTCKDSADGYKEGVAYALKSLNLPNIAMYIDAGHGGWLGWNDNLKPGAKGLADVYKLAGSPSGVHGVATNVAGWNSYDLSPGEFSKATDAQWNKAQNEKEYVALFSPELKSAGMPGQAIIDTARNGVTGLRQEWGNWCNINGAGFGVRPTGSTGNSLVDAFVWVKPGGESDGTSDTSAKRYDSFCGKSESFKPSPEAGQWNQAYFEMLVKNANPPL

SEQ ID NO: 40096 - protein, 439 aa, Oryza sativa
MSFNYDRYDRRNNSSSRSRNTLGYWVPLTLTVVVATAGLAAWVWSPREDHEDASSDDDLSYGEDSSREKTHGKAPIGPQGTGSRDAMSTGVVRENEQDFVSRAQGIIRRTPSPQQLFDTVSKKTAAGWAAAGAAAGAALASIREEDKDDYGDHNRWSEEATIRRNVEAQSSQSAAAVATQSKSFAASIKNPPTGGKRKTVVLVVSAESLMDSPHDDDASYRSENATILSHLPDTDFNNTKLFVLIYSPNQRSRPQSRAGTSSLGDSYSAISTPARTPGEELQSIDPQPEERTVYTPALSARSSDNVLWNTLHAQALRLVENPSMVMPFSQASGFVHMLRHIGPDLVYVVDALSGMSGSNIEDIKRWVGQTIVVVGSDGTGLGGLVDTDDEGHSGKGKSTEHSDTKWWEKADMVGLGKGVEVVDASRLTDDYERRVGGRE

SEQ ID NO: 40097 - protein, 319 aa, Oryza sativa
MAYSRQIFVCSAMAALLFSAVVSAQLSTDFYDETCPDALDIIESAVRDAVSKESRMGASLLRLHFHDCFVNGCDGSVLLDDTAAITGEKNAKPNKNSLRGFEVVDDIKSQLEDACEQVVSCADILAVAARDSVVALGGPTWDVELGRRDGTTASLDAANNDLPPPTSDLADLIKSFSDKGLTASDMIALSGAHTIGQARCTNFRGRLYNETNLDATLATSLKPSCPNPTGGDDNTAPLDPATSYVFDNFYYRNLLRNKGLLHSDQQLFSGGSADAQTTAYATDMAGFFDDFRGAMVKMGGIGVVTGSGGQVRVNCRKVN

SEQ ID NO: 40098 - protein, 516 aa, Oryza sativa
MLKSGLQRSLRASVRRPALRNQFQPVRSQFAPALTARYASTGSQKEGSIASVIGAVVDVKFEGEQLPAILNAITTQNGDNKLVLEVAQHLGENVVRCIAMDGTEGLVRGAKAVGTGAPITIPVGHGTLGRIMNVTGDPIDERGPIKTDKFAPIHADPPEFTEQSTSAEVLVTGIKVVDLLAPYARGGKIGLFGGAGVGKTVFIQELINNIAKAHGGFSVFTGVGERTREGNDLYHEMQETSVIQLEGESKVALVFGQMNEPPGARARVALTGLTVAEYFRDQEGQDVLLFIDNIFRFTQAGSEVSALLGRIPSAVGYQPTLAVDMGVMQERITTTSKGSITSVQAVYVPADDLTDPAPATTFAHLDATTVLSRGISELGIYPAVDPLDSKSRILDPRIIGQDHYDTATKVQQILQEYKSLQDIIAILGMDELSEADKLTVERARKIQRFLSQPFAVAQVFTGIEGKLVDLKDTIRSFKAILNGEGDDLPEGAFYMVGDMESARAKGEKILAELEKS

SEQ ID NO: 40099 - protein, 264 aa, Oryza sativa
MKVSFFTALTAFAASAIASPVPVPANNGPKVMNMARSAFERSSLAKYDRMVRDAEVKRGNAITDSVNYILVLQKDPSNGADAYQDEIDSANAKEILGKRGNAITDSVNYILVLQKDSSQGADAYQDEIDAANPKDVLGKRAVNPITDSVNYILVLQKDSSNGADAYQDEIDAANAKEILGKRAVNPITDSVNYILVLQKDSSNGADAYQDEIDAANAKEVLGKRAVNPITDSVNYILVLQKDSSNGADAYQDEIDAANAKEILG

SEQ ID NO: 40100 - protein, 200 aa, Oryza sativa
MVTNMTHDDYVSLCLMALAQAGVGGQWPAQKQQIDMAPPAPERELLRFRCSVCGKAFPSHQALGGHKASHRKPPTAALPMHVIDAPPPPSAEDTASSSTTTTTSGGGRHRCSVCHRTFATGQALGGHKRCHYWDGLSVVSVTASASGSGSSSVRNFDLNLKPVPETVAAGVRRWGEEEEVQSPLPFKKRRLSSPSLELNL

SEQ ID NO: 40101 - protein, 352 aa, Oryza sativa
MGSIPTEQWAQVIEKTGGPVEYKKIPVQKPGPDEVLVNIKYSGVCHTDLHAVNGDWPLPTKLPLVGGHEGAGVVIAKGDLVTDVEIGDHAGVKWLNGSCLACDFCQQADEPLCPKPQLSGYTVDGTFQQYCIAKAAHVARIPKECALDAIAPILCAGITVYKGLKESGAKPGQFVAIVGAGGGLGSLACQYAKAMGLRAIAIDTGDEKKKMCTEQLGAEAFVDLSTSKNVVADVQKATPDGLGPHAVILVAVNEKPFQQAAEYVRPRGTVICIGLPAGAYLKAPVFESVIKMIRIQGSYVGNRKDSSEAIDFFARGLIKAPYKVVGLSELQMVYDKMQKGAIAGRYVLDMSK

SEQ ID NO: 40102 - protein, 288 aa, Oryza sativa
MKLTLTLLATSTLAQGFAIGFKLPKDDVPKRELSFVMATPTDAAAGLPTPATGVTAAPAAPTAPPAAPPADGSAALPPAPPAGSVAPPSACAAPPPPPTGSGAPLPPSPPSDAPAPPSGAPPAPTGKSNDVAPPPPPGNGTATPPPPPAGDCAPPPPPPAANGTAPLAPEAKGKGKGTGVASAAAAAVTGAAPPAPEAKGKGKGTDVAAEATAAPEAKGKGKGTGTGLPTPPAATGAAPPPPAASGAAPPAPGNATAADAKGKKSNQAAAQSAGKAGAVRRSRVLKMF

SEQ ID NO: 40103 - protein, 493 aa, Oryza sativa
MLRARYQQCQDKNKSKMNGVHHTNSNVFPEALKSLKEADPEIYGIIQDEKARQWKGIELIASENFTSRPVLEALGSCMTNKYSEGQPGARYYGGNEHIDRAELLCKKRALEAFSLDPAAWGVNVQPYSGSPANFAAYTALLQPHDRIMGLERPSGGHLTHGYYTGTKKISATSIFFESLPYKLNPQTGFVDYDKLEEKALEYRPKLIICGGSAYAREWDYKRFRQIADKVGAYLLVDMAHISGLVAAGVVDSPFEYADIVTTTTHKSLRGPRAGMIFMRKGPKPADRLAKGEPEGTEYDYESKIDFAVFPSLQGGPHNHQIAALAVALKHAASEEFKAYQRQVVANSRALGEALKKHGHKLVTDGTDNHLLLWDLRGEGITGAKMEKACDEAHITLNKNAVVGDVSAMNPGGVRIGTPAMTSRGLTEADFEKVAEFLHEVLQVAKEVQASHGKLLKDWIVGITGNAKLAEIRSRVEAFASSFSMPGYAVDDLQ

SEQ ID NO: 40104 - protein, 288 aa, Oryza sativa
MKQMIWHVGSVLLILNKVAHVEPEYNRVGHFLFRNAFEKLRYLNSELIASVIDFDNIAAAEAERRIDAKSAIIKPQQAQDWTDLSRISWSEAIVSVLADNKDFAEKTNGTDELALHEMIEQYVALTGHDLAFIKQCLTSTNINTKSHIQTIVKTLLNGSSFALFFPNSEAKFSVKIGLLVWYCVIANSQAARSFHIYLQALYDQLDEDEAEQFEKAMLAWETSSLDQFKIYIPNSYQSYQLTAELAINEPITPQQWSELKTRSQPFLEFLKQEEEEEEEEEDEEEDEN

SEQ ID NO: 40105 - protein, 243 aa, Oryza sativa
MHCNTLSLAAVALLASSVNAHGHVAKVIAGGKEYTGGIPHGAPSDAVGWAAGNQDNGFVEPNSFGTADIICHKSARPVSNAVTVAAGDVVTLKWDTWPESHHGPVTEYLAPVSGDFSSINKGSLRWTKVAEKGLVSGSNPGRWASGELISDGNSWKFTVPKNLKAGNYVLRHEIIGLHSAGQTNGAQAYPQCINLKVTGSGSQALSGGGDFTKFYTPNDAGIKFNLYGQFSSYDIPGPDVQRI

SEQ ID NO: 40106 - protein, 282 aa, Oryza sativa
MSSQVATPAPASAAPATPAAPAKKAAKPKTAKPKAAKSSVAAAHPKFIEMIVEGIKKLNERGGSSRQAILKFIQATYKLDAKQANVHLKLALKQGVKSGALKQAKGNGASGSFKVGEAKKAAKPKVAKPKKAAAAKPKKAAGEKKAKSAKPKKAAGEKKPKTAKPKKASGDDKPKKNVKKIVKPKVPKVSASKKAITEAAAAKPAAPAAAAPAAAAPAAAAPKKVKKAAAAKPKKAAGEKKAKAAKPKTAKPKAAKKPSAAKKAAAAKPKAAAKKAVKPAAK

SEQ ID NO: 40107 - protein, 345 aa, Oryza sativa
MAGVDRSRRSSSSPPPLPWTVRVQLAALSAAHRSDGSVRRLLFYLGDLHAAASPRPDAAGVRSVDVTIDASRGLWARVFCPPTNTAAVKLPVVVYFHGGGFVLFSAASRPYDALCRRISRGVGAVVVSVNYRLAPEHRFPAAYDDGLAALRYLDANGLAEAAAELGAAVDLSRCFLAGDSAGGNIVHHVAQRWAASTTSPSSSLRLAGAVLISPFFGGEERTEEEVGLDKASLSLSLARTDYFWREFLPEGATRDHAAARVCGGERVELAEAFPPAMVVIGGFDLLKGWQARYVAALREKGKAVRVVEYPDAIHGFHAFPELADSGKLVEEMKQFVQEHSSNRMA

SEQ ID NO: 40108 - protein, 266 aa, Oryza sativa
MASIQLNFTLRTSANCKTVHLLGSWDGYQGQLPLSKDPKKSGGWTGCFKFNGATLQQGQRYWYYYIIDGYHVSHDPAKDHTTEPTTGRKLNIIDIPAAKSSHAKTSSSADRKASRRISTASAASVAKGRALSPERIVAPAPQRPGQTRQVINTQYDKTTLEELNRRFAQQTVEDSSDSEYDSDDSGSDVPSLTSRSTNSSSPSSVSSGSSCCTCERFGITRSGDRVKLDCGGARCGYSDDSESCSSEDEYVYEEKTTRRQGVVIRA

SEQ ID NO: 40109 - protein, 293 aa, Oryza sativa
MGYVKVVKTSPYYSRYQVKYRRRRQGKTDYRARLRLTTQDKNKYNTHKYRMVVRFSNKDITCQVVYAAIAGDVVVAAAYAHELSNYGLKVGLNNYSAAYATGLLLARRVLTKFGLADTYKGCEEPDGEDYNVEAAEEGPRPFYCLLDAGLKRTSTGSKTFGALKGALDGGLDIPHNEKRFVGWTKEDGLEAETLKKYIYGGHVAEYMEEMEEEDPEKYNRHFANYLEEDLGADDLEELYTKVHEAIRENPVGEKKPRSKPADAKRWQPAKLTYEERKERLKAKLATLTEADDE

SEQ ID NO: 40110 - protein, 218 aa, Oryza sativa
MRTKTFVLFPSLGVGHLNPMVEMAKHLRRRGLAVVVVVIDPPDNDATWPTRRRASPRPTRPSRSASCRRRPARTPPRTRPGAPSTRSAWPTPCSGSSSARCPTPPTPSCSTRSASTRSTSRPSSPSPPTSSSRQAHAEGLLHRATGRRRRRQERRETPVPRVAGRAAAPECRVPLLRQQGRVPGGAAEGHSSWAGELRPPFPVGSEEPAGGAEHIAGA

SEQ ID NO: 40111 - protein, 225 aa, Oryza sativa
MNQSVSGGGVVRRAEDDLELGWLDAPLRRHLHVRRRRPRVRAPRLERLRLPRRHAPPPAPVAGAVRGEVHGAPERRAQPPLLEPVRRHRHRHVEPVHQAHAVLRQPARPVHAHLRHRHRRRVARVAPAAAVASAAGARHHAPGPRPRREREGGEAVAVAVEAGGRAGGVGDGGEAGVGGDERPDRVGAEVVEGEVGGGGRRRRRGEGGEHGEGQSHGYYLASLAP

SEQ ID NO: 40112 - protein, 274 aa, Oryza sativa
MSTITQQASQSSYPPILPKDFNANQPKTIRLYPLSNYTFGTKDGQPEEDPSVLARLKRLEEHYAEHGMRRTCEGILVCHEHNHPHILMLQIANAFFKLPGDYLRAEDDEIEGFKARLNSRLAPTGTQFTGEGVNDEWEVGDTLAQWWRPNFETFMYPFIPAHVTRPKECKKLYFIQLPRSKVLSVPKNMKLLAVPLFELYDNTARYGPQLSAIPHLLSRYNFEFIDEEGNVAACTPGVGPPTDGHVPQTKVLAGGEDVKMDTNGDGTGSDITLS

SEQ ID NO: 40113 - protein, 214 aa, Oryza sativa
MASSILLLVVLAVVSAPVALVMAGDPDILTDYVIPAGSNAENITGDFFTFTGFRNPLSMNMSMPMPNANFTVTKATMAEFPALNGQSVSYAVLMYPPATLNPPHTHPRSAELLLLVDGALSVGFVDTTNKLYTQDLAAGDMFVFPKGMVHFQFNSGNQPAMALSAFGSAAAGLVSVPVTVFGTNIDDAVLAKSFKTDVPTIQKLKAGLTPPKKA

SEQ ID NO: 40114 - protein, 276 aa, Oryza sativa
MGRAPCCEKEGLRRGAWSPEEDDRLVAYIRRHGHPNWRALPKQAGLLRCGKSCRLRWINYLRPDIKRGNFTADEEDLIVRLHNSLGNRWSAIAAQMPGRTDNEIKNVWHTHLKKRLDDERKLAAAGGGGGRRPHTRKQPKAAKSAAAVKREATPSVSVDTSSGVTCSTVTESSPSSADGDHRRQQQQTQHAAVKEESFSSGGELPAAAAAPTAAADMDESFWSSTEVTGMMAGLGDMDEELAIAGTSSAAAARSDDMEFWLKMLLESGDMRDLAVL

SEQ ID NO: 40115 - protein, 252 aa, Oryza sativa
MSNKSDQEQESSSSSSTTSKDQNSNAKTNDQHEKTTKESVESLEVQLPASINQISNSPLEYAYSFWFSKRPSKNAAAAAAASSTATSAPGQNLNYDANLRQVGTFNTVENFWYLYSHMTRPQDLQGHADIHMFKAGIRPLWEDDANKNGGKWIVRLKKGLATRCWENLILAILGEQFMVGEEICGAVVSVRFQEDLISIWNKSCSNQAVKSRIKDTLKRILNLPPSTILEYKSHNDSLKDNSSFRNTFYCDK

SEQ ID NO: 40116 - protein, 354 aa, Oryza sativa
MAERLLWASTMSGGEKTRGMGAMGTLVGQLGELLSRAVMPPPPRVCGAPGGPPVTAPRVRLSDGRHLAYEESGVPKEAARYKIVFSHGFTGSRLDSLRASPEVAEELGVYMVAFDRAGYGESDPNPNRTVKSAALDMAELADALGLGDKFYVVGVSLGGHAVWGALRYIPERIAGAAMMAPVVNYWWPGFPAEDAAAAYGRQSYGDQWALRVSHHAPAILHWWMDQSWLPTSTVVDNTTFLPNKRDADIRRTLTADGTLQKKKEMATQQGINESYYRDMTVMFGKWEFDPMALPEPPCPVHIWQGVEDGLVPVALQRHVAGKLGWVSYHELPGTGHFLSAVPGLGDTVLRTLFG

SEQ ID NO: 40117 - protein, 223 aa, Oryza sativa
MGNGMSPCLCSPPVHGEEAAAEAAAARLVFWGGAASQLVASAATTAGDVMAELPGHLVCAGDSFFIGLPIPALPAGEELAAGRTYFVLPAARFSCQQALTAASLASLSPSPAAKVSLAGGASSPFEYVTGDDGMALIRVLPEFIERAITCVARVAGGGKAGGEAAADDQLCSTPELRKHYMQLVGARQQRPWSPGLETISEAEKRRRRRSPVRLVALAKAASR

SEQ ID NO: 40118 - protein, 96 aa, Oryza sativa; identical to SEQ ID NO: 35557

SEQ ID NO: 40119 - protein, 377 aa, Oryza sativa
MAVSQRIQQSSFAGSKAGLKKAAVRAAPVRAVGSSIRAEKKIKVAINGFGRIGRNFMRCLETRTDSLLDVVAINDSGGVKQASHLLKYDSTLGKFDAEVKVVDDGHISVNGKVIRVVSSRDPTKLPWGDLDIDLVIEGTGVFIDTPGASKHIQAGAKKVLITAPAKGSDIPTYVVGVNAHDYKHSDAIISNASCTTNCLAPFVKVLDEKFGIVKGTMTTTHSYTGDQRLLDASHRDLRRARAAALNIVPTTTGAAKAVALVLPKLKGKLNGIALRVPTPNVSVVDLVVQVEKKTFAEEVNNAFKEAANGALNGVLAVGDEPLVSVDFRCTDVSSTIDSSLTMVMGDDMVKVVAWYDNEWGYSQRVVDLAELTAQKWE

SEQ ID NO: 40120 - protein, 219 aa, Oryza sativa
MQLSRPNVRAQSAPRSSRTSLAFKPVRSVSVRAATEEVELATSNGAVSAAGVPANMLDFEELSDIVRMVNDTDIVELELKSKRFSLSLKKKAALQEPVVQVVQAAAPVAAPAPAAAPAAPAAAPAAAPAAAPKAPAPAVVEGIEVTSPMSGTMYRSPAPGEPPFVKEGDRVKKGQTVCIIEAMKLMNEIEAEVAGEVVKVFVENGQSVAPGQPILIIKP

SEQ ID NO: 40121 - protein, 62 aa, Oryza sativa
MFSKATIATLFASLAAAQLHEPVGEPNGNPITRPLNEVVPACKQFTITWQPTTPNTVSVLLL

SEQ ID NO: 40122 - protein, 423 aa, Oryza sativa
MASSSSSSGPSGTRRAPIVEARTQECLEEIRNMSPDELANVIMLIGRTGVGKSALLEYLTNAQGHSGNSPIPVTLDFQFERVKFFRKRYYIMDTPGFDTNKEQVVFREIIRGITAVRPYAKIVGVMLVTRINDNRAEDLDNKLVAFVDKLCGSEYAAQITAVTNFWNVSEPEEKVEFETRLGERLQRWRGVLGQELKQYQHGRRYNSFGDDVGQCLKWRADSDDIKAYAKAMVDRHYGDINPRDPRIVQELSRNQPLGKTAAGEFLGIPSPGESSSSTSASSPGQPEATTLPPSASEPEAGEILRPSAPSSENPNHFQFQASPESHGPSPVGVLGFLRDNLLFPAVERLLVNVALGATSGGAVGGFPSHLDPLSPRDHFLVRGLPSDLGFRTQWAQARGITLEPGSQAFGDAVRNAITREWPL

SEQ ID NO: 40123 - protein, 301 aa, Oryza sativa
MLSRAARPALRAGLAAAARPAPLNAPAAATYATLREIEDRLKSIRNIEKITKTMKIVASTKLTRAQRAMTESRNYGQTSNTVFEQAETKPTEGEGKKTLVVVCSSDKGLCGGIHSGLSRAVRKFLLEQPEADLAIIGEKCKAQLSRSNGKNVVLSFAGVGKDVPTFADASAIADMITTLPTEYSSIKILYNKFLNAQSYEATPIEAFSEEAIQQSPNFSAFEIDDEVLGNLREYALANSLYWALAEGHACEQSARRNAMDNASKNAGDMINKFQILFNRTRQAVITGELVEIITGAAASES

SEQ ID NO: 40124 - protein, 81 aa, Oryza sativa
MMVTFFLSCMQRCITAFHGMQFMLTLSVFALARTGGIVSFRSISDLHCYWTTTYRLKSFSFSTHNAILLKCMQNCTDLSFR

SEQ ID NO: 40125 - protein, 363 aa, Oryza sativa
MGKVLLVLYDGGIHAEQEPKMLGTTENELGIRKWIEEQGHELVTTSNKEGENSEFDKHLVDAEVIITTPFHPGYLTAERLAKAKNLKIAVTAGIGSDHVDLDAANKTNGGITVAEVTGSNVVSVAEHVVMTILALVRNFVPAHEQIAKGEWNVAEVAKNEYDLEGKVVGTVAVGRIGERVLRRLKPFDCKELLYFDYQPLSPEVEKEIGCRRVENLEEMLAQCDVVTINCPLHEKTRGLFNKELLSKMKKGSWLVNTARGAIVVKEDVAEALKSGHLRGYGGDVWFPQPAPKDHPLRYAQNPWGGGNAMVPHMSGTSIDAQQRYAAGTKAILDSYLSGRHDYRPQDLIVHNGDYATKAYGQRK

SEQ ID NO: 40126 - protein, 219 aa, Oryza sativa
MASPTRPGPYMPRPPAVPEWLNTGDNGWQLAAATFVGLQSMPGLVVLYGSIVKKKWAVNSAFMALYAYASTLIVWVLVGFRMAFGDRLLPFWGKAGAALTEGFLVARASVPATAHYGKDGALESPRTEPFYPEASMVLFQFELAAITLVLLAGSLLGRMNIKAWMAFTPLWLLFSYTVCAFSLWGGGFLYQWGVIDYSGGYVIHLSSGIAGFTAAYWVR

SEQ ID NO: 40127 - protein, 280 aa, Oryza sativa
MAAGSGSGSNPKDYQDPPPAPLVDTGELGKWSLYRAAIAEFTATLLLVCISVSTVIGEKRQSGEGGAGVLGIAWAFGGLIFVLVYCTAGISGGHMNPAVTFAMVLARRVSLPRAALYTMAQCVGAVCGAGLARAMHGGGQYARHGGGANELAAGYSAGAGVVAEMVGTFVLVYTVFSATDPKRKARDSHVPVLAPLPIGLAVLVVHLATIPITGTGINPARSLGPALVLGLGTTKAWSHLWIFWVGPFAGAAAAMIYHHYILRGAAAKAFASSSYRSPHF

SEQ ID NO: 40128 - protein, 260 aa, Oryza sativa
MMMLPSIMDVAALAVCAFSPSRTCRVRVSSTRYRNDPYKARVMQPRTPVVAAPVAAACLPVNVCVPVVTPAVFAPLTVQAVVPATPAPVAEVAPARAAPATASAAPKQHFALVGFKHEAMMYQAPFRVSAGDVVIVEADRGEHIGVVQEVTTVAPKYNVPCRVLRRATHAELVAFEATKAKETTTTKAIQKLSESLGLGIKIVDTEFQMDSNKLTVFFSSKIFVDFRKLQRSLFRDYRCRIWLVNWAEVRPYTPVPVNRV

SEQ ID NO: 40129 - protein, 328 aa, Oryza sativa
MAVLRVLAVALALLLACAAVASAERSYAVDEVADETEADVEEGFDVEDEADVDAEDEDAAFLQMEDDAEAEADAEWPDLKGLAAKAQGAAGKVVKGAKGLAAKGLQGVSKVAGQVATAAGEAAESLGDEEGGDEEGAAEGEAGAAEGEAPAGGEAAGGAPAPGGGAPGGGEAAGGEAPAPEGDAAGGEAAGGEAPEAGGEGGAPEGKGAGAPGGGAPEPAGGAPEGAPEGAPEGGAPEGGDAGGAPQGGAPEGGAPEGGDAGGAPGGGGGGEPPADPPGGDEGGAPEGGDRGGRGGGRGGRGDRGGRRGDRKGDRRGGRGDRGDRGGR

SEQ ID NO: 40130 - protein, 74 aa, Oryza sativa
MRRATAAARGLDLASAGLGRPAVAILLFCCRACRRSSPLHIDRQAHRSPPLRTIKLVLLLFAPPSSSARLLDLH

SEQ ID NO: 40131 - protein, 345 aa, Oryza sativa
MVRNAAQRVLAQSWKAMQSSAAEFSTRAAKERKVAVLGAAGGIGQPLSLLMKMNPQVSQLSLYDVAGTRGVGADVSHINSRAQVKGYEGDAQLAEALKGCDLVIIPAGVPRKPGMTRDDLFKINAGIVKGLVEACGKHCPGAILNIISNPVNSTVPIAAEALKKMGVYDKRKVMGVTTLDVVRAKTFYAEKLGLDVGQVDVPVVGGHAGITILPLFSQATPTMPSNTSAEVIEALTKRTQDGGTEVVEAKAGKGSATLSMAYAAALFADACLRGMNGATATECTFVESDVTDLPYFATKVKLGTEGVETIQPVGSMSAYEQEAYNALTPELQASIEKGIKFVRES

SEQ ID NO: 40132 - protein, 391 aa, Oryza sativa
MSRTSLRSSTSRISRRSSTSRTSRRSNTSRTFRRSSTSRTLRRSSTSRISLRSITSRTLRRRRHTRRPRRRRRTRRPLRVRPPNRRRRSEPTAPARRRTRRPRRRRRTRRPLRVRPPNRRRRSEPTAPARRRTRRPPHRRRTRRPLRVRPPNRRRRSEPTAPARRRTRRPLPDAAAPKPTPRAKVRQKERPKSRPRNPPNPRHRPNPNPTAKAEREKPNPNPRPQAPSALPHVRPNAPQSVRPNPQRANASKRVNTSTRRRVSAQSVEPGPCAPPRDIVSLRIVACAVAPVLRIPPPFRLRHPSPALRSDGRCVSVRPIAFVRLRLHLTPPPVPSDAFRCHHHTPIPPPPHHQPSCRGVTLRLPFDSIPFAHSRPLLPVAMPLIDFTDSHT

SEQ ID NO: 40133 - protein, 316 aa, Oryza sativa
MASRTTTSTRVEVAIKMSYLVVVLAIASLSACRVDATSRSLLVTGGQAAAPAPVWSFGALPPLIEPAVVEPPTAVAPVHAVAVGEAPPPLKEESGSGHVKKSKHKDEERAPPPKKHHEKAPPKSKHHGRHAPPDQPELSPPAPPPESYTPDAPPAPEAASPHHGGGENPAWPRPGNNQWPPLPPFNQPPTPEWPHPGNKWPPLPPFHPPPTPAWPHPGGNKWPPLPPFPSHPPPTPAWPQPGNKWPPLPPFPSHPPPTPAWPHPGNQWPPLPPFPFHPPPMPAWPHPGNQWPPLPPFHGSDVPPATKKITKEEVHE

SEQ ID NO: 40134 - protein, 261 aa, Oryza sativa
MRAVLVVLVAGLALASAATSRGQPFVYGAKRDDAPKPEPPVVDHAGVADTRAGGADAGWKASASPRVVANLADPKPVKDKHLSAYHQPGQWAIAHVREPKPVLKRVRADEGVRAHVLVREPRRPAPEERHTYVRAHSADVDPHRAHVIAPKRDVVTANAHIDADVAPKPRARRPRELVVANAHITRDAPRRRARMADPQLEVADAHITADAPRRPRAARTEREFESADVSMRGRGYEASKPAPNEPKPEREIVSADVKVVF

SEQ ID NO: 40135 - protein, 276 aa, Oryza sativa
MKSLLTLTLALFASAGLGDAASAGCGKQPPSSGVKTMQVNGKNREYTLQLPNNYQNNKPHRLVFGYHWLSGNMGNVVQGGYYGLRNLAGDSTIFIAPNGLNAGWANQGGEDITFTDQMLAFAKQNLCIDEKQVFATGFSYGGAMSHSVACSRPNDFAAVAVISGALLSGCNGGNTPVSYLHIHGSADNVLSIQQGRQLRDKWIGTNGCQQKQVNDPSPGAQNYVKTSYTCSRKPVTWIGHGGGHVGDPTANGQKFAPGETWSFFNAAAGTSAKLRC

SEQ ID NO: 40136 - protein, 195 aa, Oryza sativa
MAAAGSSKTASLLLCLAMISFVQLAQSSPSGDKGIKGFHGKKLSFTLYQQETINKTSYMVVAGVAGAGVSETTTPFGTVYVFRDDLTVRPERSSRVAGVVEGTSVTTSFDGLRSLSLGKITLDHRGRRGSMSVLGGTHNTRPSDCPVVGGTGDFAYAVGYVRTSPVNLRGSSVTFKVEFHLYWPPYAHYAPTSKH

SEQ ID NO: 40137 - protein, 317 aa, Oryza sativa
MILAQITSISFVLVALSLVDYSSAQFWKNDKIVKQWQQANSNSNDDKSSSSSSGNNMASSYMNAFVPSAMNSGLGSLIGSYQDTSKDSSAAASSAASVKDDYAKSYVPASVPSSAAATYEHAPALKQPQPQPNYAPAYPSYEYKYPSYSSSHEYKAPSYGSHEYKAPSYGSHEYKAPSYGSHEYKAPSYGSHEYKAPSYGSHEYKAPSYGESYPAVLPPSILPQGAYPIHQPTITNTGETIIENLVGGIPFDCRGRSTGHWRDNKYCDIFHACVYGIQRKTYVCPYVGERTYFDETTRRCEFVYRNPHGCGSNSYYH

SEQ ID NO: 40138 - protein, 324 aa, Oryza sativa
MRFSRHLARITSALFTIQRPASAEALAGNTSFNPLRGIQQFALSSYSGNMTRLAPVISLSHGGGPMPLLGDPGHKEITKSLKTKVPKILKLGTSEAPKAILLVTAHWSTNKVTVSSGSKHDLLYDYYGFPPESYEIKHDAPGSPEVAEEVTKALKAAGIECAKDGERGWDHGVFVPMKLIDPSARTPIVQLSVLASESPSQSYAIGKALSSLRAQNIAIVGSGFATFHNLRLMFSGASSTPDFKKQNVEWPAAVTDAAMTGDADARARKFEDWRKWPGAYTMHPRGGAEHFLPLIVCAGAAGETEGRKYADDFRGTDMWSYYWE

SEQ ID NO: 40139 - protein, 208 aa, Oryza sativa
MKWFLALAPLAAALPSLPTVEVGDAPPAGSVKIRGVSYGGTGCPQGTMSSQISSDRSIVTLIFDSYIASIGPGIAVTEQRKNCQLNIDLEYPGGFQYSILSADYRGYSAIQKGVTGTLKSTYYFSGQTAQTSTTYKFEGPTNGDYLKHDEADSTSIIWSPCGAAGMLNINSQVRLESTDSKATGLLTTDSTDLKFTQVVYVQWQKCNK

SEQ ID NO: 40140 - protein, 452 aa, Oryza sativa
MVLARCTVYVGADGAARELGVEQRRKLEQVINDMAAASLRCIAFAYKQVVDGGDSDNAKIDDEGLTLLGFVGLKDPCRPEVKSAIEACTKAGIAVKMVTGDNVLKARAIAKECGIISGNDDDAAGVVIEGHEFRAMSEQEQLAIVDNIRVMARSLPLDKLVLVQRLKQKGHVVAVTGDGTNDAPALKEADVGLSMGVQGTEVAKESSDIVILNDNFDTVVTATRWGRCVYNNIQKFIQFQLTVNVAALVINFVSAVTTGRMPLTTVQLLWVNLIMDTMGALALATDTPTAGLMRRPPIGRAAPLISNAMWRNLAAQAAYQVAVLLALQYRGFGGAGAGERANGTMIFNAFVLCQVFNEFNAREIERRNVFAGVHRNRMFLGIVAVTVALQVVMVELLTKFAGTERLGWGQWGACVGIAAVSWPIGWAVKCIPVPERPFHEIITARRRRRRST

SEQ ID NO: 40141 - protein, 381 aa, Oryza sativa
MEKDKVQEEAGIETREEDDDESGTKRERESGEIEGGGGEPSRKKRDPEAVSRFKQRSAAWFAKLKEEFERKVAEHPDVDWSDSLAIDASSYRKDWDYVWSQAYGSFDKITPIPPMRYTTADPGPDYASEHDAVQIFCVKIRELRRGLQWPIHVFGLVAARDVIDHNRNIIFNRTRDDCQLLTQEVPYLLLTGPTRAVVVVDPVDFEVALKVKGSIESEDKDLSFLAVQLTRISNISGTHLINKEYTSKLSTLELTFGYIVRSVEATINVRVIDGSWPEEGFSARITAHTSSLKDYRVLLLDSGDEMKKMSVTADGMIELSRRVVSVEFEGELEVSVAAFGSNCNYMEAEEKFTPRTMVKARPSLMLAFVNWKSLSSGHSCP

SEQ ID NO: 40142 - protein, 275 aa, Oryza sativa
MAVGKNKKLGKARKGGRKKAADPFLKKEWYDVRTPACFPVKSAGKTIATKTQGIKVARDTLMNRIIEVSLGDLKDNTEEEAFRKFKLRVEDVNGFNCLTQFHGMDLTTDKLRSLVRKNQSLIEAHVDIRTSDGYSVRLFAIGFTKKHKEHVKKTAYASAAQTRAIRKKMKEVMNKETTSVELHDLVTKLTLETIGKEIEKHTQAIYPLKDVLIRKVKMLRAPKADVSKLVEGAGGADALSKTVGHVATGVKPTGGALPPSENTGKKMEDDKEEDK

SEQ ID NO: 40143 - protein, 398 aa, Oryza sativa
MPGEDLNTEFSSYELEQATRGFDQELKIGEGGFGSVYKGTLRNTTVAIKLLHPHSMQGQSEFDQEIAVLSRVRHPNLVTLIGSCREAFGLVYEFLPKGSLEDRLACLNNTPPLTWQVRTRIIYEMCSALSFLHSNKPHPIVHGDLKPANILLDANFVSKLGDFGICRLLIQTNTGAAAAATTRLYRTTTPKGTFAYMDPEFLTTGELTPRSDVYSLGIIILRLLTGKPPQKIAEVVEDAIESGGLHSILDPSAGSWPFVQANQLAHLGLRCAEMSRRRRPDLATDVWKVVEPLMKAASLTAGRPSFVARPDDSPPPSYFVCPIFQEEMNDPHIAADGFTYEAEAIKGWLDSGHDTSPVTNLTLEHRELIPNRALRSAILEWQQQRQRHQPQEEDDDCT

SEQ ID NO: 40144 - protein, 422 aa, Oryza sativa
MAPYTLLASALVGLAVAQTPSGAPDNHPKVTTWKCTTEGGCVEHTNALVMDSAAHPIKRLDQPGGSCGNWGSPADPTACPDKETCAKNCVMEGISDYGAYGIQTSADNIELKMFNPSGGLSSPRIYMLAEGEKEYEMLQLNGKEFTFDVDVSQLPCGMNGALYLSEMEADGGRSELNPGGATWGTGYCDAQCFVTPWVNGEGNIAGNGVCCNEMDIWEANSRSTSIAPHTCGKDSLFLCTGEECDQGGAGLCDKWGCSDNPYKHRATKDYYGPGLTIDTKKPFTVVTQFPTNSEGVMQAIVRKYVQDGVVYENAAANITNDQAFCDSFGGATEAYTHLGGHAGMGRALERGMVLALSIWWSDGDFMQWLDGGDAGPCSATEGDPKNIQTIVADPVVNFSKIKWGDIGSTFKGNSTRMVRFRA

SEQ ID NO: 40145 - protein, 41 aa, Oryza sativa
MEDNNGNHSFFTYATIKHKIKHSWGVHDVSETWMYSVYINI

SEQ ID NO: 40146 - protein, 155 aa, Oryza sativa
MLLTVEAPMSMFITTICSWMASSGDAPPMMRPVMAPGSAISPTVLALSITGDSAITSDLLTCRAVACRGVAPSASAVSITPRCIPTSSLSFFIVTPVTVIAFPTIIPATGMMYRGVNGNTRSATRRAMVTEVPARMETAAMCFPRGTWRARCPAV

SEQ ID NO: 40147 - protein, 424 aa, Oryza sativa
MASALFGSGPVRSKNLVEFKAGRMNLKGKMVHPDKRKGLVYVYQSEDSLMHFCWKDRSNGIVEDDLMIFPDDVEIKRVAQCTTGRVFLMRFKSSNKKFFFWMQETETEKDEKLWKKVNDLLNNPPAPGSASSSVTSASGAGERGAASSASGAGVAGVPGGLPGVLGADFGNLEGPELHNLIGSMSDQQLQMFLGGFMPVNSPSSNRSSNLSSNQASRVQSTTPASRTEPTSAAAAAASSQPSSAVPTSATTETKPSAATAGSQDGTSSQQSSTTEKQETTNGGAPKMQFSDFQNILGNLAASGGGRSDLDLSDVLTLDVMAPILSNKDVQARLIEHLPESPDILAKNEHELRQTITTPQFKKALSSSCMALQSGQLGPVFKQFDLPDEVSNAAAQGNLEAFAKAMEAHAKKAKKANDDDAMDTK

SEQ ID NO: 40148 - protein, 343 aa, Oryza sativa
MGGGKGGCDFDPKGKSDNEIRKFCVAFMRELNKHIGADTDVPAGDIGVGGREIGYLFGAYRAERNRWEGVLTGKGGSWGGSLIRPEATGYGLVYYVEHMINYASGGKESFAGKRVAISGSGNVAQYAALKIIELGGTVISLSDSKGALIADDDKGFTPEVINEIAALKLQRKALTALENHSFRYVEGARPWKEVKKVDVALPSATQNEVSEDEAKALIESGAKFIAEGSNMGCTQEAIEVFEAHRRENKGSAIWYAPGKAANAGGVAVSGLEMAQNSQRLSWSAEEVDEKLKGIMKDCFENCLSTAKEYFTPSEGEFPSLVGGANVAGFRKVAAAMHDQGDWW

SEQ ID NO: 40149 - protein, 350 aa, Oryza sativa
MATKTKLRIFVAGGGGFIGSHTAKRLKEEGHFVRVADWKRQHYFEDSQICDEFHDVDLRDLNNCIKMCEGMDEVYDFAADMGGMGFIQSNHSVILYNNIMISFNMVEAARRSGSVKRFFYSSSACIYPEYRQLETANPGLKESDAWPAQPQDAYGLEKLVTEEFCKYYNKDFGIEFRIGRFHNIYGPHGTWKGGREKAPAAFCRKALVCGDVFEMWGDGEQTRSFCYIDDCVEGVLRLMRSDVREPINIGSEEMVSMNDMAHLVLDFAGKKDSTKLHHIPGPEGVRGRNSDNTLIREKLGWAPIINLKDGLKRTFDWIKIQIENEKAQGVDVSQYSQSHVVNQKPTDFTK

SEQ ID NO: 40150 - protein, 310 aa, Oryza sativa
MKGGVIRSGGGVGGIGVGGGGGGGGAGGGLMRTRLRLPVVLLSCSLFFLAGFFGSILFTQDPQGEEELDTPMRRERLMEAAWPGMAYGESGEPEPSLIPYQILSWQPRALYFPQFATSQQCENIVKTAKQRLMPSTLALRKGETEESTKGIRTSSGTFLSSDEDPTGTLAEVEKKIAKATMIPRHHGEPFNILRYEIGQRYASHYDAFDPAQYGPQKSQRIASFLLYLTDVEEGGETMFPYENGENMDIGYDYEKCIGLKVKPRKGDGLLFYSLMVNGTIDPTSLHGSCPVIKGEKWVATKWIRDKSKAV

SEQ ID NO: 40151 - protein, 616 aa, Oryza sativa
MRYNALVAGLLAVTGGSAVSASNTYHIEGEVVEQLHNVPKGWSEVGVPSPDQKLRFRIALRSADRELFERTLMEISSPSHPRYGQHLKRDELKDLIKPRAESSSKVLSWLEESGIEARDIENDGEWINFYAPVKRAEQMMGTQFKTYQSEARSNVKKIRSLGYSVPKNVRDDIDIIQPTTRFGHIQPENSQVFSQEEIPFSALAVNSTCDKRINPDCLADLYNYRDYKPSNVSVTIGVSGFLEQYARFADLEKFIPMFAPKAAGSTFAVTKVNEGPFDQNSTADSVEANLDIQYTAGLVAPNIATRFFTTPGRGLLVPDLDQPTQADNNNEPYLDYFTYLVGLEDDELPEVLTTSYGENEQSVPVEYAKKVCDMIGQLGTRGVSVIFSSGDTGPGSACQSNDGKNTTRFMPTFPASCPYVTSVGGTFGIQPEKAVDFSSGGFSDLYPRPAYQEKAVTSYLEKLGDRWNGLYNPKGRGIPDVAAQGQNFQVVDKGRTILVGGTSASAPAFASVVALLNNARKAAGMPSLGFLNPWIYEQGYKGMTDITAGGSTGCTGRSIYSGRQAPRVPYASWNATEGWDPVTGHGTPDFKQLLGLVTAPQQGERRVRRGGLGGSA

SEQ ID NO: 40152 - protein, 271 aa, Oryza sativa
MESQVLRDAGAAVLTGATALAVLRFWEEVGNRALLDQKLCRKLVHITVGLVYFLMWPLFSADDVYAPFLASIVIAFNIIKVTLIGLGIVKDDGVINSMTRNGDPRELLKGPLYYACAMTLATVIFWRTSPISIAVICNLCAGDGVADIAGRQLGRIKLPYNPDKSYAGSIAMFLAGFLASILYMCYFHLFGFVEESWTMVIAFGVTSLSAAIVESLSISTRLDDNLTVPLASVLIGVLVFYYIGARNLCCMSADSSDISALVQNQMFLGRF

SEQ ID NO: 40153 - protein, 253 aa, Oryza sativa
MRVVCFALVIVALCWAHATATQLPPGYNSANELATVLANEPDAARFASTGFGGDTITFKEGGDDHHDDHAADAHGASDADSDTAEFDAQIEQINHDLKKLKGAIKESEECSRRLTEQQAEVRSLQEQKEHLEKEKEKRILQAKLEKQMKDLAEINRMSRSLRAKFSELKHTQKLIKTKMSGTRSSLSQLDSDSEPQSSSDLSESTDAITSEVDAMQKAQTELIAREHKSTSSALKSTLNRANKAYTSKGHHHH

SEQ ID NO: 40154 - protein, 240 aa, Oryza sativa
MSSPKLTVHHLQVGQGERIPWLLEELNIPYKLVLYKRSPLLSPPELKAKHPLGASPVLEDHTDPSNPITLAESGAICEYIIYKYANGRLALPPTHKNFADYLYWFHFSNATLQSGLFRATMTRGMVGENDPRHQGSEARVGKALDHINNRLLTTDAWLAGDEFTAADVMTGWCFTTMRQFAPLDLSKYEGVLKWLKRIGERDAYRRAMAKGDPDLDVDEGLSAKGPPPLEIFAKVYAGKK

SEQ ID NO: 40155 - protein, 120 aa, Oryza sativa
MLHVYGERHLGRHWVAVDDADVVTAEDGGRGKLHLVVGEVLAEAQTRAAVEGGELVGRFAHEAAVSEPPLRLVLPAVLPPDALHPAHGVHGIDHLCPLLQHRPVREHLVLHNLTTGHEKC

SEQ ID NO: 40156 - protein, 316 aa, Oryza sativa
MPQASSSSSPATAAAPPPPQPAADPSPSAVPASEEALDPQTPAPPPQAQPEAVLTAAQKALRSKPTRPPEDSDKKNKKLKDVEISFPIVYGTISFWLGKKASEYNSHKWTVYVRSATNEDLSVIVKRVVFQLHPSFTNPTRVVEQPPFELSESGWGEFEIAITLYFHSDVCEKRLDLFHQLKLYPEEDTGPQSTKKPVVVETYDEIVFPEPTEAFFQRVQNHPAATVPRLPPGITSPPPGPMELVPHEKKRGDTKDHPLSQWFSNFSEADELLKLAAARQQVQAHIAKLRRQLSMIDGMPQQSKAVSVQGQQFGHG

SEQ ID NO: 40157 - protein, 335 aa, Oryza sativa
MAMATAACRRPAVMLMAFAMAAAVTMSSVPPASGTTTLQYDFYSSSCPKAEETVRNVVEPMIFNDPTMGAAFIRLFFHDCFVRGCDASILLDPTSRNTQPEKTAIPLRGYDAVNKIKAAVEAVCPGKVSCADILAFAARDSAVVNGNFAFAMPSGRRDGTASSASDVARFIPSPAFHLQDLVDSFAAKGLTADDLVILSGAHSFGLTHCAFVTGRLYPTVDPTMNATFAAALKKLCPPPASGGGGRAVSNNQVTDPNVLSNQYFKNVAAGEVMFTSDQTLTSRDDTKAMVDDNAANPVAWMARFAAAMVKMGGVEVLTGNAGEVRKVCFATNTAS

SEQ ID NO: 40158 - protein, 129 aa, Oryza sativa
MTFVDGVTWCVARPGVSQEDLQNALDWACGQGGADCTPLQPGGRCYQPDTLLSHASYAFNIFYQQNGNSDIACNFGGAGTIIKRNPSFGSCKFLASETSAASALTRGSMWMIFAAASMMFLHLRVFQSV

SEQ ID NO: 40159 - protein, 175 aa, Oryza sativa
MGIVVVDTAAAWDDERVVGGAEEEGHGEALQRGVGHHPVLHALVHIVAPRLQEVADVDDEGAGAGLHGHPPAALEQLEAADGVLLLVHDGEQVAVRVRAQPEAPMAMAHGGYRFSRRKHVSSRVVTIVSPSPAPGSPLIRISASFCASSYIALDTSSITALALMLVLGLGVVIGM

SEQ ID NO: 40160 - protein, 123 aa, Oryza sativa
MASRAFAAVFAAVALVVCSSVLPRALASDPSQLQDFCVADGERAAGPQHARHLVRPHRLCPQRAKPAAHPPSCHRDPHRPPGHPPRRLRHIQPAGRWQLAVHQAARPRRCLRLPAGSHPLPAQ

SEQ ID NO: 40161 - protein, 460 aa, Oryza sativa
MASMQEKMIREAMAAMNGQTAADVAVNLYPFIRKYTDGRVERLLTSSYVPASEDAGRGRGGVGVATRDVVVDRDNGVSARLFLPSSAATGGGGGGRRLPVVLYFHGGSFCTESAFCRTYHRYASSLASRAGALVVSVEYRLAPEHPIPAAYDDAWAAFRWVESLSDPWLAEYGDLRRTFVAGDSAGGNIAYHTVARAGRENVGGGIQGLIMVHPFFWGPERLPCETVWDGASVFPAFGVDWLWPFVTAGQADNDDPRIDPADDELASLPCRRVLMAVAGRDTLRDRGRRLASRMRGDVTVVESEGEDHGFHLYSPLRATSKRLMQSIVQFINQPPSPCPPPPAPAPSPAMRWPATILPEFDEWSSTYSDDTANSSQILLGMPARAYKAIFVDRMDRKAAKTGRLSSNPTVNASLSIGPSGKASKTSCYGMSFGRTRAYNFRGVAAAGSGQCQPPFRGVTI

SEQ ID NO: 40162 - protein, 248 aa, Oryza sativa
MVKFASVVALVAPLAAAAPQEIPNIVGGTSASAGDFPFIVSISRNGGPWCGGSLLNANTVLTAAHCVSGYAQSGFQIRAGSLSRTSGGVTSSLSSVRVHPSYSGNNNDLAILKLSTSIPASGTIGYARLAASGSDPVAGSSATVAGWGATSEGGSSTPVNLLKVTVPIVSRATCRQQYGTSAITNQMFCAGVSSGGKDSCQGDSGGPIVDSSKTLIGAVSWGNGCARPNYSGVYASVGALRSFIDTYA

SEQ ID NO: 40163 - protein, 554 aa, Oryza sativa
MSARTVELKPFQDQKPGTSGLRKKVKVFQQDHYSEAFVTSILLSIPEGVSGSTLVIGGDGRYWNPEVTQLIAKIGAAYGVKKLLIGQNGILSTPAASHIIRIRKATGGILLTASHNPGGPTEDFGIKYNLANGAPAPESVTNKIYETSKTLTSYKIADIPDVDLKSIGTQKYGDLEVEILDSTKDYLQMLKDIFDFDLIKSFLKQHSDFKVLFDGLSGVTGSYGVDIFEKELGIPNSTQNCVPKPDFGGHHPDPNLVYAKSLVDAVDKNGIHFGAASDGDGDRNMIYGAKSFVSPGDSLAIIAHHAELIPYFKKQGIYGLARSMPTSGAIDLVAKKKGVECYEVPTGWKFFCGLFDSDKMNICGEESFGTGSNHIREKDGLWAVVAWLNILAGVGQQTGTTPSIASVQKDFWKTYGRTFFTRYDYEGCETEGANKVTGHMKELITTKKDEFIGSSVAGRKVVEADDFSYTDLDGSVSKNQGIYVKFDDGSRIVVRLSGTGSSGATIRLYIEKHTSDESTYDMDAQDYLKDNVKLATDLLKLQEYIGRTEPDVKT

SEQ ID NO: 40164 - protein, 227 aa, Oryza sativa
MASTNGKEEVYVKEGSKLYSRMMSKEAAAAAAPLAVPSFRVYYGVASAGSVPFLWESQPGTPKSSPSTAVLPPLTPPPSYYASAGKKGGGGGASSGSRRSGWSAGGARGVLGAMFRRPWRRTSPCSTSSSSSWSYSSPSSVSMSPVFTVHQASPMAVARSHHTRACSAGAAYDDAAAARCFGMERECERGLVKGCGVAVAVRNALSSVVGHKSGGHGGAPPAAAAAY

SEQ ID NO: 40165 - protein, 284 aa, Oryza sativa
MFGKRSFASSKDRSGKITKQQTTKRSFRDASKQKQAVAEKLDTRKDSPMMEGSPSLTSAIVTVVVGQESRLFAAHEDVLSHSPFFADLLRSQFFESANRRINLPTEEPEIFSCVLEYLYKGDYYPRLVHDKRRSTWMLEGGVVASPDPNKGDRAVAVEPTFFHTGVGDVLLRDTAVYCAADRYGLEELKKLSLRKQGLQSGIEVGTILRSARYAYDNTPDSDSRLRAHYLALIIRSRKTFKRSGTMQMEMEMGGKIFFDLFVAMCNHVDDLTEANSVRGTPRTI

SEQ ID NO: 40166 - protein, 334 aa, Oryza sativa
MLIKLVLLTLALAHSLEANKARQLSFGSSYGGSLGGYNSFGGYGSGYGSGFGSGFGSGYGSGYGSGYGSGYGNGYGYNFPSPSPSPAPVPSPAPTPLPAPTMPAPTMPAPTPTPTPTPTPLPAPAPGPSPAPAPSPLPQYRDTQYDSGFYNSFDPSYSPFSYNRGPFPSSYPSFGSSYPSFGPSYGSSYGSSYGSSYAAPSFPSYGPSYGPSFPSYAAPALPSYAPALPSYAPALPSYAPALPAPIAAPVYATVSAVEVVAPYGGYVDPLYGYGAGYGAGYGNGYGLNGDLIIQNVNQNANTPSYGNGYGSGYGNGYGSGYGNGYGSGYGSGNY

SEQ ID NO: 40167 - protein, 536 aa, Oryza sativa
MIKCLAFICLLGLTVSAWEFDNKRSNRMNLLSKTVGARMLAGTNDGFQIADNGNQQFVPIQRTVQPAINNIAENGQLTPDQLQQLHQFISSQSVGQQQPVSQQFQPQQPTQQQQFQPPVQTQQKFAPQQQQQPQQTFRMDSFNQNPNPMTFDNTQQFGRMTLITTSTTTTTTPAPIMQASKPSAMEQQLLDQQVRIQQMKDQLFNLQQQQQRMTTQQQVPTQTPQQQQPVPTQQAQPTLLQQQQLQQQQQQQQQFVQQQQKVQQQQQMQQQQLLDQIAQQQQLNQKPVPGQQQTFQKVPQMQVAQVAQPTMNVSRIATQVRPQQPVFQQQQPIVQQQQQQQRGRSNDICAGAKPGDKIPHPVEETQYVVCGELGEIFLMDCPQHTVFNPHLGLCDLTTDLPILCKSNPCLNGAKCVELSATQFQCECPLGFSGKTCEKFDTCSSSQPCGQDGVCLSFALGSPIPHVCLCNGGRSVGMTCAQSEQNPCLVQGSSTKLMPVNFNRAVFAHCEGARPHFKFCQPPLMFSPTKQACEWTI

SEQ ID NO: 40168 - protein, 171 aa, Oryza sativa
MKKMRKVAEFLRKAVVALRGKASVLRARLLFLASLRRRTAVVGAISHHLRALMPGNAPAPAPDGGRLPAAEDDDEQMALDDVAGLSELATLFQEVDDDDDGARYPDWTHSMFDDDDDGEGGGEEAVSVMEVIRRRREGDGEEFDMEEEIDHAADMFIRRVRHRMAANRRSF

SEQ ID NO: 40169 - protein, 536 aa, Oryza sativa
MAAPVRGLAGDADTKTAAPPPLTAAAAVGSTVRPWWAPFDLTTRVMAALLLQRLLGPDVSPVRAFGLTVASGGVRTYQQQHDILTCHGVRGCVLPTGYPAAAAVVDAAAAAGAAGAATKPVWAQLPHVHAVGSSDTSTTAQELFWTAVSYGKVPRQPVLRGTTRLTRGAASKAEADRRIKAAAFRAIECALCAMCHAADTLGLSGGNLDVNAWFEPDWRVDAPATQRVPLLAQVVPRDDACEWVRALMTLPHTAGRPYVNPFGERELEVSGLHWLTSQPHDARARASTTDGNSVLRMAVLKEARKPQPNVALIRLLLERCPAHIINACGSPYDDGCGGTPLHVATSMLCRNASYLKHVSAVQQRRRLQNDGAAQVVRVFLECACESYGQRVDLRVRGTYRMRHDTALDLMRRCRHDDIAAFMDPVIAQFEYALSDRFDAVQRRPAVLAALHTVVGDIITVNALRQLIRDYDVSPPSPAPPPFASPLREAARVAAEAARVAAEAARAAAEAARAAARVVARHDDNDDDVDIGLSLFD

SEQ ID NO: 40170 - protein, 303 aa, Oryza sativa
MIIPINSACVVCLMHLISPELPEEISVQRSRRYKTTTTRSWDFLGLNYQNPSELLRRSNYGEDIIIGVVDTGIWPESRSFRDEGYGPVPARWKGVCQVGEGWGSNNCSRKIIGARFYHAGVDEDDLKIDYLSPRDVNGHGTHTASTAAGSVVEAVSFHGLAAGTARGGAPRARIAVYKSVWGRGGAGSGNSATVLAAIDDAIHDGVDVLSLSLGTLENSFGALHAVQKGITVVYAATNFGPAPQVVRNTAPWVITVAASKIDRSFPTVITLGDKRQIVGQSMYYYEGNNSSGSSFRLLAYGGL

SEQ ID NO: 40171 - protein, 443 aa, Oryza sativa
MIAFLSMKTDGYESDKNQPFIVHDWKKPSQLIQLYATEDGKGAWDRSPQSISWSPDDWHLYFTAEEQGRGNLFRAGPPKSRDEKEPLPTVLVRGGYVTGVSVLKDGDIFVTSTSLIENSLYSLVPLSKKSDQSITYTLPIDDRPFDSVPEQLTTKYISSASRSGSKFELSRGQVSELRWPGAAPSTSVHAWVVKPSDFNPHKKYPLAYLIHGGPQGAWGDSWSTRWNPSIFAEQGYVVVCPNPTGSTGYGQDFTDAIQGQWGGLPYEDIVLGFKYIKKNLDYVDTSRSVALGASYGGYMMNWVQGHDLGREFKALVTHDGVFSMTGQLASEELYFPFHDLKAPLWKAPENWAQWDPSRFTQNWATPQLIIHSELDYRLLMGEGLAAFNVLQTRGVDSQFLTFPDENHWVLKPENSLVWHEVVLDWINGHVGLEKYTEARKKRS

SEQ ID NO: 40172 - protein, 485 aa, Oryza sativa
MGGRCCRQQTVCIRVPPCCPPPQPQCCPPPQPQCGGGLGGGFGGGFGGSFGGGFGGAGIGGFPSPAPALPAHNHNLPLCSSLQSAAPAPAQLPIQAPINFPAPAPLPFPEPAPQFNFPAPAPAPLPLPLPAPAPQFNFPAPAPALPAQHHNLPLCSSLQGAAPAPQFNFPPPAPAPQFNFPAPAPAPLPFPEPAPQFNFPAPAPLPLPEPAPQFNFPPPAPAPLPLPAPSFPAPAPAHHNLPLCSSLQGAAPAPQFNFPPPAPAPQFNFPAPAPAPLPFPEPAPQFNFPPPAPAPQFNFPAPAPAPLPFPEPAPQFNFPPPAPAPLPLPAPSFPAPSFPAPAPAHHNLPLCSSFQSAPAPAPAPINFPPPPPINFPPPPPPPINFPPPAPAHHNLPLCSSLQGAAPAPAPLPLPAPAPLPLPLPAPAPSFGAGGGDVCAGLNAGAGAGFGGAAGFGGGFGGAPQPFGGAGFGGGFGGAQAGGCGC

SEQ ID NO: 40173 - protein, 233 aa, Oryza sativa
MVALRHRPAGGGGGGASPEARGGGGGRGRGGGGGGALAVARDGGGGRGGVLLAGEGGGGRRGGEAEGVEGGARRDGVLAPGELRGGEGAGAAEPRLLPRQLRARGARARLPRPRLPPGLHARLPRALRRLARPLLRPRRRRAAARLHGPRGRRPRRARRPLRRHRPRRRALPRRPQPARLARPRRRRHRRARRVPDERVPRREGRVRRIVLHGELLWRLRAPKMKKHQHTEMR

SEQ ID NO: 40174 - protein, 292 aa, Oryza sativa
MQHEHDTALEDEEEARRSEINALLATTPRLKQIAELFRSGKSVPRQSKDHLLQRPTFCLVPDLKAQPWWDPSEFPLVTALEREYSAIRSEILHVLGVSDVTLQPLEQAPNDTTETKNTHPLTALPVRTPLHEIRASVARGEWRALYLWKEGQPVSAHQTLCPHTCALIGQFVEQSGLEPDARSVVMQGTGPGYVYVSLLQPGTVIQPHCGPTNLRLRVHLALSCDAGALITVNGTTRQWQAGQCLVFDDSFEHAVHIGATPRLVLIVDVFHPDLTRNERQLIRTLLPDVGGD

SEQ ID NO: 40175 - protein, 169 aa, Oryza sativa
MGRPRLGEEEREATERERTLPRSAARRRHRSAAPLYSVVLLSSTVSAPTRRSGSVDFVLTSSTSIFVSLTRGVVLAGSPGRRRRRRSGHPARRLRHRSGRPVSSPLGPGCPATRRRRRATPPAAFATVGPPDVVAARTASPAAATQLGFSDLTWGKNEWRERERLGIER

SEQ ID NO: 40176 - protein, 211 aa, Oryza sativa
MKTSCHMPRSSRKRCTASSSNPLLDASICLQRSLRSSPASSSICTRVTTTPRLLHDKRRQTWMLEGAMTSPDPNKTSDRAAAVEPTFFHTGVGDVILRDTAVYCAADRYGLEELKKLSLRKQGLQSGIEVGVILRSARYAYENTPDNDSRLRAHYLALIIRSRKTFKRSGTMQMEMEMGGKLFFDLFVAMCNHVDDLVDASPSARGTPRTI

SEQ ID NO: 40177 - protein, 363 aa, Oryza sativa
MAEYLGKSRTASEAVNCAAPDTGNMEVLAKYGSEQQKRRWLDPLLKGEIRSAFLMTEPQVASSDATNIEMTIKRDGDHYVLNGQKWWSSGIGDLRCKIFIVLGKTDPNNADKYRQQSVILVPHDAPGITIHRMLSVMGFDDAPHGHGHVTFTNVRVPASNMVLGEGRGFEIIQGRLGPGRIHHAMRSVGSAEKALEWMLARLNDERKKPFGKLLNEHGIMLERVARSRIEIDAARLAVLNAAIQIDQTNAKGALKEIAEVKVLVPEVNLKVIDWAIQAYGGAGVSQETPLANMYAQGRTMRIVDGPDEVHLLQLGRNENKRGVAHKKRFQAQKEKGEELCRKYGIEPRDPLYLNRTSGEASKL

SEQ ID NO: 40178 - protein, 236 aa, Oryza sativa
MHGKLAALLLPVLAAANPVRRGDAPDPNQITIVDTTYSGNGCPQGSVSTSTSTDKTVVTYGFDAFQTYIGPGTTPADRSKNCQLHLNLKYPGGFQYAVVDATYHGWARLDEGVTGSFITTYYFSQDAGKTQTTRMSAVGGGALAAGQVYTKTDKVETTATIWSPCGQNGILNINNRIALTNKKSTQAGEMSNDDAPVAFTQQLHVAWRKCESGSGSGGSGSDTIGIGNPNSELEFE

SEQ ID NO: 40179 - protein, 25 aa, Oryza sativa
MSALHRGAGHCLWVYILGIAKGNCN

SEQ ID NO: 40180 - protein, 264 aa, Oryza sativa
MALIPHGIFPRSAFDMDSWLAPFQHPTGPSTVDLFDPFDELDHMLGRNLEWLAKPEFLTPAVPRVPQKYRITLDCTGYSPKSIKTDVVGHKLTVTGREEVKQDDGDFHIKEFKKTYSLPTHAESDKLVSFMTPQGQLVIEVPLKEIHKHSNDDLFPRVVDIPTGGKHVQMKFHVPETIDPAKLHVSIKDRDLIVKAEDKVEKPDGVSRFYYYKRTTLPENTDFKSLKCNYDNHQIAVDAPIDVNFKAHRSVPIEHKKQHAINNK

SEQ ID NO: 40181 - protein, 197 aa, Oryza sativa
MMSDNDDEFCIPRSAMYKLVKELVPQVRLSGEAKDLIVTACNEFIHLLATEANQVCEKQSKKLILPDHVLCALDNLGFGEYKEDCVEVMKQMQEETDKRKKLRNRLEKPGIPEEELLRQQNQLFAEAKKQQQAADEANDEWTRMQHEAKLALQRQASTAAAAAACSTSYDESAAATAQLAANNGKPGGKDDDDDNYD

SEQ ID NO: 40182 - protein, 245 aa, Oryza sativa
MFSKTAIFAAIIGLVAAQEPSGNPITRPLNEIVPACKPFTITWTPTTPNSVSLIFLKGPSTNVVPFGPNDGKIVSGIPNSGSFVWTPPATADATTGPTGYGLKLVDDVTGQFQYSTQFGISKGPECDSYVAPSPSSSQYGGGYPMSTPVSSKMASASSSMPMVSSSAVHSSMHTSVYSTGMPPMNSTVVMPTKSMTVPSSLMSPTGSSTKTPTSSAPAQQTTNAAAGLKAGLGMAGAAAVAALML

SEQ ID NO: 40183 - protein, 289 aa, Oryza sativa
MAGLDLGTSYLHHHQSLHLRHDDGGAGSDDGGHDDLSPGSGGGGGPSSTAGGAGIGGGEVVARRPRGRPPGSKNKPKPPVIITRESANALRAHILEVAAGCDVFEALTAYACRRQRGVCVLSAAGTVANVTLRQPQSAQPGPASPAVATLHGRFEILSLAGSFLPPPAPPGATSLAAFLAGGQGQVVGGSVAGALIAAGPVVVVAASFSNVAYERLPLEDGDEVVPPAPAGSDQGGGGSGGMPPLGVDPSGGAATGGLPFFNMPFGMPPMPVDGHAGWPGAGVGRPPFS

SEQ ID NO: 40184 - protein, 388 aa, Oryza sativa
MMRKKVQYTNITPIPTFIPRQLAIDFLHSHSEIIELNPLVTGHEAIKAPRDAPADEFYSTWYEISERIQYVPGIGKMGSGSIKFRGVFHDLPFGLQTHTYAPAGVDLRNKWQILGNQPGEPPEPKELGSKAPPEGLYIREDVEIQANRAMVGFVQKEMKAAAKIMLERLVKKAELLDSGALQAMMENGKLKTLNPADRTTDHMSPKPSPTHPYNMPMSPTHPSFRQSQYGSMSMQQQPYVAPQQLLGQNNVVMELPGDYYHTSAPQAPGSPGLLYANQTQTPRTTSTSDSPDPRWSTVSHSSASSRPSSYAPSEGGAAGLRSPGLEQKAFASELPTMEETREEHDERRRRESQLPGQQQKYTYNPQDFVRNEAQYAPAPPYQAYNGGR

SEQ ID NO: 40185 - protein, 172 aa, Oryza sativa
MTITTAAITTRRHRRRTTRTRRRRRRTTRTNRRRRRLRGRRTSAKARGAATGPAATASTTATDTTTNPAATTGPATATSAAPSSPARRIYVDIAVRRTMCVYDCIRNTSSIVVLLIALFVVINKLRHACQRVYAVPTCVCTYVYGLLGHECELFPKATCTMRQSMAYNIVIT

SEQ ID NO: 40186 - protein, 550 aa, Oryza sativa
MSSISLLNANSEIAKAQQAMMINIGAARNLMSILKTNLGPRGTIKMLVGGAGDIRMTKDGQVLLSDMQIQHPTAALIARTATAQDDITGDGTTSIVLLLGEMLSQSQRYLAEGTHPSVLIEGLYMAKNEARKFLDSYKADVQKKVPKLDREVLVNVAKTSLRTKLHQELADKLADIVVDAVECVRIGDTIDLHMVEIMHMQHRSDLDTQFINGLVLDHGARHPDMKKDLRNAYILTCNVSLEYEKSEVNSVFQFSSAEQRQQLVEAERKHVDERVRKIVELKKKVCDDIPEEEKAKEPKSFVVINQKGIDPMSLDLLCKNGITGLRRAKRRNMERLTLAFGGLAVNSTDDMTPEVLGYADHVYEQTLGEDTYTFVENEKATLKKRGHSCTILLKGPDRHTIAQIKDATRDGLRAVVNAIDDNAVIPGAGAFEIALSEHLNTFAKTVEGRAQLGVKTFAEAVLIIPKTLAQNSGFDPQDSILKLIQNFNAGNVAGLDIYTGEPINPIQSGIFDNVKVKQQILEASTFTATQLLYVDEILKAAKATKREAAE

SEQ ID NO: 40187 - protein, 446 aa, Oryza sativa
MKSFALLAALGAVIAPVFAQGKGKLPAVTVKGNAFFTGDKRFYVRGVAYQPGGAADAQDPLLDIPSLKRDITNFKSLGINTIRIYTIDNSQNHDEAMKMLDEAGIYLALDANTPKYSLNRETGATLHRSYNDAYLQSVFATIDAFADYNNLLLFFSGNEVINDKNNTNAAPYIKAVTRDMKQYIANRKGRVIPVGYSAADVAENIEAQALYFNCGSDDSRSDFFAFNDYSWRDPSSYKISGWDKKVETYKDYSKPIFLSEFGCITNTRQWGEIAALYSTDMTAVYSGGLAYEYTVEPNGYGLVEVGSDGKITPNKDFDRLKSAYEKTKNPTGNGGFKENGSASKCPAQSDDWQVKPNSVPAMPKNAQKFMNSGAGAGPGLKGSGSHFAGTPSDSTATPGSGNPTRTPDGQAAGSSSGTGAAASVEIPVRFVGMIASSVLLGAMLVL

SEQ ID NO: 40188 - protein, 246 aa, Oryza sativa
MKLNIAYPTTGRQKKLEIDDDQKLRAFYDRRLAAEVEGDVLGDEFKGYVFKIMGGQDKQGFPMKQGVLTNGRVQLLMSPGDQCFRGHGRRNGERRRKSVRGCIVSPDLSVLNLVIVKKGEKDLPGLTDEEKPRMRGPKRASKIRKLFNLSKDDDVRKYVNTYRRTFEANGKKHSKAPAIQRLVTPETLQRKRRKAAVKKAKHEKSRTEAAEYHKLLVQRLKEQRERRSESLAKKRAMRVASQASKE

SEQ ID NO: 40189 - protein, 52 aa, Oryza sativa
MWSLRPDGDRISGKQGDPMLPRKASSEVRAARTPNRLRWSGREYQGDRVNRG

SEQ ID NO: 40190 - protein, 210 aa, Oryza sativa
MAGSFSSSPKLLLLLLLPVVLLAPLLEARRLHVLPPLMLPSDGVVVGGAVEVEGGRSGNAPPSPRPHGRVTPLADGGGGGVLRRPPGRGPPPPGPGGHVGPLSGGVSSSAGRSSTRPLMISDDDGGVSGRQWPAPPPPPDPNTPVQPLSGGDGRPRQLAPPPPMGNPPPNTHRRRTDRPPRRLPADDDMAGLLLRVIRDAVEYMVGELGA

SEQ ID NO: 40191 - protein, 295 aa, Oryza sativa
MMQRTMQLVLRVKRSSGLLHQFSTAANSQRLAGKVAVITGAASGIGKASAKEFIGNGAKVILADVQDDLGRAVAAELGPGATYTRCDVTDEAQVAAAVDLAVARHGALDVFYSNAGVLGSIAPAPLASLDLGEFDRVMAVNARAAVAAAKHAARAMVPRRSGCVLFTGSVSGVVGGTGPTSYGVSKAAVLGVVRAVAGELARHGVRANAVSPCGVATPLSMVQVLEAYPGMSFEELKNAMAASMEQMEAGPLIDPEDVARAAVFLASDEARYINGHNLVVDGGFTVGKLLKIPKE

SEQ ID NO: 40192 - protein, 209 aa, Oryza sativa
MGSKLSCIYRPESDIVVESEAPAPPPPPARVIAADGSLRELPASPCVAVVSDVLGGGDDAASFFVCNSDALYFDDRPPALSPGEPLRPGELYFVLPRAMLGRPLSSADMGRLAVRASLALVGERPQRRRRHRQGGGKKQKKKVHVMPAQAQSRDDGDGDVDGVFNEKLNEQTLGVFAAFLSPARGAAPAAAAAARSPLKRALSLVEEEA

SEQ ID NO: 40193 - protein, 281 aa, Oryza sativa
MDLRRVHCLGWLLVLLLFSHEAAGGGGAEQVATQAHHDASRRLSAQVAHGTPERDVTSPLATVPVDNPAANPTVTSTTNPAAMPGTQTTPSLANPVAAGGGGGGGGGSWCVASPSASTAALQVALDYACGQGGVDCSAIQSGGGCFNPNTVRDHASFAFNSYYQKNPVQTSYDFAGTAILTSTDPNPFTSRCNSAGSSSCKYPSTSTGASVLNTSTPTNPAFGGYDNSPPGFGNNSPPLYGSMSPPGYNDNIGAAAAMAGSKETLLSLACVVATVSLNLYK

SEQ ID NO: 40194 - protein, 247 aa, Oryza sativa
MSSPFLGSSSSSASSPLSYLTPPRPPPPPPPLLMGQGYAAAANGGIGGGGVEAVNAAAAPRQGGRHAGHPPLPRPPPRQCPRCGSANTKFCYYNNYSRTQPRYLCKACRRHWTEGGTLRDVPVGGGRKNSKRAAGGGKAGATASTAASAHVVAPAAAPPTSSSFPDLLRQMLMAPATAGGGGGYSIDLTAWQQMAAFAAPPQAATGDVGGAVGAASTAAPDANCGGGGVQYWNGWLQDDMPGLDGSC

SEQ ID NO: 40195 - protein, 198 aa, Oryza sativa
MPVPSYGAMPLSKMFLLVRVLQAICMIVVIGITSNFVQMIVVTGVEPPKEFVGTLSVTCIAALYIIVSVGYYWSYANLGLLVMTGVDSLLLIAFIVCAVTVGKPMSFLNCYVIGMSSKEVDAKYAYAFVTAAAQNLNQSGSTLDLRHWAGVTRTNCFQAKTVWGMAIALCILFTVSCALLPTLWYKNKKPAPKTISEA

SEQ ID NO: 40196 - protein, 351 aa, Oryza sativa
MDARQQDYPQSGLSLPYTPYSEPSSEALPADQASAAQYPPPGQDPRSSNLTPTSDYSLNPSSARSGSFPDYIQRSYQPGAQGQAPGGMAQQQNPSIAAATSPTYSHQQQYSPYTPHHDMQHYPGHPQTPIYASRPEWAGQYPQPGMHYAHPASSGPPAPAMVSPVQRPPAGGHPLSTVYSFVPIPGAQQHKRPRRRYEEIERMYKCGWNGCEKAYGTLNHLNAHVTMQSHGQKRTPEEFKEIRKEWKAKKKEEEAQRKADDERHRADAHQRAQEGGPPGEAPVYGQMRQAVGVPGQGPPHTQLPPIGYQPAASGNNAAPQYGTQSPGLPEGMAHYPQSPYGQNPQMYQQGH

SEQ ID NO: 40197 - protein, 418 aa, Oryza sativa
MHGCALHPAAYRRIFHNPRSTRSHGLVAAASPPLHQPAAACGETHRIIQMHALFAVARDTAFSSSPAADEHLPNEHPGGHLWNQSVLSREEEHGSNDDSFRESLVSLLDNTRDYVMAPEVFEGVPVACDYLKGMDSDGMAASAVAAYSLDNNGQHASVSSIEHGIASSPLLAYQLGKNSAVVQRSIQQQEVGSPMAAFLQQLIPTSVLDQSGIGFGGVCLDGSALEASFCMRTSPDVSSFSGHRSATAEELMSTDTREQEITRLARSCSSSGSDRNKKKLSEVRGGGKAKKFKSETSHSTSSPKHQSPKVKLGEKITALQQIVSPFGKTDTASVLLETITYIKFLHEQIQLFSQPYMTNSTNKGHIHWGGEGKRKAGLEHDLRGRGLCLVPVSWTSQEYCDSILPECWAPAYRNYFYR

SEQ ID NO: 40198 - protein, 192 aa, Oryza sativa
MARTKLAALGFVVLLSIGLASAARVERYSSSQGSGTGSGQGGGYVNGGGAGEGIGAGSGSSNRYGAHASGGGGGGGGGYSQYGGSGSGSGYGTGSGSSQTSQNRYYSYGGSSSAGGAGAGGGAGQAGGYWPSNGQGSGSGTGSGSSYADNNYYGGPYANANAGGNGGGNGQGQYGGRGIGAGVGSGYGDANP

SEQ ID NO: 40199 - protein, 151 aa, Oryza sativa
MEYQGQHGGHASSRADEHGNPAVTTGNAPTGMGAGHIQEPAREDKKTDGVLRRSGSSSSSSSSEDDGMGGRRKKGIKEKIKEKLPGGNKGNNQQQQQEHTTTTTGGAYGPQGHDTKIATGAHGGTAATTADAGGEKKGIVDKIKEKLPGQH

SEQ ID NO: 40200 - protein, 334 aa, Oryza sativa
MSASIGINGFGRIGRIVLRAALEKGVNVVAINDPFIPLDYMVYMFKYDSTHGRFKGDIHHANGFLYVNGHQISVFTEKDPTQIPWGKSGAEYVVEAAGVFTTIDKCQAHITGGAKKVIITAPSADAPMFVCGVNEKTYNPSINILSNASCTTNCLAPLAKVINDKFGIVEGLMTTVHSYTATQKTVDGPSNKDWRGGRTAATNIIPSSTGAAKAVGKVIPDLNGKLTGMAFRVPTADVSVVDLTVRLAKPAKYDEIKAAVKAASEGELKGILAYTEDEVVSSDFIGDHHSSIFDAKAGISLNDNFVKLVSWYDNEFGYSCRVIDLIKHVHSVSH

SEQ ID NO: 40201 - protein, 215 aa, Oryza sativa
MAEKRLLLLPVALAMAQKHGGGGERVWARPWRWAKTAFFVVAMIASLLLVCAPPVLVVILDLALPPALLSARLRGGGGGDDASFVAAVVAQARAFDFRSSLVDLLAVSAARALLILGAYMACGGGGAAYLWVVATSAAGSVSYVLAKAAAAVLPRRGVAPAPEGKGPEPMLLLSVALAAAHLAVAYRTSCRERRRLLVYRIDVEAVKRGPSNKAV

SEQ ID NO: 40202 - protein, 319 aa, Oryza sativa
MQEKFAAEEAAAGQLPGIPGSDDDDDDDDMSDIEELNPGAVGDDDYKAPPHLSRGRGRGRGRGRGSRGGRGGRGRGRGRGRAAAAAAAADDEADDDAVDAQQRPKRKRRTRQELLADAMGYTGSADEGGEELFSASEQKAKRQRKQAGSSNAGAASGFEQQQEQEGQDAGLAAAAGGSGDLTSLAAKLKSDLKRRLSGAAAAADDGTAADAAGSSAAVTQQVLELHTQLAAAQQQIAALQQQLDTSAQQRAALEKAQAEAIQQRDTAYAERDKSQAQCRALQKEHEGIKQVLKELRAEIGGPSEEGAEDEATAANAVDS

SEQ ID NO: 40203 - protein, 386 aa, Oryza sativa
MSHRKFEHPRCGSLGFLPKKRCRRGRGKFKSFPRDDASKPCHLTGFIGYKAGMTHILRDVDKPGSKLHKKETCEPVTIVECPPMIVVGVVGYVKTPRGLRTLNTVWAEHLSDECKRRFYKNWYKAKKKAFTKYVKKYTDGKKEIDSELAQLKKHCSVIRVLAHTQVRKLGLGQKKAHLIEIQVNGGSVADKVDFATKLFEKAVTVDSVFNTNEMIDTIAITKGGGTEGVVTRWGVTRLPRKTHRGLRKVACVGAWHPARLQWSVARAGQMGFHHRTEINKKVYKIGKKGEDSHNAGTDFDVSSKEITPMGGFPHYGVVKEDYLMIKGAVPGTKKRPITLRRSLLAQTSRSALEEIKLKFVDTSSKFGHGRFQTYDEKLKTYGRTKN

SEQ ID NO: 40204 - protein, 327 aa, Oryza sativa
MTFGGKGNLSTSTSANVSFYLPLNMIDESTIKVGDYADVSLHNGGTLGNEVVVDLSPGAVIHLTGGSLNMEARSTITGAGDLVVDAGAHNLAFSINAHITISNGSLIWPTGRGPSQTITFYGGLMINGTGSLQVEPYATTIVIHKEVYLKDQAVIQFPLIGIAPQPSPYDELDAPDTFPRGNMTSLNSFIWEGGELTGNVDIYALTQLILDGDQKNISSVAKLINRGHCEWGTGDVIASNNGDFINYGTMQVRVTAGSSFTANMVYKGSDVPVANGGDPFALDYHTWDMDNGALDYSQYISLRTEFVSRVPNGWNSSDQHQSHIFNN

SEQ ID NO: 40205 - protein, 320 aa, Oryza sativa
MADLVKLYTAEDVAKHVKDADPNYVWNFAYGANLNPNALTKRRKIYPACSVAGVLYGWELRFNCRGFPAFEPGFANVQRTDVPNAQVHGVLHRMTRAEADHLMKTEGGGGYDDLPGYKWTEVEAETYTGERVKAFTLCMSQTHAGLLPSNRYLTLIRNGAAWHKLHPQYLQWLNAYPGNSAGWGARLYLLLCAIVLLPLVLLLVAGFVLFRRSHATHKLAYYAQNIVWFMHCQTCRSDKSAGVPDTFTLPQRAPFPYPVTVTSPQWTDAERAGGIDAKLRGRAAASAAAGAAGDGGDAKAAELAVAQSVQAQGQGSKKAD

SEQ ID NO: 40206 - protein, 344 aa, Oryza sativa
MRTTSLSGLLALASSVEAGLRFPCSTLTFQRLDPAGQPGAFPSSHVHHIVGGNAFNATMEGDVGERATCTTCQMAEDFSNYWTATLYFKHPQNGSYHRVKPAPVLPLLGGSNGAVGGLTVYYTQNDLSRDNLAQNKVKSFPPGFRMTVGNPAATSKDHAGLSYQCMSSHDSSGAGRGRITNTMPTTPCTGGLFTTHHFPACWDGKNLDSPDHQSHMYNTVNSEGFNAAPKCPSSHPVRMPQVTFETVWDTVPFNSMWPSGAPNPFVWSFEGSPTGYGTHADYMFGWKGDSLQKAMDKSECFYDGCGSIKKQQMNVANQCTVKDFVNEPTEGWLKDLPGMAMPMN

SEQ ID NO: 40207 - protein, 296 aa, Oryza sativa
MASAAASASASAAQELDREQYLQELIRGSMLDPPSSSSSRAGRVRPLTDDEIGRFYCEVCMEWKLVFDRFRVSDGCPHAFCVACVVGHIEARVAAGSVPVPCLLAGGGGCSGGGVMHPERCKKLLDIDVFDRWCVALCERAVGPARARCPYRDCGEMAALEGEAAAAALPLRAAASKASCPTCSRAFCLQCEEPWDDRHGGGGGGDGGARCALTQLAKGREWRRCPSCRAMIDKIDGCKRMTCRCGTVFCYDCGSSFNPRMYSCKCTPRKSSQSEEEDGFIDLTCSDRPLNLGNHC

SEQ ID NO: 40208 - protein, 377 aa, Oryza sativa
MSTQGKVIKCKAAVAWGAKQQLKIEEIEVDPPKAGEVRIKITATGVCHTDAYTLGGEDSEAVFPVILGHEGAGVVESVGEGVTSVAPGDHVIPLYTPQCKNCEYCRSPKTNLCVKIRATQGKGLMPDGTTRFSINGQRLYHYMGCSTFSEYTVVADISVAKINPAAPLDKIGLIGCGISTGYGAALVTAKVEKGSTVGVWGLGAVGLAVIMGAKAAGAKEIVGIDINPNKFKTAIEFGATQCVNPNDFPDKPFQQTLIEKFDGGFDYTFECIGNVNTMRCALEASHRGWGVSVIIGVAGAGKEIATRPFQLVTGRTWKGTAFGGWKSVDQVPELVEKYLTKELKVDEFITHTMPLAEINKAFDLMHSGESLRSMIQF

SEQ ID NO: 40209 - protein, 606 aa, Oryza sativa
MPVITVAKTELFRVLGEEFTDDEFSDLCFKFGIELDDIHAEDGSKDITNVPAHKIMYKIEIPANRYDLLCIEGLSRALRIFRGRESLPNYHVSQPAQMQRMVIKESVSAVRGVVVCAVLRGMQFTQAAYDSFIDLQEKLHENICRKRTLVSIGTHDLDTIQGPFSYEALPPKEIVFAPLNKTTAVNGEQLMLDLANDNHLKKYLHIIQHLPTYPVIFDAQRRVLSLPPIINGNHSKITLDTRNVLIEITATDLTKALTVLDTMVAMFAQYCAVPFQVEPVEIVHEKTNQLQVYPQWGRWPTVTADAAKICKQVGIEQQPVADLIAMLRRMSLPARASATSATELIVDVPPTRSDVIAACDVMEDVAIGYGFERLIARKTIPHTLTSGRQQPLNKLTDQLRHVLACASYDEVLTFGLVSRKENFGSLNKPDDASAAVIANPKTQDFQIARTTLLPGLLKTLQSNKSLPLPLRVFEISDVVLKDTSVDVGAVNKRMLCAVFSDTSSGFENIHGLLDTIMIALEVPWKHRDDSKKSRVKTHESHQGPALSYEVLPSEDNTYFPGKRGDVYLNDKKIGVFGILHPEVLKNFGLTVPCSALHIEIEHFVDY

SEQ ID NO: 40210 - protein, 230 aa, Oryza sativa
MRYTVAAFAAFASLAAAVPGYGYGEAPVVTPTPTPAYPAYPVETPKAPEYPAYPVSSAPSKPSVPSYPEYPVSSAPSKPSSVPGYPVSSVPSKPSSVPGYPVYPPSGPASSKPVVPVYSKPSKPEESCVSSTTITVTVPYPTGTPIVPGGPKPSGPAGKPPGGYPVGPSGGVPGKPVYPTGTGVPGKPVYPTGTGAYTKPSTPAQFTGAANSLNAAGFVAGVGALAAFFL

SEQ ID NO: 40211 - protein, 220 aa, Oryza sativa
MAGGCKAAIGCVDARVPVRASYVSLYKWPESDAEFVRSVAMARRHGGEAAAAAPPPESPAVPHHYYYNGSGSARRGGGEGWYYCSPRVVDSYSCRQIYLRSYTFSKKKETVPERTMACLGRVRDRGAAVFPLFIPHRAGSGGGGGSDAGSVNSASSITRETASTAGDRKRIRRRRSSKGCAVARRLQEASCGAVRALFHRLLACTTSVEVADAGEPTSSR

SEQ ID NO: 40212 - protein, 211 aa, Oryza sativa
MLLIERAGRRRLQMAGFLLMAVFLFALAGPYDGYWRDHAKTAGYIVLYSLTFFSANLGPNTTTFILPAELFPARFRSTCYGLSGAAGKLGALVGSIGFLWASQQKDGAAAGHLPGIGMMYALFVLGGICLLGLALTYAFTPETMTRSLEENESSVQAQSQVGDGGSDAGNGSDGLRFHELNVLMEAATKSPVSMASSHLSMSPILPHRMSL

SEQ ID NO: 40213 - protein, 188 aa, Oryza sativa
MASLPQPMGYYPTSNSIMHAQPATTSRGSFGPVFTVLAVITFLAVAACVVGRLCGRRLSKKRAASAEDQFYGINAVGGDLEKGFEIKYPVMKPMASSRAMIHDIDDGFEIKFTPGKPAAWKNDSKGDGKGHQQQHQQHQHQHHPQQHGMPQHHPQHGMPMPPGFRYPANVVRQGQIRGGTFISAKPST

SEQ ID NO: 40214 - protein, 703 aa, Oryza sativa
MSSETFEFQAEISQLLGLIINTVYSNKEIFLRELISNASDALDKIRYEALSDPSKLDSGKDLRIDIIPNKEAKTLTIQDSGIGMTKADLINNLGTIARSGTKQFMEALSAGADISMIGQFGVGFYSAYLVADRVTVVSKNNDDEQYVWESSAGGTFKIAEDTEGEQIGRGTKIILHLKDEQMDYLNEAKIKEVVKKHSEFISYPIYLHVLKETEKEVEDEDATEETTEGDEKKPKVEEVDDEEEEKKEKKTKKVKESKIEEEELNKTKPIWTRNPQDITTEEYASFYKSLSNDWEDHLAVKHFSVEGQLEFRAILFVPKRAPFDLFETKKTKNNIKLYVRRVFITDDATDLIPEWLSFVKGVVDSEDLPLNLSRETLQQNKIMKVIRKNIVKKTLELFNEIAEDREQFDKFYSAFGKNIKLGIHEDSQNRQSLAKLLRFNSTKSGDEQTSLTDYVTRMPEHQKQMYYITGESLKAVQKSPFLDTLKAKGFEVLFLVDPIDEYAMTQLKEFDGKKLVDITKDFELEESDEEKKEREAEEKEFEGLAKSLKNVLGDKVEKVVVSHMLSGSPCAIRTGQFGWSANMERIMKAQALRDTSMSSYMSSKKTFEISPKSPIIKELKRKVEADGEDDRTVKSITLLLFETSLLVSGFTIDEPVQYAERIHKLVSLGLNVDEEVETEQEAKADSTAEAPAAAGESAMEEVD

SEQ ID NO: 40215 - protein, 362 aa, Oryza sativa
MGPIGVGSSQGSNGLTMPHMDTDSLSSFQHGYYTLFKGDIRIHSAKDEWVFNDMEILKRIALPAVRMGLRLHQDHFQSESNDEASLYENVTRFDRESVLCYERDPLWRRAVLNNVSSLLSLRHQFTEYSDQYKVVMLSKNFLSFRLIKINKECVRSFWAGQQHELIFLRNKNQERGSIQNAKQVLRNIINSSCDQPIGYPIYVSPLITSYSSTHDQIARVLGPELSFGKIWTFLTNCFQRIRENCTNDCSGSAQNENLYGPVAYSARSDACNFTSVNSLGMGANTTPNNNANRQQQSSMNSSSLLATNDSKQLSQTVTFNVASSSSEIKKKQYQAQAQPQQPRKPDFSKQHSHDSSNSRFFV

SEQ ID NO: 40216 - protein, 94 aa, Oryza sativa
MPARGEPLPPPFRLYISPSRPATDLPGCASLGNTRGRCRRGRSSTGASAPLLSLLSVCSAGREEEAEEGRRKKKEKRRRRDKELTGGPLYSTIS

SEQ ID NO: 40217 - protein, 300 aa, Oryza sativa
MVQALVFAVGIVGNILSFLVILAPVPTFYRVYKKKSTESFQSVPYAVALLSAMLWLYYALLTSDLLLLSINSIGCLVESLYLTVYLLYAPRQAMAFTLKLVCAMNLALFAAVVAALQLLVKATDRRVTLAGGIGASFALAVFVAPLTIIRQVIRTKSVEFMPFWLSFFLTLSAVVWFFYGLLMKDFFVATPNVLGLLFGLAQMVLYVVYKNPKKNSAVSEAAAAQQVEVKDQQQLQMQLQASPAVAPLDVDADADADLEAAAPATPQRPADDDAIDHRSVVVDIPPPPQPPPALPAVEVA

SEQ ID NO: 40218 - protein, 133 aa, Oryza sativa
MLATRINRAPFQAAGSSRTHIRGASVIVAASPTKAADFRGLDNAEILQKVAELKRENLRLEYMQRTRGNIINPGAEANPEAATPKPHEFKDARRRIAQLLPVLREREIEAGITRKDSRRLRKQAKVAAGFGGF

SEQ ID NO: 40219 - protein, 319 aa, Oryza sativa
MATVEVLTSEVVAPAEETPAGAVWLSNLDLAARRGYTPTVYFYRRNGDDEAAFFAADAVRDGLARALVPFYPLAGRLGLAGGGEDGRVQIDCTGEGAVFVTARSGHYALDDLMNEFVPCDEMRDLFVPPTPPPNPPCALLLVQVTHLRCGGVVLGMALHHSVVDARSAAHFAETWASIVRGAPAGDAPVPPCFDHKLLAARPARAVLYDHPEYKPEPAPAPAHAATASTYASAIITLTKQQVGALKAACAGASTFRAVVALVWQCACRARSLPPDKANLFLLYKYISEDWVDIQLNIQQRDNCIYAPTLKANCCFTPTF

SEQ ID NO: 40220 - protein, 493 aa, Oryza sativa
MSSANGNGTPKSPLVRNGSQATENGSSGKKIKAVVLTSTGSGSDYSNLKLKDEDYPTVEGVAGKEEFISVRVKAAGLNFAELMQRQGLYRPSNKCPYTPGFEAAGIVEQVGSAVTDFKVDDRVIVFNGSGMWKDVVTVTQKNAIKMPDNMSFEDGASFIVNYLTAYQVLFRMGNLKPNEVVLIHMAAGGVGTAAVQLCKTVPGVVVIGTASSAKHDAIRENGVTHAIDYSTSDYVQEVRKIYPDGVDLVLDPLNGENSIKGFGLLKPFGRIVHFGAASISSESRSLVNAFKAWWKCLTVNALDIMSENKSVSGYHMGYLVPNQVCRDILNTDIKILLDLYEKGVIKIKVDSVYSYTKIGEAMKRMHGRQNIGKILLKPDYEIAPPAAVEQVQIVTTVVSTPTANGSATKNGDLPNIKPLNVNGESTPAAEEVKTEEKKEEKLTNGDHHEEEKKAEDVSEEKTNTNGETEPVTNEINGKHNVEVAAQEAEPTSA

SEQ ID NO: 40221 - protein, 383 aa, Oryza sativa
MNPMMMGMGADGMGMPGMGMGMMPGMGMGMGGMGPQGGMGMGPPSGGPGMGGDMGDGKFYKTKICHKFMEGKCNYGPTCKYAHGDGDLRPSGPPGPSQPRPQGSGKIMTPHGPAMGGPGGMAAPGGMGGGGMGGGAMGGGGGAMGGGGGGMNMGMPGKPPMGPGGGGDKGAHFRTRLCEQFMKEGQCRYGSTCAFAHGQHELRPFGTAGGAGGMQKAGPRPNANAGAQAGAQKRPLDGQGGGDAQKRARTEPVAPPEQEALPVEGQSMDLNSLKQRFQALQQEANRFARDTGHSVAIFTVGGLISNMDDAADFHQDNYCVDVKGKDNQLVAPGLKVAVLKYGTGGVAKQLTTRGEIIKFVSARGSKALGELYAQSKESENASA

SEQ ID NO: 40222 - protein, 940 aa, Oryza sativa
MACIPCAKGKARCDGHFPCERCVRLNRVKDCIPRIPQSAVAAAAAAQQHTAQQNGSGAAANSNAALLFALANPLAAGFMYAPRGSAPAALPPAALPAVGTTLPADSQAQLLATLLAIAHGRAQMPLAIVPTAAMTAAAAAPAASAPASVSSAAATAPFARRAAAAAAAPATDGVAPGSGEAALPADVFASAAAAAPAEPFTPSALLAPTTPGAGASDLLTLPPSPGLSLDQILNANTVDPEGTFFSEPAAGPVHTTQNAAHTIAHSYNATLELMRKAAAANGDAAVDAFASPECANAAAGSAAPAPVPAAALAASTAAAAQAATNGAAKPAAAVAAAAVPTAAAVSAARGPTPIRPPPPEGADENEMVVTRKGQKVRRYIPDAVALSACSQATLVCGHMRTLTRWLTPPLCASLMVTMDAWMRGLLTATGYGAYNKLRTMVAPEEIFAILQKHAPKFLWEWVPADDDPNEPNAPHAAHAASDPLSPGTTDRSWLSLPMAIIRHEFRDPHRFLHAAAMHADMHGLPVPKVSVAVNRAAQELLGYDTDAYIAVYGYSPVFFKLLHPAVWQIEDEFELRTVALFRAWAQEHAQNTAKAAAAKAAHSPAGASGSSTHTPNSTATDDSTATPHSNGSGSGASGSTAVSDDAAALIPTPESLAVPCSPQLQPEMFAAVSALKRNMLAAPTRFGNYLFCPNCSLGAAMLGDAFQSAVKPAALALASGDADEDGNCYEPATARAGSYASLKHNGPDRPHNAPLYAKRSERVAAAVATVAAVACECADKPTNGQKEQKESAKAASAAAAAAAAAAADSKGECVQPPPEQTVLSGTSHPADSFCDTKGKRVYTTMARQRVAVRFTRAETLPAAAATSGATGATGATGAADSQQSGWVSEKTQLLHVMHRDGHTHVPVLLTTRFTLTISPVDHMHCTRVEMVYVPILDGLM

SEQ ID NO: 40223 - protein, 741 aa, Oryza sativa
MPLVLPFSATAAANLMDHDDPFPSTFPMSVAHLPTFTLTQINSGGYHADETAQHHQEQYTLPGADTDPDTEDHDRLVDPLQARTGHHAFNQDLVTDPRLAQHGVASTSDSRGGEGLEDLPRIASGHAQDNEMDGQLDSVIDVTPHRSHLGTLANVSAAELPDMLPGHCVSVMPAPAVAAGETHLRLTGTNTADSNGLAQLSTELDDNSTSTAPSGAGGPNTTTHRSTAHKSVTPPGSPTSSTQCDRSPPSSPATATDPALASNASLLLFSGGSPCPCPSCDLRPGGPGWSLFHTPGPRKYSAASMRKYADAHATHQMHVRVRHAFLMSTRMTHAITLVAGLVLGWLVTTCWVQAGMLDAYRREVRGLHAQLALGVAQVQGTKVAVNQVHARVAAQGTWIKTEVHEIRVQVKQLAHVLQAYQRAVKYGGGRGRGVADRFGEIMKRADEFLGRVGAMHEHSDTVRKEKVKEDKANAEDQQDEAMIVEDVQVREQDAIPMGEEGPKPPVDADTHFHAPPHIADFTGTDRPQSETTHDSTDTPPANQDECHDNPQAVVESPMSTITRSIAHVARRIGRSTRKAVLASARALDRMSMCVQEWRARANAKLQGWLEESRAAKARRAHAAPASAYVKVAADQSQASEQVKQEHQSTQTKEAQDLEDPSTSPVGSAANDDALSVTMLREKLRQAQEYLRSVERQEPAEGRVMDKWERIQWANRMSAAKDTVRVAREDLERQLGTSGNRP

SEQ ID NO: 40224 - protein, 337 aa, Oryza sativa
MRLYQYAALIAPAQAALRFGCSTLGIQRIDPLVEPGKAPSAHVHQFVGGNALAPTMDKDPSTTATCTTCTFSEDFSNYWTATMYFKHDNGSYKQVPIMQNSALPNGINGGMTVYYTQQDFFNNGNQKITAFPKGFRMIVGSPTTNTVEDAKKHPGLRFVCLSDKNTRFPELPDFPPKPCKGGIMTVHHFPSCWDEKNVDSPNHMDHMYNTAKEAFAVAGPCPASHPVRMPQVAYETLWDTAQFANMWPKDGSNPFFLSYGDNKGYGTHADYLFGWKDDSLQKAMDSNCMFNACENGKPLKSQNVQAMNACANQMKKSVPDENLSGWLKELPGQAMPL

SEQ ID NO: 40225 - protein, 366 aa, Oryza sativa
MADDDHATNPPAQPAAGGGRTLDGSHVPAPAGASSSSQQASSSRQAPQRGLRTLKDLQASGSGGGHAPSEGDHDSTDSQEDENQDFFTGGEKSGLAVQNPNAANPRDHINNILKRARQNAPRPGGDDERPSSHFRGTGTTLGGDDTPSRTIPDPNAASGAPPVLERAHRALHLWRDGFSVDDGPLFRYDDPANARTLELINTGHAPLHILNVEPGQEVDVEVHPHKDEDYKQPKKKYVPFSGSGQRLGSPTPGASSSSASTVPATSSSSSATPSAPTAPQVEVDASAPTITLQIRLGDGTRLQSRFNTTHTVGDVYDFVTRASPASQQREYALMTTFPSKELTDKAQALGDMAEFKRGGVVVQKWK

SEQ ID NO: 40226 - protein, 286 aa, Oryza sativa
MFGKRSFASSKDKDRSGKITKQPKRSMREASKHKAMAEKLDARRDSPMMGGASPQLTAAIVTVVVGSDQRMFAAHEDVLCHSPYFAELLRSQFFESTNRRIDLPTEEPEIFSCILEYLYKGDYYPCLVHDKRRQTWMLEGAIASPDPNKPGDRAPAAVEPTLFHSGVGDVILRDTAIYCAADRYGLEELKKLSLRKQGLQSGIEVGTILRSARYAYENTPDSDSRLRAHYLALIIRSRKTFKRSGTMQMEMEMGGKLFFDLFVAMCNHVDDLVDASPSARGTPRTI

SEQ ID NO: 40227 - protein, 15 aa, Oryza sativa
MRLCSYRLISYFFPL

SEQ ID NO: 40228 - protein, 264 aa, Oryza sativa
MGRTPCCDREAVKRGPWSPEEDDALRDYINRHGTAGNWISLPNKAGLRRCGKSCRLRWLNYLRPDIRHGAFTDEEDAIITSLYSKLGSKWSTIAAQLERRTDNDVKNHWNTKLKRRLAAAAACTPLLPLPAPPPLAATHTSPSSSLLLLPPLAVPTVKTEAYTCDDFLQQLLPTATAATALRDPFADGAATDGGSTSASAASSGSNWSADTGVVVVGGGGGGGLFPEFCMSSDDLAGAATAEDDHFIGGGYYYPLDLSLSSSLV

SEQ ID NO: 40229 - protein, 156 aa, Oryza sativa
MATTRRRRPTPRRALTPQSAPPTPLRRRRGGRRPLPRRLHHPSSTTSSRKAAARAAASTPSRRRSRLRHLRPPRADPGNRHSHRPAPLLLHRLRRSSSRRFIPGALSSTTPTRSRRRRRRCHRRLLLRRRQCRRGKRRRLLPSRRRRRRRTARAPT

SEQ ID NO: 40230 - protein, 209 aa, Oryza sativa
MLKLALSLVFVVGLAMSAEVEEFRWETIPVAENASQCIYRPEVRTLGCRGVGGLVECPASLEFGSLQFEVFGIRRDAVKSVVSPVESRVFELYPRKLDNQTYQNYTVVVDEKPVELFLYFGETSTSSGIRVTDRKCYTRLIDVVLGVSKARHVVSVVEGTVTEQVELIGEVLVAEKPANKRWLGFGFPWLGWGLGLWGWGLGWGLPFWG

SEQ ID NO: 40231 - protein, 285 aa, Oryza sativa
MSNIGMGMGVIEAGRFMRMSSERRARHLVGMGVVLTLNTSILILGSATRAPTHCTRGVFLWPCIAIGLFFMVVFILGLCGAKNNNEGLFFCHLLGVFIAILALIGFIIFGYVAIGPGIDLSDVKAREYNLDDYKSGWLRARVDDAAYWATTSACLRGDRGAGCKAMTKLVRDPHSGLFVPDGGRRHVDMSPIQSGCCKPPSSCGFTYVNGTTWTPTPAAATNNVDCSRWSNDQQKLCFQCDSCKAGFLDHTRKAWSSAAFFPIFCLIAAILSCCSGLKYGGVLHE

SEQ ID NO: 40232 - protein, 254 aa, Oryza sativa
MAAIQLNFTLRTSANCKTVHLLGSWDGYQGQLPLSKDTKKSGGWTGCFKFNGATLKQGQRYWYYYIIDGYHVSHDPAKDHTTEPTTGRKLNIIDIPAAKSSSTSSDRKSRRVSANIAKGRSLSPERIVAPKPQRPGETRQVINTQYDKTTLEELNRRFAAQSVEDDSEDDSDYDSDVPSLTSRSTNSSSPSSVSSGSSCCTCERFGITRAGNRVKLDCGGSRCGYSDDSEDCSSEDEYVYEEKTTRRQGIVVRS

SEQ ID NO: 40233 - protein, 226 aa, Oryza sativa
MGGGGRDGRRRQRPRSWARAVAKGGIAGRGRLPPGEEMGGNDSGRGVGRERPLLPTGSSLPRRCRRPPRPRWIPPWRSGHRPGRPPRRRSIRPRRPTSATSRRIPPPPPPRHLSGCGKKWNRPPPPPRGPRRGQRPSSISPPLVPSMPVHEAGVVGLQNAEARRRRGGGPASVQYSSVQLRNLVVETDDERGGGELVHRHHHRLPDLPLPNHYLHLRLHTISQLKR

SEQ ID NO: 40234 - protein, 180 aa, Oryza sativa
MAMPMAAAAARAYGVATPPGGYVSFACAAMATTRTGARRAAAAVVVLRHASGGGGGRGPRGGGEREEEPTDASSSWLVDEDMATLRRRIREAREAEEEEGYGGGGGGGLPAEWTELERRHHGSYVAGVRGAVGLLQALLVSARPGLGAGLLALLLLGVPASVLLVSAQLLAVASAVLSGT

SEQ ID NO: 40235 - protein, 123 aa, Oryza sativa
MAPSAVQAMSSSHGAAAAMVAAGQRRRLTRLLLNVTVEQSLWPVHVVIGADCTVADLVRAAVDAYVREGRRPPLPSAGGGGDAAAGFELHFSKYSLESLRPEEKLVDLGSRNFFLCARRTPAA

SEQ ID NO: 40236 - protein, 172 aa, Oryza sativa
MADHPPTVFLNELEKWVSVKSRESILSVRFKPHAAEVKRTLDALEVVPALKRIERSKVVGYATCSVVAENGNSLYLLTCAHTIDHVYTATKEISVQDINRLFDTEVVCDHQQNNGLGGERKFTEAIVTRVDCKKDILLVLVDKSKLLNLKGKQCRFQHPPLVASQNLPCSLE

SEQ ID NO: 40237 - protein, 356 aa, Oryza sativa
MKPSPAANLDVRVERPRPPPVHPHRPGSLRARPYYRRWTPWIVAAIALSCVVVFLVSMYVNDCPRRNSGDCAAGFLGRFAFQPLKENPLLGPSSATLLKMGALDVTKVVHGHQGWRLITCIWLHAGVVHLLINMLCLLFIGIRLEQEFGFVRIGLVYLISGLGGSLMSALFIRSSISVGASGALFGLIGSMLSELITNWSLYANKVAALLTLVFVIVVNLALGILPRVDNFAHIGGLISGFLLGFVMFIRPQFAWINQRRVAPGQQPAPVKRKHKTYQYILWLAAAIMLIVGFTVAIVLLLRGYNANDHCSWCHYLSCVPTKRWKCNSSPTYCTVMQQANTLNLTCEGKTYTGATL

SEQ ID NO: 40238 - protein, 294 aa, Oryza sativa
MDPKALKISPADLVFLPPFTKPINNSIKLTNTSTEALSYKVKTTAPKRYCVKPNTGTISPNESVEVTITLNFTKDPPANPKVADKFQIQCIPVTDTTADLKTLWSRVPKEQVLKYKLRCYLSAKETAEEHSTRETIDQSEFEDASEHEDKEDHPTASSVTTPVVAQPVPQQLSTPVIEPVKPTPTPVTPLATNKVQPVSDTNKGQLSPRAKYKLEIEKQRLEIDRLKADLDKYRNNESGLRQRKVGGGAESSTADHGATSSASHATPVTGKMLYIGLALLFLFGVWFGRWTKSS

SEQ ID NO: 40239 - protein, 341 aa, Oryza sativa
MKKSIISLALLLVIVASEVSALSLREPFIVNLWNKFKKSHNKEYLNEEHEEYRFGIFKTNLERIEKHNEEYSMGLHSYAVGVNVFADWTAEEFRRHMFGTRHGNTTSKSSGTFIKLPKSVQIDDAVDWRSEGAVTPVKNQGQCGSCWAFSTTGSLEGAHFRQTGKLVSLSEQQLVDCSGKYGNEGCNGGLMDNAFEYIKANGGLDTEESYPYHAHNEKCHFNKKTIGATCSGYIDVPSGDEDALKQAVATAGPVSVAIDVTEDNFMFYKGGIFVDDSCSNGRESLNHGVLVVGYGSNSTTDFWLVKNSWGTSWGESGYIRMARNLNNMCGIATAASYPLVK

SEQ ID NO: 40240 - protein, 318 aa, Oryza sativa
MSFIRNTIVLGALSALTAAQTTPPKLDASCADVVIFMVRGNDAPYHDGRTFPFVEATCGKLRAEGKTCDYIDVQFDVTLGGDYCAQVAEGARNGISQITAFNQKCPCSHIVVNGYSEGAHVMGDVLGGPGDCTFVSNGLDNTSSAGKAIAAALLWGDVMHTANQPYNVLDGASKQKNPRSPSDLARLNRYAPVLRSYCAAGDPVCAGGNTVADHLNYFQLYTDDASSWVVSKINNVAPLCPASSSSAVPTPTASVSASVIGGNTPTATVSASVIGGNTPTATGAATVYPTSPAVVAPFPRPISYDTCVLKVHVEYCYE

SEQ ID NO: 40241 - protein, 173 aa, Oryza sativa
MQIPFKFSQNPRNFGCIYRKGLTAGCVVVFLAIVFTFFSGHLYVKSDVYCFGVVLLELLTGLRAHDLNRPSHQQNLVEWARPYIAGGKKLAGLMDPRLAGDYPAKAAARAAKLADKCLCGDPKSRPSMDDVVVALQEIESVGTARPAAAKLPPRAPPPAAHRSPHRNPYSKPR

SEQ ID NO: 40242 - protein, 302 aa, Oryza sativa
MLHLHSLNVLHSDLKCQNVMLATGNADGRGLVGKVGDFGLSLKMDCTETHISQVFQGTMTHMAPEIMLNGRVSKAADVYSFGICLYEMYTGGIAFDGIPRALLGHQITREHKRPVFPDSTPEPYKRLAERCWHADWDARPTFSEVLSELMAMRAANPRSTPPVHIVRRPPLELSSINDIFWGGGGGANSDNNVVKTLGSSVHAGSPHTPHGAEPGDHSVQSVYLEHSLDDHDLIVMRTMSDWSDGGSGARGSASNSLGTAYSGKRTTPLPQIAEGEAGEHEAPGGPVGDVAAATQQHRPHEQ

SEQ ID NO: 40243 - protein, 157 aa, Oryza sativa
MSLRTSEPTIPLRRPRTPAPSLPTAPPTRSPPRPVPTSPPSTARRLSSSTGPSASRSAPPEASTWPPTSPPGSPRVCASAPTTTRLSPPRVTSPAATPRSPSTALKAVLGQKSTTVSGSVHGRSCDDESLPLARAPLWMLVSVVYILFSSCRLAGSI

SEQ ID NO: 40244 - protein, 328 aa, Oryza sativa
MDFHHGDADDFALEFIREHLLGVDGATATATEPADLEVVEPAAAYPPMSWQEQRQQEQHGCHVELTDEHLESAPAAEAAAAFRTAPAQPAAEVMIKFGGEPSPVRPSSSLTISLPPSSFGSWASAAAPAAAAVEDFRKYRGVRQRPWGKFAAEIRDPKRRGSRVWLGTYDTPVEAARAYDRAAFRMRGAKAILNFPNEVGTRGAELWAPPPPPPAHSAAASTTNKRKRQPSEDPDDGVEVIGVVSKAVKTEAPTSNSSSLSSSLTSRDTTPATSSAGAEHAGAAAESSPATPSSWSWEQYWEALLGGLPPLSPLSPHPALGFPQLTVN

SEQ ID NO: 40245 - protein, 278 aa, Oryza sativa
MATATSTATSVAAALLLSLLLARARGDDDYSGFVYAGCSQGRYASGTQYASDVDSVLTSVANSAPYSPYANFTSPTSNSVVGVYQCRSDLPASVCTGCVRSAISRLSSLCAWATGGAVQLRACFVRYGNDTFLGKQDTAVLFKKCGGSPGDAGGAAMRDSALGALVAAAAPAGGGYRAGGSGGVQAMSQCVGDLGAKACSDCVSAAAGQLKAGCGYATAGEVYLGKCYARFWGNGGGGFSSGAAGDAYGSGHRVSGNRFVLSVAGGFFTSLAYIFVLM

SEQ ID NO: 40246 - protein, 389 aa, Oryza sativa
MPLLRRRRRRWNVGDGAPVEVPDPVRVAGVGALLQPDEVEPRVVAQRVRGHRALVLGPPLGDDAVLDAMAVAEPLLEREELLAQLLGAGLGRLATERVLVYCTRSVRLPAPLLEVGERGEQHGGVVVVAGGGEQAPGVLVHAGRAVQVLQFRLELGEKDERVGARESSNMPLVHGSGTVQLAVAELERGVRGPGIGAGAPRRPPIEHYAGVVCGAEEILHAEVLRPDAVSAREDRHGAVKYVARVPDAAATSLELRILYPHTMVAVRRRAAGQRALVHGSRAGGVAAAAAGGLLPPRVPHPLRRRVAASSATAAGSADDGLEPCASLEPVLGELVGIDDPPLLGLRRQADGHRSIAVQFAGLTDEMLGRELHGRRCFVLDAAGGRQHRQ

SEQ ID NO: 40247 - protein, 207 aa, Oryza sativa
MKWLLALIPAVAAAPALPEFNADVPPAGSVLINSVTYGGTGCPQGSMSAQISPDRTIVTLIFDSYIASIGPGIALTEQRKNCQLNVGLTYPGGFQYSILSADYRGYAAIQKGVKGTLKSTYYFSGQQAQTSTEYTFEGPVNGDYTKHDEADSTSIIWSPCGASGMLNINSQVRLEQSNSSATGLLTTDSTDLKFQQVVYVQWQKCTK

SEQ ID NO: 40248 - protein, 184 aa, Oryza sativa
MKYSIVAVAFAALASAQSIQDIPSCARPCLEDSIKKNTQCAVEDLACVCKNFNSIQGDATGCVVKACGPDTAINQVLPAASKLCANPPSGGAASSAPAAASSAPAAASSAPAAASSAAGAVSSAAAPVSSSVPPVSMPTIVTTPSAVVPPTTAKPTATPVPTAGAAALGSMGGLAALVLGALAL

SEQ ID NO: 40249 - protein, 274 aa, Oryza sativa
MRYGEVVHFSHPHHRLRLEHADTPFRCDGCREVGIGARFRCPFAGCDHDLHRQCALPLSPPPPPLRHPFYPRCAFVVLARAPGAPGTRYCNACGRDVAGFVYHCRACGFDLHPCCATLPHVLDAAAGAASGGGGGGARLYLHPKATAACHRCGHRGRSWTYRSSCKSYSLHVACVMDMLVESWNGVGRHKGGVAGGGNVYDGVTVAGSGGYRVPVIRGAAKSSHASRGGSYWGRKGKVKRCCEIAGFAAQVVISAVLGDPTALIAGVIGSLIAR

SEQ ID NO: 40250 - protein, 557 aa, Oryza sativa
MDRDPSVSDEDDDLETLVPQNHVKPPSSSFHVAGLRAAVPPSAASLGRVLWSRRYLLLFVALPVLFLVLFVSLGGASSLRLPASIRLPSAAAPAADPAASRMRDAELRALYLLRSQRSGLLALFNRTAAPTNGSSSGSNAVSYADLHDALLGQIKINREVQAALLSAHRTGAAGNATEDGLDLDLPADGCRRRELPSNRRTIEWNPKKDRFLFAICVSGQMSNHLICLEKHMFFAALLGRILVVPSQKLDYQYDRVLDINHINDCIGRKVVITYEEFTEKRKKVSIDQFICYAASPPCFIDEDHVKKLKGLGISLGKIQAAWPEDAKLKEPKKRFVEDIMPKFTTDAEVLAIGDMFYADVEEEWVMQPGGPLAHKCNTLIQPSRLIMLTAQRFVQTSLGGNYIALHFRRHGFLKFCNVKKESCFFPIPQAAECILRIVEKANAPVIYLSTDAAESETSLLQSLVVFNDRQVPLVKRPEHHNSEKWDALLYRNHMGGDNQVEAMLDKTICALSNVFIGASGSTFTEDILRLRRGWGSASHCDEYLCQGELPNFIAELD

SEQ ID NO: 40251 - protein, 391 aa, Oryza sativa
MAVARPVRALGLAALVMWFFFLYQIFKPAPISSDEFFNFARDPMHDPSGEPEGLLRRVSPGYAPNANPSERINATLLALVRNEELEGMLQAMGDLERTWNHKFNYPWTFFNDVDFSEEFKKKTQAATKAECRYERIPKEHWEMPSWINEDLYKESTKILKENGIQYADQISYHQMCRWNSGLFYKHPALKDTQYYWRVEPKVHFFCDVDYDVFRFMQDNNKTYGFTINLYDAPESIPTLWPETLKFLAENPSYKHPNNAMDWLTDSKHRPEHTQKANGYSTCHFWSNFEIGDLNFWRSKVYEDYFNHLDRAGGFFYERWGDAPVHSIALGLFEDASKIHWFRDIGYQHIPFFNCPNSPKCKGCVTGRFTDGEKWLHKEDCRPNWFKFHGMN

SEQ ID NO: 40252 - protein, 133 aa, Oryza sativa
MASKAFALFLAVNLVVLGVASACGGSPSCPTPTPSTPTPSTPTPTPSAFGRCPRDALKLGVCANVLGLIKAKVGVPPAEPCCPLLEGLVDLEAAVCLCTAIRGNILGINLNLPIDLSLILNYCGKTVPTGFKC

SEQ ID NO: 40253 - protein, 224 aa, Oryza sativa
MADQPQQQQPEPEPEMGAQPQQQWEGAVEARLPSTPAAAAWPHLAAFCSLHRYNPGIDVCERVAGDDGVPGCVRYVASRPPPPPPRAKDGGDDDDDDQQPAAAAAGVETWAREELLERDDARRRLVYAVVGSNLGFGRYVATMTLVDDDGEDVDVNAPAPAAAAAAGCKLVWAFECEPVKGWTRDGLLAYLDAAGKGMAERIEAAAAAAVTDIAVEDDAAAARS

SEQ ID NO: 40254 - protein, 160 aa, Oryza sativa
MMQEEQPLQVARCTKIISPNTDDAKYVINVKQIAKFVVGLGDKVSPTDIEEGMRVGVDRNKYQIQIPLPPKIDPSVTMMTVEEKPDVTYNDVGGCKEQIEKMREVVPASTRASLFSRIRTPTFSPRLHLKRLSPPPEKTRSGSSGGSGGEPWRRSRKTTS

SEQ ID NO: 40255 - protein, 349 aa, Oryza sativa
MMAGGDLRSLLAVVAAVAAAMSYVRFVARRLRPGLPRLAAFVPLLAVLPVIPLAFRALHLRVTSGFFLGWLAEFKLLLLASGHGPLDTSLPLPAFVAIASLPVRRRAQRDSENAPRPGLGLVTSAVMAALLATIVSVYPHKERMNEYVLLMLYSLHVYLALELVLAFAAAAARAVMGMDLEPQFDRPYLSASLREFWGRRWNLSVPALLRQCVSRPVRARVGGGVAGVAAGVLAAFLVSGIMHEAVIYYATLRPPTGEPTAFFALHGACAVAEGWFAAHKGWPRPPRAVATALTLAFILATGFWLIVPPITRTGTDRVVIAESEAMVAFVRDAGSWAAASVRSALTGHS

SEQ ID NO: 40256 - protein, 332 aa, Oryza sativa
MQSEEVKMRFGRCPYCRAMIYQNPKAVIFYCSRCRTPIRGKNPEPTDEAEYALSRLEILSADTASVFSDEPEDAGSDRRADEVRPLSRRTRRPSSSSDWTTTTDSERSEEAFYTPRNAQEGRPWQSPSPVSSQELGASGGGGGLPRPPDEPGAVAAARLMDPAFHKELLHALDNLRSLIVTIEQPRPASGGGGRALTRRDSRLFRRLESQLERALPPQDTASTSASSSSCRGDGGGGRPSAPARREGTDPCRPVLGGAPFVICGKCSELLRTPPPPRPRRRRWTTRIRCGECNEVLELSLPAGGVPAQHRPIRTCSAPLVSDHHRPLPRRLE

SEQ ID NO: 40257 - protein, 208 aa, Oryza sativa
MSGGGAPPGAPGMMTPGDGNSVGMFSSDRIGGFGYGVGVSVGILLLITTITLASYFCTRAPVTAADAAAAAGSSRRHRGGGGGGGGGGGGAGHEHDDVELGIDEATLKGYPEVVYGQPRKEAAKAASAAATKKGGATTCSCCSICLDNYGDGDVLRMLPECGHLFHRECDDPWLRQHPTCPVCRTSPLPSPLPTPLAEVTPLAMARPS

SEQ ID NO: 40258 - protein, 111 aa, Oryza sativa
MFAADEELELRDVEGRRRHSWGRAVQSATESGRDRRAGGCDQARRPRRRGPSHRVKPRRRSCRQTPSSSSFMEASNEAHGYRRHSRLCRRWFPPHAGRDRPTCRARRRLPC

SEQ ID NO: 40259 - protein, 52 aa, Oryza sativa
MKSPLLRLKGFGHHQQHRERKSRQPQPQPTPAKLDELADAAQVRESIDLLIN

SEQ ID NO: 40260 - protein, 218 aa, Oryza sativa
MGRRGRLATVDSSAAATRKPGYRPDAMGAGAAGVARGRRRGLSVPAPRCARLFGLAVFRLVRTGCAAGGSLLRSVSTIRPAGAAALLLSFALAPAAAQMIVITGAREPLAVERLAADVVVIDADTIRASTADSLADLLRREAGVQLSRSGGPGQSSGFLLRGAGTAQTAVFVDGVRIGSATLGQPSIESIPLSSVERIEVLRGPGSSLYGADAIGGAV

SEQ ID NO: 40261 - protein, 277 aa, Oryza sativa
MFLRALASLLDRRLSARGAQARRSAAAAGTRPAKPRALRTLRDLGVGHGAVKGALALTSSLAGLLLGFLYFKQDRDDSAWEYTRKEEETVKWRDVVEPSVMARFTRKDGTFAYPEYYGYLRVQMNGGKPNYDQKCSDKVEEAIVDADAADTDEDGNNAVDEPAMKAKFEDWMKEHGRIYITKKEKAHRYENFKKAMKGINELNIKRGMRSPLAAPTELADYTDEEVERLGITMADDSDWDEYLDHIHTAIARYMATIKRIRSFVLEASNYILIYVFP

SEQ ID NO: 40262 - protein, 425 aa, Oryza sativa
MGMDQPAFDSYFSQTMTTPTMMASGPMTPPTSDSVPTTIKMEDLQVPFSTPSPAPTSEGSSSQSQAGSTPAPTTSDAKPVKKRKSWGQVLPEPKTSLPPRKRAKTEDEKEQRRIERVKRNRLAAHNSRERKRQEYEVLQAEKDQMESDLQAYKEKVSKMEAELAFFRQKYPGEAPESLVFDLPLTNTNTDTICPARTSASFPSPVSMDSMDSPRDSSCQPETPASSFEAPTPEFDSTQYPAVILCDLQCRSDSVSTVGSPLAAILAYLTLFNLTLQSTKSLLSSTTFSTSTSSLKALQLQWNPLSAWLNLMSIFLARPSSATAPTQPLLAFLTALTQSSQTCRVPLAQLRLATGLSQLSSSDDTVNERSSKGMSEAGPVDGVLESRLMRSPWLRQLGGRRTSLVQENMGCRLTRRHTESRGMVSV

SEQ ID NO: 40263 - protein, 340 aa, Oryza sativa
MKRILCLLAFATILSLATSTNLSSLVDKLLDTEWHLFKKQHAKSYESSEVELVRRLIWETNWRFIDEHNLEFRQGKHLYTLAMNKFGDMTNLEFARTYNGFNSSKTMRKVAGRPFVPPANFRAPDSVDWRTQGYVTPVKDQGQCGSCWAFSAVASLEGQHFKAAGQLVSLSEQNLVDCSRKQGNMGCDGGLMDQAFTYIKVNKGIDTEDSYPYHAIDQKCQFNPATVGATDTGFTDVTPGSESDLVAAIASVGPISVAIDASQSSFQFYSKGIYSDKYCSSEALDHGVTAVGYGSLGTNKDYYIVKNSWGTSWGDQGYILMARNKNNMCGIATLPSYPIV

SEQ ID NO: 40264 - protein, 445 aa, Oryza sativa
MALLARRARKAVMAKAPAPLLQKRGGGAAAELAIPAHFRCPISLDLMRDPVTAPTGITYDREGIEAWLDTGRAVCPVTHAPLRHEDLVPNHAIRRVIQDWCVANRSRGVERIPTPKIPVTPVQASELLFDVAESAARRGAAGRAAGAVARVRALARDSERNRRCFVSVGTGRVLAAAFESLAAAGEAGVLEDVLAALVCMMPLDEEAARVLASSSSMGSLVAIAKHGSLAGRLNAVLAIKEAVSRDGAFVDLADDKVDKVVDALVVIIKAPICPQATKAAMVATYHLASSDERVAARVASTGLVPTLIEALVDADKSVSEKALAVLDAMLASEEGRASARGHALAMPALVKKMFRVSDVATELAVSAMWRLGCKASSGDEEAAATGCLVEALRVGAFQKLLLLLQVGCRDATKEKATELLKMLNKHKGLGECVDAVDFRGLNRLS

SEQ ID NO: 40265 - protein, 444 aa, Oryza sativa
MREIVHIQAGQCGNQIGAKFWEVISDEHGIDPTGTYHGDSDLQLERINVYFNEATGGKYVPRAVLVDLEPGTMDSVRSGPFGQIFRPDNFVFGQSGAGNNWAKGHYTEGAELVDSVLDVVRKEAESCDCLQGFQLTHSLGGGTGSGMGTLLISKIREEYPDRIMNTFSVVPSPKVSDTVVEPYNATLSVHQLVENTDETYCIDNEALYDICFRTLKLTTPTYGDLNHLVSATMSGVTTCLRFPGQLNADLRKLAVNMVPFPRLHFFMPGFAPLTSRGSQQYRALTVPELTQQMFDAKNMMAACDPRHGRYLTVAAIFRGRMSMKEVDEQMLNVQNKNSSYFVEWIPNNVKTAVCDIPPRGLKMSATFIGNSTAIQELFKRVSEQFTAMFRRKAFLHWYTGEGMDEMEFTEAESNMNDLVSEYQQYQDATADEEGEAGEEEAEQA

SEQ ID NO: 40266 - protein, 109 aa, Oryza sativa
MAGDIVTAIVFALAAAVLGGPEALRLLQDVAGKNPAADVAIIVGAICAVTSAVLGAMLLVRFIRVAGDAPDRATERFARVTLTVAFAAIFLVAGCLLAAPAADKFASSA

SEQ ID NO: 40267 - protein, 171 aa, Oryza sativa
MAETLKPVALLLLILNLCMYVILAIIGGWAVNISIDRGFILGPGLRLPAHFHPMFFPIGNWATGFFVVFSLLAGVVGIASGLVGFSHIRHWNYYSLQPAATTGLLAWALTVLAMGLACQEISLDRRNAKLGTMEAFTIVLTATQLFYVLAIHSGSRGPVPVERTHAVAAGY

SEQ ID NO: 40268 - protein, 60 aa, Oryza sativa
MGAASVKYLDGDANTTSSGRASSSAVGHPAAAATASASAGRRTHTHSPSPSIGNEPSRAD

SEQ ID NO: 40269 - protein, 105 aa, Oryza sativa
MQALARAARGILPATAAAPAARVQQARGIVVHVKDGNLERALGVMARKMRSSGIERLIRARSQIHHHVKDSEKRVLARKALMQRVRSQELGKKLRDILIKKIRGQ

SEQ ID NO: 40270 - protein, 30 aa, Oryza sativa
MIVFFFSNKTVSLLPSCRLVLLSSPCIRKG

SEQ ID NO: 40271 - protein, 78 aa, Oryza sativa
MGSFARKEHQFLAELGLAPRNPGSFACGAWGGSGPVVTSTNPTNNQARLPPHDPLGSRRSIWFGPPWHFWGVCDCGGF

SEQ ID NO: 40272 - protein, 128 aa, Oryza sativa
MQRAASLALRRLAAAAPRPPPAHLAVGPAAPRLAAAAPPSAAVARFLLHPAGATPAALHARRGYAAAGRKAKAVSESEDEDEDDEFEAMGSDGEFDDDLDEDSDDDDEVSGFEDDDDDCKPAKKRGRH

SEQ ID NO: 40273 - protein, 197 aa, Oryza sativa
MKRPPPREDGAGSGGGDGAKKGKGRWGGGGRRRNEQRLGSGGGGALSLAAFAYAKSRNTGYNPALIKKQKEFYKNAKLISKYKRSKKQQNQSSNPPPFPIPKEGGDDANNASKLHSKKKKRVAPSLNEEYEKKRAEDEKAKKEREAIIQAKREERERSEARRRDLREKMFKKTRSGQPVMKYRIQHLLETALESSNK

SEQ ID NO: 40274 - protein, 173 aa, Oryza sativa
MDARGGHHRDEEEEAAAAPLLAGAAPLGYSGHRRSHAGDLHVLSAAFLFVFSAYCAAQNLESSVNTEGDLGTVSMGILYTSFTLFSVAASPVVTWLGSKRALVVGTSGYVIFILANLVPTWCVRPYARLRLRIPWFWVLTPSPTDPMVLIFDMVRMVSLVPNWACWFGCLTPV

SEQ ID NO: 40275 - protein, 97 aa, Oryza sativa
METRGWTRRSRTRRGWRWRRRRRRSRSRSRRKRMGKMSSNPKRRGRNRMRGQWRMLIWMMPERCSSEVKMPMAMVMLKKVKTKAKASILIQRGVVLM

SEQ ID NO: 40276 - protein, 21 aa, Oryza sativa
MKRPPPATRRRRSASRRRRRA

SEQ ID NO: 40277 - protein, 169 aa, Oryza sativa
MGVVDLPLEAIGGADPLAAALGGADPRPRRSGTVMPDLPLEAMGRHPPAGALGEADLPPGRTGTVMSDLALEAMGGADLLPRRSGTVMPGLPLETMRGADPPATVLGGADPLPRRLGTVMPDLRLEAMGGADPPAAPLGGVDPSPRRSGMVDPALWRLGTTSRCMHNMW

SEQ ID NO: 40278 - protein, 57 aa, Oryza sativa
MCRQGVYVHLKSKSFCSICLICNSNSTNVHTSRRAAYSSRAKRASSSFQTSRAELAF

SEQ ID NO: 40279 - protein, 151 aa, Oryza sativa
MACSGSFLPIMLLPLLLAGAAVAGGAPPGLGLAQRLADGVGQQQQQCWEVLMEIKSCTGEILLFFINGEAYLGPGCCRAIRVIEQSCWATDAMLSVIGFTPEEGDMLKGYCDAGDEHKPSPPPASPAVGYVAVGENAAVPAGRKSLALQHR

SEQ ID NO: 40280 - protein, 189 aa, Oryza sativa
MFHAHHAKLEPREKAELARELGLQPRQVAIWFQNKRARWRSKQLEHDYAALRSKYDALHSRVESLKQEKLALTVQLHELRERLREREERSGNGGAATTAASSSSCNGSGSEEVDDDDDKRNAAAGCLDLEPPESCVLGGATCATPADVSVESDQCDDQLDYDEGLFPESFCATPELWEPWPLVEWNAVA

SEQ ID NO: 40281 - protein, 20 aa, Oryza sativa
MRRLEESYTTSPAVAHAGLW

SEQ ID NO: 40282 - protein, 78 aa, Oryza sativa
MRWLVNKRTCSHGEGEGAHSQELLHELPRRRRAGAVLFASDSGGFGGADLKTVATDLLQHLQIVSTDLHHSQLTYWPN

SEQ ID NO: 40283 - protein, 101 aa, Oryza sativa
MRRLRCIGGGGDSSAMAGMAVWMRRLCCIGGGGDSSGSEGNGLDATAALHRREAGDGWMRMKLMKFKDKRATFTTGWNALVGANLFEQADVCVFLFTEVPM

SEQ ID NO: 40284 - protein, 102 aa, Oryza sativa
MEEKGAEAMTQKAPEKEAAAMACYRRTVGEEATFKERSKDLFRQFKDAPAGDHWVCLKNKVRAAGEYATLRTRQGITMFGEPNVGDLLGRTKDDDSKKTPSA

SEQ ID NO: 40285 - protein, 156 aa, Oryza sativa
MEIKLVFFFLLLLGFGNAEEELDTETCDVAKLSAEIGTYCEFDQGRMYPGRCCDSIIDAADGHDGGGTQCICRVWMEDAVRKTGITFRELLHKYIDCGGLQPSLPHLADSACSAAPEMVGTLPGPGKISGADTTNVGVIFSAMRPAIIVNKMLAST

SEQ ID NO: 40286 - protein, 21 aa, Oryza sativa
MGCTATLDAPAASTARMDRAK

SEQ ID NO: 40287 - protein, 87 aa, Oryza sativa
MTLVMPDQAEVVNMSGILIGILLEHHVIPGGMMIIGGIMISVVMTMTGAIESLGQNGNQGLTLIMIVQSVMAHLIDHAVIGEMMTNL

SEQ ID NO: 40288 - protein, 170 aa, Oryza sativa
MSPATPFSCGAGHVFPHRAMDPGLVYDLTVDDHLSFLCTIGYNATALALFNGAPFRCPDDPLDPLDFNYPSITAFDLAPAGPPATARRRVRNVGPPATYTAAVVREPEGVQVTVTPTTLTFESTGEVRTFWVKFAVRDPAPAANYAFGAIVWSDGNHQVRSPIVVKTQES

SEQ ID NO: 40289 - protein, 159 aa, Oryza sativa
MALAAVLSRAAARLLRPPLPLRTRHLCALPSSSSPAPSEAEILAEIDPIVDLVKDILHSARYGDGAFLSPDDQKAVVEKVLVHHPTSEDKIGCGVDAIMVGKHPDFRKSRCLFIVRTNGETEDFSYRKCIKEYIKQKYPSQADDFIQNHLTRQFTRRPK

SEQ ID NO: 40290 - protein, 87 aa, Oryza sativa
MASRLRSFTRPAAAFLRSAAGRSPAASLPRAVAPVTRAASVGRLVGLARSLQPLHSAVAEARLTSRLGAEVARAVSQGTLCSSFPGV

SEQ ID NO: 40291 - protein, 304 aa, Oryza sativa
MASAAYYAGLVAGTPPPPCRPGRLRRCQPPANNLVSSGRRSHQAIRVTNGVNMDGRAKLAAPVAVVTGASRGIGRAIAVALGKAGCKVIVNYAKSGMEAEEVCREIEESGGTAITFSADVSIEAEVESMMRAAIDTWGTLDVLVNNAGITRDALLMRMKRTQWQEVVDVNLTGVYLCAQAAAGVMMMKKKGRIINITSVSGIIGNIGQANYCAAKAGVIGLTKAMAREYGSRNINVNAVAPGWVTSNMTAKLGDNVEQKALETIPLGRFGKPEEIAGLVEFLAVHPAASYITGQVLPVDGGLSI

SEQ ID NO: 40292 - protein, 246 aa, Oryza sativa
MVRKLVASLFLGGGGGGGGGNDACSLSSSSSTASSWQWPSCTQARTLSFARHDAPASADDDDSKRRRQQEEEEDDYCVYKTSVMNPAFFLDDHSTCRSYSSAASAVNDVVDDDDEVIIRGLRSSNRRLFFEPESTSSIVVKGRAVDADAAAFDGATAMSIDSADPYGDFRRSMEEMVMSHMSGGGHDWGWLEEMLGWYLRANGKKTHGFIVGAFVDLVVALASSPSSATASSSAFQLPLQKGSQIN

SEQ ID NO: 40293 - protein, 54 aa, Oryza sativa
MVVLATGLSLTPRFYSRSSIVVAASLLLSAAPSSSSPRARAAAPASVYSPWRGR

SEQ ID NO: 40294 - protein, 104 aa, Oryza sativa
MEGVGARLGRTSARYGTTTTFTGPVRKWRKDWVPVAAAAAAAAAAASAASSTAGAGSRGNNLVLFKWTPMNGANGNGGGGDGDQAAAAAAAAEEEKATKRRRFL

SEQ ID NO: 40295 - protein, 54 aa, Oryza sativa
MIKRFSNTWSLSTWMTQKISNQATPLLSHSPPIHILKIQSLQKHIPLVTMKQSK

SEQ ID NO: 40296 - protein, 210 aa, Oryza sativa
MDQSIVGQILEKQVLSVAKAVEDKLDEQIAALDRLDPDDIEALRERRILQMRRAAERRAKWRALGHGEYGEVPEKEFFAAAKASDRLVCHFYRDNWPCKVMDKHLSILAKQHVETRFVKVHAEKAPFLTEKLRIVVLPTLALVKNTKVEDYVVGFDELGGKDDFSTEDLEERLAKAQVIFLDGEGPAHASKQATKRSVRQSDTGNSSDSE

SEQ ID NO: 40297 - protein, 206 aa, Oryza sativa
MAPFIDLGRGGPTAAPGKPRLVMIIADPGRESTAAMEWALSHAVAEGDAILLLHINMPPNSAGGAGPSRTGSGGSAGSPLTALLGAGAAGDADFMETMSAACKARHPRARVRALRVEPATEGREAKAQTILAESQRRGVELLVIGHRRVSSFLGLRSPSGSSRAHDSTAEFLIEHSKCVCVSVQKKGQNAGYLLNTKTHKNFWLLA

SEQ ID NO: 40298 - protein, 313 aa, Oryza sativa
MGGKSATKSQYFDKLKSLLEEYHSIFIVGVDNVSSQQMHEIRHAMRSKGVILMGKNTMVRRALKGFVSEHPEYERLLPYVKGNVGFVFTNEELKEIRSLILDNRVAAPARPGAVAPGDVYIPAGNTGMEPGKTSFFQALGVPTKIARGTIEITSDLKLIEAGSKVGASEATLLNLLNISPFTYGMTVTQIYDHGQTFASDVLDIEESQLLKAFTSAINTIACISLATNYPTLPSVMHSLVNSYKNAIAVAIEIEYEWEAIHELKDRIANPDAYAAAAPAAGSAPAAAADAPAEEKKAESEEEEDDDMGFGLFD

SEQ ID NO: 40299 - protein, 33 aa, Oryza sativa
MTGSTAVGDVVKAAFAAIGGAQMAAPAAVTRCG

SEQ ID NO: 40300 - protein, 58 aa, Oryza sativa
MGTGGVDAIGADPPTPPHVGLLLQDGREASPQLLGGVEALHHQDDNEDGEVEAIQVPL

SEQ ID NO: 40301 - protein, 144 aa, Oryza sativa
MARSAALLAAARRCVGGRWFLAARGEDSAEALPSSLRWLSPPIFGSPLIRRERTASRAPSGAVGGGDFGGLPEARRCLLSLDLGVGSLAVLGGGRRGGRHLHHPWGEARRTPPSFLGALLLCSLIPKSPFLLVSLACLINHPKI

SEQ ID NO: 40302 - protein, 6 aa, Oryza sativa
MDLMTL

SEQ ID NO: 40303 - protein, 150 aa, Oryza sativa
MADMGRHGMAMAMAPAAAGGAGRRKRYMHMTFYWGKNSEILFTGWPGASGGMYALALAAVFALAVLLEFLGSPRVQESSSLGSRRRRATAAAVHAVRVGLAYLLMLALMSFNVGVLLAAVAGHAAGFLAFRAGLCGGGYKKGELAPAACC

SEQ ID NO: 40304 - protein, 34 aa, Oryza sativa
MGPTEPILKDRWLAATTRHASKGEKMFFSLFFCF

SEQ ID NO: 40305 - protein, 53 aa, Oryza sativa
MHSRISELRPMSRITRRPMSGDMGVFRDDGSSYGLDNDVRRLLPRATAAGRRL

SEQ ID NO: 40306 - protein, 46 aa, Oryza sativa
MFSPSKADMELLVAMARQGKLKPAVDSCHPLSDATGKVVVKIGEEE

SEQ ID NO: 40307 - protein, 172 aa, Oryza sativa
MSLYVQVLAEERWRLESMYARTVEDGAGDGGILRVRRRGVAAVAASAAAPVALLLGDDGGPELGEDLQLAAERLAALHELGLLPLVEAVHLVELLVQPREEGPRRLAVREPGAAVHELRFVHLSGHRAAAAASAAGQLPMHLHCIAHVPTAEQIQLLLLRTPVTMKIAENFP

SEQ ID NO: 40308 - protein, 160 aa, Oryza sativa
MLGLPRPSPPLPVSAVAVSAVGGERRQRPPLSVSSGRQAATPLSPPPLPLCRRRQQRAVAGVGGWEAAQVMRAHLIVTGGTPPPSPLASGLPSPSASSSLTGGRSAGPGPAMARTNSIAASAARSSPSFFVLLFSFSYFLKDCSSELMFMYIINLLFEEV

SEQ ID NO: 40309 - protein, 24 aa, Oryza sativa
MEKKGRKEEEGQFCPIFFVNASKW

SEQ ID NO: 40310 - protein, 121 aa, Oryza sativa
MLRGVESLGPSMFSRTPCPAQPRLRTTLAPRRRRLSSLDRDGTTAPLSREARRRRRRPPHLVHAQLRSEIPAFQLQSLHEAHRLEIHQPCCVMFVSPTHQFLMRVLIRQRLNDGTPTDLDQ

SEQ ID NO: 40311 - protein, 79 aa, Oryza sativa
MAYYARRGGDRVSGGGRVQGGGGGGGGGGRGGYVLRGRSGMPPRGPLGLGVNSRPSARTIAKARPPKLTLCFCSWSDFS

SEQ ID NO: 40312 - protein, 96 aa, Oryza sativa
MVRPALLRSRSSPPTPSWPAAGAAAASSAAAAAAARASANPLPPPLSSPPPRPSRRSMASAGVGRGRVRVAVVGDVVTPSLPSSSVSSLRRAWDGG

SEQ ID NO: 40313 - protein, 22 aa, Oryza sativa
MGKQRRDHKAAADSVEATRPLG

SEQ ID NO: 40314 - protein, 156 aa, Oryza sativa
MAGSGSGTPCASCKLLRRRCTSECVFAPYFPAEEAQRFAMVHRVFGASNVSKMLLDVPPPQRPDAVSSLVYEANARMRDPVYGCVAAISFLQNQVSQLQMQLALAHAETAALQLQPQQQHQDQDDHHHQQCILENAAAHHQLMLQEAFLKKESMWT

SEQ ID NO: 40315 - protein, 52 aa, Oryza sativa
MLGRGSPRLTMLLAKAAQKKNSLKGRPTKKHGGSPIEKNKSLLEPSPREDSC

SEQ ID NO: 40316 - protein, 102 aa, Oryza sativa
MAPAMFVGIAAAGGKKGGAKDEAEELRRRNAELEREVAALRAEVAAARRRAETAEEAEERLCVQLGEAEVEAVELAREYQCRVHDLARELAAARLLVSSPSP

SEQ ID NO: 40317 - protein, 102 aa, Oryza sativa
MINQVVLVFMAPWSEPWKLMRPAVEKMASGLKSEEAEVCTISVDRFNTLGRLLRVEALPTFVLVKRHRAVARVVGVNRDDLHSSINKHLAPPSSSPQPINIS

SEQ ID NO: 40318 - protein, 105 aa, Oryza sativa
MAFYKYGFAFLAGTGFGAALTSLRRDGDSCCPMRRRRRRCRRHHHDDDDQLVDGDGDGEAAGEERDTKESKRATTTTNPKAKKGSNKEKKAAASVAREEEDDDDE

SEQ ID NO: 40319 - protein, 60 aa, Oryza sativa
MEMKKIACAVLVVAASAATVAFAAEAPAPAPTSAAPAAVAPAIGAALGATVVSFFAYYLQ

SEQ ID NO: 40320 - protein, 119 aa, Oryza sativa
MAQHERKPVGEAVDVEAGGGGGRQRAAAAAGERMRLTWSCLAVAAGVAATGVAGAAVLVWWAVAFHPAHEQLWMVPVGLVLLGTPLVAWLSLFASGACRRLGSLRAVQDQVPPPFAAER

SEQ ID NO: 40321 - protein, 130 aa, Oryza sativa
MANNNGYGDGDDQLTTCTKLALDHIDIDLENVQGFDSNAFTMKLFDDNDDLIYFHVVFTGETPGRRGGGGMRYSFAEIVGKDKPEEVRMWKEMDEESENCTVENCIFCTGMWHPLSGGFCGYKRKKKNRR

SEQ ID NO: 40322 - protein, 68 aa, Oryza sativa
MLAAERRHDRTRGSSLQFMRLVLICLHVKPFLQRAAVEAAAGLCAAVVEAGGARRRRRRGRGSGGLNA

SEQ ID NO: 40323 - protein, 115 aa, Oryza sativa
MAASAPVEVGAQGTIGSLVCREVEYFRRMEVAVVSHDHGKNMSSSSKQASRRRHRQRGEPQDQEQGPAAVEGGRGRRAYLFLPSICSSAEVAEATGAARVRYQHLGQDEGHSLPQ

SEQ ID NO: 40324 - protein, 91 aa, Oryza sativa
MACLEPLALTSPPHLSQRWPVISRPTQGGGSSPHREQWRCPPCRERPWRCPRPPLAVAAFPTASSRDSTLLYFRWVGPAAAVSSGSAERPR

SEQ ID NO: 40325 - protein, 216 aa, Oryza sativa
MAVAIAGAATRRLLLAPARRRAFWSSPWAEESPHSPGPSADENKKKKPSSHHRLAAVMDAVADRKLPPELRGRANAVRSETDIINVVEQRIWHSMEEGHFENLPGKGKPLNLNSNPHADPAEDTLYRILSRNGCAPEWVELNKEIRGMIARWRSALRKAWANRSEDDRSTWHDDHRLLQEQIRQINDKVFRYNLIVPFGRQMFGLNWDKELDKLKQ

SEQ ID NO: 40326 - protein, 18 aa, Oryza sativa
MDLLDDFIVLLDFFVICG

SEQ ID NO: 40327 - protein, 38 aa, Oryza sativa
MGIENMSAVVNFNTAASTCGAPIQTVNSYSKNKDKQRI

SEQ ID NO: 40328 - protein, 218 aa, Oryza sativa
MVKGRPKPTPVNAPAEVVFDPSAPGARRPRRPGAPSSSSSTGEWHNFMGSSLSDMYRKPAAEKSDDTSDDDEEPDIDIGKLLKDVELFGASTWKERKQLENRKVVQLGGKAIKKHRTPLSVSKPAMKNQKKREEKKAEEERLLGIFRKRDSKNSKAQKTRPEDRVLRATQGHFKNGILDVKHLLAPPKLSGRDAPEQKMRMGKKNGKGKQKGGRRKRR

SEQ ID NO: 40329 - protein, 38 aa, Oryza sativa
MSLQRGSLIWFVPLSFRRYLLDFTLKTFDFLSPKVTHY

SEQ ID NO: 40330 - protein, 63 aa, Oryza sativa
MQFLTISSYAGVPTTLMARFRVAATFFTSLGSTTLHCQKKPYNQQPCKCVVVYRLIGIRMCHI

SEQ ID NO: 40331 - protein, 143 aa, Oryza sativa
MDHGGGERRSAGAYEAALRAVQRPAAKPWRGGGGGGGAGGSAGAAGAAPPKVYRVAPRDFRELVQRLTGAGTAAPAVAMGASQAVPAPPPPYAGVPAHGQSDAAAAADMFDYASWFSVPLLSPASMPAAGYDGQLHHGHGALL

SEQ ID NO: 40332 - protein, 79 aa, Oryza sativa; identical to SEQ ID NO: 35614

SEQ ID NO: 40333 - protein, 36 aa, Oryza sativa
MHIVVRCILWIELKPHFLSWWLCIFCAKYKGGKCSA

SEQ ID NO: 40334 - protein, 103 aa, Oryza sativa
MFTAAGLIRGTNKENNLARFRSISPPPPDHMEENTPRQRPRVKVGSRVGGGGGDGGANLGSGGRGRGTRCGACAATPAAAAAASAAASADPSPSPSAELAAAG

SEQ ID NO: 40335 - protein, 162 aa, Oryza sativa
MGLNPSKRVDAALRGAPAFAAACDDAFGRCLADAQYAFAGVRPYQLADASAHLHSSLRGSLPLVRRWVPSPPPRARVDSALRAAGLEDAAVLSRGQFREFAAELFREAVLAGAAQAALVRAPAGAAGLVGVGLATRAGAGVVGRLDAIYTAGVAAAVYLSLG

SEQ ID NO: 40336 - protein, 267 aa, Oryza sativa
MASLLSLPRLTLTPTPRANPGRRSARPTPASITCGPRDNRGPLQRGRSLSTEAILAVQSLKRLTSSDRSPAAAAAAASTSLGRLLKGDLLAAMAELQRQGHWSLALAALHVARAEPWYRPDPALYATFVSSSPATEDGAAAVDALVEAFLEEKERGGGFVDGEEDVYKLTRLVRALVAKGRARAAWRVYEAAVRMGGCEVDEYMYRVMARGMKRLGFEAEAAEVEADLREWEARISPPARDVLDEMRAREEQHNCGLTVNLIIVLET

SEQ ID NO: 40337 - protein, 237 aa, Oryza sativa
MDWYAWLAKTGLAPALAYEYGRLFNQNELERGDAAHFDHDLLKSMGIAVAKHRLEIKLAKKDSSSAADAGGGDSSSSSYAQLIARKAGRCIARCARRLARPRGVGGGRGSSVTVVPRICSGDDAVRVGAVQAAATRRRRSVKKMVLMITDGGATAARGGVGFAAGRFSGSQKASLMFHDCYEEEDDDYDHEEEARCGDGAEGGDEDAEEERCSDGGGGGGTDVEIKWDSMFQDLKPT

SEQ ID NO: 40338 - protein, 87 aa, Oryza sativa
MASRLRSFSRPAAAFLRSAAGRSPAASLPRAVAPVTRAASVGRLVGLARSLQPLHSAVAEARLTSRLGAEVARAVSQGTLCSSFPGV

SEQ ID NO: 40339 - protein, 85 aa, Oryza sativa
MRIRKRTPVRAASPSPGPSPQPKEDPAAAAKAEDDDGVEEEEESKNHGANLRCNDDDDDEEFHYYGGLQHGGRKRAKSGGGGGPA

SEQ ID NO: 40340 - protein, 160 aa, Oryza sativa
MNPADLGGFGRPSERASRASGRAVVSPRGERERDGRCPATTTTMCCGREEGAAASAGPGDKRGGDGEADACPATTTTTCCIRGRREQRRAGGRRRRRPGEEARGPRRREEAAATGGGARSPPAGGGGSGGEPPEAQIQPAFFLFFSFFSFSFSSFFYVYL

SEQ ID NO: 40341 - protein, 139 aa, Oryza sativa
MATRQASSEASADDCMSKNAADAGSTAAAAGGRRVIVVRRRHDLGAGAGEEKESCGSNDVSVVSFDGSSGSLSCYKPGSKSRLRGGGRSLPRRKVASSDHRLHARSHKVSKKVHRRGQEQEREEAAAEAYDGNQPPTDY

SEQ ID NO: 40342 - protein, 150 aa, Oryza sativa
MAAAHAHPLSLAVLPSSPAQATPLPLFLRYAALRRGGRCGGATRPLRLTRLRRGRAAVAAAGEVDAPMEQTEAMMRVAADDDSVTATVVSVLLTVAFVGLSILTIGVIYLSVTDFLQKREREKFEREEAERQKEEARKKRAKARGRKRKF

SEQ ID NO: 40343 - protein, 59 aa, Oryza sativa
MTAFAARTSPAAAAEAFWRAAMPGAPMPDAIVELLHHGESVNLIVYTTLNDTSISDGHY

SEQ ID NO: 40344 - protein, 156 aa, Oryza sativa
MSIAPSSSLRALVIPILPSVSSSPSARPGLRGVAAPVQHARARRRRGAAVVARAAALPSDAEWLERLPEKKKPLYTHSLPCIEAWLRSIGFSQTREDRAVWVAEMPLWHARLSLDVTDLHIRYLKSGPGNLDKDVERRFSYALSREDIENAILGGP

SEQ ID NO: 40345 - protein, 170 aa, Oryza sativa
MAARAAAADLAKISNLGLGKNTLAQISAFRKRADDAKRQLAQLQQQKTDVDFAHYNKLIRNKDVVSQAQKILAEFKPVTYDVQAQLKAIDAFESKAVEQAQATASKIEAELKDLKATLKNIEEARPFNQLSVDDVVAARPEIGRTVDEMVKKGKWTTPGYDEKFGNLSAI

SEQ ID NO: 40346 - protein, 69 aa, Oryza sativa
MSGPVVPLAWTAQGPCEPSPGSGPLPVSAAASDPPAPSSSVPAGGREPSASGLPPAVTPQLGVMTFGLA

SEQ ID NO: 40347 - protein, 129 aa, Oryza sativa
MVFGRSKSSSSTASPPPAAAASSAAAAACSELRAAYHECFNRWYAEKFAKGQWHKDDCVGEWHKYRACLEVTPFSPPPNSITASLIYYRSPQFVAKTTALGIALVFSQFRMGFHLSRFLVYMARNRVVF

SEQ ID NO: 40348 - protein, 21 aa, Oryza sativa
MFLLIFFSFAGLSYWILYLCL

SEQ ID NO: 40349 - protein, 78 aa, Oryza sativa
MEKEASAMVARRSTSRHDWRRWWWRLLPLACCFVCWVASTAVTVAAAAGVAVTSLPGFDGPLPFSLETGDWEFNLAIT

SEQ ID NO: 40350 - protein, 149 aa, Oryza sativa
MEVALEVLERGADGVKAPRVRHGGRRSRLLLQAAVPTSSLPPPPLDDHAPFGGAAAAAAVGGGGEGEDGVAEIVVEVPDALLQPRRRRRRCGQSHLIAGVARRRWRRREPRTPGHDRRRSRFFFYFFSFRILLTILFFFLIIIICWSVM

SEQ ID NO: 40351 - protein, 160 aa, Oryza sativa
MRSGGSGGGGGGKLVSWLWRAPRRALCRARDFYVRSITGCAGHLPPDAAFGYGYPTFAAPTTPTMSRNSSFASSRYSAGGGGDDDMRELVRAASQRLAAERAAAAAEPATVPRSQSVAMARIDEDRPCEFAGVGLVPRSQSCAVGAGRVGGRRGRVAAVA

SEQ ID NO: 40352 - protein, 81 aa, Oryza sativa
MVSKQQSSSWADFQPELLGLVLRRLPSHADRVRLRAVCRPWRSNAEMQFVAKMIAVQWLQFYYFFFFTFSHQQRVYDSKEK

SEQ ID NO: 40353 - protein, 65 aa, Oryza sativa
MEESVGSRGGGGGGLDAQIEQLMECRPLSEPEVKTLCEKAKEILMEESNVQVRWSSPAIMPCPAV

SEQ ID NO: 40354 - protein, 18 aa, Oryza sativa
MIALFCATSSSTGGPPPG

SEQ ID NO: 40355 - protein, 1016 aa, Oryza sativa
MKVNSLLASCIRAQSAPRSILRPHTLGANPTVASLARAHTPIRPRLLQNHLAKSLRSSVGSTFHRTHATCALADPAFAPVSSTTTDATDASKWFRLPRNVVPTHYDITLKSDLEALQFSGTATIDLDVLEDTDSIVFNAAEKLALSKSLVLSQALKTDNKSFVTLDIDAKHERATAKLPNTLPKGSKAQLVVAFASDIDKSMMGFYRSAWEHEGKKGYYALTQFEPTAARRAIPTWDEPNLKATYTFRMIHRKDTTALANTNVVSSHDISQSEQDKLLRAAELGLDDILATTSKTEGKTEGKTEGKTELASTASNDWTVTEFATTPKVSTYLVAWANGPFVSIESSYTSPLTGNVIPMKVYTTPEYIHQAQYALDVKVKVLPEYERVFDVAYPLPKLDTLVASDFDAGAMENWGLITGRTSVYLYDPEKSGLQSQKRTAGVQSHEVAHQWFGNIATLDWWDNLWLNEAFATLMGEVVILDRCFPEWESASEFINVHLDRALDLDGKRSSHPIEVPLQGENVEDAINQVFDAISYSKGASVLRMLSNMIGEDVFLKGVSIYLKKHLYSNAVTKDLWNGVSESSGRDIASIMANWVLKQGFPVLTVTEDADGLTVKQNRFLSTGDPTAEEDKTLWYVPLMLKTVGADGEVAVDRDAFLNSEREVKIPLANAKDATYKLNAETIGVYRVAYSPERLAKLGEEAAKKDSAFSLEDRLGLVSDAFTLASAGYGKTSGGLSLAKALRNDPTYLVNSASSLNLGTLASAWWEQDAQVTGAIKKLRADIFGPTAKKLGFEFGADDSPDLKQLRAVAIAAASAGEDAWTLGEIKRRFDHLATTGDDSQIHPDLLRTTMARAVEHGGEKEYEAVLAIYRKPSTPTHKIAAMLALGASKDVALLERTVDFLFGDEVKEQDFMFFFAALSGNPAGRRLIWDATKSRWEALSKRFAGNFSLSRIIEYSFSAFSSEQDAQDVEQFFKDKDTAKFSMGLSQGLDAVRARARWVERDAEDVKQWLQANGYLA

SEQ ID NO: 40356 - protein, 196 aa, Oryza sativa
MTAAQAAPETAWAEMRMDSISPTMHTATARSKDARPSSTCSARTARCSADPPRRPARSPTPKATPTRLIRSPTRCSSPTSPSSLNASSPSCLSSHAPGCLTRSTAASIAPTRSSAPCSSRSRRLRCASPSTRPIPWTARRANARCAACSRSRSRCATARCSAAIRRSRPSCAPSSSLARSLGWARRMRRGSGCARR

SEQ ID NO: 40357 - protein, 54 aa, Oryza sativa
MWWRQLGVGELPRRQLPGGGSCGAPRQRRRLRHAHAAMAAGVEKDTGGACEVAA

SEQ ID NO: 40358 - protein, 76 aa, Oryza sativa
MELYAVVKPCRLYKKRSSSGGGGKVAMCVRSGGDGGAGKSRPSFTCRCVRLVKEQRARFYIMRRCVTMLVCWYEYQ

SEQ ID NO: 40359 - protein, 70 aa, Oryza sativa
MNDDAITALMDIDDSPRSSGAGAVFLDDEEDAEVFPGHRAARANEARGPLPFAGFYNSFDGADFDDTDLA

SEQ ID NO: 40360 - protein, 78 aa, Oryza sativa
MEAPSSPASFMAMATMGSPMTRRSQIPCCCLHFCQTISMTLQLLALKHWRHKQKSPYQRIYFSVYVSPDQKLMRQEKL

SEQ ID NO: 40361 - protein, 164 aa, Oryza sativa
MSSSTSRHFGPLHRHDRCACRPAAAPHAVLAASRRRSTTPRRCTAVPSAIRRHHHRQAGGGKEQEPEKEYEIKRGKAGRQSVPVAVRPRLAPQEPSRLPRRPTQGRPSPATAPSAVHRHRRLHRRPAAPRDARLPPLHGRATPFRTRTAPAPSSRVPSRPPAAA

SEQ ID NO: 40362 - protein, 78 aa, Oryza sativa
MFTPQGKGWTGWSTPAPANQRSGGGAPAASAPLGKGKGTTLRVAELELNHLMATRTWWWTQLLWMLTKTGRTRQCFPL

SEQ ID NO: 40363 - protein, 220 aa, Oryza sativa
MGEGEAVALPTTINGTIHSLLDKKEPHEANGRETGEEIRRPTTWWPARPTLAPPELLQCRPSPTTAALSQPPPSRCRHCDLPRRRRRRLRGSLWRPRTHRVGERRFRQDAKLGTSPAFSKTEVVVDEGVGGERGGPGTGETAAAEHQPERDARASLASDEADAMADCAEEAMGRPGRGGGAILPCRRSHLLPSRRPACPENREEKTVIERGGRERDDVTA

SEQ ID NO: 40364 - protein, 298 aa, Oryza sativa
MDLSSSKEATPPPEAWWTGETVAVVTGANRGIGHALAARLAEQGLAVVLTARDGARGEAAAAALRARGLRSVRFRRLDVSDPASVAAFASWLRDELGGLDILVNNAAVSFNEIDTNSVEHAETVLRTNFYGAKMLIEALLPLFRRSAANSRILNISSQLGLLNKVRDPSLRSMLLDEASLTEGKIERMASRFLAEVKDGTWSAPGRGWPAVWTDYAVSKLALNAYSRVLAARLARGGDRVAVNCFCPGFTRTDMTRGWGTRTAEEAGRVAAGLALLPPGDLPTGKFFKWCTPQLYSKL

SEQ ID NO: 40365 - protein, 325 aa, Oryza sativa
MSRTLLALPALRTIKPLISRNLPRATVSPHHLSVRHSSSRNPFDLTKVPRYDPSRPSTMQSYTQSFPSDSDALVKLSFDGESRIFTLTMLGAETPDNRLTHRLLGEGLLPAINHVEGKWNAMLDSGESDQGAALITTGGTDASAKIFSNGLDLEKAMADPHFFDRCLNAVYEKLLTFPIPTIAAVNGHAFAAGFGLACAHDYRVMNAKRGYLCMNEIDFGAPLPAGLQQALASKIDDQKTMRKIVLEGHRFSAKEAQEAGFVDVLSESPQDTMDKAVELANKLKGKARMNAWGANKEVIYAQAVKIMRTKHDDATTAIFAPRAKM

SEQ ID NO: 40366 - protein, 144 aa, Oryza sativa
MDPRAREVGGDGGGGFPHARAATRRAAPLAREAGSDGGGGYQCTRAATRRAGTAAAALRMREAGNDGGGGSPRTWAAMRQAGTAAAAPCAREAGGDGSPHARGRRRRWRTTRKATATPPLPWSYAIWAKREMVGVVGPMVGQPK

SEQ ID NO: 40367 - protein, 151 aa, Oryza sativa
MNNLQSEMASPRICCSALLVLLLVSSCNAGDHPACPAAWSAAVGAELFHGGVGGGGGGEAQCSAAAPHTPVAVFAHDVDPVRFALNLEFAEAEFFLHAAFGVGLDHLAPNLTLGGPPPVGARKAGLDELTWRVCAEFAYQEIGHLRLQQRI

SEQ ID NO: 40368 - protein, 384 aa, Oryza sativa
MAEAKLTKKQQKAAQFKAGKKGKAAAIADHPATPDDVVDPDDAPSTSAAVTSTKEETKKESSKKKEKESKKKAKESVAEPSAPAEAAPVEAPVKEEKRNKKRKRLAAEAEAAAAAGIVPEPTPSSSSTKASKSESKPKTKATKIAPAAPATKTTFGDDGEVASEQAVAAVAEPAPSAASAKGSKFILFVGNMAFTTTTDNIAKHFGQTCGEVPTVRLLTRKADPNALANLPASKRKSIAKGKAQDPTQPQSKGCAFVEFKSSDALRKALNFHHTMLEGRKINVELTAGGGGKSENRQNKIKEKNAGLEKERQKLHGKYVAPKNEARKQKAGAKEGGDARPAKRSRTEEAEQAGQAAWSRNSGKERKMPKFMATGANAVRVAPTS

SEQ ID NO: 40369 - protein, 199 aa, Oryza sativa
MSRAVDAQQEPTEGRRFYSPDRPEGLAFPTSYRALYDLPTSPECLFEEDKFRQTRTWGENLTFYTGVSYLAGATSGALVGLRRAAAEAERGESAKLRINRALNQSGSVGRAFGNRFGIVAMLFAGTESFVRDQRDGADDWVNTVAAGASAGALYRIASGPRSMIVAGILGGVLSGAAVAGKPMLQRFAPKLSARLDYLR

SEQ ID NO: 40370 - protein, 73 aa, Oryza sativa
MDQTKKRKMKKWCRLKMKKWIPSSLQQKKQVHHSRISTAQQLHDVRLITMQKLLWSTTTRMKTTRFNTGSSRP

SEQ ID NO: 40371 - protein, 245 aa, Oryza sativa
MPSALPPRHTQAPAPPAAASASACLLRRRRGRLRVSLCYCRASTEPLVFASPSSPSLLRSSVAVPVPSSPRHANRGPGDGGGLLVVTVAASAVVLSACFVFLSAMRSMLECKKAAESLEKSFGSAREKLPETMASVKLVGREICDLAVDLSNLSQELRKGVQSSMSVVHAADAQLHQLTTSAPQGNQRVTSNRKRAAGEPLLASTVRELRELIAELHSGFGVAVSIAGLLTWASNFVSKRPKNRS

SEQ ID NO: 40372 - protein, 62 aa, Oryza sativa
MVSIPKNRKLLAEIKVTLKIDGSRSDRSSCAGLTADERRSDRSRSIGRTVENACRRLLSPPV

SEQ ID NO: 40373 - protein, 40 aa, Oryza sativa
MRRPQPPPEAPSHRTVRTAPSLPPPSFSVAQGRRRDKRRL

SEQ ID NO: 40374 - protein, 31 aa, Oryza sativa
MAPPLPGPVVPGGRRRRSRTPARKAMCRDGR

SEQ ID NO: 40375 - protein, 51 aa, Oryza sativa
MVEALPWPVAEEEDGVRPARRLHVAAVSEAGGMEAVTVRPAQARATTEVYT

SEQ ID NO: 40376 - protein, 189 aa, Oryza sativa
MAPKVSDFGLAKLCDREDTHLTITGARGTPGYAAPELWMPLPVTHKCDVYSYGMLLFEMLGRRRNLELGAGAGARGHGSQEWYPRWVWHRFEAGETEAVLARATAAAAGGGREREKAERVCMVALWCVQYRPEDRPSMGNVVRMLEGEDHIAAPRNPFAHLAPYSAAGSSPTTTTATTESDGSSARTGR

SEQ ID NO: 40377 - protein, 68 aa, Oryza sativa
MLPAFSTCCEELVGKWMDSLGPDGSCELMFGRRCRVSPEMSSLARHSAAATVKEGGSSSCRLSKLSSS

SEQ ID NO: 40378 - protein, 145 aa, Oryza sativa
MAACGCGHHAEIDSTTPPSSRCRRASAMAARGCGRRGRRRRYARTTSPSSLMSPPMKRSAPLTSSHASSSSTLATPVRPRPSEQATRSRRRGAPAADERQEAGGVAPPPEAADDDEAERRRVVDAAAPHPGRAQGRRAESGTSSA

SEQ ID NO: 40379 - protein, 97 aa, Oryza sativa
MSGRRWNMAPVSASSARAVSAAWKRATQTYSLPAPCCDLTRRVARSTQTMRLPVTLGSSVPLCPVLLTRRRRLIHATTQRRSKRTRGGRDGYAAMSG

SEQ ID NO: 40380 - protein, 208 aa, Oryza sativa
MGSRSGGSGSGGRRRRRGEVDEALHRAGAGLRLRARVLRLRPSSPHAADHREAASSSSSRVAAATVDSNASAFTRVATATVDSNATASFPDAHHHQSEPNAAADTDGHGEASASTSTRHRDPDPDHASLDCDYYTDTDMGLGRRRAGPQCGSGRPSDQARLRLPRRRPQRLIDPMQAQPASSTWPLRSPSPPAPNRSPPPPLTAKDSA

SEQ ID NO: 40381 - protein, 111 aa, Oryza sativa
MGAADKGTGVQFEDFLPSMARKLGVEGLIEELCKGFELLMDPGAGKITFRSLKRNAAMLGLGELRDDELSEMMREGDLDGDGALDQMEFCVLMVRLSPELMQDESHRAFQC

SEQ ID NO: 40382 - protein, 168 aa, Oryza sativa
MAMGLNRFTQWLWPASTARAAAAAATTHELPTTAAGLTSASFPDFPSGFREPDTVTFAATTRRRGGRRSRREEDRVDREFDMVIVASDDGGGGGWLSGSESDDSDWAIGWQEKLSPELQTDGDPDGCFAVLVRCYRHGQPEPAGRPDGGAHFLATAASLANGGGLSGE

SEQ ID NO: 40383 - protein, 175 aa, Oryza sativa
METPGPEPKAATTVEVSDEEEVKAIAADAGSVTGEGKRLDAAAAATASTAGGDGGEEEKPPVMVQMPLNTIAAILSLKREPRPMPEDLARLSPEERDERLAFFDSWEEVNDEFEEFQREILREVKETGRYMVHQSYFTEQAEMQARMEKEWAEIDWTGVKFGDWDYDDPTCCQPL

SEQ ID NO: 40384 - protein, 309 aa, Oryza sativa
MEETIFSSTHTRIAVVTGGNKGIGLEVCRQLAGNGATVVLTARDEAKGAAAVEKLHGLGLSSVIFHQLDVTDASSIARLAEFLESRFGRLDILVNNAAVGGIVPVDDPSFGLLPTEEKFSGMDGHQRIEWMWKNCRQTYDAAKAGLKTNYYGTKNVTEALLPLLQSSSDGRIVNVASSFGLLRFFTNEELKRELNDADSLSEERLDELLGMFVRDFEAGAVAERGWPTEFSAYKVAKAAMSAYARILARKRPALRVNCVDPGYVKTDLTRNSGLLTPEEGASRVVAVALLPAGGPTGALFDGGKEASFV

SEQ ID NO: 40385 - protein, 99 aa, Oryza sativa
MRSRLTPSAAIAAIAAFSGDMKSKPTQSVVSGHSSLNDPSSADGGSARCLRLFRLAGWLVTFSSSHALPLTPTVTARGCSVARVCLLFFFFFFFDVGSV

SEQ ID NO: 40386 - protein, 248 aa, Oryza sativa
MAAAATTTVEVSDDGDHPVLRDDERGIPRSLSLLAAIVEADAARHAAAATRPAESDLVRAFRGGATPTVAIGEFLERIHAFVRLESVRHDIRLQATCYVLAGIYLTRFLGSAAAVEAGIRVDPSTAHRLVAAAVFVGAKFGNTSDMLPTRWTSVFETSSDAAIHAGEMAGLERRFLRAVDYRLFVRSDRFGWFCGAMEQALHRSVSRSRKRTAAEAVGGEEGEDERRRRRRHSIVGAFLPPLPAVAAN

SEQ ID NO: 40387 - protein, 179 aa, Oryza sativa
MASPPKNRLPLSCASRSFKFSLISAAKPSRTSPSSVDHSASQNGFVHLSSMNRAQKRTAARRPGSAGRRRSGAGNASSTYSTMTRDSQTAARWSSSPWRRTGTFLWMGLWVSSRSLLLRRSSRMSSYGTPLSRRAASARWLYGLSKVPITFTGAGAGDAMVAAQLVLDGLLLVDLIWRS

SEQ ID NO: 40388 - protein, 50 aa, Oryza sativa
MPRQERAANAGAAAEGARRRGRVVLGVAARRDLPFSGRGRGWRWRGCCRR

SEQ ID NO: 40389 - protein, 126 aa, Oryza sativa
MERGCNGNGGGGGGVKVTFIETQFVTSDAAGFKSLVQRLTGNDAAVPAAPPQRPRPCRADGWRGAGGASATVVKREAVPPPVAPWVDEMMMLYETCDLAEMLRVDVVGASGGGRCHGGGGYGGFPC

SEQ ID NO: 40390 - protein, 107 aa, Oryza sativa
MGSDLGTTASRICSGGCGGAQMEMKANDRRRVAGAEAAARMHLDHWVHLLYIFAVVIDPPFQMHLAVDKNMETRHLELQLCAKIDAFSCEISYGIDYRCTRDWQNSI

SEQ ID NO: 40391 - protein, 59 aa, Oryza sativa
MTCTAVWPLPETTSCMKKWRCVSAARRSGGAAQASASSRKRAAGEREVGAMAEPGLDEH

SEQ ID NO: 40392 - protein, 236 aa, Oryza sativa
MAAGAEAEADEEELEPLFDYSRVQPTMAFSFDDTDIEKSDIFVHCNKRRKVADGDGDANADEKGDKGEQKAAKAAAVVDLGEEDWLPPPPPPKPKSTVTDESEQSSVLKELRLQKQAMAKFAESADDFLEKLAQTARQKVEARIPTEHIDLDKSPERHEAREKVVVTVQDKAGHHQFRLYKDEKFGKLFRAYAKKVNLSVADLTFAFDGDKVDAESTPEDLGLEDEDMVEVLHKTR

SEQ ID NO: 40393 - protein, 70 aa, Oryza sativa
MLCSAACRFDAWFSLVLLQSSVNLVEHTAYACMSILLQSLVSVVCRKFQSLVVGSSSIAKSHASSMYKFL

SEQ ID NO: 40394 - protein, 77 aa, Oryza sativa
MHRDQLIGSAFIAFGIILFVGFFYAAVLTKMLPPYENRFLSAIQNDRYYCLLIPLTLPVIIVAVYLHWLSMKMFKHA

SEQ ID NO: 40395 - protein, 80 aa, Oryza sativa
MLTRSWGCGGGAGQQGGGVPCRGAADGGAAAVGGVAAPDGQHQPGGGACGRRPRRRGAAHRRQPHRCAPKKIPPCLRTCD

SEQ ID NO: 40396 - protein, 14 aa, Oryza sativa
MSIRPCLRPGWCSV

SEQ ID NO: 40397 - protein, 62 aa, Oryza sativa
METIKTTLQLCKNRRGMRRTASSRRRPSLETRSRGGSRRTEKQLARAGYGKRLTSRTWRRAG

SEQ ID NO: 40398 - protein, 177 aa, Oryza sativa
MAAAAAAATAARILELDPAHPRAGRVIDDIVRTEKRIFPKHESLARTFHDELKRRNTTLIYSAAAATIPTTGDAAAASDEEEEVVGYAMYTCATSLCASITKLAVKESRRRQGHGEALLMAAVEGCRRRRVQRVSLHVDPARAAAVALYRKAGFQVDATVVGYYAPRRDAYRMYMDL

SEQ ID NO: 40399 - protein, 66 aa, Oryza sativa
MATVDLEEDAASKTEAGDGWIGGGHQAMRRLATTTSFVDLVVGGGRGRRRRQWCDHDIKWSNTVHL

SEQ ID NO: 40400 - protein, 56 aa, Oryza sativa
MMAPSSFFFFSPGRRRMPKRGKLYKCSVSEHRLYNKKQITKSVISLKLALQQHSTR

SEQ ID NO: 40401 - protein, 99 aa, Oryza sativa
MRDVQNPIVVDQNYCPGNVNCPGQSSGVKISDVEYEGITGTSATAVAVRFDCSGSNPCTGIRLRNINLTYDGGGGKPARSFCKNAGGSASGVVIPPSCL

SEQ ID NO: 40402 - protein, 259 aa, Oryza sativa
MAMAMQEEQRVVVMRHGDRVDHADPLWAANNPRPWDPPLTDAGLLRASTVASRILADGFHIHRVLVSPFIRCLQTAAQAIAALSPLPRINIKVSIEYGLSEMMNTQAMGILVSQIAPSIDRWFPDMSQLEAALPAATIDHSAEPLYQEVPKWGESVWEARSRYASVIKALADKYPDENLLLVTHGEGVGASVSFFEPGVEIYEVEYCAYSVLGRQQHKVGIEQGSEEEGLKNLRVLSTSGPTGIHYYYTTPAPSEVPDR

SEQ ID NO: 40403 - protein, 85 aa, Oryza sativa
MASRGAASRSFLAAVRGRAASSAPRIRAAPLPSAPRRRVPSSAFSPFAAARPMSAMMGSPAAMAVRLTGHPSASVRACCELSQGN

SEQ ID NO: 40404 - protein, 76 aa, Oryza sativa
MVGAERGRGKRNLDEVDQADEPQERRPERRRHPPRPRRGGGRSRRRRHGGNGRDGVPSQENASSSSSSSAARRSGF

SEQ ID NO: 40405 - protein, 95 aa, Oryza sativa
MQDGCSYMGSYGELCKHVRKKHPSVKPHSVDPVHTYRWRRLLFRSSLQDMICATSSPMVRRVLYVMLQFEELMASVWHEGPHGAMQINEMNLADP

SEQ ID NO: 40406 - protein, 152 aa, Oryza sativa
MDEEAKPNPNADAAPAAAEAAASSPPPLSSSESAEGKDKEEEKEEEEEEEAGDLVEKLVELVEEIAAISDFRNAYRRQFCNLSRRIRLLAPMLEEAKEGPRPLPDVSYSALRRLREALADSRELLRLGVSGSKISLVRFSLEARCFVAIFGR

SEQ ID NO: 40407 - protein, 216 aa, Oryza sativa
MAAAETSGTVAAPGRWSLHGKMALVTGGTRGIGRAVVEELAALGAAVHTCSRNEAELGERLKEWEARGFRVTISVCDLSARDQRERLIGDVADRFGGKLDILVNNVGTNIRKPTTEYSADEYSFLMATNLESAYHLCQLGHPLLKASGSGSIVFISSVAGIVALFSGTIYAMTKGAMNQLTKNLACEWAKDNIRTNCVAPGYILTSLSEGVSVFLC

SEQ ID NO: 40408 - protein, 171 aa, Oryza sativa
MGNSLRCCLACMLPCGALDVVRVVHLSGRVDEFTSCPLTAADVLAAHPNHALTAAWSPGGAGAGGAPCRKIVIVSPDSELKRGRIYFLIPSACSAPAADKMMTRRKKKKRCHGNGNGKGGSAAAASTAEQDNYLMELLSEKRGTSHRRRRSGARAGVWRPQLESIAEEPSD

SEQ ID NO: 40409 - protein, 216 aa, Oryza sativa
MQVRRRRPQVRHLQRLHQGLPGRQRQRHRGRRARPRRHRGQDRGEGRQRHVRAHRRAESRGEGREEEGPPRRVRGGVLGRRGPARGDRRGHRQGRGRGHPGRGDAAQRGAGRARDVRGRVRRGRRRVAAGPGGRRVREAGDHRPRRRCVPLAAAIDTGNHGLILSINHRDSRIIRNLASWTTFSYNKRFFDDMLNFLCFTWKDFVQCLACYACNVV

SEQ ID NO: 40410 - protein, 25 aa, Oryza sativa
MICTVSSSLASLLSLLCPLLCCLVN

SEQ ID NO: 40411 - protein, 124 aa, Oryza sativa
MEQHEEAAERKPSPPVIFRLFGVEVRGGGGGVDEEEYEEEEVEGGLFIKKSSSMPNLTSIDPLPVPADGGKRRASDDSELASGQQKRRRRKVQERKKGEQPPFLSVLVSTVHYLFHHLIPFFLL

SEQ ID NO: 40412 - protein, 88 aa, Oryza sativa
MSFFFRMASRLRPSTPEEVVRSIKDSFQALHTKNGARVKIPLLLSSLLLCFSSSLLGPPLAAASDDQGRGSVRARSRISPLHHACSWR

SEQ ID NO: 40413 - protein, 120 aa, Oryza sativa
MRWRARKTSTRMWCWAPSRPRSHPLPRSCSTKAPKSASISIAKAASTRPSVAGSSCPTRQACRSRIARSCCSKHVSRSPTSKSANSSRNRCRRSSSAGSARRLPSRSSCRRCATPSASRS

SEQ ID NO: 40414 - protein, 90 aa, Oryza sativa
MRYSGGRNRGTHQLAEIIFLFFTNIFFSKKRRFRKLKYQGIIFLTFFSASLSQVYSNLAKVKRDFLVYVQSVQVELKSNYAFSLKQLAVS

SEQ ID NO: 40415 - protein, 39 aa, Oryza sativa
MRLSWCVTVPVTLSSCIAVSVSLCEATVHSGRDAAYASI

SEQ ID NO: 40416 - protein, 21 aa, Oryza sativa
MIAGINHYLEKLHVVFKLSGC

SEQ ID NO: 40417 - protein, 243 aa, Oryza sativa
MAEELKLLGSLSGVSPYVIRAQMALAVKGLAHDYLPEDLTRKSKLLLDSNPVHKSVPVLIHNGKPVCDSLVIVEYVDEAFPGGAAALLPADPYHRAVARFWAAFIDSKVFPPCLAILKTAAAEAEEEKAAKVKETVEALQLVEGAFGECSKRKPFFGGDAVGYLDVVLGCYLCWFEGVSEIAGGVSPPLLDASRTPQLAAWAARFRSAADAVGCSVPRVDKVEAYLNNVLKPKWSAAAAASSH

SEQ ID NO: 40418 - protein, 59 aa, Oryza sativa
MGSRTPTSRSATAAASRCTRTPTTGKGTCRRSSSTRGARCSTTTRAGRTSATPSSRRTT

SEQ ID NO: 40419 - protein, 44 aa, Oryza sativa
MQGSNRRSLLPSLIPLPRRLLIREEAATTAARVAPAPPPRSPEK

SEQ ID NO: 40420 - protein, 65 aa, Oryza sativa
MDSRTISSSLHMSWRNNSVKQRTVWCCLLKKKRKKKLRVTDQEIHDLVYVLGSSTDSSRRDSTPA

SEQ ID NO: 40421 - protein, 101 aa, Oryza sativa
MDEEQLRALLRDLDALKQRPDPAAIDRMRERVAGMVTPAAAARSKIKDMSSEVVDSNPYSRLMALQRMGIVDNYERIRDYSIAIVVSTAPAQYCFGTAILA

SEQ ID NO: 40422 - protein, 153 aa, Oryza sativa
MEGKEEDVRLGANRYSERQPIGTAAQGAGDDKDYKEPPPAPLFEPGELKSWSFYRAGIAEFVATFLFLYITILTVMGVSKSSSKCATVGIQGIAWSFGGMIFALVYCTAGISGGHINQFCICFSFFAPNLCMYYMCVPFTPILCMYVLSVLSC

SEQ ID NO: 40423 - protein, 221 aa, Oryza sativa
MTTTTGGGGAGEFYCSICMETVPGALKFSVSPCLHAFCVCCIGQYVAAKIGENTADVRCPDPGCGGGVEPESCRGVVPSEVLDRWGLLLCEAAIVARRLHCPFRDCSEPLLADADGEGGGVAEAECPSCHRLFCARCMVPWHDGVGCEEFQELGEDERGREDVMVRRLAGRERWQRCPQCRMYVEKSEGCMFMKCRCGYCFCYACASPMSKELHYCKRCKR

SEQ ID NO: 40424 - protein, 121 aa, Oryza sativa
MGNCLVIQDDRDKEIKIMGMDGGEILKLHRDAAVSDSDDPAADMAKAAAAAAAAAAADTAGGVVRVKLVISKQQLKKMLHKDGVSLDDMVSLMQREASEQEMISCRGWRPALKSIPEGSDC

SEQ ID NO: 40425 - protein, 102 aa, Oryza sativa
MIPSRESAFTGGLETVMTATPSRRTSTEVEPLAIARSLARRPEKAMRGAPLAAGDDDVAHTRPAARSLSLSLSENTADRWYSTTTTLLPDSGCSTGFNNRND

SEQ ID NO: 40426 - protein, 248 aa, Oryza sativa
MERSTHSTGWTCLPPPPPEPAAPGRGVCAMSTSWRDKQQPSLINFIAAFLAANSYRLNFLSISPDFIFNNGELSVAFIFETNWDCQNEGAVFSRVNMLKRQLKHLYVVVAVPTKEQNESFNRSYHKYGMKLGFPTFVPVTDPEMGFEKIVKIAHALGVCKQQDIISRLKNEREQAVQCTDSFLRVLTSIPGIDNHDANALAQAIGSIEAIAKASKKFILENTDLSTDKAETIVRFFRDPQYYLSPKIN

SEQ ID NO: 40427 - protein, 149 aa, Oryza sativa
MADPVELGAPPSPEPLSPLRELIDVPTVVYVADEDPKFAALADQAYAGFPFLFVTMSLKALAYKRMDLNELDEEHSAHYLRLRFENQLQDAMEGMAAGGEEMRVALARMETLKKSVQFHFRRMQYAAHELRKVVLKEEEMYKKLVTLTN

SEQ ID NO: 40428 - protein, 142 aa, Oryza sativa
MEEFQEADILWPEPAEDNSDDGAVVVTTTPSPVARRPVGSPESSSLSAPVEIAASRRKRRSRSWASEYNMFDQTNDDDDAVKKKMMNNGVMVAPPHAIVDRRRLRGRTAAYSMCAGKGRTLKGRDLRNVRNLVLQMTGFIEK

SEQ ID NO: 40429 - protein, 182 aa, Oryza sativa
MIMQAAMTAQQNKKECEQLARRVFTIAELLQHLQDPEVLRRPEIRRPLTGLDDTLREAHELVLSCQDKSAVYRLVMAGRQAERFRDVQSRIDSYLLVFPFISHIDITRRLDRIYNILLPTNTPGPSTPAFPVPPNPVPAAQVYIEMGRLKHSIVCTCTTTNCNSFDLVFSSSFLSDVYSSIY

SEQ ID NO: 40430 - protein, 144 aa, Oryza sativa
MDQKPKDDFDFLEPSVLLDETHYQTGFKNGYSEGLVSGKEEGRQVGLKNGFQVGEELGFYQGCLDVWTSLVSIDQDAFSARVRKNIEQLAALLRSYPLSNPEDEQVQDIMEKIRLKFRVITASLGTKLEYQGRPTSSKQDVEDL

SEQ ID NO: 40431 - protein, 83 aa, Oryza sativa
MPSPPPRGRATPRMRSRAASRPQAAAPPPLPPTRCPGRRRARPAVSRRRPCCRLCLCGACEAAVDACPVCAATKIASVHVLLS

SEQ ID NO: 40432 - protein, 362 aa, Oryza sativa
MTSPATTYASPFVLSVLLLVSIPVIFLLAPRLLPPKTLPAIPDADESDDLALFRRAILSSSSPSSATPTPSSAASYFFRRRPAPKVAFLFLTNSDLVFSPLWEKFFRGHHHLFNLYVHADPFSALTMPPTPSFRGRFVPAKATQRASPTLISAARRLIATALLDDPSNQFFALLSQSCIPLHPFPTLYNTLLSDNAGPHGRHRSFIEIMDDAYMIHDRYYARGDDVMLPEVPYDQFRFGSQFFVLTRKHAIMVVRDMKLWRKFKLPCLIKRRDSCYPEEHYFPTLLDMQDPEGCTGYTLTRVNWTDQVEGHPHTYRPGEVSASLIKELRKSNGTYSYMFARKFAPECLEPLMEIADSVILRD

SEQ ID NO: 40433 - protein, 287 aa, Oryza sativa; identical to SEQ ID NO: 32901

SEQ ID NO: 40434 - protein, 428 aa, Oryza sativa
MGLSRRFLNLIVDNRIPGAKSLRCIDLTLARYKLFNTTTPAALILNGKISESERPQDSTPWAGADNNEKEAAATLKIGTIQLPTPIMNFRSSAEYLSWYINCIPLAGRKVLCTDQSGRACLFDADTCKVDTLPSLHKPKCLPYSIFIPSADDKDDHDDNSNGGGSVYIMDTCLNHIPRDNIQLSSQFEAFVYRRSTLTSFTKSWQCQRLPPPPFVCDPKYKHASPHKITSYAVVDGGSHICISVDGAGTYCLDTVKHTWIQIGEWTLPFIGKVEYVPELKLWFGICANDWKQFGAADLSTILSTMDSQPQLVGSWKELEAPQEWTEMQHPHLVNLGSGRFCVARFYHSWTPTAGLFGSDLGELFFTVLTGTDVVQCVVHDGNGTGNASCNDSCNNPYGSNGKVELRMIKHNSKCHMSYGTDGNIKVLF

SEQ ID NO: 40435 - protein, 177 aa, Oryza sativa
MPPPLLLLLLLLLGGAAAAEEPPAAPSSSPPPHKNATLSEILPRYGLPPGLFPASVTAFSLAANGSLAVDLGGPCYAHYEYLTYFEPRVTGVLRYGSLTGLSGVKVRRFLVWFDVVRVKVDLPPPPRYVYLDIGWITRKLPADEFESPHECEDSKKCRLSSALATVAAWFQNFFAQF

SEQ ID NO: 40436 - protein, 308 aa, Oryza sativa
MRGVAASACTLRPGPPGAVRSKSNGPDRLSHLPTRPLSAPRLHLRRSPEPTHRRLPLMASSPSAAATGSGGSFPEMNSVDDFAAVTAPRGGGRVSVVGFGSLLSERSARSTFPELEGFRVAALRGFRRVFAHSAPIFFERGIAIEATKEFSSLSVEPCEGELIVVTVFEIKEDEVPAFIEREHEFRFLAVVPEGLDGVPYANPAVVCARYSDEEYFQVRCKGSKEIYYQRYGRYNIDRIWRDDILPCRAYLRHCVLAAKNLGEPAYSNFLDHTYLGDRTTTIREYLATTGAGIMEEEPPESLKSRYGG

SEQ ID NO: 40437 - protein, 438 aa, Oryza sativa
MACHLRLFPFTQLLVLVLYKIAAVGADPANAELSTKITQHSPLYNPQPQDFPNEELYRNYLVIQRFKKTITSDPKNITATWTGHDICGNTTYLGFYCAALPGRTKKPTVTVVIFNGYGLRAPKLEGFIDHLPDLALFHAASNDFGGDIPYLTGLAYNYKINVDSNLQIQDDFSRDMVGSHVTTKVHGYCVNLDLDITFHLRPGKDDKKGRSIPGATDSKALLLNYNHLSGPLPVNIGFSKLSYLALANNRLTGAIPPSILHLQDSLLEVLLLNNQLSGCLPHELGMLTKAAVFDAGMNQLTGPIPSSFSCLTSVEQLNLGGNRLYGEIPDALCKLAAVPAGRLANLTLSSNYFTSVGPACLSLIKDGVLNVRNNCIPGFANQRRPAECASFHSQPKACPAASATHVACPAGAANAAAAPADRVVKDYSSYVMYATLHE

SEQ ID NO: 40438 - protein, 265 aa, Oryza sativa; identical to SEQ ID NO: 30714

SEQ ID NO: 40439 - protein, 525 aa, Oryza sativa
MATATASSLSLLFAHPHSSNPRPFAGGPHLRRPLRAAPHRARCASDAATTATRHRRPAEENIREEAARLRGPGNDFSAWYVPFPPTPEDDPDERYSLDEVVYRSSSGGLLDVCHDMEALARFPGSYWRDLFDSRVGRTAWPYGSGVWSKKEFVLPEIDSDHIVSLFEGNSNLFWAERLGREHLGGMTDLWVKHCGISHTGSFKDLGMTVLVSQVNRLRRAPLSRPINGVGCASTGDTSAALSAYCAAAGIPAIVFLPADRISLQQLIQPIANGATVLSLDTDFDGCMRLIREVTAELPIYLANSLNSLRLEGQKTAAIEILQQFDWQVPDWVIVPGGNLGNIYAFYKGFEMCRVLGLVDRVPRLVCAQAANANPLYRFYKSGWTDFQPRVAETTFASAIQIGDPVSVDRAVVALKATDGIVEEATEEELMDAMSLADRTGMFACPHTGVALAALFKLRDQRIIGPNDRTVVVSTAHGLKFTQSKIDYHDRNIKDMLCQYANPPINVKADFASVMDVLQNKLNGKI

SEQ ID NO: 40440 - protein, 215 aa, Oryza sativa
MVRGRQPPSLARPQERGDLRWPRRLRRPEIDRQDRLQLLRRHRRAVRRDGEPQHHGHGVGPLVARQHHHHVHPAAHVRAHERGDQPGKLAGDQPDDGGAHRGGHRRRRARAAAPPELPALHLPGRRRQRHVLAAADAARGDRLRRDARGGRGREFVGSEHAPQRTDGGGGGGAPGRPGGRRVVADAPGVRVRRQRRRLLLEEREQRRLRRAIRPQ

SEQ ID NO: 40441 - protein, 219 aa, Oryza sativa
MASSALPCAAALFLVLLLAPLLASAESPISLPPASAPTASTPAADERLHPADAALAPSQPPSEASSSAAALSPPAPPETSPLPAPSHSPPVPHSAAPEPSPMEHSAASAPAPSAAKAKQGGDDEEDDDDKEKDKEEKPSIPSPAPAAEEIKAATAGDKAGEEDGETERHELNGGKKAGVVVGAFSAAAVVGLAAVVWKKRQANIRRSRYADYSARLELV

SEQ ID NO: 40442 - protein, 314 aa, Oryza sativa
MASGGEEKKSRILVVGGTGYIGRHVVLASARLGHPTTALVRDLSPSDPAKSQLLQSFRDAGVTLLHGDLYDHASLLSAVRDADVVISTLGALQIADQTKLIAAIKEGGGGNVRRFLPSEFGLDPDHTGAVEPARSIFTGKAAVRRAVEAAGVPYTYVVSNYFAGYALPTIGQNLPPARPVDSVVILGDGATKVVFVEEGDIGTYTVLAAVDPRAENKTVNIRPAKNAVSHEELVALWEKKTGKKLERVYVPEDAVLKQIQESEIPLNIVLSIAHAGYIRGETTTPLDPATAVEATQLFPDVQYTTVDDYLNRLL

SEQ ID NO: 40443 - protein, 377 aa, Oryza sativa; identical to SEQ ID NO: 29719

SEQ ID NO: 40444 - protein, 202 aa, Oryza sativa
MTAAETQEELLRKHLEEQKIEGDEPILEDDDDDEDDDDDEDDKDDDVEGAGGDASGRSKQSRSEKKSRKAMQKLGMKTITGVSRVTIKKSKNILFVISKPDVFKSPNSDTYVIFGEAKIEDLSSQLQTQAAEQFKAPDLSNVISKAEPSAAAQDDEEVDESGVEPKDIELVMTQATVSRSRAVKALKAANGDIVTAIMELTN

SEQ ID NO: 40445 - protein, 315 aa, Oryza sativa
MAAAALLSPPPSPSPSPTPSSLHPRQALRFAVGTGGGGRARATSTGTRRRAALVPCSSSVSARGPASGGDGLALERRRLLLSGLVSSFVLVLPVSDSHAVAEMDEDVKMATLVDPINAYSFLYPVELPGKKFTFKWVESRKPERYSSAAPLSPDARQRIVSERVDMIHNVVISVSIGPPNSRFPPSKDKSKWDPKDVADWILAEKSSLKVTTGQRMTESSVLDAHSSDVDGEPYWYYEYLVRKSPTQSAPEPNLFRHNVACTAERDGYLYSLNASTLSKQWESMGPSLQKTVASFHLLPPTENYVPPYQDPWRFW

SEQ ID NO: 40446 - protein, 346 aa, Oryza sativa; identical to SEQ ID NO: 32914

SEQ ID NO: 40447 - protein, 217 aa, Oryza sativa
MAYRADDDYDYLFKVVLIGDSGVGKSNLLSRFTRNEFSLESKSTIGVEFATRSIHVDDKVVKAQIWDTAGQERYRAITSAYYRGAVGALVVYDVTRHVTFENVERWMRELKDHTDANIVIMLVGNKADLRHLRAVSTEDAKAFAEKENTFFMETSALESMNVENAFTEVLTQIYHVVSKKALDIGDDPAAPPKGQTINVGGKDDVSAVKKSACCSSA

SEQ ID NO: 40448 - protein, 67 aa, Oryza sativa
MAAEAGSAREARAVEMEAGLARETRPMEGGWIGARRVRWRRPAWCERRDWRWRRRPRCEEELPVDVA

SEQ ID NO: 40449 - protein, 391 aa, Oryza sativa
MCNSNVKSAGVAQIDGRPVLQPAGNRVAAPEAARPLKKSLQKSLSMPASLDNAAAATTCAASPEKSRAADFARAAAASLLPPPTPASVSAKATRVSGAKVAAARTAAAAAAMGGLDRSRKPAKKGGAAVLPVVTFAGLEAYEPAGSIAAAQREHVAMAQAQRKMRIAHYGRTASFSRVEGKVSATATGAAELVAGAVTGHDEKRCSFITPYSDPLYVAYHDEEWGVPVRDDELLFEMLTLSGVQVGADWTSILKRRHVYREAFSGFNVDAVAKYTEKQMASLSAEFGLDLGTIRGAVNNACRISEVRRDFGSFSKYVWAFVNNKPLSPSYKYSRKIPVKTSKSESISKDMVRRGFRFVGPTVIHSFMQAVGLTNDHLVSCPRHRVCSSSSA

SEQ ID NO: 40450 - protein, 336 aa, Oryza sativa; identical to SEQ ID NO: 32248

SEQ ID NO: 40451 - protein, 139 aa, Oryza sativa
MEGPRRPIRYAIPQIPASSSTFGQCEQKHTQYPFTSFNFCSILRVILCVIFRREPHDREGAVRLVRARQAVQLQRGREAGPVAEHGVRAGAEEGVRGRRPFRQDVRGHGPGEPVHVRPELLPGRVQKQGPLRLRPGPPQ

SEQ ID NO: 40452 - protein, 32 aa, Oryza sativa; identical to SEQ ID NO: 29668

SEQ ID NO: 40453 - protein, 394 aa, Oryza sativa; identical to SEQ ID NO: 36841

SEQ ID NO: 40454 - protein, 329 aa, Oryza sativa
MAAAAAAGAGADEEVDFEFFPIIRRYKGGRVERFMNIPPLPAGTDPATGVTSKDVVVDPAVGLWARLFLPPGGGAPQGKLPVVVYYHGGAYVVGSAADPFTHSYLNGLVAEAGILAVALEYRLAPEHHLPAAYDDSWEGLRWVASHANGGGGVEPWLLEHGDFSRVFLAGASAGGNIAHYVAARAGEHGGLGLSIRGLLVVHPYFSGAADICAEGTTGKAEKAKADEFWRFIYPGSPGLDDPLSNPFSDAAGGISAARVAADRVLVCVAEKDSLRDRGVWYYESLKASGYAGEVDLLESMGEGHVFYCMDPRCERAREMQARILSFLRK

SEQ ID NO: 40455 - protein, 290 aa, Oryza sativa
MWSVGCIFAELLNGKPILTGKNEPEQLSKIFELCGTPDELIWPGVTKMPWYNNFKPQRPMKRRVKESFKHFDQHALDLLEKMLTLDPSQRISAKDALDAEYFWTDPLPCDPKSLPKYEASHEFQTKKKRQQQRQAEEAAKRQKLQHPPPHSRLPPIQNPGQPHQIRPGQPMHNAPPVAAGPSHHYAKPRGPGGPNRYPQGGNQGGYNPNRGGQGGGYGSGPYPQQGRGPPPYPGGGMGGAGGPRGGGGSGYGVGGPNYQQGGPYGASGPGRGPNYNQGGSRNQQQYGNWQ

SEQ ID NO: 40456 - protein, 296 aa, Oryza sativa; identical to SEQ ID NO: 32180

SEQ ID NO: 40457 - protein, 274 aa, Oryza sativa; identical to SEQ ID NO: 36122

SEQ ID NO: 40458 - protein, 231 aa, Oryza sativa
MPSVLIVTGLTWLSWFPFILYDTDWMGREIYHGDPKGTDPQIEAFNQGVRAGAFGLLLNSIVLGFSSFLIEPMCRKVGPRVVWVTSNFLVCIAMAATALISFWSLKDFHGTVQKAITADKSIKAVCLVLFAFLGVPLAVLYSVPFAVTAQLAATRGGGQGLCTGVLNISIVIPQVVIALGAGPWDELFGKGNIPAFGLASGFALIGGVAGIFLLPKISKRQFRSVSMGGGH

SEQ ID NO: 40459 - protein, 382 aa, Oryza sativa
MESEQVKRRFGRCPYCRAMIYQDPNAIIYYCSKCRTPIRGKNPEPTDDAEYALSQLEILSADTASVFSDDPDTLSRTSSVAYGGGEQPPVRTSSAPYAAFDRGSVRAGSRSGEQSGEERGGSPMHSRVSELRPTSRRTRRPMSGDMGAFRDDGSSYGSDNDVPTSAAASYRRRASPLTSQELEASSSSMGSSGYQPSGVSSSSMGSSSVYEPSGAARSPLTDPAFQRDLLQALDNLRRVIAAVEQPYGVDAHLQQAGMPPKSASCNDAATGGSGGGGGAYAAAVTRRNSRLMRRLESQLVQALPRDGLRRDRSTSSSSSASSSRPGGDRARAAGRKHHCRAVLGGTPFVVCDKCSEILQLPAAVSANRAARLECGGGVVLGA

SEQ ID NO: 40460 - protein, 164 aa, Oryza sativa
MIVRRALKNSTVVPGGGAIDMEISKYLRQHARTIAGKSQFFVNSFAKALEVIPRQLCDNAGFDATDVLNKLRQKHASGEGANFGVDINTGGIADSFANFVWEPAVVKINAINAATEAACLILSVDETVKNPKSESAQGDAAASAMAGRGGGAMRGRGGRGMRRR

SEQ ID NO: 40461 - protein, 515 aa, Oryza sativa
MILAERGARIDDYKLKQLARASSSSSKADKSRRDSSPPPPPSRARSSARTDRSAAKSALDELRAKRMRQQDPEGYRNRFKDLIPQSGSPPRRRAGSPPSDGSNDGDNRGRITDETRDDEFDESPSRLDPLKFDDVKSITLRRSKLVKWFMEPFFEDLVSGCFVRLGIGKSKSGTPDYRLCIVRNVDANDPDRKYKLEGYTTCKYLNVVWDNEANAARWQMTQVSDSFPSEEEFKKWLQVAEKNGVRVPTRQDVLEKKEAIQQAYNFVYSAHTVQKMLKEKKSAIRRPINVAAEKDRLRNELDMAIARRDEAEAERIRSKLNQLQKMSKPISNNEKAAKLEAMNKKNRAENFKNASEMKPVNTSLKVGEAGYDPFSRRWTRSRNYYAAKPEGESAEVPNGNDGSAVAGDEDTKNGPRGGSAATAAALVAAADAGKLVDTNAPVDLGTESNLLHNFELGISLAGLEEFGGPKGLFDGYMARKQKIEATMGYKVPDNDGRRHALTLTVSDYKRRRGLL

SEQ ID NO: 40462 - protein, 80 aa, Oryza sativa
MKCKVRRGCSSLPRSTPPPIPHSPLAQVGAKGEVRQSASQPPRPLHGRGDTCARLQRSMPPVPSEHDPSGRTSAGEGTHG

SEQ ID NO: 40463 - protein, 342 aa, Oryza sativa; identical to SEQ ID NO: 31822

SEQ ID NO: 40464 - protein, 412 aa, Oryza sativa
MAPPTARSLLASHAAVRAAASARRGRLAGDHHPPQVAALRRGDWVKLICGASFEDAADVRNLSLVYTLAGVDCIDCAADASVVGAVNEGIDVAASIVPAVQRPWVMVSVNDDCRDLHFRKAEFDPEDCPPDCSKPCEKVCPADAILLERVMIEEEHSQSDPSCGKLEGGVITERCYGCGRCLSVCPYDRIRAMSYVRDPAMTAELLKRNDVDAIEIHTTGKGTDMFNTLWSNLGESINNVKLIAVSLPDVGDSTVNLMNAIYTTMQSHLQGYNLWQLDGRPMSGDIGRGATRETVSFAVHLSSMSNRPPGFYQLAGGTNSYTIESLKKAGLFQSTTFPGAATSGVTDCQQAFIGGIAYGGYARKIVGRVLRKIPAQFGHARIEDHPDYLLEALQEALSLVGPVKGYPTLPSL

SEQ ID NO: 40465 - protein, 398 aa, Oryza sativa
MVSASRFVLLSRLPAAAASSRFLRPLAAAGSLLPAALAPFAPPAAGARCFATQPATSSLRDSSPNWSNRPPKETILLDGCDFEHWLVVMDPPPGDPSNPEPTRDEIIDGYIKTLAQIVGSEDEARHKIYSVSTRHYFAFGALVSEELSYKLKELPKVRWVLPDSYLDVRNKDYGGEPFINGEAVPYDPKYHEEWVRNNARANERTRRNDRPRNFDRSRNFERRRENMHNFQNRDVPPGQGFNSPPPPGQGPVLPRDAPPMPPPPSPPNPGAPPSYQPHAPNPQAGYTNYQGGVPGYQGRAPGYQGGNQEYRGPPPPPPSAYQGNNPGYQGGGPGYHGGNPPPYQAGNPPPYQAGNPVFAGGAPGYQGQGGNPSYQQGSDNYNAGAPAYKRDEPGRNYQ

SEQ ID NO: 40466 - protein, 281 aa, Oryza sativa
MPPPLEARDYIGLAASPASSSSSCCASTPVAEVVGAHLALRLGLPGSESPARAEAEAVVVDAALTLGPAPPPRGGAKRGFVDSLDRSEGRRAAATAGDDERGVREEEEEEKGLGEAAAGAPRAAKAQVVGWPPVRSYRKNTLAASATKTKGEDQGKSEVGCCYVKVSMDGAPYLRKVDLRTYSSYEDLSLALEKMFSCFITGRSSSHKTSKRDRLTDGSRADALKDQEYVLTYEDKDADWMLVGDLPWDLFTTSCRKLRIMRGSDAAGMAPRSLEQTGQNK

SEQ ID NO: 40467 - protein, 191 aa, Oryza sativa; identical to SEQ ID NO: 36995

SEQ ID NO: 40468 - protein, 262 aa, Oryza sativa
MAAASRAPLARRSLLLLRYKALPLSSPSSSSSSTHSLLPRPPALWPPPPPPPPHGCERRRAFHDGRPRGPLWRSKKLIGKEALFAIQGLKRFKGDEERLGEFVRRYVARLLKADKLAVLGELERQEEVDLAVKMFRIIQKEDWYKPDVFMYKDLIVALAKCKKMDEAMVIWGNMTDENLFPDAQTYAEVIRGFLRYGSPSDAMNIYEEMKKSPDPPEELPFRVLLKGLLPHPLLRNRVKQDFEELFPERHIYDPPEEIFGLR

SEQ ID NO: 40469 - protein, 52 aa, Oryza sativa
MLSSIRTTVGEKAKILMADEGQRPEFDDEVAPKIERKRERDHNLVEYLASAE

SEQ ID NO: 40470 - protein, 502 aa, Oryza sativa
MSTKKDGVYEALRDPEQPLTTCDILKEEIVHLKWRVLVFACFLTFGSYYIYDFPGSIGTGEHHTIQSWFLSHGKSYNQEDNQALYSVYSWPNTVLAVFGGLLIDKFLGLRKAMTLFVSLVFLGSVIFFLGVLSKTYPLLLLGRLVFGLGGESLSVAQSAFVARWFKEGRGMALAFGITISFARVGSSFNFLFSPTIANKDGIVTSTLFGCIACGISLISCAALVALDIYGAKKGVVPQESKETGEPFKLSQIKDMPVLFWLASLVCVSVYCAIFPLIGVAKNFFQVKYGLSDDTASSYVSVYQFVCAGCSPVSGGIVDSVGRFSIWMMVAGAGFTAIHLIFIVASPPPWIMMAIMGIVYSVLVSSLWPAVPYVVQGDLVGLAYGIMTAMQNSGLATWPLVAGAILDKYTPPSVNKTLNATDIPKLWMILKDDDDGKKATLPTEEGYKYTELFFMATAAAGFVVACILFLVDRRGDGVLGASPARREQIKADKQALLVTGDVN

SEQ ID NO: 40471 - protein, 418 aa, Oryza sativa; identical to SEQ ID NO: 32265

SEQ ID NO: 40472 - protein, 199 aa, Oryza sativa
MIVGVNGGGKTTSLGKLAYRFKNEGVKVLMAAGDTFRAAARDQLEVWAERTGSEIVIDNDKKAKPASVLSQAVKRGKREGFDLVLCDTSGRLHTNYGLMEELVSCKKVIAKALPGAPNEILLVLDGTTGLNMLQQAREFNDVVGVTGFVLTKLDGTARGGCVVSVVDELGIPVKFIGVGEGMEDLQPFDAEAFVEAIFP

SEQ ID NO: 40473 - protein, 350 aa, Oryza sativa
MEKRATTTRAVVLRLDDLSLPPRRLTVPSRLPVSHLLRALPQPLLESSSFYLTADGRPLLLSAPVASLPPSGSVQLRLRALRGGGGDGGATGAESRDCYLSMYLAKKPDKADPNEARLSRFTCCALSGEPLAAPAVADRLGNLFNKEALVEALLHKRLPKALSHIRGLKDMIPIHLHPKPDADAAGEEVRFQCPVTGLDFNGKYQFLALRKCGHVLSVKALKEVKTSACLVCHKEFDEADKMPLNGTEDEVAALRLRMEEERGKVKEKKEKKVGNGLSGSKHAAAAVMAGGAEKLENGKKGEAPSLKRFKAGDHAPAYANKEVYASIFTSSKKSDFKETYSCRSLPLGRN

SEQ ID NO: 40474 - protein, 466 aa, Oryza sativa
MAARAAAAAFLLLLIVGAATAAPDMSIISYNAEHGARGLEEGPTEAEARAAYDLWLAENGGGSPNALGGEHERRFLVFWDNLKFVDAHNARADERGGFRLGMNRFADLTNEEFRATFLGAKVAERSRAAGERYRHDGVEELPESVDWREKGAVAPVKNQGQCGSCWAFSAVSTVESINQLVTGEMITLSEQELVECSTNGQNSGCNGGLMDDAFDFIIKNGGIDTEDDYPYKAVDGKCDINRENAKVVSIDGFEDVPQNDEKSLQKAVAHQPVSVAIEAGGREFQLYHSGVFSGRCGTSLDHGVVAVGYGTDNGKDYWIVRNSWGPKWGESGYVRMERNINVTTGKCGIAMMASYPTKSGANPPKPSPTPPTPPTPPPPSAPDHVCDDNFSCPAGSTCCCAFGFRNLCLVWGCCPVEGATCCKDHASCCPPDYPVCNTRAGTCSASKNSPLSVKALKRTLAKLNTA

SEQ ID NO: 40475 - protein, 395 aa, Oryza sativa
MEGAEAEERRLAASLTARYSDWVVEALDELPGSFILTDPAMPGHPIVYASRGLASLTGYPPREVLGRNARLFQGADTDRAAVAGVREAVRGQRPHQVSILNYRRDGEAHWVLLHLAPVFHASDGRVLHFLAVQVPIAPPASRRRTPPCRAARPFVVFAACREEARVEEECPCASHAGEVFVDVDKRGQDAEEPRVASEHEKEKALSTANSIFSALNRYSKLTGLVVCGKRCDSVGIPALSSSLNLSLGRIKQSFVLTDPHLPDMPIIYASDAFLSLTGYSREEILGCNCRFLNGPGTSVEVLEQINQHICSEQACTVHLLNYRKGGSSFRDLLHISPIRNASGKVAFHVWVHLDEGAKYDFNGLTPEVWQLGAVGAVRVAVRSLSASGSLLRPSQ

SEQ ID NO: 40476 - protein, 199 aa, Oryza sativa; identical to SEQ ID NO: 30673

SEQ ID NO: 40477 - protein, 131 aa, Oryza sativa
MCLWNCFLGSSCGRVRKEREFRAELPLSTAAVLPANHGPAVGFTLCLHTCTSTFKSKKASTIDKDKEQPEEKGTMAICKRFIALHLEPMFPPPPQTIEYYFLPRPPLIQAVGIGGSTVGLFLLIIILGAQQ

SEQ ID NO: 40478 - protein, 270 aa, Oryza sativa
MFRNQYDTDVTTWSPAGRLFQVEYAMEAVKQGSACVGLRSRTHAVLAAANKAASELSSHQRKVFRVADHAGVALAGLTADGRVLSRFLRSECINHAFVYDAPLPVSRLALRLADKAQVCTQRSWKRPYGVGLLVAGLDESGAHLYYNCPSGNYFEYQAFAIGSRSQAAKTFLERRFEGYNDYTPEQLIKDALSAIKETLQGEKLTSSNCTVAIVGRKDDGTVEPFEMIDVKRIQEIIDSMEAAEEAPAAEAESSSMQEEDKGTDAAPMDI

SEQ ID NO: 40479 - protein, 254 aa, Oryza sativa
MFLTDKYHALLPFHASGGGVKDHRRRPGKAVPGAAGGGPGSARFGAALSARLGSLLPLPASPLAALARLADLLALALADAVPALAGEGDAAAVASPAAPFSPVRPAPRPRLRRRDRPPRRRRRLLARSGGRVRRPLRRHPPPDRLPPGLRRIPVDRGLQRRVHPARRPRHQTQRGGRRRRGRRQAQIRARQRRRRPRRGGAAGGGAGGGEADGGADGAVGPAVRRRQRRVPGGAVPPQRGAREHHGGTRRKDAV

SEQ ID NO: 40480 - protein, 211 aa, Oryza sativa
MWVKLVFTTLNWFVVSLLPKPQQCRLPSSSSSSSSPAWAPPPRWRSPRRRCPRRTRTRRSLRSSCATACHRGCSPPASPPSPSPPTAALPSTSRAPATPTTSTSPTLRPASWGSSATALSPTFPGSRSAASSSGSTSSESRSTSRRPRTTSTSTSDGSPASFLPTSSSPPTSATTPRNAASRPRSPRLPCGFRFDVFLPFVIPSCLCSIGS

SEQ ID NO: 40481 - protein, 385 aa, Oryza sativa
MSTPSQKKRRSKGKDGAVAPVGLRLNRLGRASPREAAGKPVYLAVEHDDDQEVPAHSIVELGGGGGGGEAHLVLHNVRGMSFATVESRYGPRIVGVGGKLFTTVYDPKTSMEIPGPFLVEPKLRPVLIPRGSKLYALSRTPSVVPGLDFLPWFVYLDLNYVLVAPHDARTMGWHHLPPPPIFPVRLNPLEYRDPPEVRVASYAVVGSHILLSVQQDKGTCAFDMDTNQWDMVDANNLPFIGKAVPLGGHLFIARSIANGGAAAVYDIRVFPLQPTSSGSHKTELSILNIPVVSKGIVPGQLFCSLGKGIFSSIDVRSAATPGPDAKLHKARIVHRTYSQVGGDDTEDNNYTVITKQHRQIYKLIDRTRHLAHPSPVVAALTMEAE

SEQ ID NO: 40482 - protein, 65 aa, Oryza sativa
MARGPSDSSILASPPVESVARMESIGCRRCPLLLSLSGRRHCHLLLSLSMRASLSAMRREGRVSA

SEQ ID NO: 40483 - protein, 405 aa, Oryza sativa
MAATPPPARLPARGADLPRSGGAAAAGTGGRGGGGGRGRRAWWRGRCCRRRKQARAGAARAVAGLLRQDVPGRRPDRRQRHRAAVPRQPRRRPRRAPPLLPRLLRRRVRRVHTDRADGQQRRRGAEGGEGHGGEPEPAAGGVRHGGDGQGRRGEGVPRRRHLRRRPRARRPGLRPPGRWALLRGEEGSEGQQGVPGGQGAGQPPARQLHRGRAPPRVRRQGPRRRRPRGALGRAHRRVRALRPLPGPPLRLRRDAAAGPGDGRAAGEGAAHVVPLHRRQRPRGGALRREHPVPVRPRLLRQPAGEAGTPRLRPGAVPRRAHQAARRGARRRQGAVLPGVRGQHGQDGLRPGQEGQEGGGQASLQPAPVLNVYWSKLGRSHCLDHSITLGVTGVIFCCKLPHFGKY

SEQ ID NO: 40484 - protein, 345 aa, Oryza sativa
MAATNKKIVLRNHVTGFPKESDMELVAATGAAPSRVPEGTDGAVLVKNLYLSCDPYMRGRMSSHDGSYVDAFVVGEAITGYGVGKVVDSSHPGFKAGDLVWGMTGWEEYSLIKDPSRALFAIRHPDLPLSYYTGLLGMAGFTAYVGFHEICAPREGERVYVSAASGAVGQLVGQFAKLMGCYVVGSAGSDDKVRLLREKFGFDDAFNYKKESDLSAALKRCFPEGIDIYFENVGGAMLDAVLLNMRVRGRVAACGMISQYNLEHPDPVHNLTAIVTKRLRIEGFIVSDHYARYREYEEKAARYVKEGKIAYVEDVAEGLENAPAALIGLFSGRNVGKQVVVVARE

SEQ ID NO: 40485 - protein, 245 aa, Oryza sativa
MLAYLLHAPAAAAAVVPSPLSLRSPPKTPFLPTSPIRVPTPRRRPAAFSSAAAAVVPIAASLLEGPVLVWAGRLCLYYALLHIGLAGSPRNPFLAHEIGDDGAGDSDLGFSKWADKLRGGAPGENEAQDKRKLVSKWKPTTIGTLKRTYRVRSVEEGRRILKEIALVLSEDDHFVDASSHKGCQIRRESAHGESVCCYNVRALFDELPTPHLVLEITAFPAGPLTDNDYRKAERLEMVLRMSASI

SEQ ID NO: 40486 - protein, 346 aa, Oryza sativa
MSSSTTPISPQLVSPTDDELLQAQANLWRHSLYYLTSMALRCAVKLGIPTVIHRLGGNATLPALITALSLPPAKLPFLRRLMRLLVSSGVFTTERGGAAAEAEAVYGLAPLSLFLVDGAFTGSEVDDGHTNQSAFVLAATSAHYVEAALGLDDWFMKDNVPAAASPFEAVHGAPLLHETPVDAELNRLVSEALVSQNHMGIGLALRESRRVFEGLESLVDCGGGDGAAARAIVRAFPGIKCTVLDLPQVIGTAPVADGAVDYVAGDMFSYIPPAQAVLLKYVLSHWSDDDCVKILAQCKKAIPSREAGGKVIIKDVVVGTSSGLMLEAELLMDMAMMVMTSGRERD

SEQ ID NO: 40487 - protein, 209 aa, Oryza sativa
MINAAGQLLLRGRSRGVRPMFSSGLADRSFSSSASSSRKLDGKVAVITGAASGIGEATAKEFVRNGAKVILADIQDDLGRAVAGELGADAASYTHCDVTVEADVAAAVDLAVARHGRLDVVYSNAGIAGGAPPATLAALDLDDYDRVMAVNARSMVACLKHAARVMAPRRAGCILCTASSTAVLGNIGPLAYSMSKAAVVGMVQTVLEV

SEQ ID NO: 40488 - protein, 271 aa, Oryza sativa
MQAALLLPARPSAAAPPTLLRRGAASASSARAPTPLPAGRLSGGVLSAVRRLTVAAAGSSSSSGPLYPTPPPTEQDIERAKFEQVVKRLGKTARYFKNLGTLGFWSQLVSTVVSAGILSFSTVITGKVTAPFTFYATAAGIAAGFISVFWSFGYIRLSERLRKTASEPAKAPPRADVIRSLKNGIVLNMLGMGAAVLGMQATVGALVAKALTTSAVPYYQATSPGQSPVLALDVFLVQASANIILSHFLGLASSLELLRSVAIPPAEAAAA

SEQ ID NO: 40489 - protein, 402 aa, Oryza sativa
MEEPGPEEEKEEEEARFDFLEWIGPDTSAAVFTFLDHPADLARASAVSRSWRRFVVRNGFSKIQCLRLCPEASNFTRIITKQAIASASESDAEHQHRAYMHLSYALLLDDPQDCIIRCIGASTTDNFPEETIQNTLVPTDWVAMMRPSYWSSAGHFDPAVPECLFYRLRSDLCLVQQINIQPFRGQPTHPPSFFLLLLLNTSITCLLHPAFFQYGDPIYSAKYVRFQMGYPKTPLPSQLLVSHDNEGQLAADDNYIWTYTSPQFPMLQESVLQSFKLPRAVLCIGGVVKIEFLGRVQKQEMDDLYYICISHVQIVGIPLPRELGVDPYKNGVVLKYYPDTRRSGVCHGESSGDDGRNSPSKWRNFTTRILHSSSARRLGWNQAILNRLFGAHDASEEEEEET

SEQ ID NO: 40490 - protein, 284 aa, Oryza sativa
MLHEQHAPPPQPEPEVSLQLSAPATAADDVAAGDDEEVTVVTTYRDIHPLTPPSPTTTTTPPTRLGSAAYSWDTASSHRSVSSEEQFMTMSREFTAMVAAGTTMQTGPNDGNNGGDQLTSIGEDELEETNPLAIVPDSHPIATPARSRASQLEVVPAAGPSPAPPVEARQVKKEEVETKVSAWQTAEVAKINNRFKREEVVINGWETEQVEKASAWLKKIERKLDEQRAKALERTQNDIAKARRKAEEKRASAEAKRGLKLAKVLELANFMKAVGRVPTKRSFF

SEQ ID NO: 40491 - protein, 225 aa, Oryza sativa
MHCCMSLHPHRRHGDGDVDGSASGSGSARLTAGLINFLESRRAGAMSTTNSSSSVSVPAMDAHGQEEEEEPMQVQQQQAFRGVRKRPWGKFAAEIRDSTRNGVRVWLGTFDSAEEAALAYDQAAFAMRGSAAVLNFPMEQVRRSMDMSLLQEGASPVVALKRRHSMRAAAAGRRRKSAAPAPADQEGGGGVMELEDLGPDYLEELLAASQPIDITCCTSPSHHSI

SEQ ID NO: 40492 - protein, 272 aa, Oryza sativa; identical to SEQ ID NO: 30526

SEQ ID NO: 40493 - protein, 181 aa, Oryza sativa
MRTTRRKRTMIWRPSWQEGVSWTTSSSGSRSSPMACSTKSARGTGSSSSRRSPPSHPPRRPTGARRCPSTGPSSRLAPPTRCSRSPPRWSPPWPKASARPRSRRSTSPPRSTASPRTWRRCPCYRRTGSASRAAGTCPCSWGWQWWPCRNAHRRVFLTSPGLCPRLGVTCSTCRRWIGLPR

SEQ ID NO: 40494 - protein, 306 aa, Oryza sativa; identical to SEQ ID NO: 28830

SEQ ID NO: 40495 - protein, 255 aa, Oryza sativa
MARKIGVIAFVLLVSIGLSNAARVARYTTEGGGGGGGEGGGGGGGEGGGGGSGYGEGYGQGGGASGGGYGQGGGGGGGGGQGGGSGSGYGSGYGQGGGASGGGYGKGGGGGGGGGQGGGAGSGYGSGYGSGYGQGRGASGGGYGQGGGGGGGGGQGGGNGSGYGSGYGSGYGQGGGASGGGYGQGGGGGGGGGQGGGNGSGYGSGYGSGYGQGGGVHAGGYGQGGGGGGGGGQGGGSGSGSGYGSGYGGGAGGSP

SEQ ID NO: 40496 - protein, 355 aa, Oryza sativa
MASLTDLVNLNLSDTTEKIIAEYIWIGGSGMDLRSKARTLSGPVTDPSKLPKWNYDGSSTGQAPGEDSEVILYPQAIFKDPFRKGNNILVMCDCYTPAGEPIPTNKRHNAAKIFSSPEVASEPWYGIEQEYTLLQKDINWPLGWPVGGFPGPQGPYYCGIGADKSFGRDIVDSHYKACLYAGINISGINGEVMPGQWEFQVGPSVGISAGDQVWVARYILERITEIAGVVVSFDPKPIPGDWNGAGAHTNYSTKSMRNDGGYEIIKSAIEKLKLRHKEHISAYGEGNERRLTGRHETADINTFSWGVANRGASVRVGRETEQNGKGYFEDRRPASNMDPYIVTSMIAETTIIWKP

SEQ ID NO: 40497 - protein, 269 aa, Oryza sativa
MAAQALLSGRQLLGRPLQSSVSRSSSSRKAPFMVRAEATPPAKQGADRQLWFASKQSLSYLDGTLPGDFRFDPLGLSDPEGTGGFIEPRWLAYGEVFNGRTAMMGVVGMVAPELLGKLGLVPAETAIPWFQTGVIPPAGTYTYWADPYTLFVFELALVGFAEHRRFQDWYTPGSMGKQYFLGLEKYLAGSGEPAYPGGPLFNPLGFGTKSEAEMKELKLKEIKNGRLAMLAFLGFSVQALFTGVGPVQNLLDHLADPVHNNILTSLKFH

SEQ ID NO: 40498 - protein, 266 aa, Oryza sativa
MASTIMAPTSRVLAAKTPFLGHPRPSNAPVRDIAAAATGRITMSKELWYGPDRVKYLGPFSAQTPSYLRGEFPGDYGWDTAGLSADPEAFARNRALEVIHGRWAMLGALGCITPEVLEKWVRVDFKEPVWFKAGAQIFSDGGLDYLGNPNLVHAQSILAVLGFQVVLMGLVEGYRINGLPGVGDGNDLYPGGQYFDPLGLADDPVTFAKLKVKEIKNGRLAMFSMFGFFVQAIVTGKGPLENLLDHLADPVANNAWVYATKFTPGS

SEQ ID NO: 40499 - protein, 224 aa, Oryza sativa; identical to SEQ ID NO: 30534

SEQ ID NO: 40500 - protein, 251 aa, Oryza sativa
MSGTGYTVEVTNLSSRASESDLHEFFSFSGAIEHIELIRSGEYGSTAYVTFKEPYSLETAVLLSGATIVDQPVCIARWGQPNEPYNFWDTPNWYTEEEIEYRTYQTCQFNSTPQEALTIAQDVVKTMLARGYVLSKDALARARAFDESHQVTATAAAKAAELSKRIGLTDRVSGLTDRVSAGVGAIRSVDETYHVSETTKTVATATGRTAVKVVNGIMTSSYFSAGAMMLSDALHRAAQAAADLAAHGRHN

SEQ ID NO: 40501 - protein, 224 aa, Oryza sativa; identical to SEQ ID NO: 30534

SEQ ID NO: 40502 - protein, 307 aa, Oryza sativa
MERLQRIFGASGMGQPPSDSPLLDSSEQVYISSLALLKMLKHGRAGVPMEVMGLMLGEFVDDYTVRVVDVFAMPQSGTGVSVEAVDHVFQTNMLDMLKQTGRPEMVVGWYHSHPGFGCWLSGVDINTQQSFEALNPRAVAVVIDPIQSVKGKVVIDAFRLINPQTMMLGQEPRQTTSNVGHLNKPSIQALIHGLNRHYYSIAINYRKNELEEKMLLNLHKKKWTDGLILKRFDTHSKTNEQTVQEMLNLAIKYNKAVQEEDELPPEKLAIANVGRQDAKKHLEEHVSNLMSSNIVQTLGTMLDTVVF

SEQ ID NO: 40503 - protein, 303 aa, Oryza sativa; identical to SEQ ID NO: 30545

SEQ ID NO: 40504 - protein, 280 aa, Oryza sativa
MTKLAIIPFTMLLETIFLSKKFSRSIKISLMVLLLGVGIASVTDLQLNLLGSIIAVLTIAATCVSQILTNQIQRRLKVSSTQLLYQSSPYQSAVLLVTGPFVDKLLTNRDVFAFTYTFQVVAFIVLSCSIAVCVNFSTFLVIGTTSPVTYQVLGHLKTCLILSFGYVLLRDPFTFRNVAGILVAIFGMGPLLLLLRLRVPRQEARRRPLPSSPHLFLPDGGDEGLGAAAGRRRRRGGEELAVERGEGVAELRRGAEDGEERVQPAVTTTTTRADACARDS

SEQ ID NO: 40505 - protein, 287 aa, Oryza sativa; identical to SEQ ID NO: 30679

SEQ ID NO: 40506 - protein, 329 aa, Oryza sativa; identical to SEQ ID NO: 40454

SEQ ID NO: 40507 - protein, 317 aa, Oryza sativa
MQTTRSYRSKFLSPTAMYSSSSMKPSSPSQANQDADDAKTYKELYQRCTDLVSSWPSRQGLSYLQLFRHEKGWYNGVTPLVGTMVADELFAARPSDIVVPTLPKSGTTWIKALLYATVHRREHPADAAGDHPFNSLGPHECVKFLEYHLYRADEAPDLDALPDPRLFATHAPFDLLPRAVVAAAPPSGCKVVYVCRDPKDLVSLLQFVNEYKSRNGRELVAVDAAVGFFCDGVSPFGPYWEHVLGYWRAHRERPERVLFLRYEEMKRDPAGHVRRLAEFAGVPFTSPEEDGGAVDAIVRLCSFDNMVGLEATKGGRT

SEQ ID NO: 40508 - protein, 266 aa, Oryza sativa; identical to SEQ ID NO: 32418

SEQ ID NO: 40509 - protein, 287 aa, Oryza sativa; identical to SEQ ID NO: 30679

SEQ ID NO: 40510 - protein, 259 aa, Oryza sativa; identical to SEQ ID NO: 30235

SEQ ID NO: 40511 - protein, 265 aa, Oryza sativa
MAATLFSTALSPHLLPLPSTSSNPASSSLSFLSKPLLPALAVAGWPRRRTSPFVPVAVAVSEEVETEEDEEEEEEGSGGEEFSDDLRVFVGNLPFSVDSAQLAGLFEQAGSVEMVEVIYDKLTGRSRGFGFVTMSSVEEVEAAVEQFNGYILDGRSLRVNSGPPPPREQSSQRAPRGEANRVYVGNLSWGVDNAALANLFSGEGEVLEAKVIYDRESGRSRGFGFVTYGSAEEVENAVSNLDGADMDGRQIRVTVAESKPPRRQY

SEQ ID NO: 40512 - protein, 260 aa, Oryza sativa; identical to SEQ ID NO: 33227

SEQ ID NO: 40513 - protein, 321 aa, Oryza sativa; identical to SEQ ID NO: 31889

SEQ ID NO: 40514 - protein, 270 aa, Oryza sativa; identical to SEQ ID NO: 28586

SEQ ID NO: 40515 - protein, 462 aa, Oryza sativa
MKFAAILALAAVAVSSVSGATVHPAVHRTLRSQGAVNIFVTLRAGTDTVVNAVQKANIADRGKKITELVTALEKNADTTQTEVASVLVQEAASASFTRVERFWLTNQIYIEGATIDLVLKLSGLPSVSEITEEEIITLDPISSTAANTTGDASILANEYGVTKIRAPEVWAKGYTGKGVVVGTIDSGVLGTHTALSGNFRSAFSWYDPESKRAAPYDNNGHGTHTMGTIAGAGGIGVAPDATWIACKGCRSSNCPQADLLACFQFMTCPTNPAGTTKDCTQAPRLVSNSWGGGQGSTVYNSAINAWRTAGIIPIFANGNSGPSCRTANSPGDNANVIAVGATDSSDKLASFSSKGPSTSGLVKPEVSAPGVSVRSAWNTGTSAFNSISGTSMATPHVAGAVALLLSYKPNLTFAQIRTALTTTAARNLPASGSTCGSTADSVSPNNQYGYGRIDVLAAFNSL

SEQ ID NO: 40516 - protein, 172 aa, Oryza sativa
MKSFPVAGGRSVSLGLFSDVSNSWELLELMQSGKLEPEVAFLNASLVPDVFPVLAAAHKAVVSQGRESLTTRTLHSELVYNYSGSKHITESLKRCGISDDTSYILAARFDASNEEIKAVEKLICGTEIDLAELETRANQPQILKHYKITPQELSISTLPDAIVCRIAARDAL

SEQ ID NO: 40517 - protein, 287 aa, Oryza sativa; identical to SEQ ID NO: 30679

SEQ ID NO: 40518 - protein, 287 aa, Oryza sativa; identical to SEQ ID NO: 30679

SEQ ID NO: 40519 - protein, 351 aa, Oryza sativa; identical to SEQ ID NO: 30800

SEQ ID NO: 40520 - protein, 201 aa, Oryza sativa; identical to SEQ ID NO: 32050

SEQ ID NO: 40521 - protein, 193 aa, Oryza sativa
MSHRDSSIGSSTATASSTTGGGLSSLFPNLDVPLSSPQSTDPRRHSPPLFPSLHRSRSPSTAAASLSGQRHSLPSAHSCPGRPRSSPARPPLRRQITIVRSRRGRCPHLPSRSPTRCRWDLQQGWRRALLVSPQQSAPIPCLSHALRWPGTTPSPLHRLASGCSSVGRSQRRHIKDSASLPSRWWRWLPPESL

SEQ ID NO: 40522 - protein, 469 aa, Oryza sativa
MLVALEAGGLFRGLLLLLLYPVLLLLGHDRATKLMVMVSFAGVRKEKDGSPSFRVGRAVMPKLFLEDVSAEVFDAAARRRRLVCVSSMPREMVEPFLKEYLAVDAVVAPELRAFRGYYLGLAESDGEVMQRLDMEEVIGMKERGGAGDGDGDGQVTVVGIAGLGNSFHQLFQNYCKEVYVASEWARRRWRPLHPRRYAKPLIFHDGRVAFRPTTSATLAMFVWLPLAVPLALLRVALIVVVLPFSLAAPIAAALGIHCRCIAASTLRAAAVLDLFVCNHRSLLDPLYVSAVAGRADLAAATYSISRLSEILAPIRTFRLTRDRAADRAAMQAHLSRSRRGGGGGGLVVCPEGTTCREPFLLRFSPLFTELGADVQPVALHSEVAMFHGTTAGGWKMLDPFFLLMNPSPAYVVHFLDPVAGGGGGPEVANEVQRRIAETLGYTCTALTRRDKYLVLAGNDGVVANNNKSN

SEQ ID NO: 40523 - protein, 246 aa, Oryza sativa; identical to SEQ ID NO: 37294

SEQ ID NO: 40524 - protein, 228 aa, Oryza sativa
MHKTAQAWFTGGPAAPAASAGESQPSLLADWNSYAASRPDASSSSPLPFDIEAAVRSANDTVSGTFSVVTKGVRELPGSFQSATSSFPSGKALMYFGLFLATGIFFVFIAFALFLPVMVIMPQKFAICFTLGCGLIIASIFALKGPASQFAHMTSMERLPFTGALIGCMVGTIYVSMFLHSYFLSVIFSVLQVLSLAYYTISYFPGGSSGLKFISSSLLSSVTSCFGR

SEQ ID NO: 40525 - protein, 253 aa, Oryza sativa
MEVKCRRLEGKVAVVTASTQGIGLAIAERLGLEGAAVVISSRKKKNVDEAVVGLRAKGITVVGVVCHVSIPEQRKNLIDTAVKNFGHIDIVVSNAAANPSVDNILEMKEPILDKLWDINVKASILLLQDAAAYLRKGSSVILISSITGYNPEPALSMYAVTKTALLGLTKALAAEMGPNTRVNCIAPGFVPTNFARFLTTNDTIKNELIDRSTLKRLGTVEDMAAAAAFLASDDASFITAETIVVAGGTRSRL

SEQ ID NO: 40526 - protein, 181 aa, Oryza sativa; identical to SEQ ID NO: 32422

SEQ ID NO: 40527 - protein, 218 aa, Oryza sativa; identical to SEQ ID NO: 30237

SEQ ID NO: 40528 - protein, 136 aa, Oryza sativa
MASSGDSSGKQRSDEEWRAVLSPEQFRILRLKGTELPGTGEYNKFYGDGVYNCAGCGTPLYKSTTKFDSGCGWPAFFEGLPGAINRTPDPDGRRVEITCAACGGHLGHVFKGEGFKTPTDERHCVNSVSIKFTPAS

SEQ ID NO: 40529 - protein, 313 aa, Oryza sativa; identical to SEQ ID NO: 30967

SEQ ID NO: 40530 - protein, 559 aa, Oryza sativa
MVIPWCSSMMRLLWFLFALLLARSVADAATANYTFTVESMRVSRLCNSTDIIAVNGLLPGPMIEVNEGDAVAVEVINGSPYNLTIHWHGILQLLTPWADGPSMVTQCPIQPNSSYTYRFNVTGQEGTLWWHAHSSFLRATVYGALIIRPRNGSAYPFPAPDQEVPIVLGEWWSRNVVDIESDAVSSGQLPRESDAFTVNGVTGELYQCANDTFTVDVQPNTTVLLRVINAGLNTHLFFKVAGHAFTVVAVDACYTANYTTDTLVLAPGHTVDALMVTNASAGSYYMAVQAYDSLSPTTMAVTDDTTATAIVHYNTTSTKKNATPVMPTMPQSSDSATANAFYFGLRGPPSPSAPAVPTKVDVNMTIELGLGQLPCDSTQSSCSGKSVAAAMNGVSFRLPSQMSLLEAQFNRTPGVYTADFPDAPQPSGTPMVEGTKVRRLKYNSTVEIVLQNPTAFPSENHPIHLHGFNFFVLAQGLGNFTPGNVSGYNLVDPVSRNTLAVPTGGWAVIRFVANNPGMWFFHCHLDAHVPMGLGMVFAVDNGTTPDSFLPPPPADLPKC

SEQ ID NO: 40531 - protein, 224 aa, Oryza sativa
MKSRKNSTTSTKAAGSCHTSSSGGGGGGGNCYSSSSSKMERKDVEKNRRLHMKGLCLKLSSLIPAAAPRRHHHHYSTSSSSSPPSSTKEAVTQLDHLEQAAAYIKQLKGRIDELKKRKQQAAALTTSTSNGGGGGMPVVEVRCQDGTLDVVVVSEAIREERERAVRLHEVIGVLEEEGAEVVNASFSVVGDKIFYTLHSQALCSRIGLDASRVSHRLRNLLLQY

SEQ ID NO: 40532 - protein, 390 aa, Oryza sativa; identical to SEQ ID NO: 31260

SEQ ID NO: 40533 - protein, 203 aa, Oryza sativa; identical to SEQ ID NO: 31602

SEQ ID NO: 40534 - protein, 293 aa, Oryza sativa; identical to SEQ ID NO: 30503

SEQ ID NO: 40535 - protein, 264 aa, Oryza sativa; identical to SEQ ID NO: 32848

SEQ ID NO: 40536 - protein, 355 aa, Oryza sativa; identical to SEQ ID NO: 31776

SEQ ID NO: 40537 - protein, 226 aa, Oryza sativa; identical to SEQ ID NO: 32893

SEQ ID NO: 40538 - protein, 290 aa, Oryza sativa; identical to SEQ ID NO: 32917

SEQ ID NO: 40539 - protein, 365 aa, Oryza sativa
MLAKAHVSSNDAGVHQLVNHWLRTHATMEPFILAAHRHMSAMHPIFKLLHPHMRYTLEINALARQSLINADGVIESCFTPGPVSGEISAAYYRNHWRFDLEGLPSDLIRRGVAVEDATQPHGVRLLIEDYPYANDGLLLWSAIRSWVESYVQLYYPDAGTVQCDLELQGWYHESIHVGHGDLRHAPWWPPLSTPVDLASILTTLVWLASAQHAALNFGQYPLGGYVPNRPPLIRRLLPDLERDAAEYAAFLADPHRFFLNAMPGVLEATKFMAVVDTLSTHSPDEEYLGEGRDEGGVPWTADEAAVAAHGMFAADVRRAEETIERRNADHGRKNRCGAGVLPYELLAPSSPPGVTCRGVPNSISI

SEQ ID NO: 40540 - protein, 50 aa, Oryza sativa
MVGPGNVAVAADVPNTNTVLAGRSRWNFYLKKAKFCPKFCVPISSGTCRW

SEQ ID NO: 40541 - protein, 298 aa, Oryza sativa
MGLAGGARVVLFVVAAAAAAALTAAADQIFTSSGAPFGRNSREPRYHVEFHPVDAPFNPENGQESVPMTSHVGKHYTCFLPVEETKTMKSIIPQNATNVIIESERRVKPKDPDELLEILKDQCFYRHEGWWSYEFCYYGKIRQVHVEGEKVIQEYVLGEYDADATDAYYENQTSDSADEDDNLIDTSKRYHVHLYTNGTVCDLTDMPRETEVRFVCSEPTVVISSIKEISSCKYVLTVQSPMLCKNPLFQQEKRTLSIHCNELLAEAEATVDDDSLPKEAQIIIPDPDGLHNYAAYAT

SEQ ID NO: 40542 - protein, 445 aa, Oryza sativa
MAAVDNAPPSPVVTVTSTRTVAPAAAKCVLATFDLPYITFYYNQKLLLYRLPNGASDFPDAVARMSASLSDALAYFYPLAGRIRQDDHDGSLSIHGQHGAEVIEASADHVSVDQLAGEECSEEAEKVMQLLVPYTGVMNLEGLNRPLLAVQLTRLRDGVAVGCAFNHAVLDGTSTWHFMTSWAELCRGGGAPSLLPVHNRGMARSVRVNLPLPASAEAHEKTDPNGPKVPLVARVFSFPPSAVARAKAAANAALPPGAKPFSSFQSLAAHIWRAVSRARALGPSDITVFAVFADCRARLSPPLPPAYFGNLIQAVFTGVPAGMLLAGPPELAAGLLQKAIDDHDAAAITRRLEEYEAAPKLFHYSDAGPNCVAVGSSPRFRVYDVDFGFGRPERVRSGANNKFDGMVYLYPGRGGDGGIDVELSLQPEPMQRLDKDQDFLQMRAP

SEQ ID NO: 40543 - protein, 200 aa, Oryza sativa
MEEQFILRVPPSVAERIERLMNESAAASSSSNPEDASLDLSFSEDGRNGTFMIGNESFPASLLDLPTVVESYKTYDDSVLIKTADIGQMIMVREEEDPAPEGVEYKHGLTPPMRDARRRRFRREPDLNAELVHRVEKDLISIMHGVSINQNASAILRAGEGGDRKKAGPAPATKPNVKQPAANGEEAEAERSDSDESVDP

SEQ ID NO: 40544 - protein, 65 aa, Oryza sativa
MKWGIAAAVGRCDAFLVRHNQGSSLSRDAERAAAAAAGEQRVEGKKFAPRFDGLRFIETLVTAHR

SEQ ID NO: 40545 - protein, 184 aa, Oryza sativa
MSSSSCAAGAEATGLVAMDCLVVCCCCPCLVLQITVFLFVRLPKKVVVKSKRIILRRWHGRRSSSSAAAAAAKRGCSTVDPAAGVKKQLEELFDDDDLFQGAFGGGINGGGGDDEEGWWKERCFAVDDDDGGVWEALIEQEGLFWFGSFWGRTTEQVDRPDQFGDDEHAHPALRFPLVLERVCD

SEQ ID NO: 40546 - protein, 278 aa, Oryza sativa
MDAQYNPRTVEEVFRDFKGRRAGLVRALTADVEDFFRQCDPEKENLCLYGFPNEHWEVNLPAEEVPPELPEPALGINFARDGMQEKDWLSMVAVHSDAWLLSVAFYFGARFGFDKNDRKRLFGMINDLPTIFEVVSGKSKAKPPSANNHSNSKSKSSNKTKSSEPRAKQPKPQPQPPVKNEGREEEGGPDDEEGGGGGGGGGREEEHGETLCGACGESYGADEFWICCDICEKWFHGKCVKITPAKAEHIKQYKCPSCSGGNGGGGGVSGNGKRARPS

SEQ ID NO: 40547 - protein, 171 aa, Oryza sativa
MAAVPAPALLPTTSGCGGALPPLPASGGGGSLRPVSLSSPAAAPFVLSRLLAPSSSPPRLPPAVARVDGGRGRIRGWWRRLPPSPLAFLLWQIRRRRRPPQADQAAVAPSAPSRQVPRSIRRWWRRWRRPRVDPLTVAVGRSGSGGSLRRLSSPSGGGGGVGGGRGWTQWR

SEQ ID NO: 40548 - protein, 529 aa, Oryza sativa
MARPPAATAPPPPPPPPPPPPPPIDRLVWLACAAPLSRIPVVGTQVSYFPEGHAEQCPAPLPDPLPSAHRFFLCTITAVDLSADTTTGEPYATISLLPLRHDAPAPAPAPAPAAAELAEAESQEFRYYAKQLTQSDANNGGGFSVPRLCADHIFPALNLDDDPPVQSLTMGDLQGDSWEFRHIYRGTPRRHLLTTGWSKFVNAKQLVAGDTVVFMWCGAPAPERKLLVGVRRAARYSGESACNARGRVQPQEVMEAVRLAAEQAAFRVTYYPRHGAGEFVVPRVEVDKGLTTPWRCGMQVRAQVMEAEDTRRLAWLNGTLTNLRHQQIWRTLEVEWDASAASSSMKNRFVNPWQVQPVDFPPLPMGLKISNNNISAPVCNGDSLLVPPILMHPQPQPPADIQGARHNNGHAYADIPSSSTPSMVRTQQLFPRDLQILVPHTDIVTPQNGSPPDNPVNTPLSASDGMKTIQLFGVTITSPVQGDTNGAFASAQVNQVPEGVDDETATEEASDTSLPDSLTNGHNQDGARL

SEQ ID NO: 40549 - protein, 346 aa, Oryza sativa
MRRLGLSLHHDTSPSFAALACNQRPPPNGTVHACSKSRPPQLEPGKVGKKPIKKTMRIARIPTSIPPHLRLPLDLSAVSPMGSASEHDVREHLLDVDGVGEEGAAAAAGPKIRVRGLTRRSEARGEEILRGVDLDVPRGVVVGVIGPSGSGKSTLLRALNRLWEPAPGAVLLDGVDICGIDVLALRRKVGMLFQLPAMFDGTVADNVRYGPQLQGKKLTDAEVQSLLSLADLDPALCSKPASELSVGQAQRVALARTLANDPEVLLLDEPTSALDPISTQNIEEAIVRLKKTRGLTTVMVSHSVKQIQRIADLVCLLVAGEVVEVLPPSELSETKHPMARRFLELS

SEQ ID NO: 40550 - protein, 70 aa, Oryza sativa
MAARRGRGRGREWEDDDLGVGGGQPPHLAAPVVCLARSAGDLAAGAFVGSLVGYGLSLLFLPYPLCLLMT

SEQ ID NO: 40551 - protein, 68 aa, Oryza sativa
MTMSTPSRRRTPPPPPPPTRTSPSRRAAARRARRAPRPPCPTTTTTSPPRPRPRPGTTTTTRSPSTSS

SEQ ID NO: 40552 - protein, 443 aa, Oryza sativa
MPSAVVVRRARVRARSQSPPGEFDSARRTRPRMEGEEEMRGRGGKASARARSQSPPGGSGSAARVEVEGMGASAVPDDMLLEVFKRLSPLADIVRAAAVCRRWRLLVSGAGGLPAPPPYFGFFRNYAPSALPPFVPAAGVGLGLDHGALSVSPACGALLVDCRGRRLLLRELGAGSARELKLLVCDPLRKTSVSLPSRFVAGHKVACCALLPGAGAAFRVAVVLFGAAAHFDILVYSSAASAWEAATGALKKSMNPHQGPTVVIGDVVYKLQSEEDKYVMAVDATKMTLSAVPLPNTGMLLYAGNHWIGKTHDGRLCFFALREQLVLAKWVLESPGKWVEQPAVDLRALMNPATVGDLSRIKLSAKISDQLRGCKLVSFGGFCEGTGALFFVMADWVVSLDLATWRFERMWRNTDESRPLGDIFPVEMMVWPPVRRGDLGEKE

SEQ ID NO: 40553 - protein, 108 aa, Oryza sativa
MAAALIVPANPNPTPNPTSSLRPPSRAASSVLRFPRRDRARTHLTAAFGRGSPAAAAERGGKDYYATLNLRRDATLQEVKTAYRTLARKVLHLHSPPFTLRCHVPSKC

SEQ ID NO: 40554 - protein, 265 aa, Oryza sativa
MDVLKRELQRKRQLLDADFGGRKLLRRAEIERREMERIREAERRLLLQKQLRSSSSHHRAASRSTTTPGAPDGDESSRTEHRGDGEEKEGAPLLPREEVIRRLRVLRQPATLFGEDDAARLRRLHAVLEDPAALADVEAAEIGEGQTNDFLRDIQALRAKAVAASASAAAKPKAGAATAESGGETREEVPFEELCDEDKIMTFFKRLMSEWSQEMDEMPEAERRTAKGKAAVATCKQCARYLEPLFKLCKKKVCDSINSRTHLRI

SEQ ID NO: 40555 - protein, 352 aa, Oryza sativa
MVSSISMYRGNLHRAGADTDHRWPAPRPTITPSRFRSLLRSRTLSLARLDGAARADSAASSSSTSRLADGDAGVDEEEQDEEGMEMEEEEEEEQEQEQEEEDGQNEQQPQEAGEEQDEGAVEDADMDDAGEVLVGGEDAHGNGDAQEGQGESEGFDPNPEGSCLDVIEERKKELSDKLDTLNKKKHDLVQMLKQILNAEEEIRMRTMQASLRTTVPQPSENAADGSSISRLVPRMTVDVNFSDVAGESEAGSNQGTPGRPLHHVHSISPSTASFARSPFGSLQHNSGHTPRSPATFSTASPSRFAATGNQGHPIGHPSISLPGINFVASSPSPAASGGSSSVFRDYRPPNST

SEQ ID NO: 40556 - protein, 478 aa, Oryza sativa
MQPRAASEMSQESAAAAATGMAPAPAKAQPHVLLVSSPFQSHVNPLLRLGRRLAGKGLSVTFTTALRDGIRVFDDGDGGGGGVRVERLRGGGMWEPDDPRLRIPGDMARHVEAAGPAALEELIRREAEAGRPVACVVANAFVSWAVRVAGDVGLPCAILWIQSCAVLSVYYHYVYSLAAFPSGDEADSSGAVTIPGLPELDMDELRPLRIYTSDQEMWRQMLVGDLGSMTEKAPWVFVNTFDELEHEAVAGLRKHIPLIPVGPLVEPDDGGVDDDDVHGCTAWLDAQPRRSVVFVAFGSLVDIGHDEVVEIAEGLASTGRPFLWVLRDGNRALLPKDALIDACGGDRGKVVPWCEQRRVLAHAAVGCFVTHCGWNSTAEALAAGVPMVASPRWSDQRINTRFVVDVYRVGVRAPATPLTREALRLSVEEVTAGPEAEAMAARAAILGENARAAVGGGGSSDRGVQAFVDRITSGGAEP

SEQ ID NO: 40557 - protein, 641 aa, Oryza sativa
MATAAGMGIGAACLVAPQVRPGRRLRLQRVRRRCVAELSRDGGSAQRPLAPAPLVKQPVLPTFLVPTSTPPAPTQSPAPAPTPPPLPDSGVGEIEPDLEGLTEDSIDKTIFVASEQESEIMDVKEQAQAKVTRSVVFVTGEASPYAKSGGLGDVCGSLPIALALRGHRVMVVMPRYMNGALNKNFANAFYTEKHIKIPCFGGEHEVTFFHEYRDSVDWVFVDHPSYHRPGNLYGDNFGAFGDNQFRYTLLCYAACEAPLILELGGYIYGQKCMFVVNDWHASLVPVLLAAKYRPYGVYRDARSVLVIHNLAHQGVEPASTYPDLGLPPEWYGALEWVFPEWARRHALDKGEAVNFLKGAVVTADRIVTVSQGYSWEVTTAEGGQGLNELLSSRKSVLNGIVNGIDINDWNPSTDKFLPYHYSVDDLSGKAKCKAELQKELGLPIRPDVPLIGFIGRLDYQKGIDLIKLAIPDLMRDNIQFVMLGSGDPGFEGWMRSTESGYRDKFRGWVGFSVPVSHRITAGCDILLMPSRFEPCGLNQLYAMQYGTVPVVHGTGGLRDTVENFNPFAEKGEQGTGWAFSPLTIEKMLWALRMAISTYREHKSSWEGLMKRGMSSDFTWDHAASQYEQIFEWAFMDQPYVM

SEQ ID NO: 40558 - protein, 309 aa, Oryza sativa
MPEADTAAAADSAAARVYLPSTAAAEDSSAAVRSASPPPPEASAAAADVSDDAAADSAARVYLPSTAAAEDSSAAVRSASPPPPEASAAAAEVSDDAAADSAAARVYSPSPPPPPRTLPSPLRPNPSPARRRGRLRHSRGRLPRVRLRHRSRLPPRRRRAAEVDSAATRVCLPRICLLLRRRARLPPPPRPTPRCRRHARHFFLSSFFPFFSDGDYHCRRDSSSNGSSAAAVSPPYSPTSASPGGRRPMGTGCSSPRPAPRAGSHSPTSRRRRQAGLRATRSGLPPARSSEEHGAGHSRRHGQAGWHPR

SEQ ID NO: 40559 - protein, 313 aa, Oryza sativa
MERRPELRRTMTLSEQLSAPDQAIRDFLKIPHDGLGGGDGEGGRIPAAAGASGGGGGVGGMINWKPLRDRLRLRRAASAWMSASPKPAASNSGGGGGGGATLSSSNSGSNHSNKYNYSPGEAAAAFSRTFSRTRSLRPTPTFSRATSTRLGATAFSSGSRRAAVDGGGHANEDDDEDHTDDDDDDDEEEQGKDDAPAAQMSLMALLEQSDSQWDSEDEDDQGHGGGGGGGGNGGGGGGGGARKNGDGDDDEDDGEGREEEMVHVCCVCMVRHKGAAFIPCGHTFCRLCSRELWVSRGNCPLCNGFIQEILDIF

SEQ ID NO: 40560 - protein, 501 aa, Oryza sativa
MPRRPSGGGGGAGPAAAAVRKVPLRKLLRAASVACGVQFGWALQLSLLTPYVQELGIPHAFASLVWLCGPLSGLLVQPLVGHLSDRIAPAASPLGRRRPFIAAGAASIAAAVLTVGFSADLGRIFGDSITPGSTRLGAIIVYLVGFWLLDVGNNATQGPCRAFLADLTENDPRRTRIANAYFSLFMALGNILGYATGAYSGWYKIFPFTVTPSCSISCANLKSAFLLDIIILVVTTCITVASVQEPQSFGSDEADHPSTEQEAFLWELFGSFRYFTLPVWMVLIVTALTWIGWLPFILFDTDWMGREIYRGSPDDPSITQSYHDGVRMGSFGLMLNSVLLGFTSIVLEKLCRKWGAGLVWGVSNILMALCFVAMLVITYVAKNMDYPPSGVPPTGIVIASLVVFTILGAPLAITYSIPYAMAASRVENLGLGQGLAMGILNLAIVIPQVIVSLGSGPWDQLFGGGNAPAFAVAAAASFIGGLVAILGLPRARIASRRRGHR

SEQ ID NO: 40561 - protein, 494 aa, Oryza sativa
MMGRCASPLCALAAALIAAVVAATSSSLAEATATPPLPVLPVPTAAQLRWQRREVIMFFHFGMNTFTDSEWGTGREPPAAFRPAALDASQWMDAAAAAGASLVVLVAKHHDGFYLWPSAHTAHSVRASPWRGGRGDVVREFADAARARGLDIGIYLSPWDRHDKRYGREVAYNEYYLAQLHELLTGYGSVSEIWFDGAKGKNATNMTYHFQEWFQTVRQLQSSINIFSDDGPDLRWVGDENGSAGSTCWSTINRSKITIGEAGIEKYLNTGDPRGKDWVPPECDVSIRPGWFWHKNETAKPLPELLEVYYNSVGRNCVLLLNAPPNTTGLVDAADIARLREFRTAVTAIFGTDLAAGSAARASSERGGRFAAANVLDGRDDTYWAPAAAEAEDGGGYWIELRRPASAAARKFNVVRIQEHVAMGQRVERHEVYVDGGGAAVASGTTVGHKRLHRLGAPVAGRTVRVWLASRRGPPLLSAVGLHLDPFAAGGGTM

SEQ ID NO: 40562 - protein, 86 aa, Oryza sativa
MCSKTHDLRGRCGTRQAEDTDMSRRSTTTTSPGSTSRSYVASMRSSAQVSDANTMAPLARRPITRGLKPNGSRTARSLSAVRNSSE

SEQ ID NO: 40563 - protein, 146 aa, Oryza sativa
MVSAASEVAAASAAAGPSSSSSDASPPWKQLQQRAAPAGRSTPTPSSKKLRTMPSRHTELGSDDSSFSPTPATDGSLSAGDTRSSCLSNSLFSRDFAGAPGDGSICPAAAAAALISSQPNETTVQGFTGCGCGGGGDRGHRRSPHA

SEQ ID NO: 40564 - protein, 317 aa, Oryza sativa
MAEQNKRSSSAAENGHAGGKKARANVEVKQEEEEAEEGEMSQEEESAKTGPLVVATAMDDLQIDVRIAVGLLHCHACLLPLKPPVFKVSLSLSLHFKIPLLISFVSFCFSSHVVECLIAFVVILDFCVWIKSSFVVWFCSARRRTWCAPAAAATTASSAAAPPRTPTAPSWTPSSAPPRWRAPTRRTAATATSCTARPPSTSARARARPAPARTPAAASAARRRRSSATSPPTTPGPSRRSATRSRAGSPCRCPGGATSSSGRTTAPCSWWCPRPRAASASARRCAWRASGRTATTRRRRSTSASCGWRCRPTATTW

SEQ ID NO: 40565 - protein, 587 aa, Oryza sativa
MGPATAAAEAALARRAADPLPALRRRDALPLPARLFAQLHALVLTAGLARHSPNFSLLLRLASPLLPVSHRLRLLLSSPLPPTTFLANSLLLASSSSRCLPSALSLYALLFLSSSPPLLRPNAFTYPPLFRAAPPALALALATHSVKFLGAHAASCDRVLGAALLGVFARCGRIASCRRVFDRIAHPDLPAWNALLSAYARLRARDVACATSAADAILELFVRMLSLAIEPNEITLVAVIGACGELGAVSHGVWALVEMYAGCGRLDLAEQVFAAASDRDTRCYNAMLHGLAVHGHGRAALSLLDRMHSAGVPVDGVTVLSVMCACAHAGLVDEGLDYFDRMEIEFGIEPRIEHYGCMIDMLSRAGRLNNAEKLIHEMLIVPNAAIYRSLIRACGIHGKLELGEKMIAELMRLEPDDSGNHVLISNFYARTNRWEDAKKARKEMKSMGIDKNPGSSLVDINGVLHEFLVGDKTHPASKEIYTMVEEIETRLIECGRRSSTSSALFDVEEEDKADTLSYHSERLAIAFALIASNPGAPIRIIKNLRVCADCHESAKLVSRVYGREIVMRDRTRFHHFRDGVCSCGDFW

SEQ ID NO: 40566 - protein, 479 aa, Oryza sativa
MTPPPPSPPHERKTWAESVASEFRAQRGIAFPLIAMNLTWFAKLAVTTAFLGRLGDLQLAAGTLGFSFANVTGFAVLTGLCAAMDPICGQAHGASNGKLLRKTLVMASILLLGASIPIAFLWLHVDAVLLRFGQQADMSSNARSYVVCLLPDLAVTSFVNPLKSYLSAQGVTLPTLFASALALALHVPLTMWMARTRGIQGVATAVWVSDLAVAVMLAGYVLVSERRRKAGGGGGWVEQTRGEWVRLLRLAVPSCLNTCLEWWCYEILVLLTGRLPDARRTVAVMAVTLNFDYLLFAGMLSLSVSASVRVSNELGAGEAWAARRAGMVSIVGGAVGGVGGGVAMVAARRAWGSIYSSDAGVREGVGRAMEVMAVLEVVNFPLNVCGGIVRGTARPAVGMYAVVAGFYVLALPLGVALAFKARLGIQGLLLGFLVGAAASLAVLLTFIARMDWPAEAQKARTRTTATVAQFHQHDEVVQP

SEQ ID NO: 40567 - protein, 312 aa, Oryza sativa
MRAIRVLPMFVLPAVSSVIYSTVVKFTRMLERKDQKTLEKLRAERKAKIDELKERTNYYLTQQLIQKYDLDPAAKAAAASVLASKLGEETGLKVHVGEEPKLDSAVARSNDVEISPSEGLRNRKQSNARGSRTGGTTAAQNPAQGAESSLTSSSGLEQPPMVVEHFQGSGASDGGWIAKIAALLVGEDPSQSYALICGNCHMHNGLARKEIISSSSFPCFPPLVLSCSTFASPPTLLRWRRCWLPCSAPRWPSRRPWPWRTPGTSWSAATTAAGGRCRRSPTRSTGGPRPPASTSATTSCSSSTARRTRCWR

SEQ ID NO: 40568 - protein, 455 aa, Oryza sativa
MEWDLKMPPAASWELADELENSGGGGVPAAVSSSSAAVGGGVNAGGGGRQECSVDLKLGGLGEFGGGGAQPRVAVAGEPAKGKGPAAAATGAAAAASSAPAKRPRGAAAAGQQQCPSCAVDGCKEDLSKCRDYHRRHKVCEAHSKTPLVVVSGREMRFCQQCSRFHLLQEFDEAKRSCRKRLDGHNRRRRKPQPDPMNSASYLASQQGARFSPFATPRPEASWTGMIKTEESPYYTHHQIPLGISSRQQHFVGSTSDGGRRFPFLQEGEISFGTGAGAGGVPMDQAAAAAAASVCQPLLKTVAPPPPPHGGGGSGGGKMFSDGGLTQVLDSDCALSLLSAPANSTAIDVGGGRVVVQPTEHIPMAQPLISGLQFGGGGGSSAWFAARPHHQAATGAAATAVVVSTAGFSCPVVESEQLNTVLSSNDNEMNYNGMFHVGGEGSSDGTSSSLPFSWQ

SEQ ID NO: 40569 - protein, 190 aa, Oryza sativa
MDAAGVAAKPSLSRKPSPSFRLRNGSLNALRLRRVFDLFDRNGDGEITLDEMASALDALGLGADRAGLEATVGGYIPAGAAGLRFGDFEALHRALGDALFGPVEEEEPGKQGEDDDEGDMKEAFRVFDEDGDGFISAAELQAVLKKLGLPEARNLATVQEMICNVDRDCDGRVDFGEFKCMMQRITVWGA

SEQ ID NO: 40570 - protein, 291 aa, Oryza sativa
MAGSGGGDRGSPEAELRRGFKTLAVTRPDPSAAVYEVRLNRPTRLNALSPDAFAEIPRAMALLDRAPAARAVVLSAAGPHFCAGIELGSPGSPATAPSGDPAPAAAEGLRRAILEMQAALTAIERCRKPVVAAVHGACVGGGVEVVAACDIRCCSKDATFVLREVDMAIVADLGALQRLPRIVGYGNAADLALTGRKITAMEAKEMGLVTRVFNSKQELDAGVAKIAKEISEKSAWAVMGTKAVLLRSRDITVEQGLEHVATWNAAMLRSNDLEEAIQAFLEKRKPVFSKL

SEQ ID NO: 40571 - protein, 344 aa, Oryza sativa
MLPSPPLAALSKAAAAAAARRAATVAARSRRRLLVLPAVASLVPGPPPVLCRRVRLMPQLEGPRAPPPPHGRGFAAAAAGGDGATLDAGDSELVVVSFYRFADFPDHAELRWPLKELCEELRVSGGIILAPEGINGSICGTPEAVEKVLNFIQSDDRLKGLRMIQSPVTPEDEAIHHGHTSQSPVGAGEDAPFRWDHVRVKLKKEIVALGDPGVMPTKTVGKYVKPKDWNALISDPDTVVIDVRNMYEIRIGKFKRAVDPCTNSFREFPSWVDDQFQLAESDSQLCSENNDNTIGRQSEDVNSSKPKELPRVAMYCTGGIRCEKASSFLLSRALKRFITWRVGY

SEQ ID NO: 40572 - protein, 76 aa, Oryza sativa
MTAPPDRDRGHLGNTGGDEEAPALGADASPRAAAARVGTLRLRGAIPPPVRAATGRIGVGGSGTVGAVGRRCRGFR

SEQ ID NO: 40573 - protein, 650 aa, Oryza sativa
MAGKGDGPAIGIDLGTTYSCVGVWQHDRVEIIANDQGNRTTPSYVAFTDSERLIGDAAKNQVAMNPINTVFDAKRLIGRRFSDTSVQSDAKLWPFKVLPGPGDKPMIGVQYKGEEKQFSAEEISSMVLNKMKETAEAYLGSTVKNAVVTVPAYFNDSQRQATKDAGVISGLNVMRIINEPTAAAIAYGLDKKSSSVGEKNVLIFDLGGGTFDVSLLTIEEGIFEVKATAGDTHLGGEDFDNRMVNHFVQEFKRKNKKDITGNPRALRRLRTACERAKRTLSSTAQTTIEIDSLYEGIDFYTTITRARFEELNMDLFRKCMEPVEKCLRDAKMDKSTVHDVVLVGGSTRIPRVQQLLQDFFDGKELCKSINPDEAVAYGAAVQAAILTGEGNEKVQDLLLLDVTPLSQGLETAGGVMTVLIPRNTTIPTKKEQVFSTYSDNQPGVLIQVYEGERTRTKDNNLLGKFELSGIPPAPRGVPQITVCFDIDANGILNVSAEDKTTGQKNKITITNDKGRLSKEDIEKMVQEAEKYKAEDEEHKKKVDAKNSLENYAYNMRNTIKDDKIASKLPEADKKKIEDAIDGAISWLDSNQLAEAEEFEDKMKELEGVCNPIIAKMYQGAGADMAGGMDEDAPAAAGGSSGPGPKIEEVD

SEQ ID NO: 40574 - protein, 344 aa, Oryza sativa
MGYGFSTKLTAFFWPWRFSPWRFSPPPSTPMPRPHLPPPGAPSPTPMATAPALHNFPHASSSRRSPTLCDGLPLPHRHISTAPPPGPSPASPPKTIVKLASSIGTVVPVALSIVPYFYQVYTGNFERTIEVYGAPAMLAGSINSIIWLTYSIMASKKDLNLALILMHALLCMSTFTYLMCICACKRATKEGYILGAFFIGCLSAISIVVHWDLNPSKVVKIIFRCFGGISLLSCHYILLNDILGSVPKRSQKVATGFDLILSCITNLVTFIITFHDHPEHTTSLITSGVGFVLNVVEIVLLVIVTIMGYFFPLSEHPDADVEASRHISATRGICFFSLLFKSLS

SEQ ID NO: 40575 - protein, 500 aa, Oryza sativa
MKTRSSGRGGGEPRRRLRNAAVMALMLSSLVALSLVRARFSPIASDGGEALKLKADESKLVVTTNHAVVNTESGDSSSSSSSAAAEEEEEVAAPAKPAAAGGGGARPVCYETSRRSDTCEAAGDVRVVGGSQTVYADTLDREWKTKPYCRKHDAFALSHVKEWTLRPLPSGDGGGGGAAVAPRCTTNSTATAFVLSTGGFTGNPFHDYTDVLIPAFITAHRFGGEVQFLVSSYKSWWMNKYIQIFQQMSRHDVVDVDADGDEVRCYRSAVVGPEFHRELGVDPTKTPSGYSVLDFRKMLRGAFGLDRATATPSGDRWDIRRRPRLLIISRRAARGRAFMNERAMADMAASLGFDVRVGEPDASTDTSKFARLVNSCDVMVGVHGAGLTNMVFLPAGAVLVQVVPYGKLEWLARNTFAEPSSAMEIHYLEYAVQLDETTLSEQYPADHPVLRDPMAIHKQGWEALKTTYLDKQNVRPHLGRLKNTFLQALKLLPHDKETMN

SEQ ID NO: 40576 - protein, 387 aa, Oryza sativa
MSSFAHHHHGSLVEKDGRMSALRSSLRPYEAAEEMAAAAAAGGPAAAWGAVERGAGMMGDGFSVEDLLDLEELCEVDRDGGEQGEAAAAAAAAVEKERSSDSHGSSVVSYEPMPLLPPVMDLPAHDVEELEWVSRIMDDSLAELPLPQLPAAAAALAACGKPQHRRPHEGAASALLDPMRTPTICALSTEALVPVKSRRSKRSRASVWSLSGAPLSDSTSSSSTATTSSCSSSASFSPFLQYVDFPALVASDLLDEQPRSKKSKHGKNGKQKPKKRGRKPKHQQPPHLAAAAGGGAALPATGDRRCSHCGVQKTPQWRAGPEGAKTLCNACGVRYKSGRLLPEYRPACSPTFVSSLHSNSHRKVLEMRRKKETPVIVAAAAPAVASF

SEQ ID NO: 40577 - protein, 521 aa, Oryza sativa
MAATTHAASLSFLLSHPHPTSPNPNPNPNLPLRRAPHRVRCATDAAATRHRRAADENIREEAARHRAPNHNLSAWYAPFPPAPNGDPDERYSLDEIVYRSSSGGLLDVRHDMDALARFPGSYWRDLFDSRVGRTTWPFGSGVWSKKEFVLPEIDPDHIVSLFEGNSNLFWAERLGRDHLAGMNDLWVKHCGISHTGSFKDLGMTVLVSQVNRLRRAPLSRPIAGVGCASTGDTSAALSAYCAAAGIPAIVFLPANRISLEQLIQPIANGATMLSLDTDFDGCMRLIREVTAELPIYLANSLNSLRLEGQKTAAIEILQQFDWEVPDWVIVPGGNLGNIYAFYKGFEMCRVLGLVDRVPRLVCAQAANANPLYRYYKSGWTEFTPQVAEPTFASAIQIGDPVSVDRAVVALKATDGIVEEATEEELMNAMSLADRTGMFACPHTGVALAALFKLRDQRIIGPNDRTVVVSTAHGLKFSQSKIDYHDSKIEDMACKYANPPVSVKADFGAVMDVLKKRLKGKL

SEQ ID NO: 40578 - protein, 372 aa, Oryza sativa
MESSLPRKRKGARSACSLVGSSHEPTTVARKRACREPKPRPEKKKKDPSSDDASGRGGGGGVVQTAPPASGRAAPESPSRGLKRKLGRIESATRMGRKKRLESEYELGAEIGQGKFGSVRICRAKVGGEEFACKALPKNGEETVHREVEIMQHLSGHPGIVTLKAVFEDADKFYLVMELCGGGRLLDEMAREGKFSEQRAAIVIKDLMSVVKYCHEMGVVHRDIKPENILLTKAGKIKLADFGLAARVADGQKLSGIAGSPAYVAPEVLSGCYSEKVDVWGAGVLLHVLLHGSLPFQGGSLDAVFEAIKTVELDFHSGPWESISSLARDLISRMLNRDVPSRITADEVLSKCKQFLILHCSFIGFCVYIVII

SEQ ID NO: 40579 - protein, 356 aa, Oryza sativa
MASRTSATAGMLLLAAAAALVCSSAAARMPPLAKGLSLGYYDASCPQAEAVVFEFLQDAIAKDVGLAAALIRLHFHDCFVQGCDASILLDSTPTEKSEKVAPPNKTLRKSAFDAIDDLRDLLDRECGDTVVSCSDIVTLAARDSVLLAGGPWYDVPLGRHDGSSFASEDAVLSALPSPDSNVTTLLEALGKLKLDAHDLVALSGAHTVGIAHCTSFDKRLFPQVDPTMDKWFAGHLKVTCPVLNTNDTTVNDIRTPNTFDNKYYVDLQNRQGLFTSDQGLFFNATTKPIVTKFAVDQSAFFDQYVYSVVKMGMIEVLTGSQGQIRKRCSVSNAAAAGDRAWSVVETVAEAAESLVL

SEQ ID NO: 40580 - protein, 366 aa, Oryza sativa
MVSVNLGLVHYVLDHIYGTVLHRTKLGTPFFSKGWGGTKLDLLEKMVKQLFPEARCQNWPPTAVQPMWKTVWETKSSCLREGVFRTTCDPRLIEALPPESHNARVAFLTPKSVSPEKMACVIHLAGTGDHSFERRLRLGGPLLKDNIATMVLESPYYGQRRPSTQHGSKLQCVSDLLLLGKATIDEARSLLYWLQNEAGYGKMGICGLSMGGVHAAMVGSLHPTPIATLPFLAPHSAVVPFCDGLYRHATAWDALRKDAATLAQDVTSLTEDMAQKSGITIEQVRERLRSVLSLTDVTRFPVPKNPQAVIFVGATDDGYIPKHSIMELQKAWPGSEVRWVTGGHVSSFFLHNDAFRKAIVDALDRL

SEQ ID NO: 40581 - protein, 84 aa, Oryza sativa
MRPGRMRNGFGWSADRLGAWTVVGRAGGQSPGAPRPRQPSSAQPVTARLWRAPRGAAPQRPAGSPSDPSKHGPRSLTCVRVDGF

SEQ ID NO: 40582 - protein, 138 aa, Oryza sativa
MTIHAPTTPRPTPVFTDRSRNLDDVVALGYPDLGAPAWIWKQAPRRRRAPAVLCPRPPPASLPPSPPRARPTPLPPALADLLHPSRRDAAPPTSWGARFSATGPRRPATPSPSSTWWPPPWLPNGGRWWRWRSRPLAR

SEQ ID NO: 40583 - protein, 322 aa, Oryza sativa
MAAAEVRHRTVEVASGVRLHVAEAGPEDGPAVLLVHGFPELWYSWRHQMRALAARGFRAVAPDLRGYGDSDAPPGRDSYTVLHLVGDLVALIADVGQPRVFVAAHDWGAAVAWQLCLLRPDLVTAFVALSVEYHPRNPTRSPVQTLRAVCGDGHYICFFQKPGVAEAEFGRGDIKCLLKKFYGMRKAAPLIIPPGKTLFDSIDSDGTCPAWLSEEDISYYAEKFEKTGFTGGLNYYRCIDLNWELTAPWTGVPIKVPTKFIVGDQDLTYNIPGVKDYIHKGGLKACVPNLEDVVIMEGVAHFINQEKPDEVSDHICGFFSKF

SEQ ID NO: 40584 - protein, 288 aa, Oryza sativa; identical to SEQ ID NO: 37099

SEQ ID NO: 40585 - protein, 172 aa, Oryza sativa
MNGAVVGLGETAKGSGGGGGGGEVTLETLRRKMSEFARERDWEQFHSPRNLLLALVGEVGELSEVFQWKGEVPKGLPGWGEREVEHLGEELADVLLYLIRLSDMCDVDLGKAALRKMELNARKYPIGQCRGSSKKHTHYSTTTTTTDNGASGDDNNRNAGAGADADAGKEQC

SEQ ID NO: 40586 - protein, 490 aa, Oryza sativa
MGKKRKLDSKSPAAARSAAARAAAAAAAAAAAAAVAEPSSQPEALAEDPAPSSQPLGLSSEGAGERMMSREAGGGEEEEVEEVEVEEEVEVDEDEDGEGEGEEEEEAAERDADSIQALLNSFPKDQLVELLSAAALSHEDVLTAVHRAADADPALRKIFVHGLGWDATAETLTEAFSAYGEIEDLRVVTDRATGKCKGYGFILFSRRSGARAALREPQKKIGNRTTACQLASVGPVPPGGMATNPAPAVAPAPAQLALPPVSEYTQRKIFVSNVGADIDPQKLLQFFSKYGEIEEGPLGLDKVTGKPKGFALFVYKTLDSAKKALQEPHKQFEGVVLHCQKAIDGPKPNKGGGLGGLYGAGTSGGRKGAGGYGAHSHSLPGAAVGGHVMPSPVSSLTSLPGVAGGPGVNPALGQALTAILASQGGGLGLNNILGVGANGSGLPNPGASAGLGSSGLPGMPGAGGYLGGYGGGGGYGSTPPGGPGRNYMGH

SEQ ID NO: 40587 - protein, 124 aa, Oryza sativa
MRIQRRLGDEEIWAVDPVMSRCVGAGSGSVGVVLRSASASSTTRPAVATSWRMSSPARGRPPVNLRRDGWGWISASTAPWPTTAAALTTSLALVGGRRSAPITHFCHLRPRAAARRRGIKHHAW

SEQ ID NO: 40588 - protein, 367 aa, Oryza sativa
MAQQLGLLAAVFVSLAVHVALHCPIQPLAPPPARPPAAARFPPNNLLQNLEKLGEGMLSAPEDVYVDDAGGEVFTATRDGWVRRMQANGSWERWGLVGGTGLLGVAPSADGAMLVCDADKGLLKVDENGRVTLLASTVEGSTIRFADAAIEASDGTVYFSDASTRFSFDNWFLDFFEYRFTGRLLKYDPRTGEASVVLDGLGFANGVALPPDEAFVVVCETMRFRCLRVWLKGEKAGEAEIFVDNLPGNPDNIRLGSDGHFWIALLQVRSPWLDLISRWSLTRRVIASFPALVERTKATLKGAVVAQVSLNGEIVRVLGDSEGNVINMVTSVTEFNGDLFLGSLATNFIGKLSLAKVTREQEDAVPS

SEQ ID NO: 40589 - protein, 500 aa, Oryza sativa
MKNMEAARRGRRGRQGGGLLLVVLAALLLLLLALARGASAWAHGGLAGGAGAGAGERRYMDLAMRRMESVRSSFVARRELATSTAASSSRVYHVTDYGADPTGGADATAAINSAIADAFRRPSNATMTGGIPDLGGAEIHLDGGSYLLKGPLSLPASGGGNLKIHSGSLRAADDFPTDRYLIELSAKAAGGGGGSSPAMSYYYEYVTLRDLMLDCNYRGGGVRVVDSLRVGVDNCYVVHFATDGVAVSGGHETFVRNTFLGQHMTAGGDPGERSFTGTGIRLDGNDNSVSDVVVFSAATGIMVTGGANAISGVHCYNKATGFGGAGIYLKVPGLTQTWITNCYMDYTGIVAEDPVLLHVSGSFFLGDANVVLKAVNGVARGVQIVGNLFNGRGKGVDIVELDGEFATVEQVYVAQNAATGMTVRSTTARAAAEGNGSSWTVDFSPVLLFPDRIGHVQYSLAAGDAFPGHALRNVSGNRVVIATDAAVSATVHVLVDQNSS

SEQ ID NO: 40590 - protein, 125 aa, Oryza sativa
MHGKHQHQQQQQQQGGMVVVAPKGCVTVRVGAEGEEQRRFAVPLAHLKHPLFGALLEEAEREYGFAQRGAIAIPCRVDRFVHVEHLIVQDLHGAAASHLLDLDSSSHHHTQIHLHLPRFAGCFRA

SEQ ID NO: 40591 - protein, 305 aa, Oryza sativa
MAMALLFLLLLLPPPTAPFSLDFFPESPSPPRLALSGAASLRPTAVSMASPRARLQLTHPVALGPAFSTYFSFSLSGPGSLSFFLTPHPHPDRHPFLLAIVFDAAARVRIDLAGHTTGTAASHLAPSSAPARLHSWIHYNATSATLQLRLSATSRRPALPLLSLHPLPPSALLLLRTKPMLAGFTSSATNCTLFAWAFRANNTMQHSQPLDPSHLLTTPPPHRPQPHPHHYYPWLSLLFAAACGAMLTFFLLFVWYSLLATRRPVAPVTTSDSDVVYEKIVLVGAKDDDAPAATTPSPDVAGNNN

SEQ ID NO: 40592 - protein, 517 aa, Oryza sativa
MRPLPLLLLILAAAASALARAPPRFPVPHARPRRGVVGAEEAVRGYDYETRYFRQRLDHFSFLEEEGEEGDGFFQQRYLVGRGGGWAGAGGPIFFYCGNEGDIAWFAANSGLVWEAATRFAALVVFAEHRYYGESMPFGSKDKAYNNSKSLAYLTAEQALADYAVLLTDLKKNLSSEGSPVVLFGGSYGGMLAAWMRLKYPHIAVGALASSAPILQFEDVVPSTIFYDLVSNDFKRESLSCFQTIKDSWKALDAQGNGQDGLLKLSKTFHLCKTIKNTGELSDWLSSAYSYLAMVDYPMPADFMMPLPGNPIKELCTKIDNQPDGTSILERIYAGVNVYYNYTGTVDCFDLNDDPHGMDGWDWQACTEMVMPMSYSEDSMFPADKFNYTSYEKDCINSFGVEPRPQWITTEFAGHNISLVLERFGSNIIFFNGLLDPWSGGGVLKNISESVVAIIAPLGAHHIDLRPASKDDPDWLVRLRESELGIISGWLSDYYGARRGALLQRAAPIPWTLLHHS

SEQ ID NO: 40593 - protein, 454 aa, Oryza sativa
MEARVLVLVTMAIAAACWATGGVAAAATAATTTTTSRLKGLRVHLTHVDAHGNYSRHQLLRRAARRSHHRMSRLVARATGVPMTSSKAAGGGDLQVPVHAGNGEFLMDVSIGTPALAYSAIVDTGSDLVWTQCKPCVDCFKQSTPVFDPSSSSTYATVPCSSASCSDLPTSKCTSASKCGYTYTYGDSSSTQGVLATETFTLAKSKLPGVVFGCGDTNEGDGFSQGAGLVGLGRGPLSLVSQLGLDKFSYCLTSLDDTNNSPLLLGSLAGISEASAAASSVQTTPLIKNPSQPSFYYVSLKAITVGSTRISLPSSAFAVQDDGTGGVIVDSGTSITYLEVQGYRALKKAFAAQMALPAADGSGVGLDLCFRAPAKGVDQVEVPRLVFHFDGGADLDLPAENYMVLDGGSGALCLTVMGSRGLSIIGNFQQQNFQFVYDVGHDTLSFAPVQCNKL

SEQ ID NO: 40594 - protein, 260 aa, Oryza sativa; identical to SEQ ID NO: 30772

SEQ ID NO: 40595 - protein, 347 aa, Oryza sativa
MQENEQAIAPNFVEENIRLPKDVTSDVPMEDASLLPRDKQQTDGAIPVVHDLQHEIDREQALADQNELPPLPDGPPPLPLDAPPPPPLPEGPPPLPSDSPPCQPPLPPSPPPATPPPPPPLSPSLPPPPPPPPLPSGPPPQPAPPPLPIQPPPIPPPPVPSSPSSLGYQPPAPEYFRASNSNQLNQMAGNASIQGIGNMTNFIPGGSVNTQAAVNFTPSVPPDYGNNNLYIKPQGSNGNFQFRPTGVPFQQGTFSAFPSAQTPPVRPHTHLTQMNPVGQQAVPPCNPYAVQSFPNNQSQYTSDEQWRMTSGNFSPDDQRNTWLPGARALSCAEGSFMQDGLTLTDLQ

SEQ ID NO: 40596 - protein, 362 aa, Oryza sativa
MHLLSGQRLLLPIPCGACYRSPPSPAIKPSPLGLRPFTKSSSSLPLHLHAVSPATVATDGSSTSAQPDSWAEFASRVSGEWDGFGAEFTAAGDAVELPENVVPEAYRDWGVQVFDWQTQCPTLADPAAPCDLHYRLVRLLPTVGCEADAATVHTSHQRHASSASAFAYSAAGSYVAAWPRGPAPVLEVEHCVVHPDNREVRVRLVQTVALAKEARLRGVKVFSEQWYGPYRNGDQLGGCALREAAFAAGEKLAASDVTGQWQSDAASAARFSGELDPETGKFAGLTPDEPGERLSRDDGDGIVTLPKQLWSSFKENGKDEFVCEVGWVLGHGSAITSRCVLSRDGDVKEIVVSRESRVSEGT

SEQ ID NO: 40597 - protein, 124 aa, Oryza sativa
MRIQRRLGDEEIWAVDPVMSRCVGAGSGSVGVVLRSASASSTTRPAVATSWRMSSPARGRPPVNLRRDGWGWISASTAPWPTTAAALTTSLALVGGRRSASITHFCHLRPRAAARRRGIKHHAW

SEQ ID NO: 40598 - protein, 246 aa, Oryza sativa
MAEDEFELDEEVFLDIPVDVVHSVVALAAGGGGGGGDALHPERERALHPAEDRGGVALAVEVVPPREPDDEQGTGAGHGGEEEETDIVVGDYMERGGGDDDDVFSSTCLTTVLFTLLSIIVWAVFLYGAAKLCVNYLVPLFRQQPPPSLPSPASHTYDADADMRCPCPCPSDLQAWRNLVGEDGDAYASELSWLPPLGNASAAVLPVDTLRVAAGAGGPYHSVVALLVAAVIFAVLGYLVKHLMTH

SEQ ID NO: 40599 - protein, 129 aa, Oryza sativa
MGRLFVMHLEGKVYSCKHCHTHLGLSSDIISKSFHCKHGKAYLFNKVVNVTSGVKEDRMMITGMHTVSDIFCVGCGSIVGWKYEAAHEKSQRYKEGKFILERYKVSGPDGSHYFVTHDAHVGGSDVDDV

SEQ ID NO: 40600 - protein, 226 aa, Oryza sativa
MAAAAQRLLAASTKIVGVGRNFVAHAKELGNPVPKEPVLFLKPTSSFLHAGVAGAAIEVPEPVESLHHEVELAVVISQRARDVPEASAMDFVGGYALALDMTARELQSAAKSAGLPWTLGKAQDTFTPISAVIPKSDVANPDDLELWLKVDDELRQKGSTSDMIFKIPSLISYISSIMTLMEGDVILTGTPEGVGPVRPGQKIKAGITGLIDVEFDVQKRKRSFST

SEQ ID NO: 40601 - protein, 310 aa, Oryza sativa
MERWAAPKVTAGSARRYVADQPSFSSTLLDAIYKSMDEQPGHGGGATGVEAVAAAAKKQHEAALHYGNYYKPSLAGSYRARAPGPHATTSSSSECSSYGGFSSSEAESSHHRRLRPIRTTVPGGAPGPAPEKKAKKPGASIRAKLRDLRKPASPGARLAGFLNSIFAGKRAPATPPSATAGAESACSTASSYSRSCLSKTPSTRGQAKRTVRFLDSDTESLASSTVVDRRRVPVEAVQQMLLQRMEMESDEDDDESSDASSDLFELENFAAIAPAGAAYRDELPVYETTRVALNRAIGHGYGHGRSARVV

SEQ ID NO: 40602 - protein, 226 aa, Oryza sativa
MLEVSTLRSPKADQRAGVGGHHVVGFVPAPPSPADVADEVDAFIVDDSCLLEYIDFSCCDVPFFHADDGDILPDLEVDPTELLAEFASSPDDEPPPTTSAPGPGEPAAAAGAKEDVKEDGAAAAAAAAAADYDGSPPPPRGKKKKDDEERSSSLPEEKDAKNGGGDEVLSAVTTEDSSAGAAKSCSPSAEGHSKRKPSSSSSSAAAGKNSHGKRKVKVYPYYQPHN

SEQ ID NO: 40603 - protein, 540 aa, Oryza sativa; identical to SEQ ID NO: 33870

SEQ ID NO: 40604 - protein, 245 aa, Oryza sativa
MSKKKAPTSIPCELPLALDPSVSARPSDRPVASQSSARPPFPAASAAAAAPAAAPAVRSLVANSSGMDTRFDEDERTTAATRRRQSPSPSFAPSTSKATAVGLTRYGAVKSWGPRRELETGETSRCMEVLLLENPIDATKPSPLHVDEDKQGEVIGGTQQNAPESCVTERARLNLKSRSSAVGQSAGSPLKERILAPSTAMKRATENKYLANLKTDIVEKALKYDRKEKMKEVMRLMIFQRRVLY

SEQ ID NO: 40605 - protein, 331 aa, Oryza sativa
MLQFGRRLAYHGLRPTLVTTRYVLSTTPPPGDPFRVAAISDGFDDDAGCMAAPPDYGEYHRSLEAHGARTLAELLVSEARAGRPARVLVYDPHLPWARRVARDDGVGAAAFMPQPCAVDLIYGEVCAGRLALPVTPADVSGLYTRGALGVELGHDDLPPFVATPELTPAFCEQSVAQFAGLEDADDVLVNSFSDLEPKEAAYMEATWRAKTVGPLLPSFYIGDGPLPSNTAYGFNLFTSTVPCMEWLDKQPPRSVVFVSYGTFSSYDAAKLEEVGNGLCNSGKPFLWVVRSNEEHKLSRELREKCGKRGLIVPFCPQLEVLAHKATGDIAS

SEQ ID NO: 40606 - protein, 268 aa, Oryza sativa
MQNPPSHPVDLPLAAAPPPVKAPTPRPPTPASLQPESPGVFFTAAAAAAPVGSSHRRIAIAVDLSDESAYAVRWAVANYLRPGDAVILLHVRPTSVLYGADWGSVDLSLPAANPNPSGDPPSAEDDAEAAARKMEDDFDAFTASKADDLAKPLKDAGIPYKIHIVKDHDMKERLCLEVERLGLSAVIMGGKGFGASRRTSKGRLGSVSDYCVHHCVCPVVVVRFPDDGVAEGGEAGGASELAVGEEVLHPVPEEDAEYHDATEEHKDT

SEQ ID NO: 40607 - protein, 670 aa, Oryza sativa
MVVSDSPKPQPTPSPPAPPPLPVPAAAGTTMGELEAAIEALAAKKLRLREAFDCLVACSPIPIPFRWDDIDAHVSSIQSSVAGRFRQFQALQTAATAGITAAPATSNASSRVERSVEHLVVVVEGQESHVARHEDGGNGEGEGEGEGGLGKEVAMDVESEEENGMVVEVASEAPRGEDGEVEEDEKMGGPINASPPSEEIHGKGADMSRRWGNPMEMSADVDDAKTKTTATAAAAELTAMAISPIPGFTGRGGAEASLRRSLAAACASMDSSSLARILCSSGSSSSSHATLAARHFRPALLAAAEPAALVVRAVRDLLAGTAPIRDSAWESCVELLSCVPKLAVAPSPGTMEQANRLAEDWKEMIGRTESCSMNLGRLAVWGLLNFLVSYNIVLEFDAEEIIHFFGTLPDDKKQCCISLCKYLGLIDKMADSVGHLIEHGQQLVAIRLACTLNLTDKYTPLSIMEDYIQNAKETAQEILSMESDSESLKLSMSKQVNALILSWRVVGECNIDSVHCDRIKAEITQLLHKYANKRHSLEELPSDTSSPHQKHHQMSQEKHHWQQKHREEQQQQFQNQSKEQEQERRMQKLRELRKKKNKRTQRRKRKQNAQVMKQHQFEKQRKLYHAGSFTNSQSYVRSEIHHHLSQHFSGTIGTPVAPYTPVAPYTGPFW

SEQ ID NO: 40608 - protein, 757 aa, Oryza sativa
MPKEVVGAEGSQQDQFTTSTHEVVDEHNEVAEVEPVLAEPNMHGQCDGEKPDEGKVLREKDTEENAKNALGVEQIERQDKALTESCIHEVEQVDGQSERLTRTGVEEKHAEITQEQENEFDNGVMETSKVSVNGAMPYSTASIQSEGEQKEASDKDMAEKQSNQDIESIDERDSLSDAAATVFEGADDHITLDTNEEATRKHTHDCGSICENKGTQMFQEGCKLDSGVKSDIDIMEIETQATEGIQNQETMELDKQEMEEEQNPGTTIENNKMKIPEEDASTFSCGEIQTDPHSTDVNEVEFTTGTQNDEHLDIKEELIMDRRLDCEIKYGNERPLEEANTFGGCDGGVDNIGVALDVNEENSIKEMQNQEIRSTEEFQAGETNLNNGAENVDEKRILEDASTLDIRDSTNAVVNGAESTEGTQILCAFNTEKELEVQEKQDQGTENENRNQNLVNTDSFECGVEPHGTLKTIHETLPTVQVVSTSGDTFSSKNEQNDVPWEDQNKSDAEVSESNQTAPKESERTIPPEHEDREEEKEENMENKIEISIGRENDEVSEQETSTEECIVAPSGMDDRDENNKGWAEESVQTYGRYASDPVNTSWQPSKFGKPGMEESRRTHSGRSIYLRDIKESQGRTRSETSNKLHINSAGYYSRHAVPEPVSVTREIKVPLYDSTRASGRDRGPELVVTGPPEETSRWRQEQYALQILEDVQNARVAEKTRMEMEIRILKAQVSSMQRQAMNLDRVGDVISRAKRH

SEQ ID NO: 40609 - protein, 428 aa, Oryza sativa; identical to SEQ ID NO: 34797

SEQ ID NO: 40610 - protein, 675 aa, Oryza sativa
MKEPSDPPMSALSHTEGDSSGFTRNNDRNDDAVGGEDSTSSYQPCNSMKCKDGTQIMSLANEDVSNLASDCQEPPSESNHAISHGSNTDSKEEMSSGSGYRRQQSCFSSSTCSWRSSSEVESVSSTPDGSGDVVGNMSVRSKTFERRPDHIASYPSASPDIRRLYAAEGKADFTLDYHSEERWSRRSNQSTAFRTSNGQSIEHHSEIVDIPRQANSMDETTSSSSQWSFDNWGPSLPRGMQYGDEIPSLSSQNYGARIPSLSSRQSYGDEIPSLSRNCNYASRQSYGDEIPSLSSRHCNSFSSRQSYGDEIPSLSRHCNARSSRQNYGDEIPSLSNSDYQCYQDRIPLHHRQWCHDAEAHPQLNYGRGASHGNRYSRDSFVSSIATNQRFKMGTGKHTVTRSDHHRTIKNDNVCKHSDDTLEQVRGPRANKLENATRSKIQEDIRSPLVRRDQFNRPDFIVEYEQAKFFMIKSYSEDDIHKGIKYNVWASTPHGNNKLDAAFREAQILIKEKGKKCPVFLFFSVNSSGQFVGLAEILGPVDFKKTMDFWKLDRWNGFFPVTWHIIKDIPNRLFKHITLENNDNRIVTFSRDTQEIGLLQGLKMLKIFKDYDQETSLLDDFNFYEEKESARCAKKGINAESTHEARLLFFGTGARHSDDFKSMENLEASMENTILY

SEQ ID NO: 40611 - protein, 98 aa, Oryza sativa
MSDYVFDFHFSVRDCIREGDEVCLLDCSVDVADAVDDVEQPPVVALGPGEGLLLAAEGRRRLRGVRRRGPELGRGARAPGQPHRLRLQRCSPSKKTYS

SEQ ID NO: 40612 - protein, 86 aa, Oryza sativa
MKLKSLVIADQHAAVNMYPGPVHTARHTLGIGFARSIGPMITHDFCVPLVPQRPLVVLLAHTTVGSSTGVKSEQGSRRGTCGWIES

SEQ ID NO: 40613 - protein, 499 aa, Oryza sativa
MAAANAGAMVRFVAAFLAAVLVMMVPCAPRAAAAAVGVNWGTVSAHRMPAPVVVELMRANRIGRVKLFDADQAALRALMGSGLQVMVGITNEMLQGIAASPAAADAWVARNVSRYVGPGGADIRYIAVGNEPFLTSYQGQFQSYVLPAMTNIQQSLVKANLARYIKLVVPCNADAYQSASVPSQGVFRPDLIQIITQLAAFLSSSGAPFVVNIYPFLSLYQSSDFPQDYAFFDGSSHPVVDGPNVYYNAFDGNFDTLVSALSKIGYGQLPIAIGEVGWPTEGAPSANLTAARAFTQGLISHVLSNKGTPLRPGVPPMDVYLFSLLDEEQKSTLPGNFERHWGVFSFDGQAKYPLNLGLGSPVLKNAKDVPYLPPRWCVANPGRDLNNVENHLKLACTMADCTTLYYGGSCNAIGEKGNTSYAFNSYYQLRKQDAQSCDFDGLGMITYLDPSIGDCRFLVGIDDSRTSTIYSSGDCSRRRFGLWILAFLVIGFLQIGVYL

SEQ ID NO: 40614 - protein, 338 aa, Oryza sativa
MSSSPAHAQRFYCHQCDRTVPIPPPTSPDADVLCPFCGGGFVEELGEDINPNPNPNPSPFLPHHPFFPFASPSFDLRNPSDLAAFFGPPSPSPSPSPAARRFDPSNFLHDHFTGLLSGGATIQIVLEGSSASLPLGGAAAGPGGISLGDYFVGSGLEQLIQQLAENDPNRYGTPPAAKSAVAALPDVAVSADMMAADGGAQCAVCMDDFHLGAAAKQLPCKHVFHKDCILPWLDLHSSCPVCRFELPTDDPHHAHPTLGSHRPAAPASASASPSPAPPPRLAERRFRISLPWPLRAAFGGQAESSNPTNQDPVGGSTDASGSGNNNATGGHRGYDDLD

SEQ ID NO: 40615 - protein, 504 aa, Oryza sativa
MKKLFFFLFLLILAASVVHGEDGAYIGVNIGTAMTSVPAPTQITTLLRSQNIRHVRLYDADPAMLAALANTGIRVIVSVPNEQLLAIGNSNATAANWVARNVAAHYPSVNITAIAVGSEVLSTLPNAAPLLMPAIRYLQNALVAAALDRYIKISTPHSSSIILDSFPPSQAFFNRSLDPVLVPLLKFLQSTGSPLMLNVYPYYDYMRSNGVIPLDYALFRPLPPNKEAVDANTLLHYTNVFDAVVDAAYFAMAYLNVTNVPVMVTETGWPHKGDPSNEPDATSDNADTYNSNLIRHVLNTTGTPKHPGVAVPTYIYELYDEDTRPGSTSEKYWGLFDMNGIPAYTLHLTGSGVLLANDTTNQTYCVAREGAVEKMLQAALDWACGPGKVDCSALMQGQPCYDPDNVEAHATYAFNAYYHGMGMGSGTCYFSGVAVITTTDPSHGSCVYAGSGGKNGTSLLNGTSLAPSSNSTAGDSGAHRAIGDVSSFVRAVVAALLLSVVLLL

SEQ ID NO: 40616 - protein, 574 aa, Oryza sativa
MYRAAASLASKARQAGSSARQVGSRLALSRNYAAKDIKFGVEARALMLRGVEELADAVKVTMGPKGRNVVIEQSYGSPKVTKDGVTVAKSIEFKDRVKNVGASLVKQVANATNDTAGDGTTCATVLTKAIFTEGCKSVAAGMNAMDLRRGISMAVDAVVTNLKGMARMISTSEEIAQAGTISANGEREIGELIAKAMEKVGKEGVITIADGNTLYNELEVVEGMKLDRGYISPYFVTNPKTQKCELDDPLILIHDKKVSNLHAVVKVLELALKKQRPLLIVAEDVESEASGTLIINKLRAGIKVCAVKAPGFGENRKANLQDLAILTGGEVITEELGMNLEKFEPQMLGTCKKVTVSKDDTVILDGAGDKKSIEERAEQIRSAIELSTSDYDKEKLQERLAKLSGGVAVLKIGGASEAEVGEKKDRVTDALNATKAAVEEGIVPGGGVALLYASKELDKLPTANFDQKIGVQIIQNALKTPVHTIASNAGVEGAVVVGKLLEQDNTDLGYDAAKGEYVDMVKAGIIDPLKVIRTALVDAASVSSLMTTTESIIVEIPKEEKEAPAMGGMGGMDY

SEQ ID NO: 40617 - protein, 726 aa, Oryza sativa
MPLRRLRIRTLSTAAAHHPFDGIPHPSLARHRRVNPIAFSAAVRASDPASLPALHAVAVTTGLHGFAAVTNSLAARYAKTGSFPSAVGVFAAARARDVSSYNTILSAFPDPAEALDFASWMLRSGAVRPDAVTCTVALSLAAGRGEGFLVRQLHALAWRSGLAADVFVGNALVTAYSRGGSLGEARSVFDDMPARDLVSWNALICGLAQDGDCPAEVIGVFLRMLRDGDVQPDRISVCSVIPACGGEGKLELGRQVHGFAVKLGVEGYVSIGNVLVAMYYKCGAPGSARRLFDAMSERDVVSWTTAISMDSEDALTLFNGMRRDGVPPNEVTFVALMSALPADCPARGAQMVHAACLKAAVSGEAAASNSLITMYAKARRMDDARMVFDLMPRREIIAWNAVISGYAQNGRCNDALELFSSMARCLTPNETTFASVLSAVTAVETVSMAYGQMYHSRALSMGFGDSEYVAGALIDMYAKRGNLEESRKAFHETEQRSLIAWTAIISANARHGSYGAVMSLFGDMARSGVAPDGVVLLAVLTACRYGGMVDAGRDIFDSMAADRGVELWPEHYSCVVDMLGRAGRLAEAEELMMRMPAGPSVSALQSLLGACRIHGDAEIGERIARILTEKEPTESGAYVLLSNIYADVGDWDGVAKVRRKMRDRGVKKEIGFSWVDAGAGEALHLHKFSSDDTTHPRTEEIYAVADVLGWEMKFLKNCSQMEMILI

SEQ ID NO: 40618 - protein, 85 aa, Oryza sativa
MVVPGAHAVAAACESPGSEREGREEGMRAAAALLHHTAAGRPLPSLLLLPPLPPQIDGQPSCSPRGCGNDGRLHQRSTAHSGLWR

SEQ ID NO: 40619 - protein, 437 aa, Oryza sativa
MIQSDAYTESAGYLAARPPTLEIFPSWPMSHLQEPYSNSQSVGSTTDSSSAQNTMSQAELVSPASMRSDSGQEQQQQEVLMVTIDDYNYKQGLGAAIATAPSFQQHAGGLDMRKHGSTRKDGKLLDAKTERRLAQNREAARKSRLRKKAYVQQLETSRIRLQQIEQELQRARSQGLFPGGCSAPGDMSSGAVMFDMDYTRWIDDDSKCMAELQGALQAQLPDGNLGAIVEECMRHYDELFHLRAVLASSDVFHLMTGMWAAPAERCFLWMAGFRPSEILKMLIPQLDPLTEQQLMGMCSLQQSSEQTEEALAQGLHQLHQSLADAVGGGPLNDGADVANYTGLMALALGRLENLESFYRQADNLRQETLHHMRRILTTRQTARCFLSIGEYNRRLRALSSLWASRPRENFIATENVSPTGTEFQVIQQSQQNQFSGF

SEQ ID NO: 40620 - protein, 161 aa, Oryza sativa
MAMRWCYVGKATKIFFTVLALLALIGVVLAFRALLHRAKSRASSSSSACAAADECQPILPDTVPQPSMPSTAATTPPPPHQYPSFPPPDAAMPMPMPQPPPPLQPPPPAIAQPPPAFASPPPPDALVPPPPPPAAPALVTPPPASPSAPPPAPEAPSPTAS

SEQ ID NO: 40621 - protein, 260 aa, Oryza sativa
MGRGKIEIKRIENATNRQVTFSKRRGGLLKKANELAVLCDARVGVVIFSSTGKMFEYCSPTCSLRELIEHYQTVTNTHFEEINHDQQIFVEMTRMRNEMEKLDGGIRRFTGDDLSNLTLADINDLEQQLEFSVTKVRARKHQLLNQQLDNLRRKEHILEDQNSFLCRMINENHHQAAVGGGDVKAMVEMAPVLSMLTAAPAYYGEESSSTALQLTPPLHAVDAAAAAGFRLQPTQPNLQDPGCSSSSFHAAAAGHGLQLW

SEQ ID NO: 40622 - protein, 567 aa, Oryza sativa
MGSRGCSCWLLSLALLCSLAAAKEQYHEFVIRETTVKRLCKSQSIMTVNGQFPGPTLEIKEGDSLIINLINRGRYNVTLHWHGVRQMRTGWSDGPEYVTQCPVRPGQSYRYRFTVAAQEGTLWWHAHSSWLRATVYGALLIRPRDGTSYPFHVQPTRELAPILLGEWWDMNPVDVVRAATRTGAAPNISDALTVNAQPGDLYSCSSHDTAFFPVTSGETNLLRFINAALNTELFVSLAGHNMTVVAADASYTKPYTTSLLLLAPGQTTDVLVTFDQPPGRYYLAARAYASAQGVPFDNTTTTAIFDYGAANNASSAAIAMPTLPAYNDTTAATAFTTNLRGLRKAELPSRVDESLFFTVGVGLFNCTNATAQQCGGPNGTRFAASINSVSFVLPSSTSILQAHHHGAPGGVFTADFPASPPVQFDYTAQNVSRALWQPVPGTKVYKLKYGSAVQVVLQGTNIFAGENHPIHLHGYDFYILAEGLGNFDAGADTAKFNMEDPPMRNTVGVPVNGWAVIRFVADNPGVWLMHCHLDVHITWGLAMAFLVDDGVGELQSLEAPPPDLPLC

SEQ ID NO: 40623 - protein, 127 aa, Oryza sativa; identical to SEQ ID NO: 37972

SEQ ID NO: 40624 - protein, 239 aa, Oryza sativa
MADSAAAASSSLPRSLASRRPLPSSPLRGGRPRSPRRCRFGSRSLHRLRARAGKGDPEDLYGPYPWDQSLDLTTGLDIQWVPEDRVTLFTSDGLVQIGGSLVPRRITPSEKRQRKVKGIQNIQRFQESSYMDPNQSLCLGALFNIAATNGLDMGRRLCIFGFCRSIEMLSDVVEDTVLEHGGEVVTAEKASKDGLQEKLTMSVAVPLLWGVPPASETLHVAVRSGGGIVEKIYWQWDLF

SEQ ID NO: 40625 - protein, 577 aa, Oryza sativa
MESFFVFFTAAALPVVVAAAVIAGLCITAAWLARPRRVAEVFRRQGIDGPPPSSFLAGNLPEMKARVAAAASAAAPTADGEETASAGGGGGGRDFEKDGFDDYCTRIFPYFHKWRKAYGETYLYWLRRRPALYVTDPELIGEIGRCVSLDMGKPKYLQKGQEPLFGGGVLKANGACWARQRKVIAPEFYMARVRAMVQLMVDAAQPLIASWESRIDAAGGAAAAEVVVDGDLRSFSFDVISRACFGSDYSRGREIFLRLRELSGLMSETSVIFSIPSLRHLPTGKNRRIWRLTGEIRSLIMELVRERRCAARAAREHGGKAAPPSPPERDFLGSIIENSGGQPRPDDFVVDNCKNIYFAGHETSAVTATWCLMLLAAHPEWQDRARAEVLEVCGGDGAAAPAAPDFDMVSRMRTVGMVVQETLRLFPPSSFVVRETFRDMQLGRLLAPKGTYLFVPVSTMHHDVAAWGPTARLFDPSRFRDGVAAACKHPQASFMPFGLGARTCLGQNLALVEVKTLVAVVLARFEFTLSPEYRHSPAFRLIIEPEFGLRLRIRRAGGQDATSQVDTSTAPVHSSHN

SEQ ID NO: 40626 - protein, 604 aa, Oryza sativa
MSLEHNKMMITLVRLLPLVLVVALAWPAAEAPAAASPPPDPVQCSSGSGTADCTVSSAYGVFPDRSTCRAAAAVYPSTEEELVRAVANATASGTKMKVATRYSHSIPQLACPGDGDGEGLVISTRRLNRVVAVDAGRMEVTVESGISLRELIAEAGKAGMALPYAPYWWGLTVGGMLGTGAHGSSLWGKGSAVHEYVVGMRIVTPAPAADGYAKVRVLTAADPELDAAKVSLGVLGVISQVTLALQPLFKRSVTFMERDDDDLADQVTKFGYQHEFADIAWYPGIGRAVYRVDDRLPMNASGEGVLDFIGFRATPRLLIRTNRLAEELFERAGNGNGKCVTSRVTHAALSSAGYGLMRRSGGLFTGYPVVGPQHLMQASGGCITGPEDALLTACPWDPRVRGSSFFHQTTFSLPVSRAGAFVEEVRRLRDMNPKALCGVELYDGILIRYVKASTAHLGKPAAGGGQSDDMVDFDMTYYRSRDPNRARLFEDVLEEIEQMGVFKYGGLPHWGKNRNLAFVGAARKYPRIGEFLRIKDAYDPDGLFSSDWSDMMLGIGGRAPTRDAPGCALEGMCVCSQDAHCAPEQGYVCRPGKVYKDARVCTKV

SEQ ID NO: 40627 - protein, 290 aa, Oryza sativa
MDFDDHDEGDGDEEMPPMPLSSGYDAPMQPGLGGGGGGVPKPGGGVGGGGGGGGGGGGGGARYRECLKNHAVGIGGHAVDGCGEFMASGEEGSIDALRCAACGCHRNFHRKESESPTGVGPAEPSAVSPAAISAYGASPHHQFSPYYRTPAGYLHHQQHQMAAAAAAAAAAAAGGYPQRPLALPSTSHSGRDEGDDMSGMVGPMVIGPMVGMSLGSAGPSGSGSGKKRFRTKFTQEQKDKMLAFAERLGWRIQKHDEAAVQQFCEEVCVKRHVLKVWMHNNKHTLGKKAP

SEQ ID NO: 40628 - protein, 2 aa, Oryza sativa
MA

SEQ ID NO: 40629 - protein, 186 aa, Oryza sativa
MPAASSPLPLPLLLLLLLAVAGAGAAGAGAGVGVSGGGQLWCVAKNNADDAALQAAVDWACGPAGGADCRAIQQGGACYDPPDLLAHASYAFNDYFLRAGGAPAAPAACDFSGAAALTALNPSHGSCVFPSSTSPKNGSFTGTTTYGPAGADLSKSSSRQLNFWSLLLCICLSVAFFDAFPSDTFS

SEQ ID NO: 40630 - protein, 153 aa, Oryza sativa
MAAAAAVVNYPLVAALVAFALAQSSKFFTTWFKEKRWDARQLIASGGMPSSHSATVTALAVAIGIQEGYRSATFATSVIIACVVMRDAFGVRLHAGKQAEVLNQIVYELPEEHPLSETKPLREILGHTVPQVVAGCIIGILIAVVMRLALWSS

SEQ ID NO: 40631 - protein, 100 aa, Oryza sativa
MNCAASRRRVCSACHRRSAPTTAVARSRAASRQRAHSAPSNAVARTGRAISRRRERSAWPSPLRPCEDERRASPLRGRPGADGRRREEGGETRAGTRLLR

SEQ ID NO: 40632 - protein, 427 aa, Oryza sativa
MAMRGDPKQRRASASAPHGGAAHHVADKLRRHSTFLLLLLLLWFALSLYLFLSATPPPPRPAFLPSTSTPRPALRIYVYDLPARFNRHWVAADARCATHLFAAEVALHEALLAYAGRAARPDDATLFFVPVYVSCNFSTDNGFPSLSHARALLADAVDLVRAQMPYWNRSAGADHVFVASHDFGACFHPMEDVAIADGIPEFLKRSILLQTFGVQGTHVCQEADHVVIPPHVPPEVALELPEPEKAQRDIFAFFRGKMEVHPKNISGRFYSKKVRTELLQKYGRNRKFYLKRKRYGNYRSEMARSLFCLCPLGWAPWSPRLVESVLLGCIPVIIADDIRLPFPSVLQWLDISLQVAEKDVASLEMVLDHVVATNLTVIQKNLWDPVKRKALVFNRPMEEGDATWQVLRELEILLDRSQRRHVESWKR

SEQ ID NO: 40633 - protein, 159 aa, Oryza sativa
MNEYKAVAAAAADDDHNAAGVAVQLPPMAPPPSSSACVRLRNELSVCRVYVSTGTLRSFDRRPLDAPPVISHHQPQLQQQQRQLPSSAAAAATNGNLIALAGGYECSHDSSGGSSEDAAIDWSSLITAATDSATAAVDFSFNDDIDFSPAAVGPWAPQL

SEQ ID NO: 40634 - protein, 30 aa, Oryza sativa
MCGACSSAMAAKVYHNILNDRSEKQSVLKW

SEQ ID NO: 40635 - protein, 459 aa, Oryza sativa
MAGGLRLDPAVASPARLLLDVPKTPSPSKTTYSDRFIPCRSSSRLHNLALLDRDRASPSSTTDDAPYSRLLRAEIFGPDSPSPAPSSPNTNLFRFKTDHPSPKSPFAASAAATAGHYDCTAGSAESSTPRKPPRKVPKTPHKVLDAPSLQDDFYLNLVDWSSQNTLAVGLGNCVYLWSASNCKVTKLCDLGPRDSVCAVHWTREGSYLAIGTSLGDVQIWDSSRCKRIRNMGGHQTRTGVLAWSSRILSSGSRDKNILQHDIRVPSDYISKFSGHRSEVCGLKWSHDDRELASGGNDNQLLVWNQRSQQPILRLTEHTAAVKAIAWSPHQQGLLASGGGTADRCIRFWNTVNGNMLNSVDTGSQVCNLAWCKNVNELVSTHGYSQNQIMVWKYPSMSKVATLTGHTLRVLYLAMSPDGQTIVTGAGDETLRFWNIFPSMKTQAPVRDIGLWSFSRSHIR

SEQ ID NO: 40636 - protein, 74 aa, Oryza sativa
MPHPRSHRAASALRRTRGPSPFSALRRGRLPTHASRSLRRRPHCSRASAPRADLLRGAPPPIATIYSAPPPSLP

SEQ ID NO: 40637 - protein, 519 aa, Oryza sativa
MVILKHFLIPINQDTPISMEVIPILKVHLVTPFLTLCSKDVYHGRLIISLKHRPILQVLGQNLPGLNTDRALWSHWCPCIKEIKRPLAVAQQEAACVEANPVLVVVDHLIPAVHDEVVGAVPLPWQLECHVGEHGVGVHPPEELDLRVREEQRAEERELGPESGHLGVEQRHVVEDLEAVDAAVVHLVLDGLEEVVVADGVLARLGRGARDEQHPRLDVVDEGRRLRVAAVPRGPLLVPVGDLGAQRVGRVPERPRRRVRLVVPLGRAPGGGRRAAAPRQRVVVLRQRAVRVRDEAVAELDEVLLRRAELARPDGAAEHDDGEQQAHYGELRVPREPLDLPHPPLPHHPLRHPHFAPLPLLPLPPIPPHRSNKQINKQTLLPQPKSSKSKMQARNHRYTASTATAAASAARSGGGGGGGGGRSRGGFEPRSWRRINKRKGEAEWCRDPRASEARTLASESGLRWLSERSGGGMEGEIWGDAKSESKSNQPPDPAAARRRKEEEKEKAEGEGGGGKRGGE

SEQ ID NO: 40638 - protein, 255 aa, Oryza sativa; identical to SEQ ID NO: 38067

SEQ ID NO: 40639 - protein, 607 aa, Oryza sativa
MASAAAPKRCYYEVLGVPRDCSPADIKLAFRRLALSLHPDKQPPGSDVAAATAAFQELQHAHSVLSDPHERSYYDSHRSQILFSDHHPSSGPGRGGGVASASASPVPDLFAFFSSSAFSGFSDSGRGFYKVYGDVFDRVFAQELAYARRMGMPADAVPTPPVIGNLDSPHAQVAAFYSYWLGFGTAMDFGWAAEWDAARGESRRVRRLMEEDNKKATRKARREYNDAVRGLAAFCKKRDKRVVDMALKKKVEEEKRKAEEAARKKEEERRRKERAMAYQEPEWARVDEDEAAVFEDDEEEETRAKRKEELYCVACDKKFKSDKQWKNHEQSKKHRDKVSELRMVFEEEEEALKDAEEEEPEEVDVGFDFQPAQESEESEFSDAAEELADELSEGLEVRDEEEKGDKHLGNGEQKVGSYDETSVLEEMLSRSRRKNRKSGFVAPQEEASPAGAMDDDDDEDTSYEINNVKKKGRRRRAAKKGGTYADNGQGRKSENQPEESRHNNDENGADDKMEGPSSNEDSAAASKEDQQKGKTGNTKKNKKGTEKNTTISSEQKGTSKGKKQKEVSKAPSNDCETCGSTFDSRNKLFSHLEETGHAMLKTRQKNR

SEQ ID NO: 40640 - protein, 190 aa, Oryza sativa
MDAAGVAAKPSLSRKPSPSFRLRNGSLNALRLRRVFDLFDRNGDGEITLDEMASALDALGLGADRAGLEATVGGYIPAGAAGLRFGDFEALHRALGDALFGPVEEEEPGKQGEDDDEGDMKEAFRVFDEDGDGFISAAELQAVLKKLGLPEARNLATVQEMICNVDRDCDGRVDFGEFKCMMQGITVWGA

SEQ ID NO: 40641 - protein, 153 aa, Oryza sativa
MTWRSSTSAPSAPTCRPPSRTTSRRRSSTGSAASRLSSPRTSWTDSTMASASRRCGRSSTTCSPSPPTMAAASIAPSGRHTSSPTSSSPSASSRSSTPRMTTSGSTITTSSPSRPSFAVGSTGSASVSSCTARSLRRNSTVPSLFATRSSNHC

SEQ ID NO: 40642 - protein, 192 aa, Oryza sativa
MVAGALGYMARAADGGRAAELVTRDFLGGCVAADDARDAAAAAAATARHDSVSGKLSLQKQTCPATPTDLNLFPVPGAAASAAKPCPSSTAAAASGAGGTTTTTTTYHSVCTIEKVKTALERFERGKHQHHQHQQHSAGASPSSSSVTTSSVKRRRRRRSPGSTSTWGSSAPSFPTLPSPASPRWTHVTSHS

SEQ ID NO: 40643 - protein, 490 aa, Oryza sativa
MTSQSVRVVNVTHVLPGGASAAAPPHAGGGDVDVIELSFLDTMFFALTPLKRLFFYEAAEPSFPAMVSSLQSSLAATLAVFAPLAGKLAYRPSHDDVVIDCSVAAVSPGVVFIEAEYHDDDDAVVDMRRLAGDEEHHTEAFKRLVPEMDVGRLPAPLLSVQVTRPAAAAAGGSGGVVAVGVSIHHVVGDGQAVWQFMRAWSTASREGSPAAAAAATIPVVFDRKPVLRHPNDEEIARVFLRVFAPALPLVDCSLFPEPDVTRQWRKTYLLRPHQIQSLKQRMLAKTKEQLMLMAAPTTHVAVLSLYWTSLVRAKFTSTGGGGAGDGDVYFMIPGDLRRRLRPPVGDGYFGNCVKPCYASAAVGDLRGGNGLVHAAAAFQSAIRGSLECDDPLADDVERWSELERKVPKERIAQASASHRFMAYETDFGWGAPRRVELVSVYRMDVVALVAAPPAAGGGVQVSVALDRAHMEAFDSYFLQNSDTKSDSPSI

SEQ ID NO: 40644 - protein, 867 aa, Oryza sativa
MALFDRNQKQRSSLCSTATVVVFVALCLVGLWMISSPETIPAAAANVSKKPDVVAVKEEDSSLDATNNVKQNSANVVAETAAADEAAAADEDDNPAKPAAGEKAAAAAASSKDQTFDDENGRTEGGALVKPESGGGDEAASDVKEIGSLEQAAIDMKDTTEHSVGDTTKEPGVVQDKSSEEITMAASDARESSDGGGGGGAAKNKQTFDDENGKLDGVNLVKDVENKTMSEEGAKPLPEETTTVSSKNSIVAAAAMSDEKLTDNNGEQAQPVEALPNGQAELLTERAAQNGSFTTQAAESIKEKKKRAEKKKKKKKKVKAASVAAAAEEEGGGGGAASLGWRLCNTSAGADYIPCLDNEAAIKKLKTTAHYEHRERHCPASPPTCLVPSPEGYRDPIRWPRSRDKIWYHNVPHSELAAYKGHQNWVKVSGEYLTFPGGGTQFKHGALHYIELIQSSFPEVAWGRRSRVALDVGCGVASFGGYLFDHDVLTMSLAPKDEHEAQVQFALERGIPAISAVMGTRRLPFPSNVFDAVHCARCRVPWHIEGGMLLLELNRLLRPGGFFVWSATPVYQELPEDVEIWGEMVKLTKAMCWEMVSKTSDTMDQVGLVTFRKPADNACYMKRRQKEPPLCEPSDDPNAAWNITLRACMHWVPTDPSVRGSWWPERWPERMEKTPYWLNSSQVGVYGKPAPEDFVADQEHWRKVVRNSYLTGMGIDWKTVRNVMDMRAVYGGFAAALRDMSVWVMNVVTINSPDTLPVIYERGLFGIYHDWCESFSTYPRSYDLLHADHLFSKLKSRCEVLPVIVEVDRILRPNGKLIVRDDKETVDEIKGVVRSLQWEVRMTVSKNREAMLCARKTTWRPTEAEAR

SEQ ID NO: 40645 - protein, 166 aa, Oryza sativa
MDGSGGKWVRSGSRRQRSGRERRRRPLPARDLETAPLSCPDPAIEALNLEAAAATWPGTVVGSGSAASGSGGTALHSPGGGRPRSLRSGAPPRPDLATTTTSCDAARVLTFYFFCNIYFSFLFFVFMCGCTTRRKKNWIFTDSSGQTGQRSTCENHFCPHGKNVFL

SEQ ID NO: 40646 - protein, 520 aa, Oryza sativa
MAAAEAEAGRRTLALVNMAAIMERADEALLPAVYREVGAALHATPMGLGALTLCRSFVQAACYPLAAYAAVRYNRAHVVAAGAFLWAAATFLVAVSDTFAQVAVARGLNGVGLALVTPAIQSLVADCSDDTTRGSAFGWLQLTGNIGSVIGGLFSLMLASTTIMGVAGWRVAFHIVALISVIVGALVRLFAVDPHFCSNIQDDGGGDQLPPRKSPLEEMKDLVVEARAVVRIPSFQIIVAQGVTGSFPWSALSFAPMWLELMGFTHEMTGLLTTSFALASSLGGLLGGKMGDRLAVRYPDSGRIVLSQISSASAIPLAALLLLALPDDSSSGFLHGFVMFIMGLSISWNGPATNNPIFAEIVPERSRTSIYALDRSFESVLASFAPPIVGFLAEHAYGYNPVSYGAGSSSDRENAAALAKALYTAIAIPMLLCCFIYSLLYGTYPRDRERARMDTLIASELQQIELERCHRAGIGSRRSKDGTVIDVEYGEEESGDVVDDDDDEKALMRYHVEQCGSVGR

SEQ ID NO: 40647 - protein, 297 aa, Oryza sativa
MTTSMEKPRQVVRKFLARPQHEGVGAVVRRSIGRFELRYFDPFLVLDEFSVSAPAGFPDHPHRGFETVTYMLEGAVTHEDFEGHRGTIKAGDVQWMTAGRGIVHSEMPAGPGTSRGLQLWVNLSSHNKMIEPGYQEIQSKDIASTTSDGVTVRVIAGQSMGARSPVRTRTPTMYLDFTVRPHAAARQPVCATWNAFAYVLEGEGVFGGGGGDKAGAHHLLLLGQGDGVEVWNRSDKPLRFLLIAGEPIGEPVAQLGPFVMNTEEEIDMTINDFEFSINGFEKAKHWKSQALVALGLE

SEQ ID NO: 40648 - protein, 184 aa, Oryza sativa
MLLVRSHHLLLHRHHHAARLSPRLHRLLLRHPPPLPRAASAASRLRPPRMSLASSSNASSPAPSPPPPVVPKSKIRFCPSCGSPTKLAIPDGDEKMRAVCSSCGRVHYENPKMVVGCLVEHDNKVLLCRRKIEPAYGLWTLPAGYLEVGESAAEGASRETLEEACADVEILSPFAQLDIPLIGQ

SEQ ID NO: 40649 - protein, 263 aa, Oryza sativa
MKLSLISDGDIPDSQDDQGSGGRADGRQVLERGGGGGKRRRRVFLEEEDEDENAMKVDEEAVILSCARGGPAGVSTAKIDGCIDKQDGQGSSKQRKKSCSTVMKLQFREIGLHCSLRTCGISRFVPTPSTFSHEVFSKIKNNKVVFDIYRCKDVIRHLERPIRKRSAVLQILPLKDLVAVVLCSGLSFLLSRVTNKMISILNRYDDEIIVSIFYNKEDKSVITTSSRLFDGCMSRQVTSTPLECIRSNKQNNGQQIFESENIK

SEQ ID NO: 40650 - protein, 347 aa, Oryza sativa
MAAMVRRRPSPAVTTMPVVLVVVVFVGVVVGGASASAGPLKAHYYRHVCPAAEAVVRDIVTARVAADPAALPAKLLRLFFHDCFVRGCDASVLIDTVAGSGAAAAAEKDAAPNGSLGGYDVIDTAKAVLEAVCPGVVSCADIVALAARDAVSYQFGRDLWDVQLGRRDGVVSLASEALANLPAPSDNFTTLESNFAGKGLDVKDLVILSGAHTIGVGHCNLFGARLFNFTGAAAPSADPSLNAAYAAQLRAACGSPSNNATAVPMDPGSPARFDAHYFVNLKLGRGLFASDAALLADRRAAALVHGLTDQDYFLREFKNAVRKMGRVGVLTGDQGEIRKNCRAVNGK

SEQ ID NO: 40651 - protein, 192 aa, Oryza sativa
MLHVQEEGWVVCRVFKKRVAAVQRAAGDGGDSPFWFNEHVAFMAPAPGLDSPYHGHRQSHPCKLEVEYHHHLLPQEAAPFMHLPRLESPKLPAADIIVATAASSALQPCGHTTAQQLQLQIEPVYVTADASAADWRDLDKLVASQFGHGDSTAKEPSYCNPVQVFQVEGKQEDSLDYVSTSASCGGEEDLWK

SEQ ID NO: 40652 - protein, 443 aa, Oryza sativa
MATTLAFTVKRSAPELVAPSRATPRELRPLSDIDDQDGLRFYRSGLHFFRGRGGGGADPAAVVRRGLADALVHYYPVAGRISEVEAPARKLVVDCTGDGVVFVEADADVSLSDFGDVLCPPFPCYQELLCEPDGNCAAVVGRPLLFIQVTRLRCGGFVFGLQICHNIADAAGTVQLLRAIGEMSRGMPAPTVPPVWARELLMARSPPVVTHRHPEYDETAAGGNHDVLAHHEPLVQRAFFFGPKEMSALRELAAPAGAAAGKRISRFDMLAAFLWQRRAAALEYDDDDEVRVMFVVNARGRSPPLPAGFYGNAFAFAVAACTAGRLRDSPLADVVGMVAGAKARATSEGNLQSVADLMAQRGRPRFGRAARAYLVSDVTRAGFEGVDFGWGEGAYGGPAAATLATFHLTVKDASGEEVIAVPMCLPAPAMERLELDVQMSLNH

SEQ ID NO: 40653 - protein, 306 aa, Oryza sativa
MYTKNIISALSALIVLGNAVPLNNGKRDLVWVTEIETAIETIGVTTTVWVDPTPTAEAHNHHRHKHSSASSQAAIEVKPTPSPASSEAPVEPSSYEAPAPYVAPTTSSAPEPATTAQAQQTSSTPEPEPVTQAAVTPESSYVAPVSSYEAPSSTYVAPVSSYEAPSSTYEAPAASSAPASYSSGSSSSGDNPAAGKSFTGEMTYFTPGMGACGHDSTENDEIVAISKDLFDQYTPNGNPNKNPLCGQTVSITSADGTTRKATIWDRCVGCAEGDLDMPQAFFNTVTKNKAGVIADGRAYGMSWSIN

SEQ ID NO: 40654 - protein, 51 aa, Oryza sativa
MIDMIKRGGEVKLAPRRRGCAALAFFRVRLFSLFFFASDFFCYDENHSILY

SEQ ID NO: 40655 - protein, 673 aa, Oryza sativa
MYRWLFWISYINPLYFAFSGVMMNEFKDLSLACVGTYIVPRNPPGSNAYPNDVGANQVCTLPGAQPGNQFVAGNDYLRASFGYDSSDLWLYFGVVVIFFVGLVAVTMIAIEVFSHGSFSSALTIVKKPNKEEQKLNQRLKERASMKEKDASKQLDVESQPITWEKIRYTVPVKGGKLQLLDDVYGYCRPGTLTALMGASGAGKTTLLDVLADRKSIGVISGERLIGGKKIGIDFQRGCGYAEQQDIHEGTSTVREALRFSAYLRQPQHVPKEDKDAYVEDIIELLEMQEIADAMIGVPEFGLGVGDRKRVTIGVELAARPDLLLFLDEPTSGLDGQTAYNVVRFLKKLSASGQAILCTIHQPNALLFEQFDRLLLLERGGKTVYFGPIGPNATHIVDYFAERGAKCPEKVNMAEYMLDAMGAGSMKRVGNKPWSQLYLESELFQENLAEIEKIKQETNASTKANEDEGNKKKQTEFATSFGTQVKVVLKRSLLSTWRQPDYQFTRLFQHAAISLITGLCFLNLSNSVASLQYRVFGIFMGTVLPAIILAQIEPFFIMARSVFIREDSSKMYSGSVFAITQLIQEVPFSIASSVVYFLLFYYPTGFQTGSDRAGYFFAMLLVTELFAVTLGQAVAAISPSVYIASLFNPFLIIIMSLLCGVTIPYPNLPHFFKS

SEQ ID NO: 40656 - protein, 327 aa, Oryza sativa
MCSFGGRILPRPGDHQLRYVGGETRIVSVPRAATFDALVAALAKVAPALFPAGGPSPALRYQLPQDDLDALISITSDDDVDNLIEEIDRFQGLAAASIKPPRLRLFLFASSPADHASAAAFGSVLSGAGGDSSSDQWFVDALNAPAPAPIERGRSEASSIISEVPDYLFGLDTTSDEPSPGPGGARPKVDTEMAHVEDDAPVLSRGTPPAPYVTESAPWPAPPPPYMTQQVYYVPVRPVHYLDPSSQGGYMPGPVYHIVGGGGSEARGDLYSTGGSVSAAAGVGGVYGVPHPMQPFPPMMYGHAPPPGAVVYSSEGKPPMEGGAHAS

SEQ ID NO: 40657 - protein, 402 aa, Oryza sativa
MAPTTTMGSALYPLGEMRRSQRADGLAAVLAIGTANPPNCVTQEEIPDFYFRVTNSDHLTALKDKFKRICQEMGVQRRYLHHTEEMLSAHPEFVDRDAPSLDARLDIAADAVPELAAEAAKKAIAEWGRPAADITHLVVTTNSGAHVPGVDFRLVPLLGLRPSVRRTMLHLNGCFAGCAALRLAKDLAENSRGARVLVVAAELTLMYFTGPDEGCFRTLLVQGLFGDGAAAVIVGADADDVERPLFEIVSAAQTIIPESDHALNMRFTERRLDGVLGRQVPGLIGDNVERCLLDMFGPLLGGDGGGGWNDLFWAVHPGSSTIMDQVDAALGLEPGKLAASRRVLSDYGNMSGATVIFALDELRRQRKEAAAAGEWPELGVMMAFGPGMTVDAMLLHATSHVN

SEQ ID NO: 40658 - protein, 163 aa, Oryza sativa
MAHEKPIRFTPRQLAGFTRGYSARLGAGGFGTVYGGALPNGLGVAVKVLRSGMGRRSEEQFMAEVGTIGRTHHINLVRLFGFCFDAAVRTLVYEFMGDGALDAYLFDRTRAVGDSDGLRSPPSSSLWAEAAVSQNRRKPKSAAAATRRGGARGGSGRGRRGWR

SEQ ID NO: 40659 - protein, 531 aa, Oryza sativa
MSLKKALSTLKPRSGSNSAAGSDNESPAPSGHHKDHKDHDHHTSRSGTGLSSLSNGIGNLSFGRHSTDSGRRSMDVGSPSPSRASKEHHRASHSPLGFLRRKTRLGSDDSHSSTEDLPLNREGEPLSRNQQRKHERQAEKEKHRKEAEARMEADRKRKEEMERKAAEEETEEQKSKYGTLPVNYYAGQLKHEEHVDLRQLTASDVGKVVLFRARLHNIRKLSAHLMFVELRQQTHTIQGILHEHGSVSQHFLYWAEHLHVESIVRVRAVVQEPKAKQGEIIGVSIHNLEVHIHEMHVEGTPTEPLPFTVHEAEVSKSETQAEGDTRHRVSDRARQNNRIIDLRTTTSQGIFRVQSGVCQAFRAHLHSLGFLEIHTPKLQGAASESGASVFKVDYFGRPAFLAQSPQLGKQMCIAADMKRVFEIGPVFRAENSNTHRHLTEFTGLDLEMAIDEHYHEVLRTLDSTFKAIFKFVYENYKEEIEVVKRQFPHEDLVWLDETPVIPFAEGIRMLNASGYRDENGNELSENEDMGT

SEQ ID NO: 40660 - protein, 207 aa, Oryza sativa
MGARSTAIGGDGGVALPVAPLSSKAAAAPPEYEMPSMKEWLVSRVLALDFLRPRRRARGRRAPLLPRGAPGAARIRPPPLHRRPVLLPAPPRLLPPQERLRRRRPCPHRLMSMAALHHHHSHQIKAPTPTWLIVKAIPPPRDGAKKLAAAAYSPLLLSPSVWQRAQQASVWQASAVAAGERVAGERGGGGCCWCPVAAQLRWRPPPA

SEQ ID NO: 40661 - protein, 62 aa, Oryza sativa
MRIKPWKIQKLDIDEHESFNMSNNIEIDLQGNSSQYLIHLFVPFFFVNCACHCKHIVESFEQ

SEQ ID NO: 40662 - protein, 59 aa, Oryza sativa
MCLLRSNLLFFDLIKSSLSMVDMFPRGSYYKSCCFVDHVCIDLFQVTTWLFVDLLCYQM

SEQ ID NO: 40663 - protein, 74 aa, Oryza sativa
MPRALIALASAVLLLVAAVAPPLAAADDGGAGVPGEGKLESAGSAIKSAAANAFGVGSDIGGVPVNPSPGGANA

SEQ ID NO: 40664 - protein, 255 aa, Oryza sativa
MWLPWVKTRPSSPSSAAASPSPSTALAAAAASPRLSFSSPSLKDLQALLLSDHSPSPTPPQLPPNTAPCSPSVRVFHRVRVAASALRALRTLQAPHAAVAEADRRVVLYFTSLHVVRSTYEDCRAVRAILRGLRASVDERDLAMDPRYLQELGALLPRARGVTLPQVFVGGRHLGGAEEVRRLHESGELRRVVAGAGATAFAACSRCGGERYVLCGSCNGSHKRYSLKGGGGFRTCAGCNENGLVRCPDCSPPAV

SEQ ID NO: 40665 - protein, 624 aa, Oryza sativa
MNRAARSRSPEDASVAAARKLHLLLRSRDLRPALSYLRTLPSPLTLLPNHALNALLRALAAAGRVRAAAALFRRIPSPTPHSFNSLLAALLRRGRRRAASALFAALLRSPSASPDAATLNTLLHGLSTASPHPSTPALLRLFRFLPDTYAFAPDAISYNSLLSALCRAGDVLTARKLFDGMRVGGEEGRGAVFPNVITYTTVIKAYCAKRLVNEALAIFKLMVADGVAPNRITYNTMVQGFCDAGRMELVKEVLEMDSFRPDTCTFNTLVAVHCREGRIEDAMKVFNQMVELRVRRDSASYSMVIRVLCENGEFGQAEELVDELLEKEVLKKRGGCTPLIAAYNPVFVYLCEHGKTKKARMLFGQLLDRRSKVDVPAFKTLILGHCREGDFEEGYALLLSMLKRDLVPDDECYIAVIEGFSQRGRMKFAWEALHRMLNSGLRPSTSTFHSVLLGLLNKDGCAKEAADLIEIMLERKIRQNVDLSTNLVDTLFRNNLNDRAYKIVTSLYDHGYYIKMEKLIANLCEEKKFIEAADFTLFSLEKSQNFGVAIPSMVLDGLCMTGRASEAFRLFYELIENRSALASVAAPRSLVALHHALEESGKMKEADFIARQMRRASARIRERM

SEQ ID NO: 40666 - protein, 337 aa, Oryza sativa
MSGPGGGGHGLYEDHPAAAGFLPFDHDDDVVASFSFGRSAASGGGAGAGAGAGDDDGVGLITPYSSITDYLQGFLQDPVYASSPLGGDAAVKHETVVDHPSQAGGVAAAPATPNSSVLSSSSEAAGGDDLRRCKKGRRPEDEEEEEIDDEGSAVQSCKTNKMKNKKGAKKEREPRVAFMTKSVVDHLEDGYRWRKYGQKAVKNSSYPRSYYRCTAPRCGVKKRVERSEQDPSMVITTYEGQHTHPSPVSYHMHRQQGLMHVSARGVMPGAAGAYQFGAPPPPLLGFDEALAARVRMTMNQQQQQQQLGFVPSIHAAAARPTMPPLHLYTAQQDLFLP

SEQ ID NO: 40667 - protein, 558 aa, Oryza sativa
MPSKIALSISVLTAALGMVNAAPHYGAEYSYYNGGHNVESTNENKLVDASDLGLNIDILKRTDYSACKKYISSYNGGHNVYSVNENKLIDLSDATVNLSLLSSNGRKQKTWKNAPAYCLEYIKSYNGGHNVIVKNENKLVDLSGLLANIGILSKRNAPEFSYYDAGHNVVSDNENKLIDASDLLADVDILKRKAPAYSVYNGGHNVVSDNENKLIDLSNLFANVDVLKKRKAPEFSYYNGGHNVESTNENKLLDLSDLLANIDILKKRNAPEFSYYNGGHNVASSSENKLIDVSHLTALVDVLSKRHEPKVQYYNGGHNVESTNENKLIDLSDLTALVNVLSKRSLKGYGAQIHARDIAEDLYRRGNDDEDCTCVKKPKPTPPKQTTTTPPKDDCPPPPPAQTVTKTRHHQHTQTPQPKPTDKPTPKPTDKPEPSPPAPSPKPTDKPTPKPEPHHDQPTPKPQCGGDEVYINEGHNVVSTNENKLLDLSNISINIGLLTDLFGGKKTQKVAADSVCKAKEGCCVPKSVYYYNGGHNVESTNENKGIDLSGLNLGLNIL

SEQ ID NO: 40668 - protein, 82 aa, Oryza sativa
MPQCMCVVLDWDTSGLRNSEESRGFKDKWQIGLHVNPPPPPLSLPKKKRVSLHQFKYLSPKYCFFHCSGHLQIANLHESSIR

SEQ ID NO: 40669 - protein, 210 aa, Oryza sativa
MARFGAVIHRVFLPLLLLLVVLGACHVTPAAAAAGARLSALAKALVVEASPRAGQVLHAGEDAITVTWSLNATAAAAAAGADAGYKAVKVTLCYAPASQVGRGWRKAHDDLSKDKACQFKIAQQPYDGAGKFEYTVARDVPTASYYVRAYALDASGARVAYGETAPSASFAVAGITGVTASIEVAAGVLSAFSVAALAVFLVLENKKKNK

SEQ ID NO: 40670 - protein, 122 aa, Oryza sativa
MCCYVGKATKIFLCLAAALIVVGLVLGFGLAHRTWGERKVQPDCRWPDCQLQPAYGGGGGGGDPLPATSGAGDTPPGVPLTEPAVAAFPGVASASSAAPPTASMPYLGPPSPFAVGLAPAHG

SEQ ID NO: 40671 - protein, 88 aa, Oryza sativa
MPPPMRPPQMPIPFQRPPGVPPAFPGGPPPPPGPFMRGPPPMGPPQVRPGMPGGPPPGMRPGMPPPPFRPGMPPPPPGPQQPGQNPPQ

SEQ ID NO: 40672 - protein, 48 aa, Oryza sativa
MHVMQCLYQMLIFDNDMNKLFWFPSSPSQSVAPVFILLQFISLCNSNT

SEQ ID NO: 40673 - protein, 32 aa, Oryza sativa
MASDEGCKISKIDGNCCRLQGARNHHIRHLSV

SEQ ID NO: 40674 - protein, 99 aa, Oryza sativa
MAALKMNRMAVAALFLAAVVVAGGAGASAHVGVGAGAGADAGVGAAVGAGADAALGVGAGAAGAAGAGVGAGIGAAANVAGSLTGAAEGAAGVAPKVHV

SEQ ID NO: 40675 - protein, 78 aa, Oryza sativa
MASNPSSSAAGGGGDHGGARLEDLALDKVAEAADAVAAASSAGEVVRAIHAVAAIVFPVDSATVAGTVDEPFRSQGSR

SEQ ID NO: 40676 - protein, 188 aa, Oryza sativa
MADHIVDGGGGGGCSFGEFLELGHSVYSLPLPPPPSQPVVVAGGNNDQYGVSSSSSAAATTSRIGFRTRSEVEVLDDGFKWRKYGKKAVKSSPNPRNYYRCSAAGCGVKKRVERDGDDPRYVVTTYDGVHNHATPGCVGGGGHLPYPTSAAPPWSVPAAAASPPPAHAQAWGAPLHAAAAAHSSESSF

SEQ ID NO: 40677 - protein, 367 aa, Oryza sativa
MAAMAAAAVPSDRPPLPWRARLLVGAVSVLHSASLRRDGTVNRFLLSLFDRVVPPNPAPDAAGVASSDHAVSDDLRVRMFFPGAAARDGGGDHLPVVVYFHGGGFVFHSVASAQFDALCRRFASAIPAVVASVDFRLAPEHGFPAPYDDGKAALRWVLAGAGGALPSPPATVFVAGDSAGGNVAHHVVARTPSSVSGLIALQPFFAGETPTASEQRLRDAPFGSPERISWLWRAFLPPGATRDHEAANVPAALRRDAERRRAFPPTMVCVGGWDAHQDRQRDYADALRAAGGAEEVVVAEFPDAIHAFYIFDDLADSKRLLTEVTAFVNRRRLLVLHILELAVADITVCFTVSLARLHSHNFSFDLI

SEQ ID NO: 40678 - protein, 143 aa, Oryza sativa
MFSCLHPRRPGAGRPLPNSTPPDNLHPCRPPLHRVQLLRYLHARGEMTPTAEVDAHPPPSFCCASILIEDSGGLCWARVVGRQRGGGSSGWRAVAEAAWGAEDSSRWRQARAGYGGSSGWARWWREVAKAARGGQMAAGWRRG

SEQ ID NO: 40679 - protein, 107 aa, Oryza sativa
MRSRRHRLVEDEVELKLYIRRRLVELEFLIPKQLEFHRRARTWRRWSYGAPGAGRRGRPLSSCSPAVGTEGKAGDVLELRRRNESPAPRPPISCSAPPLLSVWEEEG

SEQ ID NO: 40680 - protein, 436 aa, Oryza sativa
MSGDQGFMAFRRIRGDEQEEDRDDGGWPEAKRKRQTVPSFISVMRGAMAAEKIQKLGLDLEPFFRKAVQEELERSLSKHGHLLYRSPPMLVNSVDSSLKLAFAKRLQLPIFTNNKLVDVDNNPLQVHLLHMSSTTTSHHHLPMIKKLEVLVLDGDFSHGDEGWSSDEFSGAIVREREGRRPLLVGTLNVAMADDHLGVAFIDDVAFTDNSSWTRSRRFRIGVRAVAVAGSGDGGELRIREAVSESFMVKDHRGESYKKHFPPRPDDEVWRLKNIRKDGPIHKRLESERVRNVQGFLNLHATNPEKLRKLVVMSDRLWKATLHHAKTCDFRAAEMMQVKQSSIEAYQNWDQLDEAETNKTASGNLGQAHEGSLQADEIGTVSGPHFQSRNQMDSEDSLSAAAVTEDADDALWSPCMTSDGHGLIMWKNNTSVWDQTN

SEQ ID NO: 40681 - protein, 183 aa, Oryza sativa
MFACVDDDLLANVPKISRQELAEACEDFSNIIGSTHDTVVYKGTMKDGSEIAVVSLSASVHYWTSYVELYFQKEVVEMARLSHENVAKMVGYSKESDPFSRMLVFQYPPNGTLYEHLHDGEGYQLSWPRRMKIALSIARALRYLHTEMQPPFAVAALTSSSVYLTEDFSPKVRLICLCLVTWQ

SEQ ID NO: 40682 - protein, 61 aa, Oryza sativa
MILTLSHITCLFEFFLSMFDHSSHSKNFGIIIYFVCHLLYYQKYFTYDLSFFIFVLIFQIK

SEQ ID NO: 40683 - protein, 465 aa, Oryza sativa
MDDDGETPMPSLELHKLPTLAGAAIPNPIARHPLYHPSPSFFISPTDVVLRDILFDASPASAAGERRRRHVAAYHRAGPRREVAFDPATVRAAIFTCGGLCPGTNTVVRELVVGLSELYGVRGGVFGVRNGYRGFYSDEVVPLDPAAVEHWHKAGGAALGTSRGGFDLARIVDAIERHGFNQVYAVGGDGTMRGAARIHREVRRRGRLAVAVAGIPKTVDNDVGVVDRSFGFHTAVEAAQQAIAAGHVEAESAANGVGLVKLMGRSAGHIALHATLSSRDVDCCLIPEEDFYLRGAGGLFDFLYRRIKDNGHAVVVVAEGAGQRLIPRTTTTSASGACAGADESGNETFLDVGAWLKAEMRAWWEEEHAGEVFTVKYIDPTYMIRAVPANAGDNLYCTLLAHAAIHGAMAGYTGFVSGTINGNYAYIPMDEVAEAKNPVDTKDHKWAWVRSITNQPDFIRAGPTS

SEQ ID NO: 40684 - protein, 269 aa, Oryza sativa
MVEGLPAELPIVDVAARLDGKSSELPENGALLKGAEESQDLGGNPVAVLTLHEGKEVILVDDNDSEQEDGGSGKVDENAPRVGLRFKTYDDALKYYKQYAADSGFSAIILKSSYLKSGVCRRLVLGCSRAGRGRANACYLSRESTKINCPARISLKLRQDRWLHIDDAKLDHNHPPNQSSVSHMNCYKKLTDAKNEETASRSKGRRNVPIGDKEQGSFTEIGRLKFGEGDDEYIHKFFGSMQNKNPNFFYLVDLDKQGRLRNLFWSHGC

SEQ ID NO: 40685 - protein, 70 aa, Oryza sativa
MMKNRKTIPPTNSVLSSFLLRFPSVLPIFQAIDRSLNSGELRQRIWVVTRRSTGSHLSTFLPSGSPRRRR

SEQ ID NO: 40686 - protein, 62 aa, Oryza sativa
MQFLMHKLWFPTSLQQEAYIGFQPIPVIMFPTSLQQEAYIGFQPIPVIIVSKLHNCAHSTTS

SEQ ID NO: 40687 - protein, 237 aa, Oryza sativa
MMAQEHAYSLAVERLLNCEVPLRAQYIRVLFCEITRILNHLLALTTHAMDVGALTPFLWAFEEREKLLEFYERVSGARMHASFIRPGGVAQDLPLGLCRDIDSFTQQFASRIDELEEMLTGNRIWKQRLVDIGTVTAQQAKDWGFSGVMLRGSGVCWDLRRAAPYDVYDQLDFDVPVGTRGDCYDRYCIRIEEMRQSVRIIVQCLNQMPSGMIKADDRKLCPPSRSRMKLSMESCAV

SEQ ID NO: 40688 - protein, 288 aa, Oryza sativa
MRSPPCSSRATSSTATSPASSASSTPTKVDPDRWEFANEGFLRGKKELLKTIKRRRPPPSSPPSSSSSSSSSQHQQQPAAACLEVGQFGRDGVVNRLQRDKSVLIAEVVKLRQEQQTTRAQMQAMEERISAAEQKQQQMTVFLARAMKNPGFLQMLVDRQAGQHGARNRVLEDALSKKRRRPIEYLLTRNGETCAAGESAAMLAADGVAEPDGDTTPRGDGGGGGGGDTESFWMQLLSLGLEEKQREDGVAGGVQESNSGGADVDNDEEDDDDDVDVLVQSIYHLSPK

SEQ ID NO: 40689 - protein, 349 aa, Oryza sativa
MGRRARCLCLLLLLLLVVGGGFHVANAQASPAPPQTGTRAVNRAVSTVITVVIGVFFVLVFVCVIVNQCCDCDSSAGAGAGQGQSSAARRRRGLDPAAVAAIPVVPYAEVRKHRSGGGGALECAVCLTVFDDGDDLRLLPQCSHAFHPDCIDPWLEGHVTCPLCRANLEKQPAPSPPAVEFSSSPAAAAAAAEESRTPEAAAVRVEEVAEASDEEETRRREEEAVELESLRAVRRAARMPRSNSTGHSLCALPAPRAPGPGDGGDHERFTVRLPPHVREEVLKSRRLRHATSLVLGIRGSSREGSSRGGGGSWHGARRWPSFLARTVSWARGGVGADTSAKETPCRDAV

SEQ ID NO: 40690 - protein, 179 aa, Oryza sativa
MGIWCPAGTPPSLRNASWSCSWSSSMSGSPPKKGDGGPPPLAGLMSSSPRPTISSPAPLLMLLFLENTGGGAHEEGEDTESGEGAVPQRPEFCRESMKGEWAAAAAAATEVGVPGPDAGRRPSSFLALAMTVWSSASGPKARRIISFSPWSWMRRKPMILAAWSGSSAWIRENTTLVAS

SEQ ID NO: 40691 - protein, 777 aa, Oryza sativa
MAMVTARQFLASAAELGSGRRRCGGGGACDMREDGGVEALMQCQRVSDLLIAASFLSIPLELFYFATCADLSEVKCAVLHFCAFIVLCGATHLLAAFTHAHPHSAPLLRALTAAKVLAAVASSAAAVSLLTFIPKLLRIKVRESLLRDKASRLHRDLGLVRRREEATSRAVRELTGRIRASPPDAHAILRTTALQLADALGLHACAVWMPAAGRPHDLVLVHHLTSRPDDAADLLLEVGDACTVAADDPDVVDVMASKVAKVLGPDSALAMASSVGAAPAGAVAAIRIPILRVSIYDGGGTPEVTEASYAILVLLLPPHDAAGGWSSHDLEIVQVVADQAAVALSHAAVLEESRSMRDRFAEQHRALMQAKHRAAMATRAFSSIQSAMCHAMRRPVHSVVGLVSMLQHPEADTMRPEQRLAVDAIARTSNLLSALMDEVTVNRQHLSVQRKPFSLHALIKEAISVAGCLSHCGGAGFLHQPECALPEWVVGDERRVFHLLLDMVGTLLNRCNTGSGACRLSFSVRICNVGEERYSLDWIPMRPTFSGCNVCVKFKVGIGRSRSCAIERSLPCELPRRSAATTSSQMGHIFSGYFNKIVQMMNGNMWSASDSEGVGESVTLILQFKLQQGHVEASPPYIPHLNGLRVLLADDDAMNRGVTKKILERLGCQVMSAPSGAHCLSLLASAEASFQLVVLDLDDRAVPSAAMDRFEVALRIRELRNSCWLLIVIAVAAGVVATDDGGAVQELCQRAGINGLVQKPVTLPALGAQLCRVLQDN

SEQ ID NO: 40692 - protein, 289 aa, Oryza sativa
MRRRRRGCTWTTARRGSSTASATYRNVLAGKVLAIQLGSLGTDQRSGDEADGRGQRGEPVSPLLVGLPLDVSTHMHCLLLPLVLASRSPASPHLSPLADCLGNQQENAQRRCLPTRVWLRRCRLAQHADRVHRRRRRLPRPRRSSRLQRRRRRKCRRSRRRMLPSSRGCRRESRWRDASGPYAFVGAAGERRRRVRRGRQRGRGAQWWIVQSRGRGWRGHGHSRGPFSSFRRPTFHGGLDLRRRRRSGPRPHAAVTAPVPLPGLRRRWPPSHTRGEKERGENMIYVSPT

SEQ ID NO: 40693 - protein, 112 aa, Oryza sativa
MFFFFVGGVEQGAGRVLKEAARRCLRCGGAADLVETEKVLKLFFVPVKRWPGKDPAYLCRECGLLGPGSLGGGGGEAGTGPPLLPRDARCGACNRAVADPQFRFCPFCGSAL

SEQ ID NO: 40694 - protein, 331 aa, Oryza sativa
MELKRMGATVLHGIDAKRMKDHTNLKLRRFDRIIFNFPHAGFKGKEDDLHMINLHRELVWGFFQNARHLLRPYGEIHVSHKIGLPYDRWCIEHLAYESSLTMIAKVDFRKEDYPGYNQKRGDSAKCDQPFELGACCTFMFMRDLTRLKRARRNRINASSLGIQAQHDMPFHPRPLVPAYPQPHFPSQVNAAHRQVPPEHYPLGIAHGQEPGFLDNFGGIERYPYQRGAIGTVIGMPGTPSPMRGITRSSFPAPQEQPWRQERYIMDPEVRDDHYHFAREYPRNLQEYEMERQVMPGGTRLRYVDFLENRYEESVRRQEHLRRLIAEYGGYD

SEQ ID NO: 40695 - protein, 135 aa, Oryza sativa
MDTTQIDETSLSESPSWPRVSLQIKKIFFSWSLECQDDGDAGNPDRSFFHVSAQEPSRLGRCFPLPVPFSSWATASNCSNCHFWGPFRWVRAQGDPDMWAPLVVETLEQPIKISSKSNQHGNKGREMHGCSLICS

SEQ ID NO: 40696 - protein, 174 aa, Oryza sativa
MRMAIPLVEIEKGEIFLAAARAGSAHRQELAERQRRPAPRSAMGGSPTAHSFLLNFAPLLRFFFPFFSSFSRVSRSEGGGVPARRGVGARWPRPLRHLYLVSPHHGSSHGEEPHKSHTGEIDRVVSSCWLEIYYWLAGWFFGGKQSGSIQADNDAFIGKVRWMDRLGGGPPYLS

SEQ ID NO: 40697 - protein, 247 aa, Oryza sativa
MDALPDGVVQHILSQLSSARDVAACAGVSRGMRGCVPFLPALYFPRGAFDAAGGAAAADDAIGRMVEAAARLEELVIYCPFSAARLPRWLAARSASLRVLELRMDSAVSSGAGSGHLDCIGAVANLEELRLWGLTMTRAPAWGQLERLRVLEIVGAAVRDVAVNGAVGACPNLTDLAAPLVESLEIQGFCWISLQGGIRLKHLTIAKNTGTGSVYNIEIGKLPELEKLSLRGVQWSWGAISSVLQCA

SEQ ID NO: 40698 - protein, 378 aa, Oryza sativa
MARAVLTLTVLAFLCLVALGLSGRANANATAGRKMVGVYELKKGDFSIRVTNWGATIMSVILPDSKGNLADVVLGYDTVAEYVNGTAYFGGLIGRVANRIANARFTLDGKTYRLFRNDGNNSLHGGHRGFSKVIWTVKEHVAGGDSPRITLYYHSFDGEQGFPGDLDVFVTYELPRPYVLAVRMNATARGKATPVNLAHHAYWNLAGEGSGAASVLAETVRIHASRYTPVDAATLIPTGRVAPVAGTPYDFLAGAPVGARIVGAAVPGGAVSGYDTNYAVDGAAADGERRRLRPVAEVRDGATGRAMEVWADQPGVQFYTSNGLAGVRGKGGRVYGRYGALCLETQGFPDAVNHPSFPSQIVRPGQVYEHNMVFKFTF

SEQ ID NO: 40699 - protein, 484 aa, Oryza sativa
MTALQYLLVGINALTGILPRELGNLNNLLALWASDNDFTGRIPDYIGSLSDLTELRIQGNNFDGPIPTSFSNLVNLTSLRIGDLVSGSSSLAFMSNMTSLIVLTLRNCRISDNLASVDFSKFVGLYYLDLSFNNITGKVPSVLLNLNSLIYLFLGNNSLSGSLPDTKGASLKVLDFSYNELSGKFPSWYSTERHLQVNLVWNNFMIDSSNRSILSSGLNCLQRNTPCLPASPDDSSFAVDSGGTRPIIGSDKSYYEPDDTNLGEASYYVSNSTRWGISNTGKFMEAANFSFIVYTSRQFTNTLDSVLFQTARTSSSSLRYYGIGLKNGFYNVELQFAEIFFPDNTTWTSLGTRIFDIFIQGELREKDFDIKKQTNGKSYTVVLRQYVVRVTENFMEIHLFWAGKGTCCIPRQGSYGPLISALSVSPYGGNNKVDPGPIKNSAGKSKIALVAGVVVCTIVLGLLSTGTFLWRQKRKKMEAEMGGS

SEQ ID NO: 40700 - protein, 787 aa, Oryza sativa
MYDRDTGEEVFTLKGEHEQPVCSLCWSPNGRYLVTAGLDKQVLIWDVKSKQDVERQKFDERICSLAWKPESNAVAVIDVTGRFGIWESVIPSTLKSPTEGAPDLNSTKVPLFDDEDDEERPSTSGGLDDDDDDESLGELGPFNHKRLRRKSTYHDHSNGDSEDEDLILQMESRKRMKDTHRDNKEVADKAIGDSATSVRLVTARMQTAFQPGSTPPQPGKRNFLAYNMLGSITTIENEGHSHVEVDFHDTGRGPRVPSMTDYFGFTMAALNESGSVFANPCKGDKNMSTLMYRPFSSWAGNSEWSMRFEGEEVKAVAVGVGWVAAVTTLNFLRIFTEGGLQMHILSVGGPVVTAAGHGDQLAIVSHASDCLSSGDQVLDVKVLKISECAQSLSSRLVLTPASKLSWFGFSENGELSSFDSKGILRVFSGQFGGSWIPIFSSIKARKSEDESHWVVGLDANNIFCILCKSPESYPQVMPKPVLTILELSFPLASSDLGANSLETEFMMRKLHLSQIQKKIEEMAALGLDTIALDDEAFNMEAALDRCILRLISSCCNGDKLVRATELAKLLTLEKSMKGALMLVTRLKLPILQERFSAILEEMMLNNAKIANTSGVFSNSNTNYSPSPALSTQAVPPAKVVQNGNSLKLPTLPKLNPAAQRSNPTESNKAEVEQADNLKEISTKVSPAQTPLVKIPKNSEMGVKTKKDNDGASHATTVDQNPKGGSGQVGLKNKSVDSCNGVQPQRPVNPFAKSSSSKEQPSSLFDSIKKMKVENEKVDKANSKKVKV

SEQ ID NO: 40701 - protein, 423 aa, Oryza sativa
MIRSGLPTHRSQLTSLASRGAAPIQDKQTRQIARRRRASGSETAPPPHRSIGKIGMPGGHNKQPAPPVATTGCSALASCLSFHRRAPRPPPARANVVDGATAATTRASAEQYRRRVQFLEEEIRRLGSRLAEHGRSANGGAMATRDRVSSACSGIGATAANKRVTVGGHGGVREMVRLEGGGYLHEIKRVVGMPWERLALQVSQPVVAENAATASEVLDKMTETSAENLCKLLSKMMPIKDIAGRKNPGKVIRRSARLSSGDDFLEALFFMEMDKMEGLVQQGLKIRMASTADSASSTAAGDDDGDRRHQATKDSMVSVVLIQVRDPEQGYAAIGDPMIGVMEASLEKKDGRVKLEMQGMHVAGILFGASSKGRSNGRAMMWSACLGQCKGSHNGRRGGGGGAGAGDVCRCGFVRNTNRVFRR

SEQ ID NO: 40702 - protein, 349 aa, Oryza sativa
MAALDQQPLLHDGGDQKPPPEGAARRFRRCRTAPSSEPPPTDKDNSSAADAPPKTLFTGGGRPSFRLVGLLLVAYLLLGTIAFYLAMDHMSGTRTTRALDALYFCVVTMTTVGYGDLVPASDAAKLLACAFVFAGVAVVGTFLSKAADYLVEKQEALLFRALHSHTMVRAMEMNKVRYKLYTAGLLLVAAVASGTVVLWKVEGMRAVDAFYCVCATVTTLGYGDRSFSSEGGRAFAVAWITVSTVVVALFFLYAAELYTERRQRELARWVLRRRTTNMDLEAADLDGDHRVGAADFVLYKLKELGKISQEDISEFLDEFDNLDADHSGTLSPADLAAAQPTPDPPPSLR

SEQ ID NO: 40703 - protein, 365 aa, Oryza sativa
MLFDEVFSDPIEERGALELPCFTRATKIALRLGFLGLSLPPSGVFAALRELRLSFVRFHGELTLDDTVMPFLEGLEIYSARVLASLTLRLKHLNWMNLSAVRGLLRLNAVVPRLKFLTVSCCFCSSTWLVAMAGVCIVAEELQVLRWLDWYCPRLIKFSQMPRLYVLSVSPFYPYGRHRQHTKFNPSCDRLLKTFSRIRCLEMLVFIEPHLGGVNPLMEGITRLPDIRFLHLQFSAHGHVYGASVLYMLTMCTGISNLKIGGDRYKDQDVCPPNCSCDRPPNWRDNKDISMRSLREVQMLNFRGKEHELDLLRVLVRVATGIRRIRITCHRSFAAWERLSAVIRSFARPETSVEVSQAPPSLQRQ

SEQ ID NO: 40704 - protein, 380 aa, Oryza sativa
MPPSMATARVASPSTDRKRKASSEDDIDAAAAAAALTSPLAPARGRKRFVGVRQRPSGRWVAEIKDTIQKIRVWLGTFDTAEEAARAYDEAACLLRGANTRTNFWPRPSPPPAAVAPPETTTTPALPSKVTNLLLLRLKARNQQVVDAGAAAPQEAALLQLQQQTPASCQEVFVRSHGEEYGFHVDDFLSDACSNEQYSGDSSLGLDDDDGEVEDEEEEELDFQFMDVAPGASSAAAEAGLGGEGALCSPFEMVAAELGGAVDVAAHDAMRQMDYERKISASLYALTGVSECLRIRAAAGATAAARDHLTGLREACRKKQKFAAAAAAPPQQQEPSPPPQQPETPASSGGGMSETASGGGGDGDVLMWSSLDLAPICHMA

SEQ ID NO: 40705 - protein, 426 aa, Oryza sativa
MARGLFACFGRGGEEAEEEAGKRPALRRRRTVNLRSLSLEDLSRTLAKTNLHAFTLDELKAATKNFSTSNFLGEGGFGPVYKGFVDGELRPGALESQHVAVKYLDSDGVQGHREWLAEVVYLGMLSHPHLVKLVGFCNQDDHRMLVYEYMPRGSLENHLFKNLLASLPWSTRLKIAVGAAKGLAFLHEAETPVIYRDFKASNILLDKDYTAKLSDFGLAKEGPQGDATHVTTRVMGTHGYAAPEYILTGHLTARSDVYSFGVVLLELLTGRRSVDKRRRGREQNLVDWARPYLRRADRLHRIMDPSLELQYSARAAHAAAKVAHQCLQSVPKSRPCMRDVVDALEPLLAVDDDVPMGPFVFTVGGEEAAAAAAGSSAAGDAGDDEPARGSRRGKKHVTSAVHAESPLRDGRYASRVKRPESPPSVI

SEQ ID NO: 40706 - protein, 50 aa, Oryza sativa
MVKAHHQQVEPSYLVLQFLVSKVVLWQKIDCFNLNGIKTKLQILMKHMLR

SEQ ID NO: 40707 - protein, 446 aa, Oryza sativa
MEVQVKRSSVVPPPPRETEETPLTVFELVAPTYHVTVLFAFSPPNPTTRALLDALSATLPHFPLLTARLDRRGARRRPFFVTGRGGAGALVVEAEVSSDLADHLPLAPSPELARLHPPVNTDAPTPHVLLVQINRFACGGLVVVSSAHHQAADGFSMSTFFHAWTDAVRRNGAPLLDRPVPYGPGALSPRRPPRCEFEHRGKEFLPHDGVTSRQGQGADTGAVRIDPSEVANVLLHYPSEFVAELKRRAQGKYTTFETVSAHVWKKITAVRGLDAGARTSVNVSVNGRARLGTGTVPNGFFGNLIINASSGPTARELTTGTLADAAALIRAGIRAVDRRYFQSFIDFGALHVDGGRDEEEPLQPANVDEPGVLSPDVDSDSWLHLELHRLDMGLGGRLAGILPAKVPEDGVVVVMPSLRKSGGVEVFVALWEKHANELTSIAYTMD

SEQ ID NO: 40708 - protein, 388 aa, Oryza sativa
MASFAAASFLSLKNPNTGREHTGTFSTTGATRTPEEYDRSTARERGFAAAWRVHGELELRSRPWNTILPEEFMRGESTERQRGGGGGEGRRRAGLRPARDEEDEEVEWRWEERTRRMRGGLGSAAESRERRGMSSWSWPEEDDDDEREKREEARERDASESELSRRSGAEASSDAEAPDERPLFRWSSSFSDLAAVEFIALPGVLAGADDGDGFGLCAAALFSPSNSRHRLEQLGALGEKTYGSAASTAAVAARSGFIGSEGAGIASGCGGRGAAASISGTAAAFRSGSSFPSAKSSSAGSMVAEPPRLNSKSMKSLDIAGSGVVVVATAAAAARGEEHTTTAAASSAPAASRLNETRGPCHPPNGMTAAGAAAGKLLATAEAMAGGG

SEQ ID NO: 40709 - protein, 274 aa, Oryza sativa
MEEMTISKGNRHNSEGTGVLPRAEIVHDEHPLSLGKTSVWNQFFQESETIEQIDRDVKRTHPEMQFFNGDSSDALSNQESLKRILTIFAKLNPGIRYVQGMNEVLAPLYYVFKNDPEENNAESAEPDAFFCFVELLSGFRDNFCKQLDNSVVGIRSTISKLSQLLKRHDEELWRHLEVVTKVNPQFYAFRWITLLLTQEFKFRDCIHIWDALLGDPEGPQATLLRICCAMLILVRRRLLAGDFTANLKLLQSYPPTNIDHLLHIANKLRGPIPY

SEQ ID NO: 40710 - protein, 514 aa, Oryza sativa
MPMAAAAAFAAHVLRGRWFMAYGSFLIMSAAGATYIFAIYSKDIKSTLGYTQEQLNTVGFFKDVGANVGIHAGLIAEVTSPWFILAIGAAMNLGGYLMLYLSVTGRVGAKTPLWLVCLYIAVGANSQAFANTGALVTCVKNFPESRGVILGLLKGFVGLSGAIFTQLYLAFYGGGNTKPLILLVGWLPAAVSLAFLGTIRIIRTPRSPAAARREYRAFCGFLYVSLALAAYLMVAIILQKRLRFTRAEYGVSAAVVFAMLLLPFTIVVREEAALFKNKSPEEEEADDVPRALSVVTAPAKPAAQPSPESQRPTTATARILQALRPPPRGEDYTILQALVSVDMVLLFTATVFGVGGTLTAIDNMGQIGESLGYPQRSVATFVSLISIWNYLGRVAAGFASEALLARHRLPRPLILAVVLLLTAPGHLLIAFGVPGSLYAASVVVGFCFGAAQPLILASVSELFGFKYYSTLYNFCGTASPVGSYILNVRVAGRMYDREAARQGHGVAAAAGRRR

SEQ ID NO: 40711 - protein, 440 aa, Oryza sativa
MISSVGASATMASSSAAPILLLELAAAVLLVLQRVAAADAVVTTFPGDAAALASLKSAVDAATVPAYSCLASWDFARDPCAAFPCGVRCYAPPNSSSYHRVTGVSLDPAGYSGTLPATVLASLPFLAFLSLASNRFHGALPAGSPLPPSLRVLDLSGNAFSGEIPASLFTPASSLEELYLSRNALTGAIPPQVASLGSLKRMELQHNGLTGTLPRMDAMRSLAYLDLSGNALSGSLLDAPGRLPGSLVSVVARGNGFAGPLQAAALAALPAMRVLDLTGNAVSGAVPGAAFAHPSLQQLRLGSNKLGAVEEAPDGGASSQLVELDLGGNRLTGRLPGCVAAMPRLAVVGLDRNMFAGGIPDQYAARAAADGPTDKWVPFVRLMLQGNFLCGALPSQLRQLKEDGAVVSLADNCLPKCPHQFSFCRGAPQKSNATCPKCFP

SEQ ID NO: 40712 - protein, 229 aa, Oryza sativa
MMTTKGFGAPKLLRSASAADCRRSTGNRPTPAAGSARHCRAPCRRLRAPPLRLVVTQLHPPPLRLAVAHSTRRRARAPGDGGEEVPHRPRSPLAVLPPPTPSPSPASPLLPPLRRRPPTPPLGAAEGRIQPRRGGLPFSVAASAVAAPGDGEEGLDAEVPHRPRSPHAVLPPPMPSPSPVSPLPPPLHRRPPAPPVGAAEGRIQPRRGGLPSSVAASAVAAAVASPPAS

SEQ ID NO: 40713 - protein, 432 aa, Oryza sativa
MHTSKELTTDHEPPVVELTTDAEYAQEQPRLVRFFGTTIVLSLGLLHAACSLHWAHRPLPRGVGTAAFGATAVLCLAVGAVSLLLSWSAAARMTATKALPTRRVERRLLNRLCAAVHASSALLMLAPVGLLVLVADKAYAFAVVVPLGPVGASLFPVVRNGARFGFAWGAAQYEAHEHDLRRYFGLAAGVTVPTYVALLSHAVSDHFRPAGSAQRRHHDLGGVDAVECLLLYASTAGLALMLLATSPPALCFRHTRAVVVNHFLGVLADALLALVGLAALVATAEIAGGLAALAPTTNVIAACAIFAKEHEDEPDRRGQDDTKDHLCSSSSSRQPVAPLVVNSLAFGTVMLSYSALDGGRAFSWPEKACLVAVASLLVGNLSQMALQRRAVRTDSVVTTALSLFDKVNKVTLLIAALGCMAVLATHKITASH

SEQ ID NO: 40714 - protein, 345 aa, Oryza sativa
MWEAVGGGDGTALLPWPGSAAAAPLYMPPAAAAAAPFAAGEQLPVEQPFYFDGGGGVAGHNHHPHHHQYGMEAPPPMTMMQMGGGGSSSSRMVVSGLLGTLQAELGRMTAKEIMDAKALAASRSHSEAERRRRQRINGHLARLRSLLPNTTKTDKASLLAEVIEHVKELKRQTSAMMEDGAAGGEAAAAPVVLLPTEDDELEVDAAADEGGRLVARASLCCEDRADLIPGIARALAALRLRARRAEIATLGGRVRSVLLIAAVEEEDPDEAGNDDDGEHGYGVAASHRRHELVASIHEALRGVMNRKAASSDTSSSGAGGGGGSIKRQRMISAHDQQGSFNSSGW

SEQ ID NO: 40715 - protein, 587 aa, Oryza sativa
MLDRATGGRRRAAGEGMDHRPDLSLALHPPPPPEGSSAAAAEEVGEEEAEGGEGRFSLMGQPLFLKRPRPRPPRPPRARGVGDDVDVDVDDDSSPCCSSSCLSPAAKRRAAAGGLEARRAAVRAWGCQPLTEADPDVHELMERERRRQAGGVELIASENYACRAVLDALGSHLTNKYSEGLPGARYYCGNQHIDAIERLCCDRALAAFGLDPSRWGVNVQPYSCTSANFAVYTGLLLPNDRIMGLDSPSGGHVSHGYYTPSGKKVSGASIFFENLSYRVNPHTGYIDYDKVEEKAVDFHPKILICGASSYPRDWDYARMRLVADKCGAVLMCDMAQISGLVAAKECRNPFDYCDIVTSTTHKSLRGPRGGIIFFRKGKNLRKRVGSLTQVVENDQYDFEDRINFAVFPSMQGGPHNNHIAALAIALKQVAMPEFKAYIQQVKKNAQALAMALLRRKCRLVTGGTDNHLMLWDLRTFGLTGKNFEKVCEACHISLNKTPIYGDNGSISPGGVRIGTPAMTTRGCLESDFEIMAEFLLRAAHIASIVLKEHGRLQKDFLKGLENNNDIIELRNQVETFALQFAMPGFDV

SEQ ID NO: 40716 - protein, 495 aa, Oryza sativa
MVGDQEGRRQRRRGWGEEEEDRISDLPDALRLQILSLLPLKSAIRTGALSSRWRGLWEQRWPDPSSLDVRLPSGGGAASASVAALRAEHLAGIDRRGRRRMDLFSLAFHAGQLAPPELKRFIEYAAACDVEEVRLRLDGGGGRGARGGTRRPGALAVHFPIGSKLLARLSVRGLHLTASANAMVATLEVIHFHSVSLTDAALRRVVSACPRLRELELRYCRHLRRIDFTVGASNLKSLTVVDCSRATELRVPSAPLLRSFRFSGAFLCSNIFGSTADCVEHLYLCSGGPETGLPRTNLPSAVPRLSNLTVLTLCSIALQYVSASVATPNVEKSLNSLRELQLLMFGMANSNLADIYSFLKACRCPQLERLFVQLPTNTYDSFTTNYLEVAEEEPPEGGLENLRLVKMTNFKGYRNELRLVDFLLRKASRLNKLFLIAPKEVHPQGLRKVHSEALPHFLKTDVLHLERASAIAQIIFDESVSPQILPLHSEVFVRV

SEQ ID NO: 40717 - protein, 110 aa, Oryza sativa
MVSMLNTANVPLGTRNPPAPTRRSIASACGTAKYWFMACARKMVDDQIGITRIADLSCSTWSTVHSRPLSLMPSAPPLPDLSSFVLLIMHALFKNLNRSITPHELRIMHL

SEQ ID NO: 40718 - protein, 281 aa, Oryza sativa
MAAAEVQSAAGWGRQLQQDGGGWRKGPWTSQEDALLVEHVRQHGEGRWNSVSKLTGLKRSGKSCRLRWVNYLRPDLKRGKITPQEESIIVQLHALWGNRWSTIARSLPGRTDNEIKNYWRTHFKKGKPSKNIERARARFLKQRREMQQSQQLQQPTLMPTPTPQSKDIIVAETGDARTDDDAGGAAAAVAPSSSSSSLSMAGREAEDLIMHQDAMDDLMMCPAMSYHLILHGAAVAGHQLSDGGGSCCASTSEDYGSSEDDGATWGSLWNLDGAAGACTLW

SEQ ID NO: 40719 - protein, 441 aa, Oryza sativa
MAGTERSRRRREVKLRKAWRKEAATAGPTSVNDVPDEVLELVLLRLGDSLALLRAAAACKRWRRLVADAGFLARFRSLHEPHVVGHYHVVDPTFAGALRGGNHVFVPERSPSPADALDRRRLSLDFLPEPDGDRAWWKLADTRGGLVLLYPKTWNASFPDMVVCEPLTRRHQGILRPQEMNSPYRICFGVFLIDGAAADETGGCISMSNFRVLSAVYEPETPYCGYWHGHGTPPRPRAYVFSSGVDGGWRESDSGSDVELPSLELINFVGRAGCSLYWGLDGKDAMLALHKTTAEFSLVTIPAIVGESYHPSTFRVIGGGDDGTMRVVRLIGDDLKIFTQLKGSGGEWVVEKLVRLPVATRGLPGHDVGLFHHYARIVTANERYILVTPRVATWLFSVEVETPVVEREHVRNKYAGAAYPYELPWPPVLQACIAGRRRSRR

SEQ ID NO: 40720 - protein, 134 aa, Oryza sativa
MRSPPAPRAILSSSSSSVNASPRSPPASVSAWRWRQHKNGRHMGADDRALRRLWKGRWVSIATRGRDAAALHRFIAATLLRSLLPHPDVAPPSSAMPNAVSPQTGGTSARLGEPRRQSLVLAPVADQHAGHWPR

SEQ ID NO: 40721 - protein, 190 aa, Oryza sativa
MAAWNTSILLPPPPPLLSRAAVATPALNPYPLRLHRRHPQKPLCLPSESYPADTDADASSASLDSRPRRIALFVEPSPFAYVSGYKNRFLNFIKYLREMGDEVIVITTHEGVPQEFYGAKLIGSWSFPCPWYQKVPLSLALSPRIIGEVARFKPDIIHASSPGIMVFGALIIAKLLCVPLVMSYHTHVPM

SEQ ID NO: 40722 - protein, 161 aa, Oryza sativa
MELRGGRGVPCRPRPRRGAQELRRVLLRRRRRARRRARRGEERHRRVQHRGDAQLRRERDAVVRGRGGGGGARRSPLRGGVLLLPRRHLRGVPRPGVRRGGGPREGRAMARPAPVAQPVRPGLPHRRLRPRRLQGHPPDGHRHRRTSHHLPRQQIQVNTTH

SEQ ID NO: 40723 - protein, 552 aa, Oryza sativa
MDSKPTRPHRRPPPLPSKTSGVWPVALLVVLCFAALPLFLALSRARPTLSDVSQMGVTVTVHDEDPAGTPPESSPANRDRLLGGLLSPDIGESACLSRYKSSLHRKPSPHSPSPYLVSRLRKYEALHRKCGPGTLFYKKSLMQLTSAYSMGLVECTYLVWTPCGGSHLGDRMLSMASAFLYALLTHRVFVVHVTDDMAGLFCEPFPAASWELPAGFLVHNLTQLGRGSEHSYANLLGAKKIKTDDPAGVRSESLPSYAYVHLEHDYQQSDQLFFCDDDQTVLAKVNWLILRSNLYFTPGLFLVPQFEDELRWMFPARDTVFHHIGRYLFHPSNKVWELITRYHTSYMAKFEENIGIQITTFAGSKVSSEEYFKQIVACTSQEKILPEIDPNATSSANEAALATTASKAVLVSSAQPSEYAEKLKAMYYEHATVTGEPVSVLQPAGAGKQAPNQKALVEMFLQSYCDVSVVSGRSTVGYVGHGLAGVKPWLLLTPTNRTASANPPCIQTTSMEPCFHAPPSYDCRAKKDGDLGAVLRHVRHCEDVGDGLKLYD

SEQ ID NO: 40724 - protein, 112 aa, Oryza sativa
MEGGFFAGKPLPPSGGAARGPNAKKPVGAGHSAGGPLPPSSRVAGLAAYKRLAAQPPALIPPPSNPVKKKRREGRRREEGAKPCRIQTPISACRIRRFGSPRSRGKEFGRSK

SEQ ID NO: 40725 - protein, 446 aa, Oryza sativa
MALAVVVVALLVAFLTPLAVYLAGRSTRTKPPPRRNLPPGSLGLPLVGQSLSLLRAMRRNTAERWLQGRIDRYGPVSKLSLFGAPTVLLAGPAANKAVFLSEALAPKQPRSLAAIIGRRNMLELVGDDHRRVRGALAQFLRPEMLRRYVGRIDGEVRRHLAGRWAGRRTVAVLPLMKLLTLDVIATLLFGLARGAVRERLAAAFADMLEGLWAVPLDLPFTAFRRSLRASARARRLLAATVREKKANLEQGESSPSDDLISYLVSLRDGDGGGGRPLLTEEEIIDNSIVCLTAGHDTSAILLTFMVRHLADDPAILAAMVQEHEEIARSKRDGEALTWEDVARMKLTWRVAQETLRMVPPVFGSFRRALEDVELDGGYVIPKGWQVFWAPCVTHMDPAIYHDPDKFDPSRFDAQAAASAPPPYSFVAFGGGRGSAPGWSSRGWRRW

SEQ ID NO: 40726 - protein, 663 aa, Oryza sativa
MAAAAAAASLSVSDAAAKLPKPGGQVQRRRDRDRPRVDAAACTRDSRRPTRERCSTTVSLAATATATTATPVRAPVRTRAPMGQRKGADIVVEALEWCGVRDVFEYPGGASMEIHQALTRSPVIRNHLLRHEQGEAFAASGYARSSGRPGVCVATSGPGATNLVSALADAHLDSVPLVAITGQAPRRMIGTDAFQETPIVEFTRSITKHNYLILDVDDIPRVINEAFFLASTGRPGPVLVDIPKDIQQQMAVPSWDAPMRLPGYISRLPKPPAANLLDEVIRLVGDAERPVLYVGGGCSASGYELRRFVELTGIPVTTTLMGIGNFPSDDPLSLRMLGMHGTVYANYAVDNADLLLALGVRFDDRVTGKVEAFASRAKIVHVDIDPSELGKNKQPHVSICADVKLALQGMNAMLEEQSAAAARKNLDFSAWRSELEKKKVEFPLGYRTFGEEIPPQYAIQVLDEVTNGEAIVATGVGQHQMWATQHYTYRRPRQWLSSAGLGAMGFGLPAAAGAAVANPGATVVDIDGDGSLLMNIQELAMVRVEDLPVKVMVLNNQHLGMVVQWEDRFYDANRAHTYLGNPAANGGGEVYPDFVTIAGGFGIPAARVTRKGEVRAAVEEMMAAPGPYLLDVVVPHQEHVLPMIPSNGAFKDIIVDGDGRSSY

SEQ ID NO: 40727 - protein, 325 aa, Oryza sativa
MSAVDEEQQWGRGGGISDGGGPWLTSTPIRLWTGSDWGDRSSLPLPGTDLGPCRAQPCRAPAAVGRGQLLLLGARAALLLLLRSDEAVEVAVGLEADHEGAEAVLALHLALAEERDGLTEAAEARPHGEVVGRHGHGEGAAALEQLLHHALMALPRSTVVIGDLVLSLTAAPSSSRRGGRGDGDGGCRGRRKARGGETGMGAMGRGTGRGAMVGTAMVRLTAGAPCLHQRGGGAGLVPRSERVDGRRLRRQVGQERRRRVDPRRRQRAPRAIRPAPGANLAEVNNSERRRKRQGGGWKRDGSGISPILKNSSGMVINTQIIIAFF

SEQ ID NO: 40728 - protein, 201 aa, Oryza sativa
MDPYLGGSPELARFPHADSVVPNHNGSAGPAMELGFAGGGGAAVKPSYSSYTAASLGNSGSSSEVGLVPDAICGGGGGGIIELDFAQSKAAYLPYASTPSHSMSSSMDMGVAAPEMSDCAAAAAGRAYAAEGRAARLMRYREKRKNRRFEKTIRYASRKAYAETRPRVKGRFAKRADDHDAAAPPPQIMLDFAGYGVVPTF

SEQ ID NO: 40729 - protein, 316 aa, Oryza sativa
MKIALGAARGLAYLHEDANPHVIHRDFKASNVLLENDFTPKVADFGLAKEASEGMDHISTQVMGTFGYVAPEYAMTGHLLVKSDVYSYGVVLLELLSGRKPVDMTQPPGSENLVTWARPLLTDRDGLQQLVDPSMPAASYGFEKLAKAAAIASMCVHVEASHRPFMGEVVQALKLIYNGNNDDTCTSGSFGGGGGEEYEDEEASSPWNNRSWSHDFAATPPPASRRLAFPRAPARPTTMDYSSDPADGAAGTSSASARRQRSTSSLVLDKIESLAAYDWSGPLRASRGRNFYRLRGSMSEHGGHPSEDCSMEGYWM

SEQ ID NO: 40730 - protein, 379 aa, Oryza sativa
MWRKYGLSPPELPASQPPRPRSDDDRAVAALTTTTVDVIKERPVRFSSPQLREMTGDYAERLGAGGFGVVYKGQIPGGLAVAVKVLGSDMGRRAEEQFMAEIGTIGRTSHVNLVMLYGFCFDADLKALVYECMPKGSLERYLFFLDEQEQGLGFHKLFRIAVGTAKAIRYLHDECARRIIHYDIKPGNVLLDEELEPKVGDFGLARLCDREKTHLTMTGGGRGTPGYAAPELWKPVPVTHKCDVYSYGMLLFEILGYMHGMESQEQWYPRWVWQRLEHGETEAVVARARAQGGAAAADKAERMCTVALWCVQYRPEDRPSMASVVQMLEAHDHVAAPTVSPFAHLDPQVIITTSSFSSLLHTDDTTGGTTSTHISHHIT

SEQ ID NO: 40731 - protein, 417 aa, Oryza sativa
MGRRWHALAAVGVAACAAAAVAAGDRGFTFADAVAAPEEVGYMRKVVNFLWSGEASYHHVWPPMEFGWKIVLGILIGFFGAAFGSVTSIPDPDPLSGPGIPPTAHSSPASAAAGDAAMKRARSSEVFLGGRGRARRRVAPLLAAVAFVYLLFVSFKLSGLAGIADPAAVTRPASGGAGEVVMPRRLEDPAPRARGDGDGVAVAGYGRITGEILRRRWEAGGRGRRRWGRGGNFSELERMADEAWELGGKAWEEACAFTGDVDSILFLLAFLANLAAPASDDRRPPPPQFPSNARGGRDQVPRVDQHRRRRRRDGGVPPLRARRGFRGDGGGDGAGGAGGVRGGAGAARGRERDGDGGAVRRRAPRPPRRRGGGAAQDPPPQPAAARRLEPPPRAGDEHLLPHAVGKGAPLRWQPLQG

SEQ ID NO: 40732 - protein, 461 aa, Oryza sativa
MMAAVSKSTVAARRDAAAEILQSAKKGSRRGSDSNALFMQFPSLIDHLIKLCFHPGQPKARAINISTEFSSLKRMMPLGIILPIQQALTVTLPSYDTNMTDQSTFRPFSVSEHPTIAGIADDAEILNSLQKPKKVVFIGSDGISRPFLCKPKDDLRKDSRMMEFNAMINRLLSKVPESRRRKLYIRTFAVVPLTEDCGMVEWVPNTRGLRQILQDIYITCGKFDRMKTNPQIKKIYDQLQGKMPEEMLKAKILPMFPPVFHKWFLTTFSEPAAWIRARAAYAHTTAVWSMVGHIVGLGDRHGENILLDSTTGDCIHVDFSCLFDKGLLLEKPEVVPFRFTQNMVDGLGITGYEGVFVKVCEITLSVLRTHKEALMTVLETFIHDPLVEWTKSHKSSGVEVRNPHAQRAISNITERLQGVVVGVNAAPSLPLSVEGQARRLIAEAVSHSNLGKMYVWWMAWF

SEQ ID NO: 40733 - protein, 242 aa, Oryza sativa
MRTLPTSSRGRGCPGGELGVPAEKTETGATASSACALGPRAPPTPSSMPPPLELAPCRPERRRRPAPASALLVTAACVLASSEAKVCTGASTCLPPTATAAQGHAARRLRQRRPNRRPCNRHRPTSFSSRLPASLVAGGAHLCDGRRLPRPHLLLVLLRPLDPVASVLHHRRRRRPHPPCGGGQRGSGGPRGAGDVLLIVVPSGIVLPLGIALRSRLRGGAVTAARLVPADRGTAASTLLPC

SEQ ID NO: 40734 - protein, 256 aa, Oryza sativa
MAAAAKEEMEGVLRAMDRLPGRISDLLRSERGHAGLSVLARRGFVFTETELSSLVAALRQLLASAERIGPGHVDSQTVNHCAYLIDLARWIDDLIDGYAPDKAETELRELNLAWIEQLLLVTDAPPAAPDVVVDVGPPSILVGIDVPRKKLARWLTASDDGEAQLKVLSVVGPAGMGKTTLAMDVFRQIEGQFQCRAVARLSARPPHNDKLLRHIMSQITGSQADAATLDGDDCALAYDIKQYLQTKRYCSSIPSI

SEQ ID NO: 40735 - protein, 362 aa, Oryza sativa
MGGKMGKDVAAGGESNRRPPPPPPMPLGLRLQLIGLSAAIDAVERRDGTVNRALYSVLVEHLMSVRADPSPDAATGAVRSFDFTIDAARGLWARVFAPAAAAQAAAPMPVMVYYHGGGFALFSPAVAPFDGVCRRLCGDVGVVVVSVNYRLAPEHRYPAAYDDGVDALRFLDGNGIPGLDGDVVPVDLASCFLAGESAGGNIVHQVANRWAATWQPTAKNLRLAGMIPVQPYFGGEERTPSELALDGVAPVVNLRRSDFSWKAFLPVGADRDHPAAHVTDENAELAEAFPPAMVVIGGFDPLQDWQRRYVDVLRRKGKAVEVAEFPDAFHGFYGFPELADAGKVLQDIKVFVQSNRAARATA

SEQ ID NO: 40736 - protein, 50 aa, Oryza sativa
MFFFHLSERRKFPVMNLLFFFLTSAVVFFSHMLDDCGNLPTVSLVENCNP

SEQ ID NO: 40737 - protein, 121 aa, Oryza sativa
MPSRSAAGCSTRSEVTWAVTWPWAAAVACSATSWPPTRKPPAPGSSSSSSTSAAPPFSSLARSSSASSATPSPSTSMSPPTSALISTEPAGSGKGRNQSPFFSAEPAAAASLLFPPCWGAD

SEQ ID NO: 40738 - protein, 260 aa, Oryza sativa
MDNSTAAQCWEVEDVARELVHGVAAGWRLRLHRQDRRRLDELEDGQGAATTTSADWRGGRWGCRRPWASRRRRRSRIRRRRRGRPRREARWRRLGRGRRRPVPAGHLRRRVGALGGRSRRYRRVGALGGRSRRYRRVGALGGRSRPAGHLRRRVGALGGRSRRYRRVGALGGRSRRYRRVGALGGRSRPAGHLRRRVGALGGRSRRYRRVGLLGGALRCHAVQGGEGEQVAAVVEPAPSRRAAPVAGHAAPPPVCHAPRR

SEQ ID NO: 40739 - protein, 297 aa, Oryza sativa
MAARGACDPPGPGASLRRLVLLLALSVSALAAADASGVFEVQRKFTRHGDSGEGHLSALREHDGRRHGRLLAAIDLPLGGSGLATETGLYFTRIGIGTPAKRYYVQVDTGSDILWVNCVSCDGCPRKSNLGIELTMYDPRGSQSGELVTCDQQFCVANYGGVLPSCTSTSPCEYSISYGDGSSTAGFFVTDFLQYNQVSGDGQTTPANASVSFGCGAKLGGDLGSSNLALDGILGFGQSNSSMLSQLAAAGKVRKMFAHCLDTVNGGGIFAIGNVVQPKVKTTPLVPDMYAIILCQL

SEQ ID NO: 40740 - protein, 210 aa, Oryza sativa; identical to SEQ ID NO: 39352

SEQ ID NO: 40741 - protein, 611 aa, Oryza sativa
MQGPRRRTPPAPAAKQPAMLMLGPFPAHHRCTLFLLLTVTLLPSLAAAAAAHHHHVHAAGDGVVISQADYQGLQAIKHDLSDPYAFLRSWNDTGLGACSGAWVGIKCVQGKVVAITLPWRGLAGTLSERIGQLTQLRRLSLHDNAISGPIPTSLGFLPDLRGVYLFNNRFSGAVPASIGNCVALQAFDASNNLLTGAIPSSLANSTKLMRLNLSHNTISGDIPPELAASPSLVFLSLSHNKLSGHIPDTFAGSKAPSSSSLKESITGTYNLAVLELSHNSLDGPIPESLSGLQKLQVVDLAGNRLNGTIPNKLGSLADLKTLDLSGNALTGEIPASLSNLTTSLQAFNVSNNNLSGAVPASLAQKFGPSAFAGNIQLCGYSASVPCPTSPSPSPSAPASPAQSREATGRHRKFTTKELALIIAGIVVGILLFLALCCMLLCFLTKKRSGSGGKQTTSSKAAGGGAGAAAGGGRGEKPGSGAAEVESGGEVGGKLVHFDGPMAFTADDLLCATAEIMGKSTYGTVYKATLEDGSLVAVKRLREKITKGHKDFESEAAVLGKIRHPNLLPLRAYYLGPKGEKLLVLDFMPNGSLSQFLHGQYSVNATLLILCI

SEQ ID NO: 40742 - protein, 89 aa, Oryza sativa
MAAAAVVVVVVEADEDEQGIRSRTSTASLMAGLLPGAMAQQAKASLKQASRASSLPSASPRSVGSAMRSSRLRSSTTNPACHWQSSTSE

SEQ ID NO: 40743 - protein, 398 aa, Oryza sativa
MAAVEQDQEEEVIIVGAGPSGLAAAACLSVRGVTGCLVLERDDCVASLWRHRTYDRVRLHLAKRYCALPHAPHGEASPTYLPRDDFLRYLDAYASRFGVRARLRREVRSARYDAARARWLVDAVDLATGRAERYAARHLVAAAGENDERVVPEVPGMETFPGKVVHAADYRSAEGFKGKSVLVVGGGNSGMEIAYDLAVGGAATSIVIRSELHLVSKEIWNLAMTLYRYLPVWVIDKVVLLMCAAVFGDTARYGLRRPAVGPFTMKATTTMYPVVDVGTFAKIRSGEIRVLPAAIKGVRGRDVEFADGQRHAFDAVVFATGYRSTTKHWLKSDDGLIGDDGMAGRSYPDHWKGENGLYCAGMVRRGIYGSYEDAEHIADDISKQLRSSSKPTHNNGSA

SEQ ID NO: 40744 - protein, 255 aa, Oryza sativa
MAPRPRPRRSARAPPRPRRGTVACGRAGAAHPNPSAHGAGQVTARAGHACSHRHSHSSRCTGQGAAGRARRRACHAAATDTEESTTTAGDAPAGDTSPGDTPAGVAPARHPASGSPAIDAPAGGCTGRGARGVAPGDDTTASGRSARGAAPGGGSDQEQEQAQEEEQARQEGLRARAGAVEPTGAGRAVARRQPGRRVRPSTISIRSQWKQQAVRTMGVCPSDCHGCTATIISMVIKAQTRQIHPSIHVSASPLI

SEQ ID NO: 40745 - protein, 469 aa, Oryza sativa
MDMAACVDDVGKPRASRKVCVIAAAAAAKPVRVHSSMYASLRLLGPREVMGFSDFQFVPARKSRCGGGDNPGGRDPRRFPGHREVYLYLRDFYRAAGLTDSVRFNTRVVRVAVAPPPCRGGPGDALRWVVRSMDAGLWKRCTDDQMAEAHCVEEVFDAVVVATGHYSQPKLPSIQGMGDWKRRQMHSHWYRVPDSFRDEVVVLVGCGDSGMDIALDLLAVAREVHLSAKSVEAAATPAMSKMLARHANLHLHPQIERLCDDGRVVFADGGGGVVAADTVMYCTGYRYSFPFLDTEGKVAVDDDDNRIGPLFEHTFPPSLAPSLSFVGIPRKVMVPWFFEAQGRWIAGVLSGRRALPSEEEMTRSVEEFYRARELAGVPKAHTHDVEPHKMYELGEKYCDFPRTEEWKRELMAIISRNTSDDMETFRDRDDDSDNVRRCLQEWYALAEHQAQDEEDPAAAAAQAPVHSSL

SEQ ID NO: 40746 - protein, 36 aa, Oryza sativa
MRCRGGHMSLVGPTSSDALWCCANVTTRYFFTLWSL

SEQ ID NO: 40747 - protein, 241 aa, Oryza sativa
MADCRSLIEFLRAFEHRHRHHAAAASTDSAACGTAPARPRRGSSPRRGRRRLFTSLCDHSAMAAVDAVALLAVVSALAFLVTPYVRMVAAEVGGLVSDLDAAGVASSYYAPFAAAGAGAAIAAVAGVVAWDAVGHRARRCGKPRCRGLRKAVEFDIQLETEECVRGQQQRLLPLPGGRAALLAAAGARPVQLGDAHRELEAELRKMAPPNGRTVLIFRSPCGCPKGRMEVWGAKKVRRIKK

SEQ ID NO: 40748 - protein, 115 aa, Oryza sativa
MAPGGAAMGRPDPAGSGVGVFLTASSSRTTSGGVVVLAEVAADRSPVAVLVFRPPHFLPSFSSRHASLLRPSRVPSSSGRHARRIWPRTATAGSSAVHGDGGLGGSSARRRRQAG

SEQ ID NO: 40749 - protein, 340 aa, Oryza sativa
MAMAARTLALAFPLPLCAVSSPRRATPLALPRRGAARPLASLAQCPARGHSPSPRRAAGRALAPCAAMRGSGGGGGGGEFASDDGGGARALLRATLWGAEAAYILWLFLLPYAPGDPVWGISQATISDLIGLSLNFFLILPLLNSAGVHLLESPVLHPVAEGLFNFVIAWTLLFAPLLFTDSRRDRFKGSLDLLWGFQMFLTNTFLIPYMAIRLNDPDKDKSPPQTSKLGSVMVRGAPIVGLTGGLVCILSIAWALSGRADASFGGIAERWQYVQSYVFSERLAYAFLWDILLYSIFQPWLIADNIQNVKASATEFVNSVRFLPVIGLVAYLFCLEDRDD

SEQ ID NO: 40750 - protein, 173 aa, Oryza sativa
MAPRGSTTTPPPGTASGSSSSSAWSPSRAPRLSSRAPATATPRRRRTPLIFQKRTTMRKRGGNSSSSSSSSTASSWAPTSVWRSRRATTTRRRRRNLSATSSTSGRMRRTARAPGWGSKARRSCPCPSPWPPTTSRSPPPPATTMMINLLKKPRSDQHAEEINSFFHGVRAAC

SEQ ID NO: 40751 - protein, 127 aa, Oryza sativa
MGTTTLPPSGSKVGRPPPTRIRRRALPRGDDDDDGGELGHGGSGSGAAMTTSPAVTTTSGTTKAAGGGGELGRSDNDDDGRRRGRQRSQAAVAGVDLGGVVVPAASDGDGDDGSGGGGCDELGRRRR

SEQ ID NO: 40752 - protein, 73 aa, Oryza sativa
MPQSLLLSPLPFPSPPPPPPPPLPERARAAAGGGPRAAGSAAMAGAGGRWRPLLCRRGEAAAAAQFSFFFPNF

SEQ ID NO: 40753 - protein, 278 aa, Oryza sativa
MEVTLETVAGRRFTVEIWFFSTVRRIKEYVLRQEGIPVESQRLFFAGAELDDDGDTERYSILQGSTVLLLLPEDGAAPPSSGGGGGGGGGTKAMVRVVVNAPAALAGKGGAVTVEVDAAACTVAGLKERVQEGTDGALPAARVALMFGKVEMEDGRAVAEYVPPGAAADGTATVVVSAVVRPPPPPTPTPQPPQQPRVTVNVKWGAKAAAVEVSDMLAVKDLRAELGGAAAHLPLPKDGGYFFIYKQNVMEEDRTLRWHDVKNGDTIEIFNGRVTGGA

SEQ ID NO: 40754 - protein, 40 aa, Oryza sativa
MGLPIFACGCAGRMQKERFLQTISPAWKDPCSLHEKTLFQ

SEQ ID NO: 40755 - protein, 323 aa, Oryza sativa
MKLAGLKSVDGAHEESIWAAAWVPAADHRPAALLLTGALDETVRLWAPDDLASAAASPSRGHALGVVSLAAHPAGAVAAAVSLDSYVRVFDVDSGSSVATLEAPPSEVWGIQFHPKGSALAAAGGGSGSVKLWDTEKWKPITSLAVPRPEGARPDKTGSGKFVLSVAWSPDGKLLACGSMDGTIAVYDAVRMKFLHHPEGHHMPVRSMVFSPVDPHVLFTASDDCHIHIYDAKEKSLIGAMSGHASWVLSIDVSPDGMAVATGSSDRTVRLWDINTRASVQTMSNHNDQVWAVAFRPPGGTGVRAGRLASVSDDKSITLYDYS

SEQ ID NO: 40756 - protein, 415 aa, Oryza sativa
MPAAESCHSRSLSWLVKSCIPADPARHIAVPVLCPTPQPPPPSSPPAPPISTLPDDLLLECLARVPRASLPPLPAVSRRFATLLASDAFLHLRRAHAHLRPSLLALSVSDNGCVPQALLRFESSAPVLEVAPLPLPPTLLHCGGSVFAHARAVVLGRDVFLIGRGATLRVDALTGAARACAPTLFPRKKFAAAAVGDRIYVAGGSARTAAVEEYDPEVDAWRVVGEAPRRRYGCAGASAGGVFYVAGGVAVSGEGARALEAHVCAGSVDALHVASGTWARPRALPGGGCVVGACGVGDHLYVVASHAVELSFWRWSGATGRGGDGRGWGGWVALEAPPMPRGSVGLGMAVRVAMAGLGTNRVAAVVSAAAVRGHNAGGGALEGMVLVYDIAGGKWSRAPDLPPGFRRAACAGVEC

SEQ ID NO: 40757 - protein, 299 aa, Oryza sativa
MASGGGGGGEAVEEGTTTRVGDLPEACLADVIALTSPRDACRLAAVSPSFRAAAESDAVWDRFLPPDYRAIAPLPPPPATAAASGGKRMKKGVYLGLCDKPVPVDDGSMMVWLEKESGAKCFALPARKLSLPWEDGEFSWRWTPHPLSRFEEVAQLVDCTCLDIYGRLPAAALTPATPYAAYLVFGTAAAAEGHRGLSFPDQETTVSAAGRVVARHAVCLRPDDAEARKFRGVGLADAGVPVRRPARRGDGWSEMELGRVAADEVAGAGGEDVVASFEVLGWYPKRGLVVECMEFRPVV

SEQ ID NO: 40758 - protein, 250 aa, Oryza sativa
MEPAFPNGGAAAPPPPMAAEQLPPAAAVVREQDRLMPIANVIRIMRRVLPPHAKISDDAKEVIQECVSEFISFVTGEANDRCHREHRKTVTAEDLVWAMDRLGFDDYVPPLTAYLRRMREYEGGGSGGGGGGGRGAAAAPAVVPPPPPPPPEDAFRYVQVHHPVYAAPGEPVQGYGYPVAMSSALPAPHVHVGVRGGGQHEVFGGGPAPLAVYYGGAPYGEASSRGGCSAADEGSSSSSASPAPVGPNYE

SEQ ID NO: 40759 - protein, 226 aa, Oryza sativa
MAKAQPPPAREPLLPSSASPPPYLDARAGADANADSYVLLVPVRLRRLRRGCRCRCLGPLLSTLALLSLAGFLLWPADPDVSVARLRLAHVSVSARPTVRVTISAALKVRVRNPDLFALDYGRLDVDIGYRGAPLGRVTSGGGRVRARAVSYIDANLSLDGISVVEDAIYLLEDLARGSVPFDTVAEVEGHVHLFFLSIPVKGRISCVVHINPHNQTIVHQDCYPD

SEQ ID NO: 40760 - protein, 300 aa, Oryza sativa
MRMALVRERAMVYGGGCDAEAFGGGFESSQMGYGHDALLDIDAAALFGGYEAAASAGCALVQDGAAGWAGAGASSSVLAFDRAAQAEEAECDAWIEAMDQSYGAGGEAAPYRSTTAVAFDAATGCFSLTERATGGGGGAGGRQFGLLFPSTSGGGVSPERAAPAPAPRGSQKRAHAESSQAMSPSKKQCGAGRKAGKAKSAPTTPTKDPQSLAAKNRRERISERLRILQELVPNGTKVDLVTMLEKAISYVKFLQLQVKVLATDEFWPAQGGKAPEISQVKEALDAILSSSSPLMGQLMN

SEQ ID NO: 40761 - protein, 273 aa, Oryza sativa
MRRLRLAAAAAAPHGVLLLLLILLPLVAAAGPAAAKAPAAPPAPPNVTTAMAKGGCKAFADLIAASPDASSTYQSAAGGGITVFCPTDDAVRAFLPRYKNLTADGKAELLLFHAVPVYYSRGSLKSNNGVMNTLATDGAAKNYNFTVQNEGDAVTIKTAASGDAARVKSTVVDADPVAIFTVDAVIEPVELFKPAPSPTPAPSPAPAADAPKASKPAHHPAPVVADAPGPAATDSPPADQKKEAKKSAAAGAPPCVRWFAAALAAVAMASTLA

SEQ ID NO: 40762 - protein, 340 aa, Oryza sativa
MATSSRRMRAVQYDKYGGGAQALKHVEVPIPTPKKGEVLIKMEAGSINQVDWKFQKGVARPFMPNKFPFIPVYDLAGEVVELGRGVSSFKVGDKVIAINFPGGGGLAEYAVAQASRTAPRPPEVSAAVGACLPIAAVTALVALRTAGVSLDAGDGGGGGAKKNVLVTAASGGVGHFAVQLASAAGHRVTATCGARNAGLVGGLGADKVLDYATPEGAALRSPSGRRYDAVVHCAAVAGLPWSAFAPVLADAGVVVDLTPGAAAFATALRQRVTFSRKRLVPLFVSPTKEDMELVAGMVAEGKLRAVIESRHPLSRAEEGWARSMAGHATGKIIVEMGDEQ

SEQ ID NO: 40763 - protein, 223 aa, Oryza sativa
MAARPIAKAAHELPSLYRLALKTPEILVGAGKSGQADNEALDLFDGMPPKNQVAWNKALGMLVGAGRIERALSFFHEMPGKNAASYATMIGGLSRAGAASVARRLFDDLPLGKHNVFTWTAMVSCHVRNGEPREAVQLFAALYGELYERGVLPNAHTLSSLLKACVALQSLAMATQLHALALKLLEEEVGKPEAGRALNTYQDAAGSSETLNSSESSAFAGHG

SEQ ID NO: 40764 - protein, 213 aa, Oryza sativa
MTTPSYRARAACPREQQHTARATATTQGSATTTATAGGSATATADPVVGRAAAVDPAMGRTAAADSATGRSGGGMRGGGQRAAADPAMGTVAACEEELAGEERRRRARRRSRGGGGSGDGAAADSAMGRSCGGLRRGARGEGAAAACEEEVEGRRRIRRWEGAAATFPLALARCRLFLLLAAGFSSCSCSPSAHPLALPPAMGRTVVADPAIG

SEQ ID NO: 40765 - protein, 508 aa, Oryza sativa
MTCHSAMAALTVGHAAIVHATTRLEDARSTGRRRRRRGMITVRAAAAATSGWEPGSWRARPARQIPEYPDAAALEGAERELASFPPLVFAGEARKLEERLGDAAMGRAFLLQGGDCAESFKEFAANNIRDTFRLMLQMAVVLTFGGQMPTIKVGRMAGQFAKPRSNPTETIDGVTLPSYRGDIINSDGFDEKSRAPDPERLIRAYSQSASTLNLLRGFAHGGYADLQRVTQWNLDFLRDSTQGDRYMELSERVHDAIGFMVAAGLTPQHPIMTTAEFWTSHECLHLPYEQALTRVDSISGLYYDCSAHMLWVGERTRQLDGAHVEFLRGISNPLGVKVSDKLEPSELVKLCEILNPHNKPGRLTIITRMGAENTRVKLPHMIRAVRQAGLIVTWVSDPMHGNTISAPCGLKTRSFDAIRCELRAFFDVHEQEGSYPGGIHLEMTGQNVTECIGGSKTVTLDDLSSRYRTHCDPRLNASQSLELAFAIADRLRKKRDRAWNRLVYRAVA

SEQ ID NO: 40766 - protein, 244 aa, Oryza sativa
MGGVTSSVAAKFAFFPPDPPAYGVADEEEPPPPGSAAPAAAATARRVSLTGVPWREGVEARRVRTRRGTEIIAVYVRCPKARLTVLYSHGNAADIGKMYELFVEFSARLHVNLMGYDYSGYGRSSGKASEANTFADIEAAYKCLVEVYGTREEDIILYGQSVGSGPTVDLAAQLHRIRAVVLHSPILSGLRVMYSVKKTYWFDIYKNIEKMPLVKSPVLVIHGTNDDIVDCSHGKQLWELCQNK

SEQ ID NO: 40767 - protein, 69 aa, Oryza sativa
MMACRALALLPLPAPSRLPRPRAASLARLDAARRRASASLLVRCCANPAGPGGQEDPPQDAVLKAISRE

SEQ ID NO: 40768 - protein, 164 aa, Oryza sativa
MLACYKSTIHKIYVLECSDKQHFLQSKFCLINQVHENAYASDFHHCFLLQQNSSGSADSGSGPRLDGINISIGRRGESCSSVCRAKGQSCVPSRLSVLNKCEILQKYMRCKSGCFSNLGPDQPAQVVDEAPSNLNPGACLYMQMDERLTCDGSHQHTRRLCPCA

SEQ ID NO: 40769 - protein, 257 aa, Oryza sativa
MGPPSASSSPAAAPRRSAPTMRLRREALESVLEELRRALDELRECGELGVPLPDPEGAVNDGGGGEEQPDNEEEGGGGGSSGGGNDDDSAASLAGGSDGETDKLCDLLKSTFESPNFFQKVDEIQKSLYQNDAVEQDPSWDIVKAVDLWEDDDLGDGYVLVKNDDATEGMAFFIATYISSLKTANECSPDQIRKALKKTFSSRKRKGKLRKAWNGTKVIYNVDSWSATAIGIYHNQAILKVATTAFRTSCSVISKFL

SEQ ID NO: 40770 - protein, 307 aa, Oryza sativa
MQMSSMACHSLPESGSNLSAADELFQNQRSEQGIYWTLWDSRLSDDLNTTTVYSDNHGSNGGGTQSFDTSEHCSTVPSDSDEQPGYPSQFEPLHMEQTNDMFLSQFSDEEVRRMDAPFQALDMFPDSMHRLMSYEHILNGALVSDSKNQEVNMDQDDMDTCGFPLYFSHGLQDDGGLPSFAKGMVAADTSSMDKAGASATERGDPGSSPPGFEEAVLEELEEVMVQMARTTRICLRDAFYRLAEGSRSPRSAAAAADGATVAEATSASTTRPRRRRDAIDRTVVSLTFRPPPCSPEAEAAMMRPTRA

SEQ ID NO: 40771 - protein, 528 aa, Oryza sativa
MHDANMAMSSRSLGALAAFVFLCSAASMSSSMAATDSFLQCLSASIPSQLLYTQSSPSYTSVLDAGIRNPKFLTNTTRPVWIITPTNASHVQAAVLCGRRNGVRLRIRSGGHDYEGLSYRSERPETFAVLDLVNIRAVRVDAASATAWVDSGATLGEMYYAIGKAGGRIAFPAGLCPTVGVGGHFSGGGFGMLLRKYGLAADNVVDAVLVDAKGRLLDKNSMGSDVFWALRGGAGESFGIVLSWKVKLVAVPPTVTVFNVPVTVSQGAIDVVTRWQAVAPSLPDDLFIRVLVQGQRASFQSLYLGTCDALLPVMRSRFPELGMNRSDCREMTWIQSVPYIYLGSSATVEDILNRTIAMDTSNKATSDYVRQAIGRDTWSAIFGWLARPNAGLMILDPYGGQIGSVAEAATPFPHRGGVLYNIQYMNFWSAAGGGGGGAAQRAWIRDFYAFMAPFVSKDPREAYANYRDLDLGENVVGAGGVSSYDAGKVWGEKYFRGNYQRLAMAKAQIDADDYFRNEQSIPPLVAGK

SEQ ID NO: 40772 - protein, 180 aa, Oryza sativa
MERVRGKRRARGVFRLPCATAPPLRRVPLHRPSSSPTAGAAAAPVVLPCRSCSLRGLEERVILRPPGHCLRPRHPTPARLLCLHPLPRCSRSTPPARPDSAPSPPSPFLPWKPSLVESRDWTQRFFQGLGVGAPLPAPVELHGTYSALVRGVLSSSTVSASASPCISCTLRRSPSPSPPS

SEQ ID NO: 40773 - protein, 427 aa, Oryza sativa
MATISNVVTNTYCASPTPLLRRRATAMALRVQLVLAVAVVVPALGVAAGGATLGVNYGQVADNLPPPQAAAMLLRSLNATKVKLYDADARVLSAFAGSGANFTVGLPDRLVPRLAADPSAAAAWVRANILPHIPATSITAVTVGNEVLTGNDSAMLRSLLPAMQSLHAALAACNLTSRVVVTTAHSLAVLSSSFPPSSAAFRRELLPYMAPLLAFLAKTGSPFLINAYPYFAYKGDPEHVDLNYVLFEANAGVGDPATGLRYDNMLHAQVDAVRAAICRANYGKAVEIRVSETGWPSRGDDDEAGATPENAARYNGNLMRLVAQGKGTPAAPGEALQVYVFALFNEDMKPGPASERHYGLFKPDGTPAYDVGVKAPTIGGSWKGRANGTSGGGAGGLVVAEGPGGADGAGQGTGFYTVSAAAHKVID

SEQ ID NO: 40774 - protein, 545 aa, Oryza sativa
MATDGGVLQLHPYAMAAAAVALASAYMVWFWALSRRLSGPRMWPLVGSLPSVVLNRARVHDWIADNLRATGDAATYQTCILPLPFLARRQGLVTVTCNPRNLEHILRARFDNYPKGPMWQASFHDLLGQGIFNSDGETWLIQRKTAALEFTTRTLRQAMARWANRSIKYRLWRILDDHCNAAASVDLQDLLLRLTFDNICGLTFGKDPETLSPGLPENPFANAFDEATEATMQRFLFPSLLWRIKKAFGVGSERSLRDSLAVVDRHMTETIAARKATPSDDLLSRFMKKRDSKGKAFPEDVLQWIALNFVLAGRDTSSVALSWFFWTLMQRRDVERKVVLEIASVLRETRGDDTARWTEEPLNFDELERLVYLKAALTETLRLYPSVPQDSKYVVADDVLPDGTVVPAGSAITYSIYSVGRMESIWGKDCAEFRPERWLSADGSRFEPVKDAYRFVAFNGGPRTCLGKDLAYLQMKSIASAVLLRNSVELVPGHKVEQKMSLTLFMKNGLRVHVKPRDIASYVEPSEPAPPQGSLVIPTTTAAAA

SEQ ID NO: 40775 - protein, 226 aa, Oryza sativa
MTLAVSTAVMHTPLCSDDVRYTIPAVPIKQACHVATSAASTARYAAGERSHRASSSFHPPAAASPATASAVAAACMITCTSTAMRNPPDTALRYTSSITGRYAAKSPAAPSVTAKPTKYLARLPPPGCSPESDDRSAISTELSVRSTTALRLEKLSGWRTMMAASTSVKASCVDSSSDEVDTGRYDELYEKSRLFTPMSTPMTTHAASSRRVNHANGRGCDGDRPA

SEQ ID NO: 40776 - protein, 330 aa, Oryza sativa
MKQRHATATASALFALLPLSLLLFRLLVLLVRLRLAAFRDAALSLHFLARLRIRPVHLRLPGTDATTVRVWCPAAPSAKPPLLLLHGFGGDSKWTWARNLPALSRHFHVYAPDLLFFGAHSRSASPLRTVAFQARCAAEAMRLLGVDRYDVVGISYGGFVAYRLAAVEGRDRVPRVVVMTSGVAATPGEMREMAAREERAVEESLLPETADGLRRLVRRSMHRPPPWMPDFVLDDFIKLMCVVQRKERAELLHELLKNGAGIDPLPVLTQKTLILWGDKDQVFPLDLGHRLQRHLGDVSRLEIIKDAGHALQLEGADQVNRFIKSFLLDS

SEQ ID NO: 40777 - protein, 95 aa, Oryza sativa
MATTSDIAGRSFRCSCTQRAAVRATISNASSCLAVGSAGRLSSNLPSSPSSMIGSEKATKLVTSPSSFRSMKIGLLPVSISSITTPKLFTSLLRV

SEQ ID NO: 40778 - protein, 67 aa, Oryza sativa
MALFGGTKRHRQAVRPAYICTASTEYYKLVLVIPNVWIKYSSSSQRCWSSDRMPELHNALHRSETDR

SEQ ID NO: 40779 - protein, 527 aa, Oryza sativa
MEEFDGAIARRRAMARRGSGGGNGDGDGITVHVEQMARGLMQRQEAAASDEQHRIMASSHRVSRVPAHLRDANADAYTPRFVAVGPLHRGDARRLGAGERLKMAYLHSLISRGHSDQARQLAVIEEYIRAVAAREREARAFYSEDVDMYAEEFIMMLVLDGCFIIEHLVNVAIGRDEPSLHATPFAPVQLSVDLILAENQIPFFVLVDLVRITDLPEFASTGHPPPVLIVKLVLYYLAGEKGRDMVGDALPPAEGVSHILHLLHAMIVAARTKWEPPPRIQDGAVLGTAQDGARLLRRLPLLLLVPLLYPILPEESKWRASYGREDVPSASDLKRMWVRFKKPRGGGAAAVTGIASVMGPVPLAVKLAHEDKLRLPQLRVELRTAPLLLNLMAFEQSAAKAEARDVSAYVSFMAKMVQSAEDAGALAAAEVVAVVHGNGGGEGKEEVVRLFRQVGAASGEVELERSYLGGMVVELRERSRHPLFMMWADVKRNYFTVPWAVVAEFVAFVTFVSTIVQMYSSFKQKGG

SEQ ID NO: 40780 - protein, 84 aa, Oryza sativa
MWAFLGAATRLHGCREDRGEEGRRYRRLRLAAAAGATGEEHCCSGRSEEGGGLQVQVRRHAGATGCCFLGEAMHVSKSEQGFSS

SEQ ID NO: 40781 - protein, 108 aa, Oryza sativa
MLAAAGRDCVPRQRNSLVSLQSRSGVEVCTFSLILKNAASLLTDKDPLKVEADARLAELIQSFSDLGTVVDNSNIELTADREKMKDGLLSTVSAIDKFEQSVKDCLGI

SEQ ID NO: 40782 - protein, 436 aa, Oryza sativa
MVLGKSIRRSNGHASSSSSILDGDDTSSASGGGMSIYYQKINQRVAVLEKVAVSVHESRASTREAALASLVGALEGFVPAHFIGWHLRGEIVRGCCASIKKGAAAKEARLALRAVALLAVTLGPGSKRRILPAETYNPLEPGPGSKKIMAETFPLVSRILEVSTDAPLVIAALESLAVVAFVDVAAENMDDTEACMKALWGLIRPSTGPKVAGVARKTSPHVLAAAVSAWTLVLTTTDGWKKKKAAASSPAAWRDTAAHLASLLHSDSRAVRMAAGEALAVTIEMKLLTRDSNGALISGVAARASELANEAAGAGVGKANFVEQKELFNSITTFLAGGKAPASSVRASSSHHGRLTASTWTDIVRLNFLRRFLGGGFLPHLQGKVLMGEEAPLIGQVFVVKEDDMAMDHKKKVEKQRTLNRERSIVSDLKHGSSHV

SEQ ID NO: 40783 - protein, 337 aa, Oryza sativa
MRRRHREQLPPGADRERLLAEEVLYLHSLWRRAAPAPIPPRGSGSVATLRRVDRRRRRRLERRAQEQQREESGPEWPLAPSPPASPTTWHDNKAASSPAQRPPQQKQPSPGSLSQRAALRAAEEFFSNRGSDDDDEVVEEEGSESEGEEAAGFFMGLFERDAALRGHYERGWEGGEFVCMACVGRKGKARRFAGCVGLVQHARAATRCGRPRAHRAFAAAICRVLGWDIDRMPSVVIDPRGTLGQALAAAEAAAAVAAQENNVDAVEKTISSEDQVAEKEDVETGKNDGSLSDVDAMKENSNVGKNSSSINDNNGDVHEKGNGGAYEKDIICCIHVN

SEQ ID NO: 40784 - protein, 364 aa, Oryza sativa
MRKGAAGMACTCSAAAAASALVKLLVLVAAVAATTSAGGGDEPTYETKSIDPSLAVMTLPAPVTGPESLAFDGRGDGPYTGGSDGRILRWRGGRLGWTEFAYNSRHKSVGVCSPEKKLVVPESVCGRPLGLQFHHASGDLYVADAYLGLLRVPARGGLAEVVATEAAGVPFNFLNGLDVDQRTGDVYFTDSSTTYRRSQYLLVVAMGDETGRLLRYDARRRRVTVLHSGLPYPNGVAVSDDGTHVVVAHTGLCELRRYWLRGPRAGKSETFAEVPGYPDNVRRDGDGGYWVALSRGADNDDVAPTVAVRVTAAGKKKGGGAAVVAEALAGFSFVTVSEVAEQNGTLWIGSVDTPYAGAAVRGRR

SEQ ID NO: 40785 - protein, 535 aa, Oryza sativa
MSEARTAIFARVSSDAYTNVSELIFLKMHALELDFHLAKKTGGVTKILDRGAKGVTTMAWCLMFVVFPTGFEMGLVCMLLQQEVGIEFVGVAVSAIVTYVVWTTKVTNWRTKFRDAYNDAETKSGSMVVDSLLNYETVKYFGNERFEAARLRSANEKMNHYVVKLEQSMSVLNFGQQMIFITAATTSLYFASTGVLAGTMTVGDLVLIDSLLLQLYTPLSWLGMIYREITTSTQNMQAMLGLLNRPIKVVDKPEVTEFKYVDGTIEFRDACFSYGDKKVLNHVNLIIPGGSTVAFVGPSGTGKTTIFRLLFRFFNLNSGTILVDGQEIDKVSMSSLRKHFGVIPQDTVMFNDTVRFNIEYGSLGATQEQIEDVARKAAVHDSITRLTDGYETVVGERGLKLSGGEKQRVAIARVFLQNPDIVLADEATSALDTQTEAHVIDTLRQKGGSRRTIVMIAHRLATVKNCDTIFVLNNQGQIAERGSHYDLISKGGLYASLWNQQLLARHHNVGTVAEPSLATGSIPVKEGGAPTTTSG

SEQ ID NO: 40786 - protein, 94 aa, Oryza sativa
MFGFKPDAHPSSLRLSMLAHTEGQSLLFLRSCQKKITIGDLVIRHSRSKEMSAELLRARILGLDFTVCWRAMVRKPAAGRRRFGRHAEIDARDR

SEQ ID NO: 40787 - protein, 449 aa, Oryza sativa
MFVDSKEKLLCFEYLRNGSLRSHLDTAGSCVLQWQICYQIIKGICLGLHYLHERKIIHLDLKPDNVLLDDSMVPKIADFGLSRLLSEEKSRMVTERIFGTRRYMAPEYLVNGDITVKSDIYSLGLIIREMVMGPNNEGTTTENVLEIWRHRLEQDSSKMRQTPIEMRYRQIIEACIEISETCIAGKPDKRPTTGDILRRLEKEEAGNWSIVPVTPVVDWISSLSRLMESIKRMAVTSPEPRTIRGEESKALQLQPGPSQPGDRRPADKSFWLDATSNAKCYMLSSRLLKVTWGESPEHWKWITLPDSRFAECAELLNVYWLAVIGEIATEDLTPGTRYAVYLVYKLTGTSVGLRGGQTQRSSLRLYGEITVSTGKVSVDVVPAAARGMAAGVAYPVARGDGWMELKLAEFAADEKLLGEKKVIVDFREENDHVKKSGLVIEGMEFRPNK

SEQ ID NO: 40788 - protein, 216 aa, Oryza sativa
MRLQERLKDLRLQEEIWRILSKICAYEGTETISSPIPILVYSTSDPQLWEAAVRYQEQVGGRVRFPLLYLKVDNESGKVVDVGKYWDDRHGVGEPRGRFKSFKWFADKHKMFTAEAETASSTKSTAQLQQHSYSEEEDLTMYKSHQQLQVSEEKDTTIEENSEKKWHARLIDEYIRGILEGMITQIRRLRTMRMFSLRVLWKLTHVLLVNFNISRR

SEQ ID NO: 40789 - protein, 468 aa, Oryza sativa
MPPSPPMATTERRRRCGQRQRRDKHKRGSSMKVAGAGDGAAAVMTTVEDVPDHLLEVILLRLDSSVSLLRAAAACTRWRRVVADAGFLRSFRSLHGARHVAGRYHTVDPSFGWPPSAGGSSVVFVPSSPPVIGVASRFFSLDFLPDYDDGNSWSWELVDSRGGLLLFSKKRKSTGRWAAMADARGFSFPDLVVCEPLTRRYQGIASAVYFRRHPCLGVFLLDGDAADADDTGGGGIGMSNFRVVAALHDRTWQHDGAVPLACVFTSGSDGGWRVLQSAAAAAVDLPERFDFINFAGRAGGCLYWGIDGEDGAMLVLDVATMRFSIDMFPETIRASYDKWTFRVIDGGYALRVVRVMRNDLKVFAQLAGSGEWVVERLVSLPEATRELPGRRETYFRQEAKIVAANAAYVLLTPQEKKRWLFSVELETGKVERRHERNRYAGAAYSYELPWPPALQACADYGGGRRRRR

SEQ ID NO: 40790 - protein, 432 aa, Oryza sativa
MGFFSPSNSSGLYLGIWYNNVPKLTVVWVADQLAPITDHPSSSKLAMADDSSNLVLSDAAGRVLWRTNVTAGGVNSSGAVAVLVNSGNLVLRLPDDTALWQTFEHPSDVFMAGMKLGIDYRSHSGMRIVSWKGAGDPSPGSFSFGVDPERPLQAKIWNGSRVHWRSSMWTGYMVDSNYQKGGSSAIYTAVVYTDDEIYASFTLSAGAPPMHYLMSYSGDLHLQSWSNVSSAWVTNARFPRRDCSLFGYCGAFGYCGNSTGGGGGAGGGVSTCHCLEGFEPASGADWSRGDFSLGCRRKEAARCGDGFAEFPDMKLPDGYALVGNMNAGECAAACRRNCSCVAYAYADLSRSTRRDPTRCLMWGGELLDMEKVNESWGDLGETLYLRMAGAGRGSKRSAVKFALPIVLASILIPTCILICVPKFKGTYICSYK

SEQ ID NO: 40791 - protein, 178 aa, Oryza sativa
MVPKVSDFGIARMFEGDQTTAYTRKVIGTYGYMSPEYAMDGVFSMKSDVFSFGVLVLEIVAGRRNRGFCESEINLNLLRYAWMLWKEGKSVDLLDELIGDIFDDNEVLRCVHVALLCVEVEPKNRPLMSSVVMMLASENATLPQPNEPGVNIGKITLDTESSHGLTSNGVTTTTIEAR

SEQ ID NO: 40792 - protein, 323 aa, Oryza sativa
MKGSDLPPGGSGQKPPGGPPGNRKGKRGAEAPPATSSSTPTTARRSKRLAGAPPDHPAEAGPSSTNARRSSRLAGAPPATPGAAAAAPTSSSPTAARRSNRLAGAPPDPPAAVAAPPTSSSPTTAMRSNRLAGAPSDPPAAATAGPTSPSPTTARRSNRLAGAPPDPPAAATAGPTSKTARRSKRLAGEAPETPVEAGQTSPSSTTARQSKRSAGKSPAIPKGSGQPSSAEKSKRTADASSADPAEARPSSLSPTTAPVRTTAVSVSVRKAAEGQRRTTTSGRGTTTSGRGDAAEQEAMREAVLYVRRELSVVAPDDLTSPHN

SEQ ID NO: 40793 - protein, 571 aa, Oryza sativa
MSTSHLLESFSSNQISQESRLDTSRIDSSDEAIRNLVSASSAQNYDPAQLVANYPIDPQLLQHENPNNCTENDLAPQLPLDKYRLNVDQNPHIIRRKPQEKITYLQQVAVRYLKPPPPPRAGDIVINQLPHKQVAPAPALIVRQAPPKPVTPPPVVIREAPPQPPRPIPGKSVTIPGRTVPPPARKVVVERLPPLPPKPQQVFIERWLPFPQQTQRVVYKAAEAICSIPDPKNVVIQWESPEVELRKEFKNLGVINADPQEYIKRYGGSLLSADQLPEIAHQYSKQAGVQLAAGHQAADHPLLEGDVHALKWVDLDSLGLGFYKDKLAASGNGHAASGSVSAAISGSASAALSGAAHYSQHSAALSGVHHSGVHRSSIQHQSAALSGVHSAALSGVHHSGVHHSGVHHSGVHHSGVHQSAALSGVHYSTHTARSGSISASVAPDQVFQGGEFDCNEQQAAPVQQDYGEFDCNEVQNTPAPVQQQQDYGEFDCNEVQNTPAPVQQQQDYGEFDCNEVQNTPAPVQQQQDYGEFDCNEQQAAPVQQESGEFNCNEQQLDQNELLNYSRQHGSY

SEQ ID NO: 40794 - protein, 400 aa, Oryza sativa
MASSCTMVPADLVEEKAAAAAVEEDAGSYLRADQVDLMSLDFEIEERMADRFRKLNSGGVERGDEGPKAAWEIDLSKLEIGHVVEHGDHGTLFRGKYYSQDVAVKLLDWGAEGDSSEDQIAHFRTSLKEVVAVWHEFNHPNITKFIGASMGTTNLNIPKDIPDHSSRKGARTDLPDRACCVVVEYLTGGTLKQHLIKHYRKNKKLLYEEVVRLALDLARGLSFLHSKKIVHRDVKSENMLLDPQLNLKIADFGVARLVEAQDPKDLTRTTGTLGYMAPEVLDGKPYNRKCDVYSFGICLWETYCCDMPYGPYSDLSFADFSSFVVHKNLRPEIPDCCPSAMASIMRRCWDANPEVRPEMEEVVRLLESLDTSNGGGMLLEKKKKKHPGGGCFCFFVPRAA

SEQ ID NO: 40795 - protein, 235 aa, Oryza sativa
MTTSTADRLQLRVYAIKLRVAAASPPRAAVPLPVVHISTGCCSAERRPPHQGYIIGGLLAAASTWSCSCVVLSDRSFAAFVVFLTVRASTTLSSILVIVSRSGSSSSTSSIAAAFPSCHCRRSRLVVQLPLHSYRRRRPGHWSRYIAFYFVQHDSSPASPYLPRLHFALLRQPRAAPAILPLRRSRAATVLEAFSASLLRHWHMIHGGPLSRPRGIGNTGTRVRPELSRGLANPV

SEQ ID NO: 40796 - protein, 317 aa, Oryza sativa
MPGLGITPDVVTYTTVLSAYCGKGDIEGAQKLFDDIIASGRRPDVTMYTVLIDGYCQCGNLQDAARIMDEMEAARVQPNEVTYSVVIEACCKEEKPIEARDFMREMLGAGYVPDTALGAKVVDVLCQDGKSEEAYQLWRWMEKKNVPPDNMVTSTLIYWLCKNGMVREARNLFDELERGFKPSLLTYNSLISGLCENEELQEAGRVWDDMVERGYEPNAMTYEALIKGLCKTGKPNEGATVFEEMVSRGCKPSSLLFQVLVDSLSEPRHEDTIRKILETAALYGRYFLDGDSWEIFVRKVVNATDTSNKHLDLVLDM

SEQ ID NO: 40797 - protein, 657 aa, Oryza sativa
MRRRSSLVHAVLLAVAAVALPLAAGQPWPSCGTGGTYAANSTYETNLLDLISALQGNASSSPTLYASGAVGSGGRDAVYGVMLCRGDLSTSDCNDCGTRAGQDVGRVCNRTRDAALVYNQCYVRVSDADFLAAATNNSGEVALMSSTNITRAADVRAYDAAVVSLLNATVRYAVENSTRMFATGQRVGSDPGFSDIYSMAQCSPALSRPLCRSCLDGLVGQWWDTFPVNVEGARIAGTRCNLRSELNQGTFYTGQPMVVLRADGLAPAQGPAPAATTGGKNNSASKVLVIVVPIVAVAIVAATSFCIWNVRRKRRSRKAEHFSELDASEDLESVKSTLITLASLQVATDNFHESKKLGEGGFGAVYKGLLFGQEVAVKRLAKGSNQGLEELKNELVLVAKLHHKNLVRLVGFCLEEGERLLVYKYIPNKSLDIFLFDSEQSRQLDWATRFKIIEGIARGLQYLHQDSQKKIIHRDMKASNVLLDADMNPKIGDFGLARLFGQDQTRDVTNRIVGTFGYMSPEYVIRGQYSTKSDVFSFGILVIEIVTGRRNSGPHFLEQNEDLISIVRRHWEEGNIVEMTDHSLGRNYPEAELLKCVSIGLLCVQQNPVDRPTMADVMVLLNSDATSTLPAFATHSPTISIEGNSGYSQTVTQLSPR

SEQ ID NO: 40798 - protein, 144 aa, Oryza sativa
MESHHLWPPWEFIWKSSAPPRVKFFGWLMTMNRLPTAVNLHKKSTIPSLTCQLCNTCPEDTDHIFLAYPLASAFWGLIQVLPMLTSLSEIHTIHWSGDLPERLNSTFFLLCCWRLWNHRNEVVFQLLAPSINRLLRCCANDAKL

SEQ ID NO: 40799 - protein, 140 aa, Oryza sativa
MTATTVAKSSEEVPPARGLPLYLHPPFPHGPERKGEGAGLGCGGRAAHDDRYIVFSPILRLILSVVTFLFSIRVFGSQDFAFFFSVRLPMWCSVGVLHRWTATRRLPSPRGGSVHARCSPFRNLVEMSGSMFLFFPSGCS

SEQ ID NO: 40800 - protein, 78 aa, Oryza sativa
MPRRGRRGDEAQVGLSQEHAGCRILGVGRRRRGRRHAGELGREDHGAGRPLLCRAGLGIRRWLDRRHEQPIRTSHRGG

SEQ ID NO: 40801 - protein, 106 aa, Oryza sativa
MTGWAEPSSHRFCSRDPPSTATGGADPATLPLPHGYRPLFGPLSRGSTVGGDGRGRSGDLFPSRTCPVFSPPASRADPSPATTRGLDPATSSPPATAGLGAAWIEG

SEQ ID NO: 40802 - protein, 272 aa, Oryza sativa
MGTEIAAVPNISEGLAKISKKMMDLAAQLQVLAAQSAEQAMPLGAAERSDRRAMTFLRPRQQDFKRRLRSRMRHMQQPKVASTAPPLPKPPPRGLRPSCWACRWRCHLQPRWHGFRQEQGWRRGFWKRQEQQSCFHRYFQQRRWRKRRLLLPWSHGVKQGHHVLLGMALNTIEGDRDSVFPQLRQLNGPDWWTGLRSAASPCWLRYAYHTGQSSWAFRFGLWRGPKFPYRASGWGPPVYVLDDNIRVGLFAIVLVIYIFIISQDVKGLRVLV

SEQ ID NO: 40803 - protein, 412 aa, Oryza sativa
MEDKGTQPPEPAAAAAISSVLANDDLLREILLRLGLPTTLVRAALVSTRWLRLASDPAFLRRFRARHPPRLLGFYHTARARFQDEVPAFVPLPQPPELAAALRGARLRLAPGSSGSGPDAPVILSCRNGRVLAAEFPPDGPRVSIISPMHPARHPPALPLVYELPRQPGQILHASCMLLFPDVGSDDPSYTFVEFLRKDQEMLAKAVSVRAEISDLNSVRESATIEIQESWERSIRRDVLVNGNLYLLGGKGHVLGLNLASMRLFLFRLPDGVQQLHRMGNIELLRAGDSGLYLIHLKGFQIHVWFRASDSDIGGGNWELVDNICLGESFGQFAEPNWESGDALVALHRVEDNAEVFLRVDRVIFHIHIMNRTVNKVFEMSPEAYRYFDIFPFMMLWPPTFPQLRNDHDQDQ

SEQ ID NO: 40804 - protein, 70 aa, Oryza sativa
MVKLKFAEHLKEAVTYIQQGHVRVGPETVTDPAFLVTRNMEDFITWVDSSKIKRKVQEYNGELDDFDAMA

SEQ ID NO: 40805 - protein, 392 aa, Oryza sativa
MLHLRQCLLPLLRAAAAAHPHTSAASSSSLHLSRRLFSTAAGPDTAPPFSVEEYLVATCGLTGAQALKASKKLSHLRSPAKPDAVLAVLSGVGLSRADLAAVVAADPMLLCARARNVARRLHSLRDRVGLSDADVARFLLAGGAMGLRKCDIAPRLEFWIGFVGSFDKLLPALKGNNGILMSDLDKVVKPNIALLQECGLSVCEIAKLSTLKWTVLSLSPERVKASVLCVEKLVVPRSSDRFKHVLKSACWISEDMLAMKMEFLRSTLGCSEDKLRAAVCISPHIFYLSDKNLCRKIDFLISEVGLEREFIVERPWVLGYSLEKRMVPRHSVMKILRTMGLMKDAVDFSSSLVYSEKKFVARYIDPYKQAAPTLADSYAAACAGKMPAHVHR

SEQ ID NO: 40806 - protein, 382 aa, Oryza sativa
MPSLPNSGDEGGAPPPTPPPPGARRVVVAHRLPLRADPNPGAPHGFDFSLDPHALPLQLSHGVPRPVVFVGVLPSAVAEAVQASDELAADLLARFSCYLVFLPAKLHADFYDGFCKHYMWPHLHYLLPLAPSYGRGGGLPFNGDLYRAFLTVNTHFAERVFELLNPDEDLVFVHDYHLWAFPTFLRHKSPRARIGFFLHSPFPSSELFRAIPVREDLLRALLNADLVGFHTFDYARHFLSACSRVLGLSNRSRRGYIGIEYFGRTVVVKILSVGIDMGQLRAVLPLPETVAKANEIADKYRGRQLMLGVDDMDLFKGIGLKLLAMESCWSRGRTCVARWSSCRSTTRRGALAATSTRSARRCWRSVTGSMPGSAGRGTSRWL

SEQ ID NO: 40807 - protein, 691 aa, Oryza sativa
MQPREIARLLLGFWSEWATQILVVLSLIQQFFPLFFSGIRRRQGRNKRRAVLWLAYKFANITATYALGRLSLSAAQRSHRLVPFWAPFLLLHLAGPDNITAYSLEDSKIAGRHALTLFVQGLGAVFVLVKHVGSSRTLLLPGAIMVTTVAVFKMFEKTWALWIANFKVILSSVEREDGEEEPRQLYRVYLEEDELPRGGFKGKEVDEEEFLMRRAHAVFLVCKSAMVDSSMYDPDRYFLRILAYLRENRVDLWTLMEMELSLMYDILYTKAAVIHTWTGYCICIVSSLTVAASFLLFQLYGKEGQSSRADITITYVLLSSSLLMEMASLLSALWSTWTFSFLCATRWTSLRHAALCSKKWHCLRNMVLSFRRLACSTGIWSYLSLSRRWSGTLGQYNMLDACTARPPLLGKLVVRLVFSRLSKKLGFSRLAEMLGFGRLAEELSYNVVTADIPKGLKDMVIEYIKFMIKDRTVNTLGIFREQWGKVAIKRWLEDKQVDDEYKEYLEKRLGAELHEGIIVWHIATDIFIAQRKADDQDAVKEAVKALSNYMMFLLVKQPDMLPGLAQNKMYQWTKESLAKEWEEAGVPAYVSGLHPSQKLANMLHDKEVTQDLISNRLFFATQLAKRLLERDDTMKLVYGIWVDFLIYASNRCSRESHAKRLNNDGEFTTIVWLTAEHLYQLQIYDAQEKHH

SEQ ID NO: 40808 - protein, 354 aa, Oryza sativa
MQQGAAGQAGPSGGGGGGGGGGGGGADRLSALPDAVLFRIVSHLGARQAVRTSVLSKRWRHVWASAPRVDVRHPCACDESADQERFHGFVTTMLLRRRPFAPIKALRLCWSHDGDANNWIAHAVRRGAEEIDFSARHHQDDPKPELEYTSFISHKIKILKLTRVRMGIKFITQICYRCTFLEELELKNVNSLEGQIQSTSLKRLSIINCLISDGFLVDAPNLISLCFFRPLSGKSTEGANHSSDNRSWPFSASVWEFDDDGSDHDDDFFAIASGGEHFDDKRDNESDQDNGSSDEDSDDKRDQESDHDEDVPSSPYSDSKDSCDGSDSDASLMNPVIRRVMILKIATAMICWKT

SEQ ID NO: 40809 - protein, 326 aa, Oryza sativa
MAVRGSHHPDERVARRLQPEAELHRLLLLRVHDAPEADVDDGAGLLAVEPPEALVGADGGGVPPRRQRRGAPVVERDRPDSPELHPPGLRVAGDVLRLHLEDGVDDDAVGLRACALQVVGELLPPGDVAEEARGLRPRDLDPPRQAGHHHRRVVVGDAVVGAEPLDVVLAEEAEGAHAEEGEPRDGEAGGELRRPRVAEVRHDARRGRRAPLVRAEEEVALDGLAEARHGGEVARHELGGDVVHVVHALRQAGAGVVERELGEADGQAGPPGRVDGGAHPRRRGRRGDDGAERAVGGEQQRGVHRRYEVALRHERDEHEVRRRHRC

SEQ ID NO: 40810 - protein, 807 aa, Oryza sativa
MRGDGAGSGSYEYLSCQKTTGMIWNLTSSYTDKSNEASMVSASLIVFALAALFFNLNLFSGISDVGAILDPKVRVILSKALSLFLPVMSYLFSEAKNAGAAASAAGGSTGSLELELSLRARLILVWMLLVELLRKKVEEIRMEAWHAGTVERAGRVAWLGSLVFFNLRAAGRKAVFGILWTLCAAKLVQRMTYTEVGKRSFAYGKNAKLVISYMAQMLQNDAEVELEHHPHGCHGGDELLRRCKYLVMGEEGLVIEPINSGYRITGDIDAVTTVGKIWTLAESDHLLASLDMDHRLRRLCVSFALFKLLRRSFERLPPMTEAETRHCRDLLFRGLYAGAGDGDGGGAEALFEVMSDEANFVAEYYHSVVPVVLASPFFLLANYVLLPLVVLVLCLVVVVLCGNGDVLFSLRSIESDNYTMSSGGVATMARCLLRAVATSPAAFFTAIDLSITSLLFLVLVYEEVWEFVVFLLSNWFMVSLLHAYASSNARWRDSAAFRWAIRRILWARSKMLSHHGLRFKQFSVLSSCRLSLTLPAAVSLALAILPAVSVPCQVKQSIAEYMAKSLYDGGDGMSAVAEHPELLPFCASGGGGGGGVGVVEVILTWHIATAILEEKCPPAASQSDDAIVARTLSRYMAYLVAFHPELLPGNQDSTELVFQAMNDELKQVLGFWGYHLRPLLMLMLRRTRRFECDMVVMAGVAERRPASKQQQQEMTVLQKGAALGRALVEKAGRDGAGGGVWKVVGDVWVELAVEVAPASDEERVMGHRKVLPEGGEFVTVLWALAVHTGISRRLAVTLTPPDTMDRV

SEQ ID NO: 40811 - protein, 483 aa, Oryza sativa
MPPKAKKKQSAASPQPSPRTPASRGREGGSVAAGGGDGGGTLDLPSVAAAAAARHPALVPRGGEGCFSGTVAEVAPRGRSRGGEARLWLSEPAMVGAALRPGCLVSVSLISSNRGRSDGSPLDSLFEECNEFFDLDVDNDLMPNEAGRNFVIAKVFPSREVQKNGIKLSWDLACSLGNPSVGCSLFFSPLYTSQAPKETDSVDILRVIKCSNLYLSFVPAKVGSSSEIESESVHHPIRNGMVIESPKRNSSVLSGRNESYDIASHSGPSLCLDPATARSSLADEKINELLQTCASRWLSGRHLLKANYVPLLMCGKLSMFIVMGAEVDGSAPDVVHDKDKLPSNEEISGKFGEAPVSFLVDRTTKVHLSGPVCSEEIAFVKPGPSAHNSFRTDARNGDFNHGPRLGGLSKESKEIKEIISFSIKDQIGLQRVKDNLWYRGILLSGPPGTGKTSLATSCAYDEGVNLFTRFAVVEQHGRTIMNK

SEQ ID NO: 40812 - protein, 408 aa, Oryza sativa
MSLRCYHHHLKVRALLCGFGGGCFPTRTPPSPSPWSPPLTHFIKHLLGSPAALSGTATGAACEPCSLTLHFLRNTCGLSEDEAAAAAARVRLRSTKKAHAIVALFRGIGFSAADIARLVTSNPSLLSYRADATLMPKIEFFRRELGLTDAEIRRLVLANPYRVLRYSLKRCIRPNYLILRDLLGSDKNVTAAVLQSTDLIHGDVRGILLPKIKILQDYGATNDVIVKLVTTHPRALMHRASRFEESLAAMKELGVRPSSGMFPYSFGLFARLHPRKWKGRMDNFLSLGWTKEQVIEAFVRHPYCMSVSNDKVKLIWQFLAKKLRWTTDYVARSPMVLSFSYDKRILPRCTVLNLLASRGIFNRDIKTSHLVLGEKKFKEKYVTPYQDEIPEVLEAYSSVAESRVPVYK

SEQ ID NO: 40813 - protein, 211 aa, Oryza sativa
MPPLLASTSSTSPLLLASRLRGGGGCGCGGAPLLHRTRRGFLASSTTTTQTTRTSFAAMSWLGKLGLGGLGGSPRASAASAALAQGPDEDRPAAGNEFAQFGAGCFWGVELAFQRVPGVTRTEVGYSQGNLHDPTYEDVCTGATYHNEVVRVHYDVSACKFDDLLDVFWARHDPTTPNRQVSQPQINSIHKPNRMISFTVPCSMLNFGFFD

SEQ ID NO: 40814 - protein, 644 aa, Oryza sativa
MAITKVLGSKPADCFQFQDPNSWTCMTELVSDVVVEVGDFSFHLHKFPLMSRSGTLQKLISEAAAGADDGEPCSVKLHDVPGGAAAFELAARFCYDVRAELDAGNVVALRCAAEHLGMTEDHGGEGNLVEQAEAFLRDVLGSWDDALRALRSCDGALLPLAEELLVVPRCIDALASKACADPTLFGWPMVEYYTARGLEETVMWNGIATAGKPRSPGPDWWYKQASSLKLPVYKRLITAMRSKGMSPENIAGSLTHYAKRHLSGLTRHSGYVGGGGASGTVLSDVEQRALLEEIVALLPVERGVATTRFLLGLLRTATILNAGAACRDALERMAGNQLEEAALEDLLIPNTGYAVETLYDVDCVQRMLEQFVAANTSAFAASPEITDEAQLVDGPSGELMPISTVAKLVDGYLAEVATDTNVKLSKFQSIAELVPDYARAIDDGIYRAIDIYLKAHSWLTASEREQLCRLMNCQKLSLEACTHAAQNERLPLRVVVQVLFFEQLRLRTTVAGWFFVADNVDQGSPIAAGRYAPERSGELDFGAGPPEEEDGDDDDDEARNNVRSSSSATMSVDDIRQRVVELEEECSSMREEIHRIGKPKGALSRLFRKLGLGGRSAARRQQQQPPPPPTSSGDERRKSMSLEC

SEQ ID NO: 40815 - protein, 149 aa, Oryza sativa
MGTRRWLDSSRDVGVASPQVLPTTSGRRNRVMTTRKKIGWPPPEEIHRSRWRTSPGWLTSTSLDRRPVPGDSLATTLAGPAELPPRHPPRPDNSAPTAADSRRSIPSAPTSASTSTRVAPGRGPPPVSIATRGNLSRHRIRRARGATIA

SEQ ID NO: 40816 - protein, 296 aa, Oryza sativa
MMEAAPDEEAGLALPEGERILEVTLISAQGLKPPSGLRRRLLQAYAVAWVDAARRLQTRPDRAGGVDPEWHERLLFRVHEAALADDSRAAVTVEIYAAPAGGWHIGGDSLVGSARFLLGDHGLLSRPVGSPSMFAVGVRRPSGRVHGLLNVAASLVAAPPSPAAAHALRSSPAVSLSGLSTAPIPAGRVLRVLNRSFPTPPPSPTVLTTKKQQIAAKPNKKCADKLDVAVKLNNGADDRSDEEREELREMGGVVFCGPCILPLPRKIHISPSDENLQAFASIFSGGVGITRQSPRH

SEQ ID NO: 40817 - protein, 385 aa, Oryza sativa
MAAHQGMAAATAADRFCLPRMAAAAAAASQVENWGDSGVIVSSPFTDDTSTDLDDSADKHHLHALVGGGDGGDDAGEQRGADSSAVSKERRGDQKMQRRLAQNREAARKSRMRKKAYIQQLESSRSKLMHLEQELQRARQQGIFIATGGSGDHGHSIGGNGTLAFDLEYARWLDEHQRHINDLRVALNAQMSDDELCELVDAVMMHYDQVFRLKSFATKSDVFHVLSGMWMSPAERFFMWLGGFRSSELLKVLASHLEPLTDQQLMGICNLQQSSQQAEDALSQGMEALQQTLGDTLVSAAATVVSGGGGADNVTNYMGQMAIAMAKLTTLENFLRQADLLRHQTLQQMHRILTTRQAARALLVISDYFSRLRALSSLWLARPRD

SEQ ID NO: 40818 - protein, 128 aa, Oryza sativa
MAMALAWELDGAGRWGSSSSTVVPSSPRRRPRSSGGVGGAGAGCGRLDPPLLSSPEPTLTSVARELGGDDELGGGGGPNSEVRAATEAPGGGMSRAAMTMPGGAAAPLSTSAASPISPLSSNSPVGPA

SEQ ID NO: 40819 - protein, 419 aa, Oryza sativa
MFSSLRRASCNVAMNAKSTHWWTNVKMAPPDPILGVTDAFKRDKNPNKINLGVGAYRDDNGKPYVLECVKKAEKQLAEQNLDKEYTQITGVSDFCEAAVRLLLGDDSPAIKNKLYGVAQTISGTGGLRVGFEFLRKYSPYAKTVWMPTPTWGNHGPIANDSTFEVKYYRYYKPSNRGFDFEGCLEDLNKIPEKNVILLQSCAHNPTGVDPTQEQWKEISHVIKKRQLFPFLDTAYQGFASGDIDRDAFAPRLFARDGHEFIVAQSFSKNMGLYGERVGTVSFVVNDKQDLERILSQLRVTIRRLYSNPPRHGAQVAARVLTQPDLRALWLKEVKLMADRIITMRSTLVDNLKKEGSKHNWQHITDQIGMFCFTGLQEKQVERLIKDFSVYLTKDGRISIAGVSSKNNAYLAHAIHEVTK

SEQ ID NO: 40820 - protein, 240 aa, Oryza sativa
MPFMPEQSCSSSSSSSPATASSRRLFLSSSRLLRWRQPRVPRRQRGHRRGVGAPGRRRLPHRRRGRLRPRVAHGGVPPPMPHRGGEGGSAGGGRIEDAAQSSSRPDLECSRSSRPPQRTARATMANTTAVAASTARGARRTRRSEIRRCRPWSPASRGRRRRQVVSVAGLSSSLLRVEEEICGAELCPRDTRLATARPTRSLAPWLSQKRLRNASPCEQTRAYSGGRLRPKSKRDGDAVS

SEQ ID NO: 40821 - protein, 437 aa, Oryza sativa
MEVKVLSSKLVKPAYNGGVAAAPDVEYIPLSIFDKVTYKMQMAIIYAFPPPAPSTAAIEKGLAAVLAQYRAFAGQLGESPDGEAAVVLNDRGARLVEAAVDADLVDMAPAKPTPELLRLHPDLEGELQEVVLLQLTRFRCGSLAVGFTSNHVVADGHATSNFLVAWGRATRGLPMGAPPVHHHAALFKPRPSPHVEHDHRNREYYLPAAGDDSHGHGDGGAADNIVIHKAHFTKDFIAGLRAAASEGRGRPFSRFETILAHLWRTMTRARGLSPDEASTIRLSVDGRHRLGAPAEYFGNLVLWAFPRATVGDLLTRPLKHAAQVIHDEVARVDGAYFRSFLDFALSGAGGDKEGLAPSAVLKDVLCPNAEVDSWLTFPFYELDFGTGSPTYFMPSYFPTEGMLFLVPSYLGDGSVDAFVPVFNHNLEAFKECCYSME

SEQ ID NO: 40822 - protein, 390 aa, Oryza sativa
MRRSLAPRRRAAEAAMAAARNPRNPRRRGAILAAVAPFLAFADYLRLRLVDRAWRLYCRRVGHAPPPFPWLMLPERESPPGAGAVARRVFYDVPGGRSYGYRVPSRDMHRCVATGHGWVVMVAVDAPRRVMLLNPITGDQRIVAWPFARWNARFHAVLTSSPAAGEAGCFLVVVADRLLAFCRPGADFQGWETLRAPGFRHHAALSDVVAVGATVYLVDERRRLWRADLADENPKVQRRDTGFALPSLELRRHYLVESLGHVLLVLSDERHNRVALYKLNWDARAWLPIAACPGERVLLLGRGCSAAVPPSSAAGRAPGTVLFAHQPSTLPDVDVAARGQAWFWSESRVGAAPGDLLVLKKTVPHRHGEFPADGDSFWFFPAVDPDEDAR

SEQ ID NO: 40823 - protein, 417 aa, Oryza sativa
MAKVTEFYLKRHAANVFRDGLKEVPPLLATAVPPQLPNPAAVTAVHAMLLKAQRPVIVIGSQAVRATGVSALAAAVETLGVPVYLSGMARGLMGRGHPLQMRHKRGVALAKADFVLLAGVPMDFRLEYGRGINKAAYLCLVNLSADTLKTNSDLRRANARVLGDAHSFLTTLSQLAAADKKQWAEWIKFLTAQCAKRDAEIDAMIATETKAKPVLGPAKPGAAGAGEAKTFVHPVYLCKQIDLHLADDAVVVGDGGDFVGTAAYVVQPRGPLQWLDPGVFGTLGVGGGFALGARMARPTAEVWIIYGDGASGWSLVEFDTYVRMRLPVIAVIGNDACWSQMYRDQVRLLSDDVATELAYTHYETVAEGFGAVGILVTRNEDVAPALKRAKELFRQGKPVLINALISRSAFREGSISL

SEQ ID NO: 40824 - protein, 139 aa, Oryza sativa
MAPTPSPPPPTSSTKARLGGGARPAPQPPPTSPTSTGRRRVRGRSTPGSTRWSPPATTSPRARSTMRPLASRHSAACAAITSSSSCYRSGSERRMFHLSMKMAAPGDEQASTATAAAVVAAAAAADAVGDREGVGVWIG

SEQ ID NO: 40825 - protein, 200 aa, Oryza sativa
MHHMRIDLYCRKSQSPGEQQLQDLQSGWPPHYLASSESDHLLMEQRLMQEIWKGAAAAAAHDHHDQEAATAAALHHDQHVRRLDHIVAGRPPPPPASSSSGGGGDTMASSLDWLLASRRQEQHKYGDRHYDDDDGGYYTAAHRGQAAAAMSAAAAAASGVVKDRRPSLEMSLGRQGWEISMEQRSSVEYSSKELTLLKCL

SEQ ID NO: 40826 - protein, 574 aa, Oryza sativa
METPPPDPVSPPPPAADEGSPGGDDGAEDAGGFSAGLDSLWTALFGSPEELEPMWSPPRGFGVGAEFAAAEVEPEIMDVAGGPWDGAPWRSSGVVAGEGAATALVPPTAAAGFAEFEPAAPIDSYPAGAAAASLGDVPEVSALDSGVDCSPDPPPSSSPPVDFDARGFDPVADSAPAMESPLPPSVASSEANLDGRMLDCTLNSVPSPPLASPYEVGLGAEDPIKDSSPSVAWGTTMDAKDPEVDATCANGTALRRSRRIMKIKSAASSMPLNQNGDSSRASKRRVADSRKSRSSEGSKLPAFTGPISVNTVDLINGVKVQGLQEIVAVENVSSSYDNNQKAGGLYNQVVVALPAASNSLLKDKGASVLPRRKTRLASKVLVNSDRVSAISPVVNGGPPVQKSDVCIPTKKHKLAVEECLTSLDGVDGGGIVLCNSKLKSAKSRVVSKTPQGRGRRSPQPPKTQRARTLSVKYLEKLKRAENNNNNGSMSKSPRVPMIPENNGSMSKSPRVPIIPELSTKHELVLDKHMVDSVMLETDDGSCFFVGDAVPDDEARKQWPHRYEINDQIMKKVCT

SEQ ID NO: 40827 - protein, 238 aa, Oryza sativa
MHGHRRPPAPASPAVSAAAGRGVHHRELEEADVVGDETIVAGELTPAGAVEAAGVLPVHERDVPLPSPARPLQHHLPLHRPQILTRELRRHPLTSKQKQHQFKFSLFQPRNETAMLQCNAIWYVQCVQEEETRAAAIAGDLTLMKLFLWSVISRWWRWPLSPSTIGGVRRPFLPPCSAPAEFSALPNPWLPTKCGDAFSQPDGSKMSTSKEEETPLYLKSRQSPSSMPLPSTNSFQPG

SEQ ID NO: 40828 - protein, 206 aa, Oryza sativa
MMGSGKSTVAKILAEVLGYSFFDSDKLVEQAVGMPSVAQIFKEHSEAFFRDNESSVLRDLSSMRRLVVATGGGAVIRPVNWKYMKKGLSVWLDVPLDALARRIAQVGTASRPLLDQPSSDPYTAAFSKLSMLAEQRGDAYANADARVSLEEIATKQGHDDVSKLTPTDIAIEALLKIENFVTEHSTSSGPVGDLIVDSQNRRTKAL

SEQ ID NO: 40829 - protein, 420 aa, Oryza sativa
MEEDGGSDARVVESMQRLLDAVPPGADDPYTIFRLPAAVRERHRDLYEPKLVSVGPYYHGRDGLGAAQRHKWRLLRDFLSRQSDDKAGLGAYVRAARAVEADARQCYAEGFDDVGADEFAEMLVLDGCFLLEFFLRKSEGQLAAPGGAKWAWQHMYHDVLLLENQIPFFVVERLHGVAFAGDDDGAADRDALLDIFCKAFAGDLPSSRVIRPPSDKTIHHLLHLHYECNVRNPAADSDKARNGGDAANGGASSLAIWKQPPVPSPRSSDGAIKGRMTSMIPPAAKMEEAGVTFKRKATPRDVFDMSFRYGVLHMPAFVVDEGAKVLLANLVAFEQGGGRAARKLEGGNLATGFVALLGSLVNSRRDVEVLRRCGILHCMVTDEEAVAYFSHVVQYTTMDYDRHLLACLFRDIREHCHWNR

SEQ ID NO: 40830 - protein, 297 aa, Oryza sativa
MSAASGAACGVCGGGVGECGCLLHQRRGGGGGGGGGGVRCGIAADLNRGFPAIFQGVGVEETAVEGDGGAQPAAGLQEFQFFGHDDHDSVAWLFNDPAPPGGTDHQLHRQTAPMAVGNGAAAAQQRQAFDAYAQYQPGHGLTFDVPLTRGEAAAAVLEASLGLGGAGAGGRNPATSSSTIMSFCGSTFTDAVSSIPKDHAAAAAVVANGGLSGGGGDPAMDREAKVMRYKEKRKRRRYEKQIRYASRKAYAEMRPRVKGRFAKVPDGELDGATPPPPSSAAGGGYEPGRLDLGWFRS

SEQ ID NO: 40831 - protein, 533 aa, Oryza sativa
MDSSTVGAPGSSLHGVTGREPAFAFSTEVGGEDAAAASKFDLPVDSEHKAKTIRLLSFANPHMRTFHLSWISFFSCFVSTFAAAPLVPIIRDNLNLTKADIGNAGVASVSGSIFSRLAMGAICDMLGPRYGCAFLIMLAAPTVFCMSLIDSAAGYIAVRFLIGFSLATFVSCQYWMSTMFNSKIIGLVNGLAAGWGNMGGGATQLIMPLVYDVIRKCGATPFTAWRLAYFVPGTLHVVMGVLVLTLGQDLPDGNLRSLQKKGDVNRDSFSRVLWYAVTNYRTWIFVLLYGYSMGVELTTDNVIAEYFYDRFDLDLRVAGIIAASFGMANIVARPTGGLLSDLGARYFGMRARLWNIWILQTAGGAFCLLLGRASTLPTSVVCMVLFSFCAQAACGAIFGVIPFVSRRSLGIISGMTGAGGNFGAGLTQLLFFTSSRYSTGTGLEYMGIMIMACTLPVVLVHFPQWGSMFLPPNAGAEEEHYYGSEWSEQEKSKGLHGASLKFAENSRSERGRRNVINAAAAAATPPNNSPEHA

SEQ ID NO: 40832 - protein, 270 aa, Oryza sativa
MPGSPLAKTISRRSMVTRKKGHSSYISRSVARPPPASLCCMACLNAAPKPSHTGRWNRVCVHAKIHGMARSDSMPPPGFRFDGRLPMFIRPYSVSGVAARKYSTKRGSWNTMERYSSVATVAMSSSRRRHSGFGDTGGFMPCSRVAAVNLCSVRKQRFSSPNDFSMTSPWTVTRSEPLTVFGGWDRMARWLGPPPRPTVPPRPWKMVSFTPCRSATPTISSWALYSCHAADSRPASLPESEYPIMISCFPSIRSLYQSTEKRSSMVARAC

SEQ ID NO: 40833 - protein, 409 aa, Oryza sativa
MATAASASASASPAAAFGAKTRRPGPSPSPSPSPASAFARPSPRASAAGRLHASLHLGGASATGSSIVSNASGIHLAAPVLAPLAVPKMTGAVGAHKNVLLFHCEEMRELAEQVVARNDDIELRSISWRTFADGFPNLFISNAHTIRGQHVAFLASFSSPSVIFEQLSIIYALPKLFISSFTLILPFFPTGTSERMEDEGDVATAFTLARILSNIPISRGGPSSLVIFDIHALQERFYFGDSVLPCFESGIPLLKSRLQELPDSDNITIAFPDDGAWKRFYKQLQHFPMVVCNKVREGEQRIVRIKEGDPRGRHVVIVDDLVQSGGTLIECQKVLAEHGAAKVSAYVTHGIFPNKSWEKFQPDNGEGPGHGLSHFWITDSCPLTVNAVKDRQPFEILSLAGPIASALQI

SEQ ID NO: 40834 - protein, 404 aa, Oryza sativa
MPHGSWLLQTCSPSAALASLAVVTTSLLIIGYASSSFFLGAPAYEYDDVVEAAAAVPRRGPGYPPVLAYYISGGHGDSVRMTRLLKAVYHPRNRYLLHLDAGAGAYERARLAGYARSERAFLEYGNVHVVGKGDPVDGRGPSAVAAVLRGAAVLLRVGAEWDWLVTLGASDYPLVTPDDLLYAFSSVRRGLSFIDHRMDSGGAEAVVVDQNLLQSTNAEISFSSGQRAKPDAFELFRGSPRPILSRDFVEYCVVAPDNLPRTLLLYFSNSLSPMEFYFQTVMANSAQFRNSTVNHNLRHTVAQDGGAPTSQGADGQQASRYDAMVGSGAAFAGAFGDDDDALLQRIDEEVLRRPLDGVTPGEWCVADGEEGTDNECSVGGDIDVVRHGAKGRKLATLVVDLVGA

SEQ ID NO: 40835 - protein, 161 aa, Oryza sativa
MALALLSPSSASAHRLPRPISSPPLGRAASATSIGSSFFPLCSSPPSSGSCSLRRASSAGGASEPEASGATSLDADLLRRVAGAADAGEALDIVAESAGGTGGLDASDCNAIVAAALDRGNVELALSVFEAMRSGFARGEGIVSLLTFFLLSRNVVNYVLD

SEQ ID NO: 40836 - protein, 176 aa, Oryza sativa
MPPGSLPLPPPVVVTVSGCEPLNDARELYQYLEEYVNQEGWIVDDTQLAGLAELAEARDELVGARDKLTTLASDIGDDLLLGGAVTDDVPLLSGDFKAALARVLKLPEGMELPKDFESPLLVPAIAGRERIHGELINLRADLAALKQHVEEQWLPWANDRLSSAGVIGDQILLDME

SEQ ID NO: 40837 - protein, 500 aa, Oryza sativa
MAAVASSAEVHEGTRSCVLLNVRGYRAARRDATTATSYTSNGHPIEVSFRAALPPVLSDFYVYCPALQLQEPADYPSMVPKAIAVDGDLFLFRIPIDRVGTMSLTHNDYFVYMARSPPHRPRLDLLPNPSHDTLGDKEIAILSCADGGEQYVVTALRTIPGSKTIHRLHLYRSKPNGEQGRWTSQMVSVEGPLMRDLVCPIPETVHRQVHHVTSKVIRLGTGANGMVGWVDIWRGILLCDVLQESPKLHDMPLPLPAKSNSHRAFLNTTDQYCGDVAVSRDKSFIKYVEMEIVTPKIVSATPPGDCDPDPFLEWLRRRECKDLKRTLVHGRWKATTWRMPIPVTSWDDWCRDCAVESAELSTDNPKAYELLCAVSKESLKEDDDDKAMEAATTTTTRLPLGRLGMAYPAMSIDDDVIYVLTKPVMGNGKAAFLTAVDVRRKKVLAVAKLDSAVFMRYYLAVGISKHFFSAPGTRESLGQAEDHGQKSARRRRRRRGKRQE

SEQ ID NO: 40838 - protein, 427 aa, Oryza sativa
MGISESDELRAFEATGIYRLAESGAAFLDPVRILNASYRRFRLVPSAYYSRSFGTSRQGGEAETERTGEASPERKKRKRKRQRQPKPRELNEVERMAEARHQEARPLLSSAHKSLLKAKDLLEFLPRMIKEDVRMLDVESNLEKNLVELGSSWRAPLCEMTLCFQKSSGEDSEEGICHKTSTPLFNSTISIEENDDAEGEFQDRRYILPRRCCFLMTDLKHVRGLIPDNYNQGYNLIVVDPPWENGCVRQKVAYPTLPNRHFLYLPVQELAHPAGALLVLWITNREKLWKFVEEELFPAWGVKDHTVFYWLKVKPDGSLIGNLDLLHHRPYECLLVGYINLNKEAVRGSKFKFLEERRVIMSVPGAHSRKPPLQKLLSEYIPGPKPARCIELFARELVSGWTSWGNEPLRFQDAMYFFNKQEHDVHS

SEQ ID NO: 40839 - protein, 353 aa, Oryza sativa
MAMDGGAAAVLREAHRLTGHTDRVWSLAWNPSPGAGAGPVLASCGGDKAVRIWKRAADGAWQCSDVLEDTHNRTVRSCAWSPDGKLLATASFDSTTAIWEYSGGDFECVATLEGHENEVKSVSWSASGSLLATCSRDKSVWIWEMQPGNEYECVSVQQGHTQDVKMVQWHPILDVLVSVSYDNSIRVWADDGDDEWHCVQTLTEANNCGHSSTVWALSFNQKGDRMVTCSDDHTLKIWDTSADLSQPKTSDNQESWRHLSTLTGYHNRTIFSAHWSSEDIIASGAGDDAICLFAEDKSSMVEGPSYRLILKKEKAHDMDINCVRWCPQDPRMLASASDDGTVKLWELRGNALD

SEQ ID NO: 40840 - protein, 44 aa, Oryza sativa
MEETRRQRRRRKRECECQPRDSATATLRSPRRRRSPLRWPPSHR

SEQ ID NO: 40841 - protein, 446 aa, Oryza sativa
MKITVHSSKAVKPAYGPGEFPTTTGDVVPLKVFDKANFDTYISVIYAYRPPAPANAALEAGLAKALIEYREWAGRLGVDGDGNRAILLNDGGARFVEATADVTLDSVMPLKPTAEVLSLHPSGDDAVELMLIQVTRFACGSLVVGFTTQHIVADGRATNNFFLAWSQATRGAAFHPVPVHDRVSFFAPRDTPKVEFEHRGVEFKPYDDDEDVHASGGGGDDDEVVINKVHLSREFISKLKSQASAGAHRPYSTLQCVVAHLWRCMTKARGLDGRESTSVCIAVDGRARMSPPVPDGYTGNVVLWARPTATAGELVTRPLKHAVELINREVIRINDGYFKSFIDFANSGAVEEERLVASADAAEMVLSPNIEVDSWLRIPFYDLDFGGGRPFFFMPSYLPVEGLLILLPSFFGDGSVDAYVPLFSRDMDVFKNCCYSFDKDQTTSLA

SEQ ID NO: 40842 - protein, 474 aa, Oryza sativa
MEAVQPPVLSDRLNPLIHHRSAFPASVVQPQDHGDSVPGLCSGSFIDTRGRLSSGSMTSEDSPALTPRWLSIKSNSSSDNCFEGSKRAVSWSDRHVFNPNGQVNYAEFMDLMEQELDTQLDRLKGDVTGLENFALPDNGYIIGTHLGMSLDVMLIEIDERFNALKLLLATVFRKAREMDSSSVSDLQWEHELQLEVINITIGEFISGLQEEMERKLYEQISMTNSMSKNWQDAIAQFASMRDDLGALSKLLLPSLQESHISHSKHETSSNRSNRWKYNIFGKKNKEDHSSRAEENKSFRKQKSMVVLEKSDFRHLNGMSKEEIITYFKSEMSKLKRMHELDLQEKTEELFKFKREKGLLTLKNDVEFEPLRKKIPQIISRMDQIISKNIKMPSLCMTNDGLDERCISAKRIDSLYYENQHLRGLLADNMKDVKELSSQLSEASKEMSIQLSSEDDLLRQIAKIKEYGVCFNLLV

SEQ ID NO: 40843 - protein, 454 aa, Oryza sativa
MAGTSTMAPWSDLPSDLLGLVIARLPFPADRARFRAVCRAWHSALRRHVAAPPQLPWIVLPEGTFVTVSDGGVHRMAFPESNTVCIGSTDGWLALHRTDNDDDDSVDGARTTKTRHTFLLHNPFTGATVPLAELGDILDDDFFEEFRVCKVIIRSHPNGGGHLVAVMTNHWDCPLILCQPGKGIWTPDSCTMPFVRVVDIAFFADKLYLITKAEDLFAVDLADDKDGKPTVTSVERIIRQPRSPDGVIDAFRWSDDEDDDDGDAQDNDGDASTNDHDESLNQEGDSENDSEIEPVGDDGIDDVGHQWQYLTGEDLIWKTTKYELEGDDYAVNGSWHLLESSGRLLMVRRECLIAAFVKDADHTRSVDVSKADMDAGTWVPVTGGGLGGQAIFLSELFNKSMPAPAHGEVLEDTMYFVDTPDVWDLKSGTRRPFTRSIGFFDLDRTWVFPPELIV

SEQ ID NO: 40844 - protein, 451 aa, Oryza sativa
MALSFAVRRRATELVAPAAPTPRETKRLSDVDDPESLRWQVPVVFVYRPSAAAADPVDTIRRALAAALVPYYPFAGRLREVEGRKLVVDCTGEGVMFVEADADVRVVELEAAGLRAPFPCMDQLLFDVDGSAAVLGTPLLLIQVTRLLCGGFVLGIRLNHAMCDASGIVQFMDAVADLARGAREPAVSPAWSRELLDARKPPKLAFRLREYNDFAAAPPAAPSVGALGDMVMRTFSFSPGDVAALKGALPPHLRGRATSFDVLASFVWRARARALETPAGEDARLAIIVSFRNNGELRLPRGYYGNVCVPVTVAMPAEALRRRGSLADVVEQVREAKKTVNAEYVRSVADTLVMRGRPAIDTANLLLLSDVRLAGFHRVDFGWGEPVYGGPSHAWYGVSYLIAVKNGAGEDGVAVPVVLPAAAMERFTSEIERLRKGQQRGHFRVQTTSRI

SEQ ID NO: 40845 - protein, 385 aa, Oryza sativa
MASDVPQDDVQCHFCGTYLRPRSFRKHQQRCKYNPDALTRQNLSASSIPTSATRATHSEMASDVPQGYVQCHFCDTYLRPRSLRKHQQRCMYNPDALTRQNLSASSIPTSARRATHSEMASDGPQENCQCSFCHKDFEGRSSCAEHELQCKNNPDVHSQTEPSGNAQGGIGSLDVHVPRRKRTARNQPLPEQHLKKPASDYAQGGTSDAPETPPKPTTSEVKVDSAVNAPDITIPDNKDPSVMQKQKKKLDLNLQPHSDSSDQEEQADNFSSINDLSTIDTNSDKKKNTITGVADTNIPDHKDPSRMQMQIKLDLNLPPHDDSSSSMDDLKTLAPTDTNSDKETNTGNGGVDTNIPDHSDPSAMQTKNKLDFNLPPRNDSSDSLV

SEQ ID NO: 40846 - protein, 271 aa, Oryza sativa
MARHAKTDSDVTSLAPSSPPRSPRRSAYYVLSPAASHPDVVVASGGAGGGGGGVAAAEKMSFAGSTPAESPLHYHYHHSGAAVHHSRESSTGRLLFSDQLRSGAAAGVPWRRLAQGSGAGSVGDDDDDEGGLAGAASQWRCYALGAFAFVAVFAFFLLVLWGASKSYKPHVVVKSVVFETYHIQGGTDRTGVPTKMMSVNATVRLRFRNRGTFFSLHVTSTPFHLFYDDLTVATGHVRALSTTPTLAFLLVLLPEFAYAILVTFGESEWIG

SEQ ID NO: 40847 - protein, 299 aa, Oryza sativa
MAGVLRLAGAARSPLARALAPAARRMGASAAAAMEDEAYWTEWEEEEEKARARESAPVAEMCPTGGGGGGPQWVVMGRPGPQKHAHAARLAEVLAVPYISMGTLVRQELSPASSLYKKIANSVNEGKLVPEDIIFGLLTKRLEEGYNKGETGFILDGIPRTHMQAEILDEIVDIDLVLNFKCADNCFMKRRFGGDICPHCGQLFDFSKTASSDRNPSLGSCTWPSQVQHAAVLGLEDSRMEKMRAYAEQTKLLEDYYRKQRKLMELKTSARPGETWQGLVAALHLQHLDASPTPHKLTM

SEQ ID NO: 40848 - protein, 110 aa, Oryza sativa
MSSTACRRTCSHPVRDEAATRRRHRPPRLHQRWLQLLLAHAEAASVLALLLRAFGCPWRAAHTLASASASRGPRRRPWTCRGWCSTSTALGHGVAELEHGAVLQSSGITS

SEQ ID NO: 40849 - protein, 295 aa, Oryza sativa
MGDGRSRWTDMEVRVFLESCLEEMAAFTITSNSPKPQAWQNLIHKMYTKCKKKVNKAQLEYIWGQCKKRYNRWVWLESHASGLGRDPHTSAIVADDEWWESKNAQNKGVLSFRNDPLKHIDLHHTVFSGHTVVGNHSAVAGAAPQAPQGAVQWQTIDMAQLAAAYRPPPPTPPPTAADRGKGKRPAANTTASGSSSKKSRSDSAGLALERIADIREQSYQSRVAQMEAEKSMGLDACMELVENDGHEIGGSVWYAACALFRDPFNCKCFVRIKDAARRLEFIRTGGTGQSSGGTW

SEQ ID NO: 40850 - protein, 108 aa, Oryza sativa
MLAATTSDGAAAFAPQIAIPSSRPGYSASASARSQCAALALASDAEVVEAWWSGETPCFYTRDERKAAKRGARRRRFWTLTLFPRMLGGASLTARTRGLLFVFVCPEI

SEQ ID NO: 40851 - protein, 431 aa, Oryza sativa
MFPPKGSNPYGQQQSYGGQQSYGQIPGSSGFSSSAATGGADGSRFGARVGQGAAGQYGGSYASVYGTQQVGGLGGKGPASSSIPNLPEPSKFSSGSVGSSIARPNDDYMAVRGYGQKLDQYGSDYTLERRMYGDHSANLGRRDGLTDLDRRYPEHVSGGHQGSSMRHPQLLKPQLQSGSDIRQADYFAGRSAPIHQGSQDIGAYGRVEADHRNLSILGTAPYGGQQSASLLGGAPRTNIDSLSYGQGSSSSGYGMGLPPGRDYASGKGLLHPSSDSDYRDSILSRVHPGISMVDERAVDRVGYRRELDLRDEERRRDLLLEREKERDRERERELRDLRDRERERERERDRERLRERERERELERERERLRERRMKERERDRKHPADSRREHTPPRTPGDRRRSSSVRAEKPLRRPSPRRDAVHRWTSMFSL

SEQ ID NO: 40852 - protein, 155 aa, Oryza sativa
MRSLISASLRLEPYLRSPSLSSSKVMAPLASVSMALNISLRPASSSSERFRAMTRSAIFLSLFMAENCLRRERTAGARGRSGATPSSQTQGWQSTWWAVRRSLGGERSMRRMRSLALSEMVGHGSESKSRDPRRTASKMPCCVSAQKGGTPLRRM

SEQ ID NO: 40853 - protein, 372 aa, Oryza sativa
MATISATLSISFLPSSIRFAVATTSTSTTSSSSSWRIKRPARFRCCAEPSSPEQENPSTPAPPPVKPPASPSSLWGISTSTWSAGVAGLGFLETAYLSYIKLTGSEAFCPVSGGGCGDVLQSDYSVVFGIPLPLLGLVAYGLVLTLSLQENGKKFLPGIDDLDIRLTLLLISTSMATASSYFLYILNTRFIGTSCSYCLLSAFLSFTLFSIRVKDLGLERVQKFVGLQLSVAIIVALALTNSYSSATTQLNGTDDFVLERYDTEITTESTPFAIALAKHLHSVGAKMYGAFWCSHCNEQKQIFGREATKILDYVECFPNGAGKGKKMAPECAAAGIEGFPTWIINGKVLGGDQELPILAEESGFTVEGTEQS

SEQ ID NO: 40854 - protein, 433 aa, Oryza sativa
MAAPLLLSTIILALVVVASSTHGTMANGVFQVRRKFHIVDGVYKGSDIGALQTHDENRHRRRNLMAAELPLGGFNIPYGTGLYYTDIGIGTPAVKYYVQLDTGSKAFWVNGISCKQCPHESDILRKLTFYDPRSSVSSKEVKCDDTICTSRPPCNMTLRCPYITGYADGGLTMGILFTDLLHYHQLYGNGQTQPTSTSVTFGCGLQQSGSLNNSAVAIDGIIGFGNSNQTALSQLAAAGKTKKIFSHCLDSTNGGGIFAIGEVVEPKVKTTPIVKNNEVYHLVNLKSINVAGTTLQLPANIFGTTKTKGTFIDSGSTLVYLPEIIYSELILAVFAKHPDITMGAMYNFQCFHFLGSVDDKFPKITFHFENDLTLDVYPYDYLLEYEGNQYCFGFQDAGIHGYKDMIILGDMVISNKVVVYDMEKQAIGWTEHN

SEQ ID NO: 40855 - protein, 184 aa, Oryza sativa
MAAWAALWRDDATRFAAAVTSQCRAEKDLCCLAAAALKHSSRLGFGSIAEETEMAAAAPCSWTSAAVFMAAVFMSLPRHPPARRRQRLWPSTRRPRRRRTRWLLSLGRFEALEQCIDESNSSYSNVFRSILQTRVALLNIQTRIGTWKQCIPPKEILFQPGDDWSCFLLMIGVLDYQWLLFTDD

SEQ ID NO: 40856 - protein, 377 aa, Oryza sativa
MGEPPGKTGRRDAGGTAPAVEDRWTQLPPELLPLICKKLPDSADFVRFRTVCSAWRDAAPLSDVPPQLPWVVERRGSAFQARAHFRFYSPSSGRTYGVRGYGGRSWLVMGGACQEHLVTTVDLSTTALYNPLTGERLALPPAPYPQWRHGVVHVVAAGRRRGGAPLVVNASTRTGHFGYCRQGDTKWTLVDGRQDMGHRAYHGGRFYVNTNAQETLVIDASTGAVESVLPPPPRSADAGAGVSCGDYLVESRGKLIRAVLFPRDGVVTTSAEDYYLNVYQLQEDGKAAAAWAKVESVGDSVLFFDKHGHGFSLEPNGAAELKRDCVYFMHEKRTWLDAGEYRFLCRYNMETGEVDRVVSLPDTFGDTWVVPGLCPSE

SEQ ID NO: 40857 - protein, 65 aa, Oryza sativa
MRQYAGLQRCKLGVNFFRSLLAAGIAQIRYLPTPDSVPPVPAAVTKISTLPAVSFQISGPDIFRK

SEQ ID NO: 40858 - protein, 72 aa, Oryza sativa
MSAIGDSIPAIFLPLLSSSNKIKCRWPTAKAVSRRQMSPVQVPQTGTRVTGGATTGMCCCWRTRAAAWCTAT

SEQ ID NO: 40859 - protein, 347 aa, Oryza sativa
MLLDGCFILRRLLKFARIASEEQSGAKASSSSSRSGTGGQDDDEDRAVLFGRCWVWSFVTCDLLLLENQIPFCVVQKLFHQLRTDADDTSDVLVAGALRLFGSLRPRKLYSSPISCRDVHVHHLLHLFYLSVGFPPPPDAAAAPDDDPSEHLVPPSELPQWIPCARELEEAGVTFRPRKDATSFLDVRFAGHGGVLEIPELQLYDYSEPLFRNLIAFEQTYPYTRGHVTAYAVFMDCLVTSPEDMRLLHLSGVLVNHMNRDRDPTGFFSRLCSEAHLAADRNYLAGVIGEVNRYRRSRWPRWRAALVRNYFSNPWVATSLAAAVILLALTMMQSFFAAYAYFKPPKQ

SEQ ID NO: 40860 - protein, 269 aa, Oryza sativa
MASRLSLLLLLALVLPASGDDAAAAEAAPPPAPAGGASFNVTEILGRFPEFGLFSYLISKTHVDRDINSRNTVTVLVPDNSAVDWLLRRSARLPRAALVELLSVHVVLDYFDAAKIAALPPGKPTVSTTLFQTTGNARRRTGFLAITPTAKGGAVFASAAPGALVNATLKRVVAAVPYNISVLQISNFVLPLPRMKPMAIAPTPAPVPAPTKMVPIPPSLPLTDPADEDGDEAPAAAPAPSHGNAVKVMSWWSGLGVLVGTMACVFGYL

SEQ ID NO: 40861 - protein, 546 aa, Oryza sativa
MRQRDEPLLSSPSHRNAYPCKLLSFTLLSLATVLCLCAGAAFLLLSPTATNLCASSPDPASCQAIVADAVLASPHSHPSRPAHVLRAILATSLDRHDAAAEAVAGMRRRASDPRHRAALEDCVQLMGLARDRLADAAGAPDVDVDVDDARTWLSAVLTDHVTCLDGLDDGPLRDSVGAHLEPLKSLASASLAVLSAAGRGARDVLAEAVDRFPSWLTARDRTLLDAGAGAVQADVVVAKDGSGKYTTIKEAVDAAPDGGKSRYVIYVKKGVYKENLEVGKTKRVLMIVGDGMDQTVITGSRKVVDGSTTFNSATLALSGDGIILQDLKVENTAGAEKQQAVALRVSADRAVINRCRLDGYQDTLYAHQLRQFYRDCAVSGTVDFVFGNAAAVLQGCVLTARRPAQAQKNAVTAQGRTDPNQNTGTSIHRCRVVPAPDLAPAAKQFPTFLGRPWKEYSRTVYMLSYLDSHVDPRGWLEWNGADFALKTLFYGEYQNQGPGASTAGRVNWPGYHVITDQSVAMQFTVGQFIQGGNWLKATGVNYNEGL

SEQ ID NO: 40862 - protein, 658 aa, Oryza sativa
MSEDDFIRNNRAINAGKDLPREYLSELFHSISGNAITVFSQASAAAEMTPTRWADLVKRSRAIDPFTPCDFKHKLTREVFVTVSGPAVATLAAIFDYTDDEDILNQCVEGLISVARIARYGLEDVLDELLCCLCKFTTLLNPYATTEETLFTFSNELKPRMATLALFTITNRFGESVRGAWKNVVDCLLKLKRLKLLPPSLVDQEGGAGAAVSTERLGHRAKSESGVIFPSSHRGAGTSRHVSGMIGRFSQFLSLDAGGESLLSVGSEFENNLKIIQQCRIGSIFTESGKLPDESVQNLGRALIFAAGGKGQKFSTPVEEEETVGFCWDLIAVVSSANVHRFTTFWPQLHDCFAAVSQLPLFSPCPFAEKAIVALFRVAVRLLSGGGGDRMAEELVFKSINLMWKLDKEILDTCCEGISECIVKLLMEYASNVQTPIGWKTVLHLLSVTGRHPETFDQSVAAMIKLMNDGAQVVTRFNYAACIEAAFGFAALKISPLDISTRILQLMADSVNWLILWHKSGYSDPGNAWSSSSSSSSAAAMMMMEDASRMGNLATSMFIKLAEALRKTSLVRREEIRNQAVAELGRAFALAAAGELELGPTGSLACFNLVIFAMVDDLHEKTLEYSRREGAERETRSMEGTLAAATELLADVFVLFLA

SEQ ID NO: 40863 - protein, 388 aa, Oryza sativa
MQKHHPKGRSLIHLPESVAKKRLLQMPTWMIMAPKARSRMILARLLMRSPALVVLEFWTRLGKKIRVANKDPVSDIEETLPPKKRKRMKLDPYDTSNKRLEDSTAKQDVCSPEKIPEKSPPEETETSINAKFRAIQPSSSIISYVEDNLLGRRRLNEIKNAGYNVKLSAPLDNVPFSTSPERERIEENVFRNKLEFFAAAKISSSFPPPTLPEIAFAGVSNVGKSSLLNALTRQWGVVRTSDKPGLTQTINFFRLASKLCLVDLPGYGFAYAKDEVKDSWQELVKEYVSTRVGLERVCLLVHTKRGMKPLDYELVDLMERSKTPYQIVLTKTDLVFPIDVARRAVEIQESLKKNKSVVRPVMMVSSKTGAGVRNLRGVLGKIARFIKP

SEQ ID NO: 40864 - protein, 234 aa, Oryza sativa
MAPPSRPFYLVYVVIFVAVSLSATAATATAAAVLPRGALPTKSGYLPIPPAANASLYFAFYEATEPVTPLATTPLLVWLEGGPGCSGFLSNFLQIGPYLFAGGSLSPNPFAWNRRFGLLFIDSPLGTGFSVAPSPANIPTNQSVVADHVLAALQSFLSLEPSFRARPLYLTGESYAGKTIPAAGALIVATNPTLPEQKRINLRGVAIGNGMTHPVAEVTTHADIAYFMGLINAK

SEQ ID NO: 40865 - protein, 351 aa, Oryza sativa
MLLPEGHGLYPGHGKLRGFVRFFNLSTGAFVRVHLPLFRDHCVLDSVDGILLLQRDHDTAIRLLHPFTGDILDLPPLETLLRYVSSKLVGDKWNYLRRIGAASINVSADQVVSLMMWSPGMVQVAFATSGEQQWRASSWYFNQIFSPLAFQGKLYMVRHELTYGEPEILQLDPPELEGMEPWLPPPTLIAKCPANTVNTSDSRFYHLVECDSEVLVIALSAGIHRKISVYRLADFMLGRRTLRVTCIGGNALFIGQRNLCVSSKAFPTVVGDTIVFHHYQQGYLAQYHLRSGTLEPASDGTIAEYAIPSPTCIIYHIYTCCFREQWNKGHIRFQGLLTINWRVKRKWRSGA

SEQ ID NO: 40866 - protein, 108 aa, Oryza sativa
MRGGGGRGTSNRGTSLPTQATAVPSLPPNQAGGEAAATKVGRGRGTCSRDDALPSVKSDRRGGGGGRGTSPPTDPVGGEAVPAMSNGRRGVGCDSSSALPDFSPFFML

SEQ ID NO: 40867 - protein, 368 aa, Oryza sativa
MQTRKKGATKNALGDPASTKTSRQPRRAAQAAASEKKVNDLITSSAKKKKSVGAPSKKNRASKGGRKLISACDAANSENEVSQVVSGIPHDQKSDDNVDGRPCNSIFSPAYHLQKECGASNFAKGLEHKGDTLGSVSSVEERTTHAQGRKEVTTSRSESTSHAVKTCVGSDHHTLNAQSAFCNTPLEEDEFSELGNLSSEVSAIYLAMQQSKLECIDEHSQDSISTEGYVDPEDTEEYDDFDPYAFIKDLPDLSLVVPKFRPVLLPKQTRSCPTTTLKHLCIQLLNHARMLTSHFQFILTSENTQYMSDAVPISKSSWRGLPICLRQSFSLQVKAFMQNSFSMFLILKESCSVIVFTVIPVFMWRETT

SEQ ID NO: 40868 - protein, 319 aa, Oryza sativa
MDGEWSDGAAVSSPTMSGGGGREQMKGGEDVAAADCPGSPVSPSPAAAQRSAAGAAASPSGRSRRSAQKRVVTVPLADVTGPRPKGVGEGNTPTDSWAWRKYGQKPIKGSPFPRAYYRCSSSKGCPARKQVERSRNDPDTVIVTYSFEHNHSATVPRAQNRQAAPQKPKAQACSPPEPVVEVEPEETHQYGVTAGPATGGGGGAAAIEVRDEFRWLYDVVSVPATSTSPSDIDAADEMQLYDQPMFFGGAVVGTAALLPDEFGDVGGLGGEGLGEEEALFEGLGELPECAMVFRRRAGDGLEMGGGVKIEQPAESTAMT

SEQ ID NO: 40869 - protein, 609 aa, Oryza sativa
MATQAIAPMHAAVVHRHHVLPPRRCVRRRGVFVRASAAAAAAAAETDTLSAAFWDYNLLFRSQRDECLDSIPLRVTEGAIPPDFPAGTYYLAGPGIFSDDHGSTVHPLDGHGYLRSFRFRPGDRTIHYSARFVETAAKREESRDGASWRFTHRGPFSVLQGGKKVGNVKVMKNVANTSVLRWGGRLLCLWEGGQPYEVDPRTLETVGPFDLLGLAAADDNKATNASAARRPWLQEAGLDAAARLLRPVLSGVFDMPGKRLLAHYKIDPRRGRLLMVACNAEDMLLPRSHFTFYEFDAHFDLVQKREFVVPDHLMIHDWAFTDTHYILLGNRIKLDIPGSLLALTGTHPMIAALAVDPRRQSTPVYLLPRSPETEAGGRDWSVPIEAPSQMWSVHVGNAFEEANRRGGLDVRLHMSSCSYQWFHFHRMFGYNWHHKKLDPSFMNAAKGKEWLPRLVQVAIELDRTGECRRCSVRRLSDQHARPADFPAINPSYANQRNRFVYAGAASGSRRFLPYFPFDSVVKVDVSDGSARWWSTDGRKFVGEPVFVPTGGGEDGGYVLLVEYAVSKHRCRLVVLDAKKIGTENALVAKLEVPKNLTFPMGFHGFWGDE

SEQ ID NO: 40870 - protein, 149 aa, Oryza sativa
MATNSVIREGQLLLRCSKPSPAMAAFRFSGELRKSKHAFLRPSQWCCSASARTVATELTSMRSHSFSSHTSLSLSMAYLSAATSRCWHMAPSSFSFISGNESVYAKRSSALNTCASMSTTRTTAFLRLSFIEPSSSAPNTGDRAASTHR

SEQ ID NO: 40871 - protein, 377 aa, Oryza sativa
MEVAALASRINWTEYQLASIEAAAIGNIIRDGKVIEIAPNSKGGPLQDVLRSLLEKNELMINKLCDEDAPLESTASRPLSGFFFNTLCKEPGYLAFDTIRCGKLLYPESRFAALPEPVSFLASTRGLVCVCGKTTGLYYVTNTTTFKWVQLPRHSCDHGEPAVVITFEEPLTSCFDGAVEHYHVVAAFHLKGSVWTSESYSSRTGRWTIAKDAPPAVEVKAESGVGTLGCAFWRTSLGSILCYDPGKDLLKVIPAPRVVNQDTVWELGQMEGDLTVTCFKDVDGFLTLGVLKINKRLFDDKVAALWTVVGSFSGEKVGKRAMLLRSQGAAEVVVWEPLEERVVAMDLEGLVTGNFGPLTNEGCTPCFVPYVPSSVSI

SEQ ID NO: 40872 - protein, 450 aa, Oryza sativa
MTQDVWRINRERAVDYLNTRNRIYVVDGFAGWDERYRIRVRVVCARAYHALFMRNMLIRPSREELEHFHPDYVIYNAGSFPANRFTEGMTSATSVAINFAEKEMVILGTEYAGEMKKGVFTVLYYEMPVKHNVLTLHSSANEGENGDVTVFFGLSGTGKTTLSADPKRKLIGDDEHCWTDTGVFNIEGGCYAKCIGLSAEKEPDIFNAIRFGSVLENVVFDPVSRVVDYDDSTLTENTRCAYPIEYIDNAKIPCKSENHPTNIILLTCDARGVLPPISKLTPEQTMFHFISGYTSKMAGTEDGVTEPQATFSSCFAQPFLALHPMRYAHMLAEKIKEHKANAWLLNTGWVGAGATTGGKRCPLKYTRAILDAIHNGSLANANYEVYETFNLPVPTACPGVPDELLNPKNSWTASTSFKDEVTKLATLFNENFKKYSDEATPEVLAAAPQV

SEQ ID NO: 40873 - protein, 392 aa, Oryza sativa
MHSSRFVEFSVRSIEQLVYGRLVPLAERLSGGGAAVDLQEVLLRFTFDNICAVAFGVDAGCLADGLPDVPFARAFELATELSLLRFVTPPFIWKAKRLLRAGSERRLVEATRAVREFAERAVADRRNEMRKVGSLRGRCDLLSRLMSSAPGADYSNEFLRDFCISFILAGRDTSSVGLAWFFWLLAGHPDVESRVVGDVLAAGGDIKRMDYLHAALTEAMRLYPPVPVDFKEALADDVLPDGTPVRARQRVIYYTYAIGRDPASWGDDAAAFRPERWMRGGAFAGGESPFKYAVFNAGPRLCIGKRFAYTQMKTAAAAVLSRFAVEVVPGQEVKPKLTTTLYMKNGLMVRFRRRSPPPPSPPPRHVVADDDDDDDVAAGRHVAVGSCNSNHL

SEQ ID NO: 40874 - protein, 516 aa, Oryza sativa
MEAKPVAMEVEGVEAAGGKPRFRMPVDSDLKATEFWLFSFARPHMASFHMAWFSFFCCFVSTFAAPPLLPLIRDTLGLTATDIGNAGIASVSGAVFARLAMGTACDLVGPRLASASLILLTTPAVYCSSIIQSPSGYLLVRFFTGISLASFVSAQFWMSSMFSAPKVGLANGVAGGWGNLGGGAVQLLMPLVYEAIHKIGSTPFTAWRIAFFIPGLMQTFSAIAVLAFGQDMPGGNYGKLHKTGDMHKDSFGNVLRHALTNYRGWILALTYGYSFGVELTIDNVVHQYFYDRFDVNLQTAGLIAASFGMANIISRPGGGLLSDWLSSRYGMRGRLWGLWTVQTIGGVLCVVLGIVDFSFAASVAVMVLFSFFVQAACGLTFGIVPFVSRRSLGLISGMTGGGGNVGAVLTQYIFFHGTKYKTETGIKYMGLMIIACTLPVMLIYFPQWGGMLVGPRKGATAEEYYSREWSDHEREKGFNAASVRFAENSVREGGRSSANGGQPRHTVPVDASPAGV

SEQ ID NO: 40875 - protein, 661 aa, Oryza sativa
MEETYTVKVGEATPAAGGKPSAGPVYRSIYSKDGLMKLPEDILSPWDFFSGAVKQYPKNKMLGQRKVSDGKAGDYVWLTYEEVYQKVIKIGSAIRSLRVKPGGHCGIYGSNCPEWVMAMQACNSQGICYVPLYDTLGANAVEFIMDHAEISIAFVQESKIQSVLSVVKRCRAHIKAIVSFGDVTSELKREAEQLGVSCFSWEEFSSMGKQNYELPKKQKDDICTIMYTSGTTGDPKGVIITNRALIAGVMTTEHLLKVTDKVVAEDDSYFSYLPLAHIFDQVIGNYCISKGASIGFWQADIRYLMEDVQMMKPTVFCGVPRVYDRIYTGINQKIQSGGMIAKSLFQYAYNYKLGNLRKGLKQDEASPFFDKIVFSKIKEGLGGRIRLLLSGAAPLPRHVEEFMRVTSCSVLVQGYGLTESCSGCFTSIANVFSMIGSVGPPVTTIEARLESIPEMGYDALSNVPRGEICLRGHTLFSGYYKRPDLTEEVFSDGWFHTGDIGEWQPDGTMKIIDRKKNIFKLSQGEYVAVEVLESAYVQSPLVTSVWVYGNSFESFLVAVVVPEKQAIEDWAAQNNKTGNFAELCNDPKARMYIQDELNKTGKRLGLRGFEMLKAIHLETTPFSIEKDLVTPTFKLKRPQLLKYYKDCIDQLYKDAKVGNKQ

SEQ ID NO: 40876 - protein, 150 aa, Oryza sativa
MTSALTFNSDHTHAFRAIITNKSRTTAQAARNGTLVLVCLCATHELEVWVLGQASAGAAHVCRAGDHAEAPLQKLLHDPLAGAARRAGHEDGGRLLGVRRTSGRGVYGGDRRGGEAKLSGGGAGAGAEASERSERKAGAGGGDGVESGGH

SEQ ID NO: 40877 - protein, 256 aa, Oryza sativa
MRLSIDCCEHRFVLRAAAGVRGDGELEEPRGGAGGHVVAAGGVHRRRQGEGVRRPAAVHAARLRVGLVHRRHVGYSWIPQAEDPDGFHVAVSNHRVHGWHGGRDRAAAAQGLPRHDALHHQEVSTFVSAFVVGAVALIAAAFAIPPATSGTPLPSARSVTAAIDGERRRRPARREIAGGEVGPAAAARTRKWRRSASTGREARRSVERGEKRARERGGEREDDDVATLTCGAHVGLTLTQLTRRIKPGSKPPKNLN

SEQ ID NO: 40878 - protein, 298 aa, Oryza sativa
MTDLGGWPSSHCKTSERSSSSSSSVTRLVVGGRIPAGTVGFRKRPVRKSNSWGGSSSWQLLLMMRRHRSSVRQKRSTSGRPDALGLKAPAIHPNSRRRKAMVEGKGIHLGGTVKSSGAVRGYRAFAQRGPNMAFMAAGMIWNMAHGTQCSSAMGGSQWWQKSTTIQSGRFARPARNAANGAARPSQAFLTSPSLSGVTSAVDSAPSGSPSTVSASAAAGGGDDRKGSPAPAGAWRGFAAWRGRRRRGPSPRGAWTAGGRGSCGRTPARGTSPRPGRRRRLLPSPTISRSPESSERVLV

SEQ ID NO: 40879 - protein, 182 aa, Oryza sativa
MSSTSPSRPRLPCPLPPLSRSPALPRRPGFDFRIPPLSPLPLPHFGRRFPPLPATSGPLSPYLSSAATPSLFFPISPNSLVLPIAPAPCTHPPPPFPPLRPPLAAARLAAASRRRRRRVRVAKVHPVRPSSVEVRRRSAIPAVRRSSRTPSAACRPPSVAPRRRSSPPPPIPILPTLRCTSR

SEQ ID NO: 40880 - protein, 328 aa, Oryza sativa
MSSSLIPPPLADSDGASPPPHWVLIDIWCYIGDLPNATTAESTTSTGLPIKVTFRTARPPLLSHLCVHCPGLDFLRATPKVIASHADLLLLVVPFDPLTALSSGTWDYFVYRAADPPLLHLIPPPPRSMRFNDSEVAIVSHGDGEYAVAALAFAGTFLSVNKDFHLHLYHGGKQQQGEWVSKLLTLEDQLRDKLVPLPKAAAEYRFYQETRKTIVIGGERGTVGWVDLWRGIIFCDVLDDHPVLRDMPLPLPASGNWDRLLKQTDPNYIRDVTVSLCRDSIKYIELEIVGTGETHTTVQPTESYQEWVRRKPRYTSSVVLRRGWKATI

SEQ ID NO: 40881 - protein, 114 aa, Oryza sativa
MHAVVRFAWMSDLSLMGGVVRTGVVAFKHWALAMPSLLLVVAAQGMVLYMASNFLLLLAWPLSMMNLPAACGTAIGEDKPIEAISITGILCASPRQCTVRGNSKGLILPINSNH

SEQ ID NO: 40882 - protein, 558 aa, Oryza sativa
MLGLLISSSIKSFYEPPHQLKKDARFWTLMYVAAGIVSLVSLPMENFLFGVAGGKLVERIRSLSFKRIVHQEVSWFDNPSNASGTIGARLSVDASNIRRLVGDSLALIVRSSVTIIAGFIIAMVANWRLVLVATVVLPLGGLQGFFQIKFLEGFSADAKVKYEEATQVAHDAVSSIRTVASFCAENRIMKAYYKKCEAPVRQGIRQGIVSGLGFGISFFVLYSTYALCFYVGAKFMLDGKATFTEIFRVFFALLMATIGVSQTSAMGSDSAKAKASASSIFAMIDRESKIDSSSDDGMVLANVAGELELHHVCFSYPSRPDIQIFRNLSLRIPSGKMVALVGESGCGKSTVIALLERFYDPDSGTVTLDGVDIKNLKVGFLRQQMGLVSQEPVLFNDTVRANIAYGKEGDATEEEIVAAARAANAHQFISALPGGYDTCAGERDVQLSGGQKQRVAIARAILKDPRILLLDEATSALDAESERAVQAALESVMVGRTTVVVAHRLSTIRGADVIAVLRDGEVVATGRHVELMAKKDGVYASLVELRMSSERAGDSKPS

SEQ ID NO: 40883 - protein, 433 aa, Oryza sativa
MQSRLAEELRALKFDRVWRPSPHRSESDGGSCSYRNSIQRVVTASVAAASTSSTTLVFPSSGSVTSSSSASFTSSAPGSEAHGTPSSGPESYRLLRGEAFRGLSEIASHMVSDRYTERLITEFSRPRLGSGSGGGGGGDEILQTWFSDLGVDWVLRVDEMNLQEKPWSGVEEMIKGWLAALTVMAEALRLTKATLSSGDGDSGGVIPVLPIEKYRPQISAPAWIDDDHAGVTLHDVSPGSGSSNLDQESSDPAPNTSRSRSIAIATVKQAITAYSQAASSRSYRYDQHGAAGPEFQFALFAKASLVKMMCFPDAIAALSRSPEKILRVIDMYAVVSGVSPSLLALLPGATKWLVSERITAVLKTLSGMMRGILHDLESLIREEDSWRTTAQGNDIHPVNQIATCWSRRARTTTATTSCSPSGSYTSSRRRNRR

SEQ ID NO: 40884 - protein, 355 aa, Oryza sativa
MAAKLSLLLPVTCFILFVLHAVHVEARPDPAAFGDSDNGFYTLFVFGDSFADTGNLPKRRLSEQSREWYYPYGRDRGNNRPTGRFSNAMVQSDLIARMLGRHEAPPTYRRVDNYVHPHGMNFAAGGSGVFKLPSGAPTLDKQVDHFRDLVQDGTITRRNLRNSIALVAVSGNDYARLANVNDTSKMIKFVDEVTSEIAKQVHRLKNNGARKILVNNLHPVGCTPWVTRPGNYSGCSSTGNMGAYLHGSNLQQKLSHLDYVHHVDLNTAFSNIVNPDQGSKHKVSSQFEHKMQPCCESLDPNGFCGQKGHDGKDLFSVCNDPEKYFYWDDVHPTEAGWKAVMQQLEGPIKKFLRIN

SEQ ID NO: 40885 - protein, 171 aa, Oryza sativa
MRGSTTFHTSVARSGRRLRLISAHRRPRCASWLACTNGQLPAEGSRMECSPPLSMASSTTSAIFWGGFPVSSRRMMIPREYTSERGVSSPVVRNSGSMYAKVPFGVVVRYNRVVAAAAAPVFVCIRSRQMPKSPSLLTKLASRRMFAGFRSPWTIGCGLFEWRKLSAEHIS

SEQ ID NO: 40886 - protein, 822 aa, Oryza sativa
MSPPHLLLLLLALLLSPPLLLASSSFPLPTIAIAAVSNSSSNPSKQHLACGLVPAAGGAAAGYRISCASVSNRSAAAPHVYAYGGDGTCSPYSAVVAGDGYLCSAAPTSSPPMSMRWWDLNEAGDASKRVYRGRVLSAVSGGGESVCGLVGERMQCWRCPWGEGAPARVGFSAVAVGGGFVCGLVVGSGEVRCYGGGEVVGREPAGRRFMLLAAGERHACGVDDGGVVGCWGEAAAVAAASPPRISRAVSTVAVGDAVTCVLWGNWTVSCWPEGEASPPPALAGQQFVALEAKGKVVCGVLMSDYSLQCWGAGVAGGVRKVFDKVLPGPCAPSKSCSCGVWSGSAQLCAGSGGGGGGDVSVCYPCGYTPPPMALSPTSNSSSSSSSQSKGKRRPSNLAIALISAGAGSALVALLAALAAVYYLRRHRGSSSPVSGRIHAEPTGTAPRVERRLSALLSKGPNTTVEQFPLVALRAATDCFSPAKRIGSGSFGAVYRASLPDGREVAIKRAERRDTGGPSSSSAAAARRVDHEAAFVSELALLSRVNHKNLVRLLGFCADGGERILVYEFMPNGTLHDHLHRRAASAAAPLSPPLASWPSRLRLALGAARGIEYMHTYAVPPIIHRDIKSSNILLDSCWTAKVSDFGLSLLNTLDGDNAAAGDGGNAGDGDDEERCVTAGTVGYMDPEYYRLQHLTDKSDVYSFGVVLLELLSGCKAIQKYEGSGSPKNVVDMAVPHIEGDRVHRVLDARLPLPTPWEMEAVAYVGYLAADCVRLAGRDRPTMSEVVGVLERAVAACDEYEEGGAGAGGEPALSRSCTDGSTAT

SEQ ID NO: 40887 - protein, 179 aa, Oryza sativa
MAGIVDEGSCLPHFLSLLPTLGLPLPLPLSVPNPMDSLLRAFRASVQYFLLASSSDDTPHPRLAACHSSRLLFSPRGRGKSRPPLPVLFSSCIASRRVTNLRLCEDEGLLAPARGDGAYCAGGLLNPQTAGLALQGKNTMSPQALGDICSSRPLMLMRGKSCTWTGWSLLCLAVGCCPS

SEQ ID NO: 40888 - protein, 365 aa, Oryza sativa
MGGSAAAAAADAVLRQQQPPWPFVALVIVGAIHVAALAFRLASHLCLCLRRPRDLRRRYGAWAVITGPTSGIGRSVALELARRGLNLVLVGRDPAKLRDVSEAISKLGDGGVETRSVVFDLALASTAEGDEAVRRLREAVAGLDVGVVVNNAGVARPCAVYLHEAEAEAWVRMIRVNLWAVTEVTAAVLPGMVARGRGAVVNIGSGSTEAIPSFPLYSVYAATKRYVAEFSRSLYVEYKSKGIDVQCQAPLFVATNMTSGVAKAGGGGDDAAAKGSKRRQRRWLSPLFVPTADAYAAAAARWIWHGAVCMPNLCHRLQWCVSRAVPDAVHDRVRLRENLRQRALFQRLRRRPPPPDDQPKAKIDG

SEQ ID NO: 40889 - protein, 533 aa, Oryza sativa
MAATAAETAAAATATAGGCRVVRWRRWTFASLGALLSNLGPVWFLIAPLLAAYAPRRLLLTYFNLVLRRRARRLLAAVDPYVTVDIPDPGAADAHQQYYHHRSRLGGRRAGDNAYEEVKAYLSAACSSEARELRAEAAAEGRGLVVSMRDGQDVADEFRGATMWWSSVDEEQQGGGARRRSQRLTFHQLHRRLVVDEYLPHVRRRGRELLFHNRRRRLYTNNKSLSYSSVYHKAWSYVNFDHPTTFETLAMEPAKKAAIMDDLDAFRRSGEFYRRAGKPWKRGYLLHSPPGTGKSTMIASMANYLDYDIYDVELTMVSDNNDLRKLLIETTSKSIVVIEDIDCSLDLTGDRATRRPGEIRGGGSMVTLSGLLNFIDGLWSASGGERVVVFTTNHVEKLDPALIRRGRMDMHIEMSYCRAAAFRTLAKNYLDVDAHHLFDAVDDILDKEDITPADVAECLMAAKRSSDSDVTSSLEFLVDELNKRAMENAKAVAEAKARAEAEAEAKAMADDDSEEDDDHYSDDYTDDDDYDDD

SEQ ID NO: 40890 - protein, 426 aa, Oryza sativa
MDSGNSGSLQSSSGGDDEFDSRCGGGGVDSSPLSALLRQSASASGFGGGTGSFYGLQELASPPPQLPPLSQAAAHQWTAPLPGGGGAGGASSSPPSSSSPHGVQVSAEQVVAQQGQGVGAPPARGSRKRTRASRRAPTTVLTTDTSNFRAMVQEFTGIPSPPFAGPPARSRFDHLFPAPSSLRSAATAAGGGNPSSLPAYLLRPFAQKHHPSPFPPFPSPSTSSPSPSNIAIATSTAAATTAAVAAPGDRYHLASAPSSSLLGMQDHGGSYLSFQSHLGGAQLGASDDVKYTAHTMFDAPGSDLAPRPPPQRLQDPAAGFLGLTHGIMGADGSHMHQQQRSRGHGHGGDELSGVVGGASMTRSVGGGGKKTTFSSGAGAAAHAAPQLEHNAESTSVTVAAAPTPSSAAATAAMRTQSVDSWICTSE

SEQ ID NO: 40891 - protein, 235 aa, Oryza sativa
MAAAAAAKPFPFLAAAAAAASRSPLPLSPAARPAPASSRFGDRRAPAVVAATARRRGAHGVRALRPLLLPRASASPSAKTAAGGMSDPELRMVLELATDEELMEFEEILYGTSYFSPLLKSIAKRPNSDYVDALDDIEERDIFISKLESRFLYLAADARSIIRGSRPSYRNVLLGVRRELGVRCSSKLCTADLEAEIFLHLLDEYSRNLQKTTLALELTSGWCLLILLGRLEQKD

SEQ ID NO: 40892 - protein, 441 aa, Oryza sativa
MAAFLVWILLLLPYVAISSTASHGVRLELTHADDRGGYVGAERVRRAADRSHRRVNGFLGAIEGPSSTARLGSDGAGAGGAEASVHASTATYLVDIAIGTPPLPLTAVLDTGSDLIWTQCDAPCRRCFPQPAPLYAPARSATYANVSCRSPMCQALQSPWSRCSPPDTGCAYYFSYGDGTSTDGVLATETFTLGSDTAVRGVAFGCGTENLGSTDNSSGLVGMGRGPLSLVSQLGVTRFSYCFTPFNATAASPLFLGSSARLSSAAKTTPFVPSPSGGARRRSSYYYLSLEGITVGDTLLPIDPAVFRLTPMGDGGVIIDSGTTFTALEERAFVALARALASRVRLPLASGAHLGLSLCFAAASPEAVEVPRLVLHFDGADMELRRESYVVEDRSAGVACLGMVSARGMSVLGSMQQQNTHILYDLERGILSFEPAKCGEL

SEQ ID NO: 40893 - protein, 387 aa, Oryza sativa
MDMMEEEAANAATAQAAAAGDLADVVARANARAFLVSTPHHHPSPLHPLPPPPMPQAPHQYYPAPQITIPYHHHHHGELRRPTTIAYTDAPVPFETAGPPSTVVDSYHHLTPGDAGYGMPRPLALQISQHALCGGGDVVMGGGGAGAADDGEEAIRISPLTPSAHHQMMKRKNEVKKVVCIPAPPATSSRGGGGEVIPSDLWAWRKYGQKPIKGSPYPRGYYRCSSSKGCMARKQVERSRSDPNMLVITYAAEHNHPWPMQRNVLAGYARSHHSTHATASSSRHKQQQQQQTNQLQPALITSSSSSSSSPFNLYADVVLGGQQANMMMTTEGAGAGLGIQPSAADEVFAELEELEPDNPTMINANMQVYSTTSRPGVSSYDHQWHKF

SEQ ID NO: 40894 - protein, 159 aa, Oryza sativa
MSNQSANMTLGITGACGRTAASPAAGSVRLLESSADDDSTGPEDSELAGRSAATRSWPVSLRFGLPVTTSAGSADFLAAASAPSTRFLSVQVHDGFFFLSGKHAVLQPRPQVIDPSQPATLAVTLQPCMKGKFRREFSSPDKVHLTKKHKSSNRLHLSS

SEQ ID NO: 40895 - protein, 546 aa, Oryza sativa
MALQPFTDDLLAEILLRLPSAASLQRAALASKCWLAVASGPDFLRRFRARHTSSPLLGLFVSHGSSGLPVFHPAATVRSDPDLGAAVLGGDFSLIRVGDGEDPRWQLRDCRNGRLLLCGGRSVAVYDPVSRRRVSIRRPQDDPFSDAYIADCLLHGRGDNGAASFRVVSVQRHGRRMRAAEYNSGTREWSFHPWVENMRRPRRGQAMHAAGIIFWKCEDNFVILLDTLTMEFSMLSLPVSLFQPSKYAIGEMEDGVCCLVCLDGTMDNVHMQVWLLMEEDGGGRRWELEKEMPVSEVLDRHSLVRQVRTVASGLVLVSWDDRYPQFAIDLKNMKVMAEFRCSGETYLFQTPWPPALLVDSEYVEPLQMIATQNMMKHVNLAAERTDVVNSEGPLDLVLEPHGPLDAQQAMAAEAETLVVTADLKLVRSTEAQNQSVAEKPEIMKGPEVPVSKRSMSRLEKRRGERYESALHKAMERKARYMGGVEQLSTSLGRNYRRSEKPIVVDSSYERYYQCRQRREKPIVVDSRYGKYYQRRQRRPAAGVQGR

SEQ ID NO: 40896 - protein, 336 aa, Oryza sativa
MAVAPVRLVACIVALAAVAPGGVAGHTRGVRPGRAAGKQQPSFPENATRVEAIERQFMEWVRYMGGLEHSTVHHALARAFPSYSLVVDKNPAFGDFTTIQAAVDSLPIINLVRVVIKVNAGTYTEKVNISPMRAFITLEGAGADKTIVQWGDTADSPSGRAGRPLGTYSSASFAVNAQYFLARNITFKNTSPVPKPGASGKQAVALRVSADNAAFVGCRFLGAQDTLYDHSGRHYYKECYIEGSVDFIFGNALSLFEDCHVHAIARDYGALTAQNRQSMLEDTGFSFVNCRVTGSGALYLGRAWGTFSRVVFAYTYMDDIIIPRGWYNWGDPNREL

SEQ ID NO: 40897 - protein, 128 aa, Oryza sativa
MYSRVSARPPRYLYSELHFGLFQFHHLTSAVSCFLVNLFLLVLRLLVGSRLFLSRQEQQQRGVGVPVAKAQHPCGSCSRTANVVSSPKSKFIHLSSKDREPPLLHQVVSELKLLGERFYHSFVFTYSP

SEQ ID NO: 40898 - protein, 298 aa, Oryza sativa
MKLKNRAEEIFRDGDLIFTSERNLGARNVQMDYDIVRANQPAVVQTRCRWIIGDVTEVLDRNTWKLGKIAKMLKNNYFVIRLADCIQLKEFHISSLRVPASPHSNNQYSVADKKSEAKLAQRGQIPSDALPGRTNKKRKSTADTSFNPRRRTSRPENASRACVLDGSTTQNRFQFIREEAECSVASCSINDPDTTFTNAKKLQSLGFPDDAMSACPCTSGMEDDDAAAAVADEDDDDEPAAIAVHELELEAYQSTMRALYASGPLTWEQESLLTNLRLSLNISNEEHLLQLRRLLSSR

SEQ ID NO: 40899 - protein, 59 aa, Oryza sativa; identical to SEQ ID NO: 39863

SEQ ID NO: 40900 - protein, 73 aa, Oryza sativa
MISPSDDIIDLSISLPRKITDGHRNIHKGVHCILQGPQIQCRYEGSPQFVVYQTNRYGIAWSNHDQLFPDCVR

SEQ ID NO: 40901 - protein, 344 aa, Oryza sativa
MPTSTGSRKPVRSASTIIAGTESGQHLLKIDGYSHTKDKLPTPGSNVKSRSFRVGGHSWHISYYPSGNDSDKANCISIFLNLDDDVDVKAQFKFSLLDRAGRQPARLQKQRVGVCEFHPEGRAGEIGVSPGRLPHDRVRPHRLHGAADGGHRRRHRNAAAAAAAYGGGPTVGPAPAPRRPPRHRGGRRRDVRGQREDVRGTQAGARGPVSGVPCRAFWAKQGAGCHDRRRGGSHRHTHRRHGGAGLRGSAPLHVHRLAAGARDDERRRGRGGDAPGPGRGGEQVQDGEAEAGVRAQTVRVRERENGCFHACIRPGAPLRWPQGEVLAFPRRSSESERDREGSII

SEQ ID NO: 40902 - protein, 257 aa, Oryza sativa
MDANASAFVVVVDPAVGADGPTYKVRPYPRKGDATSMGRVTEITVRTTAAVVFSISGYTGNLFHDFTDVIVPLYNTAARYCGDVQLVVTDGNAATRRWLARYGAVLRGLSRHVPLDLAAEAAAGGGEVHCFGHTVVGLRAHGELIIDRERSPDGLGMPDFTRFLRRALSLPRDAPTRPGGGHGDATKPQPRPRLLIISRRGTRFYSTPTPWRAPRSRSASRPWQASWTWPARTTTTSRAWHGSSTRSTRWWACTAPG

SEQ ID NO: 40903 - protein, 93 aa, Oryza sativa
MVLPILQGCPCPWRHHHHEEDRTDLQTECSNEQCIGYGNINSAMVPLLVPCQKEHKCNHQGDAGDESEYGASPCTNHSRLSVEVVIHHSQLDL

SEQ ID NO: 40904 - protein, 211 aa, Oryza sativa
MWQADSTCIRWLDAQPAASVVYVSFGSWVGPIGHDKIRELALGLEATGRPFLWAIKDDPSWRAGLPAGYAGSVAGRGKLVDWAPQDDVLGHAAVGCYLTHCGWNSTVEAIQHGVRMLCCPVSGDQFINCAYITRVWEVGLKLGSVRRDVVRDCIERIMGGAEGTRLQEKMDALRQRAVTAEARCLAQGNLRSFVNEIKRDHPLLTQIYNIL

SEQ ID NO: 40905 - protein, 488 aa, Oryza sativa
MIVKLPATVQSLQYLETLQLNARVANVPSDIVHLPKLLHLRLRDVANLPDNIGCMASLCTLESLDLSNNSEQNVWGLGEMTNLQELYLNCSTELSGRLKRNLTALASSLGKLRKLRTLILAPSSGTSMYMDCSSIVSSPPLCLQRLELLPTICIFSRLPKWIGQLKRLRILKIVVRELLCSDVHSLTMLQELTVLSLDVQQSTEETIVFNDKAFPVLKYFKFRCGVLRLAFQAEAMPNLRKLKIEFNVHRGEQYGDILTGIEHLLNLQEIIGQIGAAAGAEESDKRAAEFALSDATKKHSRISRFNIRWINCVEEDVRVSKISDLQGISSSSDEEKQKANEPSGTDITIEDESPFSHEPNYDVPRAYKAEIESEEVPHAELADASRTSDSIDNRRRQRRSIEPSFSRDRLSQPRKHSVASAVPKFGEWDSPLRPADNYTSIFNRAREEKRSQVEKPSVFDKDDLLVRRTRNRNDGHASTKCSCFGWCK

SEQ ID NO: 40906 - protein, 425 aa, Oryza sativa
MQLLNHAMEAYRQQLEAYQMGSQHSAAAAAAARAPLVLEEFIPVKNIGIDVVAADKAAAAGGNSVSSEKASWMVSAQLWNAPASASAADTAAKGPQTPKEHSEHHPLDTSPKLITAAALPELALAPAEKAADAITIAAGEVDKKPYAHDNGVVARSREAQNGGKPPSTPSDGQAVPPPPQPHRKARRCWSPELHRRFVNALQILGGAQVATPKQIRELMKVDGLTNDEVKSHLQKYRLHTRRPMPSPAPPTAATPQLVVLGGIWVPPEYATQAAGPAIYGAHPATQPHYTAAVAAQEYYHHHHHHLQHHPAAAALVHHRAVAPPPPLPPQQQLAPPYSAKSSASARLGSPDSDGRGSGGGGGAAASGAGRDMSESIEEEGEGEEREDDDDDDEMAATNNAHAVDGDDDNDEINTTTTTSAGAINY

SEQ ID NO: 40907 - protein, 346 aa, Oryza sativa
MRGEEGGEDERLDGHELDEDVERWPRGVLERVADGVPDHRRLVRLGALGPQRPRLLRRPGLDVLLGVVPRAAAVRRRDRHLHPGHQRAGEQPRQRLHPEQRPGDERARHHQRPRRHHLPQRRVGGDPHAGGVVRRGEPLGEPRDLVELAPHLLHHPQRRAPHAPHRHRREPVGEHGAGEEPDEHPGAHHVHRPDPRPAHVRAEQRQRHQRRRPDREPLPDRRRRVPGGVERVRALAHAPRHAGHLRDAAGVVADGAIGVDGEPRGDGAQHPQRSQRDAVHGGEPEAGVDGAGDGEDRHDHRLVPHGEAEDHVRRRPRPARLRHRLHRPINLKFERKFHQNLKFYKM

SEQ ID NO: 40908 - protein, 91 aa, Oryza sativa
MISSTTDIRTGILNAMSELLCVGKTGIIGLRLIYIFSSPFNCACRHLVLSTSKTFTIAQPDVNKSNCPQFFLRWSIWKLACNLFSFPVVSC

SEQ ID NO: 40909 - protein, 381 aa, Oryza sativa
MDAKKKRNKKKKGNQGKNTGDVTSSTAEAAIRSHNHETAPNDHHNGTDADDAMSTVGEEAPQYQNHEPDRQANHDSTNTDDVMSSVGEGIPFQNLDPAMTHENHKVSSTAHADQRSVEMSDSTVELDMHRLYEAKLDKLHDTIKKLEDEKSLWHQKMSSMEIEVEKLHNKVDYHAQNEVRLEEKLNNLQNGYDVLIKKEVALDNKVRSIEVINDALTHQETSLKERLSGLEETNKVLLVQVKVLEEASNNTVEESQRLVKGFDELASRLGVFEAKSALTEASVTKKGNELIVDRSVNSSAAITSVDNYSPINSSPSNAYVNNHLEEAPMQLPETTINDVSSEGLIDMNAHQRSKQDFDEPRTSEEILPVALDDIQIHEEDP

SEQ ID NO: 40910 - protein, 261 aa, Oryza sativa
MVIGCCRVLIFVRLIAFTLFVIWRIEHKNPDAMWLWVTSIAGEFWFGFSWLLDQLPKLNPINRVPDLAVLRRRFDHADGTSSLPGLDIFVTTADPIKEPILSTANSILSILAADYPVDRNTCYLSDDSGMLLTYEAMAEAAKFATLWVPFCRKHAIEPRGPESYFELKSHPYMGRAQEEFVNDRRRVRKEYDDFKARINGLEHDIKQRSDSYNAAAGVKDGEPRATWMADGSQWEGTWIEQSENHRKGDHAGIVLVSIIKS

SEQ ID NO: 40911 - protein, 286 aa, Oryza sativa
MVMVGCLIAILARSCWHLAVAAVKLPALLCCDAMLSTVAFLTFPLRLLAAVDRERKLDRLVGEMQRQMERLVWENRELEEKLGMALKESRAMEEILDEMEEEHDDAFARITLLETQLKALKLENMRLIEHRGKSMWDKKPPATAVHGGESLPASTSRPSNTRKRKDREDEAEEAAAAQEEEGGGGVATEEDSEMSVQMRRGKAVARRRSLVSVGMAAAVGAVVWAADAPCLPLLAGLLATVGVSMCSVARFFLLREEAAAHAVFPRAARLVAPAVAWFTATAPLSS

SEQ ID NO: 40912 - protein, 474 aa, Oryza sativa
MAMASSRLPLQLLLVVGAAASEIAHFLGVNYGRLGDDLPPPHRALELARSAGAAAVRFYDSNATFLSPAAASGLVFVPGVPNELIPSLAASRRAADEWVAATLLPFRRNRRLRYLFVGNEVLSDPTTKSRWFQLVPAMANLERALRRHGMRRVKVSTTLGMDALDGQNVFPPSAGVFRPDIADAVVRPLLAFLERTDSYLFVDAYTYFTWSANHTIVPLHYALLEPSPSPSPAYQYHDPGTGLSYTNLLDHMLDAVVAAMCRAGHCGVRMALAETGWPNAGDLDQFGANARNAATYNRNMARHLASGAGTPRRPGMRMPAFVFALFNEDLKTGPATERHWGLFHPNGSAVYEVDLTGRRPPASYPPLPPPATNDAPYPGKLWCVVGAAAANETAVREQMEAACADEAALCAPVRAGGECYLPNTVAAHASYVFSAHWNKFSKVYGGWCYFAGLAMETTTDPSHGSCKFPSVTPS

SEQ ID NO: 40913 - protein, 267 aa, Oryza sativa
MDLVADHDDHSVVLLEMRYDKEGYDEFGIDYFVYNYAAADDDGDDDDPPRPPSLSLLPSYWDPLDEDERRRRQDPKVHQLDADSTGLLRRRRRRHGEDDLVVAELITTRESESSKLEEVKLLVLRSGEWSVTRAEIIHDGSKGEELSYWETDMAVPVGDRRLCWVDLYRGVILCGDDLFDEIPPRLQYVPLPVEAPAGEFEEDSDDESTRRCLMASSSSSTSSPAAAAATPAPPSATILATPSSSTSGHSGSTATATTPCCHGPWTP

SEQ ID NO: 40914 - protein, 167 aa, Oryza sativa
MPPPGSSAGHRRIDLLRYCGRRWRRGGLERKAYPGSSVSAASLPAADASIRGRRVDPRRRCFDPPLPPRSPPPAPPSAATASICGRSRFDPRPLPRSPPPAAARSAAAGKLRRHRCSRRRGERGEVVLGRAPPEKGKSRHQEDGNRAKEGSLVIFRGYTANIGCICK

SEQ ID NO: 40915 - protein, 210 aa, Oryza sativa
MAGRKRKAEAARAAEEEADRALYGAFRGAANSLSQLYALAGAHQRLSFHAGERHALEKLYQWMVRQHEIGLRLTVSDIASHIQHEIEYGGDNALTSPRSQHAFQNLQAPMHIPNTSTQQPPSCSITPSNPSKDSMIFSKALSSPVRQNLQLYHVQQCGDTGCFADGIFCPGNGDSDPAASNDSSVDMHSDSPGFPRPTEALRDSEGGRPS

SEQ ID NO: 40916 - protein, 425 aa, Oryza sativa
MASGADRISDLPDDVIHHVLSLLPSRDAVRTCALARRWRDLWRSVPAVRVAGDRGWASFDALARFVDSLLRLRRGGAALDACDFDLRFDGAFPGEELQGDTWIRRALRRQVRALRFAVSTHPRVPIPLSDSPLVSHSLTTLELRGVQGNDQVLDFSSCPSLVDLKMKDCYVGGLEMWSPSLKHLSITYCVFYCDYRTRMDFPSLVTFKFNTNTGRTPLLETMPSLATAAVRLDHFCHDRCANGWYDDCGDAGCKGCHDYYRPDEYDCVFLEGLTEATDLTLLAYSKVYLFNRDLKWCSTFSKLKTLFLNAWFVAPDLSALAWFLQHAPLLERLFLRVSKVPKNLVGMDGSFNQLEQPFAASHLQIVEIYCREVDGIILKILKVLNANGVPLEKISIRCSGCELSMNTHASYYAVVNMCCRAKHCP

SEQ ID NO: 40917 - protein, 495 aa, Oryza sativa
MANPRGGGGGGARHHLPLRPRRLLRSPISRCAVLLAASAALLLVLSLRQVHRVGLPPRDHPPAQEPNEQLWGSDGYGSHACVTPTSRYMAPKGSERYMTVRSNGGLNQMRTGICDMVAVARLVNATLVIPQLDKRSFWQDTSTFKDIFNEPRFIKALEGDVSIVNDLPQSLQSVPRARKHFTSWSGASYYEEVKQLWKDHKVVHIPKSDSRLANNGLPIDIQRLRCRCLYQALRFSDPIENLGKKLLERLRSRGKFIALHLRYEKDMLAFTGCTYGLSESEADELRIMREKTSHWKLKDINSTEQRSGGNCPLTPEEVGIFLRAMGYPESTWIYLAAGEIYGGDKYISKLRSYFPNLVSKEVLATKEELGKFNDHASQVAALDYIVSVESDVFIPSHSGNMARAVEGHRRFLGHRKTVTPDRRGLVELFDLLQKGELMEGPKFSSLVTEMHKNRQGAPRKRYGSLPGSKGRARLRTEESFYENPFPECICLNGKH

SEQ ID NO: 40918 - protein, 533 aa, Oryza sativa
MSSNMFGKKGWDSNGMDTSGSVCRSSSDINYINQRARLKSASLNCVGSPPRKNNNATQYRMFVATWNVGGRTPNKRLNLQDFLQVEESPDIYVLGFQEIVPLTAGNVLVLEDNEPAARWLALIHQALNMPQEPADGDEPSPLTPPPSSSTTTSESSNGARTRRRDAVSRSASGNLFFHTPSLKMLSNSYRVDSALVKTCNCSPEHSSVRRRAAEVRESVYLADAPAPAGETAAPAADEDDAPTTEAQCEAGCGGGGGMSYCLIASKQMVGLFLSVWVRKELVEHVGHLRVDCVGRGIMGWLGNKGCIAISMTLHHTSLCFVCSHLASGEKEGDELRRNADVAEILKSAHFPRACRPAPAAARRVPERILDHDRMIWLGDLNYRMSLSYDETRTLLEDNDWDALLEKDQLLIEREAGRVFRGWNEGKICFAPTYKYTHNSDAYAGETAKSKKKRRTPAWCDRILWQGDGIEQLQYLRGESRFSDHRPVCGVFAVEVDGGDGDGGGAAGKIMKGYYSLNARIGGDRSQCHQGDVS

SEQ ID NO: 40919 - protein, 117 aa, Oryza sativa
MPNSQPFADDRDASFSTPSNLPMCTGAHGDVTNLTHAEVVRKRARNWYASLTQEQKDERNKKDRERRKRKEEESQVLNKSATNSGVAPLGKLSNISAADLMTCQLEVNDSSTLHKVY

SEQ ID NO: 40920 - protein, 521 aa, Oryza sativa
MAPSKLRAALGAVKDRTSVGLARVGGADEVAADLAVAIVKATAHGESVPGDERHVQEILTLTCYSRARVAACVSAVSRRLGRTRAWAVAVKALALVHRLLADGDPAYEQEVFLATRRGRRMLDVSHRFPHRSSRSRATWDFHGFVRAYAAYLDDRLKHRMKGRVASQGKWCSDGRRDGFPDITDGSYEVGEAVAEVWALVPRDTPATGTTTTEELVSKAQHLKHILQRFIGCRPTGKARTNKVVAAALHRLVKESAVMYRELTEVMAMLADRFAELETPCCVRVHSIFTSIAKLFDELDEFYSWCRSATICRPSEIPEVERVAQKKLDLMDEFIRDRQPASSRWWRCTPPAPSSPLAPIASNGDNSSKASPAEPAPAGALVVVDDHMADFLNLGEESTPLSTEEQDRDLTLSLFGDDPATPAPKWETFDDDQCDDWETALVQSASKFAATQSATVLALPPPPGATGGEVADPFAASLAVPPPTYVQMMDMQARQRLLANEQMMWQQFETQQMAAWSYSSLL

SEQ ID NO: 40921 - protein, 198 aa, Oryza sativa; identical to SEQ ID NO: 37175

SEQ ID NO: 40922 - protein, 419 aa, Oryza sativa
MGGGGDERGEWEAAVREEVGVGGWWDDPDGDELRARFKAFTGQRRDWPQPKLLFWKGLLLRVARRLRLCSAPARLVLGVWFARPGGLTPLCLPQVLEEMRADGEILLKSELIDPTTGSLYQLVRRMSQMAVISKQPIAQDDILVFKSLIEERAAEIVDQLRNSHWTSTCIVTISKFNAFFHGQEDSHVALCYLTQCGKARYIVDRRQDSVEGVKFSLMAAQVPAVSKLDHNTLHLILTEEKLQQQLDVLDRQWQISRRRALVSFKSGDKQSAYRYVRQSKLFSESRKRFTPLLERVEEVISLIASAETTKKVNEAIKVSIQAMNEHHVSVEEVNEHLKEVDDLVATQREIDAALGSVILQSMDSEENIEEEFMKLEAELQDEFPHVQEDPVSHANEEFPNDEDVDSLSNNLSNIKLEAI

SEQ ID NO: 40923 - protein, 338 aa, Oryza sativa
MLARPGRLAASTLPNDSAAAAASTVLSILRGEDPASLPAAGIDPCPAVFQQLRPSLPTVPDSALPALARWAGEATAVSLLTSRGLFAAAWRLLLAPSPTPPPLAAFAPLVRRYARLGRAPAALRAFQFLRRHPDRYMAGGDIPAAASLLNMAVDALCKEGHPRAAVELFERWRREEPDSPPDERAYNILLHGWSRAGRLDKVGKLWAEMRLAGVRPTVVTYGTLIEGLCVKRRPDQAIALLDEMREEGIEANLLTCNPIVYALAQAGRFQDAHKVLEKFPLYGVAPNISTFNSLVMGYCKHGDLAGASSVLKVDRTGHFADHKDIQLFLHDLCQEQRC

SEQ ID NO: 40924 - protein, 91 aa, Oryza sativa
MSPARRLAVLRSHLQPAAPAGEGDRDVVVCAEQAAGVSTSPCSAAAAGGGREAEGKSCVFCRIIRGEAPAFKVYEDDVCLCILDSHPLAPG

SEQ ID NO: 40925 - protein, 297 aa, Oryza sativa
MGSGGEGGGGAASVRDQPPHDFANVASFSELPFLRPAPAPRESPNNSAIRLFGIDVPHASSSPDGKASKESVVVSTAAAAASTHGAAAAAIAAAADSSRKFECHYCCRHFPTSQALGGHQNAHKRERQHAKRVQMQTAMAAAAAAASGAHHHHHHHQLLGYPQHHHRFGLAGPTVAALYQHPSWPTMSGGGGGISSIGPQFYSGIGSVTQPINGSPLPAGLWRPGPMAAPPLLAGERRPVAVSTSSVFRGDEPRASASLVASQTASSSLLLSPQGQFACEQPPATTAAEGVSLDLHL

SEQ ID NO: 40926 - protein, 475 aa, Oryza sativa
MASDDSSPPDAKRLRRSPPTSTSPDHLLVDEILTRLPIAAAVRLRAVSRDWNAALTTDHFILAHRARAAAARHPELLFFAPPDHRNTTTFYACSLRGCEPPAAARELLTIDYFSAKHAVMSPTPCRGLTLVSDGRAPRYYLLNLSTGDHVALPPCQPAAKAHPDPLAWLPRGTTSYLPSMTPWRPFELSTTGLGFDTATDEHKVVRLFKRRNGEHACEVYTLGKPGGWRPCAGRVPASAASILPAMPPVFVNGYLYWLLQPAAPGDEQIRRILSFSIGAEQFGSVYVPPRLSSRMCHLANLDGSLCAVFDYRGAGGVYGLFTCSEPSASPSPSWSVRCSIYLNRLPREVSDELMEERVIVPLCTAGGRILLATGRHEVFAYDAGRNAVERVFRMQEFVDVPNDCREARLLLSVGLHDECIADLHPGAGGERMLFVNTGRRGNTVVKREVPVEYHDDSDRRFNVFFKDLATMAAQI

SEQ ID NO: 40927 - protein, 80 aa, Oryza sativa
MTRKRRRWCLRFQWRSVVRWWKVIVRSAFGCRSRAWSRNRLTPFRSTKSASSHAIRAQREQSFADSTKLPSRREARAAKL

SEQ ID NO: 40928 - protein, 413 aa, Oryza sativa
MRRRVALCLVLFAFAGLHAAAVEAVTLSTSSRWIVDDEAGGRRVKLACVNWPSHLEPVVTEGLGMQPVDAISKKVASLGFNCVRLTYPIALATNASLSSLTVRRSLLAHGLAGAVAGVEANNPGLLDLTLIESFRAVVDSLGESGVMVILDNHVSRPGWCCADDDGNGFFGDRHFDPDAWVRGLGAMAALFAGVPNVVGMSLRNELRGPRQNADDWYRYMQMGAEAVHAANPAALVIMGGLGYDTDLSFLAARPVDVSFAAAERGKLVFELHWYSFADARAWESEDANEVCGRVARGVARRGGFLLDAGFPLFLSEFGADTRGGSRKDDRYLPCAAAVAAELDLDWALWALQGSYALRQGVAGADEVYGVLDWSWSKPRNATALSRIQSLQRPLRGPGYDEARPYTVLFHPPP

SEQ ID NO: 40929 - protein, 186 aa, Oryza sativa
MCLPFLCGGDDPVKNSEVRPPARHPREGPNDGDGGHKPSPPPHAGGAVNGNGGAAPPAPATSPDTEVRAPTYGDKQISPPKEGAAGKPPMVVPAANHPQAPTGEEAKKAHGGGGAVGRRNGISSTVLTAPPPVGPMAAPATTVKDAPPAAAAAAANDVHGDADEQHPGYGDHGEVDDRKPRRRSWL

SEQ ID NO: 40930 - protein, 382 aa, Oryza sativa
MFLLVAGHPPWALPSPFVPGSRVLSVQCSRLPQLGLSLPQRIPCPLEDGEFVPPLVPDPSQIFKIKNPQVYSRPDPELPPSSQAQKLCSVEDPSKDCAAPLQEDVSAADLGANRNLSMKILHPQSKIVQIRRHYSTILKSDIQPHAARRLSVAERLNPPVWGRWATQPPSRSLVPRRDADVTTQGLNSRSSTTQVKEDQWSEVKPRFWWRKQQSFNPPNNQKPMHSRKQLFLKHVVGKCFRCLSLDHKVTTYREPLHCWMCRGFGHISSSCKSKNYKSQHPPLNPPPLSSTTTFPSLSVSNPSPSLHHSPTTAMARVPGDLAARPALISAWWPPLERLSDCVSFSLPARLSPGLKKGKGWRRAHLLMMCALHSASAALISKS

SEQ ID NO: 40931 - protein, 199 aa, Oryza sativa; identical to SEQ ID NO: 36349

SEQ ID NO: 40932 - protein, 236 aa, Oryza sativa
MDLAHVLLVGLSINCNCIAAAACIRVYLSFIPISERVCVARRLVDIGTSPTLASTLLRLHRSASRIFGLITRSSVRLQQLLQPIIIEHASTPSSFGLPLRRPLGLQCCRSWSISTSCWNAARRPPQRGLTTGELLAAASTWSCSCVVLSNRSFAAFIVFIAVRASTTSSSALVIVSRLGSSSSTSSIAAASPSCHCRRSRPVIQLPLHGYRRRHLGRWSRYIALYFIQHDSSPALP

SEQ ID NO: 40933 - protein, 234 aa, Oryza sativa
MGWVDLYRGILFCDVLSGGDHPTLVGVPLPLPRRLVDRGAEVEGCPKANRGIAVLDGCLRMVELEVHGEILPTRDPETGHLDREIKNWELYMYTNSKITGAWEDWQLVHGVEASQINIDQAIHDSLLQPGLLRDKMQDGKERKLHNLLTSQPALSLDGEGVVYLLTKAKFMQRQAWVLAVDVKGNKILGLAEFGTDTYLGLSLAYCPSRISSYMDAWTVQTISYILVLYKFLVL

SEQ ID NO: 40934 - protein, 586 aa, Oryza sativa
MDTEITQETAAPAAAAADVDIISDLTNDVLLIILGLLPAARDVVRTSALSTRWRHLWTRAPALRFDVGPRSWRLGGCGATDEAAAAARLVEAVDSVLARREGGADVKDLEINLVHHRSDGGDRPPMCHHYAAMFVSSPSPSRHREEPRCDLLAVPLDVVTPARVAAWLRFAERRVAGSFSLRLPALSRRIAAAGSPPAVLPCSERLHTMRLALGGAALAVPDAVAAAAYRSLTDLLLSKVSLDDDGDDLRLCSLLSSASCPNMRRLELSDIDGLINLRLDAAATLEVLRLIGLRHMEQMEVDAPGLRELVLKRIYAHLMAAASASSVRIAAPGLQALTYEYDYACWGGAFPMVLDGERTAKLQVLSHGVPDKDNNGAAAWFLQHCAAANRLDVVLKMEFDEEKMEEDIEDLIKDIPEVLNITDLRITVAISTGTVDTHAIGASVTKLIAKFRRIEYLSIDIDKKAGDCTNFDCKCEQHKGWSNEMIPLDHLRMVDIRDFLPFNDQIELVCALIASAPALEKMIVALHESYEETRERTNNMEAYLCIPSCGGRWTPCAWNGGKFGSATKYEWKPCKRKRSEEGVEKV

SEQ ID NO: 40935 - protein, 131 aa, Oryza sativa
MVAAGSKELLRNEDGFTTEDVVAMDSPNIVALAETPTARTSPPPPLPTTSRPSERASCSPQGHPCSAGEPPGDPWRRGGRGGDSFPLPLPPRLLVVLGGVRLRVKVAEQHPGRVRLHPGRQLPQPRLHPAL

SEQ ID NO: 40936 - protein, 405 aa, Oryza sativa
MRPLAIRRREARLLPPLAVLVRSMAYVDVKMRWKKDASFDAVPVLSQARDLRPLVSLAGLLSPSPTPVSAVSKLRIPLEVPDRRVISFLRRFPAAFVESVGPEHNHPWFRLSGSAAGLLQEEREVFAARRADITSRLGRLLLMAPRRRLPLRAAQGMLWHLGLPEDYFRCRDYDIAQDGFRILTIGDSVCREEEEDDGRELVLIDNGEHQEMPKSVLQMDAIRRFGSMETVPIPLFQSKGLRLKQKIEAWLEGFQKLPYVSPYEDFSGIYRDSDVSEKRVVGVLHELLSLFVTCSAERRRLLCLRQHLGLPQKFHRVFERHPHVFYLLLKEKTCFVVLKEAYLARGDTAIEEHPMLVVRRKYAGLMEESREIIRCRRSGKPFPSKHKDHEQIEDSEGANSAPILS

SEQ ID NO: 40937 - protein, 281 aa, Oryza sativa
MSPPTNGAISLAFPPMGPLPADALIYPFDGLSYDDFVLPVAAAPQHPLPVAVADPAPLLLLPPPSSCTCNGASSGMGAVAPRTLALGATTDGSVMTPTSWGSDGGGGGSSSARAVRSPSPVLPLVQGTGQRTSCYRGVTRHRWTGRYEAHLWDNTCRREGQKRKGRQVYLGGYDIEDKAARAYDLAALKYWGANATTNFPKESYVKEIEEMQKMSKQELVASLRRKSSGFSRGASIYRGVTGTTNMAAGRQELVVLQATRTCISAPLRPKKKQRRRMTLQR

SEQ ID NO: 40938 - protein, 366 aa, Oryza sativa
MGKSKDKKASREAKADKKLVLGVKRKDLKRKKDRTLNGPVENEVAAEHGTAEDKGLVRKKKVVAMKQKKQMKLKSSQTDSDDMLELLTSKKDETKLKNKKKSKKNLKEGSNLVEEHQSLSDRINAGTPKLKKDRRSSDEPNNADEVLHGNQDEETPTARVNQLTAESGDMDIGEPEEVKRGNKSKTKKTKKSGKSSKKDKHESSRENKLDRHGEVDTANVDEIQSVDEDCSRGMKKWVLEYKQKRPGLKVLQQRIDEFITAHEEQEEQERKEREARAAEDGWTVVVHHKGRKKTTDTETGTAVGSVSLAAMQEKMANKKPKEVDMNFYRFQKREAHISELAMLQSKFEQDKKRIQQLRAQRKFKPY

SEQ ID NO: 40939 - protein, 463 aa, Oryza sativa
MEEPPSSLSSPALPLDMVVEIAERSDPITLLRCAAACRHLRRVICGAAGFSRNLRLRNADGFVPGLLRGFFLQPRRPSPDPDYQPLRFVAAGHAIVGGGGGADQIRSFVSSSDHVYGSIHWRIEPVAARGGFVVLRTGDSSGKVCNPMTGYVRCIDMPRPWSSGSYLLLTGDDAGVTSELHPYRLLSVSLHLTGTGRERRRIHVEMEALSPDAGSWGPTTAIPVEIAGGGEYGSPRALLIRTPAVVDGVAYFLGGHPSLVFDLQYQRRQLPYDYFILCVDVSGETEIGSATSPATITRLPTELRLLSSCTGEADVSPGQLLLVPPSSCGGGDRKSLALLVGRRTQVEIWAMNFGGGCGASARSAPRLLSVSCTRVVDLTTTGVHRSPCSPPLPVPESDEVFVWSGEASGAVVLRLRGTLCLLDRRTMAVRALGEDFSEFRDGPNGVFLPYEIGVSSWVPSISP

SEQ ID NO: 40940 - protein, 445 aa, Oryza sativa
MAVEIVKSSMVTAGEATPEHRIWLSNLDLLVARSHTPTVYVYRRTGPDSDAAFFSPDVLKAALSKVLVPFYPLAGRLAQDSAGRPEISCTGEGVLFVTARSGATIDDLGDLAPSDELRRMLVPAADVAAASILAMFQVTFFRCGGVCLGAAIHHTAADGLAALDFVNTWAAIARDVAGDGEAAAAAVQRPWLDRTLLRARSPPAVRFDHAEYSRRRGGGSKLPFDSAILPMSKNQLNALKGAGAGAGKRLSTFTAVVAHVWRCACKARGLAVAGTEAATRLYMTADARTRLHPPLPRGYLGNAIFRASAVSKVSDIVAAGPLGAVAEKVSAATARLDDGYVRSLLDHLEQTAAAASGGAAGLRKGEWVMPESDLWVISWQGLPLYDADFGWGRPAFMGRACLQFSGLVYLVPGRDDGDGRLDVVVAMDPESLAKFKDVFYEELKC

SEQ ID NO: 40941 - protein, 770 aa, Oryza sativa
MSAEEAGGASAEASGSGSAPAGAAMVPGGEEAAARKRYDALMQVRAKAVKGKGAWYWAHLEPVLVPPPGSGVPPKAARLRCVLCAATFSASNPSRTASEHLKRGACPNFAAQQGAAAQPHQAMTVSAASSVVPISSIPPSSQRRHSTGGGGRKRHALAAAYAAVEAAASQHVVVGDPSSYSPTPPTPPALPAPRQVLSGGRGDLGALARLEDSVKRLKSPVASPGAMLPRQQAEAALALLAEWFLESSGSVSLASAEHPKLKAFLRQVGLPELSRAELAGARLNARFAEARADAAARIREARFFQLAADGWREQVVTLSVNLPNGASVFERAVPTPAPASSDYAEQLMLEAISSVSASSELHHCAGIVADRFGSKALRDLEHKHPWMLNLACQVHGLSRLVRDMARELPLFHSASANCAKMAAYFNAAPTVRALLHKHQVQEHGHAMLLRVAAPPFDRAAAFAMLEDILTSARPLQLAVHEESYKLVCIDDPAAREVGSMVQKVAFWTEVEAAHSLVKLITDMVKEMEAERPLVGQCLPLWEDLRGKVRGWCRKFNVDEGIAMNVVEVRFRKSYHPAWSAAFILDPLYLIKDVSGRYLPPFKYLTPEQDKDVDRLITRLVSPEEAHLALMELMKWRSEGLDPLYAQAVQVRQPDPSTGKMRIANKQSSRLVWETCLSDLKSLGKVAVRLIFLHATAKGFRCAPPMSRWLTAPGSSAAGIARAQRLVYVAANSKLERRDFSNDDDKDLELLTEGDDDMLTEATASVDPSSV

SEQ ID NO: 40942 - protein, 665 aa, Oryza sativa
MTIPDEVDIIVCGGGSCGCVVAGRLANLDHNLQVLLIEAGENNLNNPWVFRPGIYPRNMKLDSKTASFYYSRPSEWLDGRRAVVPCAHILGGGSSINFMMYTRASASDYDDFQAKGWTTKELIPLMKKHETYQRACNNRDIHGFEGPIKVSFGNYTYPIKEDFLRATESQGIPTTDDLQDLVTGHGAEHWLKWINRDTGRRSDSAHGYIHSTRAVHQNLHLLTSNKVEKVILEGDRAVGVKVVPTKPVSPGQVNSRIIRARKQIIVSGGTLSSPLILQRSGIGDPEKLRKAGVKPLVDLPGVGLNFQDHYLTFATYRAKPHVESFDDFIRGDPKVQEQVFQQWNINGTGPLATNGIEAGVKIRPTEEELKMMDSWPCKEFRSGWDSYFKNKPDKPVMHYSVIAGWFGDHMVMPPGKFFTMFHFLEYPFSRGSTHIVSPNPYEAPDFDAGFMNDKRDMAPMVWGYIKSRETARRMDAYAGEVQAMHPFYAYDSPARARDMDLATTNAYALPGNLSAGIQHGSWTAPLEKGRVPQPTYLNSNQQEVFEDLQYSNEDIKHIEDWVKRHVETTWHSLGTCSMAPKNGNSIVKHGVLDERLNVHGVKGLKVADLSICPDNVGCNTYSTALLIGEKCAVLTAEDLGYSGSALDMKVPNYHAPREVVGLSRL

SEQ ID NO: 40943 - protein, 533 aa, Oryza sativa
MNIVRGVADLLRKAPAPPPAPPAVPSSSFGVREGSFHGADQDVAPSPRVVFSDSTEERVLNTLWKKYENALNKAEKEKSLQIFVLQFVQTFRDWGPYHNIHLVDQEQGSDETVVGCSHGHPSEVILILIQEMSIITSTIAEIGGNSPESSPNYSEQPGDLGLSTERLHVLECLTILTRSMHNCRVFSYYGGVKKVTSLLKAAVAQLKIQNSLLAADNHVSCQAVENIKMMLNMLKYIVTIISNFMKLEPTILRIPHFLNSTKCASSKNHLATVTPSTSESGIFDTLQRWQQRAIVLVMGAGGVNSLVELLRVIQRLNSEQWTDLSLHFITLCTLRSTISGTRAQNHVRSIGGLEILLDGLGLPSSKFSVLKNSSIPKDERVEVLLLQILYLEILSEAVFGNVNNLQFLCENGRVHKFANCICWPAFMILEFHRQRDNTGPSLALDSISGPIYFLDITEWREYSVKLSNALCSFIIPSKVISYCRNEIACNKISLSIPSAYREQSVRWFIRVLMTVFLCIKACTSETELPNHIK

SEQ ID NO: 40944 - protein, 518 aa, Oryza sativa
MDAAGEEGGMTYGEVVDYFNSLQDPPAQERIDCIIPYLISLLPAPFVPAPPDAASADDSEDDHFSFTSSDDYSAAEDARSFPSPPPGDGEEDHISRLADDLLSEIISRLSTKEAARTMALSTRWRRVWTKTSLLVDDAHLRDADNEVSLVRAISRCVDAHPGPVRSARITHVAFYHHEYALRRLVASLADKNVEDLILFNRPWPLNMPLPDDIFRCAYLRRLYLGAWMFPEVAAAALVNLRELGLFHCIIPDRDFDALLSLCSKLEVLSLAMSYNCPSRLRIKSPSLRAAVEWMSSLDEIVVDGAPCLERLLLHHAIPVAERTPIKIVSAPRLEVLGILDLQLHELQIGGTTIRPGMWMFVKSSAKLPSLKILAVKVCLAIEREIKLLMTLLKCFPHLETLHIKSIPPCASPEIANCADVWESLGSCECLKSHLKTVSIQGFHTERYEVLCLKYLILEGEVLETVAFFCEDKVCFAAKDDEAVEIELMFPKNLVQDRWSFQSAIDLSLDDPFFYAVES

SEQ ID NO: 40945 - protein, 453 aa, Oryza sativa
MVGLAVACALSNMPLTKHLRVGIIDSNPALKSRNYLKKDGVPDSRVSTITPATISFFRDIGAWDHVQQQRHAFFGKMQVWDYTGLGYTRYSARDVGKEYLGCVVENKVLCNSLLLRLQEENGDIEKMIYPTRLISLALPSKSRQAPTREAISSGYPPEELNRSNLVKLELSDGQTLYSKLVVGADGSKSNVRQTAGIKTTGWNYPQSAIICTVEHITENDCAWQRFLPSGPIALLPIGDNYSNIVWTMSPEESLRHKSMSPEDFVKSVNNALDFGYGPHPHSGSLDYYMEKLFSDIGSTAASTKECFEVPPKAIGVVCERMAFPLSLKHSHDYISKRLALVGDAAHTVHPLAGQGVNLGFGDAAALAKVIAEGVSVGADFGDISLLKRYENNRKAANVAMAALLDGFQKMYSVDFGPLNVLRAAAFHGAQYISPLKKNIISYAMGDAKWPLFS

SEQ ID NO: 40946 - protein, 314 aa, Oryza sativa
MEEKAARAYDLAALKYWGPSTHINFPLEDYQEELEEMKNMTRQEYVAHLRRKSSGFSRGASMYRGVTRHHQHGRWQARIGRVSGNKDLYLGTFSTQEEAAEAYDVAAIKFRGLNAVTNFDITRYDVDKIMASNTLLPADLARRNAATTTSKDDHSAAGAGAIVSVHSAADIAVADTLWKATTAPRQQQQHHDDVVLSGADQAAFSVLHDLVAVDAAAAHQQQQQQQHMSMSAASSLVTSLSNSREGSPDRGGGLSMLFAKPSPAVAASAQQQASTKLMAAPLPLGSWVSSPPASARPPAVSIAHMPLFAAWTDA

SEQ ID NO: 40947 - protein, 538 aa, Oryza sativa
MSGNPSFSQLGAVDAAMNGGYFMAASGNGADVPLFHPAMAPPHDHGGSFGYGDAAAAAMDVGAHFAAANNLVLASLATQLFGAAPAAAAHGHGDYLGATTPPEEEMGGGYDVAVGDSSGGAVSLACLGHGQPGDMAAGWCSTSARKPSCNWSSSNAGVHGGSYYLAGVPEAAGFVSAAAASELSLSLCSKSSSDSMLNAGGDQCSSAASRSGLTQMSRVVVVEPEPPLVPYYPAANFAVVVARSRYAAVAQQVLNDAVGCVLGGVADAAADSASGVDSGSSRPSSCSVAGGAPSSAVSSNNQLIASSGEHTHGGGDASAQRLRSELLTMLQLMDQKYNQCLDEIQSTTARFNTLTHATARAAGMSSSSICAPFAHRAVSAMYHGLRRRIAGEIMSAAAAAGRPCRGGESSSAVTGGERERSWESAFIQKHWAVQQLRRGEQQCWRPQRGLPEKSVAVLKAWMFENFLRPYPKDSEKEMLAARSGLSRNQVSNWFINARVRLWKPMIEEMCEELKRSSGGGAGNQALAMEHMNSQDVVS

SEQ ID NO: 40948 - protein, 404 aa, Oryza sativa
MPMWSQPPPPPSSLQLRRPPPPLPHRPRRLRSRLSPIAASQDPLTALSRLLWGRALPPSQLVLAVRHGWTAAWGLLMRQLAPSDPATGAFTRTPSRFPAVVGTPSARLHLYVGLPCPWAHRALLVRALLGLERRLPLSVAVPGDDGAWSFTPDSPDALYGKRKLREVYASARRGGFEGRASVPLLWDAERREVVCNESIEITKFLCDLAAADGSAGGLDLWPPELRQDIDRWYSFIYPSVNNGVYRCGFAQSQEAYDAAAGELFAALDRLEDHLSGSRYLCGDTLTLADVCLFTTLVRFDLVYHSLFRCTRRKLVEYASLHAYTRDIYQMPGVAGTCDMAAIADGYFGALFPLNPGGILPLVPASCSPEALLEPHGREALSSSAAADAGGGGNGRQLEATSASN

SEQ ID NO: 40949 - protein, 104 aa, Oryza sativa
MSPPRESCHLLAPLESPLLPQCTTGPAPIPAASSLLLSLLESSLPPQSTAGPAPPLPRLHRRTTSLAAAPPRDSPPHATASCPSAPRPALTSLLCSPSQGSVSW

SEQ ID NO: 40950 - protein, 500 aa, Oryza sativa
MPTSRRALAGGALSMHVAYFLAISCLGYGLLGVLKVREPGAAPRRIDRFFTAVSAATVSSMSTVEMEVFSNGQLVVLTVLMLLGGEVFVSLVGLASKWSKLRSDAMDRSRRVESHGDVALADIDGGDVENPTSSGEEAASRRRPMDADTLRHNAVRALFYIVLAIFAVVHVVGAVAVAAYVLASPGARRTLGDKSLNTWTFAVFTTVSTFSNCGFMPTNENMVVFKRDAPLQLLLVPQVLAGNTLFAPLLAACVWAAAAATRREELVEMAREGGRAAAAGYAHLMPARRCWMLAATVAAFVAVLMALVCGMEWGGALQGMSPWEKVVNALFLAVNARHTGESTVDLSILAPAILVLFVLMMYLPPYTTWFPFEENSTTKDSNAENQGIRLLESTLLSQLSYLTIFVIAICITERRKLKEDPLNFSVLSIVVEVVSAYGNVGFSMGYSCSRQINPDHLCTDKWTGFVGRWSDSGKLILIFVMFFGRLKKFSMKGGKAWKLS

SEQ ID NO: 40951 - protein, 651 aa, Oryza sativa
MSRDCRSRTPSSRTQDKNRSLLLDKVRASHAEALERLRPAADLDAGLCFGLLDPVSNAIVNAAVFAEAEDGNDRTGRSLDGAVTFLTTFFPHLPDWEAVRYLLDADADVLVAARLVVRDRGLRRFGFASDTAGAAVRLALRCAALAVKHPHPDRLVHAWLSLSRRLDEAVSALANHDVRGLVALVVDEAEAPAAANMERAWELAASRFLGRDNGIAAPPYRHAMPLQRTLLYAIQGFYLRALARLPSGELRSHYHRSLVKAGHCYGPMDPVSNIILNVVWYDAAHPPVEELELAMIPPKSMSSIATRSFLGLVSFLCTRYPNLGLHDAIRCLLDFDGDLNAAAREADRRQHRPSCTIQESYAAAAAAARHPKPDEQVEFLSSSRAMTTPLLLQNGGQLSSEDVRRLAAALLPPTPSAAVSPMQRKPTKPRRRRQLKLKAQIIRDQNKICRKVKAALDRYALQNNEPGGYELHVICGMNNCVSGPVYCTDDDIVSYTPLIYFRCHVNFLARRRDSDPSAIAGEGALQLFFAECGNYRLNHDGICCPVTISPPCSEQVRCLYCEHEGVGIMHPSIENFHGREVDFEKMVCGEDTCGDEFDPEIDEEPFYTNDGIVNSLKVNILSGLEEEFIYRNSDEGTDEEEGDSDDDIDFV

SEQ ID NO: 40952 - protein, 624 aa, Oryza sativa
MEVSIGKPDDGQSLLANVEASDDHAAFDAMATSSRRPPSLRPLRHPNVTSLAPLPPLHRCVPRQTEVIFPPLDSPDSSELKKVMSISLPATPTGFAAPVAGASDSSGIDLRRQAMASNMTQRLQQRSPTSQSNNGRRLTDETTAFQSPPPTPGGGRSSMSRDKRYDSFKTWSGRLERQISHLAGIGPDIPSPAGQVVDAAMDSHHHSHTVSTPEVGRFFAALEGPELDQLRSEEELVLPVDRTWPFLLRFPVSAFGICLGMGSQAILWKRIAESPPTTRYLHVAADVNLVLWWLSVALTCAVSAVYACKVVFFFEAVRREYLHPVRVNFFFAPLIACLFLAIGVPRSVAPSTAALPAWLWYALMAPMLCLELKIYGQWMSSGQRRLSMVANPSNHLSVVGNFVGALLGASMGIREGAVFFFAVGVAHYVVLFVTLYQRLPTNEALPRELHPVFFLFVATPSVASVAWAAIAGEFALGARLAYFVAMFLYASLAARAVSLFGGVRFSLAWWAYTFPMTSAAAATIRYAAEVEDTRLARALCVALAAAATLTVGCLFATTVVHAVVLRSLFPNDVAIAITDHRKVKPKPKPKTTMEVHYKMDGNGDIEGGAPAMTPSPCMPMATAA

SEQ ID NO: 40953 - protein, 241 aa, Oryza sativa
MAAGEGDVGMEVETKAPAMPPPPPASSSAARKKKQARAKNGDTPEPDAAGGARARASRRAKRGPGSYRGVRQRRWGKWVSEIREPNRGKRHWLGTFGSAVDAALAYDKAAASILGPRAVLNFPAFSPPAAATAPEQRQTPGCSPAAVAGSGGGAVFEERDVKPVVLPLPLPAILQDGGGTEAMAQHWDWEWDASWPELEMFECLDDIAMYLDVDAVMTTRDCKVEELDADIVDSPLWTLSD

SEQ ID NO: 40954 - protein, 440 aa, Oryza sativa
MEGGGGGGSLPPFLSKTYEMVDDPSTDAVVGWTPAGTSFVVANQPEFCRDLLPKYFKHNNFSSFVRQLNTYGFRKVDPEQWEFANEDFIKGQRHRLKNIHRRKPIFSHSSHSQGAGPLTDNERKDYEEEIERLKSDNAALSSELQNNTLKKLNMEKRMQALEEKLFVVEDQQRSLISYVREIVKAPGFLSSFVQQQDHHRKKRRLPIPISFHEDANTQENQIMPCDLTNSPAQTFYRESFDKMESSLNSLENFLREASEEFGNDISYDDGVPGPSSTVVLTELHSPGESDPRVSSPPTRMRTSSAGAGDSHSSRDVAESTSCAESPPIPQMHSRVDTRAKVSEIDVNSEPAVTETGPSRDQPAEEPPAVTPGANDGFWQQFLTEQPGSSDAHQEAQSERRDGGNKVDEMKSGDRQHLWWGKRNVEQITEKLGLLTSTEKT

SEQ ID NO: 40955 - protein, 124 aa, Oryza sativa
MTMKMKQQMMNKLGLLVVAVAVAMAPAGSFASSSGRGAPMVPAVIVFGDSIVDPGNNNNLKTQIKANHAPYGMDFANSEPTGRYSNGLIPTDFIGTVSYSLFFFSLQQCNTSLRACMQQQQQSW

SEQ ID NO: 40956 - protein, 130 aa, Oryza sativa
MVVPSSAGPVPGIAPDGAEVIPSRCRTLPQPAPTSHEVCPYRCQSPSAANHIRIPPQHAPAGAEVVPPSAGATPGTSPSEAEVVPPSTGGWSCVWACPSGAEVVPRPPLPPTFFCYLFPKVRYAGTVDAR

SEQ ID NO: 40957 - protein, 316 aa, Oryza sativa
MGACATKPGDLKVKGGEAPLVKEDAAVAPSPPAAEEKEKNVDEAPAAAAAAVVVAAVEGEPAEAGRRRSLSDLLKEDAESEGSEAAPAPSAEATKAVETESPAAAAESGIAAAAAEEEKAEVVEPSPATSEQVAAGEEEEEKETAAAAAEEEQVMAVETSPAAPEQGAAVGEEEEEEEEEEETAAAAEAEEEQVTVVEPSPVSPEQHAAGEEAEETAAAVEQITAVDPSPVASEQETTGEEAEAAAAEPEAAQEGGGGGAQEVAEEEKRVDPDSVQVAAAASSTPSPPSSADDDEEEKSKEEAAADVSAPAAPDEN

SEQ ID NO: 40958 - protein, 253 aa, Oryza sativa
MSISVNGQSCVPPGFRFHPTEEELLNYYLRKKVASEQIDLDVIRDVDLNKLEPWDIQERCKIGSGPQNDWYFFSHKDKKYPTGTRTNRATAAGFWKATGRDKAIYNAVHRIGMRKTLVFYKGRAPHGQKSDWIMHEYRLDDPATDTAAATPTVTSAAAAAAAMAAAADGGQEDGWVVCRVFKKKHHHKEAGGGGGKHGGDGSAGAKAAHAYSSSDDALDQILQYMGRSCKQEHELPPPPTTCCSTTTTARTGP

SEQ ID NO: 40959 - protein, 172 aa, Oryza sativa
MSTARYRQSCVARASFGTAPASPTNLEIGSDSSVAISAATSSTVFATVCIAPPPPCSAPAPLRDALRLRPFAPPDDAAESRSTKAVMMRRTVSTFWTRSPALSSATVSRSPAVAWSSTAATRSSRSRHVLADAQMVMATWRRRQRNAAGRGASSVEGSTATTDSTSARCIPE

SEQ ID NO: 40960 - protein, 356 aa, Oryza sativa
MSSSAAGNSSRSASTSTIVADTETGYHLLKIDGYSRTKGTPNGTAIASSQFIVGGHRWRIYYYPNGDHTDNADYMSFYLLLDEKKNTKTKSVKVWTLFQICFADQAKALPTLTSKTVRTFGDGSSWSWGYSKFIKREDFEKSKDLRDDSFTIRCDIAIVREFLVETTEVLPPKSFVSVPPPDMNLQLGELLETEKGADVVFEVAGERFAAHRCVLAARSPVFGAELYGLMKEGNAAVVVRVEDMEARVFKLLLRFVYTDSLPEMKKKDEGIMCQHLLVAADRYNLERLKLICEEKLCKHISTGTVSNMLLLADQHHCSGLQKACCNFLGSSANLSPVSRGWLFVMKQLVLGCWCLH

SEQ ID NO: 40961 - protein, 179 aa, Oryza sativa
MVPPAPGAAAAGEGLPGRWMMRTLDAGGRRGGAQQRWRRCSCLRRPATARAAPSCRRTPNASIYCFIHRRHQHQHQHQLDEVAIESIALTRYHDGACMLGATDCPVCLGEFRDGELLRLLPKCGRAFYVPALTPGSAPLAAADSAGGLGDSQLPLDLTEKVTETTEIVMEWHGSNFRRL

SEQ ID NO: 40962 - protein, 677 aa, Oryza sativa
MARTAAAAVSDDDDDGPPAYTVPRGPRRDPRLKDLGISCMLNTEVAALLAVIRRRPDPYSYLPPAVAAAEEATFAGLIQSLKNLRGLLFQPRHGAWRCSDPAMYLKPFLDVVQSEESPPAATGVALSSVLKILRIDVFDECSPGARDAIQAVLTAVSSCRVERIADPGAEEAVLLRVLQVLAALLRARAAPLLSDHAVCNAVNTCFQVVQHAASGRGSELLQRTARHCMHEILQAVFARLPDIPAADAADADDLSVAGFGARCMADIFNFLCTLLLNAPDMVATGDGHGAFITEEDVQLFSLVLINSAIELGGEAIGKHPKLLRLIQDDLFYHLIHYATESSPLVLSMICSTALNLYHFLRRFLKLQLEAFFMYVLLRLCGGGGGAQLQEVAIEGLISFCRQPTFVIEMYVNYDCDPMLRNVYEEVGKLLCKAAFPASSPMTTVQLQAFEGLVNMLTTIADNVEVDKAPDHAAYAVDISDYRLFWVERWDAAAAGGSGNNETWVDFVRKRKLRKKKVAIAANHYNRDEKKGMEYLRLSQLVPTPPEPRSMAFFLRYSPGLDKNKIGELLGDPEEQSLRVLKEFTETFDFTGVILDTALRTYLETFRLPGESQKIQRILEAFSERFYEQQTAEVFATKDAAFILCYSLIMLNTDLHNPQVGVQVGLSANPLIDKISTI

SEQ ID NO: 40963 - protein, 244 aa, Oryza sativa
MDALREAEAKLTVYVHPSNAADVRRAVARQLSSLLFSYEDRFDGVLLAHEATVESEQGKILNGLVPYFGVPVHANLLLYSPKPDMMLEGKVEMLGKESIHAIVLGVFSAAIMLDDIHEKFKFKRKKYGGKFVSRSDKQHVIKKGSMIRFSVKRYGLIFSPLDSFKIFIHCLLSTVKHLYSKVMALVCYYICNLLVVCSTCCTLFTNMHCSSMLELFFPWCAYYDRSPEKSHFDTMALKSNNKTM

SEQ ID NO: 40964 - protein, 200 aa, Oryza sativa
MGSGLSCNHRSSTLLRHHQPAAAPPAQVIAADGSLTEVAAAAASCPVSVSDVLGGNAGRLFLCSSDALYFDVDVPALDGGELLRPGQIYFLLPVSMLGRPLSGVDMAALAVRASDALVARARPRHQRGGGVKKVRIMPMLAANGCGGDDRDGEINEKLNERTLGESVMTRPCCPASSGDKLAAAAPPVKRLLSTIDEDAE

SEQ ID NO: 40965 - protein, 433 aa, Oryza sativa
MLCHRGLSAVASGRLRRALTTAASRPPWALIHRISTADGSTGAGVSLALAPPPRASRVTIPAKAIALNDRPISADESRVALRGRGVLAASGDGLLLVYTFKACFRGPAHPVPELPLDVIIPELARTTVETTYEHFASFVCNPLTGELFRLPDFDGTENTVDVHHTGILTQRDGGGEDGPPKRYAAAQLSNVDGDDEGRRFLLRRYSSETREWSKLVMPSPLPPGRAMGMNHEVVAFGGRLWWVDVSWGAVAVDPFSHRPEPRSIKLPAGSILSEKPCSREMERIVKHRRMGVSNGKLRYVEVSDQEPFVVMSFTLDDESGHWTLDHQVALSTLGAKGGSPKGIPYIGAIDPFNADVLYLAIERVSVSVDMRLKKVIQCSELCSDVFPTVSSSGVLLPCVLPPWLDSFPIPNAGKNNMKNETLADILVRSDRGK

SEQ ID NO: 40966 - protein, 480 aa, Oryza sativa
MATRFLVLLFLLATSASSSSTSTSLATNTTDVGRDGGDNAVSFSFSSFHAEARGVNVTVVGDANINGGALQITPDSLNDASRYLTNKSGRVLYAAPFKLWHREKGGGEAANGSTAGKRVASFSTVFTVNVFRPNGTVPGEGFAFVIAPSAAAPPAGSTGGFLGLTNAATDGNATNQIVAVELDTEEQPYDPDDNHIGLDVNGVVSVATTSLKPLGIEISPVDPVKYDVWIDYDGAARRIEAYMAVSGQARPASPVLAAPLDLGATVAEWSYFGFSASTGLKYQLNCVLAWNMTVERLPRRARRRIGLPVRGEAAAEGERRRRRQRHHRDDDPEPRRGAEGVRVPGAEEGDEQLRREDEAGAGRVRGGVPRRGGRRPHLPRRRRERGGGRRQEVLAGEHPGAERLPRRAQHHQPPPPQAPRPPRRVEPRQWRAAAGVRVHAEREPGPAPVRRGGGGAAAAGLGPPVQHRRRRGVGAALPPR

SEQ ID NO: 40967 - protein, 427 aa, Oryza sativa
MAPAGDYGASVSMMISYGGAIVQADGKAKAAYYAGGVHRIVKVGMSERLPGLRARLAALAGCADVFIRYALPGEGLGVIRDVADDGDLWGLVSLLFYYKEVPVSSKPGRIRVFLFAADHDAPPHRTASAPSLPVLVSGSASAAPPVTLGLPRSASSPSLATSGSGTAVRMKVSYGGEIIQQQRGGSAAASCYYAGGVHRIVRVGLSERLAGLRARLAALAGFSDSDDVRIQYALPGEEGLHLHDVASDGDLWSLVSLLFFHEAVMASSKPKQGRIRVFLFAAHDAPATSSTSPTAAPLRRSASSPFLPTLVEEDEDDDDNDGNTDTAAATQTSTSRVTATVGMRRSASSPALATTSSSSDAATASTSGGATSGSSGDSDTPAMTSSTAAAAAVQFGPVVLVPVMVVFPVIPVYAIGVVDYRSVLLVA

SEQ ID NO: 40968 - protein, 576 aa, Oryza sativa
MPREEAERRLAELRCLVKSRGARVLLVVEDLKWAADFWAAAHAGARRVGSGGGGGYYCSVEHVVTEVRALASCDGGIWLVGFGTYQTYMKCRAGHPSLESMWGLQTLAVPAGSLALSLTCAFDDSALGAVNQSMKASPHTTDGNRPAPSCGPLLGGSHLLSRCCGGDCSAATTTLEHDTKASLPRSFVSSSSLPSWLQHCRDQQLQESTHFADLGKTWGSICGKPSQRMTLHFSAPVSPASSISSYEHGHGHQQQQHQPHHSWLLADLDAKHPWKPKREDDDDEKAKSHDDCSGASNGSVEVECRSRFKELNAENLKLLCAALEKEVPWQKEIVPEVASAVLQCRSGIAKRRDRSRSTEAKEETWLFFLGGDGHGKERVARELAGLVFGSRKSFLSVKLGASSSSPSASGSTEDHHRSKRPRTTTTSSASEAYLERLYDAVSENPHRVILIEDVEQGDHRWQVGVKEAIDRGVLRSQAGDEVGVGDAIIILSCESFEARSRAGSPLMNKKMKVEKEEANTSDHDHKLEIESGAPSSCFDLNLDMESDQAADELSSGDVCLLTAVDRVLLFRRQDEM

SEQ ID NO: 40969 - protein, 67 aa, Oryza sativa
MTSRAVSAFWADSVVNLTEKGPTSGPRTRHHVAPHTCFMSSHSTEFACTPPCERQHKQIRNRSTMSN

SEQ ID NO: 40970 - protein, 195 aa, Oryza sativa
MPWASHRHELSLGHRRLSTNRSLPNVLLSCRHSQSRRSRNLTRNVSTTSHVTSSPNARSLPPRTHSFLRPPPRAGCTTSCSSSAGTRRRSSFARRGRRDRSILPPPPAWAAAAPHRTLSDSNAANPCSRGSSSSGATGSWRPVLTLSFRSSGSAARSARRHGGIFLPPAALATTKPFRTWSRWSLQTPWGIWSSR

SEQ ID NO: 40971 - protein, 479 aa, Oryza sativa
MEKASCLEEALLLPESCKEEEITASDEVKRQLRLAGPLIAGSLLQNLIQMISVMFVGHLGELPLAGASMASSFAAVTGFSLLLGLASALDTLCGQAFGARQYHLLGVYKQRAMLLLTAVSVPLAVAWYYTGDILLLFGQDADIAAEAGAYARWMIPALFAYGPLQCHVRFLQTQNMVVPVMAAAGAAALCHLGVCWALVHAAGMGSRGAALGNAVSYWINVGVLAVYVRVSRSCKKTWTGFSMEAFRDPLSFFRLAIPSALMVCLEWWSFELLVLLSGLLPNPKLETSVLSITLNTANCLFMIPFGLGAAISTRVSNELGAGRPRAARLAVRVVTLLATLEGLGMALVLACVRYVWGHAYSNEEEVVAYVAKMMLVLAVSNFLDGIQCVLSGVARGCGWQKIGACINLGAFYVVGVPAAYLAAFVLRAGGLGLWMGIICGVAVQTLLFLAITSRTDWQKEAKMAKDRVFSSSLPTDLAT

SEQ ID NO: 40972 - protein, 387 aa, Oryza sativa
MNVLCAGMVADLPAAGTATSDDDDDHPRDIYVNVERMCTAAYVSTALMTLAASASLLLLDASLYYVLVVVTLLLLVLGFLAFLFWQQMNLDGNGSSAAGGERRRSHGCGHIKAAMYFSRHNATLTRLSAMSSDVASFVFAGLSGAIVGYVKASASTWPPAGAGHRMPEELMLYSGALGLATALITAVPPWVVEPRGRGLRDRFVNVHARVLAYAALLFLALACVLAAQEILHGWAVLIAFANLAFAAVCFRVDFLAAAVLQDDDDANGAGVDQEGGGGVTNFFVALYHPSALGMLMAAYSTYAGGKEAAHLSWLFKCFVWLLVGSIVTYLCRMVIKVEMRGASTLVRRKVELLWTRMSVILALLALAFCVIAVVVPGSRSEIVAVFV

SEQ ID NO: 40973 - protein, 263 aa, Oryza sativa
MAISLQAIQGTVSAHTLRLQGSIQGFDVLILVDSGSSCSFLSSVVLPHLTGVKSLLTPVQVKVANGAVLSCTSELPAAKWEVQGHQFSTDFKLLPLDNYDMILGMDWLEKYSPMDINWQAKTIQFGLLDKSVELKGVVPELDKCDLVSIHQLQLLHNQGAVESLVQLTASDGSSSSQNVPSSIQSILDEFADIFNEPDGLPPSRSYDHTIPSWLRSRRLTLFHDHPVLGAGRYRPFAALWSMRMSPPSRWSMCTVHAARSWCR

SEQ ID NO: 40974 - protein, 595 aa, Oryza sativa
MMGENRARVVALVVAVVVVVVGVAGNVAAAQAAVTVADLQRVAGSLQMYVDALPQMAKIRGYGFQRGQAVPINLTIGMYQKTWKFHRDLPATPVFVYGQCPDSATFPGPTIMARHDVPLFVRWENHLPASHILPWDPTVPTAIPKNGGVPTVVHLHGSAHPPQSDGSAFAWFTAGFAEKGPAWTQATYRYPNVQPPGNLWYHDHALGLTRANLLAGLLGAYVIEKPEVDTPMDLPCDDDDLHLVIADRSFNVDGSLYMNSTGVAPNIHPQWAPEYFGEAITVNGKAWPFLVVHRRRYRLRILNASNARYFNVSLSNGLPIHVVGSDASYLSAPVTVSNLLLSPAEIFDVVVDFSQSPTAEIELLNSAPYPFPTGAAPGPLNGKVMKFIVQPNGPLDPPDNSTVPDHEVPYASVTALPPTTMTRYIVMYEYLTPTGQSTHLYINGLRLEDPVTETPKSGTTELWQVINLTGDNHPLHIHLGMFQAVKMQQLVNLQAFTDCMTAVNDAVKCNVDQHAVGPVVPVPDHEKTWKNVIKVPPGFVTSVVIAFKLVDTNQTYPFDTTAEPGYVYHCHVSATLNATCLSYWVNFFSNRIYMF

SEQ ID NO: 40975 - protein, 667 aa, Oryza sativa
MEGVPRITYHRLGVDVDHEAAGVLRPHVVGVGVGALRWLVAVPAGDGEALAVAEAEEVEVVGGVGADPLGLDGGVHVPVHHLHGAPLPVQDGLHGVALRHALRPHRHHHVHGEPLAGGDLARDLEGELPRDQVQRVDPLHARHAALAAAPRVRAPQEVLVLDVDEVAGAPDRVDVRVLDAALDHLVLAGHQPRRRGLVGALREPRRRAAVDGAEHLHVPVLRVGLVGVARGHAPVEGDQKAVLAPAGLLAPPLLEVVEHVPGRGALDAAVDVVPWLPRPALGDGRAGEVGLVEVAAVGGVERPEQRVLLRVVPPVAQVDAAEEAHEARRRLPAAAVDDHRLLVVREHGGRLDVLHVAPALVGVPGAEDAVDLGALEVPRRVLVVRRHQPVAADRAETHRRPVVPHQQQHHHALLGLPLEQLAERLRRRRRPPHQHDVGVDGPPGDVHHPPGAADRVEHVLPAPPRLVPPAPGELDARREAVGDVRVLVQPDAAPAALREEGARHALVRAAPDAGAPARRRVGGDAGEPELDAYLVPAVDRAVALAADGEPQVGHRRTGGEALVDGEVGAADERGADGVLGLDGEDDVAGVVRAVDVERLLPPRRARRLHRARPRDAGLVDVHRRIQLAGQRAEADGVLHLLRLHRRRRRVNIIIKIQYNTGLNLMAL

SEQ ID NO: 40976 - protein, 113 aa, Oryza sativa
MTRSGASCRTSHRWPGSSSGGAIRSRTSSTLLMMSASHLRVYGRILSSTVAFAAGGCFGNSRSDRDDGSVRTSPAMKQTSVLKSERSQQMVSPASDEHGERSWLSRTTTSPAL

SEQ ID NO: 40977 - protein, 258 aa, Oryza sativa
MGRGRSRKPRNFATFRLCPRPGAADASDRVFFRVDNNPYYVPGFADDDVLGGAAAAAVGEGDDDAPSSSASGETGPLPDHVRREILELGLPDDGYDYLAHLREIRPSISSTGGGGASAAFLPVRRHARAHFGPPVDVKAYDASRVRIGSSGKETTTATAAAVEVEVTRIENAIDPDVARLLEESGEPALAGSESESESEDDDLEEDFVLVANQDDDDFVLVEIENQFEEEEENIAAADDSEEDGLKNGECKVGNSASA

SEQ ID NO: 40978 - protein, 574 aa, Oryza sativa
MATSWSVAFTIFFSCILLLETISSSASLDCSYGSAQVKILSSSVVSEQQNVYLFLKPFQSTRSCSARRLAGEFVNGVVVPNLRLNVTGVVVTANERQLGALRCTLESVQAELAVAGLGRSVKVSPELSLPSLRAMAKCRRRGEKHWRRVMEFVRRSGSFVVVEMGAEEKADLAVADVAAAFEEGVGVAFRISGRAARSAAEMARLIGDADKGRRWTGVLAEVASPSPRRELAAAARTTARDVFAPVTNPTTTPATNPVTVPATNPAMNPVTPGIVTVPSTNPATGYSNNPNLPPLYPEPTPVTMPDPTTTTTPTPFMNPVTAPTMPSPVTNPATTPAVTNPTTMPYPYPPQQGGVMPTTPTYQPPATMPAAGGQTWCVAKAGLMDAALQSGLDYACGMGGADCTAIQPMGACYNPNTLQAHASYAFNSYFQRNPSPASCDFGGAGMLVNINPSSGTCLFQASSAGYGAGYSPGVTGTVPVGGGAGAGAGVGVGVTPMGPAVGGTGGAGVTPMGPAVGGGSGSTVLNANSPGGNSMYGSDSNPTSLTGAAAAALSSGWVLCLVWIFTFAYVKEKV

SEQ ID NO: 40979 - protein, 548 aa, Oryza sativa
MATSAAAAASTLPYLVAAASSSAAARRRGAHRIRASSAAAEVEGAMDVVSEAELREKGFMGLRKTKLVCTVGPACVGALPALARGGMGVARVNLCHGGRGWHRAVMREVRRLNEEEGFCVSLMVDTEGSQLLVADHGGAASVKAEDGSEWLFTSKRTDESHPFTMHVNFDKFSEDILVGDELVIDGGMATFEVIEKVGNDLRCKCTDPGLLLPRAKLSFWRNGKLVERNFGLPTLSAKDWADIEFGIAEGVDCIALSFVKDANDIKYLKTYLSRKSLEHIKIFAKVESLESLKNLKDIIEASDGVMVARGDLGVQIPLEQIPAIQEAIVDLCRRLNKPVIVASQLLESMVEYPTPTRAEVADVSEAVRQYADAVMLSAESAIGAYPQKALAVLRAASERMESWSREENMQKLLPQHQLAIALPDRISEQICTSAAEMANNLAVDAIFVYTKYGHMASLLSRNRPNPPIFAFTDNANSRKSMNLYWGVIPLQLPLSNNMEDNFNQTIKLMKSKGSVKSGDTVLVVADSDLNRPRAATSVFQSIQVRIVD

SEQ ID NO: 40980 - protein, 782 aa, Oryza sativa
MAAAAFSCCHGAGGMVVIVVVVMAMLGGVVAGGEPPFSCGGAAAGGGQGYAFCDATLPAEQRAADLVARLTAAEKVAQLGDQAAGVPRLGVPAYKWWSEALHGLATSGRGLHFDAPGSAARAATSFPQVLLTAAAFDDDLWFRIGQAIGTEARALYNIGQAEGLTMWSPNVNIFRDPRWGRGQETPGEDPTMASKYAVAFVKGMQGNSSAILQTSACCKHVTAYDLEDWNGVQRYNFNAKVTAQDLEDTYNPPFRSCVVDAKATCIMCAYTGINGVPACANADLLTKTVRGDWGLDGYIASDCDAVAIMRDAQRYTQTPEDAVAVALKAGLDMNCGTYMQQHATAAIQQGKLTEEDIDKALKNLFAIRMRLGHFDGDPRSNSVYGGLGAADICTPEHRSLALEAAMDGIVLLKNDAGILPLDRTAVASAAVIGPNANDGLALIGNYFGPPCESTTPLNGILGYIKNVRFLAGCNSAACDVAATDQAAAVASSSDYVFLFMGLSQKQESEGRDRTSLLLPGEQQSLITAVADAAKRPVILVLLTGGPVDVTFAQTNPKIGAILWAGYPGQAGGLAIARVLFGDHNPGGRLPVTWYPEEFTKVPMTDMRMRADPATGYPGRSYRFYQGKTVYKFGYGLSYSSYSRQLVSGGKPAESYTNLLASLRTTTTSEGDESYHIEEIGTDGCEQLKFPAVVEVQNHGPMDGKHSVLMYLRWPNAKGGRPTTQLIGFRSQHLKVGEKANIRFDISPCEHFSRVRKDGKKVIDRGSHYLMVDKDELEIRFEA

SEQ ID NO: 40981 - protein, 527 aa, Oryza sativa
MALSAETGKVVQWRRWAFANLGSVLSNFGSLWLLLAPLLAAYAPRRLFKTYFNLFLRRHARRLLAVVDPYVTVDVSEPGGASAHYSRYGRVTDSGDSTYEEVKAYLSDGCAGEARELRAEGASEGDGVVISMRDGQDVADEFRGAALWWTSVVREDAQGQQRAHTRRCQRLTFHHRDRRLVVDEYLPHVRRKGREILFSNRRRRLYTNNKSGDSFRYDYKAWSYIDFDHPTTFDTLAMDTARKREIIDDLDAFRSDRDFYRRAGKPWKRGYLLHGPPGTGKSTMIAAMANYLDYDIYDVELTVVKDNNDLRRLLIETTSKSIIVIEDIDCSLDLTGDRAATQRRGRQNDRDDGSRRHDRDGSMVTLSGLLNFIDGLWSACGGERIVVFTTNHVDKLDAALIRRGRMDMRIEMSYCGIEAFKTLAKNYLDVDDHRLFGPVGEILGRESITPADVAECLMTAKRAGSDDESSRLEIVIDELKQTAEANAKAKAEAEAKAKAEAEEEAKAAEMDRDNTREEQNGRKSPKI

SEQ ID NO: 40982 - protein, 117 aa, Oryza sativa
MSPRRSFVGELPPYTSSPRRPSTSPAENAHHPLGPGWCSPASSSLAHAPVSVSSANASAENLPAPRCPRSLGSTSPPNTTTCFPIPAAQNTLRGDGLSPPPPPPVVSTVDHAPVPGS

SEQ ID NO: 40983 - protein, 169 aa, Oryza sativa
MERHGRARGSLLLALRHMRHRRARHEPLPRQHQRVRPRVGRRRRPLQPRAPRPLQQQHQRYVPDERVPLRFSPVPQPVSELPRRGAPRRHRRRPRGEPDNSSPQRQLLHWHHPQVVVPIAEAGVADAGQQQPHRHNPGRARRPDEPYDADDLDEQARTGSAAGVVQEPD

SEQ ID NO: 40984 - protein, 58 aa, Oryza sativa
MLSLLFCCIIDLKLAKCAVCWLNLPIDCQLDQVAAVENDLIVARVCILRTYLSITEEF

SEQ ID NO: 40985 - protein, 383 aa, Oryza sativa
MAIAAAVAAAMAGPRRRRMLLLMANYAALLVGSVASSLLSRFYFTHGGRNRWVVTLVQSAGFPLLVAGALAGGRPASAPRPFTWLSRRFLAVCLVIGALMGANNLLFAYSTSLLPVSTSSLLLSTQLAFTLVLAVVIVRHPVTFVNLNAVVLLTLSSVLLALRSGDSGETAEGGVGGGGRKSYLVGFVVTLGAAGLFSAYLPVMELVYREAVSGGFVLAVEVQAVMQAMASLIAAVGLAASGGVADDVSGWVDGGSSPAVYWAVVATLVLTWQACFMGTAGVIYLTSSLHSGVCMAAVLTLNVLGGVAVFGDPFGAEKALATALCAWGFSSYLYGEYAKAKKVAAAAAVAAAEEEESASDGEGSVHKSLTGGGAAGGHVETAV

SEQ ID NO: 40986 - protein, 202 aa, Oryza sativa
MISSSSSASASVSPRADDAAAAAAAASSSIISNADAAAIIALALPDGDDGPPSPPPPPPPPPPLRLLRRRCRRRRRLITRRMTPAGSLTVTSSRISSSASGQQQHTAAQFAAACPAASPPPHPGRGRASSSSTSSSPRSRMCSDPLRLLADRTRESTGTYPWVQWYLARRDATRGRRERERTTVLRRLVACGGERKREEIDG

SEQ ID NO: 40987 - protein, 554 aa, Oryza sativa
MASSSPLLLLLLLLPLAAATATASLPPLPLSTASRWVVGADGRRVKLACANWASHLEPVAAEGLSRRGLGDIAARVAAMGLNCVRLTWPTYLATNATLANLPLRASLERLGMPESVAGVRVNNPGLLDLPLIDVFQEVVSALAKNNIMVILDNQMTTPGWCCSENDGNGFFGDKYFGPEEWLKGLSAMATMFRNTKNVVGMSLRNELRGSKNVSLWFRYMQLGAEVVHAANPGVLVILSGLNFDNTLDFLVPNQIQLTFTGKLVFEQHWYGFSDDGNWGSQNQNDACGMVVDSIKKKGLFLLQQGWPLFFSEFGFDMSGTHVADNRYLTCFLTVAAEMDLDWAIWALQGSYYIREGTLAYDESYGLLSWDWCTARNPSFIKRINALQSPFQGPGLPNSQQPYNVIFHPLSGLCVLVKSSEALELGPCDKSNAWNYTKGYELILKQTGQCLQAKSVGENAKLGTSCSKSSSKWKLLSNSGMHVSTELTNNGTRVCLEASPDGNITTNQCKCLTVDPNCNPESQWFKIILSSKHIPGGTSILQLPSHGPWSPTSSS

SEQ ID NO: 40988 - protein, 136 aa, Oryza sativa
MFSEADHHADVVDDDAELEDPPAESTEGVAHGLAVRGGAHSAAEPDEELDGGVREHCGEHHQDEARHETEHLHGGRERHDARADDGGGQVEHRAGEGRARLLTPPPAGRAAAPPPASVKKRGERGREVERGGGRRG

SEQ ID NO: 40989 - protein, 378 aa, Oryza sativa
MDFVEGLPRVHGKTVILTVVDRFSKFAHFIPMAHPYTATSVAAAFFSEIVRLHGVPASIVSDRDPVFTSTFWRELFRLAGVRLNLSSAFHPQSDGQSEVTNKIIAMYLRCLTGDRPRHWLRWLPWAEYCYNTSYQSSLRTSPFRVVYGREPPTLRAYEPGSTRLLAVQQAMQDRDEFLREIRDRLEQAQQTHKSAYDGKHRALEFSVGDWLWLRLLHRPIASLGVTGRGKLGPKFYGLYRVAERIGSVAYRLQLPPGARLHDVFHVRLLKPFCGTPPDSVPPLPPIQHGQVCLQPAAVTQSRLARGVRQVLVQWKDKPSAEASWMPLDEFRTLHPDFQLEDELLLQGGEMSCGDCNTSVAATGGRRQGVTRNSFLLLF

SEQ ID NO: 40990 - protein, 343 aa, Oryza sativa
MSSSPAIAAASAAVVALAVANRVLYKLALVPLKQYPFFLAQLTTFGYVAVYFSILYARYRAGVVTGDMLALPKRRLAAIGLLEALGLAAGMSAGAMLPGPAIPILSQSFLVWQLIFSALLLGRTYSMRQIIGCFLVASGVILAVASGANEGQFLSEVKFIWLALMVASSAFQAGASILKESVFIDGAKRLKGRRPDIFVVNSFGSGFQALFVFLLLPLLSNLKGIKFAELPAYLNGGAECFLNVDDSLIDCGGAPFLPLLFILVNMAFNIALLNLVKLSSALVASLTATSAVPISIYILSLPLPYIPHGAELSSSFILGGVVLLMGLIIYNLPQSSKKQSKIE

SEQ ID NO: 40991 - protein, 300 aa, Oryza sativa
MLRKRAKPSSSSGGSNKQQHEIAFDHGGGGGGAAAISAPKLLVPSSSGEASPEAVLMSPTSTLQTASATSPCSGRTTGAAATAVPFSRRRRHGGGGVGRGPADGDGQCRTHRPWDATRPVGLGLVGALNDDEDDDDGEVDAAPGDAAASSVLTGQIRLRVQTNYYAPCTEFGVKSGGAAVQYAPPPRRRWMSPREMMEEMSEDYTCVIARGANPRTTHIFDNRVVESSGDGEYFSPELWPPSAAGKGDDDGDGDFLRYCHGCSKDLGLGKDIFMYRGEKAFCSHECRYHEMLFDEGIEEL

SEQ ID NO: 40992 - protein, 181 aa, Oryza sativa
MAAASLRLVVVAAAVAISLRGAAATAVTVEDACRHTRHEAYCVKALSARPESRAAALDMPALAEAALSMAAESGAAATSFVRNLAKMPGGMPPECLEGCVAKFQEAVAELRRSEAAMEVRHDAAGAKAWVTEARADGETCMDECRMTEGGAAPEIADRIDELAKLCSIALALTNASMSKHP

SEQ ID NO: 40993 - protein, 371 aa, Oryza sativa
MSSSAVIPPPSPERRVPMVAVPVVADDGGGGHGAKGEESVSGSVAGISPSILIIAVIVVVMLLASVSIHYFIRHLCRRSSASAAASSSAPVLPVVVRPASSAAVGEQVVGKASAERAAEMERLISRLPLFTLASSLAALPKSSRDCAVCQSAFRDDDELRLLPACRHAFHSRCVDPWLRANPSCPLCRASIALPHPPLPDLLRVELGSVSSRRSNPNSAAAVASAPPEGAAVRAYPLPTLPNSEYLVEEELEVVIKQPAAAAAPRTGEPSQHPLPAAQAERGQPSSVTPTASFSSARSQERWSNRWSSRWSSRWSSGRWSSRYDAGTVTAAATAEWWWDMDGGAAPAARRREVEEQGNAFHGFMRWLTGAY

SEQ ID NO: 40994 - protein, 461 aa, Oryza sativa
MDYLKTVVPSQLMAERGANLVVINPGSSNVRIGFASQDVPFNIPHCIARHITQQKDDTPRLSVRDKMLNCHATPSQNAERERAYDIIASLLKIPFLDEDMPSANQALPPKMGRVDALSSQQNKDDSKFTWTDVMDRSIKSSTPIERPVDKDADVDPLQRSTPDDTEPNSEENMYKEIIFGEDALKIPPSESYCLSHPIRRGHFNISQDYSLHQVLEDLRTIWNWILTEKLHINPRDRHLYSAILVLGETFDNREIKEMLSIVLCDLGFSTAVIHQEALAAAFGNGLSTSCVVNIGAQVTQVVCVEDGVALPHTALALPYGGDDISRCLLWVQRRHCTWPNFQTDPVNKPIDMLMLNKLKESYSQIRSGSFDAVSVVHSYEHEKSVGHQKTKLSALNVPPMGLLYPRVLVPEEYPPPPRSWFQDYDDMLEDTWQTSDSLYSSGNGGFGMWDNYPMFPTRLKI

SEQ ID NO: 40995 - protein, 160 aa, Oryza sativa
MFMTRWNYRAFNKTHSPQCANNSQSNIGNGLQHVFVFGILALGKHAYHLALLFYYEITQMICWIAIPVLFLFWSLNIEVKTKRWAAIFLSNRRCIGAATKVVPLPGSGSCQVVSPSRLCCFARAVSSPGSGLFQDVSPPSGDDSFQVLFPGQGFSHAVSP

SEQ ID NO: 40996 - protein, 92 aa, Oryza sativa
MAMLATVCFLCLSTASVWELFFVHVAINQLTAMHTAYNSYERNNSRAVTIFLFFSLLILAYAPNQFSQKIEVIAIVNISAYIYLCLSSSVRI

SEQ ID NO: 40997 - protein, 62 aa, Oryza sativa
MNQINPISIPVSKSSEGVDSNGCAESVTLPPLKTRWATATATASKPVLQAPRWRFPRSGAVL

SEQ ID NO: 40998 - protein, 188 aa, Oryza sativa
MLQELAHKRSPYGDVYHRCIALEFSVMYMARSAIHQTARHVHMSTIDKYPHGLKYLLEVAKSIYVINDSFVDCLTNLSNLDELEECKLHFCHRMKHVFETTYHMWRDLPNSWDSQHKSAWASRLKSAWASQLKSLIHFYILAYTNSAIEAIGFTSLNHLHLEHCPRLESIMPRNCALPRLTTLNILFC

SEQ ID NO: 40999 - protein, 231 aa, Oryza sativa
MTKIYRSWITAMACSCSSSGSPTLPLANGCTCLPSRCRHASRWACARASASYDPMVSPHHFEVFCVPLVPENIFYRSSDNLDPDSNSSVDQESLEWPLSSRCTTHVFSSRKWRWEERSFVRQQGVEPANETIADLQFHPQQFQRRALYLKGEIYVQCKNNSLMRITLSNDKYQMIKSPVESKIDDGNGVLQLGKSEKGVYFVLLMKIIISPNFKFGCSINLHHVVVRLSGR

SEQ ID NO: 41000 - protein, 366 aa, Oryza sativa
MTNHAGFAADDAVTAAVPVQAAQGGRHFPPFLAPSSRLTDCKKAAAHVDLAGAGGVATVPGSWPRHAKPVSGAELDDWMEKHPSALAWFESVAAAAKGKEIVVFLDYDGTLSPIVADPDRAFMSDEMREAVRGVAKHFPTAIVSGRCIDKVFDFVKLEELYYAGSHGMDIRGPTAAASEYNHNMKAKQGDAVTFQPAADFLPVIEEVYHVLKERMASIRGSLVENNKFCLSVHYRCVDEAEWGVLDGKVRAVIEGYPDLRLSKGRKVLEIRPVIDWDKGSALQFLLKSLGYEGRNNVFPIYIGDDRTDEDAFKVLRNMGQGIGILVTKVPKETAASYTLREPSEVKEFLRKLVKIKINGDKGLIGK

SEQ ID NO: 41001 - protein, 55 aa, Oryza sativa
MYLIGWLRMESCPIASHIIVLCMDIALLDSRKKLLEFWKRCAAMVLNQMLLLIHL

SEQ ID NO: 41002 - protein, 279 aa, Oryza sativa
MAAPGDGEEKKAGSGRNKHGFPRGFRFVPRDQELLDILDDKLRGAPLDRALDAVFHDTRILDFHPAKLYGMYAEDEENGYIYFFSTIEFKAAKPKQKKWPRRAAQGGRWKAVLGSSQMVEVGGVPVGRKLSMEFTSRGSGPTGACTSSSGSSAPTSRLRILPCTAYTSYGRTARRSRETSPRTLPRARTRVDKRRRRTTTRLTRTRSLRRMRMRRRTSSSQDGAKGTPTMSRRRHRPRPGLSVGRRRPRRDPMTAATRPRFQGRRRHHQLLRARWTRRR

SEQ ID NO: 41003 - protein, 495 aa, Oryza sativa
MREEMDAVNRNGIWELVDLPHGHRPIGLKWVYKLKKNEAGKVVKHKARLVARGFVQQPGIDFDEVFAPVARMESIRLLLAVAAQKGWHVHHMDVKSAFLNGDLAEEVYVKQPPGFVVAGEEDKVLRLRKALYGLRQAPRAWNAKLDCTLKELGFDQSKHEHAMYRRNNGGSALLVGVYVDDLVITGPSTRAIEQFKEEMKAKFQMSDLGLLSFYLGIEVKQGDDGISLNQGRYAQRIVESAGLKDCNPCATPMEERLKLSRDSTAPPVDATKYRRLVGSLRYLVHTRPDLAFAVGFVSRFMERPTEEHMVAVKRILRYVAGTMEYGLHYKREKEEQRLIGYSDSDLAGDIDTRRSTSGMLFFLGSSLVSWQSIKQRVVALSSCEAEYVAATNAATQGIWLARLLGELLGKQPKAIELKVDSKSALALAKNPVFHERSKHIDLRYHFIRSCLEEGSISASFITTMDQLADILTKALGRVRFHELVARIGVVKISSE

SEQ ID NO: 41004 - protein, 128 aa, Oryza sativa
MHLMLPCKKETYQLSEGVKLCKKKGEVPLLSVEALHQLHIFIFILGLVHVVFCATTILLGGAKIRKWKLWETEIQQEMQQKLQKRDATPGRIAHNQQGEFVSERTKGLWMKLAVVSWIIAFFKQFHDS

SEQ ID NO: 41005 - protein, 449 aa, Oryza sativa
MRRRVALCLVLFAFAGLHAAAVEAVTLSTSSRWIVDDEAGGRRVKLACVNWPSHLEPVVTEGLGMQPVDAISKKVASLGFNCVRLTYPIALATNASLSSLTVRRSLLAHGLAGAVAGVEANNPGLLDLTLIESFRAVVDSLGESGVMVILDNHVSRPGWCCADDDGNGFFGDRHFDPDAWVRGLGAMAALFAGVPNVVGMSLRNELRGPRQNADDWYRYMQMGAEAVHAANPAALVIMGGLGYDTDLSFLAARPVDVSFAAAERGKLVFELHWYSFADARAWESEDANEVCGRVARGVARRGGFLLDAGFPLFLSEFGADTRGGSRKDDRYLPCAAAVAAELDLDWALWALQGSYALSTWRLVSGSTMHVAVNATTTTTPSRDGGGGLLCLDVGDDGRSVVTNPCRCLDDAAAGECDPETQWFKLVTSTRSPATGAAAAATVARGLIAA

SEQ ID NO: 41006 - protein, 412 aa, Oryza sativa
MEFTTSSRFSKEEEDEEQDEAGRREIPFMTATAEAAPAPTSSSSSPAHHAASASASASASGSSTPFRSDDGAGASGSGGGGGGGGEAEVVEKEHMFDKVVTPSDVGKLNRLVIPKQYAEKYFPLDAAANEKGLLLNFEDRAGKPWRFRYSYWNSSQSYVMTKGWSRFVKEKRLDAGDTVSFSRGIGDEAARHRLFIDWKRRADTRDPLRLPRGLPLPMPLTSHYAPWGIGGGGGFFVQPSPPATLYEHRLRQGLDFRAFNPAAAMGRQVLLFGSARIPPQAPLLARAPSPLHHHYTLQPSGDGVRAAGSPVVLDSVPVIESPTTAAKRVRLFGVNLDNPHAGGGGGAAAGESSNHGNALSLQTPAWMRRDPTLRLLELPPHHHHGAESSAASSPSSSSSSKRDAHSALDLDL

SEQ ID NO: 41007 - protein, 296 aa, Oryza sativa
MDGGDRLSALPNDVLHLILLRLRSAEAAARTSVLARRWRHVWATLPELRFRMDVSLAAHAAPALRRLEVSTDADDPAASTAALRLAAPRVAGELSFCIWPRWDDAPGEDDGPAPVRRPGVVKLPCFEKATELWLILGLLGVSLPKSGVFAQLTALAFRDVRFTGRCDLGAVVSSKRCPVLQKLQVHDSQDLYNLTIFSESLLHIELSDLHGGMGRLMIVAPLLRVLDVRHCFYWRTYRSHSLVRDQPYAAVFTPALEDLIWVDAYDPTTVQFGGVKRLRKLVTQLQCMDSLAALIT

SEQ ID NO: 41008 - protein, 302 aa, Oryza sativa
MGSTAAAGGNLRTALSYCVQQVRNYDYHHYLCLLHLPPAMRKAAFAFRAFNIETAKAMDVVSDPKTGLMRLLWWKDVVDKVFANKLVEHPVAQVLSSVVSEHKISKHWLKRSVEARINDANRDDYAIPETISELERYAEDTQSTILYMTLQAGGIQSTIADHAASHIGKASGLLLLLKALPHHVSKQGRIPYIPASIAEECGLLTREGGRSEVRMGDELPDAVFKVASVADAHLQKARELASSVPAEAIPVLLPGVPAQVLLDSLRRREFNVFDSRLSRGVHGISPLWYQIKLIWHSVRKKY

SEQ ID NO: 41009 - protein, 384 aa, Oryza sativa
MAKLAVLLTLLALVGSVTCQGYTGNASPPTPITYPSPPSLSPSTPPTYPPPSSTPPSLAPVSPSPPTTHLPPSPTPPSPAPASPSPPSLGLRVGYYSSSCPKAEQIVKDTVKNAVYTNRGIGAGLVRLFFHDCFVEGCDASVLLDPTTANSRPERLGVPNFPSLRGFEVIDAAKAALESACPGVVSCADVVAFAGRDAAYFLSNANIDFAMPAGRYDGRVSLADETLTNLPSPFAGLDQLKKNFADKGLDADDMVTLSGAHSIGVSHCSSFSDRLASTTSDMDAALKANLTRACNRTGDPTVVQDLKTPDKLDNQYYRNVLSRDVLFTSDAALRSSETGFSVFLNVVIPGRWESKFAAAMVKMGGIGIKTSANGEIRKNCRLVN

SEQ ID NO: 41010 - protein, 128 aa, Oryza sativa
MASATASLLTCFFALALFMLHSNAAAAAAAPSLYHSQSSKTWCVANPAASEDALRANLEFACSESDCAAIQGTGGCSFPDDDGSLPTRASVTMNAYYQARGRNSWNCFFNGTGLITITDPSSGNCKYA

SEQ ID NO: 41011 - protein, 311 aa, Oryza sativa
MWARTGCAVVQDGGAGGGRMVCATGDCGSGGAECNGAGAAPPATLAEFTLDGSGGLDFYDVSLVDGYNLPVLVEPSSSGGGGGGGGSLTSAATCGAAGCAADLNAMCPAELRAGGGAACRSACDAFGRPEFCCSGAFANPSTCRPTAYSQVFKSACPRSYSYAFDDPTSTFTCSGGPDYTLTFCPASSPSGSQKSTTATPTPAAMMPGTGTPTTPTTATAMPGATMPGTATATTMPGTTFTDAVPDTSMPMPMGGDAGGGGEEGVVLSGSETWIANMATGELTAAASLSRPSPAAALALFLVHALRLLVLR

SEQ ID NO: 41012 - protein, 126 aa, Oryza sativa
MALASLHQPPMRARRRRQRRAAAATGTVTTTTASGWRARSGLGTGGGGGLPSPTSHPVRQQRGRQWRRHPFLDGGRHGDDDGGSGRRAPSDHEDGGGSGRQRCLPPPPQHRGGVGGSAASGGAALG

SEQ ID NO: 41013 - protein, 524 aa, Oryza sativa
MLPRFHGAMWMQDDGGGDQEHGQAAPPGQEQHHHDQHLMALAAAAAGGAGFGAAQAPAPLLDEDWYFDAAGGGGGGAHGSMMLGLSSVHGGIGAGTSGGGHGQQFSLLNMGAAAAPFDVSGFDLGIACGGVGGGGDVVSFLGGGNASNTALLPVGNAGFLGTFGGFGTAASQTPEFGGLAGFDMFDAGAVNTGGSSSSSSAAAAAASASAHVSNTAPFSGRGKAAVLRPLDIVPPVGAQPTLFQKRALRRNAGEDDDDKKRKAAAGAGAGALSADGADMVLDDGDDDGLSIDASGGLNYDSEDARGGEDSGAKKESNANSTVTGDGKGKKKGMPAKNLMAERRRRKKLNDRLYMLRSVVPKISKMDRASILGDAIEYLKELLQKINDLQNELESSPATSSLPPTPTSFHPLTPTLPTLPSRIKEEICPSALPSPTGQQPRVEVRLREGRAVNIHMFCARRPGLLLSAMRAVEGLGLDVQQAVISCFNGFTLDIFKAEQCKDGPGLLPEEIKAVLMQSAGLHTMI

SEQ ID NO: 41014 - protein, 371 aa, Oryza sativa
MASTSQAAGSPVKPVKLSTAEGFLCGALAAMTAVTVTNPMEVCKTRMQLQGELMSAAPRVLSGQAGSAAPQAGAQAAVGARLYKSSLDCFTKTIKSEGLKGVQRGIGAAYVYQVLLNGSRLGFYEPFRKAINRAAGKRPEEQWAAGAFAAGASSGCVGAILGNPLFLIKARIQAYSPHFVIGKASHNYKSTVDGLVKIVQSEGVRGLVRGMDAAVLRTAMGSTVQLPAYNWFKSYLTNMDVEANAYNPLKFLANKPNSFFTYLASSIFSGLCVCAVMQPADTALTRMYNQPVRVDERGRSVGTLYRNPFHCLYLTAKAEGVLGWYKGTTAHLFRIAPHTVLTLVMNEAYLRWYTNFKSGRSLLDAPAVKTM

SEQ ID NO: 41015 - protein, 269 aa, Oryza sativa
MAEQQQQQRDGDFEPVYEWLDAGAHYLLRVNVPEFKKEELQVHVDPAGRLTVRGQHGGLRLNKVFQLPPTCNLDAITGRLEASVLVLTVPKKPATTAAAAALPPKANQEEEKETKKADEHDVAGKPPPPPPKTDSDQSERRTQLSAREKKEEPPKATAPAAAPPQPAARERHDEEEKARAEHKARLSREADRRIEAARARLAAQQAASRPAPAPAPEPEKTAAWWKERAAEEGMKLAEAIGKNKEVVATAVAAFALGVFVSTKLFSRNN

SEQ ID NO: 41016 - protein, 44 aa, Oryza sativa
MSGMCKPVSPARWASCPGIADAAGQLVKGNIKHLLHMRSTKSNM

SEQ ID NO: 41017 - protein, 780 aa, Oryza sativa
MEAELDLDAFLGPGPSAPRYHPTTPPSPSTQASASASTATPRPKGMSRIEHELGKSLPDWAVHRIALQKKFPDGWRPPKILSREAQEGIRLLHASDPDQFDVVELSQRFRVGVESIRRILRSKWAITGEARSRQDRRAAERAAEREESELAEILRLQEAELVDEGESPQIEEDEMADEMPDDEEGIQPVRYEGLVMSAADASALGVTSRTKAGGKKGDGNWCLVDADWCMVHVMTEQARFNYDIEGIWRELEAGKHAKPKPWEQETAQAPSRPRTKRDVFGSSLKKNKPQRAVGRFGDERRLSTSARRKVEEVPESLARVMARAYESLQSGEDKVPVRVEGWLRSTRKQKAITFLEVTDGSLAGARSLQAVVRSHPDTAGLTVGTAVRLVGDLKRGRGSKPGQEVELDAHTVEMLAPCDPTYPLATLTHKVEQAAYAASLAERRNPHLLGRLPRYAAMARTRDRVERGMAAYLATRDFVKIACPVLTASDCEGVGEVFQVVADADVRAQQPMQSFWSGKPAYLTVSSQLHLEAAGLGLGRVWTLNPAFRAERSATNRHLVEFWMAEVEMYFTGLDGILDVTEGMVKAAIRSALEGAEDMEALGDTQHRERLEQVVRDEWKRITFREALDILSRAPGGTFEVQPSEEGGLASEHEKYLAAQMGPVFVTHYPLAHKAFYMKRAAPLEAHLVECFDLLIPELGELVGGSVREHRSDVLADNLQQLGASADKLGWYTDELKRFGGAVEHAGFGMGVERLLAWITNTASVKDVVPFPRTKGQLRF

SEQ ID NO: 41018 - protein, 289 aa, Oryza sativa
MAGVTSKRRSSSASTSSSSGDGAAVSDRPRGVTRKRRSGGRCPRPAASLRPAAPRPSSHHTAGLRVILQKELRYSDVSQLGRIVLPKKEAEAYLPILTSKDGKKSLCMHDLQNAQLWTFKYRYWPNNKSRMYVLENTGDYVRTHDLQLGDSIVIYKDDENNRFVIGAKKAGDQQAATVPQVDEHISTLFPIFPIAQVDDYLSPMAPQVDISAFVPHADENHEIFDGILNSLPEIPVANVRYSDFFDPFDDGMDMANTLNANANQSASLHVTDDKSGHSLIPNPKSGPHM

SEQ ID NO: 41019 - protein, 294 aa, Oryza sativa
MFANTYQNGDDDDFLDQEEDSPDETKDEEYESIEENLRESDFPADSDSENPGISHEFGNSDDPGSENGDVSFPSDAPTLGGSKFNAFAGNMHDTPGEVPASWSTRPHLFAYANDNSDGDAFADSPNGSPSPWNSHTLDRITDADVSRMRKKWGSAQMPFVGPNASQQPRKDVTKGFKKLLKFGRKTRGADGLNDWVSASTASECDDDMEDGRDLAMGSSDDFRKSRMGYPSAYDGFVDTDVFAEQDQSLRSSIPNPPANFRLREDQLTGSSLKAPRSFFSLSTFRSKGGDARLR

SEQ ID NO: 41020 - protein, 504 aa, Oryza sativa
MPLLLHPRFPSSHAAACAHRAAAAHRDARPALRLPELHATRRRRNNVACRATRAREAPPQQQNTAAALSKEAHKYFDHAVVTVRAGDGGHGAVLAMPAPPSTDAPKSPRRRSDKGKRSGVKKVSYKRNYDGSVALPMGGHGGDVVVYADEAEETLLRFHEKARYCAKRGGNVGATGTLSSRMHNGFAGETLRIPVPVGTVVKRKKGAVLADLAHPGDEVIVARGGQGGISLIDVPEYRRRKAMVLSPNIMRDVSDRVLIHGQPGEEVSLELILRVVADVGLVGLPNAGKSTLLSAITLARPDIADYPFTTLMPNLGRLGGDPALGALQFSSEATLADLPGLIEGAHLGKGLGRNFLRHLRRTRVIVHVVDAAADDPVDDYKIVREELRMYNPQYLERPYVVVLNKIDLPKAQDRLSSLAFEISSIGCEECDGNNTSEDSLNGNTGEHNTSSETKVEGGEKELRDYPRPQAVVGASVLKHIGIDEMLKEIRAALRKCFDHRLPEP

SEQ ID NO: 41021 - protein, 202 aa, Oryza sativa
MDAKRTPPPPTPPNPNPSVIGSGAAADGGGFGRGEAAAATKHMLAFHFLRALSRIHRATPVTRRTRTIRRAAYSSMARAASPRRAWSRALLGQVRARRSRTLMRRAAVLVRRRVVAAPAPSPASARGVRIIAAGETSAAARAVPPPPRQQGEPPRAEALRRLVPGGAGMEYSSLLEETADYLRSLRAQVQLMQGLVDLFSYQ

SEQ ID NO: 41022 - protein, 653 aa, Oryza sativa
MLALMLHLPVLHERVTVEFDEVDGDVDVPGLPRLCRQRPCRAVPDGGQEEPQLHVVRAPRRPLHGRHGHHREHRRGADELEPAGSPRHHRGQPVRAGANRISDLPDDLIQRILHFAPAREAASTGLLSSRWRSLWRSTGAVNLAVLVRRRDDFFSLCDAFVRSAHAALAAAAGGHVRRLTMHVETERLPVQLTADAFLHRDAEDWGRRHDVVAGVVSHPAARRVEELRVAAVRSADGPSSDREVTEMEEGEFHLSLGGSGGTQPSTETLRVLDLTGCGGVSLPAGAALPRLTTLRLRLCVVQVEDLQGVVDSAPALATVHLESVFLAGTKEDGCCARLRFPAATALVLAKCRGHGSHHNGDDDASDCEGAMEIDAPRLRSFKYTGLPRRFSLISPAADMERADLHFLHDDGPHHYRDTTAVLRARFWRFLHNFRGVKSLKLKVTYLKAIAVTGNGKGILLPPLHGVERLDVAALHDPASETSTVAITNLLRCCPNLRDLVLRLSTVPPDSTKNGGYCRDVLRRRWQADLDESVHRLARRRGWPKPPPPPPPTKISCMNQSLDDAGGDIRGLSGRSFACLRSSLTRVGIQFRNDERSWLGVSLIKFFAENAICLEEMRVDGGNERMRDHINRRVERWIVESGMRCFRVLPLERR

SEQ ID NO: 41023 - protein, 989 aa, Oryza sativa
MAYCEAGGPVGRSPPSGSGGGGRRKTLAEVMATRTPRPASIRPEATRAAEAAAREVLLRVAPTEEAERRRQDVVGYLRRLLGTALGCEVIAFGSVPLKSYLPDGDVDITVLGNTALDGACISDVHSILESEEQDSGAELEIKGLHFIDAEVKLIKCVIENIVVDISFNQIGGVSTLCFLELADRKVGKNHLFKRSIMLIKAWCYHESRILGAHHGLLSTYALETLVLYIFNIFHKSLHGPLEALYKFLEYFSKFEWAKYCISLNGPVLLSSLPSPAVEPSSIQDELLFGKKTLPEVSDGSNINFCLKHLNIIDPLKWSNNLGRSVSRGSFYRIRGALSFGAQKLGQILMLHSDLIPTEIFGFFANTLKRHGRGERSDVGNNDSIESLLDPEYALGKDTPDFTNSDRNQDENRNPNLQTTSYRYFHGDAKDHPWNKIWLTNFDIQYYNMVSGASLMSHSTSSTENGNHNIKQRCSRSLMEQQIYASNQPHILTPSTHKNTLDVINSCRAELNRSDLHEEKVILSPFSPSNLLDLSGDLDLHLRCLQKIQYHLESMFDGLVQLIQEAFLSGLLDEDSFKIPTRSFSNSTDERPTGLLPVASVDTGTRNLCPVSYFPSTGDVSHKSHTEDQVNAVCQKNVVLSSGTCIISNGFASSPSPPADLESYPVSWFHNTQEIMAHGTGMQTLKNVSLLPGTDVLSNVVGQLPFLAADSEDYSFSRSHNTREKRVMRGTGTFLPRMSYYTYKERILSEKGRRERERLPDRPWKIKTNPTGYLHQHTSPEVGCSGASTGGITIDQYSSQQDYSRSSVPAEGGVFQKRALINHVSEQIQTSLPWDVHNNQHGYVYSDMNMVDNQNPGTTSEGLVGHNSESRELPIHHPPEVQFSETMASSPCILLPHCIGNGQGNLLQESNTCQPFPPATDVFHSIKTKQDENLEVESFRPIPFSSPCAKFGEAFPLPTSKGPAETESRPDGLYQLRDEADFPPLQTRSC

SEQ ID NO: 41024 - protein, 185 aa, Oryza sativa
MAETKYEPRLKTEYVNRIRGAMQEKFSYANVMMIPKLDKIVINMGVGEATADSKKPTVAAGDLAAIAGQKPVVTRARNSIAGFKVREGMPIGAKVTLRGARMYEFLDRLVNIALPRVRDFRGLNPKSFDGRGNFAMGIKEHIVFPEINYDKVDQMWGMDIIVCTTAPTDDEARALLTEFNFPFRQ

SEQ ID NO: 41025 - protein, 613 aa, Oryza sativa
MVKVSAGCPVCRANRCAFLCPTCVNKVFNDERQPIDELRGQRQSLLESLVQQLGKKALLQQQQVRRWQLQQQLKEAQAKAQRAKDALANAQQQLSQVTASNSSRQHSLQQLNQHTAAARTEVLGNTLPTVLRYQSLTLSHACAMLAREQRTRIRELTEIFPLRVNALRDRGGGPIQITICNIRLPESGTTPPGGWPEVQSTSAALGYLLLFVDQVALIMGGPMLHESAHQASTSSIWQPSSFWDRQPPSPAAMLPLHVMTAGPGAGGAAGQAAYNFATSRYLSSANFWSGLPRSDSSGTSSGNAASLAAGTAAAAAAAAYAGAAYAASAIGRATGMEGTAPVGPGGYLSSGSLVAIAAGGAQQVLPGGATTSGSSGSSGSGPAGGGRGSRKEGDFKAAFDLLQRSLACFLRDKAAKNGMQLPAAWNPVAWLAVYTAVVKRDRQQDGKLVAASNRADAVAAASAAGLDPGGDSEPGVASLSAAAAGLQGGPAAGAAGQGWQGQEDDDEDEEDEGWGVVQAPYLPPPPSQPDAVEHWARAMFADGNALSSGQAQSGGYGLGLGLAMPRGYGYGGQVGLGAGRLGLGAAALGSSPSSTAGGMLPMERIRSLFGRSE

SEQ ID NO: 41026 - protein, 848 aa, Oryza sativa
MNGFSGDFPVGFGQCRSLVELSLDGNAIAGALPDDVFGLTSLQVLSLHTNSLSGHLPPSLRNLSSLVRLDVSFNNFTGDLPDVFDAVPGLQELSAPSNLLTGVLPATLSRCSRLRILNLRNNSLAGDIGLDFRALQSLVYLDLGVNRFTGPIPASLPECRAMTALNLGRNNLTGEIPATFAAFTSLSFLSLTGNSFSNDSSALRTLQGLPNLTSLVLTKNFHGGEAMPTDIAGFAGIEVLVIANGELHGAIPAWLAGLSKLKVLDLSWNHLAGPIPPWLGELDRLFHLDVSNNSLHGEIPLKLAWMPALMAGGDGSDEAHVQNFPFFIRPNSSARGRQYNQVSRFPPSLVLARNNLTGGVPAALGALTRVHVVDLSWNALSGPIPPELSGMSSVESLDVSHNALSGAIPPSLARLSFLSHFDVAYNNLSGEVPVGGQFSTFSRADFDGNPLLCGIHAARCAPQAVDGGDGGGRKDRSANAGVVAAIIVGTVLLLAVAAVATWRAWSRWQEDNARVAADDESGSLESAARSTLVLLFANDDDNGNGDDGERTMTLDDVLKATGNFDETRIVGCGGFGMVYRATLADGREVAVKRLSGDFWQMEREFRAEVETLSRVRHRNLVTLQGYCRVGKDRLLIYPYMENGSLDHWLHERADVEGGGAPPWPARLSIARGAARGLAHLHATSEPRVLHRDIKSSNILLDARLEPRLADFGLARLVRAHDDTHVTTDLVGTLGYIPPEYGHSSVATYRGDVYSLGVVLLELVTGRRPVDMARPAGGGRDVTSWALRMRREARGDEVVDASVGARRHRDEACRVLDVACACVSDNPKSRPTAQQLVEWLDAIAAAAAD

SEQ ID NO: 41027 - protein, 173 aa, Oryza sativa
MSVAPATEGSARRSAAAAAAEEEERQRNRKRSNRLSAQRSRIKKQQYVDGLAVEAEQLRRENDAMRAGAGAVLQRCRLVEQENRVLAAHARELCSALQLRASQLRLLGEVAGVPLDVPDVADHLVQLYGGDLGMTPLSPPPLLPPLPPQIEMLYFQPDSVMDPVSMLQGYENI

SEQ ID NO: 41028 - protein, 864 aa, Oryza sativa
MEYFRVIHKTACCSNSICEPCALKHLTVKLKLTSPHPTMPSGQRFPSVECPMCNVKGVTFLFVHPNESARAYQESPHTKELLAAAERRASGGAGGVGLAFAGRPVIEADASFDGLKRKILSFDDAATGAGPTTGAGGGSSGSGSGASQAQAQRENSISRSAQANPPPALTNAPPVALPPKHPTKRSQHGTLSTPSMGAHALAAGAGAGAGGAAVTGSPVPSPGTLVPAGVAGSVVFVDSKHPSPNPSPNPNAAGAAGAAAMAAEFPFSRRPVGSSGSGGGSGGSGSSGGAIVDLTASPKRDMIDALPRVPAVPASPGGVGAAAERHEKEAHAHAHAHPLPGFVARDLPSHLTPSTPVRTPADDAEDERKVQLWIEMNRRPQPQPQPQPPISPGASGFAAAIAAAGSASPSDSKRSAHSAAAGSPPPADQVLSVLLPLAPPIGSSSGAGSSNGSGTGPHHRSDDSDSHKIELINVFAHPQGQSSAAPPPAPQPEPLPTPAKPGASSAAAPLSPTGLTLAAAANGTAAAPRPVAIIAVTPVRAAAPASPPAAPVPFNISITATSAGPSSAAAAAGTHANAAAGAPPSSAAAATAAHGGSGATNSSAAGPSPGGGSSPYAVSRTATASQIGSGVSTPTPSGSHVTELSRLHAGPSPAAGPSPAAGPSTLHPAGGAPGGTASAAGAPALPPRATSISSLVLSPDTSPRPSNNGQQLPPHPETEPATALPASASVTALASASAAQRSAAPSPPAAAAAAAAAVGAGAGAGAGTAGADSGGSLLRVLQPGAPPLLMAGLPSPSAHAHNLLASPMAVSPLSTVSASGVHGLVSPSSNSAFSVLLHSGTHLQHQQQQAAAASDDASASATAR

SEQ ID NO: 41029 - protein, 574 aa, Oryza sativa
MDAGDAMESGQRAALLPESHGPKTEDDSLQVPLLKDKKRGGSKAPAIVLGFECLESTAFNGISTNLVVYLETVLHGSNLASASNVTTWYGTSYLTPIFGAIVADTFLGNYNTILISLAVYLLGMMLVTFSAFLPATAALCAAGATCGTGAAAAQTVAFVGLYLVAVGSGGVRSSLLPFGAEQFDDDSAAGRERKAAFFSWFYLCVDFGLIVSGVLLVWIQQNVSWGLGFGIATACIAVAFAAFVLATPMYKRRLPTGTPLKSLAQVVVAAFRKVGMRLPADAELLYEVSDKVDSQPKIAHTSEFTFLDKAAVVSESDLEERPEAASSWKLCTVTQVEELKILLRLLPIWATSIIVSAAYSQMSTTFIQQGSAMDMHIFSVPVPAASLSSFQVLCVLTWVILYSKVIVPALRGFSSSGAAGEPSQLQRMGAGRLLMALAMAVAALVETKRLNAAASGEAINIAWQMPQYFFLAGAEVFCYIAQLEFFFGEAPDTMKSTCTSLALLTIALGSYLSSLIYAVVEAFTATAGGHGWISDDLNQGHLDYFFWMLAAMCTLNFVVYSGFAKNYKLKTVLS

SEQ ID NO: 41030 - protein, 170 aa, Oryza sativa
MERQAATGGRGTSSSPRHRTPPVHANRPPAHRLSPHRRPPPVPAPLPTARLAPSPSLVPVPPPTTCPRALAHRLSVLTIRLSPRPLTTAAHRLFPRRPSAPTIRPPRHASPSELRLPPALGDEGGGGGRIWGTGSPPPPPPATRARSAHLRHWPPECAGGGPQIRVIQLF

SEQ ID NO: 41031 - protein, 246 aa, Oryza sativa
MGNALTGKRRVAKVMTVDGATFRYRAPATAGAALRGHPAGHQLLESEEVRRLGVRARPLDRDAPLKPGKLYFLVQLPRGAAGYGGDDDPRAPRKTWSGALHVGARERLESLMLSRRTVSDMASVVPAARAVAGGGGEPARRPSSVEVGVDGAVRLRMRLPKSEVARLMKDSKDAAEAAERIMQLCVARDQGGAGAGAAVTLAASGPVSAMSGRKTSAMKKEVGIFFLSLLPLPMLTSLELPRDVIL

SEQ ID NO: 41032 - protein, 547 aa, Oryza sativa
MTHEPMSRSSPSFFRRDAAGNEERAALTTPPPLPAEDDMGGAPAGRRRWPSSVMRMKGVGSVMVGVVFLALLILVHRWVGLDASFLRDSSMVRTSTRQWHPHHNISTPPLMTLPPFSCGNGTAAPATCPATPPSPPPTSKPATGGEPAASCPDYFRYIHDDLRPWRGAGITREAVERGRRHAYFRLVVVSGRAYVETYRRSYQTRDAFTQWGVAQLLRRYAGRVPDVDIMFACDDRGRVRAADFAAAPADAPPVFRYCRDATTLDVVFPDWSFWGWPEVNIGAWPATLEAVRRESARVRWPEREPFAFWKGNPGVARIRGELMKCNPASDGKDWNARLFSQDWNHAIHNGFKDSSIPKQCLHRYKIYIEGEAWSVSEKYIMACDSPVLFVNTPYQDILSRGLVAGEHYWPINRTRMCESIRAAVDWGNAHPAAARRIGEQGSRFVREQMAMDYVYDYMFHLITEYAKLLRYKPTVPANAVEICAESMACAAAAGRERECMDESVEGFVAGFDPCSLPPPFTEEEKREIAAKEEEVLRKVAKLEEENM

SEQ ID NO: 41033 - protein, 559 aa, Oryza sativa
MAARERRRIQARLNRSSTGAKRALKGLRFISRTTGTVQAAELWRRVEDRFNALARDGLLSRDDFGECIGMVDSKEFAVGIFDALARRRRQNLERITREELYDFWLQISDQSFDARLQIFFDMVDTNVDGRITREEVQELIVLSASANKLAKLKEQAEEYASLIMEELDPENLGYIELWQLEALLLQRDSYMNYSRPLSTASGAQWSQNLGGAAVAAGAAAATGGGAHAAVAARGGQQQQQQQEGRRGGWGVRKAAARVRVAAEENWRRAWVVALWFAAMASLFVWKFVQYRRTPAFRVMGYCLPTAKGAAETLKLNMALVLLPVCRNTLTWLRSSWARFFVPFDDNITFHKMIATAIVVGITLHAGNHLACDFPRLIASGPEEYRLVADAFGPEKPTYVGLLSGVEGITGVAMVVLMTVSFTLATHPFRKGEKGGSGGGAAATVLPTVARLPSPFNRLAGFNAFWYSHHLLGIVYALLIAHGYFLFLVRRWYLKTCRVAVVASQPGTRSTYCAVLCLARDGQGWRSCVIVSLIINRPCRGRQRRRGGRSRPVHSCVLQC

SEQ ID NO: 41034 - protein, 225 aa, Oryza sativa
MASVWATGQPGVELEVKVVRVAGVEARPEGGGGGGGGLFVRYYVPAGDGKRRIRVDTREVPCGGGDGEEDGAFWGELARFERRGGGAPASVGGVVFELRWRPRRRSPAFLGMLGNGRPSSRVLARGELACQDNAAAAVTPAPASSGSTWLRLSPACRELSGCKAPKLLVEVRMIHAADNYGAVKATRSLGGVNHHYCCSDGERCAQCGWIGTEEDMFLAATFTHE

SEQ ID NO: 41035 - protein, 81 aa, Oryza sativa
MPTRDRRMLHFATAASPAPIQTFPRRDLTSSATSPPSPSSPAGEGESADGGEGGWSESGDREVYQIWSRATAVCSRRPARG

SEQ ID NO: 41036 - protein, 180 aa, Oryza sativa
MMASDGSASPASCGGAACGVCGGAATVYCAADAAALCVPCDAAVHAANPLASRHDRVPLAVAMAAASSGVYDHLFAPDDDAASSWAAAAAAGAAVQGQGQGSPNDSSSSFTNDSAAASSSSDDDSTAAAGVSGAGGAGAAATKEAKFWLSFSDDGRADGVGFYMDSTTAATAAYGVVPTF

SEQ ID NO: 41037 - protein, 294 aa, Oryza sativa
MATTRSGVGGAISDPFATPGFRFYPTEEELLGFYLRHRLAGTRPDVERVIPVVDVYGYHPSQLAALAGEASARDTEQWFFFCPRAERELHGGRPARTTPSGYWKATGSPSCVISSATNRVIGVKRTMVFYQGRAPTGTKTRWKMNEYKAVADDADAAAAAMLHPMAPPRLRNELGVCRVYISTGTLRSFDRRPLDNQAAAPTQQQVMPSLTAAAAVNTNLCGGGGGVVFAGAQGDSSRDCSSSSGSRELAGGADGSEDDAIDWNSLISSATADDLGFNTVVGFDPSIVGSWPQV

SEQ ID NO: 41038 - protein, 373 aa, Oryza sativa
MAKPFPDPPKPPVPEPPKPGSDGACYDCPSPPPPPPPHSRDHRRVVIALATTASLLFAILLAFSVYCFIRRRRQQRARREALLAPPPSDAAGGGGAPGAPVAAGDGAVGGAGEGEGEGEVLHHAWHIRTVGLDEAAIESIALARYRAGAGMLGATDCPVCLGEFRDGELLRLLPKCGHAFHVPCIDAWLRAHVNCPLCRAHVLHPADADADAGDGERVPPPAGANGGGGGGGGAATDQASSPTDQTADQENPGQQQQGEQHELRVQIDRRDQPSSPEPPRRSPDPRSAQSFRRVASMGSRSPPAPSEDAPEDEQTTTQSSKEKQGSGGDSACCGKAPSGSGRLHHMRRSFSGGGGRRSLPSRHGRTSSSMLPL

SEQ ID NO: 41039 - protein, 335 aa, Oryza sativa
MFRHSSSASSAASYGSDVSFMNHSPAAALPAVPTQIPRVAGGYLDGNVSGGLPHFGGAVSSSSSSPPSYSSSLPSSYYNNIQRSISSHSLPHHLQLTDHFGGAFFSSSSSSSHQLPLPPPLSSSPSSSSGDLFEFTSPCPVRRVFSTGDLQGMNGSSPPRPLPSGESCGQDGSGPFSQKVGRYSAEERKERIERYRVKRHQRNFNKKITYACRKTLADSRPRVKGRFARNGEADAEGDEREAFDASYSYDYSAAGYSDYRSGSNSSSVNSCYNYNRKDGAATEASVVGGSDNGEWWWRAPGATTAEAERQRQAGFDVDEEIWATLGDMLSVNLAS

SEQ ID NO: 41040 - protein, 390 aa, Oryza sativa
MVLQSHDVSDLCIGKPPVRWLPPSSTVADAIAEIEAGGGRGPDAAVAVWDGTKGEVDGRVCMADVHLFLCGGDGEAASLASPAAALQATLSDLLAAGAPPVRRIEPHASVAEAVDAFLDDAHCLVVPIRERWRRAAAAGEMCMCWLTVEDVVRFFVGCIGLFAPTASLSVSQLGIVREATLAVAAGDRALSAVPLLSAALATHSSVAVITGAGIAPRLAGEVSPSALCSCDVSVAAAIAALSAGDLTAFLHRSDLRCRRNLPGMVDLLYAGDPSSWPPSPSSSSSSSSSSSSLSSFSSSSDDEAEDGYKHYAPAPCARRDNNRQIIACHPGSSLVAVMAQAVAHRVTQVWVVDFDDGELVGVVRFLDVLWVLREHLNQPPPDLPIEFLIN

SEQ ID NO: 41041 - protein, 223 aa, Oryza sativa
MSPLLSDKCRRARAAMSSSPAPVESPWLTMRAMRRVGGADGGGGQRSALMVASYPVLLLLVVLAAFVKYVWIALALYSALLLLFSCASRRLALAERLPSPLGGGGGGGGVAAVTAAEELQGAAARGGVSGETLASIPAFAYDASAHGGGGEAAAQCAVCLEALRGGETARRLPSCAHTFHVACIDMWLGSHATCPVCRRRVERKHKGGVLPPMPPEPETEPPV

SEQ ID NO: 41042 - protein, 215 aa, Oryza sativa
MEPGDRNKSRILIIGGTGHLGKFIVAASARAGHPTSALVRATAPPPPATGGGGSSSRARLLQSFRDAGVTILQGDIGDHDLLVKAVRAADVVISVVGYHDVGEQMKIIAAIKEAGNIKRFIPSDFGNDADHAHIVEPAKATFDVEAQIRRTVEAEGIPYTFVSCNFFAGYYLPALVQPGASGLPADKVVILGDGNTKSNICRRGGHCNVYHQRSG

SEQ ID NO: 41043 - protein, 126 aa, Oryza sativa
MALGASYARDTPEHAAPPPVVEADAEQRMTTWTQLSCPTSASGCSASLQRNVAMLASTSGGDCSEMMVVTCPLRRPTCSCVVTTAAASPVAGHRRRSSSPASPRRLPPQHAGQPAQEKMERRGRDR

SEQ ID NO: 41044 - protein, 803 aa, Oryza sativa
MAGIGTSPLPPPVAGDPHDGLGGDKVDEGLGGQLDSELQADMEMAEKLLNAAADGELETVKQLCAAGADVDHASETDETTALMLAAHEGHQAVVEYLCTHARATVNLAFESGWTALHYAVRGGHTALCAWLVREAGADPELTNRDGVSALAAAQSDATKADVAAAIVAAVAARKAALAAAAAAAAAAKAGSAAPTPKPRSAADSDAKASAPAAGVPVAAASVVPGTTTTVVAGSDSPTNADIKHAGATAAATAAAGAAGAAAGATQREQAMVAAGVAIGVKPVTVGIKAAAATAGGSGAGASGTATAATQAAAAKAGIAIGDQFAAIDEVLSQFRKLYVYTCQTYQPKTPIVPHPTLLQAIDGMIAKTKPLTTLSLRGDSPLWDNAVPRMTLPQLVPVFDILGGQFAHAPFTTIDLSNNNLPPPIVPALVSFLKHTATLTALNLSNNDIDSEQGIALSRALWTQDTLLSLSLRGNPLGDKANCAFAKMLKQNRTLTELDVGHTDAATVSLVRYAVALSRANTTLTSLNLDAPLLLSTTHGSGSDETTSTHFAKMLGANTTLRHLSLAQHRMRDFGADWMAQYLAKNGRLTALDLSKNEISFTGVAAPIKALAVRPLSTTIALHANSLTDGAGCTLRLRPLDEVDELLLAHANKPPHAHAHGAAAVMASPSSQQLLAGSGSSGGLKVLLNADDAKQSALAVKASPMASPGGGSGVAEWWRSQGLAPSDSKASMGSARSGGGIGGGGGKGDGKPKPKAGCYVSFESKLDRHRLVAVARNPALDSAGLMPSASSVFGPVAPASSSE

SEQ ID NO: 41045 - protein, 903 aa, Oryza sativa
MRREPEPFLFSHNSNDRRNRVLMRVGDSQWSKPLSFEAIGSETEVVIPSASKNEEIHVGLTVEDGLGKFKLSKVVKLTPRYLVRNSLTGPINLREAGAADFVTVEPGHRVPLHFLRVGATKQMTLAYPGINNKWSAPFNIEDVGSVHLRLAKAGQHQHLIKAEVLLEGPTIFISLSQEDGPWPFMLRNESDYTVQFMQATERSDEDGGGGKRVDEAVGKRYELKPRSKMKYAWDYPAATDKMIKLVINGRERNVNILEIGSLLPFKFASADGRGSRVASLDVRADGPTQTLVLSNYAEELSNFKLKRQNSTFSRSDTVSSVASRDAGFVAVDVDTNILTAFNVEFEGVGISLINQNVQELAYVSFRGLEMHYTESEVTTAVNVICKWIQIDNQLFGGLFPIVLYPTVIPKDGKDLEVHPTLQASVIMLKDESHGVTHIKYASVLLQEITAELDEDFLFALYEFSKFEGAAWQLEAEKETDFIEHPREVREPSGTQTASDDIYFEILHLQPLALNLSFMRTERVNADEKVSSRNPLIFFFNALTMALGNVNEAPVRLNALVIENVRLSSAVLQRRVVYHYSQGFLLQLYRVLGSADFLGNPVGLFNNVSSGVADIFYEPYQGLVMHGNKELGLGIARGASSFVKKTVFGLTDSVSKVTGSIGKGLAAATMDKEFQSRRRMSRFRNKPRHALYGITAGANSFFTSVASGFEGLALRPLEGAEQGGAGGFLKGVGKGLVGAITKPAVGVFDLASNVTEGMRNTTMVFDQNDIDRVRLPRYIASDGIVRPYSDREALGQTWLKNVDNGRLMKDSYVAHVDVGSTEGDAVIMLTVSRIVYIRTMRLKVMWEVALADLSSISLESQGIALVLRGGVSGPFVHLPDVSTRNWLFKQVSKVVQNYNTARQA

SEQ ID NO: 41046 - protein, 1153 aa, Oryza sativa
MSSVCAWSIDAQIRREVIHFLALGQGTSSDVTKNIPEKFTDLAAFERILSQVSIFRAPDGTHDFGIFELKDECYAEIQPFFFHYTRNQREKVEEVIRARQKKHLAQTAARQASTIKDEELPPLVPSPCLGQLRGTLFGRLPEVLSNDVLVSLLFRALDNTRALDTYAPDMLVDTALQIIMIGLVDATESFADKAATLPIARLPAKGDEAAAASSEATLVELLCQIELLEAFKPFKTKISWCLEQLLSHNATARGIVQAHFAATGRGGAAATAATNAKKPQSADEARRAAAKARQAAIMQKFSAQQKSLLNQFGSDDDDDDEGEVDAATSSVDAEARAPKKSWGSCTLCQENLATDKAFGSLAHIQPSRMMRMTPKQDAPSLQQALEAPLTMDRSSDDGKRVQGAPPMGRSGLPSGNGGRTRQGPAYGSFPQEDHRFGFYASTCGHLMHLHCFETYCRSVEQRHTQQIARNHPEELQRSEFICPLCKSLGNVILPVADATPAGHASSSNGGNAFVPFDSVVADDMPLQDWIRKINIDILKHSSKTNVADYQETEHGSGAFLPFFVEHSPSSLQVRLEMASIDRSTAQMIDRLMNVLKPMSQATKPAREKLQQHTILAPQGRKMYIPEEVVAYTIAMLEVSQRGMTPSPSTDCALPVEQRSVADALNDPTVDLLRSLLHCLRVASLTLNEGSRGPDIIRRGLLKRLLPHWGGDDAVRSPLLLRDPMTILIEAAVVAPEALPQCTALMYYVCLVQTVFGLAQPSIWPQVYGHMSNMFGPNSALRPGAGLKPGQIAKEDVDEARRIFPDVRWTVANIIGFVGYARGNITLGFDNLDDDTLAKMICSYTLPFLRRAAILRRVVGVTVAGGAKVGESTAGVGEYRRLLEQLQIPLPSDALPVRAEKQTPMASMVEGWIKHAYVPLASLFRPLPIQPAPLGNSLFGSQPPSLGHDRPSSAAAAVAGGSSSASLGGGRSGGGNSSLATSYLQAAETHPTLLLEHPHVYELARLPSDLATLLQDTRRRACKKCGNIPPEPALCLLCGEVVCLQSFCCQSEDDGERGECNQHMDLCGGSTGAFFKIKSNLVLLLYQGNGTFHFLSPYLDRHGEIDVGLRKGRPQKLHQQRYDELRKHIWAHGVANIVARKIEAAMDTGGWQTF

SEQ ID NO: 41047 - protein, 830 aa, Oryza sativa
MLAFGSQRVAFFKDGATHAKYLRAITSAQDWLPASAFDPSTKSSASAADGHLLKTPQQRAAVEPGLSDAKETYERLRILVSDQHLSDVLALSNRFPAATRGPFFSFMCATLAAWPIDVHDHVLNRILYSGTDTSVARDNKQQRHNGPTGTAIIREVWRGYVRGSSLARSLASAHNDTRAREILASLSSTSTSEDWPALVLVFELLSNVLLTLGDDEFYPSDNQFGGSNAANAAWLSRDEIVSISGLLRNVAFAMYWYEGKAPLVNLHDEDLTDARPHKRTPRVPGMRMTLLSLRSLVTKVLKQLHLRDSRRRFAPADHWLMVSHLDLNDFMRTVVLEEQQLSSEQHDESEQFGGISPSNADSSTSSSHIAAVAQDADADMRVGEDSDYGMDEDDDAQSRQPLSRLQQLRARGDTRSRHLTALNLAFLSPRLGILNNVPFMIPFDVRTQIFRQFVQIDAVKNGIFADRWQRRRAVKIRRSHVAQDGFAALAPLGAEIKKPLEIVFVDQFGNNEAGIDGGGLFKEFLTSLVREAFDTNRGLWKATGAQELYPNPHTYATSGDQLEWYGFLGRVIGKALYEGILVDAKFAGFFLSKMLGKQSFLDDLGSIDSLDKELYKGLISLKNYQGNVEELALNFTVTDEEFGVSLTRELVPGGANIPVTNLNRMEYIYRISHYRLSTQIQHQCAAFFTGLADIINPRWLRNFNHEELSILISGSDDPVDIDDLRKHTVLGGYHEKDLTVEHFWHVLEGFDQPMRKAFLKFVTSSPKPPLLGFSQLNPMFAIRKAGDDTSRLPTASTCVNMLKLPDYADEATCREKLLYAIQSEAGFDLS

SEQ ID NO: 41048 - protein, 895 aa, Oryza sativa
MSGFFRKVGDSDSESDISSSEEELSELESGDEQPKTTQPAAGRSPFLKGSDDDSDSDDDSDDSDEESLDSDDDSDDDGARADGKKAPTSRFMKGAADSDDSDSEEEVKKVVKSAKDKRIDDMQTIVHHIESAQKSGDWTSINKDFDNLMRSIERQRTLGEHIPAFFYKAISNLDTFLNESAAKEKDAKKKMKAPVAKAMNGMKQKLKKVIKENDDTIARYRSDPAAFDAAYDAANNAAAAPAADAETAIAKGKKERLAAALDADANDDFQTVGRGGRTETYTSEGLFKSLAAIMEARGKKSTDKTEQIRKLNDLSGVADSPYKKIRVILALVAARFDYNASATAYMPVEMWDSARKEINEILALLTNNRAYVVREETDDYDDEVERIPNQDGEKDTVAVRGSIISFVDRLDDEFTKSLQNIDPHTTEYVDRLCDEKKLYETIVLAQAYFEMQRESDALSRCTMRRLDHIYAKQDVIIRALESTLGDTAKSFASQLFPAPARVAEQDGPATLVRALCTYLYQARGAQAERPRTRAMPCHIYFHALHAEYHVARDMFLMSHLQDAIQLADVATQILYNRVVVQIGICAFRNGLIKESQVALQEIFATGRVKELLAQGLQKQNQFSTITPEQEKLERQRQLPFHMHINLELLECIYLISSMLLEVPNMALAGNDPELRKRVISRPFRRMLDYTDRQVFSGPPENTRDHIMQACKALQNGDCNACIELIADIKIWKLLPGSEAVKTMLAQRIQEVGLRTYLFSYSAYYESVSLAHLAATFDVQQKQVKAMVSKMIYNDELAASLDPKANVVSFHRLELTKVQQLAATLADKANSMLEQNERLLDAKLGEGKEQRSSGGDRERDGGQAGGRRERRGGASARGRGRGRGRAQQFQALGQKV

SEQ ID NO: 41049 - protein, 660 aa, Oryza sativa
MMDSKKIRAAPELRTGAMTSCPDVADIPDLLPKVLKFFKTSAGGAPINVLNVAVVDQGDFVDAEVRSKLAEYTNACSKAFASARIRRVTYLLCQPGMYPFFATFRPSEQGIWAEEKAIRNIEPALAYQLELDRVSKNFELTPVPVSSSTIHLYFARGIQNSADTRFFVRSLVRPGRVQGDMAAYLISESDRIVNDILNVIEVALGQPEYRTADASHIFMSFIYQLDVSLEDVQKAIAGFLERHGTRFFRLRITGAEIRMILSSPNGEPRPIRAFVTNETGLVVRYETYEEEVAADGSVVLRGIEPLGKEATLNGQSAHFSYTTKVALQSRRSRAHALQTTFVYDFIDVLGQAVRASWRKVAASKIPSEVIKSSVELVFDEQENLREVKRAPGMNNIGMVAWLVEVVTPEYPTGRKLVVIGNDVTIQAGSFGPVEDRFFAAASKLARELGVPRLYISANSGARIGLATEALDLFKVKFIGDDPAKGFEYIYLDDESLHAVQAKAPGSVVTKPTQAADGSVHNVISDIIGKPQDGLGVECLSGSGLIAGETSRARDQIFTATIVTGRSVGIGAYLARLGERVIQVEGSPLILTGYQALNKLLGREVYTSNLQLGGPQIMNKNGVSHLTAQDDLDAVKAFVNWMSYVPAQRGGPLPIMPTADT

SEQ ID NO: 41050 - protein, 889 aa, Oryza sativa
MSYQRPQDPYIHSNASQYDERYQQGYSQSYQQQPYQQGYSGGNASAAGYRDYPDHASGYQGSAYKESQEGLYANQGAGYGQGQQRNAATQAAATYSYAKPKRGVSKWIKFGIPLLLLIIAGAVVGGIFGARAAKNNGSSSGSGSSSSGSGSVGSGSSPNVQGAALTAAQQAAKNGGNNMLFYQGTDPYGNPAFVSANVDTSAAAYSGQAHNQSCSDSWSATNSLTNLRPHPRIMTTQAEWDCLPTKIANDAYLTVWNSTIFNNATNWASQPPVKYVFDGGPTGSGILDVSREVQQRVKAFAYAYKISNNASFKDRLYLELNTAAGNTATDFGQNGTHWNPDHFLDVAEMTSAFAMAYDWLYNDWSDDEKAMIRSAIVNYGLVPGQAQYQGAGWWRLPENGDGNWNCVCNGGLLTGALAIRGDGDNNQTSIADSIINSALTNMRSNCMSGAYDDGTWTETPNYWYFGTNAQARALSSLISATGTDQGLMAANPNWYKTSDFHMYVSGPGGLFAYGDNGPNKFATTANQLMLYSKLNGDARPALYQRDRADAAFDPLSMFWYEPTAKGAFWNGLPLDRYFDDTRGSWVSMRSSWTDPSAVFVGVKASNLTGHQTHGDLDAGDFVIDALGTRWAGEYGNGNYLSTDYFSNETQGSARWTYYRKATDGQNTLTINMQNQNVANCLPVNNYTSTGVAQTGDLSFKPATTDAVSFITDLSSCYSQAAGTVRRGIRMLNGRRQVLVQDEIGQSSSITDVKWRVQTNGTVSISSDGKTATLTQSSITDPNAGVVGKVSLGGTKTMKVQILSPSNAVFTATGPPATRIYGQAVYSAPPEDSDQVNTGVTALQIDLDGTSSGAQTLQVLWQPQWDSLSAADQATPKSVPLSQWSLTSHN

SEQ ID NO: 41051 - protein, 321 aa, Oryza sativa
MDRKTHEGYEEAAEAFEKALELGDLGKHEALAYNMRGTFRCLRGQQEDALADLDKSLELDPAMTQSYVKRASMHLERGARDQAAQDLDRAVEQNDQDPDIYYHRAQLHFIHSEFQEAAKDYQKSIDLDASFIFSHIQLGVTQYKMGSIASSMATFRRCVKNFDTVPDVYNYYGELLLDQGKYEEAVQKFDTAMEMEKQTKPLAMNVLPLINKALALFQQKAGFTEAEKLCEKALIIDPECDIAVATMAQLLLQQGKVVEALKYFERAAELARTPGEIVNALSYAEATRTQLEVQERYPQLADKLSGMGGAGGGGGAGFPGR

SEQ ID NO: 41052 - protein, 836 aa, Oryza sativa
MPMSRHGALALTTSFLLAAVAVFLPGHAAARQFSTVAISNSPDATVVCALVRPKDVPDDVPGAKLRCTSMPTGEVMSYPSADVPYNAIAAGTDFLCGLMAPNGGHAAMRWWSFSDEAAANRSRPVGRRLYWGPSLRALSAGGPHVCGLSDAHDPTCWEWPGLSLPKGLDFSRIALGRDFLCGVVKGNASAMTCFGGGMAPPAFAGAASIVAVAAGHRHACAVDDDGGMSCWGEGYPDMRPGDLPADMKSMALGRNTTCILDGDDMVRCWGVEVPEEYRRASFVSIEADGDTVCGVLTTNFSVVCWGNERFHGRHLIFNDTMPGACATVGNCSSSCGFVPGSAALCGNGGGEGGEQLVVCQPCKLPLNASRLVVGNGTSKNAAAPTDSGKNRKAVKVAVTAACVGVAAPVVAGLVLYLAVVRKRGGKKNATVQLGESSTLTLCRDLEGAVIMPAPEASPPPPPLGCEEFTVKELSRLTDGFAEERKIGSGSFGSVYRAKLPDGREVAIKRAERPRAASGGGRRRRRRYDAERAFRAELRLLSRANHRNLVQLLGFCEERGERILVFEFMPHGALHDHLHGRVDGHSPLFASWEARLRVALDAARGVEYLHCYAVPPIIHRDIKPSSILLDGEWTAKVSDFGLSLASSSSSSATATPPAACSTSSTAGTVGYIDPEYYRLQELTQRSDVYSFGVVLLELVTGRKAIHRQEGGSGSPRNVIEFAVPAVEAGGVGRIMDGRVPAPRGNEAEAVSRVARIASECVRPRGRARPVMSEVVAELEWAVTLCEESVDRSSAAAQQQNSSRHGGSDVSRSESDDPSPFHTREFAGVGHGRSNSAM

SEQ ID NO: 41053 - protein, 1246 aa, Oryza sativa
MVAAAAALVASSAASGSPPVPSAKDDSQAHALHRERDRKRRQLRAANVGVWSAGPAPPAQSLDSNLKKNTAYVKRAKQSIGHDARDQLLKDLPQLNLEKYLQELIQAVSEALTRCVTAKDCIAATEIISAFHARFGPTTFSEPLTTSLEHALAPPSKTLYQSATAEQKERDEAARVARQKPLLRVTAELALVDALGHTRDAPTGSDWLFSIIKALLATDKDHANVPLLISLLKGLGQTLLSPATSPTKDDDSLLANKASGALTIGDAVDMPAIAALDPASAPLVSPDMQAKFRKLFETYFQTLARRVVKEHQRLQDQDRKNHEAYIRSGEIFEDRQQNYERMTKSFERVRDWVRILSDLLGVDMPDLESSASATTAVGLGVNLESKSAFERADEEFASDQSPWEDQDSQKFYEDLLDLGDIVPPSILAQTTGISAASSANADRHDAGEDGANRAEEEKASTAASTPQLDADAGDETMNAGPAAQLATLMAKLPDMTNRSMIDSAAVDFAFIATKPARRKLVKHLASLPRNRIDLAPYYARLAATLSRYMPDIGAGLTALLEDEFRYLQRKKNADLTETRAKNARFISELTKFKVTPTHAILHCFKTCLEDFSGPNIEVVATLLEGCGRYLLRTEDTSVKMRSMLEMLRRKRAAANLDSRQLLLLNNAYYQCNPPKRKAIEQKSRSPMELYIRHLIYHLLAKKSVDTVVLQLRKLAWDDAIVHGWLKDAFTRAWRIRYSNIHLLAILVYDLDRFHPSFAVDVIDQVLENIRIGMEENIFKHNQRRVATACYLGELYNYRLVNSGIVFEQLWSMVTFGHAKGRPWPGQVAPLDAPDDYFRIRLICTLLDTCGVCFDRGSLRRKLDDFLVFLNFYVLCKQQPLPIDVDFTLTETLEALRPELRFKKTFGEAAAALEEMMAANRQLAPQAEAEAEEESDGNSSDTRRQGSRADAHEASATRGSEKRRRNQARNQAASDASDSDNSSDSGSSSSSGSDSSESASSSSSGDSDASDSDASDSGSSDVDDSDDDEAAAERHLQDQELAARREADDEFDRELARMMVESSAPSAATAQSSVGASTSQRPHAFFSRAALASSGAGYGHAHSHAHAHAHASGSSLSEIGLPIKKKAAEQADGGVEVEAGSHMKFSLLSKKGSKQVTHEVHVPATASIAINTRTKQLKEEAERRQLKQQILAYERSSESQQHSGLQSQGVLRRQQPQPQPQHHHREEPANRAASKGDDFKIWTSHGF

SEQ ID NO: 41054 - protein, 1309 aa, Oryza sativa
MASLDKLAIRGVRSFDDKSINIIQFFQPLTVIVGYNGSGKTTIIECLKYATTGDLPPNTKGGAFVHDPQMATSNEVKAQVRLRFYAANKVRMNCVRNLQVSRKKGGGLTMKTLEGLLQIADDDAKTGKRGTLSTKCSELDEEIPRLLGVSRSILENVIFCHQEDSNWPLAEPASLKKKFDDIFEATRYTKALDNIKSLRKDRTNQLKVDKAALEGLKVDKDRADNIKSKLTHLQADLAQKEAKLEDLNEEIRIKTVQNSKFYDEATRFREIVSRAETLEEKERLHKENMEALKATMTPIKDSDEDLQKRKQTFRAQLDQSHAKISTLQTRIAKREDELETHEQRHRKKLSDKGGLEAEKRAHVQAKEKRETAVKKISTELGIKGFAGDGLSDAQIRSFEDRVKEDVRKLDDELGRLREANAQKDDQLTTAWQNARAELRAKQNAREQLVDNVRKLREKIKRAQEELDGYALSDADVEAATRERENLAAKVTAAQKEFTDANYDEQIRRKNAEIREKDDLREERTAEINLLNRHAELRASLALKMQQAGSRRTNAQGLFDRHKASISQHVSSNVELSSVENELTRALSKLEKQASEVEAKNVVKNRQLQEVESTISFARKQLKSKEAAANELQQAITAILSPDFDSAEEAVKVCAEEIAAAKDEYASIDSLDSFLRRVLREAKGKGHCFACNRGVTPGEYEAIEKHVSSTLSTSNTTEKKKTLKADIDGWTERSAECQTALAKDAQLKAIRDNEMLDLRKTLDAKEAELKQVAAAAEEASAEVSKIQSQLKELQSLRRVGSDIARLLSEAGDLESEVRGLQSDLATTGSTQTGEQVQAEIDELASSIRVLKRELNVLQQDRETKRTLINSLERDAHRAEVAVITKQQEQAKKTAVQTHLGEMSADFDEHQKRIKSLEAEIETSNAPIRRAKEELGTFKAEAGEAENKLKKRADELEGWAKQIRELNAAVNAYLQQRGDKRLEECEEAINTLVEQIQAIHRDVKELTDKAAELQKELNQSQATERNILDNIRYRQLAKDVAQIEEEINSLDLEQAQRSRKHFADKYTEAKEEENKLNGEASHLSGELASLRSQIKGREAELRDEFKGVHQNYKRKLIEVKTSEMASNDLEKYAKALENAIMRYHAIKMEEINDIVRYLWQKTYQGTDIDTILIKSDNEGARGNRSYNYRVCMVKDTVEMDMRGRCSAGQKVLASIIIRLALAESFGSNCGILALDEPTTNLDKDNIEALARSLADLIKERAENSQLRLIVITHDEDFLTLLGQNDVLEYYWRVSRDVHQKSIIERERIRNT

SEQ ID NO: 41055 - protein, 909 aa, Oryza sativa
MSSEREPLLPTHARQARESVEQYGRQAARDAKATARQYGVDPDNLGEQARQMAPSRQTLARIAQMVGAFKAGKMPSQKQLNHFIEAIMSSPVLDERSVAGSTKLSQQGAKVIQDFKGILACIERIGESKNGDDKIQKFIFQTSQASINVTDQGGISASLPTAKSVGAEGLTSEAKQDVGKVLGEIQQIGQLLLTSKAFRDVLADVQFLLRDLTADAAATAAQKAGGAEGKLRVSDEERKKRGDAVEVRAPNKKDLESAKDAAKRGAKQAQDNLQDLAKRAAQWLDEKTPDDVKEEFLERVKQVIDSVERDPDFKRALNGIYGIANKWTDIVQDVAAKAKEQTDVDIDTPEAEANENLREAFQQLKSILETFAGRPLEPVEKSVSQLVEHAKKIFDDESSKEGKELREFVEDVKTFIDRALNEDGFIQTNRSNRMASDLYDRAQRLFNATGKEANKALSKLRGDFDATLDELSTFVHGLEEDAELRELAQRVEKLGSDLNFVDLQRVFNSGGQGVLNLLNDVRSQAGGLVRDTVEVLVPRLIYEIESIPFPRIEFVSREADVVIDNLSLTASRASFVPERVRIINRNDLTLDQRRSSFGSNFDACLYLEIEGLRVKAADVAYYINKKTGWVGWEDYGLLDLDLGGRDGTSFVVKLENADEDDAESFYKVKRVSVDMSSFQVKVRHTKHWFLNFFLMPFVRPMLRRVFQQLLEEQIRSWLQNQDRSLWAAQQRAKVINSYSKTAVKSGQGISTKAYLKAIFAPDSDAFEPYGRRTAQPRTEVGLAEGLQVQGPHDGFKLAIGASYSKQLLPGRGGPFRYAREQAERYKQIEELVRQGVRELREGASELREGAHEAVQQVRDGVKGLEGEASKAGSKAQKEAGKLSREARKQEREERLDSGWRSDVFDDIDL

SEQ ID NO: 41056 - protein, 855 aa, Oryza sativa
MSRFFAASDSSSEESSEEELYSNDEESEQENSDMDSDEDDSDDDDSSSDSEGGGANRFLKDADSDDSSEDEDTTKVLKSAKDKRFDELEATVRQIENAQKINDWAVISDQFDKLNRQVPQLMSLNDGKVPKLYVQAIADLETIVLETHEKQKVTPKKMNAVNTRGFNAVRQKVKKHNREFQKDIDLYRENKDEYMRETDEVEQAPTDKKKKKKSKIPQLGTETIEDATDDGFITVGAGGKAVQYTPEGILKHLRSIVEQRGRKNSDKLEHIRTLEKLFDVAVNDYQKIRVLLTLISTRFDLTSGTASHMHQEQWKLADQEFGKLLEILENTQEIVVIEGAEEWEDDEKLPTITPGEIFRIPGSVVSFVERLDDELTRSLQHIDPHTAEYVERLTDEALLYAQLVRALIYVENLKKNPSLDLPQDALNRVVMRRLEHVYFKPSQVVTIMEANSWKAIPASLDSTVTPRSNSNDTTSLVQILSTYLFQHSEGIIRARAMLCQIYFLALHDQYYKACDMMLMSHLQETISNFDVNTQILFNRALVQVGLCAFRAGLVYESQNSLQEICGSNRQKELLAQGLQMQRFSQISPEQERLERQRQPPFHMHINLELLECVYLTCSMLLEIPLLAQLGSSPDLRKRVISKTYRRLLEYHERQIFTGPPENTRDHVMQASKALSAGEWKKAAEFINSIKIWELISNSEKIKEMLSAQIQEEGLRTYLFTYAPFYDTLAVSTLASMFELSERKVSAIVSKMISHEELAAALDQVNSAIIFRKGVELSRLQTLALSLSDKASGLIESNEKTLEQRTQGTANAFERQGGRGGRGGGRGRGGGRGGGVPRGGRNQQFTGGALGRAIQA

SEQ ID NO: 41057 - protein, 1030 aa, Oryza sativa
MDPQTSYDAWSVQQAWQSANGDMVPIGAQGTQTFHAFQDAQQQQQQQQQQPPYNHYEQQQQQQQQQQVMTSHHLQQFNAEPISGAPQASSSYLAQPTTVDANMLRELQAMYPNAHPDMLMQAILHPSASASQPANFFPAATQQLSQVPHQHQPQWQGAAPVSQASYQPSSFALAPPAYNGAAQPPHDNYGDQSGHSLADALRFTPAASSTPAGSTTSLQATPASSEADASGEKKKPKLRQLKLTSLLGVAQSVSMEGQQPLPPTSSTPHPTTSGSPESSTEPRTPPLPPARVMAAKPASSSGASTDTAAAQPNAAKPLATADGVLWSKAKQPLGRLSVERDPTTSARQLIKILCEFDAEGRFRRPVSTGAEVRKSLVETLHAIATLEKGKGFSETGRKKFFGAWMASPAGRHILSTWLRQTVPPKKVIEGAPDLSRRYRDTLLPLLAILDYVPMRKAYLTDEAGLGKAITGVSLRAVDPGARKLAESLKIKWTKVIEAEDSTSTSSSKASPPAASTGSAAVKRKPSDAAGTSESSTKRYKTATSTTATAAGTAKTAKPASSSSASAKPGLSFFGADSMKKPVAASSKVSSGATGANRMSAGQSVMNFLGTLSGGNSGSNSSGNRAVGRPGKEAEGKAGTQEKKKVKKRVTWKEDSELVAVRLIEPADYGQDDAQHAELLEKGLEGVEHDEGDALRQSFSTMEAQTDWYEPREVEVPEMMQVVLGSESVEGPFQTRRHAELEEVVYAEGEAPTSPDESQLERPGTMSETPEELKGAESVEIPTPWMGEADVTGGEDYAYAEEAGMPEVKAEGSTSDAGAASGSGGGVPSQADIGALLSKVGPLMGGKASKAPSSEASASSAPAPAPAGLNFDINVLKSIVDRAKSSGPAASAVNAAMASQQVTTDGISSLLSSLSAKGHGVAARQVEESYPGEYNHDYVRTSSAAPQYGGGHQAYQQPPRYDYGNNGAAWSGPHSNQYGGGGYGGGGGSTAGAWQSKLHTKPCKFFAMGNCFRGDSCHFRHDAADTWGDQQ

SEQ ID NO: 41058 - protein, 1218 aa, Oryza sativa
MPVTSRRSSALPPPSPATSPRKRHPLAEETNLNMKQSRSQADLGPQQQQRKRIKRSPSQDAPPSSSPPSASQDAETRTPRQTRSQNGPSSSSPVKRRRTSPELTPNANGSPSRPRRSAANAHSASQTNGTRAPETDDELSDNDEEESLDAEQDDAPSAAADSAHAADADHRQDRSPDGYLPGAIRRIALSNFLTYDSVEFHVGPYLNLICGPNGTGKSSIACAIALGLGGAPALLGRASQLGSFVKRGETQGWIEIELQAAPGDTNPIIKRTLTTASNKSDWFLNRRASTKNAVLEAVAEFNIDVANLCSFLPQDKVHEFAKMTDAKRLVETEKAVGGERLVRWHAKLSAQGKQAAEIATKLKERQDEKAHLEQRNQALQEDVQRFEERKQIQERIERLEVMLAMADYNRTKRNVQELQQERDARRQQLAEIAQRGQPVRQKRTELGEKTTKLNLELGRLESVYASDDKKRRSLAKTVEELGGEIETKLTEVGMLNRKDEDRTRRLAELRREIAERSASLGDEPGAQDTAEVEAAMRAVRAKQDDCSTRCNDMQRQLQDVRVESQTIDRGMHNYREQLAQLDNVPQQRLEKIRSADEHVYRATMWLRENQHRFRKRVHEPVLLEIALKDQRYAAAVESCIPWVVQKSFVCQTREDYDTFTRELIDTQRLRITVAEVEGIALDSMRPDVPREQLAGLGFESYVIDLIDGPEDVLVHLCRQSHLHRMPITLNPNVDVERIERSGKFRRFIAGGENFTINVSRYGADVRQTVSRRIGPARSLVDAVDRERQRTLSTKIQELSDKKKQLEASTRALLKSDQTLKAEKARYDERLEELQRERRDKVGAQKQWQRERALIEARRRELRDKEREPSREEKRARLMKEVRALAQRRAHKAQDLCAQVVQMSKVGDRRHAASLSKWQWDACGVLIENALRDVHEAEREAASALEAAQAAHVRARREAADLRAHVQRLIDEAGDLVAGLDPNDDELLDTDRCSAELRAEQSKLDLAEGVRPEVIEQYRARQREIASLTDELEALRQLQTQTTARIASLRAKWEPLLRRLVGQVSRQFSRAFDSMGLAGELRIVEDVDFEKWKLEIMVKFRNAEELAPLSAQHQSGGERTLSTIMYIMSLLQLSRSPFTLVDEINQGMDPTAERVTHNHIVQLTCQERASQYFLITPKLLPDLAVHRRQKVLLVNNGVYAQKRFQLGPILEARRRATRA

SEQ ID NO: 41059 - protein, 497 aa, Oryza sativa
MHILSALTSVLALATSAVASSSHRLPLRAIQFAEDADILTPNHRVTAVSTFDLAFNVGAQRIRLSLEPNHDIFVDGGRITHLAADGSIDREEAIDRMQHKVFNGTASVKRGSRWDSVGWARVGIRQDGLEPLFEGTFTLNHDLHHIKLARNYRATRLAEDPEVNDAEERMVVSKDSDMGMAAQQDHAELRKRAGVTGQACESDSLGFNTHADHPVYAGMRARDMTSRASIPIERLFGRQVDGQMGSGGAGVNLVSTIGNTQGCPTTRKVALVGVAADCTYIQSFNRDKNQTQQNIIEQINSASELFESTFQISLGLANVVVAEPDCPASEQQSTPWNQACSDSVQIQDRLNLFSKWRGQQNDNYSHWTLLSTCNTGSAVGLAWLGQACVKGSQQNSGSNSETVAGANVVIKTSTEWQVIAHETGHTYGAVHDCTSQSCADANTVNSQQCCPLSSGTCDAGAQYIMNPSTAQGITKFSPCSIGNICSALNATASNPTA

SEQ ID NO: 41060 - protein, 313 aa, Oryza sativa
MVAPAMALLGAPSLRPGSLASIRVSALSAFGAPDVAAPARACFSTPNRSLVSTAATPAHNRSETAQHINAMQQIDEPSRPQQYKDVVLSSLPLTATPFDIRSLALGKIRNDLARIEFLYTKSMRPSGRAIASFSNAANARTFEEIVQGRILGGRQVQARLQSAERRDAFLQSYYASWSRHYQLPLDLIEYERGTLVLLRNIPQDTFEARLEERLAGRYDLRQQDRWRGKRTAYPGYFNDKKGYGGSHDVVLGGVLKLPKAHPDATTASFIVRCQSAFEANRLVRRWHNTYFAPATFDIQDTAGRYRVAASVLY

SEQ ID NO: 41061 - protein, 1052 aa, Oryza sativa
MPPKRYFEQDEPAAEGAAPAPTAATAPAAAADAIPSTKSKDKGKDRLNATLFVSRLPYTATTTDLQTLFSEIGPLKRAFVVTDQATKKSKGVGYVTFAIPEDAQTALDQLQEKSLDGGSRKIHITFADQKDPTGNKRIPVKADQDSLSSSKRPRTESSKPARQAGAFQEKDAHAVRTVILSGLSGCKPVPDSKQIYKRARKIGDVETVIYPHPSSPNPNDAAHVVFRTPNHAMTAVEKLHAHVFKGVQISAILKKRADNAARIAAHMRPETLAKREKMRQEVEKNSGKGTMPVLLSEIDKSSRLIIRNLPFDVNEADLRSIFLPFGPVYEITIPKVKAKQQPDEAKPDSNGKQKETASVKQDDSEDSADSDSSGDSDSDGEDAEESDEDAEDGSESDSEQDDEADDDDAKQNDSKSSSDSDDEAPADEADADVDSNKQASTSAKPATVPAAAKPAAVEKGRGFAFVWMVSRNDAARAIEAVNGSKIQHGAAERAAYKSTLGSRGRRAAKAALDHVRANAQPERTVAVDWALSKKDWEAKADESEPEQDDKVNDDDDADDADDASDAGSDASEEPAERPKLPAPEEGTTLFVRNLPYQATEEELRNLFRTFGPLRYAKITMDKATNRSKGTGFVCFWQAESADAALAQARIIERESGVSGSSSSSVANQKNPFAMPSVLTADPAAPLTASLNLHGRVLNVIPAVARDEASRLETSGRKEREKGDKRNTWLLREGVPFPNSDFAARLAPSEVEKRLQSFQVRKAQMGANPSLFVSKTRLAVRSLPLFVSDRMLKRLAIHAIKTFGSEVRAGEREDLDADEKADRTLSASAENRKRKPGERPTPVVQSKVVRQHDRVEALTGLGKSKGYGFLEMKSFNDALKVIRWANASKAVSKLFGEWWKDDLQQQVDRIATQVHSKTKTLEEKEGEEADALRAEIEELTTRKQRLRTKVSELEEGGASGDKERGGLLMIEFAIENVVTTKKRADKLKATKESAVRRQERMEAEEREAAVHAELAKREAQAARKIEADKNKPKGYAHGHVIGKKRKERRARRN

SEQ ID NO: 41062 - protein, 589 aa, Oryza sativa
MINTPLTEKLGLRVPLVQGGMQWVGTPALAAAVSNAGALGTLTALTQPSPEALRKAIRETKSLISEDIRKEREGKYGSFAVNITLLPSINPPDYVGYAKAALEEGVRIFETAGNNPGEVIKVVKAAGAYVIHKCTAVRHARSAERLGADMLSIDGFECAGHPGEDDIGGLVLMARAAEELKIPFIASGGIANGQGLASALALGAVGANMGTRFMCTKESEIHDNIKRAIVESDERNTTHIFRTLRNTARVFNDEPRDSNRSSSDQSTAGAVTVEPSTVEQPGHDPNKPPDPKRASQERETELQRQATKEGAVELLGTRDPDSYALQEEHQRKWNAWGLAKSYLNDEIDHTAANVPLAWQAFLTGIVDMLLYSRSQVWLGFQTGNMVQFSSNIAQFIIPGVERQPLLTLLRILSVIGFFLGSLVGFQLGRRIGHQKRSWLILSSVIQSAFLFSGAGILLSRPKNELPSFDWYPDVIVLVAFSMGMQSILAQKLVSPAFATTVAFTATLTQIASDPYLFHLVPSEKTRGRDRRMLAVLALCVGAGVGESLLHTSANLSGGIAISAGFKLVLALLWLVPEGKKSNTAKASKA

SEQ ID NO: 41063 - protein, 1018 aa, Oryza sativa
MAAAAASSSQSDAPAPMDTSYDDETRPGESQFPTLTPLSRDLELLSPVHAPNFSVDDFLLSRTKASDLNFILSDLRGYNEKLKDELYSIINEDYKDFVSLGSSLKAEAHRIARLGFTAPARSDASADHVPPQGLMAPVRDTLLASRSMLKSVQDDIASCMKRKEEAASHKARLELMLQLQDSIVRLEELLLIQRPHPQRNRRKSSLSARRPSVISAGSQPERRDSLASVAADSDDAFSDYAMSSEYDEDSDSDDRTQLTDALSNRPRRKGLRRSSVAKDVVHDEPTSASATRNRSDTVNGGASSLLGLPQRIARTSAEYSRLRFLHRRIDEEGLSQFTDALQDRIDHVCSVLRQDLRALLGVLLAPGSLLVHGQSSARTPGSPELRRSSRPSPGSARRASFLGTSTLAKPATIHEQCASELDSWSQVAEPTDESAGAESAYWQARLDEQRSWLEMALATLNTLTLVRAKGGQDGAGDVARRRNEAEEAVRDLFVSKWAARTIVESPSSNAETEETSGLPSTALAMFQEFNQRAQSALLPTSESDRLSTVYNAVLTFVGTMAWQVVDAAREVSLQSMHSTETPASAAREDAQCDVFVHVLWDEISARLLDDLGTMIFFVGQTDSFYTHYTLTRAFLDKLSALAPTEASRAALHAHPGWTAFRRRWQLPVYFQMRFREVVTQLEVGLADGRARAAEGEMMQATRATLDAVARVWSDGVHIHELSAREWRVTLQILSRYKTWVEEWSPVEAGVSNRPLDALRAGAATASADGSRSSMDRAASVEISRSATPQPAPDVSTQQQEDEQLALGAALVGDCLLLRTRIYALLDDTILLRISSCIEADPAGLEELRTDLVKVLDSETFDFIAGLVSGVGRLAFGTISPRVAAPLRLLRSFSTPAYRANTSSASAGVEVVQQLFAPLEAFLKLEAVRAIPDDIKRDWTEPILTYAFRSYTTTVETITKNQQSLIRLKKSQAPSSGLLGMFRGSIAADDNNDDERAQANKSALTAFQTKLQALDRSRL

SEQ ID NO: 41064 - protein, 1147 aa, Oryza sativa
MARDFRPKGAKSGTGRPAAAHAASASTNGTPKPTPTKPVTTSSAPAKSTPSKPTPTKKSSSSKKKDAFDSEDSADEDTLMREIQSFGGSREDLELISKANAKSKSDVNIDEAAFSTEVAAFLKQLQSDPTASEPAAAPATPTKKQKDAKPAAASASTTKPDSKKKNAPEAPAEKSQARKEKEAAKQKSKQTEAKTRQQPAAVAESTTAQRMGKGKKMVFDDDGVGKETKHKPSHTSRGPLRLEAVPQWISQSLPNLPASGSNDELGHDRITHLLDLGAELMRQEARACDDLTSSETSLNRAGGSIGTLTASDAQFVRSLLSSEGGGTLSDRISALTLLVQSSPVHNVKHMYTLLAMTRKKSREEASRATRALADWLASEGGLGSRKLRYFRDQPQLASASAALSSSDPSAAEAAKSHLLLWAFEDHLKKFYLQFLQVLEVQSHDTIAFTRKQATTQVYILLRDKPEQEQNLLRLLVNKLGDPERSVASKTSNHILELLTAHPAMKFIVVREIANLIMRPSAPAGGDDEGKVSNHTTHARYYGVLTLNQTVLTARDDATANHLILLYFELFEGILRQSERKEAAGIVDEQDTEEPKKKDKKRWKDQPRKGRGRKSKPAKTETREEPKLVKDAESKMVVAILTGVRRAFPFAKIEPAVFEKHLNTLFKILHTASFNVSIQALQLIFQLSVSDAHASSAVLASGAIGDRFYRVLYDSLLDARLAASSKQAMYLNLVFQALQADADAERVKAFVKRLCQILSLHQPSFVCGCLHLLGELFRRTPGLRAMLTEPEDDDDEHFHDVDSDADESPQTGINRTADAGGEKYDGRKRDPRFAHAGRTCLWDILPLTLHYHPSVSVHALQLVQGSTVSTNADLSLNTLSHFLDRFVYRNPKQTSGTRGASAMQPLPHARVGAGVTRSRTHALHENEFFNTETLWKQRADAVPADQLFFHRFFNLRSKQPSSSRAHLGDDALAASDDQVAKQEESELDSDDDADENEIWKVMKATMPGKEELEGMEDSDDEDDEFDYVDSDVEDGTDGDAADAAEDEEDDSDDDGPRVLPGMTFSDSDSGSPAANADWEDDMSDDGGNLFDEDDDDLVPFTDFDSRKRSLDEPEEAGKGKGKKRRKAVANLPTFASAEDYAHLLGDDE

SEQ ID NO: 41065 - protein, 1061 aa, Oryza sativa
MSSPSALRVVYPPSFQNSFWSYPSYRPGAQSLYAKLRAGLDENESILAFVAHRAELEYDHAEALATPPPAPSFPAPLFRQAAGILHEVLPIDNAGGSAAPRGFAANSSATSRAFRMIQAETNTAHANAHGKVARHLEKSILEPFGRWAADHRTRVTQSWEHVDATLARFERQKSEVDKLKHSYENKCRAADEAEDDARFAPIDEADLPSPPPSHASDSTLRPPAAAAAHSQRRSVSGDSTKSIDSHPDDTNDPDRLKRRETLRKQFGFTQRATSATHSPPAHAALDGVKLPPLPTETEGEAMDASAASAASLAPPAAHATSLKRSGTISALVSSAVDKMPAPLKAAVGGVVSAEPRHARLRRDADNAETVYEEAVRNLDRTRCQLEEVLFEHYGLTQRWEADRIRAVHSVLASYNHAVAAEIPILQQSSARSFQSSQGLDPSLELRALIRQARTGPFRPAIERFQPYYHDETSLGRKVGPHGVAHAWLVKNGGFGLDLSLVERLEYLERLEHQPSAPESDNSTQLATVPPVLAALLAALDRAYADEERWTALAKAFAAANAPAPADQKSENQSAEDKAADEPDAKLIGQEKRKIWILEVPLPITHRLRDALIAHLSPSLADLIYGGTNGTKAADAVESPANLIPEKLLDSYDAPVLAACIKLWLLELEHSLITEELWDQIDAIYRAAAGQEHEALAAATPVVGSSEEAPAAAKDGEPAATPKASAIKRPEVDEATKAKIRAGVLEDLRVVLNKLPRIHLACLDALFSHLHRLVASTHAAEADAVYANKLGLALGRALVRPRHESAYTLSSQIGTLVVYDLLHHYDDILPELVEKKRTEAAAAAAAASPNAKGAPADGQRRMPIRKRTKPIDQRISRSSIGSDLQQGARKLIQQMDERERSKVEPTPIVTSSDAVTAEAKRDDDIAAPTPLAERVLGASAAANEPAKEAETVSVVDDSAEQHKEQQSEEAAQAQSAAAAAAGAADERPLSNVARLSRQFNSASSTGSAGSKRSSLGGAGPRGPRAPSSRTPSTGVSDPADADPKRQSWARTSRPSDSLLEDD

SEQ ID NO: 41066 - protein, 1046 aa, Oryza sativa
MSEDGQDVRALRRGFEAVTQGTRRFGSRDEVLRFYAAPLARLFGRDQLGALQAFGSEASVEVDVLLVEAMQESLLVRLGVDWATALGSAWKTLLELTFFGSVAESCARQAGMVQQCALRTVSRVLATASGETLEQTVQLCVAARERISLRAMVAAVAAEPNPARARVAWTEALRLLGALPDRVANATKGDVPQALRGECWIDATLVRGLGDALQHANDKNEVELLRDVLVRLDRLGHLSRAADSSTTGFWPTLLRTTATKSTTTTQWAKLRRIAGSSLRRRLDTTLLQTLQHAAMRGLAGTLVAPTETGKPGTEGSAFLSSATHAVVAASAHVLGLFIPPDSPADSSDSDTDTEALHYVRTFNGTALSRVPQSPVLAWAWATYLLSAPARDRLDCLTAAFERWTDAARLARALVDEELFLSALIVCILASIAAGSQELEDALVAVAHSRAVLDGVSAHLAHADPLVRRTGMLVGELLSERTARPGSKTLSFGAAIWNGTGGGREEARVLRALYHAWSHHSDAIAARAATVKHDSVAVDTLLGPQQVVPVSTALVALGAERKKSDGPKTRRLPQRVDARDTRTRPLISVIGDSGDEAPLSVSPPRQGPLRMFSAPVRPHTPSETSSSSSDSDSDADGADQHEMHKLAADLAGVSTDDAAPLFASAAPSSSRTSAGVGDMDADREAHAPQFERRVRAPVYVSQLAPLLKTSSRASVRMGLRSAAALVTRKAPTRTFGGEVDENAVDLTLALAALHDNFGIRRFEQMRREALVEVACAAPVRVGGVLTEQVFGSQYSGVQRTAMLYALTEAAVRLSGKEQQGEAGHRAEAVAARVVSETRRVGEQRVPQLRRERNLRLDTSRSALVQEIRPGTSLGVGSDGQGWAAVAATFVFPLLNRYLAYQALPSRGSLFEPDSLALLFDTLGVLISLAPASVLRPLGPVLLEALGTLLISPSAGPETAAALSALAIFLHAHLELDGAASLLNDRTGVRMLKTLLPRVQMLFTQLNAHTGGTPAKVAARAATVLLQMDQLDQAQTQTIQNALGFIPT

SEQ ID NO: 41067 - protein, 882 aa, Oryza sativa
MEQCRQGKSAKRIRNFGKRIGSEGWARGSRPRTRLNHHNCPTLVMSDPTPSNPPAGNPPKPEAADDKDAATAILRQKKSPNRLFVEEATTDDNSVICISPAKMEELGLFRGDSTIVKGKKRRDSCFIVLSDESVEDGKVRLNKVARNNLRVKLGDLVSVHACHDIKYGKRIHVLPFDDSIEGLTGNIFDVYLKPYFLEAYRPVRKGDTFTVRGGMRAVEFKVIETDPAEFCIVAQDTVIHTEGDPVKREDEEANLADVGYDDIGGCRKQMAQIREMVELPLRHPQLFKSIGIKPPRGVLMYGPPGTGKTLMARAVANETRAFFFLINGPEIMSKMAGESESNLRKAFEEAEKNSPAIIYIDEIDSIAPKREKTNGEVERRVVSQLLTLMDGLKARSNIVVMAATNRPNSIDPALRRFGRFDREVDIAIPDPTGRLEILRIHTKNMKLAEDVDLEQIAAETHGYVGSDVAALCSEAAMQQIREKMDLIDLDEDTIDAEVLDSLGVTMENFRFALGVSNPSALRETVVEVPTTTWNDIGGLEKVKQELQETVSYPVEHPEKFLKYGMAPSKGVLFYGPPGTGKTLLAKAIANECQANFISIKGPELLTMWFGESEANVRDVFDKARAAAPCVMFFDELDAIAKARGSSSGDSGGAGDRVINQILTEMDGVSSRKNVFIIGATNRPDQIDPAILRPGRLDQLIYIPLPDEPSRLSILKATLKKSPIAADVDLTFLAKHTHGFSGADLAEICQRAAKLAIRESIEADIKRERERMATKEANAEGEVKMEEDATAAAEEEEDPVPEITRAHFEEAMRFARRSVSDGDIRRYELFAQNLQSARSFGTSFRFPEGQNPGQTGGAGGSGAGGSGGAAFGNDDAGDDDLYA

SEQ ID NO: 41068 - protein, 869 aa, Oryza sativa
MSRRARRPPQNPGRQYLRPARMLNRSIASVAAATAAGTSSLAGWSASTSRAAACSAALARQACMICCMPPPTHIAVLGRGFQTSALVARGGPPRGGSKSGGAARFGSGKGKDRRDRSGKPRFGDNRGKKRIEADFSIPEPPTAQHVARQLVDKIESLSGNPHFPAQLVVYGIKGDAARQVLQLYTPSKTPLADQELALKLFRTWSEEAQDEMMNIALLHDGGEVHRPVVFGYLPDAISSFTVEGEACLGRFCLSAFLDWMDSGYARVETSGNAGEISLARSQLMLLRSCMDLRLPAHQYPRARTMLRSIHLHVGPTNSGKTHGALVALSKARTGVFAGPLRLLAHEVWDRFNTGTISPGVAPRACNLVTGEEQRTVDALAGLVSCTVEMVSTSSSVDVGVIDEIQMIGDPQRGFAWTAAVLGLPAKELHLCGEASVIPLIEKLAEACGDHLTIHRYERLTPLSVADESLHNDLAQIERGDCIVAFSRSGIFALKREIEQKTGLRCAVAYGALPPETKAEQAKLFNEGKLDVMVASDAIGMGLNLRIKRVVFDTLTKWNGSEEVTLSASQIKQIAGRAGRYGTQSASTKPADLGGIVTTRHEHELEVLRAALASPLRPITRAAIRPAREALSQLSAMLPSAKPGGGLRALSQLYADVALLARIEAAHYFVADFSQQLAISPLVESASAGMLTVAERETFSNAPANMRDERVVAFLTSAVAQFSRGGLVRFDQAADALGMLEVEEQLVELMEQATEARRRATESANSTTPHSDPLPLVAYLGHNSGAGGGGSGAHPLINIATLLVVESLHRCFTLYLWLSFRFPLAFCYRAEVDRRKKRAEIAIDFVLEGIRFGRAKRLQALGRAPPPHKR

SEQ ID NO: 41069 - protein, 1596 aa, Oryza sativa
MKKPVKERYNAKARGSTVGGSSHKNKRSLRQREADAYDSNAQLIVPGSQDDLRRKEAEQQRRQLLESSGQDADAPMSSKKRKRLDAYIASRLKKEERVRIMSKLAQSSAEIDRTTLKSAATLGTGRAKTMEERIDTAGQKSDRAGKRRRRTMNGAIMQIDEDDDDADLDNMQNDVQDDEDEGNFTSPEDVEDDGEDHGPIGEVEEDPVRRARILAAASLFDKSKQPPASAATTSAASTTSAPVPGSAIAAARLGSALAKDASGNPIMPTMRKRAKKAKAARVNAATRLQQARDSDSSFDSSESEAESASRPAASASRPPPMVDADRMGPAPRASLWRKTQEKQAAQAALAAQAAQEASQANDVKGKGKAKAITSGPGWDQDDSDQDDADAPSQGSIDQDDEDELDEEVDDDDDDDDLGSEEPDTDDDEEAVFLEAMRLRGLLPSESSGNDAQASSSASTSKRVEQQGSDPSDSDDEDEDEQMVEATPAHDSDQSDDDEEASDDDESSEDDEDDDEEEDTEEYRSRRRGIGTTKRSSGFKDWARAALGIGGSASASTNATGTDAADASAPVDDDTAYNLEPVGGFKIKVGDLMPSDGVARGPLGRDEESVRSTSAFAAKHYAELEAALSPDIATDAPKPLTHVEVQRSEKLTASRLKLPVVAEEETIVRTIMQNPVTVLCGETGSGKTTQVPQFLYEAGFGSKNSLNPSMIGVTQPRRVAAVSMAQRVASELSLPADRVSHQIRYDATVSADTAIKFMTDGVLLRELAADFLLTKYSAIMVDEAHERSINTDVLIGVLSRIVRLREKRWLEGEKDARPLRLIIMSATLRVADFTENTTLFTTPPPAVNIDTRQHEVTLHFNRKTVQDYIGESVNKATKIHARLPPGGILIFLTGQQEITSVCRKLEARFGSRAIERKKRERELVQNRTGRRRNSIEDQDADADVDAKMKITARDADVEAVEVDLGVDRDLAADVDDGAADADPDALDTDDEADGSDDDALPDELKDDSDVPMHILPLYSLLPTDKQMRIFDAPPADARLVVVATNVAETSLTIPNIRYVIDCGRSKERKYDLTSGVQSYEVSWTSKASASQRAGRAGRTGPGHCYRLYSSAVYEEHFAQFSRPEILRTPVDGLVLSMKAMNIDNVANFPFPTPPDRVALRKAEQVLTHLGALSAPAVASVSVGKGLRKVQHAQVTELGRTMTLFPVAPRYAKMLAQGEQHGCLPYIVAMVAALSIGDPFIREQLLDEEYGDRRAPASSAAEEGDDYDRAFGTMDGDEELDAELRNVTNAELLDKERRKARRAKYFATMRKFEALGAGLSDTFRLLSVVGAYEYAGGSSAFCDKNFLRPKAMEEIHKLRAQLCSLISGTFPNLARGLADPKLTPPSEVQLKVIRQLLAAAYIDQVAVRADLISNEGVVAASVAHADERTDQMLFKLRTKGGGDRMQSTRGVPYKAMGVAGFAFVHPTSAFYHTTPPAWVVFGEVHRSQPRVAAGGEDAQKGTVWLKTLTKINPTWLTTLGRALCSFSKPVPVEGGVEGVKASVQAVKAGQAGTREVVVTSTYAVGSENDGLAGGLGWPLPALRAQQKLVDGRWILLLP

SEQ ID NO: 41070 - protein, 859 aa, Oryza sativa
MFRRPLTVAPRAGARLASTSSSSSASAQRRALPNRSVLVAVALAGGAAAAYSLSKPSLYADAPDTVPGDTRPHPLWSPPSRAQMLGALRQSSAKSLRPNASRGNNDNASLLPLAKDSRSSSPSPAAHEQSGGAAASRSGDEDDEGFDILVVGGGATGTGVAVDAATRGLSVAMVERDDLGAGTSSKSTKLVHGGVRYLQKAVFELDYEQYKMVREALHERKTFLKIAPYLSDHLPIMLPVYKWWQIPYFWAGTKMYDILAGSENMESSYVLGKGKALEAFPMLKSSGLAGAVVYCDGQHNDTRMNVALAMTAVHHGAVVANHTEVVAIHKKPVEGKADQICGARVRDMLTGDEWDVKCKCLINATGPFSDTLRKLDAPTAQEIVAASSGVHITLPGYFSPRDMGLIDPQTSDGRVIFFLPWQGNTIAGTTDTAAPVEAHPRPKEEEIQWILDEVRNYLSPDIKVRRGDVLSAWSGLRPLVKDPAATDTQSLVRNHMINASESGLLTIAGGKWTTYREMAEQTVDRAIEEFKLKPQRGCVTKNTRLLGSHGWTKTMYVKLLQRFGLETDVARHLSNTYGDRAWSVCSIAEPTGQRWPVHGKRIDQLYPYIEAEIRYACRSEYAATAQDFIARRTRLSFLNAEATVDALPRVIDVMGEELGWDEKRKKQEWAESVDFMASMGLQPARVDQLKATSLDQMRQQREKQQRALKVSSLGAASLDEKDALAISARASFSSEEMEELRAKFKLLDVNKDGKLDSKDLKEVLQQIGYADVDDSTLRGIVSEVDFTKTGALHFEDFLDVFAALKDARLENAFTHILSEMDSRGLQPPSHDPVGPAAKEKSERRDASRTIPVEKSGGGW

SEQ ID NO: 41071 - protein, 724 aa, Oryza sativa
MGTDIGPVSSANLFLAALATTNTTLQGQITAKSGRDLQNTGILFTNFLRGKTQILQVKGVSVVTQANGNQPVNWLSAAFRTLTLNVALPGQIYQIIFSITLPDLTVFVNGNPADSYTVPSSSNSTIATFANPFRFSLQPIQALSHINLSYAGGNTAYLDLPLSNVQAGTSRGPQDFQALQLMWRRQNIVAVDRPNFQAFFAQLTDTPRGQFDLRGGTDVVAKTVIGNIPIGGIPFNVTTTLAGINSFNGVATLSQVTVSSGTSAFLWVPLTVALTNPSNLTVFTNEVFLPVIFSGTFVGRAEIPVLGLIPGDNRVQSYFYYAPVNANDTTAQRLLQQYVQPDEANGGKQISQLTIDGSQSPVGQGNLTPYDSLRPALAGVKLTTQLEGIASRIVTHINVYLTAQTLLTGLAGLLNPAASPPIVEIDLTAINQLNTNLYLVALQTSAKRTGETPRDATNPDARVSYTFPNGGFEIPVGGAEVTSPRVPNVVLPKGLIASLPVIGQNLDIYNNLPVRIGPSVGDSYLVPGLNYNEFNIPTDYALSLGGVNIPLGPVEDILGLLNQIAAAGVDLTQILGSTLTQLAQGNVIGGLSTAAQGVLCEITKLTPGLGLSILNPILNQAKCPNAPGSSSSAVSASSTANPVAPLAAGASSAVSSVTEAAAGAVSTLTSAGGGVVSLVTQALGGGSASPAAATASSSSSGGGGLLGLGTLIRRAEPTASPHYL

SEQ ID NO: 41072 - protein, 1559 aa, Oryza sativa
MRGFKFVQIPTTLLAMVDSAVGGKTAIDHPLGRNLIGSFHQPNYVFIDAAWLKTLPPREFSNGMAEVVKTAAIWDPIDFAKLESSAPAIRSAVLGPFAADAPLDQGRTLDTRTESQSLLLDVIRGSVGVKAHIVTIDEKETGLRNLVNFGHTIGHAIEAVLTPEMLHGECVSIGMILEAEVARYMHGLSQVAIGRLTRCLKEYDLPVSLSDSRVTRLPKSLNVTVDRLLDIMKVDKKNSGSNKKIVLLSSIGDTVEDMASTVSDDIIRRVLSLGATVTPILEQPNNAKVTLSTPGSKSISNRALVLAALAGNTCRLRNMLHSDDTQVMMAGLTDLHAARFEFEDGGETIVVHGNNGDLRRPANNKHIYLQNAGTAARFMATVVTLVGNDGTQDPVVITGNKRMKERPIGALVDALRSNGTSIDYLEGQGCLPLAVKGTASGFKGGKIQLSATISSQYVSSILLCAPYAAEEVLLELVGGQVISQLYIDMTIAMMATFGIKVERLADPATGRLSNTYRIPKGRYVSPAVYDIESDASSATYPLAIAAITGTECTVPNIGSASLQGDARFAKDVLEPMGCTVVQTATSTTVVGPKLGNLRQIGLVDMEPMTDAFLTASVLLAVAAQPPANGSTSTARPSTRITGIANQRVKECNRIRAMMDELAKFGVDTKEHEDGLEIFGIDYRQLHPDVRVHCYDDHRVAMAFSVLASLAPGTILEEKRCVEKTWPNWWDDLERKLGIRAHGVDPECSPSLCISPSHFSKASVAKPSANGKQPASLAELAGGRTLLPRKYSKDATIICIGMRASGKTFLGAIGAAALGRTFLDADVVFNEKLGVKDGLGDYVKQHGWPAFRQKELEVLEELLHRHPTGALISLGGGVVETEACRNILADYAKSRGPVVYIVRDTDAIVNFLSTSDRPAYGEPIMDVFRRRDPWFRECSSFELVSYSEGELLAVQPSAINVPDPSFTIQKRFGLESEVARFFKFVTGQDTNQVNDLVVDSRNAGRRTYFLSLTFPDVVPKLELIGSMESGADALEFRADLLNASGEPVTSPQLPDVEYVKSQLAALRHRTSLPIVFTVRTHSQGGMFPDGYQKEYFELISVALRHCCEYVDLELGWDDDALAAVVAAKGSSQIIGSFHDWSGKLDWESDATAKIYERACRFGDIAKIIGKANTMDDNYSLERFRTKVSASATKPLLAVNMGAAGQFSRIVNPVFTPITHETMPFKAAPGQLSFREVQNALTLIGKTEPQQFALFGNPIGHSLSPLLHNTGFAALGLPHHYQLLQTREVGETLDAFVHAPNFGGASVTIPHKIAIIRLLDRVTDEAKAIGAVNTVIPVRDAMGNVTSLVGDNTDWIATETLARRSLRTVHLANPKLTGLVIGAGGSARAAIFALYRLGVKRILLYNRTYANAESLVRVLPVEWNVEVLSSLDEIAALAPEEAPSVVVSNIPAEGTTLDSSAKGLIYLPPSILRNPAGGVAIDMSYKPYSTSLLQLAQQVNTQTELAIGTNTTKAPSRKLWSTCPGITILLEQGCHQFKRWTGREAPRAQIEHAAWEEYLQR

SEQ ID NO: 41073 - protein, 396 aa, Oryza sativa
MFADPSGQSSGSRSAGLTLNLSSNNPFRNRAASPNSIGSNQFSPPPPHSPFDDPPPRPTSRNPFLDPNNNTNSGNSNSFPAQQPRVKSPGSMSSTNEKSATAFAEDLFNSLSLEDKAAQKTPSLQPSNRPPPPPSRPSRGENGPPPRGRGPPPRGAPHRPTRSQEEAQRAARTHGVSGSLGGERMFNSSDKRPERRPERRPRRNSDTSIIEKPMTEEEKKAREMRRRERERRHREGKDKDKPKGKRLDLIDQLDATSIYGTGLFHHDGPFDALNPHRNRGGTRRAPMEAFPEGSLNNSLGGSGPINTRPDHATFMGNHDDEGFREWSGAGKDRNGYVAPEAKAEGGFFDPTARGTMLHGDESMGLGTSTFLEGAPAARADIQRRQAELAAQEQGGL

SEQ ID NO: 41074 - protein, 633 aa, Oryza sativa
MAEVSKLRAILTLCKNLVLAALLYAAIYGVITFINDPSVAAKGKIGIPTFLDKAGPTELIETTKAGVKVKFAGTTKTVTINPHANVFNRPITAVKNKDDYLGPRPHVDTEADIDMLIEECRGTYAGIEKMRRPFDCLKFFAEGEDRYYSLPEPADRASASDPRKADFIDADGHGKTLENYTPIKDAIAANGSNIGTCPGPIIPFHTYWTGPATWRVEAFIKSYLYTQNLACSRLWLWLDTDHNPNAVENMLNKDALFARFIPLVDRGDIVVKGWKFPSRIPLATDKEDKNGFDYYSKPGAVNAKGEKDVAENIIEDKTGQQWLVLTQKQMTFLPVAVSDAVRFIVLHIYGGAYFDMDVLMLRDMRPLLLPKEHSWAERWAAHPHPGDYNTAIMSLSANSSLSSYLLYGGIRMGVNFHPRVLGRMAWKDGRDQEFKMFETAAFDPIWTEFNWDREGRCTVPCIRDYSAVFKGKIGGVKDEWESYDGPQLDRIDLKDAQRKELRTAGDALAKRGEENVPASAALPTPNHGDKEHPDSFQATLDEEAELRKAGVITDYVLAEDKFPPNNRTLENFFRGAWTYHIHNQWMKHPEPSSWISVLEHAHDGFIAGKRTNAYGEKWTGPSIMPYNYWPEYV

SEQ ID NO: 41075 - protein, 1183 aa, Oryza sativa
MSVKNAHDPFATPLETLHHDPLAETAGLKADYDKRAYGEANPGLVGTLEKDDIANRPIDAVEEVPTTSVRKWWVRLTWFTTWWIPSFALAKCGGMKRPDVQMAWREKFTICAIIFWLCAIILFYIIGFGRLLCPDYDKAWNESQLSQHAGQDDYYAAIRGTVYDFTKFYKGDHSDITNLQTSSDLMLQLAGQDLTEYFPVPLTVGCQSLVSDTSLALQPTANNTPAISQAVHTSGPLQSDASSKLHDIEWYPERFLPFTKKLKKGYYVYSKKSIEDQGQYRNWAVVNSKVYDISDYLNTLNVYQTNAAYDFLDSSLVALFKSQAGQDITAGFTEVMAGFNTTYRGATQACLDNVFYVGKTDFRNTARCEVQNYLLLGFSVLLVATVLAKFIAALQLGTKRTPEQQDKFVICQVPCYTESEDKLRKTIDSLAGLEYDDKRKLLFLICDGMIVGSGNDRSTPRIVLDILGVDPKIDPEPLMFKSVAEGSKQLNYAKVYSGLYEFEGHVVPYIVVVKVGRPSERSRPGNRGKRDSQILLMHYLNRVHFDAPMFPLELEMYHQMKNVIGIDPAFYEYILMVDADTRVEADGLNRLVANCADDSRIIAICGETTLDNAEGSWWTMIQVYEYYISHHLAKAFESLFGSVTCLPGCFSLYRIRSSDKGRPLFISNRIIDDYSENRVDTLHKKNLLHLGEDRYLTTLVLKNFPAFRTKFVADAKALTSAPERFGVLLSQRRRWINSTVHNLAELVLMPELCGFCLFSMRFIVFIDLLGTVILPATAVYLVYLIITVATRTAAIPYISIAMIAAVYGLQAILFLLKRQWQYIGWLIIYILAYPVFSFFLPIYSFWHMDDFSWGNTRIVVGEKGNKKIVAGTDDEPYDDTMIPVKRFSEYQREVWEEGAAPSVRSGMTGASGPFGNSQAILHSGPPSLYKAGSAYAGSAAGSEYGQPLGGGDYYQNTNVLARPAHSRQASGAALSQMGGMGGMGGGSQVFAGTPSMYGMPGMGSMYGMPSSSASMYGMPGMVNPTASMYGMPPMMPNPLAMTHSPAGSDIGLTMPLSQQNTGSNIWAQQQQPQQPQQPQSPQSPQQQQEMRPVTTYSTLNAANPFAAAHVPRALPVNEASDPTDEEIRAAVQTYLASQASLMSVTKRSVREALVAAFPNAELSSKKQMINKAIDATLSGGAQA

SEQ ID NO: 41076 - protein, 978 aa, Oryza sativa
MRVSEVEVGEVVNATIIKLGLPNAIFLQLQGHVDGVVFANHFADVKLTQPEKRFKPGLQVKARVLDVDPSRNRIVLTCKKSLVKSDLPIVGSMQDARVGVVTHATVFRVQVNSIIVNLFGGLKALIPGREASEASFEDVKASFTEGKVVKMRITEVDYENQRLVGSIKQASPEFLAKLNVDAVEVGEKVVGKVAAVHKEVVVLSLVPSGVRALLSLSVLAAMRGTSAEQLLESLEEDQEIDNLVVSVKNPEKGLVIVADKVRSSKTARDANGSSSTSAQVEQGAVVKGRVIQKNEKYLDCVVALGTATRATLHITDLADDYTSGVSLPSPGDNVDCFVVSLKANGKSGVVSTRASRISPSDAEVTDAEITAITELTKGQKVRGFVKAITNVGVFVSLGRKLDARVQVRELFDEFVRDWKKRFTVGQVVSGTIMDVNANQNEIEMSLKSTPGSIKPRAERAQERAEADGTKRPKRLNDFKAGDKVKGFIKNIIDFGVFVQIEGTNVSGLAHMNELSDGKADEALKAFRVGDKVRVIVLRINEEKRKISFGLKPSYFDAADFEDSSDEDEDDEDEEEEMDEDDVADIGSDAEDDASDSEDDDEADVIEMDEDSDSEADAAPSKSKTSKVPSLALSGGFSWSAGAGDDDAADELDSSDSDSDSDSDSESKAAALKKEKAKARNSRKGAALEEDLTADLATKAPESSSDFERLLLGSPNSSFLWIQFMSFALQLSDVDKAREIARRALKVINYREEQERMNVWIALLNLENTYGSDETLEATFKEAVQANDGFTMYLKMVNILEAADKNDVAEEMFVKAKAKYSTTPDFWIEYARYLLRTGQADAARALLPRAMQALDKRDHTSTITRFAINEFKLGDAERGRTIFEGLVDSYPKRLDLWWQYLDQESRLDDNQNQVRNLFERTLTLKLTAKKGKSLLKKWLEYEKTHGDAKSQNAVLAKAKQFVDEIARKNQADDQDEDDE

SEQ ID NO: 41077 - protein, 934 aa, Oryza sativa
MLPNNAFHMQPHMAQQQQSQQQQQQQHPGAMQNAANFAMQPSVYAQQQSQQMQPPPSHQQQLQQHQLQQQHHQHQMQQQLQHQQQQQQQHQQHLAQHHQQQPNHPHQHQPQPSVVYAGGPPSAASVNQPVHMANPSAGSSAYHPTMQQHQAQMARIAQASQPQLGNPQQQQQRPPQGSALTPQQHQHQLQHQQQMQLMQQQQQHQMQTPQQQQHAAQHQHQQVMLHQQQQQQQQQQQQQRQQQQQQQLHHPHQHPAQPQTPQPQQPQQQHQPQQHMPSHSQVTLQSHPQAQQAQQAQQQQAQQQQASLAAPSLHRQNSLPPSAQGHHSNNNSQPTTANNSPLPSALAHRAAQPGPHRTPTPISHAAHPMQSTASAASAPPNAASSMPSPQVNAPMPLRQASVPLNHPGPPTPTHTRPPSAAPTPALQSANPPASAMPMPRPNSTSPNASQMLHKAAAQAFATPVPAGANGAVSMGSSNVDSMAGAPGPNPHLQSHFPPGAGVLRLLQYSEALGSGANRSDIDYWQTFVNEFFVPTGVYRLILWNATSREQKGFEIPTCVLPRFMLTNYVSGLRSSQLQLETPREYQTGWPPVKPLPPLPASHKFVNSFPSANVTHHVDTEQATFVSSFESGWQVQMSGRLRASFVPWALEQPGEPGKMDVQLRLESLDFTVHAHAGYLPRVAIQMSKVDHPLPSSLVASIRSTSDKAGSSLPNGTKKGQARGTAARKEEAKDDSNRGDEGAPAIKLEEGTGTSSDDDAKSQSGFSVAVERTFVPDYPVNEYGISLRAMRCLEITESVCQLRDLIDMSMRDKLGPIDALRKFAGQYRDMQSGRATAQVGAAGGALGDANGNGNGNAASAQQQQQQPAVNSAATPGPPPMGRSPSAHGRPLENGTGSNHASPVVANGVTSLKRKGKTAPSPSPKLAATANPAKRQR

SEQ ID NO: 41078 - protein, 1034 aa, Oryza sativa
MASNGNTRGASAQRGASNSGFRGAGNNHAGGRGGANAASRGGASAGGPQPSRWGNGPPANTGASAPHAQSRNVPGARPAPDNSAKAANQRTAAPPSQSTTNQQSSASTASAPASAQGDSQKLMHDRMMFLLVTLIGNPVTVTVKGGSQYFGIFSAANTEGGELGVALASAQQIPPADAKDAQPQLGALKSSLLINAKDLESIQAAEVRVQDQAKEMREAREKEAFRTDTEISKAFDPLGSGRALQKWSDDPDLADLDDHSSKLPAWASPSDAKASGAGGLEDSNSNKPWDQFAANEARFGIKSNYEENLYTTKLDRTGKDFRDREREADRIAREIMGQATNNPHMAEERGHADDSGVNEEDKYGAVVRNPNAYVPPALRNKSGAGAATAAAKKPSPAAPPAAAPAKSNGAAPPAPAAPADVVSAAPAPLATNLPTVNVKVPSPSIPQEPTSKDAAGKKASIDAANPLMGDFRQFVSSERERLEKKKAALAKKEKDTRLADLKSWASSFKLKTPMPSDVADMVQKDKPDAASDKPRDPSLQKSLSPTPSHSAAVAAAKADASRSSATSRAAQASSSNVVSPTGGSGSAEASRDAHKLAESKALLQKMTIPKIPPFNPDKFKARQAAAAAGSGGEADDAAKAPAKPEGGMPSSMSTSSFKLSAKASSFKPFNPNAATFTPGGASFTPAAPPSNAAAAASPAPAAAAGPSLSARPSLTSTPPTASTSAAAPANPFFGNRIIKKSNTPLHIRDDFNPFKVSKVPDAKAVGPMWAFSGKPYRQHFVVAPPGALMDDGPGLYVAGPGGMMQPGMHPGGQTPQHVPQPMHPGQMSQPGPGPAGPGPVPAPVPGPGPTQGPGPPQQPFGMVYQPYAGAPYQYPGGQPPAQGMQGRQPGMMQPMQMAPNMQGAPMPYGGVPQQFMGQMPFSPPMHQHGAPQNMYSPQMGNVPPAGQAQFMPMPPPGAGGPRPPPPHMKGQPHPPGAQPHMYYPGQPGANMPYGAAPQFGGQPPHAGPQTQGGAAPRAGPGESGPASSAASSTA

SEQ ID NO: 41079 - protein, 1180 aa, Oryza sativa
MPKTISCPHAGCDYLFSKPVHLRRHLLSHSDEAVWKCPDCDQEFKRIDSFQRHKKRIHPDQPNLAAVRIGGDADADSSAKSDDEADDQIDDLDISMRDDDAKPIISVKRGATSPLSRGATASASATSHQMSSYNTPSALSTQRSSGSTYSSPSSSRHHGLATATEPSASMYTRAHHYHPYQRSDSAPHAAQSNNGDSSAVSHSQWPSQPAQSSMYDSNNAAASSSFSFYPNLYGAPISYNGYAAASSSSTGADALAVANTYGSAASGDASQTAAPLSIASLTAPSPSWGSSNSDTEAQTFFDDILQSILMDSISTFVPHETVGASDLHNLTGAAMTQDAFGFGDAGSAGQVMPSAQNSLQVQQPGQQTQHQTQPPSAVPQEDQHQQQQEPVQQGQNQGQCAQPAEVQSATATSTSQQQQPPQPLVNLVPFATFTESAHNSGRSTPATPRHAHAGMDDADEMTRSVEKVGDQAATNIGARTRDLVLHGVNIPKKPPRLTAASLFSAATRHTRSMLPLLPSYWLLDHRRLAAERPYVFVSLLALGTLWQPRADVKAYGAELWQLIFRSIWAGAVFYLDQPQLMREATAVMAYTHLYAFMCRDENIRRKSIHSTYTGSSLIREYGWRQGVWFLVGPWEESLQRLLGANIQMALVELEVLTRDQSTNRLSAEQKRLLDRLHGVWKQWSDAEEVNRNMICHGITESHHSEFLTSHGQMRSMGRITCQALVPSADDVWDAKTAIEWARLVLEHKSRRENHQRPLLAGKRQLGPILDALWDVDAPSPATAKRRDSGESGELDSLEAKRELQRMMCFTIKEHFALLTLLEGLHLLWIARYMPSFRTGTSYAADFSPSQPTFAPGIESVFCIKGGTAYHHLNVLDNEMMLAALSRWMRLCHQSYLPNPVANGTGFSQPISSDGPSAAADKSADAGVPAKPRVQSIGPINDRFQLHFRFHVVQLSVLFNAHHVVHALVSSCGNEEANGVGQGAKAAAVRPGMQTAVPLRCESCTDPDMCPYRNARLQRWAALHAGAVIGNFMSMPRLSNVTPTILEGLGQAFGILVILCRLQRPLAQRRRTMCRCDAEVREGSVELISDQCLHLDAERPSPGEGVKEKASARFESSSDCWLQHGTLDEGATLLGQPIQEWAFVLQDMGNELKSVAGTWQTAEEFLAVSQKMLNSFTFYVE

SEQ ID NO: 41080 - protein, 1045 aa, Oryza sativa
MSRMSSSHSLSKLAKAAADPVSRTASPAENGVLVEPPTPSRSPSPCPTDQEGPRDGLVSRQTPSPAPSSLASHAMESGQSQKALERAFADTMPKALGPYELVIKERMMGCYMAVYVWRGCKDRVRGASRSHVKSGLLAGRVGNKGGVGISLKLGTTRLLFVNAHLAAHEDKVALRLANVAKIKAALKVDSFLPPSDPRSKLEDITEQFDHTFWFGDLNFRIDISRQHADWLMMNKKYDQALAFDQLGKVLKDGDAFRGFKEASINFPPTYKYDVLKTLKIKRNKTLTSIRSGVDIPGAGNLAGTTKPTGLDLAGTPIGEVIPEEGAIGSEAPGRLGGDDTDDASFSCIAPGEPEPCSSQDESARTIPIAGRPDRIEAAMETVDLQDPDRSDEDRFSIASSSAFGSVASSSGFARAFKHEEARMSQGVDPALVRERELELEQQKQLAENTSAAQGPRFFSQGAAIKAKFKIMDIVRNAANSNLKGKLGGAASADGQPGGKKKWLNVLTESPRKSAMPASFPSDNTSIVDSVLSMPSPTTEYSASFTDHNDLQRGGARRGSLLSNDGQLSSVGHGEIGTPRRGSSGDVQTPSSEHSVAFTGALSRRSSAQLARTSAQALAAKAQREAKYPHLTGATAEQIDFLEAQPYDTSAKQRVPSWCDRVLFRSTVPLDDDDADESGDASAKADAHEARLGSRVGSALSNALITPLRQAAERRQQLHAQRSMSSGLIAAVAGSTTIAFAQDHKVPAEASLVDPAARKASMARRDCSNSVKEAAAPLESSPRAETRTLAGVERTRPPHLLQRFLHPGRRRHQAKALSPSLTLSELVHEPGAGASWAAKNSSAELLPTSASLGLGLGAGLGLAGLEHKALSSVDLPSQVEERDRRFGGVPKRVASPALAPGEVQARVVIPPRHSSSAASSPMVHAAAIQPPVRSTSATHMGTGADTSADASRGGWMDSLSSHLPAFLAPAFSALRSHRHGSTASIDATPAPAADDTVADAEADRLVGPRRGTIECLLYKALDDREMRVLEGRSDHRPVIFVGAIGI

SEQ ID NO: 41081 - protein, 270 aa, Oryza sativa
MTADTVTTTTAAVAEHPATSLSPSSPHPQLHPRRRHHHRLHNHGRRRRCHRHRLRRPPLRRHPPPPRSQHPPRRRRHVLLRQRQPTMPLPTNCHCRSMPTPQSLPHPPVTARAVSATAAAPSTGVASLTAAISVVAIAAVGVASRRLPPQSPPPLLPAAVAAATSRIATASTPRSGGPRCRHRQDERRRARTAIAVAAVASCRPPPQSPPPLSPAAVGIHRRRCHRPRCNHRHPQIWRTSPSTPSARASTRPTPDAAAVTFSPRRQPPLP

SEQ ID NO: 41082 - protein, 448 aa, Oryza sativa
MPIVMRSSSKHNDEVLDAERLRQIARRKEQNRNAQRRLRERKEEYTMQLEAQLTDLHRRAQSQEEESQFLREALARMRADNIKLVEQISLIHPAVPSTQTTHPLPQRAPVDLGVDLFAPNAPLDRGRNRSQSVTATAMQNLGLGPAPAPWSLTSSQHPLHATHPVFASTIAPGSTHRVPLASNTSMAGAPPFASGLALPSMTDSADDSMPRSEDASRRSSFTPLSHRRSSTLLSPFDVRGNLSRHGSDMTELTVPPDHSDSENGGSSRKIQRAYHASNLVSAPTAPSSSTLASAAIASSEGTAGAAASSDKMDVGTSSAAPDSDEVMASCLDSIHSMPYGTLEESKPSAAEPTPSKMQYDGGGSWMSTAPEMPGQLALSELRHTDMSGLSKPMGITPGALGLSNISAMGGSGASGDGWTISPWINMSQTPSAAGAGVDAESGAARLHG

SEQ ID NO: 41083 - protein, 122 aa, Oryza sativa
MRRRWRNMSKERHENDGHNHDTAAQVQSQTETAVELQGVCRQRPSVREVSRCGGEGEAWSAPAVGLLLFPGAIRRLVPPPSAEAGRPPLPVVSSVRTESGALPCQTAISTVLLGVFVVVCII

SEQ ID NO: 41084 - protein, 991 aa, Oryza sativa
MSTSTQNIQTATVPTAAALDPAMNAVNDDTAAGAARSRKKMYKNCDRCRQAKRACSAQYVSIAEALANKVACKNCKKKGEVCTFNSLINSFGGIPLAGLTGAAFAESLQETTNGFPSENTNAAASNSINIDETLASEPESSKAAERRRDSQSSIDNVNAVFELLNSCDDLVQPPAKRRKASALDTQQDISSYSGFVQPASNAASNSLVLSRAQSPYAEDESDTSVFDILGFQIWGSAPSVRLAQTADRQHLNSDLLSVYEGAAESAFRVWVTDATTPYLLCADSLTSTSAAMSLNKKVTLLDHASKRIFKADNASRNVEKRVSEAYHAVLLAYAAQWPRHRNNQTASRAEWKPDEARIRLSLWKQARDKLMDAADAWSFRIVFALILFAWTEKPREVPDDEAWGSDSEPPAQLHEVPSLDENSTLDSSSWQINAEASTMMLAAAMRKLKAFRLKIQQLRRKGIDLWSTEEPGLEASQVAHRRAEATLLENTYHNLYWFGCMMDTELSVLRKYDAVIGDEDSDLTDQLLSPQRATSLRNETESFATGANAARKPVRKIWDEVIPANSQKFRHTFAKSWPCSEEEAKRTLAYATPIKVLLFRHVGRLQSSYWRQASSEQIERQIAHVLSVVRHWGETFAPFFASCIAHHHELPPSIQSWHVITATKWNLAAILLVELVQTIDRSAASSDPFQNTGEIFASLRTKVCLNTAALIDAIQRSSLARVPSAESPFEFIHATDSTVLHSDPWPEISVHGFACVAKCEIKQFAQLAARSAWAELEAAEQRVHKCIWALDQLSNRSTMAVDASAEVAKLLEIHSPFKQQQRQQQLQMHMARDEDARSQSIDASVAAQTPAIEAFLAGGGNVAPPAPMPSAFTDEVWASCLQILSESEPREATGSMDETPDAASSSLLWPDLGVPSTSSMPLADDTDSASSDHSLSPTYTSSTVTSSTVAPIDPLPLPATAPYADYFPDMKDHDAILPTLDSFPNSFQFRV

SEQ ID NO: 41085 - protein, 1289 aa, Oryza sativa
MAVDEPLNIRISIDRGGTFTDVHASIPGRQDIILKLLSVDPANYQDAPTEGIRRILELATGKPHPRGQLLNLFHIESIRMGTTVATNALLERKGARSALLITKGFKDLLLIGNQSRPKIFDLSVARPEVLYEQVVEIDERITMEDYTEDPESAKTFPSAAAPELVTGITGETIRIMKKPDTEAVKLQLQSLWDAGYRSLAVVFIHSYAFPDHELEIGKVAMEMGFSVTLSSSVQPMINVVPRGMSAMADAYLTPVIKLYIDSISANFEGGFESHNTRIEFMQSDGGLVDFRNFSGLKAILSGPAGGVVGYTQTSWDAEEKCPILGFDMGGTSTDVSRYAGVYDHVFETTTAGISVQSPQLDIHTVAAGGGSILTYKNGLFHVGPESASAHPGPACYRKGGPLTVTDANLFVGRLLPEYFPKVFGPNENEPLNREVTAGKFQTLTEEINEERRKQGQSPFSAEDVAMGFLEVANEGMARPIRALTEARGFETSNHHLACFGGAGGQHACSVADVLSISRVIIHKYSSILSAYGMSLADVVHEVQRPAALTYSVDTEPELKSQLYDLEAQAQRKLFEQGFSPKQISYNSYLNMRYAGSSSSLMILKGDDWDFKQGFEAAHKREFGFNFSDKPILVDDIRVRATGAAHTRVEKSPYAQMKLVNNAEVALPAENGTSRVFFAQGGWAETPVFELQHLPNGARLTGPALVIDKTQTIVVTPHAVATILDNYVVVDLPSNASSKGQQEQEFSPIQLSIFGHRFMSIAEQMGRTLQKTAVSTNIKERLDFSCAIFSPDGGLVANAPHVPVHLGSMQFAVRYQHNLWEGKLKDGDVLVSNHPSCGGTHLPDITVITPVFDNGAIAFYVASRGHHADIGGLLPGSMPPTSSALWQEGAAIESTKLVSAGKFNEDEVRRLLLEEPAQYEGCSGSRKLTDNMSDLKAQIAANVKGISLIKDLITEFGLVTVHRYMYAIQHTAELAVRDLLKNTVAKFGNEPLEAVDYMDDGTPIKLKITIADDVSADFDFTGTGPQVLGNTNAPIAITHSAIIYCLRALVATDIPLNQGCLNPISIRVPDASILSPTKGLAVVGGNVLTSQRITDVVLRAFRACAASQGCCNNLTFGTGGKDPITGEHKDGFGYYETIAGGAGAGPTWEGTSGVHVHMTNTRITDPEVFEKRYPCILRAFTLREGSGGKGQNRGGDGTVRDIEFRVPVQCSILSERRTRQPYGMEGGGDGSSGLNLIVRKDEEGKEQVVNLGAKATTRLVAGERVIIQSPGGGAWGSPKTNSINGVNGHA

SEQ ID NO: 41086 - protein, 775 aa, Oryza sativa
MTPHSSAHGAPQKSQSNKRPQAAPSRVAIPLPLSKPRASKPQPQPTIDPAVDAPAKKELAAQLAKDNQAGQPPTAHDEAKLEQPTSNSRPYNASDADLKPAASAAGGAAREDITILPHVNGTPSEEPQGGPVRPLSPTTVVSRPQTRPGDVPAQRKPSNIRTELPPAFVPSAGQHTPQSSTYSRQPNQIPQAFQPQIHSSRPSTSGIVFGDIDSSDSSPAPPQSSGSAFAPPPQQMPRPFQPPPFTPVNHAHHFSEPQAFPVFPGGYAPPQPWNPQRGYYPAQQHPPFLAQPQQQYRYPTQDAFTPVEVSQPNMPSALSRSASPGSVYAEALRVGQDLRSPTVIEKTGSMKAFPEPRQHFSNQLPFRQPPFARQLPPQQQSIPPPEFRLDMDNAQMLRDHVRSQFSKPALTDCYLQISHDSDASTQKLDAHKLILARSPTLLRLIQASGNVHKPQLDVHLPGRYLSLHTFNECLKYIYGGQLPPLDPPHRPSPSFTEPVSAQVDRMEQALQRVATGAWLEMPAIAWQGLNVATNTMTWDTLPTALEFGLEGGISPKWTLDYGSEERGSATSSDDSHTSTPTYEPFATPLLQSIFQFVSNSFPLDFYPDNSAPQLKICPRLPPLPPKQAQQHKKNELSRSADPRLSQIRFGELPSQGANAPRPSPVTTTISSLLFSLPFALLKFLLEHPVLAERVGFETVGSIMRQTILERESRRLRCLNATSTAAVARQGEPDEVANLYWEESVEATGQGRLGLRLCRRRKGVETPASSEATSNA

SEQ ID NO: 41087 - protein, 935 aa, Oryza sativa
MSSSLVEDWSEGDFDLDHTALRTEHLSLHDDHDDNPTTAHVDDDFPDWDHDEDQDASDEQTDTIKLSNIAGSALKQMLEASKASASSLPSADLHALDQQLLHHDADVDRLDIMRFANSHDDLNTCSTASLSTSASTSYRSMMGLSTDLTDPDSPHSKHGTRNTTITSCSSSDRARSDLGFHSSEPDDAIDELDFELAPNMNNLSLCSSLSRARSNTSFSHVSRDLWDEEPTLGASGTTDQPATSSKSISGESDADDEHEDLLDGLDLQGSIFEPQSNPAVQPAPLLKAKLEAMLDLKRSGRHPDQYQNPAHVTDSDSGIAAGLVITDDVDLSPSRITSRGLSNIRPNPSYAQIANSRLSAQTMISDGSGERQHSSHTVLSHHQQHQHHRAPTGEAASQQSKGFRTEPRGPRRSLRFKRSTSDLQTHMSASSANPGPSASNRSQNRGSQLTRKRSLPSMRTSPPAPGSVNAAAVQLGAHTIAVRQRHNSGASTSSSVPRNRSHGSSRLTDSTAASRARAAETAADQLARLHRDAKAPARPSTPVSIPTRSSHNPPPRISVSTRSKTRAERQGLSGESQPAARLLKRSAPYASGAELDGIDDLTTSISPSVKPIPLPPPSTSANAGRGATKTDDGASQFQRGGKSRRGGRRHPKSKPGLIRSLGVGGSPTQKTVKGMRWNAQALRWEGNEAVLRDFDQVIQSSTRPALISQITGSSTSSRLTHAAGYTSPISPESSTLMNSIASGARVVGDMLFDPVQMRWVHKSGDEEDDVFAQFDEALDEGDASHDAAGLGVDAEGDNTLRARRTRSIEAFSQSSNPWTRLSAREPAATASDDEAYERSLNRKHDQAIRRALSRGAFAASVGIERDIWDACVQADKRHALEVGAWLPHPAPHRSRMRTRSHTSDRAMTMDEIDRPRPHLYYLEKIAKSIPRSDAS

SEQ ID NO: 41088 - protein, 1073 aa, Oryza sativa
MDLDDDDRSAASDVDDTDDARSVASSLTDPLSGLSDQETLSEGDDEELMDALRQVDGVRAKSRTKKGGMRKDAADADAELSGLFLLPPKKRSMRTRIKASMALSEEEDAGDEHDDDQEQEAKTKSRKSDVADKSKSAAKRKGANRHAVDFSSDEDRDSDGYSATTPVKKRSKSGNVADPSSPLSSVPSPGSIDSSLSTPPPVPRLSAKHRLENERRLSDRELLKKKRSTKQAKDRKAKSSDSRPKESASRRRKREEARIHRNAILDLGDTESSEEDLTDRDDAESSNKATARDDASERGSAASTPRASKVALPAESAQSPREAKGKKAASVESPKSAAKDTPSKTKKVRRILSDSEQSSDDEGKAVASSPSVHAKALPQVKDEEAAAQPTATAQAVADAPMPDADAAAPLESLGTATKEEGSEAKDAQPGAATAASEVAPAPAAAPAPVPEVKKEEPRVKQSLAEYKRRLAERRVSEQQPASASSASTAAAPVPVIATRTSEVAPSPSPAVEKVDPVRALPSVSSEPPTSEAVSAPAQPTTAPVEPRSPEKSASALPRGVLFTSIAAPTAIRSVEIPKSPSPEPPSLASAQQPSQVGAVAGGAAASSEASATTSAEVSAAAGAGVDATRARAPSVTQQPVGQNTDTAGANLAASEGSVKPQTPGAVATAPGAASSSTGAATVAPSAAAPTPSPTLGPTRYPGSRVPSSPSGPSTFNPPKAPRAFMSPPGVSAPAPLTSASAAPPSTSAAVASASTTTSASAGVASTPARSVAGVGNTPSTASSSSTASSRYPAAGLTSPTPNTTALPGYAPRAFAGVPKGPASMRDPDPRADAWAEAREAREAREYPGARHLDTMRDGGRDMGWGERPREPVGDRDGPRGGWGRERRDMMHRGEPMGREPYARDGRFFGRDERDGAGAAAVPPAGSGGAGGAAASAGSGALGSRIDHAHAHAPYAPYRRPSASEYDELHAGVGATGYDPYNRGIVVRGRSLGLGGPGASAGPSGPPGASGAGAREGRGEYRDYDDMGPGGGAQGPPMGAAARGMPGFRSGWGGRSRPRGAPGGGGGRGRGWMR

SEQ ID NO: 41089 - protein, 1097 aa, Oryza sativa
MPSKVARSNATPAKAKASAKPAVATPSKHAVDTEPNSKRRRQRATSDVDVVAPTSSSSAPAAPQKIVSRNRLFAPFRALGLISNDVPFALQTRFGGKDATTPDVNVITCLGDSWAMWDAERMTLLFVSTSLPAPISSLVISLSPDAVLAAAGTKVYRFRRGKVDAVYDTVDHIMAAFDKPNGHMEEEDDDDDSSNSDSSSEADSTGQQGTQLSSLLVFGDTIVALSSDGRHVFVWSVGTAELIRRIDLPDTFVASSILHPATYLNKILIGSVDGQLALWNIRTGSLVHAYDAEQLRLAAAGPNPSTPSAAIVNLTQSPAVDVIAVGFADGHVLLHDIRLDESLFAVHAAGGLSSGSVSFRSDGKQHSVAIATNTGNISIFDLEPSTASGPSSAQNGPRLTYSIQEAHDGAVGSIEFVPGQPLLISSGGDNSCKQWFFESASMPPRLLKGRSGHHQPPHLIRYYGDEGKEILSAGRGRSIRSISVVRDSRSHELSQGELQKKSNQLSVSVSSLKLPAASSLSFSLTRSRDWDDVLTTHTGRQFANTWTVRDKRMGKKPLPASADRKIIAEARTSCVSACGNFGLVGNSEGLVEMYNMQSYAHRRTFDTRPLDPMGAAKAKEFAAGSKKAQAALNARVKGSAVTGVVTDALNRVAVISTMDGQLSWFDFASAALLHRIPVSASGISSIQLHRDSNLLLVISDDLVLRLIDIETRRVVREFVGFRGRILDACFSNDARWVLATSMDAVIRTFDIPSSRLVDAFKAASIATSVAFSPTGDFLATAHVDSVGIYLWANKTQFSSVALQGLDELAEVVDEDEAVVALPTVQGDVEDAALAEYSEAMMQVGEPELQRVYTSPVQIDDASNDGGLVTLSTMPRARWMTLINLDTIKLRNKPKAAPQKPDAKRAPFFLPQTVSGVEFKFDPTAAVADDAGEETKADKSNIFSSAGISFKTEFQERLEAAADKNDVDGFFVYLETLSTPQLDAEIRSLTASDDLVAFLGMMLARLDQHRDYEAVQALLATLLRVHTDLILQTFNPEISEDGDDDDQMQLGADEDEAERLKSVLRRLIRAQVAEGRRLNGLLDQCLGTLAFLRGIPMT

SEQ ID NO: 41090 - protein, 690 aa, Oryza sativa
MMCSDSDSLPFIRTAIFNGPYHTSLASSASSSTASVWSDASSQLSDDTTLTAPTSNSSEPCDSYCHSQPSTSFQAPDVSCDQVKATASWMHQTQLQTAVEVPRELRQNPRRTSSSAVTKSGRPPVLTRQSDRKVNFVDNLVDSSTQIVEAIWPLSSVAYRAELGSKAVLPLRTFIQETLRRSRTSYSTLQVALYYLVLIKPHVPKHDFTMEQPDDVHANRVLQCGRRMFLAALILASKYLQDRNYSARAWSKISGLATQEINQNEVAFLLAVDWKLHITEAVFQRWTEIVLKYTPSQPPAPGTGCSQAYEREVQDWKNVILLLDPELDNIDGYRPSVPTKVTSRRALSPVSPRSLLAASRERSSVGGSESNDATPTPRNFSMPMVMEPSPATVYTPGRLAPALGLLPTPRLTPQMTGASIPAASAASCLLSGRGSMGYAMAQASNTSAAQSLDRWPVSMTSSPQSYCPVRRSSLANSISTASSPESMISDSSRTSRSSSISSASSFGTAPSSTKLDVQARCRYAKQCSERYSLRAAIASVPEDYEMNGISSSPESYTGPVSKDLMDMSMETPMARRGCEADEAADAARVLQELHNYQHAHSQPSTGSKRSRPLSMDNALQENVREMLSQQYYAGAQREWLETTQCPRGTAAGGRKRVCYSADTSAPPSLPSLHPAMGGVGGVGMWGNLLN

SEQ ID NO: 41091 - protein, 1105 aa, Oryza sativa
MRHLLDACRMEELDLIKKMRPRPASSEAPNTQLVTLPAATSRVAPGAPPTDDEALLPFLDLLFCGKLASMVVCEGCKKVSHTYEDFYDISLSLRDDDANPKSRRRDRLRSMADRWRRATQGRTIMDRKSAAAATAAASNSETPVGTPRYSENDTSDADSTALQRKKSANLLSPDEPGRGRFQLRTRSLRKSAGRHEKLGATSGSEMEPDFPDMASLSLAPSGVSRPYVDSAPASAGEDNGDARTGTRVARMLGSARPAADASSRETSPNPGVARSAAPTLAAGMRPPLRATKSSSHQSAYISRIMADDPTTPANSAAPRKAGAPSPLFDAVSAAASAQGKPLHGLFRSVGAHPRSRDPCADFEPDPHSRGAKRRRKVRQDQADTGLIGSLRQFTSVEVLDGDNSFACKNCWRLANPPNAQEREQIRRRRRRKGAQAADVDDDDASEPSSSDADSDLDKSTKTPVGDATLTAPPSSADMNGTRITSSTSQSTLANSSVDSIMTSSSASLSSRQRSDIPTISMTSADASADSIDLTLHNSIGGVESVDGVIARDYAKPSGAAAAAAPPSGPNGVMMHGRMGSESSLSSVEAAAQRQQRTGLAPNNGYDTGTETDMSGFSTGMDESNASTGEGTDTDEPGAAGNEAKRAPGRDGPKRSAQSLPRRALKRYLIASAPPVMIFHLKRFQATGRGFVSGLAGFKKIDDQITFPEYLDITPWLAPPREEYDRRGRLKATSDPLAIRRRAEEEATNAGVDARNVRVEVSGVHGRGSRHAHHADKKGRRHGMWSWHLHDNAKHPRGAHAVDAKGGDLDEGPKVQSSTGHEIVPSIIRRPKTEYRLYAVIVHQGSLSAGHYTAYVLSDRIKLKEGQKELVARSAPTSRTNTPAPPGSSAAPAGSSKDTGGLGQFFLGGSRPARNGTSSPAPVPVRPASAAPAASVAMTSVASTTSLGKSSVSGGSSHDIAPQTSISSLEDGSVSSAVAASGSGSESSVGPKLVRPRPQLKPMASWDSLDELEQSHATGAATPTSATVVSPAALEPAPAVPTVASQNSNAHRHVETATASDDDDDVDPRKHDDGRRWVYTSDTIVRAATIDEVLKAKAYMLFYERI

SEQ ID NO: 41092 - protein, 649 aa, Oryza sativa
MAAKGAKPMPVNGVVYSTNDIVPAYNQVKPTASNAAHTGPNKPANRKTDYTSDGVTDNNIAYLKSSDWEFLGALTVLAFFVRLFRIYQPSSVVFDEVHFGGFASKYIKGKFFMDVHPPLSKLLITLAGWLAGFDGNFDFKDIGKDYIEPRVPYVAMRLLPAVCGVLAVPVMFLTLKAAGCKTATAAFGSALVIFENGLVTQSRLILLDSPLVLFTGMTALSWTSFQNQHELGPKYASQPAWWFWLAASGITLGATFSVKWVGLFTIAWVGSLTALQLWVLLGDTKNVTTRIWFKHLFARTFCLIIIPLAFYMAMFAIHFVCLVNPGDGDGFMSSEFQSTLNTKGMADVPADVAFGARISLRHHNTQGGYLHSHQHMYPTGSKQQQITLYPHKDENNVFLVENQTQPIDWAADPTGNTSVAGPMAWDKFDPEWVVDGSVIRLYHVITDRRVHSHDHRPPVTEADWQNEVSAYGYQNFEGDANDLFRVEIVKSMSDGKEAKERLRTIQTKFKLVHLMTGCVLFSHKVKLPDWGFEQQEVTCAKGGTLPNSIWYIESNKHPALKEDAEKVNYRHPGFFGKFWELQRVMWTTNAGLVDSHAWTLALLRGPSFAAVSTSGAATTARSTLLATLSSGGLLLPLSDCTPSSRRSQS

SEQ ID NO: 41093 - protein, 846 aa, Oryza sativa
MPPASSIGSSRRKLGQPTVCLECYLRKVKCDRKRPCSTCVRRGTEHLCKTFNTSELDPETLQKKQARRSMAEINAMLDATTDDASEDTDPQQPPEPSETSEHPMMAFINLMLKDLNTNDDASISNHASPDSASPRSSSLLPSRAVVSQYQQKPCSIKMLEFCSILPDWYHLQALLRSYLWNVDWKFLITCQDSLETQMHDLWLRVISPAKSCDPYAESTHSTAAIAFQPGDLSRLALLASVLGETIESMDPDAIAQSMPASRPGVAVAAPIKLEADANARVRALLILTYHVPALIEECVRLDEMTIDLVQANLSAFSLWSNQGLHGTGSTEFPRWNVTIRAAKRCNLFEDPGSNASYTQPQLDHRRRLAWLVYGYDHAFAVGANTRPLIVESQFSVDQPSDAAPWSACGAPPDACLAMLEVQGGKIAELVSSTLCYGPPLHRKAMETDSKIMGMMAQLHPSYMWDNPDVSFDQLDPFRARRRCWLQLTTAWQRGSLHRQFFFPNGRITNGELATSRHIATDSALRSINAVRELRKMQNRFSDHMGSAWWFQYLTEPSMTLATAALLLIRSRGQGVPGLANEASCWPTMMHFSKMIDLCVEDLAASMQNSAACLPSFLTFGQGCLKLIEQLRGAIQTSFDAFVKSQPDLARVENLRIDEKIIALLHPRSRQKSPSGATPGATAHSREPSTSGVTAAKGVKRAGDASARGALSSRNRVGGSGQEQRAESRSISPRSSLAVPAFAGVGASNLMAGYGNAVGPQLSSPDHEVPSGELSLSFAPSMSAMAPAAVAAPHFGVPAPVPEGQLLSPAEPFALREFYTDDGVQRATSDWLTSIHMSAMLPQPPPS

SEQ ID NO: 41094 - protein, 995 aa, Oryza sativa
MLSDTRNAPLSGSRHALNASRDLAAQPYNSAMSPYPDAHSDRYESHPPLPRRPDERSIHQRVLSHATAEAVDADPRRPDTASSAWSSVRSSSSGVKRSPPQQHAPYLPPYAREAPIPAHAQSSYPHDRDAQERLPHSGKPAVTQRSPPASDGFASAQPPLGAIARGHAAMAAQSVAASMSAQHPMQPNRKRLRISRACDECRRRKTRCDIVGAFPGEPGHPLTISGAVPPLEPNMEPKGEMLILQPCMNCRRSEVTCSYSKRPLKRGPSKGYIKDLERRLNSLESQIVSGSDRTDQDTHDVHQDALPLSTNASTAPGAPPANKPKIRTEDRISRLESVLARPSTAKDDDEDPPAFSDATSSEVFAAQVKTEASSDVLDTASGLASEATADLEAARASSSFSPLLDPVVASVAAAPSSPTKASLPKLNGTSDRSSASLKGKNKDKAASRANARSSASQTDVADVKAKVAGSFLHATFPVMQGRAEGEGGSSSSNSNIARLEDRVLARGLRLLVEPVEMVTSQPASRDDTPGSQGAKAQQAHAVRVANLIGQASTGLGGVRDELVERGQSSLDSLRALRKVAHRLSAQEADLLMLCHLDHLRNGRNNNSALAAAVSKLGSGGNVQNERETYRRRTVLFMLDRWHAVAFGTPHLLSGRFGMERDSFRSMKLALSDAEQSPLGDAVFEVLRCAIMLGQLNDLVQNNGGWKGVSKSDVDAVIHSAMDENERRTATEASDARNGSRAEHDSASNGADVEGGEAGPSLLSTEAMRYSLEQAVRCYYALHTLPNARDARMQDVHRMFNLAEAVIVLGTAKTPISLQGKLIQSAIGPTVLAIAAVAFSWCLRVICMLVASSRADESASTVASSSTPGVVESTAGGGESTLYQLEFYRRKMLDYVRMCGPFCLFSGGPPTAPASFAPVYLRLALFFNKTVSLASQMGSLVSPEPPKTSPVHHDPTALGNDADNLLDMGREMGFLGYVLASTSQSEAWNLLTGSAA

SEQ ID NO: 41095 - protein, 1028 aa, Oryza sativa
MVALALPRRHKEPIQAIASPASNMLPPTHTTKASPELAAADPGAALHPEAERIKPKRSSSFGRGLGQLASLTGAKPRAVDLMSFGRTKSGASTPQSPSPQSTADNVAAAAAILANPAAAAANNHAAAMRPPSTPDPSHLTHFSLLLSDLVNKAFVTCSPGSAPAATTTSSVASNVAAAAKGPTIPKINQITYEGKHLPDKAKIIEIAQVVVGELRYAEAVDAYLLRAVSRQILKALTLFAARIDSLLVSPTKDAGALRIPTNAKEGLHLPAAMEFNLGLVTLEWIVEDSLERCIEGDRDAHGELIADENGAVHDGMPHFVSEIPTPVRKRMEGTILHIIQPILAQTKASMARCISSAVPTPFVSTVALSPSTTSGSATAALPSDSGTASPPLAAVGAAATTPGAVPGNVSPPLRPGEAGPGSAWLRELDGRLEGARKLLLPRIEERCGQDGEGWFISVAIHVIWKGLMILTSRSVSLPSNAAAELLTGSNAASTSAFDRLMGEVNQKRSPSPAQLAQALKSVGVGSARSKSKGPDATCAASDSGRQSPSHCSASGLSSATPFSLVSARLCAHQLAELQTFEKLMLRFCDGFLRKPGTQSKKAGKDSKRSRFALFSSGAASSLGGSNAPLDLSAYDPDEEDELARAALAEAMHALRATIIVLQCLEREPATICAGLEALKRLPGAESSADSLTGSDAGTPSTPAAAGPAAASAVLGSEAAKALDAIPNLLLLHVLYTRLPIGAGRLELPSPPALSGYTWTDYEKAIAGFAGGEQWAQAVALRYKPEMEKAWKGVEQRRAERLGALEQRGPRTARSVSGCSSARGGSALARGGSKPSSEGDDDDDDDDDEEAAEAMSQSVPELKKPSAQTRRSSDEAQRDAGGARGRVSPGHSPRRSSTAHAALADGAGAATVGATAPPRFWRRSTSTARSGFHLSFAGLRAQSPRASPASESPAPGGAPATPPVSATTTDPLASPPRASSAAGSETHEARHDADAQRIRLEAALERRSLCVFGMALTYAARGQMHINLA

SEQ ID NO: 41096 - protein, 774 aa, Oryza sativa
MVESEGRAAPPRAKLPPLSPSLTRHSDGFPSTSSLGHVQRSPPQLHAPPSKLPPPMPTRLHSYHHPISASYASSNSSLHDRNRQPPPPLWHEHRSPPLEHRSSDFSRHLPPLSSSSSSSNSATSALPSSASTNAFQLPSLSASLPSSTSWHGREAQRAPSLHATSFRTSRDPSAANLDSRKDTKLPSLSGHFGDQHAPRPPASDAASAGLVSPSAEEPSPAARKPAKAHVPSACLNCKRAHLACDVGRPCRRCINLGKSDTCIDVQHKKRGRPRLKDRPASQTAVSTLQTLDAKSDVSGSPASASYARQSPGSESGYFRSPTRTSELLSPPLLSSSAAVMHVSGATHGSSMHPRSASNSVSASSYPFSRPDHLRRPTDTASHAVSHAASSWSYQPASHAARDTPAHTLSPPLMGARQHSHSLSYEHHHPYYHPQHQQQHQQQHQQQHSQPSAHGHAHHASASSSGMYHAGAGTDASDAGFSAVVTMICSTNLQCARISDEVTALLGYQPSELNERSLFELVHPSETSRLQEIWTSLIDPVGVVPQAVPAAAEVVMSTPAARLMTPAAGTIFVQENMRLRQRNGMYDFYSVRLHLGGGFGVDLYRRDTLDRAYIVASLLKLGNDAVHPEPALLRSPYSNDAAQSGGFRTPSAGAAPAQSRAGTGRWEADEAASMRAPPHTAQSPDARDAKHADEPAHQASDSASRGVKRSSADMDEDEPDSSSQTAPPPSAPASNGAAASSAYGSSKHAVYSPPPAMRSMLSERSRGTSRDGILC

SEQ ID NO: 41097 - protein, 855 aa, Oryza sativa
MELNVDSAKQLLAQSEQELQQAHAQQLQALKDEPITAATSAPNGAASHVAPAPAAPAPVAPAVAPVAPVAAPASTLVSSSQSPNAAGRMQLIDENQKFNSAHFGPSLDQWGLADAGFGYDLCAVLGSQSTGKSTLLNKLFGTNFDVMSETARQQTTKGIWMCKGLKMNVLVMDVEGTDGRERGEDQDFERKSALFSMASAEVLIVNLWEHQVGLYQGANMGLLKTVFEVNLGLFQASKAKTAGAKDKTLLLFVIRDHIGVTPLENLSATIMADLTKIWLSLAKPEGLEASQITDFFDFMFTTLPHKVLQPAEFDKAVDALRTRFVDPKDPNFVFKTEYHKRIPADGLPHYLESIWEQVMTNKDLDLPTQQELLAQFRCDEIANAAFALFATSIKDFRKHIEGGSILDTLGADMALHRSTALASFDRDASRYHQEVYKRKRVDLLEKLNSSLSPFFLGQLKNLHRHMLQNFKRSVLDRMRTEPNYDFGLVVSSEKRTALAKFSAAANAVLLADTDWAVDEEVAQLDAEIQAISDTMRVEETKKMVAQIERTFKKNIGEPVEMALNAPGPEMWDQVLVAFRRTLEQAEATYVRKAKSFNCTEEENTAALAALRRKSWLSLRAKVDEQTADSVLAARLRGCFEDRFRYDDAGTPRVWKPEDDMDGAFRKARDETLALIPLYARIEPKDPAVAVQLASTEDDAELQGAVDRGEGEEFDFAQTLVVFSEARKAEIGTRFRKEADALYVEAKRSTVSSIAQVPLWMYGVLAVLGWNEFMAVISSPVYFAFLLVLIASAYVVWRLNLSGPLASVVGAVGREVHRLADEQLRSHFGQPVLAQPVPATTAAQSTAPEEIELQEK

SEQ ID NO: 41098 - protein, 1068 aa, Oryza sativa
MSTLNLTGHPDPKLGSDPLLLQALESYVEPIKAALAQNNVEAAAIPSKSGSLSASDLATLLFDLQSFQEESLGVNAPRPADPSASTPNTRHPVRIPAELFLPTTSHQSTALVDPHNSPLKLLLQESLAFLASNAKQTWNFSDPAQKHDNVKLIAHLRHQLSNAGVLEHPTVAVSPSITEAEAASLRHMAEQLECKWSDDVSAATHVLYPSEVTPPSSPKQGDAASSTTSEEYFRTIASRAGRALIHVWYRPDSYDTWLPAADFADPDPAPEKRLPWKVGAKWLRDSVRFNELMNAEDYEQEDALDTAAASADATATTESATDAAKSKKRGLPDEITDASSAAAAAESSSKRIKLLVAARPVGAVPIDLSGSQPIKGKKYENEPVPSGVLGNLPSESAGPTKVEGEQPAVRPANDADATMADGTASDKPKDAAVDESTEATVDPNAPVIQPDAAAIEQQRIRAEEIAKKYLASQTQEVIIPSYSTWFDMSTINAIEKRSLPEFFNNKNRSKTPSIYKDYRDFMINTYRLNPSEYLTFTACRRNLAGDVCAIMRVHAFLEQWGLINYQIDPETRPATLGPPFTGHFRVLVDTPRGLQPMHPGTRLNLPTSANATADGIAAGADKPDMNLELRKTIFQSTMKGSKPVDLAEANSLAAQADAAVQGGAGGAPRYTCDTCGSDCTRVRYHSIKAKNYSLCASCYLEGRFPSSMYSGDFVRMEDSVLKQSGGVTGGAAAAQDDWTDAETLRLLEGLEMFDDDWSAVANHVGTRSREQCITKFIQLPIEDGFLDGASQADLGPLQYARRDAVDKLGKPIVPFAQADNPVMSVVAFLASAVNPAVAAAAAQSALGELTDNLRKRAGQAKSGDAAEADKAAEAEDKEDKSEGARANGDAMDVDAEPESAAASTDVAVVDYGKKSAAAGGAGAVPRNAVERAAAIALGAAAAKAHVLASFEERECQRLVGQLIEAQLKKLELKMSQFEQLETLLEAEKRSVEAGRRQLYADRLAVQKQLALVNELLHKAATAPEKVSQQDLVKASSAANGLPQQGPVVREANVQPGDAPTGANVASIG

SEQ ID NO: 41099 - protein, 567 aa, Oryza sativa
MEKTADDQVTAGHRSNSVGLAATADPERIEAPVTWKAYLMCAFASFGGIFFGYDSGYINGVTGSAVFIRLVEGDAFVDAQIAAGDSPALTGSNLSLITSILSAGTFFGAPIAGDMADIIGRKWTVVMGYAIYIIGVILQTASAGLGLIVAGRLIAGIGVGFESAIVILYMSEICPKKVRGALVAGYQFAITLGLLIAACVNYGVQNRTDSGEYRIPIAIQFAWGLILGGGIACLPESPRYYVKRQYIPKAKTALAKLRGQPEDSEYIESELAEIIANEEYERSIIPAGSWFQGWANCFSGSVWKSNSNLRKTILGTSLQMMQQWTGVNFIFYYSTPFLSSTGAISNTFLIPLIFTLVNVCSTPISFYTVEKWGRRPLLVWGALGMLICQFLVAIIGVTVGFNKTFENAAGETRAINISAVNAQIAFIAIFIFFFASTWGPGAWIVIGEILPLPIRSRGVALSTSSNWLWNTIIAVITPYMVGVDEGNLKSSVFFVWGGLCTCAFVYAYFLIPETKGLSLEQVDKMMEETTPRTSAGWKPTTTFSSAAMKDGKLDTQVEDVERRGSAF

SEQ ID NO: 41100 - protein, 977 aa, Oryza sativa
MASASAHPELSQPVSLLAHPSAAPAELARHAALPATGFSSTKCSTVSTGAAYKLSSDARTLRRLKGTLPILVAANALNLVNPQTQTPIQSFTLSSADTASSAPLTLLSSLGAGRSLRTTYVGIESHKRSKSGRAAVAASHELWAFVEELSAKGKENAEVQFKKEVLPLDKPVRLIHPLSDGRLVLTHPDDSLTLVSSSPIIFDDEASVQTASTSMQVVQTIDATNGAGHQRSHFYVNILDAPSAKALVSHSSQIEEAALLGLRIAVTSDYILASTSAKAGDDSKKKKRSKRSKKDASSKPSAKDAQDDDDVAASSGHLPAKGAPSGPLTLELTAFVKSFDGASDAMAALVKLGRIEVPGFTSARHVQDVHFHSAGRLALLGIDGQLTSFKLSTSSSAEPVLVRSGASLLPALAPASNARPSSSSTASPACCLLLSRDHALVVGVTRATPATQDKERIAALIVDVELGAVLREIDWAVPFVAPSSAAASTLGLLQRMTTISATRIAGSTSVIAIGAPTVAARISDSSANAEALLQLQQRRLCVLSMPFVVPEASVLRDALGKGDLTARWIQTAATDAADAAGVSASDASRADVLDQIKRISQATGNAKAKGAEINTPISQWIEASTADGRMVETMSAPEADTAFFGELLDVLLPAPSSRKGSASGLTASAALVTMLKHARVHPSVFASLQPTAGSTAANGAVASPSNAARLSEFWARIGSSNEPKLVRAAIERLPEVSEETLVSLLMTAVRGLSASSASKAAAGFMALVVELVEVPVSRAALRSALKTQLRDDVESAVALLQMCNAWISQTIQLPLQVVERGDDSKMPKAEAAMALATDVLDTFFPLLLTTPRTHATVEALSATIGRYVQLMSTLRLVNAPLSAFAKLQQENALLSEAASRDKKSSKRGTSLAASGAMASAGNAKVHASSKAEATARAEMGGGLGLKLGTMGEAKTRRLQLLEQSMLVGAYSFERLEI

SEQ ID NO: 41101 - protein, 1451 aa, Oryza sativa
MAPDSPCWQQRHDSIRHILQTRSVKAALRDFQFSLNNLDNIRSISDASDASQADPSSSSHVHASSAATLGRFLDISLVISWSADGLAASTDPNPFRIAAAPTLRDLRSLSLQVQDFKSIKVLQKSAGSLVEVVKSRLDGRVYVLKSLVKGFARRNAAIQTPINESKLLQRQPHSSLESHQHHQLLTPQLLAAFQTQNSVHVLMEYVPSGDFSELLMAASSCGPDYPGRAPTGLLNEDWILRYSVDMVQAIAWVHAQGFAHRDIKPGNFLLDRSGHLKLCDFSSAAPFSDFASQAHTASTSSKPDRKVWAFYCSQPTGTCDYLSPEVLEAEETRVLQRQQQYDLSNLDDFLGVQRRTNPSSQAGSGSQPECTPGLYGPQVDWWSFGVMLYEMRFGVLPFFADKMEETYEKIKAHSTSLRFDASVACSTQLTLLIRGLVTEAARRLGRDSAQQVQQHAFYAAERIDWSKHWPLDAPFTPNAPGDPASDQRSTTRDGLAGQNANPAPTGIAAHFKDSSMSVVSSLPSFSALYAGNPDDFPAFADSREFEADSVGHKQDWWGPDAGISQEGEPDCSSHLRDDETQAANNVPPPSSDLSLTAGMTRSSSSPAVVLNASSSPSAMLRDANSSLAGTISPCISRSAPRWSDCDTTFVGFSYLPHRDAFLPPADAAPAVSTGDLSTAASFDDLAHKSGASPSIWPTSTPIASTPFHRGSSQASHSLTTLPTPPSFAPSPVAAVEPAGAEVRNQRSQPRPPALPFQHPQNFVTPARKPSYMAIHDRFRQLQGQEAPIPEDASANYTPAVPSSPYPFPMAPAVKNSHFTGGRKAVLNRRDLERARSATPGGGSVGSDSRQSGGSNAVREISEREAWDEMMAAVQKSVRKKQPAAVVPPTPPISSAVKPTGLPRSSTDPQLSASKPVTTLPSRRVHPQKAGDNTGSRRASRNALQPLEAPRQALHPARSGLGDRRSSDEKHGSVAQSQGDARQAGNGARLVAPRATFKVVAPESPEPLPAALVPDDSPRAGGLMPNQYALDIDMYDSDGSDDGHAAPRHLRHKKSARQLLIRAQERGTPTKPKRAQSPPLTEAFASAPSVAAVLEAAGARDSPPLLLGDHSVRSAGSSRDVSYEQSADRGVGSSRARALSMQRSGKSTPDGSREILSTSLGKTSVSFAPMAYVPVLGAIPPWRDARDAAGSGDGSGDGKGLPRDSGRGTRTIRRKDSGEMLSQYRKAKGMGRATSMLSLSERAKADADAPASRPDTAGSGNAALSTSPPDGDGEDDFILGHVESRMRSLAPGGSLPGRTIRRFSSVLSLKERERVTIERPASQDGGGKSTRGFGRFRSRFAPSTLCEEPSEDAAGDDAGLAHERAQRGAHRSRRVGTKVADDDAGKLDGGRRMGETLPRSFAVRAASMGASESPGTGDVSLMTGLGQRHHALQGSLLGLEQRLARLKARLED

SEQ ID NO: 41102 - protein, 1283 aa, Oryza sativa
MSESMSSASSSSSRSSFDGPSTPPDAVRSLHNSIKAARQEGGIDAELPLWKKRHTFFPLERQERYSAPTDKGFVAPELTELVAPNIESFNALWAEDPSLDPPASAVGGFYNEGVGLLEKSLRRLAPRIVFDGQGDAKGGLGNRITLRMDSVNLSKPLVNDRAKGVRERRVFPTEARERLFTYTGKLTARLCWSVNGDPEQSEIVALGNCPVLVRSNRCNLRGMSSRELVAHHEEASELGGYCLVNGNERLIRYLIVAKANSPQAIERPSFEKRGPSYSNKAIVIRCLHRDDLISVTNAVHYLHNGGLTLRFSWRKQEYMVPVVMVLKALVDATDKEIFASIVQGDFDNTFLTDRVELLLRNFKQYTLWSGHQCLEYLGSKFRVVLGCPEDWNDAQVGSELIHRIFLVHLDSPREKYKMLIFMIQKLYSLVAGESCADNADPPQHHEILMPGFLVGQIVKERIDEAVGNIRAQIARDVRMKLKGVDFFDARYIKKSVAKVNIDIGVKIASFLATGNLSSPSGLDLQQTSGFTIMAEKLNFARYLAHFRSVHRGAFFAELKTTSVRKLLPEAWGFLCPVHTPDGSPCGLLNHFSHTCRMTTRQPDVSHLHALLTSLGMTEAAFSVGGSVQGAGAAKNNIVVQLDGAILGYTTPALAKHIATALRIWKTEGLHKVPLDLEIGFVPTSKSGQYPGLYLFSNRSRMIRPVRLLHNNKIDLVGPYEQVYLDIACDPSEIIQGVSSHVELAPTSILSVLANLTPFSDYNQSPRNVYQTQMMKQTMGTASTAISRRTDNKLYRIQSPQTPVVRPELYNKYGFDDYPNGTNAIVAVISYTGYDMEDAMILNKSAHERGFGYGTVYKSETVDLRDLRGKAASASVPTLHFGFAPNYRASEAQRAILDQDGLPYIGQKVMAGEPICAYWDEVSGKTSFKKFKGDEYAYVDTVRLLGADGGSGGGDSECQKVQIMLRITRSPVIGDKFSSRHGQKGVCSQKWPAVDMPFSESGMQPDVIINPHAFPSRMTIGMLIESIAGKAGAMHGLAQDSTPFTFSEDFTPTQFFGEQLKAAGYNHVGNEPMYSGITGQELRADIYLGVVYYQRLRHMVNDKFQVRTTGPVHALTRQPIKGRKRAGGIRFGEMERDALLAHGTSYMLQDRLMNCSDYSTSYVCRTCGSLLSVGFDHSHSGAGGAMSTIDVTTQGTTPVLGPNGEFCRVCRAEDEVRRQQGLEPLRGKRQPIGGAEATIGIPAHNVINNVSGGDLDVVAVPYVLKYLVAELAAMGIKMSFALSP

SEQ ID NO: 41103 - protein, 954 aa, Oryza sativa
MADQQSTANRKRRRQQQGDPFDASSPLPGPSNANTPARSSPPPSSLPPSSPPAAFSDFTDGELDDADVVDEEREARQLGDHFQDNADSDDEGEDLFGDNMDNDYTENAALDRYDTALGIDDDNQYDQMDANARRLAELRMSRRDRTEAANKGSRSRAPEFLHSDDGASDADDGVAILNRRRRRHYDETAASADAAAFADDLPLEQLGDVKTDSIASWVATEDVRRAIVREFRNFLVTYVDENGVSVYGQRIKTLGETNAESLEISFLHLVDSKAILAYFLANSPASMLPIFDEVAFDVIMLYYPSYDRIHSEVHVRIADLPTSSTLRDLRQGHLNSLVRVSGVVTRRSGVFPQLKYVKFDCLKCGAVLGPFWQDANQEIKISYCSNCEQRGPFRINSEQTVYRNYQKMTLQESPGSVPPGRLPRHREVILLWDLIDSAKPGEEVEITGVYRNNFDASLNTKNGFPVFATVLEANHIAKRDDAFSAFRLTEEDERQIKALAKDERIGKRIIKSIAPSIYGHEDIKTAIALSLFGGVSKDIGGKHRIRGDINVLLLGDPGTAKSQFLKYVEKTASRAVFTTGQGASAVGLTASVRKDPVTREWTLEGGALVLADKGVCLIDEFDKMNDADRTSIHEAMEQQQISISKAGIVTTLQARCAIVAAANPIRGRYNPTIPFNQNVELTEPILSRFDALCVVKDTVDPVKDDMLARFVVGSHLRSHPKFDDETDEQLVATSLDADILPQDLLKKYIMYARDHVRPSLNALDQDRISRLYADLRRESISTGSFPITVRHLESMIRMAEASAKMHLRDYVRTDDIDVAIRATVESFVSAQKMSVKKTLERGFRKYLHQSRDHDELLSFLLGSIVKDRMRFVQLSAGARRGAQRDTVVTVPAAELETRAKEVDVFDIRPYLGSKLFHANGYTFNAADRSITKTFGAKRTGLSAAGGNAAAAMVA

SEQ ID NO: 41104 - protein, 1039 aa, Oryza sativa
MIASLARVQRGRSGFSAAHKAIGAKRTLATPAADGRVPTFHPSRVPPYAELLATLEAVRAQLNRPLTLSEKILYSHLRNPDQDLAGVGADVSAIRGKKYLKLKIDRLAMQDASAQVALLQFMTCGLPRTAIPSSVHCDHLIQAYEGAEADLKRSIASNQEVFAFLESASKKYGIEFWGPGSGIIHQIVLENYAAPGLLMLGTDSHTPNASGLGCLAIGVGGADAVDAMTNTPWELMAPKVLGVHLKGELSPWCTPKDVILHLAGKLTVRGGTGKIVEYSGPGLQTLPATGLATMSNMGAEVGATTSAFPFTPAMSSYLEATGRAEVARAAERAAGQGFLSADEGAEYDERIEINLSDLEPCLNGPFTPDLSTPLSEFVNKAKSDQRDHPVELSAALIGSCTNSSYADMARCASLAQQARDRGMKVKSSFDVTPGSEQVRATVERDGIQQVLTDVGARVLANACGPCIGQWNRKELQGEDNVILTSFNRNFRGRNDGNSKTWNLLASPEIVTAMAFAGRLDFNPMTDTLTAPDGKPFKFEPPKSDVLPASGFAQGDIGYLPAPMPEPQPDTEVLISPTSARLEPLQPFDSPFAATAAQGKYELPTMRCLLRIKGKCTTDHISAAGPWLKYKGHLSNLAENTLIGATNDELDAVNAATDYATGKQDTIPGVAKQYKSRQQPWMMVADHNYGEGSAREHAALQPRFYGCNLIVARSIARIAETNLRKQGVLTLLFENEDDYLRIGSGDVVETVNLTDLIRPGGDLATQVKLRVIKFEQDGTTVKETFELPTKHSLSAAHLDWIRAGSALNLIREQAAASSSSAGGVSGAFAAAAGAAKAGASKVASLGGVRGYATAAAGRTGGSRNPNDPNYVPPAADPRTDAIRKMVYPPAAAKVATSASEVLPFGEASEEVHSTITRAWLLFQRTQREELAERLDKKHARLREALLDLRATEPRLYAAATYRVAPNKRSPREHRKLVELGLVTLPGAQPKADAPTGAEARRLVKAVAGGARLEGLFPREMRVPTNSPPRKVWPDHEPSTL

SEQ ID NO: 41105 - protein, 252 aa, Oryza sativa
MASANISKKRKFVADGVFAAELNEFFTRELSEEGYSGCEVRVTHARTEIIIRATHTQEVLGDKGRRIRELTALVQKRFKFPDNSLELYAEKVQNRGLHAVAQCESLRYKLLGGLAVRRAAYGVLRFVMESGAKGCEVVISGKLRAARAKSMKFTDGFMIHSGQPVKDFVDEAVRHVLMKQGVLGIKVKIMQGWDPEGRAGKPFPLPDAVTILEPKEEAPILAPVSESRQAPAEVAAPAQAAPAAEVQAEAAY

SEQ ID NO: 41106 - protein, 600 aa, Oryza sativa
MSSASDPAASSAQAANDASKKKSTKKAVSCEPCRRRKLKCDRGWPCGACRDRNESSKCGWAEGVRPQTTGRDTGDASQTNDRLDRLEAMMGTIAASLGVDLPGAKNSPASATLTPGGVAQRKYSSSSSLSTNPGSANASTSKLSTLAELGASEANRAALAATSTRSDDPQPSYGIGPISWGFGFGISQTSQVSSEELTRRTLFELYKLLPDHSTVRALTDFYFRELSWMAQLLPEETFRKRLCTVEEQRLFWDGRPDAYRYEEMRDSLRLVATIHALCGAVLVFGEPIEADSLPEKYGKQAFTIFLDAAQHALSMLDIYEELHIDNVRTMILLSSCLSALKGPAVGSAMIANICFMAYALQLDVEPPKTLPFEERKDRISLFATICIQDWFSAGNVKRSYMIDPANTSLPSLFGPDADTNDIIAVPMRYKLKLSDVSRRASHRIRMSEDEAYEFTKQLHQEVVAIEASIPEHLRFDESLIDSDDPDNPERWHRSAMALAVQMQLLTLHKRFYVQSWSNPKYKESRDISFAASMLIIKVFRNAFKWFTPRENATLDEQRAVIGEGMRTQHNSVSRLWFFAQMSIISSLVLIHFVSMLDTHP

SEQ ID NO: 41107 - protein, 152 aa, Oryza sativa
METTSMLDSPILVTSPSESGEGTVGTRGEPLRRVPLEDPTSETAHREAGGGRNSMERWRCDAPASRTAMSLPVATRPTRSTAPARHCRVSPPRRPFFTCSVSTGGGASAIAAPPCSREWGIAERRGMRKGFQIFRGECEIAEEWIWAHFHLS

SEQ ID NO: 41108 - protein, 689 aa, Oryza sativa
MPADRLLGTLLRSLQVYTDQQDTPRVLGTASSLLTTLNNPLNVTLLTSQILSAPAIWAVPDGLQTCTRCMSVFHSAAQALVRHENASHDKSPDRDFSQLQLERTLPKDDWIRAVAKGADEHSARWRHLLALGGLLLGFGPADNDALSRGMRSTLEQGFVHAINLALEDVVEEDHFSQQSISLVLNYCFPLLSDVERSQIDFDKLLPVLMRSTFRNMDGLGSTYFLGAIDIDVEVTPEQQYRWPDKAPSFQSIQRTLASPLVSSLGSLARLIGHTLEQVRAPWLVSSAVEDLEDFTRTLHLQWRQNKLSTVDSSEEQRRLDPGTLHTTDLLWRLLRSTMYAAVIVLRSAVGRLLADAGLADDQTASNIATQTLNSLRNLYFVSTRSGSATFSQYTFVYLTAIDILSSYPNAAQVYLQDIRPSEAGQVPQLPLDRNLDLFFLNTSEHLTLALPPAIAEDLLVNSAAPYLASASDANLLPIFEAAHSVMLAVFSAPQNADIANRHLPFYVDALFRVFPANLSARQFRLAFKTLIQITSPPSPLSISQPELPSVLLELLFDRAKHATTMPLGPRSTDPTAAEDSVLLSEQATIVLTVIDILTQLSLGLLDEWLPIAADMVNTIEDANMREHCKEHFWLTLVDGAMDPERSRVCHAWWSSAGGRDHVLFGREPAQLVIPEMSGALPAVEGTSKL

SEQ ID NO: 41109 - protein, 448 aa, Oryza sativa
MFGLTFANFSGNRDGGTFTLADCAAEEGGVCAANRVDRKMPDHPFHVLEATICCIATAIVIVLVVILVVYLRRRRKMLRRRQFVLVPAGDNAMADHETTLSNNLLGRRRMKKREPPSINLATFEHAPVRVTVDEIMRATGNFDGMHVVGDGGFGTVYRAELPGGRRVAVKRLHGVGRRFQGGEREFRAEMETVGKVRHPNLVPLLGYCAAGDERFLVYEYMEHGSLEDRLRGGGGAALGWPERLTICGGAARGLAFLHHGFVPHVIHRDVKSSNVLLGEGLQPRVSDFGLARIISARETHVSTVLAGTLGYIPPEYALAMRCTAKGDVYSFGVVMLELLTGRPPTWSSAEVTAEGDDERGGGGSLVGWVRWMAARGRGGEVFDACLPVSGAEREQMARVLDVARDCTADEPWRRPTMAEVARRVGAIEAMEYGPLVVAVSSGEPPAMP

SEQ ID NO: 41110 - protein, 267 aa, Oryza sativa
MPLKRLEIDNFKSYRGHQVVGPFNAFTAVIGPNGSGKSNLMDAISFVLGVRSAQLRSSQLKDLIFRGRKMGAATADDDDAPGSASEDDDDQGEGTATKASVTAIYEDNKGYEHRFQRTITLAGSSEYRYNGRAIQYSQYNAKLEQFNILVKAKNFLVFQGDVEAVASQGSKELSRLIDQISGSLELKEEYERAKEAQERATDNSTFNFNKRRGINSELKQFRAEERGRKVPAPPDRARTAHPQPHPLAPLPHQRRHRTQHPVRQDPG

SEQ ID NO: 41111 - protein, 733 aa, Oryza sativa
MPLIVPDVIEIGSSGSSNRASSPIPELTITKMNGRSIQPHEAEDEEMPRSSAASRVSLANLLGPSGPGSSPYSNTPRTSPRKRPSTDAPGTGLQPPTDIANGGSSSSSTTHSEGRERRRSDAASQRSPARAEAVPDAAPAGDGSTYHDVPTVDVTEPDGKAPGDRDEDEDDEDEDDEDDDDDDDKATTDAGSASEAEGEDKAEGSSAKEGAGSGEKSIVPKKRSRRRSPFPPEAATAPPPPKRPTVRLSILEARQSGYLINVPELVLAKLKGQDHPWAKWYEESLLEAAEPEPAPPQAGPGAPPDLEGFGSLARLLAKYPAGEGSAASAGASGASKKRRKVNDDKYDIGQYDVRDPFVDDSELNIDEPTHFAKPKADGFYVTQGTVELAKAKAMGKGQPLLGKDRPKPLSIRDSKFGFAGSLNKLVAKKAQQQAELPPMPASSSMQLGSLLNNGDPGSPAMGAGSALTNVQRQEGTRDSPIKVDDNDSGSSKNAAKKNRYPTEPVDPRLQASFDDLKSKVGAESFAVKTKFPATLKPPLIETAKLAVMLGEYDDNFFNHLPTIFPYNRFTMMKLVKREFFPHHIKYFEDLKQERGEAPKEGEEAAPKPATAAEGDQSMDVDGKEDDESVEPTKRWEWSEEMREEVFVLITIENAMSEIRNEKYKLENSAEQYSEINARKACYKQMAELFPEDGWTTSTNISREYAQIKKKKDRQEARGEELFGDSRASSAVPA

SEQ ID NO: 41112 - protein, 913 aa, Oryza sativa
MDKKHEDVGGVAQIDKTSVFQEARVFSQSPISPRKCRVILTKLALLLFTGESWGRQEATNLFFGISKLFSNKDASLRQMVYLVLKELASSADDVIMVTASIMKDTSVGSDVVYRPNAIRALCRVIDASTVQAIERLVKTCIVDKNPSVASAALVSSYHLLPVAKGVVRRWQSEAQEAASGPKSGGFLGGFGGSSHNALQASTNYMTQYHAIGLLYQMRSGDRMSLVKMVQQYSAAGVVKSPAATVLLVRLAAKLAEEDPNLRKPMVQLLDGWLRHKSEMVNFEAAKAICDLRGATDAELVQAVHVLQLFLTSPRAVTKFAALRILSTMASFKPDAVRSCNQDIESLITNSNRSIATFAITTLLKTGNESSVDRLMKQITGFMAEITDEFKVTIVEAVRTLALKFKSKQAGFLSFLSGILRDEGGYEFKRSVVEAIMDLIRFVPEAKEDALATLCEFIEDCEFTKLAVRILFVLGREGPSTPHPTKYIRYIYNRVVLENAIVRAAATSALAKFGVGQKDPEIKKSVHVLLSRCLDDVDDEVRDRAALNLRLMDQDDDLAISFIRNDSMYSLPTLEHQLTMYVSSDSKETFADAFDITKIPTVSREQADAADLSKKTEGSTPILKAPSAQKAPAKSGAESAAAATAAMQKYAEELQKIPELAAHGGLLKSSAVVELTESETEYVVTAVKHVFKDHIVLQYDVKNTLPDTVLLDVEMVVAPEDDDSGLEEDFIIPAAELKTNEPGTIYVSFKRLETESMFLATSFTNTLKFVSKEIDPSTGEPEEGEGYADEYQVEELELNGADYVVPAYAGSFDNVWEQSNGESATETLQLANMKSIADATEQLIKTLSLQPLEGSDVPLSPSTHALKLYGKTVTGGKVAALVRMAFSAKTGVTMKIEARAEEEGVAALVVGSVA

SEQ ID NO: 41113 - protein, 840 aa, Oryza sativa
MTSTTDHGDKAYSNVITSTCTPGPSPVSTPGAMSALPLPMAGGQHHHPPSMPSNSISIAGASQDQHTPGSYGPSSMNASSDMGSVMTEDEEDLEDYGKGGYHPVHVGDTFSDGRYLIVRKLGWGHFSTVWLAKDNKMKRHVALKVVKSAPHYTETALDEIKLLQRLVSANPSHPGRRHCVSLLDHFRHKGPNGSHVCMVFEVLGENLLGLIKRYQHRGVPPHIVKQIAKQVLLGLDYMHQECGIIHTDLKPENVLICIDDVEAVVEAELRSNPAAVPTKLVGVPPSRGRGGTQTPKRDGIFITGSQPLPSPSSSLGSSPMFDKWAFGMSKIDKPSVSDSENGFRSGASSEAAGSKGGSLVTSKEREGSTDVIGHGISQLSTQASSSLPGDSFGSRTTTGVPQQKGPSLLSLGAPRVPQAPAPAAPSSAAPLAEAAAEPTDSPSPMSMDSPSPTDRQEPTPMDQEMHPPAPAAGDPTTLPPPPPYDPSSLERITVKIADLGNACWVDHHFTNDIQTRQYRCPEVILGAKWGPSADMWSASCMFFELLTGDYLFDPAAGTKYNKDDDHVAQIIELLGDFPKSLAFAGKYSADIFNRRGELRHIHKLRFWPLISVLQEKYLMPYNEANELSSFLMPMLRLHPEKRSGARELLDHSWIEGIVVQGEIEQAMRQAGIDVDALTAGSPSGLSLPPGLTPSEADALKPVGSVSSSPAPLALNMQGLEDAKRRAAQHQADAAAAAAAASQNGASQTTNTSNAASAAMPHSRDPVHALQAEALERSSSSDGAGESHMTIKGLGSEDASASRSVSTPKLTGQAQAGSSSNREAGSPSPQGLPRPVATTVQ

SEQ ID NO: 41114 - protein, 790 aa, Oryza sativa
MPPTLTMRRSTLRPRSPRLRALGSAHTSNASHRDSMPPRTTPQRNSRHSPALFASASSRTRRRRCTRVAAFATHAAILVSSILVFSPAMMAPAAAQSVSRLDTRSRAAAMSANQHTFDARATAPDSLFDFNSQPRPASDHTLPAASFSHPPHSFDDVDDRLPPEPHPSAPLHRQYPRQFDDESALFGERDVSTTLSPHEYNAATSATQSAHRYSLPSSYPSSIASSWSRPERSVWFQQKAIIITSIFLAIFIVLFIGAAVFLRERKFDDELAGLDDEEALARIEERMTMGRFSDPTEKPAGGGGSRLKRRLRLGRKRSEKDSVDPDSTDPSTGSSSALRRKRFLVSRWTRTRDSNDTVRSSNDAASIRSGRSARRVALGDPTAQQTVEVVYDNTDANAASSHTATSARDANSADDSHASDSRTNRPRSPPPPHPDSAQLDGDTATSPTSGASARSPRRAVLDDTDFQAADAAETHDDDLRHMPPAYISSGSAALPSSSYDGGALAAALARGDAKHGIPPPAERDTSVPPEVFTAVLAESSGAAREQEAEAGPTAAHIATDDKALLGALSAAASMPSAPATSEATAPAYGFAGGSSSGAVILPPTAPVLEADAEGFELPPDEAQDAMGGGKGKAKQTPLATSSLLPAPPAAVQTAFSPFDQPYRSTAPPGAQLPSSPPMARIGAGSDSGGGMSSRKSEKQKEAEEEQLAQLVASRPDVPRYERRQSSANGASAPALEEGAVEGVEEDARGLPAYEQQRRASQPGTRRQMQLTPTAPSAPSAPSPSADGLDE

SEQ ID NO: 41115 - protein, 982 aa, Oryza sativa
MVNLALKLSVVVQAALLLLALQHATTPANAFFGRGRPAGFNSTDIVSRYADVETSDPVMQRAANAQPSSKGAQTYEDGNDDDDDDEYDVLEIITSFEPEQDEDVGAGKMRKRGGPTPCPAQHTQRQRRSLQTPLPHHKRESEPETYHEEEEVTKTIHQTVNRRCTQNARRAPQPTPQTKPKQLKKRYVSNFQPPAGYRYSWGIDGSRVSYGTFTGQYLSRTTIFGASAVGQSEVDTCSARCENTNGCGFFHPVQMNGGSEGAVICVLYTVKQSKSAATWTSGAGSAGGSVAFSYGFTRNAGPAAGVANFQAPSGYLFSWGIEGARVSYGTSTGQYISRSTIVGATVVGQNEVATCSARCNDAKGCGFFHPIQMSGGSAGAVICALYTVEQPKSAATWTKGAGSAGGDVKLSYGLIRNAGPSPGNPAATTSVKTTSTTAKTTSTTPKPTTSSTSSRATTTTTSSTPKTTTSSSTPVPTTSSTSTRSSTSSTSTRSSTSSTTSTSTRSSTSSTSTRTSTSTTSTTSSTSSSKTTSSTSSSSSSTTLSSASSSTSSSTSSTVTPTPTPKVYSLMANYKGANFYDNMYFFTFKDPTNGMVDYVGRNEASSLGLVKTTSGGQVYMGYATTRIYPPTPTTTSTTASSTSTSSSSTSTSASSSTSTRAAGRRAISTSSSSSSASTSTSSSSSSASSSAGSFGAQAVTTSSSISGSSSTSSSTSSAAATSSAAPIPYMKSVRVSSYDTFTTGVFILDASHMPVGCGVWPAWWTVPTNPAGGWPNGGEIDIVEGISFTSQNTYSVHTVPGCRVNATTNSQMGQYQLTNITMATNCASAETGNQGCGVQSSLRNDYGVGYNNNGGGIHAMVWDKDEGIKAWFFPRSATPADITAGTPDPTGWGTPQGSWPAQSCDPTTFFFNHVSVFSNTICGDWAGDKTLWNNAWNGQAQSCAQMTGYPTCQSYVQSKDVDFSQAYWLINSVKIYQTDRTT

SEQ ID NO: 41116 - protein, 880 aa, Oryza sativa
MQVEPARAGLAVSNQSTSPYLAAAPAGLFASSSQPTAAFDPASQPDAQHLQLQHHQHQQGFIAADAFQHSVARSFSPAVQDPSTSTHDGAVYRVPALARSASVDYTYNYQQLPPHIHAHQQHPQQQQQQQHAPPPHSVPYHTHVYAPTSYASLTGSAPAPAPFGQDLTALPYTHSPDLAMLPNNTGMPMMRYGSFGLPVDDMARAGSSSGGTPGPMTQQDIDNLLAMSRAQAGNQGDASAFPCTYCDKVYTGKHARSIWRRHLQDKHNIPLSAQPRRTRWDGDANRPKNAEERRARMLESKRRWARKKRLQEKQAAQGGKSGASNTPNPDDSDADDADDADDGMDADVSNMSMSFAANDADESLSAPPDAQLFASHEPLGRPAKRQALASSTAHNVAGPSAGGAPHAGQLLAGPFGAHELPAGSGMYSHSPLRHTGPSLGLPTAQHVLPAMPAAAGPNDSLSSNSSDYSQPNSASFFNDSFGGSASNAGSDGASTSIDTPATTWPALPALPAVEGEKLVGGAKPKMQKGETRDAAIQLLALRSGTNSPTDEREVSLRRRDDEAWSETPSRAKVSEHEALTALSAGRVDEAASPSPVSRTLPQRGMPVTTPGPAARTGENPFSLDKHKISPYRRLSYSAAPRSPVASPTHLTFGAPTAKTSAGAVVGVKLPPLVSTPVRQPADEERTRLEALPPLLGATPFSGLGYSARRRAVGRPSPSRHDDQFSSPQHLNLTESLGLAPHSISRTSSFASAYAGSLGLTPSVAHMAGLGSTPFHSGLGGLAGLGGFTPMSAKFWPESSRKSAHRAALSRASVRPKEADIFDAGFKGKDAAPSSDSFDEDDALGPGAIDTPSKPAAARMMPKQRKRKDEARSPLKAIGLN

SEQ ID NO: 41117 - protein, 1005 aa, Oryza sativa
MAPNRGIASHFAASKASISRTARSLKSKSTKDAAKATPPTTGSTAVEPLAASNEPAPSSPAAPSVPKPATPKKSTAKRQTRTRLRTPDEGEVDRIMLENQALLQASPSRASSSASAAPTDDAPLTLLGTPPTTPSAGSRSARFSPLLEPTQMSPISVRTDPDTKKMFLLLPKSPKPSSPAGASAGPSSPSKRKLTTPPKSTSPTKTPRTLDGTPRRLITGEHEVFGTEEEDGLVLTPGKAKGTRIALGSPSKSPRLARLGDTPKDKVLRTIVDEDDESYITPRSVRQRPKGVPLPPLATQNAAAVFRGASIPSSSSAPSISQRQRKDLFHTGPFSGLAAISSSQNEVESETDPADDEADLPDPKHALSTQLPLPSFYSSLMTLHVALEHALVVHLATAGCASATLESSVQTSSDSDSESDTAFGATRKATKTVRLPNLISYTALRPLVERSGGRRLGPTELRRLANVWLDFQRQSSDAVDEVRGLGFIIGKTRSIDTRTGRRALDWGIGIELEIKRTVREKTPPTQIGFGGVEVQSSPLLASSDNFDETVRGTPKMPSRATTPPPAGERVAANARTQLMSPLLGSPRRKVCAESPTPSSPKVRSSLGAAKAREGMSVVAMWNNGLETRKAEVARRLRQRCARFHQLWLDENGISVPAPKQAHEPSTPSRKPAGAADAESDTEDGVPGPPREVVMGAGGLLTPSATRSGGRRVGKRTFHLDPSELDSHTLSDEDDDDAVLGFEALQGGKQSMLAEVSHSVVRTSKSMPNLAAAAVPPEGADLVAWHVEFPLDDARVVKPVPLATLPSLSAPLATPHRNKEIGLGISDPTTPRKPIKYTAAPELASEAAPSTAGMSLRERIQAKEQLRRTASLPALASGSMTSMQALSQRALVSRLPELCSILFMLFSNGTTLSSTGITRSPTIPMQDLLAKLSKSTKITLSPRECRAAIDLLASIAPGFLVVLNPSDTAAAGTKEYVRLGTNPDTNALWRLNDLRARIASQLNAHK

SEQ ID NO: 41118 - protein, 739 aa, Oryza sativa
MAAPRVSFGEKDMENGGDGAAERSRKWSQAPGNIEDLDEYTALQKYISTYRDPKAHAAEEAEANAADAGKGKAWYQFWRSGNSGNATTADPGFVPDEMLEADIKQGISSHEVEQRRKRYGWNEITTEEENLFIKFLGFFTGPVLYVMELAVLLAAGLRDWIDFGVIIGILLLNAVVGWYQEKQAADVVASLKGDIAMKATVVRDGQESDIKARELVPGDIIIIEEGESVPADARLICDYDTPEDFATYKELREQHALNPEEDPAGSEDAEDDGEGVAHQGHSIIATDQSAITGESLAVDKFMGDVVYYTTGCKRGKAYAVCQTSAKFSFVGRTATLVQGAKDQGHFKAIMNHIGTSLLVLVMFWILLAWIGGFFRHLKIATPEESSNNLLKYALILFIIGVPVGLPVVTTTTLAVGAAYLAKQQAIVQKLTAIESLAGVDVLCSDKTGTLTANQLSIREPYAAEGEDVNWMMACAALASSHNIKNLDPIDKVTILTLKRYPKARDILKDDWKTEKFTPFDPVSKRITTVCTLRGDRFTCAKGAPKAVLNLTDCSKETADLFRDKATEFARRGFRSLGVAYQKNNDPWVLLGMLSMFDPPREDTAQTIIEAQQLGVPVKMLTGDAIAIAKETCKMLALGTKVYNSHKLIHGGLTGTTQHDLVERADGFAEIFPEHKYQVVEMLQQRGHLTAMTGDGVNDAPSLKKSDCGIAVEGSSEAAQAAADIVFLAPGLSTIVLAIK

SEQ ID NO: 41119 - protein, 722 aa, Oryza sativa
MPASTDNSSAAGPSRLSSSPRATFYPSWPHSHDEAEYFEVPPDHFLAQQRGPHKAQPSDPSEHPLVRHLSASSSSTTRSASIDAAPTTTMPALAAHAALLAPSQPLAELASAVQAGIPAAPSSVARANPPLDRLADAVPRPAGFSTVDDHIPDTSTLAAADFDVDVRSGFLPPEAPVLRLTRPHADHWEHALDQAKRIPLMQGGGGITITPQQRILARRWRRSLREMPVLPLSDELANDIRFARRGHVVLSFLAHFYIHSQPRKAEHAVDPTPARSWLNVFSRKSPEELQDDQDLADELAGKFARRVPAAIAVPWVQLSQKLDLPPVLTYATTVLWNWKYIDPTRGLEPDNLRIVETFTGTPSEHHFFFTSLLIEARGVEALELMRVSLDEAFVADRVARRRVAANLNRLAVVLQDLTRLLHDVRNGCDPKIFYWGIRPWFVGSDTVDKGDEIGWHFEGVDAEGVKRVFSGPSAGQSTLIHAVDVFLDVDHTRRKQRLNRPAVTSNGDARGADATFMERMSLYMPGHHRAFLSHLRTISFDDADDIDDDDDAPADDDASSAGSEAEQEQLREMPHPIRSLALKAQTDEHDEGLPAAYDNALTQLKALRDEHMKIAYLYIVAQARGSPPPAYAPLPKGFTGEPAVDRKLAKARAQSDEAEADAALDTASNDNGGGAKGTGGTDLVSFLRDCRVNTIDALIMAKDTVVAAATRTADASSSGVGH

SEQ ID NO: 41120 - protein, 895 aa, Oryza sativa
MPTITFVTPPGRPSVLRATSGKQEAAQDSNSMHEPAPLTFGKKRILPVLTTSPEPAKDAFEQPPQRASLDQPSSSRTVHDDTRDHKRPSLLSAAMSSSGTHPHRSLSTTSSGILRKAQLEDGSHTDDRDSRSHAPSTDAVNPAPRARLHFVEPHKEATHHTSARIPHDARTEESSHASTSAAPAVLANADNTPRKRSLVIQEHADVIERVAERAARQANNSETHAPDHPPHTRHTVRSRQHSASSAGEETASTRSSWAVRSSSRGSSVATSPTVVSDVNTQELSDFDLNRPARDPKPPANSSVTPIFHSTDAKPDAEPSRPPPPAPATSSRKLVFVDPPPPRPRHDAPPPQASKLTSAATSSKAHMNAVSHDDGHDAHARKALSFAACPKPERPARLSPAHATRRAKKLSASPAPHKLAYPQRLRGIRGTDPIRSPAPDRVVPLTHVAAEHWEAAIHDPPSSEGSGYSEDEEDDDDDQDDDDDDDDSQKGLGSEQDDDEQKFSSSVSDQQSLAESAALASQDDAIARANAAIQSAGAHQAARALTPVLDLDSSAVLTGRRHSTSALLQLQTAHAGPSVPLSPPRVARPSRSTQASPRQGASRAGRRLQPKESLSHPMCFLPDAFGDSAPATPTEPDSDGYEPPRANLLHGWLSEGGSATSSRRASWQQPLSPALRPGAGEQEAVPITLPPFRRSRERTAQCSVTSDDERASRSLGGNAAFIRESALGRSLSTAPLLGVSVPDGRPERPVMWKQLSHVERPASGLGAYRRASHSLEPRLAKSAYTSPIGSYTARAAGVKQRATSMHMRALPVVAQTQRDVSGAASPRRDDAQATLKHHLAPVRSEAERDDEAPGNAARYWTERLASLAHAMGDELASVGQTVLGYEARANANAHEE

SEQ ID NO: 41121 - protein, 871 aa, Oryza sativa
MSPSDGHALYGDDQHNSRTESTSSGAANMDARGDDAPTPGSSSSHHTTSPSQGRTPASTTPRSAGHRADHTDDAADRADAPQPSGSGAGTAAVPLAGKRSRSGCLTCRKRKKKCDETLCVETGGCWRCRNAGYRCEGFRRAPVTFEPGTTTTSKSKRIKIASPDDSNPRVKTEPASSTSQLADFEHEARQADGMAMPNSLAQFAGLATSTAAWPMVNGLAPAPTTTTTKADAKPPISYKNGTPTSPPSTFSSFVHPSAMLPPPPRSPLRSAHDHEPIRPPPAATSAFYAASSYVACEIVGDCLFSGRHLCASCSAVANRLMQPDPAQLAAMDADLVQVQPMPSLSTPMASRPHSPAPHAAPDANGASQASAKSKLVMESLIGYYSTLITCWTQGCDVRGLEASTLFRQLVPYLLDSVDTNPPLRLSIAAVTAGYVGGARLTWPKDVVAIHQWANTLRGDRTSIADCVKANLSFPFPATPDTVWSASPSGSLSSETPAGASSLSPANAERLRRASTTHATLDDLLVGQAQTLKQLAVKSLEQAVADYRCKTATARAAGVGFTEKGFLAELKQVNPVLLAAMNIAIYAFAEEGMESYFEEAARMRALIDTLLGAFPPVDLAKLVSHELLGFRTYVWSDVSTAIACGTRPHLQLAKSTFATDADAAVGAAEGTIERELDMAFGLQDASLIALSDIARLRYDYDGGDFSKTAQRAAGSAVPAWVHERAQRIQTRAESCRIETSLTTGSAICAMMTKSACVILIHTLIYRVGALHPVVRSLLRGMLELWTSAGEQYCRSVGCSNFNLPIFIAASVAVDEADRKVCEQAMQIVGHEEAGPAPGRELIREVWRRTDITGQPCFWTDLVATGDFAVAFF

SEQ ID NO: 41122 - protein, 996 aa, Oryza sativa
MSMDRGSPQRQGQASTSAPNREPRSPASPTTIQRHPFTRTPSNEPPRIHFAREGDTTPGRLHPSSGTDATLTVDLSSSSELDRASLDASVNGLSSSMDSFGAHPTDALAQSSNAHSSSASKYWPEPSGSHLRSAPYAVNDSDSQASYPPHERNGPHARIPRLHTKSLGYTSSNDGDLTPIASTSRMAPPLVGVNLTDQQIADMTESDVSEYDDTSKLRRNRRGSGADPAATSVFSSITKSLRGEPFWSRSASSYTPLTATRSRSLKKSKWNRNSKADKTLFSSSAHPSSKDRTRPRRTPSIWTHPLRMLLSFFSELFRTAFGPIHPVTIVLALVLIASFVASVTKLIIYILNPDKEPLPWRTYCQQQPSFPHAYADALAPVDVFVGVFSIDSAYERRHLIRSTYATHTMPLDPHTGTPTSNVQVKFIIGKPRQAHARRVALEMETFNDIVVLDMEENMNRGKTHAFFRWAAENATVPFLRAVEDGQNPASGLAQGSVLLGELESRGQGHGQTREVLGGSTEQMHRYQVLWKKADYVVKADDDAFLILEELERHLRVAPRQMTYWGYLFRNWFMGGECYALPNDLVQYVAKSENVLHYIKGKEDKKVAQWINLHPNRSSIHWVSEHCWIYDHPKAGTAYSHGFLFPDYVEKIKLEGRRGLTDQEIARRGGEHRAKSYSTVSRWHSPYVEPRGDLTIEEEVEALVEGGGRWSGSWVRGEEGNDTQIWVPWQQIVFEANDERLRPPILDNLGAHPTLAEEVGIDPATGLTVRHIHAANRQASSAFAQADDDAVHAQRRKRDIPFLAHLPSVPGFDFGAGGVSRSAAEDRKRSFANSALQPRMIPLPTHKDGNGEAEELRRRRYLGRRFGGTVVVHYLKKSEWFYETALAFAGRGRFWPDGAGGTGSEWRMYGSPLVRHEDGYISGGRSQPRPDMELAYLQQARVQAQANAAQAQQLSARMGSFTKPKPAAAGGPPPSKAPPQDSQPPVQPPQHQQPQHE

SEQ ID NO: 41123 - protein, 968 aa, Oryza sativa
MPDIDNPASPVPVQIEERKSPGSPHSPSATRSRHPHHHSPSSQGSTPSPSNLSHPASLNGDDARHGTSPATSVDVPSVPPAGLKLDTASHYAQTRREQQASLSRAGVARSPHPLDGSFTGRSGGMLATMQEEGGPGFADSRRDSSLGFDSNQTFSQMEQAMRASRHRSASSAAALALHGSSGPYVDRWASNAAGRIAPASNLPSRTLWDGVRTGEAAGGPNAPNSMAAQRPQPHLQRGFSASYVRSKPEPASPSPFLSSPAGFHDLGFDFTEGSLRTHRSNYNTNSSPFGAVHDLPELSSYPEPSRLGGADADGPDGDNDRAQSGYESRRHSVAGPTIARRDSSSASVIGGHRRAIGFDVAGPYTTDRGGHELAGHGTTADRGWPVAGRHGRDRSITSVSATASGFNPFAGGSLALSLDDLAGDSDFEPSSHARTPRRDMSGTRGTADPTCVSGTSAPNVGPHAASMPSAFDEGSLDGFGAGSTRFADAPRLTRAGLDSLSASWDTMAPSHMATRSPGEGQHTFAEMTRRLRQMSIGEQDVHSHSHRHGSNASSFFDNQAEGTRTVRASPGTSPTGVRGLAAPTTGHALSAQAKSFTASQPMASYGQDFAGAISGAAPGAHGMHAGFGFAPPGSVLAPGSRMPYPPPTASPFGMMQQSAFGPGPGPALGLSGPAPLPALSPNDLTFSSLAALGPMPPSSMGPPGALGGGGAPFGSGASGDLQDLGKGVPLGSLSKDTPLYIVEFKQGRTDLFFRSHSPTQSPSMREEEPIRRGDLVIVEADRGKDLGTVVNDSITVEQVQAFLAHQSDLTIGAAAALQGNGSTGLGAGSSRDETSSNASGRSGSPSASSAASGPSSSATSNAMASRPMRTINPKRLFTKAAAADTSTLYSKAQDEERALQLCISKVMQRGLPMSVVAAEMQWDRRKLTFYYTASMRVDFRDLVKELFRLYKTRIWMCHLGHPSGTGLS

SEQ ID NO: 41124 - protein, 1006 aa, Oryza sativa
MLKRAVQSLTKDSSSGENGHAKGSSSPATASANGTGSGHTTPIQPPSAKSTLDSTMSGSTDKKFRLSHIFSGHSLPGRRSSSRASSMDEPRPSAIKKAQRIEEKERKAIEQERIREKIAFARRQSDLRAAKIETPEQRARYGDHYPVEWNKDHDRWASIASIADDAETGDTVTVRARIHTIRDVSSHLVFIVLRQQIATIQAVLAEESDIITGHMVRWAKRLPLESIVMVRGVLQKPREPITGATTQHAEIKVHELYLVAPTKEALPFNVYDADLVIKKSDDHDSPSSADASGNNTDTEHDGLPQDENHSVERHEGPVITQRVRLTNRILDLRTPTAQAIFRVNAAICNAFRSHLDKGDFIEIHTPKLQGGASESGSSVFMLDYFGRPAFLAQSPQLYKQMCIAADFRRVYEIGPVFRAENSNTARHLTEYTGLDIEMEIVHYYDAIRVIDGMLKNIFTVLRDNFKAERELIKRHFPHEDLVYPEDTLILPFAQGVRILRDSGFVEEDGSLPKEDEDLNTRAEIRLGELIKEKYNTDYYILDKFPSSVRPFYAMEDKENPKVTNSFDIFIRGQEICTGGQRIHDIDELEAKMHRLSIPAKGMSEYLEGFRLGAPPHAGCGIGLERLVMLYLNLGDVRMGTLFHRDPRSLPLQKNVEDELRHPEASTNPPPWKHPRVALKADAESELRDMQPLEKLIANYGDASNTAWLDDRYKTWRHPDTGAAVGDSPFKGYAMIIGDPLCDRTQLTQVVSAFLHFIKKEAKLKPIWMMVSEDVEEILGGRLNWCTLSCAAEERVEDPAKNPARHDTEIQKKVRHARKEGVRIQDYALKEEVPQEVVRETDERIDDWRNNRKGEQVYMTDVHPWRDMSHRVYYIARDAGGKVCAMVVLHQLSTQHGWHIKWALDFPGAPNGTIEHVILHALENNAGSKMTFGASATSTLVAKHGLSKMTVKALTKAYSSIAEHNRLTNKGEFRQKLGAVEDRVYICYPRHGLSPAGIQAIVGFFKQ

SEQ ID NO: 41125 - protein, 940 aa, Oryza sativa
MSNQAAAATPTSPSRKQHQQQQKQPASTRGGLAAIAGIASPKFSFRSAVQHKSKLTKAVPATTHDAEAKPARGVASSIPSLSRGRFNSTDAPSTSTLPRPKPAATSPTACRPASSLGKRGVDDSSSITDFGVYKASTTSTRLASTKSNNPSDSAANTAKLRGPPSARTQWAPPAPKTLPSPSSSKAPRKIARADGIAEVHAGTHAAGAIPRSRTMSAASRTIAAPQSQSQLHRPKIGTLPKPKAKPALVRTILDERYESSASDTDEDAQSDWDQLDGPDVSRIRTKRSMQPRLSDGASGSISTTRTQTLGGSRIPSIGSSNRTLPRPHRRSSSNSLLGKTPTDEKENASIPAPSHSKRHSISTSIEAAPARARTSLPLSPADNTPSPSKSASLSALRSRGLQPGSLQSLQPAPRHDLGIKNSIIQANPVHPSIAALHAQTAPHQPISTPEALVKAKKRLSGALFSSSSSSLTLNTIASTSPSERAGMAHSPSLSKLPQAHKKPVKAQTVSAAVVTPSRSKQSGMPRSASRSPIKSSLLLFTSVPEPDAGPSSDEHCTTSLSKQVVTDNATSEIDAHLLASLRVVAHKANLQLSDLLDADSQRYTREASEELEALAGDVSVDLMALDLAASPSSDASMLRSPLIAHTPPAVPAQPQPDIPTRSLEPAPAVDAAPELEGEETDTSLASPSVRAAARLPLSTPGAGDCVPETPLRPRLLSASNASPPLASPSKACPPSASMSARSRARLKKALRESLGLEAHYAALNLAAPSTAAPLHPSASRNAERVAGRSNQGVGALLTDSDLDDIVSAVARIDLHHAQADTHEVRPAVEVEEMGEVAELRAAQTALTTQLALAESRESSLAVQLAEQAMAATRMQREHERLQSDLAALRARAAGMEWAQAQTAWSRARVEALTELQDAKVEADTIMLLQAHLGICHLLAT

SEQ ID NO: 41126 - protein, 1028 aa, Oryza sativa
MSSPSQHTSTNNAFVTLLTSDHYLPGALVLAESLRLSHGLARKGKARAGTSRSAATTDFQVVALITPDTLSVQSIKALRRSGLFDWIVGVEPVGFRQILASSTNAPTTVTTGISGSSTAHDAAVLDSELDAKIRDMERNLSLLGRPDLTNTLTKLHAWRLGRDSAHLVAQAASPVDGSDQKWHGFDKLVFLDADTLVLRPIDHLFRLGSSVHFAAAPDTGWPDAFNSGVMMLTPSIDTFEAIRSFARTTGSWDGADQGLLNDFYGSDDSSASLPDEAQSPDTSSAPGGGWKRLSFRYNVTSHGGYTFAPAYQRYGRNINIVHFIGQHKPWNRPRPHGSAQPNPLVAPRDLDSQTITPDQPDYLLALWHSAFASLYPSSGSASPDSEIEIVHTERGVEVVERRNFTVPTYHAVWDAEAREEDASSSGLGFGIPVAARESAPAHPRAHQHWEASYASLPLDGRTSLIPPVPEVARTPSPPTPTQESIDAELRSRDASPAQPIPVPAPSIQHGSAAKRGDDDDSDTSPQHYSPPKLSWNPAHGPPPTGSGAALYQMRVPIDAYYANIWDAGQKTPRTLAEQKAAFFVPQSQGAQDRSGRQRGGPGYIPSQLRRDHVFDNLGSHKPDASKVKPIFPWETQQRTPAAPTRVFPDEPKRSPPPSADTTPKMGSTQQGNNGAFASVAAAPAVSRSRGLPSNLSFVNAWDQAGAIGNFANAWNRRANPTSPNRRRAVEAAKRQAARDNGAARQTEPRRAEGQRAGSPQASFRPAYGAERRASMEEVTDARDGEASDSRDGDDESSSGEESSGNEGVSQVVEGARDGTPSPTNSRQAGWPREGPGRGYMRKAENSVYVQMHATPRSPRMTSRVLSYTSTATEGEVRSGRVSGSSTASEAAARQRAKDRIRPDGWISTGSGSGMSSPPYGGWHQAEMTAASLRGIPGMRAGQAHVRRRHEPTSSNDSLSEESRSASPTALIAQPLPAVRGEVVPPTPPSLEEPFSSSPRNTRAELSQHARTHLHARRAHNFPHAPHAQ

SEQ ID NO: 41127 - protein, 835 aa, Oryza sativa
MSRLLPDARSASAVRSFSAGSHASSNSDASYSSNADAAHTPSTSPALSDHGAFSLDALSWNKLPRAYQPSSPTSDPPTDSKLSPLELLVKRGKQVQQDILEPSTHDASSDPTSHRIYERASALSRRTSVRRPPVQPSPDPDDFDDAQSIRSVNLLSEPGSSFSRNPRTQTPTSQDSPPTPSSSGTSFTVQRGYKATYDDQFDSYSPMHASADEQPHSAHLLSNAFRNSVASDISFNSITGASLDTSLSRRASIDTVRSSEFGEDGRWGRAWASRADDEESAYEESVYGDELDGNVGPGSSHLPSSVAAYDIQLDPDQGPFTSGGGLSSVAQQWKLDHAARDPSRSAEGTMRGVHASSTPAIREMPSKEKVVSLTRSIPPPRLLDQHQAGHWQQQGDPRHSFVPQIESHDGDAVTAYHDASQHIYDRTPVASADRHLGHRSTSSTATITGNDARESTGSPESARVYVYPPSPSGSEASRASGAHAHSSRDPNHRSQQRFSSMPNPTSARIETMSAASSPDQPPQHAGSGEVKRTPLAPSALLSNPRVASAGSLESRRLKPSGHPAGRAPPPPPPAAAWSSPSMSGGTPNGHSDPNQYFQGVDRPIIGRKRAEAIARADGRESMVSDLDVETLRLDGSSRRDSSSTIGSVMTSRMSIGSVAHDPLVLQSANWQEHSPIPPQVASPRTRGAPSMQAKASHASFRSLQPAQEAYSPVAGAGGPNRSSMLRNAKSSNALGSVEMQASASAPPVGLGVSGVQSTPRPRTSPAVDTRTGPSSAEDFLSSGITHHEQGDLARSAFYFERSAKVDGGCVVGMCMFGMALREGWGARKDPAKGFT

SEQ ID NO: 41128 - protein, 1084 aa, Oryza sativa
MSTTTREPSRSSKSGKSQASITVAAAARKTIGFVGSISLLVNNVTGGSMVVLPNTFHQAGWVLPILCCLGVALLACVCGVLLIEAMTLVPGNNRFQKRLEYTNLANLLLPRWLYWIVQLFYQLSTLAQNVSMIIQSVQVMDFTLVALTGYTCALPQIAPSFTFRCSYPGGFTSEGINPFGDWYLVSLGWWVTAILVLPLGFINLDDNDAVQQGGFIALLSIVAVWCGLSVTQTGNGAVPPPAFGGNYDTLMGSILFNYAIGYTLPSWVNEKKPSVPIVRSLPSSLLLSSCLFIVLGLCGAIGFPPPSNSQTLLNQIYNSGSKLGAITFYLFPACVNLTTIPVNSIMQRYNLEEAGVCGRKWATFFGVVSPWLIAIPLYTGRGYETLVTWSGLLLISSVNFVLPPVFYLLALKKYGSGPTAMRTVHEEARASQHSAGNSEPTSRTSRRRSVLSRGPNGTLGRSHTHTQMDGASGVRRMSTGHVLASVRGSNAAVFVAVREQSTEPPPELPELMQEEGKQQQQQQGTWLAQASFRPVCSSPSLEGPTAAAVAAEDAVLPLAAPTDAVTAAAIAKSTLAEPVMAPAPPLTSVAAQEEGGAVAAAAAAISETRVLPVAQEEAGDDDEQDVIALPLTTTTTTAAAMAPPVGVSNRPPLPVPVGGLAVPGWSPAQHLQSLRAQRLSVVGAPVSAEEKTATVAPIDDQESFVATAASVQSDTVTALHSAAIVAAAGAEDVNPQHAAAAPVVGTAVEPVTAAFLAAAVAGNSSNVVSPTSGLLRQASSMGGGGEAGGGDGEEAAATTEDVLGLPAHVDEEELAQLEWEQRQAEKEAARRARVLRKLRLRRDQAAALAANPEQVHVEREFQIVIPVRMAPPREWRTQPLQLLSWLLLLPWHVLFRYTVPHASRAGRWNPLQRWLLLPVSVLAWTCLLCFCLVWSSVVVARVTGLHELVLGVLVLGVGVRVPSLLSELQAYREQRGDLNRLFAHSVWALLLCLPLPWILTGGGAAGVWGTHIIYSASLPIIALTSFLLTALLLILLNAYRWFVLKPVALAAALFVIITILVCFLLDYGVVMTLTPPFCGQAQAD

SEQ ID NO: 41129 - protein, 1039 aa, Oryza sativa
MRPFASSKTGSSKRQIVSLLATFCLVSAAASASLQGARIELSQPPSERQLSSYDGRAEPRYIRELPLSPLLKRHGDDEHEDDADEEQKYDAHTHLEPEHHGMEHDDGTSMDHQDPHTHAHDDASHGHEDVATAAAATQHSHTHEHGHGAHSMHMDGPSPDSIPDASIAGSELRELPVWHSHGGHGHSHGSGPVREKLNETLLFRAKGPDPLSYIEWDFAYGVGSLAQLQRFTADADVLAGTEKMGVVDGRWRKLFDENDADQRKAIAQDIASRIEDAQGQEPGRHRGLLVLHVVTAIVSCFVLLPMALVLRAAHSSLAPPVSLLYLALLGGSMFISIIYKALTPRLYPDNAHGSMGWAILWISLITLGSDVFRLVGQIWSAVGALRSHRRAQSNAWLPTGSVANATGGPQSWRDVVGTMLGRGQSHNLNSESYDALEEEAMLSEEAQSDAHELDVEKHMHRHTAAPRRSGFSSRSGSGSGSPHRVHFDEDGEAGHRTHGGSAESLVEPVNWVSSGSTAVSSPEGGRRNDLTGGNSHLGADRLVASPTTTACNTPRNSIFGADSTLLPPLSLKSVSLWRKQAHDDQAGAPQDSSHPEAMGYPATQPRSSRLDTFRTVLRYARVVAARSLPILAFATSYTGLAVYTGSCRSGYKNVCLAHGIKGGIFFWFGLLTFGRYLGAYADCGWAWNKRPSAAAGVRGGGSSQRSAAWRRSMPSAEFVECLVIFIYGASNTWMERFGAQPGDPYTIKQIQHISIAVMFWFAGLMGMLLETRFIRNMLSFPIAYHHVAAVPLREARRRHNASRMRGGGAGRGARVGYDEADEELELLVEAQTQPASYSASFNPFPALVIGVTGVAMAAHHQDYVYEVQIHMLWGELLAGFAVLRCLTYFLLWLRPPTASVLPSRPPTEALAAFSLCCGGLVFMLSSEEVSFAAMRSGYGDFMAILNVAVAAVALLFCWTTVLMMLKGWAVRREVKRSVHVAEVVPDLGANALQLNVAANEDTQPRHMRASVAGRNAAAAPVATTATADPVFVLEDEEDD

SEQ ID NO: 41130 - protein, 463 aa, Oryza sativa
MPQQRSGAQSPNAAVYRRQSPSDTRLTTSSTTSSTPSSTTTSSTPSSTSTTSSIPITTSTSSSAAPTTSSTIPSTSSALPTTSSSIASITSASTASSTPIPVVTVTYTSTGTDGAVVTGVSTSSNPTATSGRSSGSSSGSSPNLGAINGGVAGGVAGLIILVWLILLPLRKRAKKAKEVEWLTFGQENDHVNESSAEAVYGRGAGGGSGGSGEGKMGGSVANVNEIQMDDMEHEMAQQPYHYQNVDNGAGWAAAGAAGAAGAGAYAHSHAQHDQYGNAHDGYDAYYHAQQQGYGGPQYQQYAMQSHQGWAGQPQVAYPSEAWGAAPGYTSPVQSQTHANAGLQHSLSVGSTKVGGAPRTASAGGGSQSGHAKGSQEGHGGSQYGGGYTSPPLGAQSPQQFPQHYQGHPAASSPPQHAQYYHGQQQPQQHDQQQAYYADQQQHDQRSGSPASGHGAGGLHLANP

SEQ ID NO: 41131 - protein, 898 aa, Oryza sativa
MHSKSYSDWLQSWTSRLIAKTVERHEASVAASTAVGGINAGALKGAEVASTIFGVFRVAIRSHDVGIARHLLPHLVLHSIISGDVTDREAIVDEMQTILQDQVESRTSYDPERKLLTAQTLFTIMDHIGVWMRRKRQDLARTSRRPRIAQGGEDLLVGVESTMLRIPQELLAQASLQCKAYSRALLNFELRVRTMRVQGKGDHDLQSYYENMHRIYANLDEPDGMEGISTRVISPSLEHQIREHESTGRWTSAQSCWEVELQQRPNDPELHLGLLRCLRNLGHYDTMRTHIRGALSAHPEWEDLLDAFRVEGACILGDWDEVEARTQRSQAKSAEHSIGRALLAMRQSDADMFGNVLVQARQDLGKPLVAAGTASYPSVHDSVLHLHMLQELEMIRSHAGRHGGSRAVTRANLSDTVSDLNKSLTARLNATLPSFRTQEPLLSLRRTAFAALRSSLGGGNEVGEAWIATAKIARRAGHMQTAYSATLQATQNQATFAFVQRVKILAKEEQTHAAIRDLVNSLNTLVSSFKPTEHGDTARSSVIELQATDADGRTVRIDRDAYAKACPLRARLQDSTFRYTANEILDRYKEAAKEQHDSEKMWYHLGHFQDTHEGLLPNMAMQRYNVCRAFLRSAQVGTKFFYRTLPRVLTIWMDMAADDQILNFNKKGPTADTELAQKFDAFAQLNILMKRYSRKLKPFQWLAVFPQLVARIVQKNEDAWMVLQDMILQVLLAYPQQSMWSMVAGASSKDAERKRRYNEIIQRLGSKGGASHKEVVKVVASSQRLAKELLRLCDHSVSKNETVLSMDKLFPGLLEVAGTSELLLPLQSSMTVLLPSNHLISEMHRPFPSNLPTIRTFDDTIEVMNSLQKPRKLMIVASDGNRYPFLCSPRTICARTRG

SEQ ID NO: 41132 - protein, 144 aa, Oryza sativa
MCPAPCSNGVDALPVAASFIGRYVLSCTYAVVISADLICAGLQSGWLALISAATPATCGHDMDVPDRMLNPRRRLSLDKLDGLASPLHAAKMFTPGATTSGLRISRVRMFGPRDENAATTGDGRMPSLVPPKLSVAVGFGALLL

SEQ ID NO: 41133 - protein, 853 aa, Oryza sativa
MNKLHAMNKIKFGERYTIYSPKDGQPCMDHDRSDGEGLGPQEYTGLKMELVQWGALAAPELDAKLQGKNVFFVAATLRPETMYGQTNCYVGPTIEYGAFQINDSDVFICTERAARNMAFQGITKERGEVKQLASIKGSQLLGTKIKAPFGLYPEVYVLPMETVLATKGTGVVTSVPSDSPDDYATLMDLRKKAEYYKIDPQWAAFEPIPVIRTPAYGDMTAETLVKQLKIQSAKDKNRLAEAKELAYKEGFYNGTMLVGSYKGEAVQEAKNKVRDEMIRANLAFAYAEPEGKIISRSADECVVALCDQWYMDYGEESWRAQASKLIAQMNTYGSEVRNAFEGTIDWLKQWACARSYVLGSKLPWDPQYLVESLSDSTIYMSYYTIAHHLQGGVADGSQVGPIGIKADELTDEVWDYILGDAAFPADSSVPQAKAEVLRREFRYFYPMDLRSSGKDLIPNHLTFCVYVHSALFPEHHWPKAVRANGHLMLNGKKMSKSTGNSLSLRQSVEKFGADATRLSLADAGDGIEDANFEEKTANANILRLHTLIEWCTEVVQNKSKLRSGPKDTFWDRSFENQMNQLVQLTNEAYEKALYKDATKYGFYELQTARDLYREATADVGMHVDLVLRWIRTQALLITPIAPHFAEHVWSKLLGEGTSVQTARWPAAGPVDHSIAEALAYVSGTVKTVRDAEILLTKKAKGKNAAPVKYNDRAPKQCRMFVAKNFPAWQDRCVSLVQAHYNPDTGAFDDKAIREQLAKDGMLKDKKVMNFIVTFKKRIADFGAQTAFNRLLPFDEIATLRAAAGYFRKSMHFSHIHIYQIEDKDSYKDVDVDEKVLEAAEPGQPSFAFFNVEA

SEQ ID NO: 41134 - protein, 1097 aa, Oryza sativa
MSGASQALEGLYKAPSAEECYVAAEQLAEYVNSTSLPVLQSEGVLDSLVKASKNKKSGYEREAAAIGLDAIFVKVAGKNAPSPLGAEPWLLDTLPAILELYADKGDVVRQAAETAASSLLALVPPEAAPEFLTVLYEVLGSGSAKWQAKVGALKLIGRLSATASEQIGDELVELIPYLTRAMHETKAEISKQARKTAIKVCEACLDNKDIRPFIPDLVGCMAQPDAVPECIKKLSGTTFVAEVTGPALAVMVPLLARALNERSQNVERQAVVVVDNLCKLVRDPHEAAKFLPELTPGVERIEKGASFPEVREHAKSALDTLTAATAAVDASAATEDPKKVFAQQCAAALDAILAAVQAYVPEEHANLKSDAFAMTGLNYLSKSIARLANKRILHTSAWEEVYVLPYLRRVCRDDDAAKTATADLRKTYIELDKARFGNSEEEDDDEAGECLCRTEFSLAYGGLLLLNHTTLKLYRGHRYGIVAANGSGKSTLLKAMRDGKVEGYPSQDEVRTLMVEHSLQGEDGSTPIIDFIANDKKLVGKTREQVAEKLREVGFDDEKQKNPVSSLSGGWKMKLELARAMLSDAVVYLLDEPTNHLDVQSIAWLENFLVTNKQITVVTVSHDSGFLDNICTDIIHYEKKKLRYYKGNLSDFVATKPEAKAYYSLAATTVKFSFPPPGSLMGVRSNTRTILKMSNCTFTYPGMTKPSLHDTSCAISLSSRVGVLGPNGAGKSTLIKVLTGETVPQQGKVEKHPNLRIAMMAQHAFRHLEQHLEKSAVEYIAWRYQDGHDREMTEKASRKMTDEEKAQMETPIKSTTGESRKVEYIVGRQKLKKSYQYEIKWVGYEHRNNSWIPRERLLELGFSKLVQQFDDFEASREGAGSREISVKLIRQHLEAVGLQGEIAQHHAVGGYSGGQKVKVVLAAAMWNNPQVLVLDEPTNYLDRDALGGLATAIRDWAGAVVIISHNMEFVGALCPEIWNVDNGRIMSRTKTALAEGAFLDEMENASTPGASVPGTPLPGSTAASRLTSKAGTPVSSVAPTPAGSGDEGEQDMSKFKAKKGKKKLTRNEKKAQEERRRLRLSRWLTYGGEREPDTDDE

SEQ ID NO: 41135 - protein, 965 aa, Oryza sativa
MAARNADKPRASGRASIPTPPVKFALDDRYSQGKHAVVTKPKPKRSGGFSGWLFWFGTRVTVFYLIYAALWTCPSRPFAFDYSAKDPRPVCRNLAQAHDQLTPIVKPYWNLAQQKVQPYTDPVVRAVAPWATRLHKVSRPVYREANKRGRLIWKKRIDPARRRALKDINKRIDPYVKQAHSYHKKNVQPRIDTVHKAVKPYHDIYKRDVSPYVDRAYQYSLHSSSVSYAFYMDKVHPRVVKGLKQIYSFLVNHVDPAVRRFYSLYVRPQLERLLAKVYERKAHYLGSDAIKTAQKDMKHAAHEADKHAKRAVREAEQQAIKAQNDPSLLDRAKQAKDAVVGGNTHGETDPVKVAQLDAELDAEEDKVKELLEVWETRMSELIEKEYKLAVDRIADLRNRRLADLPDRFGLVNEAFVEDTVALLLNRVERGARKISNGSGDVTSKVEAGNRLVDQQLTRFDEAAQETKSQIAAFYEELLQQETQAIDTSSAEVRRFAGAAKEAYDEIMRDAKFAVTMDEWQGWDVGVRKRATLFTEELAAVQRGTKRVSTASGAVDLSNEAPDVQKEINALRAWTDKLHGAARRELVAYGDSALAQLAGGGVVAKISDVTDRLAEQASRISTDAAAGMVGAVGAARARLGLGEPAADGYVARAKAYVAAGTGSGSSFDDYVSSLSAGAGAVASSASSLAGQASSSVASAVDTSSAASAYEAASSAVAGAASAVASNAQAVASSASGAVGGAVSQASVAASRASRSAASAVGASPTPESVADYIDAVTAGVGAAVDSAVSGVAAVSSGASSLASQASRSVASAAGATPESVADYVEAARDHVVAAGGKAAEAAQGGVSSAGVVYASGSSLASAASRSAASAVGASPSPETLQDRIDDARDGVNSVVDAVTSSAGVVYASASSLASAASRSAASAVGASPTPETLADYVDDATDAADKIAQKAQGAVSKAAAQLHVEL

SEQ ID NO: 41136 - protein, 754 aa, Oryza sativa
MVSPKPEAYHDGLYHLAAAAESSPSPQPNHYPDAHSFGPYHQQQHQYAPIAAGHRPMHPQQPQYRYADRMYSPSSASVPSTSSGSAAPPKPTSDDPILRNPIADAAAKDAAAAAAAAAEKKISCMECRLSKVKCSGGDLCTRCKRLGKECFYKSHKRGRKSDSSKIQKLERTVDSLSRALEHFSKDKIAVASLSSQSPDAAAVHRIISRAGVADSEDASSPDAYWKAADPARNANLSSSSANAMSPPAHSPRAPRPNAYRDPPVHVHRRPSEVFRQRSTSATFQTPQSIASATPTSDDPDEPENLGLPTLSNPLKLLAQVSDSAARDRDSANDPSDRATSSDNNDAASPNGADDAASASGADARDQANTKSASSTGIVAGTAGTHSAADRADMATGSSSAKRDRPDHAGQPSLFATAFGSATTNTVSRFGPGRGKAFFDMGLFTTKLDNLAHFDPIDRGYLTLAEAQSLYAVFMQYINPALTLLDPHLHTFDYVRSSSALLLSCTCWIAAKYRVEASQIAADLEMHIRSNLLPTILMEGFRNAEIPQALIILAAYHPQMNTLSEDKAWAYVGFAIRIASELDMNSRIATRPMNRQDDAGLARRLRNRERTWLNLWLFETSMSQHMGRGPTLANDPVVMGCAHWHLDKFALPGDRAMVAVVQLRLLMLRNTQLFENFVDVSATHLPAERTAKQVELFRRICASDLDTWLATWTGPSPRISADDAQTSPAGTVASESSTAGSGLAKPDLPPTLSRI

SEQ ID NO: 41137 - protein, 935 aa, Oryza sativa
MYHRQRHRQCSLSPAELRWSKLRLRRTVLRIQSTCTHTHGPSDRTPALLLQRPRATSTTNKIADLAKIEHKNSLGVSLVDIIHGRSCRPISLLDLRTFLHFQRQPQKRLPAYYPASDMQSSALDDFDLNLDQPSASPTHLFKHKLNARRLHFDEVDALDFLVAYERYVTKFRDQPRAHRLQSPDPATCKAALRAYVRRQCKPRVSSDLTVAQMLMQEAPTPDDDVDDISEQASREVLARLRPTDLGLKPDQQPLRVEFDRLVHRYLCSRRVCILPSNRRLRRKRDSSSSSDTAAGGSESPYKQLGSSSAERMPRLRWMVDVGLISESDLQLCLAECDFSTHPDVLAPIAEAVYAYMSQHVVPFFFISVARNLSPNTKRGRLLVGVACTTIALIFSILLIISPSPLAPHANHGTGNIPRWWRLLTAPVWCAGLGYILAYFTGLCVWLTLRGNREPDEEEEREREEIRSRISGEDVVGFDLAELQATADERDMEVEQDTNRWMAPEIADILTGFTGQKKDKRKRQRSSSDALRLDALEEGHLRVKSEATDVVPSSKVSFEYSLTAEKPSDASEGAMTSFADKASALAAPAAVIMNTPRRPSMMPVMSETNLAGRPSTTLSARDVSAANSVRPSLERSGHSQSDVRPADARGAVNGDSPSGPALLRQKRVPLLNLSIGFVKAPGHERGEDQADAPVLTRDALLFDPELAARVTTPTVAGGPMEGSPVRGAKSIGAAGGSQHGSPPARRKSLAHVLLPLRSGARLQAQMEDAQLSSPTYETHSEKSAEHAEIAMPTVPEPTALASMPVIGASATSPRDIAPWAIAPGRSVDLPSSAQPVLFALPSSRKSRMSATTSTTVVASPLAPVSAGAKRSYEESPSLSLRERLWIAVQRGTGFAVGAERVLDARVRRAQQMKALRIMALNTLATVVVMVIVVAVP

SEQ ID NO: 41138 - protein, 1332 aa, Oryza sativa
MSSPRTSPRPATSADTSSPPTAAPSGAPTAAAPSNASRSPPAAQPAVAPLDLLSGLLRYDQQPPPHRRGSLNSTSSPVTTFRPRGLRALGTDSDGSAPATPVTLPPAALQSQQQQRPPQPQPHQAQQQPPGSGPNSQPPTPRVANSAASANAALASVRSPPLHSAAIVNVHIPPAGGHSPVVTSSEAAALDNPPPARRLMIHTGSMPSTPQETHVPSNLQPPSLSVDTSAGDTPPAANVAAGAPLHQGISLAPFSVPARMRMLPNTRATSQPDDPDAKRAFQTRHARSNSNAPPLHRAHRASSDADQMPMHAQSVDLTHERSVAAAHRAPRRPTRMRRAPSDGGSAEGGAGLLRHEGSGGSSGAGGHSLRSSGPSSRAALSRRGSLDPSTLADGSPQAPAAAQLSSSFLDRVPLSMRHGAALQPGSILMSPLFSAQQPPSLYGTPSSSRHRRTRTGAPTPIHGVARHQQSAVNLNADSFSRGGGGGSGGISAANTPAQQSRKLSLGEMADNARAVKNELRRQGAGPAGSGAQRMGMGIVSRSRANSIIAATQAPMGSHAAAAAAATAAAAAAASGGMFGGSGPGSGQLHVRHGSIALSNSGSSRGGTPVAASNALAQRSVRHGPVSTRSSRAPTMLGGGDIMSPLHLPANANAAAAAAALQSIKAAINSDEAPSASGNAAAARAGQAEEGEQEKVAGGPDKDRLQAPSVSPDLAAPSDELNSSAEAVIDAAAALTAAAQQDPSLLHGIPALPSALTAANTRDGSFDDSTGGISLADVRLAATGKAAASIALQPSPDPDESYGAVDVRGFRSGLFRYAPSLATQLTASDPYLDNGMPALTRQHYRDRSRSSSHLHVLTGADTGYDSDPTNGGLVTELEMVQRQHALSGSYEGGEEDGYLSGGGGGQLAGNMGDGYTSGHELEEGLGAEHVRSKDEEKVIHVFLEEMGAALFSCGLPLHVVEFYLTLAAHRLKIDISIVAISTSFWITFAPSSTAHMVMAFKPGLSLSKMVDTCAVSEHILHGMCSPVEGLAQLQAITRRGLIYPKWSVVPAMACCCFFYAPLFNGGWPECLVAGFAGVLIGLMEWFSESHASLARGHDLLAGLLAATVAIIVHSYIVHINLLAATLSGIVWCLPGLRITMSMLDLSTGNPVTGTAKFMSSLITAINLGIGVVAGMSVGKLTGVESKDLLQSQSYGTVGAWFLPIAVVSSCFPSMLLLDAHLKHAPQYVIGSALAYYLSNYSTVYIGQAFGSWLSSAACGLMANLYGRYTPYPSIELALFSILMLVPGSIGVRSVLASDAISTLGFLTQMLTVAIAIVTGLFTANVVVPPIRAL

SEQ ID NO: 41139 - protein, 534 aa, Oryza sativa
MSSLAISDVPWLSKRIKACCRRAKLFSTHELLLTPPLLLQQALRLAPADVELLLLQVATAAKASTISVLDALNGIAPPPLGDDLFGEHRDDSSDSHTDDEPIDARLVPPTQGYDGNFPGAHQFVYDSEDDDDSSVAIDNDDVEPTRPLERHPDWHDPAPAQTSDALVHGRPRHVYTTGSPELDALLSGGLRSSLLTEIVGESASGKTQIAIQACAFAALGLSPLASSIPPPSQQSFDDGVGVCYITSSGERAAHSIVSRALELASSAIRHRFHLHPNADEVELAVELGRAQLLRNLHVACVADIEALDHVLRYQLPALTSRTDIGIVVVDNLPALFQDDPVAGDIDSLVHRSRWLVDVADALKRTSAAVVVINHVSDAFGIDKDLARRFVFDSASRTSRRTDVVADHPAAMEYAAQSAYTSGLLASVPPTLAAAMTTTTTDSDSPLYTLHPRTAQLGHTWTNLIHTRLVLTRTNGRVKDPNDDKRYTHVRKAAVVLNPAGPSMFDLPASQAHLRFIVTPASAVHALAPYTLHDS

SEQ ID NO: 41140 - protein, 1271 aa, Oryza sativa
MTNSHGYVLEYPRIRVDHFDQAPVPLPASLLAHRRSVVGHGAVHSRQHSESLQFEPAQTHFDKPLLYLLTHIHTDHLKGLDRPGITAPIYCSATTKQLLLRYERQKTRIEKDRDAQAGKTLSVVRPYAHLRVTTDHAAARSKLSGYHASSLDLLHPLPYNVPTKVPYTPTSTVTLTLTESNHMFGGTMFLIQGSNGAVLHTGDMRAEPWWCEALTRNPMLSPYLFWPTAGAEVGSNDHPTTEQWAEQIESFDSSTTSSHQGSEIFSQSQNESQTAFGTRHHTGNASGPNTSTRGARRSALRLRNIYIDTELLLCNQHVPTKQQACLDMVALMRMYPANTHFFLNCWTWGYEDMLVVTAKAFGCKIHVDRFKYLMYKAARNEAPFLADIVTQDHTKTRFHACEKREPCVSVRSLASRYANDTSAALAKQVVAAHSQMDSSSPDPRQRWGPVRSQPEPLFVYVNPGQVSADQWQSMFEDTKQRLQAAQRHETAWPEALIVPIERHSTLPELQNFVGLFRPKTVSPNTILDPKGGLDYYLLHHLFGHVLGGAHDRQQLADQGLLMLGDKTWSLYEAQLARAREEALAQRNAGADSTEAVRAASVSLRDGQADGVGESIDANQLERLSRLRGISFKGLMMQNMAGNLAAMLEIERWRKAAGIHEPPDELESVLQQSSGDVADRTNASWSSRGYDADHSQLGETQAIPKGVSLRLHKETTGTHQNKPSPAPEPASIHSEPIDSAREVDRHSRIPPIPDLGEASVPANRADAMGASANAPLESQVSQSSVGEPVTELTEDLASRYLNVLIHHFNVPFDRSTPANATHIQLWGLVRTKLPADAQKVEEHWFRETGMLPPLWSPDVHAPSQQLQPTAQRGRGATNEAQSTDGGNAFADVLASFVDMLAAASTQETPAAPTHGDRAVALQLILRLFAKLGFHDRVLAESYESSHRHTHSHSHTSCAAGSMQAWQAIAVPLTGLAHQLADGLQVVPALLSDGSCGRGSEMHLLGLQVAGVLLSYRPLNAVVSTPAMQALLESVISIVEAAPSDWDGAEGDAKRVVALACGVLRAEEIDERVLAKYDARLVQLARDPDGPLRSLDGLLDTQSGASATQSSIQHTEAQEGEQVSVDVEESMPVRAPRAAAASPKPAPPKPAPPKPAPPKPAPPKPVSMQCSQEAVGGTDSIVEATSEDPIESVESNRLQASQASESATQEEDSTQSESALSYNPVRKLVPPRSIDRTASLPSLHVSADLSRSTRKRKPADPDRDILPPRRYHR

SEQ ID NO: 41141 - protein, 1390 aa, Oryza sativa
MSAQGNTEMATANTAAPLSPAPHDDPKPTTETVAGASAKPANALTPPTSEEMNHETKDSDSELSDLDLSDDEDDGEPIEPDHYWDGGNIPVFKPTMAQFKSFKKFIEKVDKYGMKSGIVKVIPPEEWRNKLPDLDEKVKRIRIKNPITQEFNGTFGTYTQQNVEKMRSYNLPEWKALTHETQHQPPARRGERRRNQEKVVRGGGGLRGRAAAAAARAASEVGDDETPEKPKEKRKPGRPKRNVVIKDEADSDDSTTKKATPTPADKKKSRGGGRGTGTNKSVSSRRLNNTAESVDHIDDKAFRNFDYRMEGLEEFTPERCAELETHYWKSLAFNQPMYAADMPGTLFNDDEETWNVAKLEYILDVLGTKVPGVNTAYLYLGMWKATFAWHLEDVDLYSINYIHFGAPKQWYNISQEDARRFEKAMRQAWPGDAKNCDQFLRHKTYLISPDVLQKQYNVKVNKLVHYEGEFVITYPYGYHSGYNLGYNCAESVNFATESWLEYGRIARKCNCEADNVWVDVAEIERKMRGEPTPEYYEETDDESELEEEDSKLPTPPASVKGKPASKKRKRETKNEAPKKKKIRIRIKAPSAEPCVMCPNDNPWEPLLPTDNGKKAHRSCALYTPETFITIDDGKEMVRGVANIDRARLDLKCNYCRSKRGACFQCSAKKCARAFHATCALAAGVQIDAGPVPTFDEDGKEYFEEGFDFRCKMHRPKMPKNATSNTLEKDERVMKFAEQLKPKDVVQVQLIGREVFGALVIENRPAEMTVLVDVMLEGERVEVEWKYICVLDPYLSQRPQPSANAVPMPEGMNKQLVSASNRQDGVPSQDEVFTDDAAYKWQEFYNSECPPGGYRPNKDKLPKVKVDLERVDQLYYYLPKKSTEAKCFFTDKVGGTEHAPRSNFLDRVAPPKPTYSYTAPRPSLAAAPPVPRTQPTYSTMQTFQQALDKPYAYKPRVPSHPNTLAIDTQVLANQSNFATQAGQPGPYGRMQSPTPYGQPNSRPGGGSRRGSESEAAPPLRPFSQDHYYSTRVLPAAWQGEYSSFQREVRKSQGAQTLPRPTFPQGSLPPIYNPGPQQQPAHAYAPSGLMGRPAGSPQPTMQAPYGQAASDSMQPVPYTHSPYGAPPTPATTASEASRQPPRPQASQDHSTSQTPAEKQPAVARTPSHSISSGSNSRPMSQQWTPPSQRPGATPTHQQPLYPLQPPRQDEQKPGWPTAVHQTPQEFQTQLTYAPSIASREGAHLRALRDKGYMQPVYQQHVSPYAPYQPPYQPMPQQQHRNSLGQPFVPGPDTHVWTSPRAPTASPISDPNTPGMHQQKQQQQRDHYYGSTLFNPPAWGQNPSRPDLALLTAHGQAQNPNGQGPMLPQMQPAPSNGPSTGPSHGNEAWRYTG

SEQ ID NO: 41142 - protein, 1183 aa, Oryza sativa
MAAPQQPVPPYALAPLLIPTLGSDDDTESLHPGSPVAIQQNAQRSIRCSESDGTHLYIGTSDGQIHSFNIRYRKSDAAQGSSQQCTYSLKSSRSISSHAKPVEKIVLLRPFRAAAVLCEGVVNFFSTPDWTPIRSLPSTRAVSTIVLDDEEAQSDTGIDAAGMISVCLVRRKNIILAKIGSDGRSDLLWSTIKDVPLPGGAIFARRYADTLCIANATEYSLVNLSSGSITQLHLPISQTGESPSAQVRPSIVTVPVQPSSLRQGSVSPEVGRGSSAAASPSANCEFLVTSHSGSSTLGVFVKPSGEPAPKLLEWPSHPRSVAFDGKHLVSLLRNDTVELHRIRSDSTHRLQTIQLPPGLDPRFLQPVSHPADAQPSASDPSVSTSSDLDIVKVNLAHLDGSDATLLSRAQEDQHASSSSPCQILLCGRNSTSAVQQDSLLGWTSQQLRRGRIRNLRQSLASYRENANDDATNSSALQSSLEASAAHARLGIELLHRADFAAASDVLSHAHLDPRWILGCFPSLLPEGQALGEAILPALLLPDLEKLKRKDGNGIQSIENIIVANLTLNYSPPLDVDKDRALSELKQTLLHRSDAMLRRLLEDWRAAAVDAAHPWAGTYMDEHMLANVHNRVDSAYLHLLAQGRGTDNPDAASIKREMAAFLDSNHACEPAVVEKLLKDKGFLLLLARHYESVGNVEGALSILAGLVDGKQSDALEQSIDTSATVSKIADLLSGQQDASLVSEYGRWLVRKDPEAGIRILTAQTAASDSAATQKTPSRSKAQELDAIRLQKATIDELRQIDADAATKYLEVVALSTSKVQDEQMHRELAAALIRRVAKHLEDAEYRTKMESIEHEYADGSYAESFFAHLALACSGSSMDVDRLKLSMLLQGSTMLDYGAVLLMIEPLPTLAYERAIVLGKLGRDADALSLLAITLRDANSAEAYCSQDGEVLSPMLAASIAEDHEELRPFAAMLSRTHAQRIKTHAKQEQQAGRTGAAQRKQTLLKELLSVYMANGAHEKFRIATAHLLNTQALHLDSQQVLELVPADWSIQTLETFLTQSLRRQLHRRREVAMLRSIAKCRSLDLAEDLWARQRAMGGIVQDTDSGGAEDSAASFDAVHQSSLAEGKAHLDDQDSNAQSEKRRTGGLDTSDRAKVEIVHADYSAPTSAVVYAEREDGADGDLG

SEQ ID NO: 41143 - protein, 1017 aa, Oryza sativa
MARRKKDPFSDDDTSTDDDSLDLADVDDEALNGVSGLDFSTRPAHKRPRRTKDDAIYGMFGEGDHNEHDGGAGRTVRARDARGKKIDYRRGQAFIPASASAAAVSTQQGESLHTQEAAASGSGGSDSSDSDSNSEAEILQDAGGAEAVEEDDFQPASFRSSRGGIGSHGHEQAPRPQRPPPTEQPQKRSGRAGIGARAGIGSSSSNRDGDDTASAPRRTGLTSLSMFVSAGASRPSEPAPPGPPPIPPTTLASTSDAATSTTAPEPPSSTTQHTDAIAAVDDRDQQMSAAGLPTSFSRPSLAPSSAFQRARKPDAPAMPRTSIKFGGKFDPSAYLASMGWTGGGLGKAGQGIVNPIEVQLRPERAGIAYGGLKEKTQQAKDEARRRGEAVSSDEETHARRGHGKKRHDKQRRKADGEAAETPRAWTKKEKKPRKPRVEHRTYEQILAEVGAVRAPSTLGKIYDASSGELREVADLASALGSRGAPTAEANELPELQHNLRLICTTNAQTLTALAREGAQIQDRRRWLRREAEQAERQRAADAAKLQRVQQALVLVRELEAVHARAAKLDPDATQDARLAALEAFTPIVARLEAHARGMAEMALDEAVVGAAAPLLRAVWTAWRPLKEPQLTVSMLQAWAGMLHPQETAGGKGERVMTAWEALIWNVWMPPVRSALNAWKPHHPSAAVELLEAWRGVVPQFVYDNLVDQIVLPKLHAALGAWEPKSSWRLDHAVFPWLPVLGTQRLGEVMGEAKRRLRSALKTADIPAGPDGGLEAWRKLYAQSGGEWDALMLATVVPRLSSHLRGFKVDPADQKMDVLEAVFAWTKVVRRSVVARVVAAEVFPQWLGVLGAWITQPGADLDEVAQWYEFWRGYLEPLCTSDPTNPINAGFAIALDRINLALDTPPEQRAQLKPPVYVLPSRRSEVKPAAAGVQVAEVATLRDVLAEELAVHDLFLFKTAQVHRTGPASTATVWRVARAFEATAAPAAKVYIDDDVVFRSDEHGWTPVSIAELVQSLA

SEQ ID NO: 41144 - protein, 1016 aa, Oryza sativa
MDGANCASRKGKRALVHSCPSSSIPSKIPRTSPPLSSEADLPPCRPNASVTNAGPSISRVGVQHSDRDRARSPQASSSSSSSSSSSSSSCAGPSADPFPRYELGIPHLDVLLPTRDGLDLLHAYQQGVGWINTPVDRTTLLETLEEAQRHGPTSIHPHRLACLLAALALGDLFGPCFPSSLPSSSRPSAHSPSKRGKIWFGVASACLAGSRPDIELMHSPTPDACSALYLMSIYLLCSNDDELFQRSQGLTGLALILAKAALVPSCLPSSRPIASRHTTASASLHANLVTPWQPVLSTAAQSGDNDRLQCNRLLSDLIFHLQCQVLTLALPCTSKSAGNVGSIPSLANFPDVPTIQAIWTAFGTPLYASIDAFGSRFSPNIFHNWKLGLADLMHQVSCLTNPSTAAKPLAPLSSSAAGLQAADKDAGVRSVKPSLPDHSQIIKLDERIRRYHASLPDFLLLHRPLPVEMAGKVDEDELAQIICQRHMACSMVHRMLMALHRPWFLSALATKSRPPHTKAAAKHGQADIARGSETAQSNKGDPTPPAQQPSASDMYSLSAVLRSATWQTETFASAASCAPPQALAWWQFTNNALAASVVQATALLRLCGSGAPGAGSSGSAKVAGTAASEPCTATSQFHRQVRTDLDKNVCSFQNVAKRCKLAARALPFLQRVCAAIDTGLCKSKTQQMPDTDALQSSLDESERPLDHSELDACGLRTHPPQHTSPSQHRLDTDNSISISTRIHSETASDISNSISNSISNSNSNSNSNSNSNSSSNSSSNSNSKGHLASNGKSTNDKTNAGINRTTSDMDTSKAATDGSCSHNSSDEEAAHRPRAGAEAACDPTPEQWGSRPAVAVRRASSANSRAGSDLEAMFGPIAQGLEPPEATSAPRTSAGLAKPFYRQNWDSLPVPREADGGSSQAPHSDAGSSSSSTMPVTPAATLGSRSPRMGSRVEIPDVTPSAAGSGNEGKPPTAAATTTSRKKASFESDLVLQCIRFWQPDLLAMPSRALAAPRDT

SEQ ID NO: 41145 - protein, 262 aa, Oryza sativa
MRATTGHGGQRTRHRQGIAPAVEPEEAERLDPRLRRRHAAFQDPHHGGHARPQRRVLVKAAERDADGACRFGLVDAPLQPRVDEVQVSPLLMELQCQHREVLVAAAARATRRRRHRAAPTGRQVRVLAAAGSDGDVVGRRRRLLLAAVLPPVYQLEQHHAEAVDVGAVGDGRVADPLGREVPARAAHGGEQRRLLPRHQLGEAEVRDLHLAAVGEQDVLRLDVAVHDLLLAPGVQVRQPARRADRHLHALPPLQHRPRAAEQ

SEQ ID NO: 41146 - protein, 819 aa, Oryza sativa
MQITLLSCSEAADSQHESPASAHANSTHTQHISPVPSVTMGNADDHDEHATMTINVEETNRKYASISPAANALKRLAADSDSASNNDSLTDGTASMPSTEPSTTPDEVSSSSSGISAARRNAKRARTDSAAPLQHARERVQLPHPLGIKPLGNAFLSDRNDRIPSLGLFARFDDDFLLNFITSSLAQDPATLAKLEAVSHAFYTFINATNSVWREAFLLAFNGKMKRWCGSWKRTLIWHHKLSRAVFDDKARDSMDGSAFALLDPPAPRIQSPYLFSDTLYHPFRLATAPLDHLVAPACRLYNPIPKIDLAEPGSIAEFKLKFAYANRPAIVQNAMPPKDWPCREWSLDKLAQRWPNRFFQCEAVRSRLPTYFSYSRGMQHLHEQTWQQLLEDADGNPDAAGRRDSATVSNDGTSSADGTDSPRDRTALPLQNTPYTITRAGTQLYSAVADEGDSTFDPYAVPDESPFYLFDASFADDPHASLEWRVPKFFQQISTTAADARADHDASAVRSDLFSLLGRLRPDHRWIIAGPARSGSGWHKDPNATSAWNAVLTGRKAWMMLPPHVTPPGVFVSDDEAEVTAPLSIAEWLLEFAHETRRLYGPSAARAEERLLVEGVCEEGEVLYVPSGWWHLVINLEESVALTQNFVSPPELATVLDFMKNKPDQLSGFKRTQLDGPAEAGAVALAPGRQAASIGQSVAGAQQTQADEADDDCDGATFDVFALFADRLQRFDGALLDEALGKVEQSEQTRKAMCLARRVAPAPRTAARRPNAGPTWWEKLKQHEAAPSGDGAEQQAPSAFSLSTQLAGEQLELDDVPW

SEQ ID NO: 41147 - protein, 921 aa, Oryza sativa
MISAARSQSRSVSVSVAPQGARVRYVPRTPVPRRGALNPSATPLPDDGHDDLDDAVTPEPEPPSASASSNTAPLPVRPHPSSSKLVVQSESSDTPHTAESDTSEPPRAPQHLERVALPRHTLADTEETSGTESALAHHHVPARVGTARLQDMEAGDDAVIVVVDDSSADEAYTRPTPKLPGQSARSASASSRFANANPMVVLPDAKQSMHLLDVEMGSSSDTSHALQPSSDHVLNGGLQPKSIVIDDSSSQATPATGSDSEAFRRYPKRARNVTDYNVRRAFERWERQHAQEALAQVSHPARQRGKTLPVVLASSEFLDRVRQGATSTSHTRPRPQSSFADFLLAKAQSAASAEPTFPAASTRSAHPDRALTVAKARQLPTRTLHPAAFWDLPVRADREGVAQLPLSTRRALGLGPAPPPTSPQIPPPAKRKILFGELLSLQEQWPKAAQRRMQLESCVGEGRLGRSPNAEGLDSVARHLRAGRSCKLPLPDALSVLSDMERREWLRFEEGQSDLERLAEEDRARERGLVMVDVNDCGCVKTQTDGAGRTRFAKVTCATGGTIRVYFDLQRSEAAISQEEESEQRMEIVRTASPAKLTSASRLAGKQAVPNSDSASEEMVLDVVDVDDDELPVEAQMYDSDDDDTPVEVEMLEDDDDDDASVREVTPVPVASTALNRGRIDDLFSVRTSRSPGLEQPNGSAAIPLPRPGQAAAALPSSSSTQPAARAAISKSRSASDKSPRDLRSYFTLLPSPSKRARSPSPTGQRGALGSLSAVARGKQRAVEKSAAEDSLSTAEVSEWIPSQSPSQQVEVVLDAPTPASMREMIGTPRKKRAHSPETSFRKPKHTKAAKAAEPSSQQERLARAPGIKPKKRKATTAQQRRPPKATPSPSRGGWRGLSSWYTARDAFTPTPDTPNPRKRH

SEQ ID NO: 41148 - protein, 910 aa, Oryza sativa
MYAALRVGWRWEVGRDGGEDGRSEVRLMRCWCWAVRRIPSAECRIPTEVVEAQRYSTQELHAPFHLSTTRSPAHPLHEPPAQQTRALFTGRHQSAMSAASAAAPDALVSTSDRTASGSKSKRKRRDSLSKSGKKREPTRQESLGGAVIRSLFGTLAFLFKRPVRLFRPVKLSSWTILEAMANREGRKLSLRYLRMLLRRENSNFLPHLLLPPLLFNTAIGFTLFEAYSITESRLLARSKRQASGPGTDAEDAEDEEEASAPTPKWTPLWIVTASGAVAGAAQCFLSAPLDNVRYIMQRNVSASDSHARGGARAVTLISWRAILRAAILPFAPAIARDKLVHDVQKEAIEHSKRTPKPTLRARIVALLEPATASRDAAESVSQRFSMSPEKRQEWEKRLKRWRGGVHGSGLALSLIRDSVGFGSFFFIFEVSRRCAFFASTSVDRMSAWFNARGLGVVRPGGETTQQDGPNVVGRRKSDDGMGGGDVHIEDAGRVAHWIREGQRNVTDAGVSYNQSRTVQGRVVAVIILLVGGAVGAFSYELVGRPFELMRVVIWEGRKQWEQGKREPGFRSSARRSASTASAAPSSADAMGVTTLGRTRVRGARAAAQARAEAYDGRLCKRRADFVVLRAQNTMGTHVSRVWGRAKLTRPPHPLRLTGPAVLHRPQINGTAGPRLTSSRALQHRKTLKAPTSTLPSHTVESERPPQHRRTHRAAPTLATRPGFLTLLIEHAQSTAQLDRKHSGVDPSKTSIPLLLLHTYFIAPFLPEIPEPVLDNELVRAAAGVDKHLRPSSGAQTVKTQTDLMEKVSTVAQRTLLMSLASRRRSAESPEAKLKRNWIKNNPVNVSFAKGKAAGTDGGKRAGGFGASDRSTLQKGTRYWASGRVVWSLKRLATPYGVAFLVFAWLGGDLN

SEQ ID NO: 41149 - protein, 1079 aa, Oryza sativa
MRAPRLSFSGVGTSASARASSSSSVSVARIAQPRRLSTQPQHPAPTASYPPELFQDIVHRSLRSAPSPRDAKWSTAMSWAPAQDIDAAPATAPQAKTGKARTSALPTFNTSMLILRLIRNNRILSAMTAFTEHMNNNSLPPFTHDQLEAIILALRIQSRRHASARPTPMPQPADRHAELWRPSRLDPSVSAKSLPIPVQCMYAMSAVYDASIEHKHRPTAKMVTAMLATFATTLAPEQLLHAARTAIQHLFPATTSQRKIGVFWRFISLRALSTFIRVFGRAGVPEEGEEFLRQWTRAQRAGAAQPDAAMLQADITLDLAGWGSNILVWQALINARIDAGHLAEARKWLDRYRLATKQLSAAATGEAANALPIRSEPYLAYMAGVRNSARNLRSVGKIRRVISSTHDVVRLMAADHVPIESSVLAFVLDCDARLGDVDGGASLLHELGDLIHTMALADPALLRSLLHMRRAVVSSASAAGARSNLSNLPSTHSLIRSLVRVGEGETPALGDHMAECRSRGMLNDALVTVMAERDYPAAVVLLNLFERWMITVSQTTYSIVLTSLVSHGHHDALRGEAAQATRSDSVHSLEATLQSMAREGNGEQADTIRRALGDRVLHSHTFVASARPATPLRKTQFLVRILNRVCAAEIEAAEGREQLPAWAVRVTAMQTQHWKDDVRSVVAKAITIAQTGLLGPKDTRKQRIVGPAKAPLLSAAAPRLSPKRKHFTAPPATWSRELSTSAAARETAASCDLAASAKGDNTHLEPVRTVYIPGFVPYDLGLALQEHLVQERAQARQALRVLDDASSTSASVRAGLTLVSPSASEAALRAQAAQDTLLLLQHRPVYTEGRREESENFDVAEALRALGADYKLTKRGGQITYHGPGQLVGYPILNLGAMGLASRCYVDRVQDSLISLLATRGIGTVDPPDAHTGVWADEFHKIASIGIQVRHRVSSHGFALNVEQRAMRGVRHIVACGIVGRSMTCVHDRLDPTGPFARYNSGKQGDKDESVESVAKDYVRHFGKVFKRTTRQATHEEISFQLAPEDKAALMRERLGIDVGHVEQVVQAIRVGDHRVQVA

SEQ ID NO: 41150 - protein, 913 aa, Oryza sativa
MFPTNAGNMSMGGLNNNGNVNGGNMGAGLGFGMNNNGSQMHGNMANGVQSQETGNSQSTSEYTLAGILHHLQSEWRRYEKDRNEWEIERAELRARIALLEGERRGVENLKTDLMRRVKMLEYALRQERSKYLSSGGSTINSQSASSPLSANAPPAKNPLLQGLEKGTSSSGRSSPAPFPEAAPTASAIAAAAGSAGAMGTGLLSRSTSSAKDPKSRARSREYLKQCLQEISYLTSASTLNPLPDRGIASGSAVNGTNMQSALRPRKTMLENVPPTLPGPTESHAALAGSISRASGAALGIPNAKGGRPGRSPLFASEPVLEEANETEEPQEGGLETVPEQREVDGAEQLSSGAESVAPLKNPLSATFAEPEPSSSASPEETGDEQREQDEAPGSSGSSDSSRSSQSTDSRGNSAGSMTDQEMDEQEQVTAIFKPGGRDWQKLKEAGIKSRERRESERQGQAAEEASIIWEAQQQLAITSEKVNQLMNRSGRAAGSERKDEEELANLSLVAEDDEAAKEAAEAAADSLLWKSKKVLRSHLDAVRAVAFLPNEMCLLSTSDDNTIKFWNLDAQTLNQPAGKSGTDSQPLVTFRGHSAAVTCVAVSRSKRRFYSGSLDSSIRVWQLPDGSTEAYPPFEKSMELGCLVGHSQAVWDVALVPDRSDDEGRLASASADGLVKVWNVGASQAEGKSKAAATLELSWDYFGSEPAAEAAKERENLEKSGTLPVPTCVEACHWDLRLLAVSYSNSVVKLFELDTGRQVRQLKSDETFDGTAETQINKLVTHPTLPLLITAHEDGYIRMFDLDTGACTLSMVAHLDAVTSLDIDASGLTLVSGGHDCSVRFWEIAGGTLSGKEGSGVAGGEGGQSGSASSAVCRQEISSHRKKAGEGVLAVKYHPTAPYFASAGAVGVIRIYG

SEQ ID NO: 41151 - protein, 855 aa, Oryza sativa
MASLAGDGKSRPVNRPDGEPETTVSRVMACPYVFRAQAPPAMAKEAMATPTRPQVRETWPAGGGGGGGGWMGVGSGERVASAYDLVEQMHYLYVRVVRARGLTAAASTVAGGGGCNPYVEVRLGNYRGTTRHHERKAAPEWNQVFAFSRERVQASVLEVFVRDKDAVAAVARDGYVGRVAFDVGGAPVRVPPDSPLAPQWYRLEDVGGGGGRAVQGEVMLAVWVGTQADEAFADAWHAGAASVRGGGDGVAAVQSTRSKVYVTPKLWYLRISVLEAQDVVPGAVAGAGGDKGRHGEAFVVVKVQVGGVTLRTKPCCRPTSPSWNEELVFVVAEPFDEPAVLVIEARAAHPGKDEIVSRAVLPLTLFERRLDRRGAAAATHTQSQWFSLEPFVHRPRHSPEEPAFAGRVHLRACLDGAYHVMDEPAMYASDTRPTARQLWRPPIGVLEVGVLGAQGLPPMKTAADGGRGTTDAYCVAKYGHKWVRTRTVVDSSTPRWNEQYTWEVYDPCTVLTLAVFDNCNLGNGGGGGKDQRIGKVRIRLSTLEMDRVYTNAHRLVVLHPSGLRKNGDVCLAVRLTCLSLASVLRLYGEPLLPGAHYVHPFAVAQLDGLRRQAVGVVAARLGRAEPPLRREVVEYMLDAGSHLWSIRRSRANFLRATALLSGAAGAARWLADVCHWRSPATTILAHLLLVTFACFPELILPTAFLYASVAGAWSYRRRPRRPPQADAGLSCAEAAGADEFDEEADTFPTSRPDGVVRARYDRLRTVAGRIQAVVSDVATQGERVRSLLAWRDPRATAVFTAACLAAAVVAYATPPRVVALVAGLYLLRHPRFRSRMPSAAGNFFKRLPSRADTML

SEQ ID NO: 41152 - protein, 1154 aa, Oryza sativa
MSDSSATLDNAKAQRGSRGVTRIRKRWERIWPRIKLLAPPVAGALLISPFVLERRLKTWISADPFFAYIHFFLFFFPSPLATGAFLERSIITLVFVAAGTGIAFGAICGAISIDGAGAAAYSSKQSRAIGVCTLIFLSFVSGVLSSYAPRLRGPCRALLFSTVWELTKQYNVATARIFLDSFYPALVAMVVGISCNCLIFPRTARRSSIDQLCQLFQGTDRLMAKAIQEFSASLKPNKTLGPQGITAQDAPAESFEQLKEQLGSLQTRLEANFDAARYEVGFARVGVEQLHVFLPILRDIRAWFSCSLACLGEAKQQAETVEAAEIGSGLAEQPGVSTPVEETKAAFDFKHSIRTFSVEVSAALACLHWTVRKCTGSSAADGVQPSSGRNEKEDAAAGGGDPHLALAQQKQRLRASIRTFKAALNDAVRESRAELNATSTSQAHPKVGMPVGSGLGVNLPDSHQATPGVGQPKVLADMFRTEAYQISFLMVSLLEVGLLVDACLTGGLALAAAWKSSPHRRLRMSAAKWQYWLGHSELGVRDDMVFMDERVDALLHEDEPASPELRAESEQLDYFNDDAETFVLGDAPRLDRTPSRVSNGITSIRSWCSTKLRAMHSVLRTRRATRWRIALSRHIRALRHSRHIKFGIKLAGGFVLLTLPSWLAPGEAKQWWLQQRGQWMAISYLFCLETSTGASIRTSFFRILGTVSGSLLGLVINEVSRGNNYALAFLLTLATLPPSYVMLFTQLQGVGIVMGLTLPIAALLPTEESGESVVHVAWNRGYMIFFGIIAALVVNLFVWPIHARLELVRRVSSITSQLQSLYLSLSRQMLSGGLTSSHKSNAAFERLEVGIERRVGQARGLVDIMKIEVSLQPKRTRVLSELLDHLQMILELLMGLRRCREHGLRSVRQQAVVNVLGLRQSLIASVLLVLWTTGQALQTHAPLPQYLPSPRLALEELTEAVAEQLRTMLEEQEPVRPQGVPDAFHALDSLNHEAILASVRRRHRKHGLHSIQSASPAFGSESGAITPKEHKRSAVSGTDSPASAGTRKRNVDFAVFFILAEHALLEEIVASLEHLLQLCRSMVGEATFLYTQFVPTDRTPGDTTPAQPRGAEPSDTDTATPTPAASLRAPGSDRTPTLRPSPLAHASLPPTSDP

SEQ ID NO: 41153 - protein, 947 aa, Oryza sativa
MDYFKSLSSAASSVLSATRSGPLANFTIGQELVEYCSRSLWSLHSATKRDDNSACTVLAFDLSHPHNATRANLLPFAKNAARKLRTTRHPNVLKLLDSAETNSSVYIAVEKATPLYKVLAQSEDKRATPQRQDWIVWGLSSIVSALKFLNADAASTHGNLRPESIFITAAGEWKLAGFEALTPHAEAPHGLLFTQGSLLPDANRYAPPEVRQNGWNILSSMDSTLLDSYALALVAIEAFNGPLPPQTGTAAPPRGHVPQQLYSALQRMLVPNAKTRSTVAKVWEAGEGEGGFFKENTLVKVARGLDGFLLATENEKADIIKLLQQKPDSFTPDFLMYKVLPTLVAALSAVPPPGTIPSASTQASVLLPLVLRLGQPLPNDEWTANVVPPLLKAYASPDRSTRMALLENLSLYVERMDNRTVTDKLWPNLITGFNDSVAVIREATLRAILPLAPKLSDRILNNDLLRVLARTQVDPEAGIRTNTTILLGRLVPHLSVSTRKKVLIPAFSRSLKDQFVHARVAGLMALMATGDSFDHDDCARQVVPAVAPCMVDKEKLVRDQADKAIKMFLEKIKSGRAGMPDTALSPEQLDSSTSFSSSTDGTNGAGYASSMAASAGSAASALAGWAMSSALSSLSNSSSAPSVADGRPLSSAAELQSQMDGRSTPATSVGTPATPPSAPVPPSSGLASLRLGSGAADAADSSSWLSEASSSATAAKSALDYDLDDDAPSASTAQAFAAPPAAANTDLMDVNDDSADWSSFEVGQPKKKAPAVGRTKMAKAKLGPRRAAAAGAAAAAARSASAPVAPQVDATHAIERSSLRVAAPVEQEAAAWGGDEGWSAPAAESAEATPEPAGAELAGSQELTAQAFSAVPASMAVPAPDDPWASFDDQDDVQDERSRSASPATPAAAAPLSREEKKAELERKRAERRQRLEQLKRDKEQARLAAL

SEQ ID NO: 41154 - protein, 1022 aa, Oryza sativa
MAPHKRSNSASSTPATPTKKLKAPHQSALTSFFTSPSIASKPTFAAEPTSPISETARGKQKAQVGDVDLAATSQEEKDAQFAAELAAQDAGVSVEDYRARMRADEDMARRLHLEWSGDPAPKDGAAAGASNFQPASHAMDASAPPSPSKKPPSAAKPVDLVALDAAIDAIPLGDDIFVYDPSAVDTSAWPHVAGKHGELVPTTPYALLTHAFVLISATRSRLAITTLLTNLLRTVRAHDPDSLLPTVYLVSNHIAPPYDGVELGLGGSIVNKAIKSVTGKSARFLKQVRDKTGDPGDVAYEAKKDVKALVRPPPITVQRLFQNLHSIARLGGTGSANQKLGVVTKLLVASRGEETRFLVRTFISHLRIQAVRTTIATALARTFALVEHSTALTPPSNDKERERANMLLVHPSERSGILANATKPKERQDPQRLVLMERLARAEKLVREVRARHSNFGVIVPSLLKHGLPGLSEHVPLRIGTSISPMLGSITRSLGAMHAKLGARAFVSEFKYDGQRCQIHAIYVPRSAGAEARRSVRDDTASSNGAVKCGKWVGTNGEVYVRLFSRHLEEMTEKYPDITDMVPLHMGQQLEAEAAAERQKVTSFIMDAEVVAMDLDGRLLPFQTLANRSRKDVSLHEIKVKVGVFAFDLMYLDGESLLKSSFRTRRRLLHTRFPPLSPQSPLIARFAHVRSCESTDADQVARFFAQAQEYKCEGIMVKSLDHHWEAPRPSHQDGVGEPVEEDDAEEDEEEDDDGENGSSPPSARLHKLADVVDDDLAMDNEDEAVATVEAGRGASHVAGEVGKGVNGRGKALLSTYEPDKRCESWLKVKKDYVDGLGDSLDVVPIGAWHGMGRKATWWSPMLLALYEPGTGVLQAVCKCISGFTDAFYKELNVRYAEGSESCVRARYGEPPPFGYEVDTGNLFPDVWWRPSEVWEIRGADVTVSPNYTAAIGLVNEERGLSIRFPRFMRRREDKTVEQASTPAMLAKMYFEQQKAAPAPDARDDDDDDEAPRKPAADDDFEF

SEQ ID NO: 41155 - protein, 928 aa, Oryza sativa
MTSTWQPSQDGLAELVQLFRDSQSPQMDVQERIAQRLDAVSQIPDYANYCVFTLTSLTTEDLATRSVAGLILKNHILFHHDLISPESFEYVKQAIIPALSLPEDMLRRTATQVVSMLMTILTPQGWPEGLSKLGELMGSQNTDEAEGAFSSLAKICEDIPRELELCEINGVKPIDILIPNFINATQHADSRLRMHALNCLNQFVQIGSTALQAHIDAFLAALFKRASDESANVRRYVCQALVLILGVRPDKLIPEMDNVVEYMLYSTQDKDDDVSLEACEFWLQFAEEPSLKDKLRPYLAKVAPVLLKGMVYNELDLLMLGGDEDDAAVPDRAEDIKPRHYGGGGAHRNEHLDDAAAAANGGAAATGKSRAAIEAQDDDEDDFDDDDDDDEDDDGISDWNLRKCSAAALDVMAVNFGDELLEILLPYLKERLFSDDWLQRECGILALGAIAEGCIAGIQPHLPTLVPFLINSLKDSKPLVRSITCWTLGRYSSWCVAAETPEHQQQFFVPAMEGLLSMVLDNNKRVQEAGCSAFATLEEEAGRNLEPFLEPVLKTLVYAFDKYQQKNLLILYDALGTLADSVGSALNRPEYVEIVMPPLIAKWQGLHDTDPDLIPLLECMSSVTIAVGPGFLPYSPPVFQRCVGIVHDNLAAAEAEAQKPAVEQDVPDRTFIIVALDLLSGLTQGLNTAVRDLVAGSQPSLLPLLGHCITNVEAPVRQSAYALLGDLAISCFDLLKPYLPALMAELIRQIEPEPKMENVSVCNNAAWAVGEIALQYGADAELTQWVDELIKRLVPVLLSTKSVKSLSENAAVTIGRLGLVQPQLVAPHLDVFIESWCQALWDIKDNDEKDSAFRGLCEMIQVNSNGAAKGFVYFCNAVVRWSTPSAELNDMFRKILTGFRDMSGPQRDVQKAQFPPVIVQRLADRYGL

SEQ ID NO: 41156 - protein, 973 aa, Oryza sativa
MELQRVQNSTVNVMHVMEYLAANVDLAKDLVMRCSAVARELKNDDLLGMTEDLDSVIKNIGHELSRIPASAFGSSRFPDGRADANLQIAGHRPRYCDHNSCDGYSEADMSIIPANSRPRRRTLHNSDMPRLVDFLQGMYHESHDIGAHSFNSLPEVAEYVEPLYDSFFCPLTNKVMVDPVTTGSGVTYDRKAIEEYFEKFADGSEPVVCPVTKMSMQSKALRSNVPLKSTIAEWIMRNEATRVRIARTALSMASTEAMLLEAIQELKLLAKIRRKNREQMHKIGITKFLPRLLEHKDGLIRCDSLDLLCLLAEDETGKEVIANTRAITRTIKLLSSNSPDERHAAISFLLELSKSELLLENIGSTSGSILMLTTMKFNDSDDPVAAEKAGEVLKNLENCPKNIKYMAESGYLDPLQRHLVEGSEDVQMEMVSYLGELVQKQEMTINIAGSASEIPIKMVHSGNTVIRKAALDVLVQISSDGPNSKTLVDAGAVPVMVEELFIRKIDDEPMGSKTEAAAVLANIVESGLDPDTIVVNKEGHVITSKYSVYNFTHMLKCSMPDDLNLSIIRVLLALTALPKPLMTVVSVMKEQDSSLTVIEFMGSKTEALGISATRLLIALSPQMGHTIAEKLCKAPGQPGRLVKSIGQPGRVTERHAVAATLLARLPYQNITLNLALLEQGAVPTLLAKIEEMQRGEMRVSRHAKTYMEGLVGALVRMTMTLYDPDVLLAAMDHNFTAVLTDLLVRSAGSDEVQRLAAVGLENLSHQSVNLSQPPSEEQRRPKKKNILRRLRDAHTGRVHDNNRKPPPPPAQGRLCPVHRGVCSPATTFCLAEAGAVEALVGVLESNENGRVVDAVLGALCTLMDDAVDAERGVAVLAEHDAARHVLRALRQHRDVGGDTAGAVSRRCFWAVERFLAHGGERCVRDVTADRALPSALVSAFHKGDAATKQVAESVLRSLHRMPDYSATYVSVEL

SEQ ID NO: 41157 - protein, 972 aa, Oryza sativa
MQAAPGLPRQPSSSLQPPSSPPSTDHVPSTAHPALASGDLATFLQPSFDAAAYVSQLISGVDAQLGVARSTAQPPTPSAKLAVSPGGLLQPASPGILPASAQNAAASRTSISLASPSAAAPTADAAAGSSKAQAAQRKREQDQEEVDLSLAISRLNLGIEELDRSISTQVTANAPALLQRTSRLATMQHGLEQTKQGVESLDMEVANLRRKVHDPFQRLTELQADLRVYDGAGELVAKAVKFVGLARRLETQMEALFAKKDGTATGKAAEADGEDAVVGLVHGRDLSRAALLIHEISDMLDAERPQGSDGLLALKLVQDVVPVVESARKTVVDYMEDMIVRGLRDLSPVMLASSLQTAFNLGTLPTLVKDLLDDLTEVVRERTAAALDLDAIARQLGLAIPSLEASNPSYSTYRGGRRRDDASARQQQQQAWSDALWKRLESLIVVEMGAVCSKVYLLEKVLKLKTDAETGVNFLAAALDVLGDKPSHTFWRTLAQCLEQQTGVATAKSPWVAQLLSSGIAAENTQGGVVMGGYMRLLRLLHEFFAKITVYTDVQYTQTHQSAETVILLCGLAPLEKGYVDKATWRVAEVLSQVVAPTRRTALDASREADGVVALVANAVDGVRSDPLLLRAVVDRCAALVEQYATRLDKVVAEDASAWLVDGRAVEASASQTWNAALVRFSHALAAGLTGAAAEQDAASASYAATRLHAAVDTIIGATRRVLLDPLVRAAEQTVAERMGKMHVQLASRGAVHQRGVSIDATSGASAYISDVCDALAFLRDHLLPLYPPQLRISLAGAVPATAAHCFLLYAGLLALPEQADKVKLRLATDMTELEFALTQLVGEAPKQPQGGKWVDDAERAEVVGNMKVFRRTLFMDTHQLVEEAKGVEPNSVFAVAMALHLVSRAGALDKVLAATARATKSSNAAARSELVRSAMHSTTGLIGRIHSALPNASLDDETARIINLLLPPTSA

SEQ ID NO: 41158 - protein, 1127 aa, Oryza sativa
MSSADKYRADGETEAAAAGGQQPGASSASAASSTSSSDSPNHSQVEGQPQSTVRIHMNEDAQAAGVANGTPARKMKERVAPTPLSAAATASSASHLATPVASSSPAPASPGVGNAVSPRRKLTATGAPTHAATSAETLKSQITPARHVVAPEQGSGNDGNVFVHVIDGTGNFSCTPVDLTYLVLHAQQSRNANYSVVGIMGCQSTGKSTLLNLLFGTRFQEMDSSQGRSQTTKGVWMDSGCKKRDLVIMDLEGTDSGERGEDRTTFERQTSLYALAVAEVLLINMWEHDIGRYTASNYGILKTVFEVNLQLEVSQQALFGEATNRTVLMFVIRDHIEEETPMEQLKKKLHKEVDKIWGEIRKPERFKNTQVAEMFELKFCALPHMKLQKDLFKQRVNALREQFTTPSDSEYLFGGPRNGRKAVPADGFGLYMEQCWATIRSNKELNLPTQKEMLATFRCDEIIHSLYADTFAPGMAELKELAATELVADQFADTAEPLLRAILADYSDETKHYHAAIVAAKKRELLRKMSRELEEIFATQARKFVTKQALDVCKQKMKEQLASGSAALSAANAAAASAAASGHNKRGSVSMSAAALSAASHDAPHPAFASATQSAVQAAMDFATAELSKFQLPVLSSMEASAAGQEEDAAAAEAVASSLGTDSATGSDPLLSWSALASKVEEEVRTAVDGCVALERAHQLKKLTFHLDKVFKAQLSAPLTSILKKAAPRSMWSDIGKLYRKVRANVVQQYVVDTLCVAYACSAEETTSLVEQSEQQLSQLCRLIVDQHVGMISLHLRSKFDSLFRYDSEGRIRKWGARDNIRAVFKQARDETLQLLDLFAIFRLDEYKEADSPANKRDQALRDEEEAAKTRPHVRRASSVMGNSSSSLNATTAAPAASGESKDDADEEGEDSLSGVESDSEGVEEKVGRSTVDYSSVDAANIILDASARLEKESTFRFDIEGALREAEMQQAANEDKFKVPWWMFALLAFFGYDEILSVLRNPFMLVFLVVAGGGAYMAHQVGALFPMLAVAKATALQFLAQAQGSLNNVQQLQQPSGSPSRSNRRLSRMSSGSSLNRRASHIRNPSLGEYTESESTPRSSSRRASVNEGLSRAAPPPPRRMMARWR

SEQ ID NO: 41159 - protein, 1151 aa, Oryza sativa
MSSKAIREFDAKLLVNYWLPRSPLAHADLKVNADFVAPAPKVAQIAWDPTTNSITDESQLPAWVQSTKFVAKPDQLIKRRGKAGLLKLNSDWADAKAWIQERAGKAQQVESVTGTLNNFIVEPFCPHPADTEFYVCINSAREGDWILFTHEGGVDVGDVDAKALKLLIPADPAAPFPKREVWTSTLLTGVPAAKREVLTDFLIRLYSVYVDLHFAYLEINPLVATDDGQIAYLDMAAKLDQTADFICGPKWAIARDPSIVMGIAAGAAGNKGEDRGPPMYWPAPFGRDLTKEEAYIAKLDAGTGASLKLTVLNATGRIWTMVAGGGASVVYSDAIAAHGYAHELANYGEYSGAPSEGQTFEYAKTLLDLMTRGEVNPQGKLLIIGGGIANFTNVASTFKGIIRALKEYKVSLAKHGVRIFVRRGGPNYQEGLKAMRLLGEDLGVEIQVFGPETHITDIVPLALGVKTFEEVTLASQQQNALPSGAQTPVHGGANGAKAEDKAIGTVDHTTGERVQPQDQIVHFGAGAAGERPAYRPFDANTRSLVFGLQPRAIQGMLDFDFSCGRQTPSVAAMIYPFGGHHIQKFYWGTKETLLPVYTSIKEAVAKHPDADVVVNFASSRSVYSSTLEVLDCPQIRALALIAEGVPERHAREILHRAEKAGVLIIGPATVGGIKPGCFRIGNSGGMMDNILSSKLYRPGSVGYVSKSGGMSNELNNILSITTNGTYEGIAIGGDRYPGTTFIDHLLRYEQDPECKMLVLLGEVGGIEEYRVIDAVKKGIIKKPIVAWAIGTCAKMFTTEVQFGHAGSMANSDMETASAKNAAMKAAGFIVPETFEDLPQVIREVYNKLVAQGVVVPKPERPAPAIPVDYKWAQELGMVRKPAAFISTISDERGSELMYSGVKISEVFESGMGIGGVISLLWFKRRLPDYCTKFIEMALMLTADHGPAVSGAMNTIITSRAGKDLISSLVSGLLTIGDRFGGALDDAATEFSNAYDRGMTAREFVDSMRKGNKLIPGIGHKIKSVSNPDYRVQVVKEFVLKNFPSHKMLDYALAVEKVTTAKKDTLILNVDGCLAVCFVDLLRDSGAFTIEEARDYLSYGFLNGIFTLGRSIGFIGHHIDQKRLKAGLYRHPADDFHIEMATPARVMGTLKK

SEQ ID NO: 41160 - protein, 998 aa, Oryza sativa
MDAFQADTTPPPTPGPSSFAPPSPHAQRLARQPPTSLSLRIPQDGQSRLTQPSPLSARPALPLSPGHASSSTLAPPPLSRLARKRPSKLTLAPPSLADDPGLSSRSMPSSPVVLSRSNSKSEHQPDSTVAAPSAISEAVRHLSSTLRGTPRRRPSMPFKDTSAQRSAFPEPPSASSSRTRPPEAFRDPSEHILSGKGSTLQHARSVYSHGPVEILPGLYLGDEHNARDHHTLSALGITTILNVAKETTLDFTADAASASPAQWSRVPERRGTLANGELPSARSHRDSAQSSQVPPTPGAYFTPPTTASLPVARDNNDAPSPRTAISPSVLRNTSSTPNLLTQFLHDEPASTSDLSSHTQAAPVDASADLRTLTAQDVLKYRTLRRSSGSSSDDANDTASSPSSSRAPSTCTSAATELTPPALMSIRAKGSDAESESHDAYDSSAYSSQQVSPRYASDAGEQQSPSAWVTHVELPANATLTRVAVGAADGCAAEVRYIKLPWTHDETELASGHGGFAQGCALIAEALGVDARYWYAAKIPEDVDACSALHDDASLAQVQTSRTPGRILVHCQCGVSRSATLVIAFVMQAAAMRYGFGAARSLLGMHDCYNMVKDKSSSISPNISLIYQLVEWERYLSSAAGRLRDVLGMASVRNHSEAGQVMDVGHSTSLAGAGWCTETMDEAMWSKMRLEEEEKEAAEEARRREERLNEAVRLAAERKAAQDRLEGLTPDSAAAVGSDAAAGSLMQRRRKKAAPALQLQTAGAAGGAGAALASPGMQRRRPPALQLSRNGADRGTAVETPFQTARMEVWTGSEHDGDGDVMMDELDAPQTPLRSWAMDSDVVSTPTARTAAGPCEGEADASTLRTPSARTHASFTLGGEARLDRARPSSTSHVSLGREGVVSSTLPLAMETSLSLGSRGVEAQGHAGRARARPDSMQSVLSSTASSTALFGVTALSREERKKQHRRTFSSDWPTLQANLASQKRRSKIEPGPTEAMDV

SEQ ID NO: 41161 - protein, 885 aa, Oryza sativa
MPPKRAALPTKERALFQRLIQEYETKKYKLGLKTADTILKKFPEHGETVAMKGLLLGSTNRREEGIELAKKGVRFDLTSFICWHALGILHRQDKNFEEALKCYTQALRIEGGGNINLLRESAFLQLQLRNYPPMVENRLTLLRMQPHLRINWIGLAVAHHLAGSLDAAVRVLEGCENVMRDIPDRNYEHGEVLLYHASILEEQAKFQESLDLIEASSPRIVDLKGKMEAKARCHAGLGEKDAAESIWRQLIASNPENKRYFAGLLSLLGITTETADQAQAVEVFRGLQADHPKSTAAKRLALIYASGDEFATQATAYVKSALVKGVPSLFSDLKSLYQDSAKQAALEQIVETLGLEWAPASSAPADGTEPPTSYLWALYYLAQHYSLTGDSARALHYIDSAIAHSSTLPELHMVRARVLKRAGDLLGASAAMTDARLLDGQDRFLNSKAAKYLLRTNDTVEAERIVGLFTKPDAPSPTYDLNEMQALWYLAEEAEAFLRTGNLAMALKWLGQLERTFQEFWDDQLDFHSYCMRKMTLRSYVNLVRFEDGLRSHPAFVRAASVALGIYTTLYDKPDTPAFVETKTDEEDPALAGLSEAEKKKAIKKARQAEAKRAAKAEQEAADKKKKAEEAAANGEVVDDDGPKPDPDPKGLDLFKSVHEAPLEQAAKWLRFLQANAASSEETWMGAFEVAIRQKNWLLATRALVALHKLHPAHPELVHMVVRLKTRLPDLSAAPKPIGSVIASALETIVPADKPASVVFTEALQSGSATPEEVLGNARAALALDRTDEAVQILLSLPKTISPATQPRALNRALRTTTVARDLLATIAPNSTAEFDAAAGKTFPLANAFMSTSQLEERQKTTKVAQQAWSSAPVEEEANGHQPLL

SEQ ID NO: 41162 - protein, 843 aa, Oryza sativa
MSIPSEGLVSVASNVQPQAIGTGSRVAKGKTVLIDNYDSFTYNVVQFLAEAGADLVVYRNDKVTIEEIEALNPANIVISPGPGHPLHDSGISIPCIKHFAGKIPILGVCMGLQSIYSAYTGIVEFAGEIVHGKTSEIAHDAKGLYAGLPAHGVVGTRYHSLAAQLPSLPKELVVTSKTSSGVVMGIRHTRYTVEAVQYHPESILSVGGREMMVNFLSWTGGTWDANPQAKVDAAAIERAESTTEPVLAMANDGGAAAPASAPAAANGSAPAATASVGTILERIHVQRLKDIAATKAVPGFSQRNLDIALSLHLAPPLINFPERLQRHAARGLPGVMAEMKRASPSKGDIDPTAHAGAQALAYARGGASVISVLTEPKWFKGTIHDLSLARRAVDNLPDRPAILRKDFIVDTYQIAEARLAGADTVLLIVAMLTDEHLKQLYDYSVGLGMEPLVEVNNPEEMTRALRLGAKVVGVNNRNLHDFNVAMDTTSRLADAANKGGVILCALSGITGRSDVAKYLKEGVGAVLVGEALMRAKDKRAFIHDLLGLPSTSAAAETVEGSLVGHGTLVKICGLSSVEDAVAAAEAGADMLGMILAPGTKRTVSHTQAAEIIRAVRALPGSAPEDAVALDAEAVAGLLEHGVTPEDWFSLTVKKLRSRAGKRPLLVGVFRDQPLAEVASTAQKLGLDAVQLHGRSEGIEWAKFLPGRLVIRVFPVGADAQIGTGLLRDVARPGYHHLAALDTAGTPTSATGGDGGTGVAFDWSLARAVRTADALPAIVGGSAARPVPLILAGGLTPDNVAKAIHDALPFAVDTSSGVETDGRKDLAKIRAFVANAHSAPRPQQ

SEQ ID NO: 41163 - protein, 1206 aa, Oryza sativa
MQANNLQLFWEIASSDQDARLASANHLVQQLLAQQDVLASTSKLTLNAALSTADDDAPNALQVDEAEADAVEDALGNRTVADLMYALRRLLRGLASPRESSRLGFAVVLTELLSNIRYAVTAREILVLVLRYSNPQVAASRQEQKDFMFAKLFGIMCLVQSELLVQHTATIADFKRCMRILITLSADKPWMAESCAWVMVNAVAQIQQQKDLAWAGEAHAWMTEQITATSELSPEKLAVLLQLSHTAPADYFHNIALPSMRKEHPLSTANLPQLARVLKEAIPAENDANATVGARSRWQPKIHFVWDLILDVSFKEVAETRLAAFPDFYRVVVDETLFAASSSHDRKSWGFQVFERALARARDDDKPLLFTPNFMRTLINQLGNRERLLHRAAVKATHTIQEVVKQHPYLGFVLVTQLIGKNGHPNFDSITKTKTVEQVLAALDVERVREYVQHLGDIMCKGIATDDDDELQEITNRRKWALDQLLFLVRTPSVPKDDALILDVLTFLAAHGYFALTKPIKKRFLLHTLPTPPLADSLKQLTRQRFLSCVSELAKQATPTTAVNGKKTPGVAQDGELWLAKAHTILVQLEADKSVTSVFDHDAEIAAKLAEGVRCLERVRKLDAKSDSAEAHERSRAFQSLLLSALLVSADAADGASDLVEPLCACANKLFPPATTRKGKKADEEEPTGIELLCDCLLSFLELSSAFLRTTATNAFEAFSQDMTKESMGLLLSHLRTTDEPASADEDEDDDEVMDADDDDEEGKPSDTSATSDDESDAASDADDDEEGEEVDEELRSRLRAVLKESGMAERDGEADDDDEDDEDAQSDAGSESSVEFSDLCDDEMMLLDDKLAEVFRQRVSAVRDQKEAKQEAIALRFKVLELVEVFARKQPQSSLMLDLITPLYDLWKARDEDTEQLANKARGLLLTRISKAKTVPDSVDASQLRELVEKMHTEARESQSNDVSNVSQAINAYLTKTALSQAGDDAKTALGGELVAIYRASLLDYLERKASRMRHEFLIDAFRRFPLLGWELRGELLDHCRPGAATRAFRQVQAVSMLQAVLTQIAQRAVNQVLDFVPEISSVFVQIVSDSVEDSGAALTSSHMKDTIKFVLQAARISLRAEKDASRVEAAWKVTKLQEAAKKLQGSERFKASTSIHDLMKQLLKVVQPQAGDKVKNKKRAADDQATATKSEAKSPAKKVKPSKK

SEQ ID NO: 41164 - protein, 1067 aa, Oryza sativa
MSQRPLPTGAPPAVISVVRRPLAPSARSNIAPATASTAAAQPAKAQIKLEDRLSKAEAKIQDLQREKDTAHNQLGDLQTELRLAAQREAKLKHGIEKWEKAHASLKEKSSKLSDLQARLAELHKVHEESKARRQSEIDDLTERLRKEQDRRKHELNEARQSIATESAKWQQYQTKCSALQAELDALKLQGSASHDLVAEKQKQIDELQAERDSDKVILIDSQKYARKIENEFNARIQELQAQLDAKTDEAARSARDQQAAAEQERSEMHDELEELQLELEQTEQQYAHNLTVIAKAVSEQIDAVKLGSRAETQSWMARWHHAASQQIQLESLSDERAAQIHELVAVVKQVQDDRDTAKRLAATLQADLVSITTELHAERHLADTLIAQQLEDQQQRQSTQQTSASDSNSEGEIDAGDMSSALLRVHLDDVQSHNAMLQQEASELQQLVLSRSNDAKQAEEALAAVRAQVATLETSVAAKTREVDNLVSQLAELEPLRRRLAGALEEAAAAKKEAQAQTEAARSIAASLQNARVAEEAWCDERDRMAALLDHAEHFEALYHELAEQAKHLVERNALAEQEKATLSALNAELLGHNNPNQKIMYMDRVRHELDDARRDNVGLRMHIERLEHENAQLSRELASFRAVDVPLSQRPRTEVTRVLRASADPAQLLRKVSAAAATPAAKVELPRAEQRVSTPVRTNFAPITNATPFSAARPRFSAQPLLPEVHKAVEAAPKQARKQEEEAPQRVAEPLAHPPLPVHTGLSIKKRRSYGNLSVHAIEADDAAAEETEHQEAVDDDTLLANAVEIEADEVAVKRDAKRNAPRATLVNSGALRVGGAPSMPAPAPAAATTQVDSMAAASVSAVRTPSLATSSLGIKARRVSEIVRASTPPLGSIVDFSGIDTPGGAMLLDAALPSPSPYGLADWTATDETSHVPALTAHFGSIAHSTPLPAKAGRRTKSRYSGAQRVALAPDTTPRAKPSLLPPQAKNQWLAVYESDAVESPMYEREHDSFRNGWLDDDIPDLPEFTIDHAKPAPAPAANAKSKKVKPRASSKLVKPGPMARTFFR

SEQ ID NO: 41165 - protein, 950 aa, Oryza sativa
MPHHHRASSLRQSNKAFKSKHATKTSLREASKGRSASDVSSTSRLSSHKASPLSAAGNEVGSRQHRRNHAKQAQRSKRNALVQSNRIFSSAASREGKDGLSKGFAGAGAGAPCICAVVDLAEDGDSWEAVRRIQEEGLDGGVQPVPGRSVDDALRTGLPYCELEATRFRQTIQFLPLPYGALYPILDACKCADFVLLVLSASTAIDPGSWGELCLRTLQAQGLPTVVVAVPTLHPDGATGVGGSKKAGAALKAANEVRKSLLSFAQYFSPDVDKVHALDDRAERGALLRTLATATPKRVAWRDFRAWMVSEDAEWETAPNPDATNANDGANGIASLNGHDQERGTLKVTGWIRGAPMSADRLIHLPDFGDFEVDRIAYAPPPNARTKHTKASATTAASTDADDAAMTDADTAATVADAPLAAGDVLQTRDDEFADDLVSENEPDDMGNEQTWPTEEEMQAAEQFAKQRADGEMPPPPALPGTTPKTIIKGSGNAKDNAKYRAAWIIESDEDEDDDDDDDADSMMAEEADEDMDTGDVEVNEAIDDYERMKAAAIAQQHAQPSESMSEMAFEDVDDAQAEAEYRAYQEQRKREREERDDAEFPDEVDTPLEIAARQRFARYRGLKSFRTSPWDPYEDLPRDYARIFQFEDFHKTRRRDEGAALLDGVQPGFRVTVWVKDVPRAAAVRARASNIELPKVDVAVPFVLFGLLRHEHKKSVINFTVTRNTEYDAPVRSKDPLVLCLGPRRFRVNPIFSQHSRGGGKGVNNVHKFERFLRPGVSASVATVYAPITFGGSTAPAVLLRERSIDGESGYDQRGVSAAQMPHLVGFGNLIDAGPTRINAKRILLSGHPYKVHKKTATIRFMFFNPEDVYWFKPITLHTKLGRTGHITESLGTHGYFKAHFDGPISQMDTVLMNLYKRVYPKWAHPFGSAYDELPLPRSEVYKQDDMQT

SEQ ID NO: 41166 - protein, 848 aa, Oryza sativa
MAATRARTELAAAAASTPKNDTSLDSSRQAAAAPAEASTDHTPARRTTTRTRKLPSRLLPSPSPPPSRPTSLYNAAKHAKGGRDSADPTDPSSALCTPTSASAAPTPKTRKPRPSDVEDPLADPDTSLDTSQDLGPGKRKRRPSSMYKPPSTLTSVDTPSPASNLAATAAAKAKKKGRSQSPDTSTQTTTASATKLKRRLSKGKFESTPSSLNKTDAAHIHADDSEAELESIRHSSASKRARLDDADDLDLSPPPLLPRDGSARVRMPTHFTQPTFIRGGRVSVSPEASAKRPVTFGIRDFNRPAFHRADAVSGDRHNTPHSAMAVKRSAPAKRSDIMSSSPISAGVAKFESEPGAPLTYVPFPCAARSLGRFHNMRANPFAHEQMDVDDDDEEEDDDENDFHQAMLDADFDFFDSQKADGNATNNLWNVSQRAATEDAAVEDDDTPATTPRSPQSGCDLPSPDSPRCKSEDEAQPLRTDDSGMAFNAVRDSVFVHALPTTQVGADKACQHAGSLTLSLPYTPGVAVSSPQLRARELELDGGAGVRGTGDASSLTQTGTPVLQRRKHAALGGDGAHALAPLKLGAELMERGSSHSATYMQLSPMIEMDSPLLSPVLTLGMHAMHAKGTDLPSPFIMGVDSLPELEHPAALDLAAADGSTTPKTFHPEAMDDAVLPAATTVSTAASQTVEAPSAPKPEPKVAPAKVEKPAARRPALPPPRQIRFTTLDTPSNDATAATLPRGAPQQQQQQQQQQQASTLQQHATSGKVEQATPELVHSSSSSPDSGSDSPSPVSQAGSSGSGEAEVESLLFGPPEKLELHELDSAWNGSKAAALRLTQVRHVDVGASRT

SEQ ID NO: 41167 - protein, 788 aa, Oryza sativa
MKKLTVAFLATLAAADAAQARGSRHARRQNYGNGYQVGEVSSAAPVVSSSALPAAPPVSAGGNGYGVPSAPVNTPAPSTEASPEKPSSAPAPPPAASVPGNGYGTPEKPSAPAEVPSATPSPSTEASPEQPSSSAPAEVPTPSAPGVPTPSGPAGVPTPSAPAPAPPASVPGNGYGTPEKPSSAPVEVPSASPSASTEASPEQPSSSAPAGVPTPSAPAEVPTPSAPGVPTPSGPAGVPTPSAPAPAPPASVPGNGYGTPEKPSSSAPSSQTTDVSPEKPSSSASGPASVPTFPGTGSLPLPSMPGTGPAPSFPGTGSLPAPSMPGTSYNMPSFPATGVSTPAGQTSTDVAAETPSSAPSFPGTGPAPSFPGTGAYGTGVLTSAAPLPTGTGAFSFPVTDVANSTSDGSELVTSVIYTTQIFTQTACAQSVTDCPAASTILITSTIPLTTTVCPKSELPTPTGASTTAAPVASGPGNGYGTGSKTSAVVEAVSSPVTEKVHVSTETLVYTVGTGSTAHAVTTEVATTSTETIYKTVYVTKGYETAPASKEVASEAAPTGNEATTYTTLESTSTTTQFITVHPSASAPAANVPGNGYGTGSGSDVPVEGAGSVVPGGNTAGAGECAPATTVTVTEQETVTVTAQPTPTADVPTEGENVPSSAPAASTPATDSAPVPTGGAPAPYPAGNGTLPSGASSGFLTQTRPVGGAAPSGTGMFSYPKPSGTGVAPSSELPSFVLPTSSAAAETSAAAVAESSSAAPVASPSASAPAPNYGSGYSTGNYKRFFGLF

SEQ ID NO: 41168 - protein, 1007 aa, Oryza sativa
MTFTGLPTAALSASTRDPTSSQPHRFGEVTGSTSSHGSSGLDDYKVLQPGDFARMKGQLSLRSRPASRIDWVIDSDHYNALAASPGVPNLLHDASPLPPDFDLVLPARHHHLHDQAKSNRATFGPWSDKSDHTHEGAAAWADAKEDLLSVADEGSDTEPALQTNDTALQSIQAQPAAAPLTAEEEAPQAVKQDTHLSQLKMEAEAAWANYRPGLRPLTTEHESLASTSSTPGTPTQVPQRLASLRRSSLVAHVALAKPHQGSNHKYSASHSSISLSSLAHDTGTPSSLHAKLEPEYVPHPARPFGRGSLGSIRASPSEARFQRPYTASILSSTSEGSLLSYQNSFESGLSPLLLNRAATSGRLHGRSQRPATVGSITVSAAPLRDLHFPRPNLSASSGRPETTNQLSAEERRQQVRRTKKLAQMLGEEMLFATNAHNQQLDPAPRSHSLVASSADARSRKHRPQSMPFSVTGHVDVPGTFASNAGSKTRAFSRKLLHSRTHGVKSWDHASSDLNQNAVYLNLNRKAADVLGIPHPYSSNARANVYAGDTFSSDEELNRVEEIRSHPRPFVPSGLEEFNEPTPKVDQLAAFSAAALDEAASPTLPQDGPFRPFDRSEIDQALAVSESRKLAAARDERRRRVAKMSRWLGEAVPAELISSATKAGPGAVIVSTGPSNPASLGSPAPTTSDAHSLRGAPSSSACQPSSHSHGSISHESSVASNLHSFMSIDSSDEESGDEAAPAIATDRVLTDVRLAASSPRSRASERVAASDSLSTCRNSIESYEYLLENDRRRLGELASIFQHGRSAPRPSTVDTISARSRPVRPNGRPQTSPVTGSMPDGRRRGFQSLGHAGYESEERPPRPSAAFLELSDSESDSSEADELPESDDESSYPTSRRQRAANLHDRSISKLSNFFGSTPSQIVRSQSDMRVLTSSVDTVSTVGNGSLGSRPARGGNGMRSLSQPEALKTMLRSLEEEAMDDSKLNPFQKSEISRRVHRLKKRTTKIFS

SEQ ID NO: 41169 - protein, 420 aa, Oryza sativa
MYIFRRAAARAVSAPRQLRATPCVNSFQSSIPSLTRSFHQSRIWRAEEQKKETETAAQDAVSESSGTTSEPLGQSEGVSSSETTTTPSSSTTSEPVGQSERQSKPVLEQASEIAEKAKDTVSDAAAKAAQAVGEFTQDPKERAQDAAASATEQASQTASKVSEQASEVTSQIREQAQSAAAEATRYARNTAASTRETFQERRPYESRPPAPPSKILYIGNLFFEVTAPQLEAEFAKFGEVTNSRVVTDDRGLSKGFGYVEFINQQQADAAREALDQKVFQGRRISVQYHRRREANNNTKRNQRSTAEPSKTLFIGNMSYQMSDRDLNDLFRSIKNVLDVRVAIDRRSGQPRGFAHADFTDVESAVTAKKALEQKSVYGRQLRVDYSGQAKEDGDRPARRERSDRYERRERRDRDDSNDLD

SEQ ID NO: 41170 - protein, 1084 aa, Oryza sativa
MKHSRPGSRGSEAPSSAAPNTPEAHAHNPDSPSDDARLYSRGTGKRNRVHFSCTECYRRKQKCNRETPCQHCIARKIPERCKTFQPGEDANDVATRLNRVERMLEDHLPKLAEQVHHLVSLLGSSTTSRPQPHDPHPRIPSASRSTWHEGALARSPERTYARASDQGDDDIDELETGRYSPKTGFYSGGSMDMRISSILDDLPGSSSKSAPLNPPVRTLEGPSEIDVVMPEYGCPTAPTPDLLGAFSTRAHCSVLIDHFFNDINWMRQPFPQKSLRKSFEAFWDSGPKINAQNINIFALLCNICAIAMLSVQHRLFPEGPRDRLKAARRYHYAGRRALLMSTIMGREDVDQIVAWLVSCRFLLLDRRIGEAYTLGSSAVRAAFSIGLHRDGTKLGLSPAETEARRRVWAAVYFLDRAMALNTGRPAVIDDRVCDTQVPSEVMDEDIFPAPKHPPKMPPGVDPPTAYSYTVFRQRIAELEGRILATFQNLQHPVHISDVLALDKSMRELQDGLPFYFRAKLTKDGVEGDKSLDSVYGFLNVHRFLLHTEINSVRIALHRPYLLRSGGPNGAKFLPCREASLDAAVHDLEMRRDFVQNLKTLTPAGEEPLLYRVQIGTYKWFHSLLVVGIVLLMDPNARDAPKLKSHLEEYVNTYKSRPASQRDEMRDREANVIGIFLSRIEQVEKMAAEAKGNASGSRAAPRAPKRGRSTDAGPNSDARDRLNKSRKRGKDAGDELSDEKSDAHLLLSLDASRSGLNGAGRREVGNEADAASKSYLDRLARGAVPSTSDAPQDAGSTASRQGSGDWSFGGPRGLSGTVDPSSSASSSNSPSTSSLPAVMASGHGVNDPKANASSSSTPTWAPAPNGGGEDAQQFFDAWYQAEWAAATMPSYDAAYNGANGLGGGAAGVSLGLDSLAGFSGVFGSTSNGGGASSGPVSQGLGGGFNGLIGPSIGAPGAAAPGPGANGSKALAGAGTGAGLTTGGGMSEWMSQAGGLPPSYAATTTSAATSDRLADLLSRSQPASNTDGSWQEQRHGAGQSVSGSSGLQPPGAVAASAFGSSAPTGAPGSQAQGSQALLTFDGSAPG

SEQ ID NO: 41171 - protein, 789 aa, Oryza sativa
MLRRRHHLPAVLRLFSTSCRRGHPTQPPQHPSPAPLPLPPPVAKKVPFTASAHGRSWSDPYHWMRDTSDPDLAALLEAENAYADAFVDSAGEGGGGLRARLAAEMRARLPPSAASPPQPWGPWLYYQYVPEGKEYPVLSRRLRSSGGLARAALDFISGSKKEQVLLDWNEIAEKFGYVHIGSCRISPDHRFLAYTLDISGDEFFSLEVKDIQSTNTIFCSPHKGIVSLAWSRNSDNLFYTVCDETLRPNQVLCKDLQSDQAGFLVFMEKDINCCVDITSTKDFKYVTINSNTRTSSEVYVMESGHVRGGLWPVQKRSDKVQYFLEHHNGFFYILTNAPSEGTETANGGYYLARCRAEKSEMDKWQVVALPGSYYTFQDMDIFHEQLVLFIRKSGLPLICSINLPIDVDFQEQKELDDLDPWFFPVPSDLCSIVPGSNNDFMSSTYRLVLSSPVLPDLTVDYNMRMRTFAILHQEEVTGLSSNLCTVGLQSNITGIQQNLQLIEDSQSWSDLSKLFSCERVQVISHDGVSVPLVILYSREAHRRGESPGVLYGYGAYGEDLDKSWCSDRLSLLARGWVVAFADVRGGGDSSWHLAGTKANKINSIKDFAACGTHLIKEGFVRKNRLCAIGCSAGGLLVGAVINMLPDLFSAAVLKVPFLDICNTMMDSTMPLTILDYEEFGDPNISTEFDTIRSYSPYDNLSPDICYPPVLVTASFNDTRVGVWEAAKWVSKVRDITCQSCSWSVILKTNMQSGHFGEGGRFMHCDETAFEYAFLMKALGLDDNDSCKIV

SEQ ID NO: 41172 - protein, 481 aa, Oryza sativa
MPHPFQCIATVATEGGSYLLAACGPKLLSLAAKDGSIVSQWTSDAAGTVPVTTADEAASEGDERPAKKQKTTAKAAPALTNIIKLTVSNDQQHAVAVTEDKCVRVYSIQTDGGIVELSQRTMPKRPCALEVLPDNDTIICGDKFGDVYSLPLLPSDESEKEAADLKAAQAAQDAKNAELRAQGNFQPAATNLTVHTKRNLRSLEAQQKQKLFTPRKEVLAFEHKLLLGHVSMLTDATFAVREIEGKSRGYIITADRDEHIRISRAAPQSHIVEGFCLGHTEFVSKVRLVPSTDLLISGGGDEWIGVWDWVNSKLKASINIKQHLSKFLTPTPEDKDPQVAISSIWVVPVQNQPGNHAVVIASEKVPALLVISTSTIGDSQTQVTIVDEQLQGSNPLDLTVIDQRVLVSVDARGDDQKRVVALQFAANDNGSIEVVRDEASENTLKQLNDLTGIEEDPKSLETLLYGIKNLKKRTGWEEREE

SEQ ID NO: 41173 - protein, 1061 aa, Oryza sativa
MAMPVGVAPVLLLLLLPLAAATAAAESDDRDALMAFKAGVTSDPTGVLRSWNETVHFCRWPGVNCTAGRVTSLDVSMGRLAGELSPAVANLTRLVVLNLTSNAFSGSIPGGLGRLRRMRYLSLCDNAFAGEIPDALRNCTALAVAYLNNNNLVGGVPRWLGALPNLAVLRLSHNSLSGRIPPSLANLTKIFRLELDQNLLEGSIPDGLSRLPALGMLALSQNSLAGEIPVGFFNMTSLRGLALADNAFRGELPGDAGARTPNLQYLFLGGNLFAGPISASLSNATALVALSLANNSFAGQVPGEIGTLCPLSLELSNNQLTATDDAGGGWEFMDNLTNCSALAEILLDGNKFAGVMPPSVVRLSPQLEALNLAGNRISGVIPPEIESLVGLQTLCLQSNLFSGEIPEAIGKLKNLRELLLEQNELAGPVPSAIGDLTQLLKLDLSGNSLNGSISPSLGNLHQLTLLNLSGNELTGHVPSELFTLSSLSLLMDLSDNQLDGPIPPDVGQLTKLAFMALSGNRFSGEVPTELESCQSLEFLDLARNVFVGSIPPSLSGLKGLRRLNLTGNRLSGSIPPELGGMPGPQELYLSRNDLSGGIPASLETMSSLMELDVSYNRLAGQVPVHGVFANTTGLRIAGNTALCGGAARLRLPPCPAPGNSTRRAHLFLKIALPVVAAALCFAVMFALLRWRRKIRSSRTGNAAARSVLNGNYYPRVTYAELAKATDDFADANLVGAGKYGSVYRGTLSLKTKGEFAREDAVVAVKVLDLRQVGASKTFMAECEALRSVKHRNLINIVTCCSSIDMEGNEFRALVFDFMPNYSLDRWLHRAKHTETGKWCGGAGGLGVIQRLDVAVDIADALNYLHNSCNPPIIHCDLKPSNVLLGEDMTACIGDFGLAKLLLDPASHGAAAANTESTIGIRGTIGYVAPEYGTTGMVTASGDVYSFGITLLEIFSGKAPTDGELRDGLTLPEFVAGAFPDNIEEILDVALLLQAEELDGAASSTTSEEESEARVTVRDCLASAIRVGLSCSRRAPYERMAMSVAADEMRLIRDACLRACGK

SEQ ID NO: 41174 - protein, 854 aa, Oryza sativa
MHQSPKRSVIKHPHDFHGAQVMPRSADALAEATSRPPMPPSVAHADPSSSTTPNYLKGVEGIGNPDATFSGLGSSFDFGDLNLVPKRSAPAPPNHPNSTAASGSVFASRQAGPSSTSASPTSTSASTFANGTSSAAWSTGASAAPAAVGPYRPNPTINTSVQSMQGPRSGLPAQSSLPFGVGNHPPAASPISGPVSASPYSSNAPGASTSNAAFPPRPVRSNTSGPDTFHTVSSVTASQHVAPVMAQRSHSSIGPQQHQMIGSPTLNQSSPTLEHGAPGESTPSLTTQSQFVHGTRDRERSRDGSATPGGRNTFKSVFGGFVNSMSDVFSAQKKIEISTPYDPVHLTHVGFNSDTGEFTGLPKEWQQLLQESGISRQDQEANPQAVMDIVAFYQDATKSDGDTDVWKKMGYAKGNNQAPGTPRTDTSSSDDGFKSGPQPVLYEKPRAAPVPPGALHGKRPGDIGSPDLRAPHATGDVALKPTRPAPAPGAGQATKAGSPPMGSRQPGASGASVSKAGTTNGASTTSAAAKSAKAAPAAGPAQGPGAVPRRRETKKNTVKDSDVIAKLQAICTDADPTKLYRSLSKIGQGASGGVFTAYQVGTNHSVAIKQMNLEQQPKKDLIINEILVMKESRHRNIVNFIDSFLFKGDLWVVMEYMEGGSLTDVVTCNIMTEGQIAAVSREVLEGLRHLHEHGVIHRDIKSDNVLLSLQGDIKLTDFGFCAQIGESQAKRTTMVGTPYWMAPEVVTRKEYGPKVDIWSLGIMCIEMVEGEPPYLNENPLRALYLIATNGTPKINNPENLSNTFKDFLKTCLDVDADRRPDAVGMLAHPFLKRSESLRTLAPLIKAAREQTRKS

SEQ ID NO: 41175 - protein, 1242 aa, Oryza sativa
MQMLTKFESKSNRVKGIAFHPRLPLLASSLHNGSIQLWNYQTGTIYDRLEEHDGPVRGICFHPSQPLLVSGGDDYKIKVWNHKTRKCLFTLNGHLDYVRTVFFHHEHPWILSASDDQTIRIWNWQSRTCIAILTGHNHYVMCAQFHPKDDLIVSASMDQTVRVWDISGLRKKNTSAQPMSIEEQIARANSGQADLFGNTDAMVKYVLEGHDRGINWASFHPTLPLIVSAGDDRQIKLWRMSDSKAWEVDTCRGHFNNVSSALFHPRHEFIISDAEDKTIRVWDMGKRTAVQTFRRESDRFWVLTAHPTLNLFAAGHDNGLIVFKLERERPAFSVHQNTLYYIRDKQVRSLDYSTGADHALLSVKRLGNQYIPPRTLSYNPAERSVIVTSVSGDQGTFDVAPLPREAGGDLAESSSVGKRGQGASAIFVARNRFAVLDKAAQTIEIRDLNNAVTKTITPPQPTNEIFFGGTASLILSTATGVILYDIQQQKTLAELTSPPVKYVVWSIDGSMVALLSKHTITLADKSFASSNLIHETIRIKSAAWDDSGVLLYSTLNHIKYALPQGDNGIIKTLEQPVYLTRVKGKTVSCLDRLARPQNIQIDPTEFRFKLALAQGKYDDVLTIIKNSNLVGQAIIAFLQKKGYPEIALHFVQDKSTRFDLAIECGNLDVALETAESLNVDEVWERPATAALRQGNHKIVERAYQRTKSFDKLSFLYLITGNTDKLAKMAVIADKRGDHLSRFHNALYLGNADARASVLVDVGLPALAYAAAKSNGLDDRATAIAAEAGMEEEAAEVDRQLSLGEGSSKLAPPTAVSQAFQYNWPIVSTEQSYFDRALVAGNEGGPIFKDNALNGAKTHDIESWLDGEALEESDDDDDEDALDAEPEDFGEAEEAWDLAEEEEEVALAEQEAAVVAPLHDAPLDGLAAGSSEAEHWLRNSAVAADHAAAGSVETAMTLLSRQAGIVDFAPLKPLFLSSFLAARSYLPAAPGVGPIEVHLRRNNEESDGKVTQAHPASPRSVKALASGELQEGYRAVSANKLAEAETIFRRLLHQLVLTPASSEAEATEIQDLVVLCREYILGVSIELGRRKLVQTEPDNVARNLELAALFTHTQLQPQHQTLALRSAMTEARKVNNLAMAASFAKRLVALSPAPAVAQKAQQIISLAERSPRDAVEVAGYDPLEQTFVICAGSHRLVTAAGAGSVADPLTGARYLPEFKGSLCKVSQISEVGRLASGLRSFAK

SEQ ID NO: 41176 - protein, 864 aa, Oryza sativa
MSFAIPSHHLAAMSAASLTPRGNDTPQRNGTGLSSSPASSSHGHGAASSAPKAASVAMSAALSAATQPGTAGSGPSNLVAEFLKSPDDMAKIAALRKKLLKEQASLSAKLKLGAKEQLEATREGLLKLQATRQDVAAIREAFAQVEALYNNTDVDGGSGSQSTDANRSFRVISQVSQIHRNFVQTTSTLEKLDALPEQIETLADMLQRGQDDIMGPATDLLPLHFHLSQLEAFRNETFQIARTCSADVRSTVAEFFAPLDGLIRAFDEYIMALAERTMDLVREGRPAVVVKLVKIIEKESREDERAAAIRLAKRANLEGAARFRSVVANARVIKLYRPKFVEAIDRSAAELFDECWSRFGSDGTSLEFLTHLDWIYNDLRFVEAEVVPLFPADYKIVRTFVKSYHKHLGAILRERILATDPEASALLELYQFTQEYTKTMTRELGADKAWLEPSLLGGKEQTIIDDYLGLITNKIGEWTANLMSDEVREFVARQNAPEEDNEGLYGLQGAAILFQMVNQQVDVAADSGQASVLANVVDHAAKAMHSTQATWLRVLESEFKRQREAKTPEDVVGGLVEYVIALANDELKSADYAEALIARLEPMVSKKYQAGIREAVDNALNGFLDVSKRCTQVLVDLVFADLQPAIKELFGFPAWYSEGTMTTIVETMRDYTSDYSERLNPNLFDVLCDDMMDRFLVSYIGALRRVGSGKLRMPTAGDQMRKDVEDAKTLFPAFKKEEEVQEKFEVADAILGMLTSSPTMVFLPYWSFAKAHGSHLGFLEALMRARDDLKKDDVNGIMESARRKVKSEGLNDVVPETGGPTVMSRVAQAYGSSFGSGLLANLGAERAAGMAASALASWKSKERE

SEQ ID NO: 41177 - protein, 1298 aa, Oryza sativa
MSPVPSPRDTLGRTSPDQARSGEAGDKSTTKSSAQPTIPRESTENGNHPRLQQGVLADSPSTPMTPTRLVLTTAPPIPHNWLELALKGRAAALREAQRKSAPSSLPADMQQAPVTDPPTAGTSMQTDAVQDAATQQSSGVKTEPDVDMEATAATLTAPPTEGFLHDGALASGLVSASSSPPPAPSTNSPEISVAAVQPPPMAALALASQNAPAASGPEALRTEIMGPPPSLPTDPAYPPLNPVATEIIAPPTASKRRGPAPAANGAARRSDPIQAPADFDTPTNLNGKMPYALFQTVQKSAIPASKSAQTTLAAQRESTADDAAAAGQQSSGKAESAPLTDNKAIDPLIADVLTDADSVATATATRETSREASAVPETGAQGAATEIGEPAQPSTAIGSETASIAPSSSVPQQAAPPTLSAGTLESADASPSAALRRTPSNRGASLQASQSITSAYADPMGLKKHRELLAQEAARARRSPSAASAGAASVAPAVPSAGASKKSNTAARTIVPPSLVEPPPGMMHTPEGRLRVIPGIAGAVVPTASSSSSTDAKLAPRLEDKGSANNDFCEVCLGHGRFVCCDGCPRSFHFFCMNPPLDIDEMPPSNAAQVLGPAKANPVQKGKAKAGEPGAGSDLNMDEMWFCNVCVAERKPKAVSRPKGLGPFGYLLPILSQQNPKSFQLPADVRTYFKDVATAKDGDFVNAAMVRQVKPNRHGQIEPRDPYRLKDKNGDAVLCYRCGGTPLPAGSDQHTAPVGSPERHSRAASEAGSASAATPADHTIREGTGWRRIVSCDFCSLHWHIDCVDPPMLGMPSNLRKWMCPAHSDHVGERRRVARIGAAVPKTLDLPLPSVETIGPGKHFRTRVLNNGDIDIIPDPMELLMGANGITGSLQTGIKEVPLVPIPGVVDSPTLTDGGSKLASKIRYRFPEKVIRTDFWSKLRGDDASKIGSVFYLAADELVHRSPFRLVAAEDGAAPTGEDVSRYRPFGRRDYQRSGLDSLADIASARLAGDALAVKETPGLIRPSRTRQLVATALGIDLDNSDVPESSLRSSLDEPESLESSDSPLSSLSDSESDAGAETAAQNAAQREMATPVKPAQVSQPAQTVQPVHPVQPVQPGLSEEELIKRIAMEAASGVSSGDPVRLSKRKAAVAAESAMAGSPNTPAKKLRSASPAVSATPTPIRTGAAAGAVPAAVQVGSPAAPATGVKKIILKSNGVARSGKTEPKGVSEAQAALRTAHHLAGQYADERREIEQLRAIRELMRLKGPDRMLEFLLSPNESAGATKPPPSEAVQATSDAC

SEQ ID NO: 41178 - protein, 1181 aa, Oryza sativa
MASAPARPPRFGIDNAMDSTGMYANDANSTASHGSSSRFAPAVGTRSTPAPAPTALADVLARADGDHVAALDQVLAERNQFCLDNAKLSSENVRIWNLMGRIRKENESIKARCVELERAYAAAPATRGSPLGSTNSATPGSPAGGRRRMPYGQEIERSSSPLSSPRHMRQNSRSELDQRLASAGQTTNLANSRAPTDNGNGVSGAPSASAPEPASVLSDTIGSTHAYDSPVTSVDQGPSRSTQPVDTGLDRSVHANADHQASIMQQRAAAQAQAQSMSLNRSAQGPDTLADSLASHESADFEAVDRSSASGTDESPHLHQSATHPPSSAYDRHRTPIQQPYAAPSGIPASPYHPSVDRAVEQERSLLASGPNRNRAEITPTMIPSSASSRSLVSKVVSEDRLSRGTGSRRSKDDVKKHRVLAPRLDSSLLRVASVKIQGTNYRSPDRGKEAISFLITVDILHPPASWGLNSMASGEPSPPTSWTIEKSYSDIIGLDAKLRSKVGKKASQRLAPLPDKALFKDHAPAKVDQRKALLEIYLQSLMVLELPDKDEVCTFLCTDVVPNRMRDPLSTSKEGFLTKKGQNLGRWVTRFYVLRNSFLSYYETRGGAQIGSINIRDAQIGRQQKSTASSEQDENAYRHAFLILEKREGMPDEPAHIARHVLCAESDEERDDWVDVLVRAIAELDGVSLDDMPASPTQAMSQMSLSQQATTPGREALGSNARFPDSAFSPSADKAGRQFGGDAGQDGSRNVAARMNSVDSTATGKPVGSTPGSSLPQSASYRSFNEPRSPVSSRGADLYDAPGSPGPRNEPLNRGKTSISGPLNGAPIPAGYKFGAKDDMGPDSKKDDKKRFWQGFRAFGGSDKHNREPRPVFGVPLAESIAISSIHEGLALPSVVYRCIEYLEKRNAFMEEGIYRLSGSSAVIKNLKDRFNMEGDVDLLTENQYYDPHAIAGLLKTFLRELPTSVLTRELHMDFMRINELQDRVERVNELGRLVSQLPLANYSLLRTLCSHLIKIIEHSDVNKMTMRNVGIVFSPTLAIGAGIFALFLTEFDSVFETDANGEPAPRRIGEEPVEGQQQDAEQHAGQVHDETSARSKRNSVQYRESQADKLLGLEGRSLSHQAVDEDMEGIGEEAWAEQRRASEPAENGQMQYEQAPQTYGHHHGGEMHGQHNAPSAIMS

SEQ ID NO: 41179 - protein, 1013 aa, Oryza sativa
MMIANEQSAAAPTATAASSSASSSSSRLAPPPGSTSDPSLVDDRELAKTAGSPAFFAPELCMSSFSSASPSINPRHDAKGASLADAAEANQSSAAAVRPKVTKAIDVWALGATLYCLLFGTTPFTAESEYALFSVIPNTDYSLPVSMGVDRVRVGPRKPRWRSHVQWTDEEADAQPQSPSDLIPDADPQDLSEDARQLRDLLDRLLEKDPAKRITLEEVKKHPWITHGLQDAPAWLSETDPHHLPFVEISHADVEDALTGFSKLKQRVKRWQSKLLDSFSGGRRRSKSVNHSSAGSSVYADIHTDSGSSSPHPNRLAMPEDAGSMPVTPFDSSSHSGSSARTPRTPLKGHIFFSRQKSAGSVGRRDGTTTLRALTTTVRNDEEGDAIALGSPRTTLAGTTGKVESKALSGEPASPSLSKEDSVQSSSAAHMLPPLVLTGALEADTMRPPSLVSQRRVSAHSTSSVGARSDAAPEIPQRTSSGTHALAPKGGAAPVSPVLLSQSPQTTSLRRMLSRQGRTSNDSHPHRAASPRRSVDSEGRSSTLSISQTSRVSGRHRLGDFLRGSWLMTSEDRHRSTSRPSTRGSREAAPFGLGATGTSTAGRSGSVRSNASSSKREAAAGPSSGIALVVDTQGAVRQTGALPGSGTPTSAPVLGSNSSSAITGAPSLSTELLSEPVESGSIARSAFGAASQPTSPLTGLDEVQPFAFDRLGRRRPVQMGLDEADNDDVDLELEFSDDDLSDDLHGVNTGPMLVNAGHGWSVRDGDHLGGDGVNGDGGDGPAFLPEAYRRKASGGSDSSHDILTPSVEGGYNVFKPPYQHLLLPPEVSEAPGQHAVPVAAAHFDDVAAAPSSQAFAIDVGLSPEAQALRKAEGTETTADVLVNSSARPHSDDATPVSSGSVSRSASHRLHGSDDSSRAPSAAGTYATGGSENEVHLADALEKKATEVVPLATIKPIIATEESQFADADEDAAASAAPAALLDDDDDDSDEQCVSFQARRKRSTRFRPAAAPAA

SEQ ID NO: 41180 - protein, 878 aa, Oryza sativa
MPPFATISLPIPSFQTEEPSPLTPGSDTSTLFEFELDDPFKSSLDSGKDFELASPSDHPPEPLEEQGTRSAPSIPSRRLRYLERIEKVLATELNPFDLIAYSDSDHSTIGAPDCHSRPAGAGCNDAALPTRVDMQNTGASSTQHHFNDPAQQQALTDNAYSGAFYDPSSADGYSAPTQTSFLSAAPASSSSSSILSQPSPAASSSDLNHLGAPNAFRDNNVNPSPLSSPYLGAISPAGSHHRSGSHSSEAASPPQFDRGFISDPALSQTVGQIGQIRLDEDQRYPPTFEESSDYAGSPANQAATSSQGADGSTFPSTNNQTFGGRPAGSTPQLTLGIPTVSVSGSSMDFTPIAATADTAMPRINVMAPSPSTPRAMGAHGQSGGFQDVLAQLVASHAATSGISAPSNQPDASSSWLQSDQPLTMHNEPFSYASTPGTTVEAQQPSSNEQPFRPNLASGRLIPEGYTTESAQMMSTLAGNPQRNPAVHAPGQWSSQAKRQDSYDKIRQFLRLDVDMGFQSTGKTESPTLAMFRKRANSDIGPRSPVVGGDAGAAGTAFDWSLAATNASNAKDQDSLDIDWTHLKADPTGFQGASNELGSTQPATMNPALLSNAQLPVDLSQAFDPSNAALLASWQQQQALMQQQQQQQQHQQPYQQQHQQQQQQQQQQMQQMMAPVFQLNGNNNLMGESDFSSQLGGSGPGEFNPQWRFPGDGTQSANFAGGASAQPRLRRSSSARQSSAGGHRRLTHSEDLSRSRMYQGADEDFLAKITAPDGGLAPLSAGRSVSSNNAGPSNHQTSSPRVHPYRTGHDRHFSFGSNTSNSSATSASPLPTSGARSVTMLQGTWCSIRLTCLARWVEARRMLRNRHRHRARLRQRARC

SEQ ID NO: 41181 - protein, 924 aa, Oryza sativa
MARPSASTSAAAASNGAAKRKRNVPAPAAKPSSTTTTKTPTTAKGKSKAQELHLGDSDDEDEAQLDLESDDDDLQAGDASGDESQDCDEFPEIDLEESEGEEDSDAEAEQPEQDDDADDESIELQDSQADDESEQGYNSSDIDNSDFEGDEPEDDLEYDSAEEDDRASAFAARSDASQTSIDEELSRMVSRYASKPDEESGSLSATNKLGIPRNQAAQAFDLRTRNPDGSAKGVFKRSDITGEMKRVYPEIQPEYDSDSSTEDAENRIGNVPLEWYDDMPHIGYDINGRKVMKPATKDELDRFLDTVDGDGEAWFSARDNSTGKDVRLTDEELAIIRKLQNAEIPDDAYDPYEDYVDWFTGEDKVMQTALTGRPEPKSRFVPSKWEHKKVMKIVRAIRDGRIVPGAKAQKDTKPKFYNIWADADENDTRSPWAVMAAPKLALPGHAESYNPPEEYLFNEQERKDWLDAEAEDRKQNYLPDKHGSLRHVPAYQNFVQERFERCLDLYLAPRMMRKKLDIHNPENLLPKLPSPKELRPFPTNVSVVYSHPDGSRVRCLSVDPTGNWLVTGGDDGRARLWDVAIGRCTATWDACEGMPKAERSAVHSVAWCPTKNYSLFAVAVNGRVVIIAPPQTQNYAQTQSGPASSKAASSSGATATSTASFLYATAAAATSMPSKPDARAPVAWTRPAESERRSGVAMYLNITATSASNLKTVVWHAKGDYFATVCPDAASGAAGMLIHQLSKHRSQSPFRKASKGSSVQKIVFHPNKPWVFVATQRYVRVYDLMAQSLVKTLQTGFKWISSLDVHPSGDHIMVGSYDKKLAWFDLDLSARPYKVLKYHAKAIRAVDFSTAWNLVADASDDGTLQLFYAKVHADYGENLTLVPLKVLRSHEVKNGLGVLDVKWHPTQPWCFSAGADGNALLWTT

SEQ ID NO: 41182 - protein, 916 aa, Oryza sativa
MPSSNSTNSTSSKKRRTTRKTCAPCKAKTRTCSASLPCQECVAAGEATSCHYRGGLQLNALKRPNDAREPGSSRGLKATRLIAPSPSLTQYPTTPASVQASSRLLRVQDRSDDPWPQNGVTGLSSSEPTPGGWEALQQTAEPGHLSRPSPLDTLARIAQEPASQKLRSTESLAPQSSDTSPSERGYGSTNTSPACLRTSDLVEKTASDDPGAREQSTPVVLPFFRYFGNTAIAPGPRCVEVEVRDEQTTLMNHHHVSISDTSRSGPLEPLREHMAPVSRETATQKASSEPCTGLFDDTNPSLPSRTILARLIRVFFLTISCHLPFLSEERIMTELEQGQLEPLEANCIAALACRFGSGLGSNSQPLGAGLETAEANWHAASNREATPNVARYIWAEPFAEKAKELIYPMFALPSLKVCQALVMITWIEWGSDRDSSAWLWSGLAIRMSQDMGLSYWDSLESISDGETRRVHQLTFWAVYFLDRVISYGAGRRVTIARADIEIDPPTSAECHGCRRDPARRDVSHPWPHLIRLLGHRGDISDQLNSRSASKPADRVGGGKEALYDFFRSLPMDVRFNVSNLRSHSLNDAAPVLVMMHCLFHSLVCVLHRPSLVQTKGDWAKGREFAEAFRSDASRFPAECASSARSISDMLSFSGLVDERTIVCNPYMDHAMFIGAIALVDELQQVMQVNGRQSQAEADASATGCVASDELKARFAEETLREKIVVMRDALETLSRFWGGIRWVCGWLEERSQAVQPRGEAEASDSKATYQAAPTKVKADMMRFLARLRAAQRKAPLEDPASDSAGAAERACVPTAIGSPRSRLDRVMLTDAAKSAQIGEAGDADEAGEACDAGDALRAATAPVGVAQLGARQQASGDAWDSLEAILGEQGLVLDGIFDFETPWDELGDMSGMLHCG

SEQ ID NO: 41183 - protein, 1040 aa, Oryza sativa
MVPAPRRASPGADDSQPSNSSVIAASKHSKPSTSRSRAPWPLDTLWSSAARKNSSAKSRSPASPEPPPLGATLGSSYESCPDQPFDFNDLPLTPPDSGGSAFELHPATSAPQQNTPLVTAATLEQDFKPPQKPHSKNDIFNAPVSWLTPPSRINPTPPSQAHTAAPPPSKNSSFFSSFGSGPSPQPPLQPPPPPARLHNAPARSSSSTHAAVTPTRQLDSEPAPFAPAPTITSPSAAKQQATGRKLGHSRNSSLGRASSEECLQEEARIRAAKHVDFRLCPTNEFLLGEGRHCCVYLGSYRPTHDPLPSASSSDSAHQASMWRLCAIKRLHADRQSQLLGLEEAFALRRLGMHPNIIQLIDIRDEVEFVTAPDPSASPHASRSDVPSAGLGLGLGLPRIEGRGAPSTPLGHASHARSTSDMTGKDELIFETKSHKRALAEEIVRQAARNSLPDSHPAESRGIKSRTRVVTTEYRASDRSANPTFLVHAPDSDAQEISADANEADQRIHTAPVRRLASTAPDPPRLLILLELLPHNLALYARKHADRIDLQQWLDWAHQMVEAVVFLHDKGCVHADIKKENMLLTDGLDIKLCDFNSAVFPNPNDPPRDGLGLGTPAYCAPELSRATGGPTATSFSYPIDIFSLGAVLYSLATGTEPFSKARSVVEMLHRKRLFFESEENDRASRLAVEAGSNPNSQPASRSGSLRGRHQKSSSASINEMPAGAASPAQLASSLHRILQLGSPAPRTPRREASSDSLESVASSITTIAGRHPSSLAVSRLLEPTDEPHGLLVDPSGPTRKNSLLFAKADVRRAASTGGRNATATGSAALQRLRISRDEGISALASPITAAGDGHAPDATDRPAVRKGAPGVARVAILEASSRPDWLRRRSSYGDEVRAQSAHHSPSGAVAIAQVSGSELVAERADELATTPTKPSRLRTMFSPTSTTFPKLDEHDQLVVENTARETATHLAPDDDMSAWEQHLPDLRPYADGHPAIILPAGGRLPDWARDLLRDMLHADPAARPTANQVRSRLRSAAPTYM

SEQ ID NO: 41184 - protein, 1169 aa, Oryza sativa
MPAMAQDQLALRDRGAPLVPSSELDDAPHNHDADDELPEAYCGGCGRLIDEESVEEGVIQFATKLWHIECFRCAKCKNRVSTERDDILLLSDGHPICGECNYSCNICNQPIMEEAIMTGDESYHASCFTCRSCHSKIEELVFAKTSQGIYCMKCHNERVARSRKHAEHKRAKARREKQLQDAQNAEAKQQALSNTKAANNAPSPSSPPDRQPPSLPSKTPAAASTTPSASALPSPSPNAASLSPWIHQGGSAASAAASRPGSAGGKRPMHAPPPPNRDARSPALGSLAKLEGRSLSANNASNTSLASLATDDASNPYETTAPLSPRKNAFHATISSPQGSPAANKSRLPPFTDAPYSSSSPTTSPLKKSLPLQASPRTSSRPLQPSADRDALGVSLRSTTTASTSPRNPLQASASSSRLSKVYSFYDPDFLNLVESFGDFDSNDELRAQPPPVPELPASLPSASAVTEPVNTKVAHDQTTTAPLGTLLDEHDQNNGADSPDSDQELLDEDRPRTQTPTGSLNEVSNKVRASMQQARDGLVSMDISFVETILRDLEDTRQRMESLQTRYDRIRRASQQAAHGFSMAKEEFEHEVNARHEAELEMARLRRQLAEQALKLATANSEKRQQEQLERRSQDVKASLKGMERDLAKLTVERDLTVAEVAELMALQDGAAGPSSVLSSPNMARSSTSTSDAVITQNLATRLESVKNRYRKEIDELTMERDSLLIEIEELKQSKELFLEEAQSLNAKNEELNTVLGQLNRKIELAAQSRDQLPPLPTIPRDLASSATKSSGGFSFGSRHKQLHKHTAHNASISSDAPPSSAGYDVSVDTAVQQVIQPGKIEPAPVVKKFKWMKPKLSETTRNNVPPAGQVPPVPPKGGAGLAAPSASGSTTSMTRATSHDVVVREHLFQPFNVLRPTRCFACQKNMWGQSEMRCALCTQVCHSRCLQSLPVSCNQPYTRPDESVGDNAGPSMFGRSLVEQAAHEGRDVPLIVEKCIQAVEAFGMDYEGIYRKSGGTSQLKVITQLFERGNAFDLEDTDRFNDVSAITSVLKNYFRELPTPLLTFELYDELIRLVESKQGDAGAKQEKMKELVTRLPRQHFCTLQHLVLHLYRVQERSVDNRMNARNLGVVFGPTLMRSADPSQEFAHMGGKAMTIEFFIDHAPDLFT

SEQ ID NO: 41185 - protein, 1106 aa, Oryza sativa
MKRALSVAASSVARSSFVRAHSSLAALAFQPVHAPYRCPRCARANHAHRHAEHRPLPYRLAVPSRFLAMAAAATTSNAAAAASTEPVYRHYRKDFGPLQTRPLHLDLDFDVYEDKVRVVTRTTFVHVAKDALTQLQLNSNDLQIESVELLQGASQLSVSQPSSDEFVTHVTSLNSSAIKATPLKFDLDSKGHFLNITLSEPVQQGSQFVLRTVSVATPTAHILEGLYYDWTPDGQPRTIITQCQQHGFQRIVPALDTMTAKAYYTTRITADAKYSHLITNGDLAPGFFDAATGEPRPHSAADGKDGQKRCSVTYYNHKVNMAPYLFFLGAGHYVSYRGEVEYPNGATLLAELLVFPGLVEEAHAKSALQSLIDSIQWCYCSTGPEATEHTQERKRIYELLAERDALKKKNSLSEAENAKLAELRAELKRLDSVWNKTGYAYTGAIYREISMQNSDYGGMENVGNTTILASRMVPSANLSDPAYPYLEGVKIHEFYHSINGSQVTGESPFEIWLNEAVTVHIQRQREGVLFGSDFMRLKEVAYAFTPGQGPLAIDSGANAMPIEPKGFNRTQELISAMTYSKAPEFVHMIELLIGTPTFNRGLDLYHTKFAFSNASTDDWVHSMEEASGQQLMPMANRWLRRSGHPHVEYSGAWDESKKEYTLRMKQSNLPTKGDTAPWIFPVRWALIKDGKAVHEGMYTLSDESASLVIPGVAVAPDFVSFACGWSFFGTHANTSASDAQLAQQALADPDVINRYFSYRAVTDKSKAKIIEALRADRAAAATAGSAAEAGKGAEYPPAGAAGVVVADEWVELHARLLFDESLSAGARAAVLREGEDITTRPDLAHLYWEIADAKLALLQAVYDRHADKIVALYNEIQARNRAGPHLEQLHDRALKHHLFNLIAAGNKPRSVLVSRKPSAVTADVSAMARALLTSPFMSDRLFGFSAFLSGPASLAEKQSVRSQMRSAWKSHPDTVEVFVSVIGSVDDASAPDLIRELVEDKEVFDVAQAGHARTLTRLWAGNRKRSLLSEEGRKLTLQLFLQVGKVNQYSAQSFIAALNDLAKFDAQTTQKDVLQLVRDMHAGLDPVKTESLFNQLTATLAPYKDA

SEQ ID NO: 41186 - protein, 1057 aa, Oryza sativa
MRRSPCTLLWACLLLATTLWVDRAVAVREHDFKKCRDSSFCRRIRRQSEYVEQWQQDHNEPFTSPYSVASQTPNFVHANASINLPLSSALHPDIQFELSLTFFKDGTARVRAGQLGERYGGWKRYDEAAKWAVEQLPDLASAPSDTRIDSHKHGFQVHFGPQHSRSLRLQFSPLKIEILRDGEVQVVLNDRGLLHLEHFRKKPEPFPTVKQEDQEVHQLVFQRNKRSILSSPSSAQYTESLVSQWAGFEKEDNGEWEETWASRRDSKPKGPEALALDMTFPGYTHLFGLPEHASPLSLRSTRSPVGRPAADDEKDRFDDPYRLMNTDVFEYDHNSPMSLYGSVPVLHAQSKDRAVSVFWLNGAETWIDLHKSTSSKKSPDTTSYSHFFSESGILDLFIFTSADAKTNMAHFTRLVGRTVLPQHFAIGYHQCRWNYLTDSDVKDVSQRFDDEDIPMDVMWLDIEYSKDHMYGVWDEKAFKDPEGMVKALDDKGRKLVVIIDPHLKRTRDYWLYAEAQDKKLLVKDSDGKGEYEGWCWGGSASWLDMFEPASWKWWADQFTLKGSALAGKIRANARNVFVWNDMNEPAIFNGPEVTSPKDVIHAGGWEHRDLHNINGILFHNQTARGLRDRELSLPSSLGGGKPRRPFVLSRAWWVGTQKYGAIWTGDNLGTWEHLAVSVPMILANNIGGMSFCGADIGGFFGNPSSDMLVRWYQAGIFEPFFRAHAHIDTKRREPYLLEEPLRSAVRELIKLRYKMLPMWYTAFKDNAVTGMPVLRPQYLMFPNDPDGFAIDTQYYIGDSGLLVRPAVDKDVDSVSIYLAEDRPYYNYFTHEVYQGSERGRSVTVAAPLTEQMPLLHRGGSILPLRERARRAAELGRTDPFTLVVALDKEGRLGKSGASNVLAEGSLYLDDGQTYEFEEGQFAWRRFEWTRDTASGKHVLRSTDESALKMGDAELVLGDSKQLQAYDESNAYAQSIKDVRVSKVVVLGLEREPKAVHIQGKRVQKDAAASVVEWTWKSGTSASGKGGAFTLGANTASELVIKDPAVALVSDWTIELEF

SEQ ID NO: 41187 - protein, 1111 aa, Oryza sativa
MVKREEEKFPRSDTIQGPDIPIEDALESAWQFHYTSVMRALGVEDAEHGLNKRDIESRRQQYGPNQLEGGDEISVWKIALHQIANAMTLVLILAMGVSLGIGSWIEGGVLAGVVAINIIVGFVQELSAEKTMNALRNLASPTARVIRNGDGETISANEVVPGDIIELTTGDTVPADCRLIDSMNFETDEALLTGESLPVAKDHTQVYSAAEEVGVGDRLNMAFTSSTVSKGRATGVVVGTGMNTEIGKIADALRGAAKAQKIRDVKRNAYGKAGPHRYVQAGALTVWDKVNNFLGTNKGTPLQRRLSQLAVGLFFVAVLFAIIVFLSNNWTDNEVIIYAVATGVSMIPASLTAVLTITMAMGSKAMVKKNVIVRKLESLEALGSINDICSDKTGTLTQGKMVVRKAWVPASGTYSVSETNEPFNPTLGEVSVNNVEPRDAKTARDSIEDTGEIVARNGQSDKVKGNDRFEDFMNVASLCNLANVFKDKETHAWTAHGDPTECAIQTFVTRFAWGRLRLTKGKNPDKEVTEKDRDAAEWTQIAEYPFDSSVKRMAVTYVNNKTHQGYAMMKGAVERVLESCVKAQTDEGLVDFYEDFEARVLANMEALASQGLRVLALAHREISDKEKEQGEELERADVESNMIFLGLVGLYDPPRPETAGAVRKCKEAGITVRMLTGDHPGTAKAIALDVGIVPRNTTKFSKAELDNMVMTAAQFDKLSDAQIDAMPQLPLVIARCAPQTKVRMIEALHRRGKFCAMTGDGVNDSPSLKMSDVGIAMGMNGSDVAKDASDIVLTDDNFASIGNAIEEGRRMADNITKFVCHLLAQNVAQASVLLIGLAFKDETGLSVFPLSPVEILYVIMVTSGFPAMGLGMEKASTDIMKRKPRSNKWGIFTPEMLIDLTVYGFWMAALCLATFTLITFNWGDGNLGVNCNSDYSGSCDLVFRARAATFAVITWFSLILAWEMVDMRRSLFNMRDDARWYNQWLRDTWRNKFLFICVVGGFFSVFPILYIPGLNRVVFLHDGVSWEWGVIIVCTVLFVGGIEAWKWGKRVYYRRTEVDTAKLVDEEAGVADEHDRTPVDGEKKQHSNEHSRKMVSAPTTSSETTAVHQMA

SEQ ID NO: 41188 - protein, 860 aa, Oryza sativa
MSFLPSFTALGASSSSTSSSSSTGPTFKPASLSYFTIFCPALKPPKSHRAQQDDDAEQDPDALEEERESAQILFYTSRARAAPKDRMLRQIGVAKGMIEFCSMVHSSPSDGAGRTWNVHSSKRRMILVEVEAGVWVHASIDLAYTTTTSSADAKPKREFHDDLLPDAWLEEGIRRSWIDWTLLNGGPAHVLSQKTGRVGLERSLEKYFSVWAWSWDLEAATNAGSTKQHGLLAECVQAYPVVPRGPREGIEELMRSDVAQRLGREREMVVLSDTQLLWPPSDAGCFDDPRDTKPTQPQREAGQMDAATKAELLRRVVSHLTGLERERELVRAAAVASTSDGRRRGTSGAIRERGSSSTKRDVRTGLLSNGTGAGKMRVVSSPAMQQRSTSASSHASTTSDSTRWSNWGGMLSGLGKLGLRSSETPARTETPEPKPATEENAAGASAISMAPSDGGGGKAGDVASPLGSLQDAGEKVWNGAELALRGLGASLGLASASVGSREDGAASREAEVSEQERFADASFDTSGAEADASVVTKVSILEPEVDVDELAEALGAEEASHADETAAQPDEAEPVAPASKAVDDRDADAASIGTAASAKAFPSISVTSAAWYSKAVRSEATVSTNSPQLSSGGDSQDASLGAGQHHDFELDGWGHETAQPFESFRVHVGGAEEPLCHESVLALQEEPFRCTPYRVLFTTRRLLTMVLIERLPLDSGSTLSVTSNDLLDDVWMVLRRMQRLLNDHARSAPPPSDSVGFVHIDGLTQTMHSTLSATGENDGEVEVVADAHCVSAHELMRRHGVLETFSRSSHGKTWTASRQRLHKEGGASQTYMVLAGRKMSIVDCDTELRKLAHQYPSFGI

SEQ ID NO: 41189 - protein, 1212 aa, Oryza sativa
MTSTRPPLDVNHRSEPAPSRRSISSQAASASRALTSVASSSVSTPYGGLPSSASSSSSASSSSSLVSSARRSISSTGRNSFPRASPSTTSLVKDQSPRSRSRRNGSASSSSLVLTRPDNATGIHQSSNAESSASGSGSKREAVSASAASQSTRHQRHHSAETLRLDLDGLDLGGNQSLANPFGAAAAATAPDHRHVRSTSNNAAIPNSSSSSRLGGFIDPFSSNKPVDLNLHQLCASCPTDPHTYPALHALEDSFSLHLRAECSDYRQIMPAQIVLNAAADRELRMRNAGPEATDQYRPRGYSISHGQVLGGFASLGLQTEPDAAPTAPPTRQSPVRADTKHSTDSSEPPITPIEWRDSFASPTSASYDATPKWAHLTSRPCNPLEPLDVLSIQEMGFHSLDVGSLNDWEGCKLSAEILCPINGHQRIQWSVAQTTRRTKKWVVVPNATITCGKPDTLANAEQAERTVVVSARSIWLDEAAQTAAQASTSHNPPNHSAKLATSNRSSRPFSGKSGFELRLLRPTSGRICPPIYLANASTHRSLHQYRTDICLRSKPSQASLVADRLSPRPPQPVYPVLRRSRSRPYLRHQHVPLRRSRSKPYLKPEQHAANQAVASSVVADDFAPSPPGDPHLRMHPGESWPSARSRSPRPRSSLDATSSSDDESDASSDAEIFSAPKTHESASGSASSASYDHSHKPDMPPRSAPVAMVSSGNRHGTGQRSPSEKSAATSWQHSSLGESHTDSWQGTSQTTAASASSASASSKQSRSRKGLQRALQKKDKVLNSWFKRRPDASSAASADGQAPQAEVANGVSPSASALPSPTSAHRSLNGSQPARMPRESSEASTGVASKGPTPLTGTALESFQRAMFRPASPESTIMGSRRGSEALTQKAVEPSNAVGDRSIPDKVATNGGAPGTDAASDNRTGVHTTLSTLYGWDREQAASKLLPSRAVGSGPGSVASTQGSSYLDLDEQVALLGIDAVPAEALTMLIPLPLIGRSRAQDAVRYMRVNFVPFGSLSDSVDTQRSTAWSGLSGVGSPGSGSEAGLSHSTSNGSGSLASAREAGSGTTKTSEQSNWKRKLGLSGRSGAGANGQNSAAIGASQLASTTESPPPTSGPQAFRITAIVHDAPWTAPAACSPLDARLPEPGTFPVVLGYCNGSKTLEMVPEGWGALSLAGVPVPTKPDGSPLEGVHPLHGVTDLIISACTAVMDV

SEQ ID NO: 41190 - protein, 981 aa, Oryza sativa
MLQHKLSLATTRSSNSSSSYNAAMLAKKERRIPIYVRIVPKDIWLRMHVSPSQTVGWIKDAALHKVNAPEVDPSLSYRFYQDALNAASQAKLAPVASHDRVVKHRTYALPRTFVAPPPELGDPNAGVVAALAKGAKARRTPLPPVQSRRGDDSTIATSPSTSELGGGRTGASETSHSQTSEEEWAIRLDPSLITGDRDAKLEEQLASLRLAQWTASRTERSPLDSLNSTPTIASSSQFGTDPGSSPWLGSQCTDERSQGSSGAAGLYTQAGAAESFDSLASVGSDEETELVTTADDEASVMQWGTQAEASPLSSPRGPQPSLSEQSPTRPRSRTVTAADVLRSRASGESPPPMPEAVSSPTRNSSLPKTLPRRMVAETSQRRAVHTDLLELLKGSADDVEPQPRRTQPDKGMVRRTSSSGSASMAGESGTWTSPTPSATGESRFVAGLRWDEISRPGKGVSHPLSHKLTLLSCANGCEMEEWKTVQSYAIRPYELLEMQWAIPTERVYIPPLHPHDLVRPPRSTGKEPHKPWRTATDAGPDVDAPCLDPYFEGWVYVLKGGGVAGKEKARAKVGKWKLHWLTIKGWRLDLYRKKPRAGEAMLPVADQAWPLRSVEWVLESDTPIPPNAALPALDTIPPSSLSLCFTSTPAASGAAGEGGLLTLRSLSRFDHKALSTLLMRAWYRAATTWPGVDMWRRKAIFRAVVAGRGGTVAPGRAGRGRGRNAKARTRLRPSGWPREWEDADVWSSDSEREQVEVPLELEEAVQQRRDTITQLAVEKASRRKKDDDKVVVPNGLYAALLGRTTAASAAEETARDSSPYHQGSGHGHASRLASRTSATRVAYAEPGLMLGNQVDRQPGARRGAARGDGSGDTAMRRQRSGSLTRSASGGDVSAARSRSLTVSSPSGAGATRGRSNDSSAPGSRNVSPLPGRRSGASTPRENAALYPMSPAIAPGFVDVPPPASLLLLKKYKASQASKPQP

SEQ ID NO: 41191 - protein, 845 aa, Oryza sativa
MHQLSALPTHIIRAKSLVNLTASTRPLRPSSSFSHIFARSLIKGNTFSSRSTSASAHSPPVRTFVNASMPSVAQLRQPSPSMLPPAKRAKMHSNTEPDSHVAATDGAAAAPEIEAVAADSTSYNDVPALPDNAHHHVDDLDPIPACTSTLTFQNGIFLAPMVRIGTLPTRLLSLEYGADLVWGPEIVDRAIIGCERKVSPTTGVVEYLKEHKQIFSCHPIERPYLVYQLGSANPDLAYQAIKIITQADDVAAVDLNCGCPKPFSTHAGMGANMLSTPVLLCNTLKAMRRAAPPHVAVTCKIRLLPTQEATIELVDKIVRTGAIECLTVHCRTKDMRPREPALLHRLREIVDHVNTLAAEMGRIIPVVCNGDVWDAVNAPRIKELTGVTSTMVARGAEANPSCFRPQGSLSIPDVIAPKWVRYSLALNNPIGNTKYCMAQLAFKPAESVAKDAGAKAKPMNKKQLSALRMGIAQAKTHEELAAVFKIDVDQVRALGVDDEILGDLRTALSQRVSHRSASAGGFDGERLGAVLNNASGGASQQGGQGVGDGHASGDGQKRATDNSPQPEWKQLLATSVSDNIKDEKSILYYAFSTVEPPSSVHDAAKPHVRYVVHRGFVNEQRDGDRPGGIAPHNASFGSSPCLLTTTDVRTPKVQQLTSQSSLRAHGPDGSRGGECEIAWWIESAQLQFRISGTVHVLPTPGHPLRSLFPFERLSPPRAPGSEAIDAFDWDKERKRIFDKLNPGLLASFCRPTPGSAHPNADRLQQAKPKDDTSSPWPLELPSPGKEENEEQKRMLEQSEKNFALVVVEPYKVDLVNLADDTRTVYELQPGECAATGRWTARRVVP

SEQ ID NO: 41192 - protein, 906 aa, Oryza sativa
MSATASRRGSFPRPKGRSNQQVQDDTEEVRNLRAKYSDQLAMIRELFPTWTDEDLLFALQESLGDVENAVVRISEGQVEQFSSVKSKKHVKKESNVHHAAPAPHASAPPTTTAPHAARGNHIGAPAGRGRGGASVRGARGGRGGFRGVGGRGGGIAPQTNGHDVKTPETIEATTAQAFAPIATPTTGTSWAAALGRSNNKSQPVLAAPAAPAVPAPAPALVEESSDASLGAPVAPADTAAAPAPAAEIVAPQATESATTTGALSSSNDKPVPAVKVPAPSKPAAKPAGMSWAQIARKSEAPKPAPAPAASAASEAAPAPSAETAAAESATAAPTESAASAQPDVSAEQPAPDAVEAVAEPTADPVADVKEDAAPAPAVSESVAPEAAPAAESASAAPATGPPGLSKAAPRAPAQRSSQRARQDAPVVMAGGSSQLDKLGVQFGSLNFLGGDAEDAAETAEESPAAAEPEAAPAAAAQTAAVPSAQRQDAQVGQAQTESYNQQPASAQYNGFKSDSFDNSYGFTGQQQQQQATPAQSAAQPQQQQQQAAQEQIHGYNGYNSIGQGQAASQPQPQQGLQDYSSMYGGLDTQRLAQFYGAYDQGSNAFGQRSDDKSQQQASQQGQQSQQQAGSQQAGEPHQPQHHQGHQAGPGLQQAPQQQFPGIMPYYYPHYYMPNQFQHYAQPTAGYGQYPVYGQPAGQPQHPSKPGTPANIASPYSQGPQSDASAYGAQNHYGQTPSSAGLASYDQGFGRGMPGLGGMSDYSKIYGGAIPGLGGFLGSGAGGAPPSQNAASGNAGSGNAGTPHMGSQQKSGASSGSALDSYRQYDANASKGSAQSGAASGQVGRGQGQSQAQPQVQQQQQQQQAQQQQAQQQQQQQQYYQQYGAYGHQASSNAYSNYPYARQYWGQ

SEQ ID NO: 41193 - protein, 500 aa, Oryza sativa
MEDQLFSPTAASQLFDLPLSSNGPIGFSPSIDMTSNLPLTFGDNLETPAFMLEIQRKRADTTTTLKPDFEFRDDFGFQGATLLTDTPRRPRAIQRLSLTPSVASSAASTASEFDYSGCDSEADHSNVTSPSADDMCSAPWNDSPFGSVDVSDSIQTAFDRIGFGSPCDESKLSLYKQEMFTPAGFSFHDFIEEPTTGGDGDNAANSGTIRAKDMSISPLTFADVSSDGGHSHIRSSGSESSLGLFDSPNVGAMPMPMGPYPVQSFFGNGSAYPMVFSQSAPDASCIHPHGSSCPSSPNSASSSSPYSGFGMPAGMPSVLASPASRQIQIQHIPTQAPGLAMLPKGMSLYSHFAHLANPYAGLITKRSRGRRVPNKPEEMNNLGKSGKVYTCKVPGCGKCFKRSEHLKRHVRSIHTDEKPFLCPYPSCNKRFSRHDNLNQHARVHTSMGGVAGVAGDEFDAASGHAMSHLNHPLAHPMVLSAGPQGGISIASGPSHQIKQE

SEQ ID NO: 41194 - protein, 1314 aa, Oryza sativa
MLGRAGRPQYDTFGEGIIITNHSELQYYLSLLNQQLPIESQLVSELADNLNAEIVLGTIRNRDEAVAWLGYTYLYVRMLRSPALYSVTADYAEDDPFLEQKRADIVHTAAALLEKCGLLRYERRSGNFVSNELGRIASHYYITHDSMATYHQQIKPQLGLIELFRVFALSNEFRHQVVRRDEKLEVAKLLERVPVPVKESADDPIAKVNVLLQSWISQLRLDGYVLAADMVYITQSAGRILRAIFEICLKRGYARLSRMALDLCKMVESRQWGSMTPLRQFRGVPADLIRRLERKEYPWNRLRDLEPNEIGELIGIPKAGRLVHRLVHQFPRLELQAFFQPLTRSLLHVQLTITPDFQWDEKVHGGAQSFWIMVEDVDAEILHYHDQFLLLRKYAEEEHTVSFTIPMTEPLPPNYYISVVSDRWLHSEVRLPISFKNLILPEKFPPHTPLLELQPQPLSALNDRPAQELYRDSFAHFNKVQTQTFHALYGSDDSVFVGAPTGSGKTVCAELALLRLWKDADAGRAVCVVPYESMVAPRVAEWKTKFGEYQDGKEVVALTGETSADLRLLEMADVVVTIPEHWDVLSRRWRQRKNVQSVALYIFDEIHMIGDWRVGPTYEIVASRARFVAAQTERPTRMVALSVPLANARDVGDWLGAPSGSVFNFAPSARQTPMEVHIQTFSMPHFPSMMIAMAKPAYLAIIEHAPDQPVIAFVPSRKQAKLTANDLLAYVLADSERDDGASDDGESRFLNIEMEDLEPHLQRVQDRDLRELLASGIAYYHEGLTKNDRRIVERLFAADAIRVVVASKETAWSIPLTAHLVLIMSLQTYEGREHRYVDYALPDVLQMVGRCTVPNDEGTSRCVLLCQATRKEYFKKFLAEGPPVESRLTSYAQDFFNAEIVARTIDDKQAAVDILTWTLMYRRLQQNPQAYNCQGKSMQHIGDYLSELVETTLADLENSKCIAIEDEMDVSPLNLGMIASYYNVSYVTIDVFNMSLKDKTKLRGMLEIVSSAAEFEDLPIRQHEDVLLQRLYDRLPLKLDRLNLLSPYHKVYILLQAHFARLTLPVDLEADQRIVLGKVLNLLSACVDVMSSNAYLNAIVAMELSQMVVQAVWDKDSVLRQVPHFSAEVIERCRARGVEDVFGLSDLLADLSEVERDELLQMDKKQTARVAAFVNAFPYIELSYSIETPREEMNASDPITVRVTLDKDDEDDEEGLVVQSAFYPARKLVQWWVVIGDPATKNLLAIKKVTVRKTVQLDLEVTLPQGRHDRLKMWLVCDSYLGADREVNIEPLDVMEGHEESEESEDDEESDDDE

SEQ ID NO: 41195 - protein, 675 aa, Oryza sativa
MIEAYSHVPHPFGTVLANDVFSTGLILSDTDFRQFVEYGDKLTGLDMALVGNSYFYHTRKDIPKYLEPGATQHFGENTLAIIEHLCLKNGSVELLRNIEPYQSRHTLPIYFSIAGRYFVMLQNKAFKSIVMGLSAFINFQLSSTVRTEANIGALNLTILSAVAAIVSVIGAALGANLVAVIMTRVLGKGMSWYSHEFFPMLLYGPPAIAGVLVVQLLTAKLIKPHKRPYLERASLSGLGIFFNIGLLGLNAFGIGSAYLMMLASITFTVVVTINDFVLIGVGQIEEKLVAPDNRASAYVYPIMALIPGIVGVEGMASFLDLFVPLTGRMGEISPADHIIASIVAGLSFLSFPFAIPLAHRYTAENLKKTIVALLALTAAVMAVFASPGWKPFDSAHPKRLFVHQVENITSGEWFVNVGAADPAPGFGELANELQSYLGVASESRAELQVMNDYNSDFDILYPVSAFLTPYKFQLPSPAAGFATKYAAPAPEANHFTVRAANEVIDLEAGTRSLTLEMSHPGVIWSVVAFDADILSWNLPSEPPKGHQRHHLKSVARHGIYEWSVDLVLRLEGDALEAAKKRSGAAARFKKAVTGGDTEGQLIRTVADAPIDKDASRLWIDASGLVADEMYPQHKHVAAADRPAMNTFVKMDDYMLQKHPEIDVMMLTVVAGVFEA

SEQ ID NO: 41196 - protein, 931 aa, Oryza sativa
MAAPKVDLALPDLSPRDMHLPPTPPEDYSDENKAGLQTPPMQTLQQLLTPDNTPPGMVPQPPRPLLSRDPSSRADSFRTAREELSREFLRAVDEAGSQVEDEESSEDESLHNGEHDTLDDEPWRDMPGAFNSTPSTTSSEDGGEPEQSLGAVSSPSTGSSDKFVRPKQYLDVESPPSTGSSRNLERTRRYRHDTESPSDRHKADGSTSYAYSARSFEADSKDSDEDEQDDDDDDDDEVAHEEGDKASVGHDFEHANENRHDWDNHVSYLSLGIKEQEDATTSARASPSSSRLSGNGRRVGANGAQPLIKGINNPPVATSAAVAEQGLLKRASDESSHQRSDDTPSPSVSAQKRKQMAATSKEATTPREARELRRILMSQHAGTDIPAEFLNTPPRDANDTVYKHIQQANMDRFDAMKNGHAIEAVVVSTDSARNRHLRHVTKRQSLRSVSDNNSAYMPSGGPKRESSLRPKKVRIQPKVPQSNGPESPQTIRSASGSHSLRHEKRPLSGTGRPLQSNDNSPALSRAKEPLPLRHKPPSISKEPPRPRHSSLPIHLKSEPSQASPTSVDSAKSERRRALRRSSREYRIENKHATADPVPEQKPVSTIVETTTFISPHPLGLGTQSRSRSRGTPLSVSGVSDRTETEVCEAQNVAFYPHSNESLLVVQHRSKPEQKVQDTAHSPSKTKGTRRFSDSDNARRPSPFLSEPAVQDTPAIAVNGKSIHTVESPLTNPRAAPMPPVINFIPATPSHEDEEKELVPLEEEEIPSTPQRRNSLAKRARRYSEVVTRPLFGRTLVTRSHNIRPSPTASEKRDERLHPNWVPNSFWQDDDDDDDEYYSDPEDPFARLPAGGDTSEHPKAKFPRNMSVRMPGFRGSGGFLLGNSLGVDRHGTNKRRHYIEPPSGNGSASASRQSVRRVASLDSMASHASGDG

SEQ ID NO: 41197 - protein, 1152 aa, Oryza sativa
MSRQFSADFSRSARRADSVHPLTHRKSLQAKLQSTPGRTSPYARTGAFKSGPPSRSGSSVGGSPRPLFQSDNELSSSTDDDDDLGSKHFPGIKLPVPTLAMSSRKAPRNQNTKKPSKVYSTKKDRARGERKASVRKERFDELDTDSDLTDVPSDDDAQDDASVAGPSYSSLNKGKARSVDSDDDLESDSDTEMERKLAEAGDGESLLGSGASGEDTEEEEERFIIQDALDRESKAKARLQHRDPTDRSRHAGDRNWASKGDLQHRARSMAIRRANGDGQTGEAGDDAEADDEDGDQDDDGDDADLLSMSPDTLRMYGLPVIDDELFEQQEAFNSSSEPSFTDFFETSTDSETGAPDTQNEIGDDDDEFTTDSDEDRDISDLEGGLLDAPLIAHIGTGSPDQTVATSEGAEDGSDLPKPEMPLLVIEDLDGRLIYARAGDGEAVFGSDGEFEFVDDSDDDSADWEFDQGGNRLWSGAGSHAGFLTVPDDDGDTTDELPDEDMPYPRLLVGSVAPRGGRNARRARAMATNSRRLSPAASSNMPSPSALQHAPAAATSDSSANGKHSSGSGASPVSSDEQAANEVGITISTEDLARDPEGTLRAAAAALGVTIQEAADMVAGVQVPAIAGQPADGTDSSASSSVHADGKMMAPKTPDQRQTNVAKPQMGSFMPTSAKSVHRAVIDGSRKAPSPFSGKRSLEKKGLAKKRSAGRRSSLMDEGFSAKRLRRFSSANDAASALDEYSELAPSSPEPVAEVDPMELDDVVDASMIWRGAGSKSPSPEAPDAERRPSMRASRKSSSSAPGLNLNAFARWNKIPMGSFRDSQAAPVPSQNAFQQQHQHQQPLGTFLLTRSQGQSGSSRRTNSPFRSSSNAVRHPEMFSISPLRQPHQEVEQPLEAGRSSDSTPGRRRSFIISPVLFPTRGGEIPPPSSSPYTAHTPTYSQVAAMRLGGSGATGDAASVASNTSAGPGRITRREKREKRARRAALLAAQENGEVGSPQDGDERRTVSASPMPSTPLLQLSNLPEGSGGGYEEGDSPATAFPRMRITDATPTPRGSPAPFGPAAPGKDLLQSGDAPSLAPPTSSQFLPEAELDATPTPSMPSRAAAKDDGASATAMLPSSACKTPLHSPLFGGIFGGALNYDLEDKDAEQLRI

SEQ ID NO: 41198 - protein, 668 aa, Oryza sativa
MAKIKQKGKSGAAKNYVTRNQAIKKLQVTLADFRRLCILKGIFPRQPKSVRKANKGSSAPTTFFFAKDIAYLQHEPVLQSLREHKTFAKKLSRAIGRREWAAAKNLDESKPTYRLDHIIKERYPTFRDSLKDIDDALSLLTLFANLPATDKVSAEVIATCSRLCAEWQLYVMKTKALKKVFLSIKGIYFQAEVNGETITWLVPYLFTQHIPSDIDFRIMYTFLELYQTLLGFVLFKLYTDENLVYSPRFDATKDEQAAGFGALSLDPASAAVLRGENAAAVAPSTSSTVITASGKKVSARDVKKQIKAIAKSGAVADDVDEADEADEEEAQIEAEQDQFVEQPSKSAEEQESSAHLTTFDEIQAASAASEGAANGLFTPYVFYISRECPRAVIEFVLRSFGALPGRIGWDMVAGAGSAVDEDDARITHHIIDRPVHAGGMKKYAGKRVFVQPQYIVDCANARKLLPAGAYGPGQTLPPHLSPFVDDAEVARRGGYVPEEAREQLGLEADAAAAPSDDDEDDEDVDEESADEDEDAEEEPTSKAEESSRPALAALLADPADATDAGLLDAAELEAEAAGGEDALEEMRRKHAAALKEAKKKAKGSSAGGAAARKSDEQEAKEMTKMMMSNRQRKLYEKLNYSSGKRAEETAKLQQKKKALNKKAPKARK

SEQ ID NO: 41199 - protein, 580 aa, Oryza sativa
MDRPYPYGGSYAANDTSLPRFSAQGDAAPASASYDDASEMPRIQKRPRRTHARRSCQMCQQRKARCELPDLEVPSSPLPLPDHQACHRCKTLQISCIVDDANKKKPRKNTADTDPAQPGSSKRRASASVAGDRPRTMRNSSTSASLSSLGDRRSIGSNRSNSSAGMLPSGLPDADADSLKFAGGRELGNQIVYPAEAKLVSKTPDTSDEDEQPDPATDFSARSDRQPDRTNSSETYIKTQDRGPSNAANIDTWERYSARSRPLTLLTELVPRQAGFASKIFRLVSARATIETDVSEIIPDAKSKILSDWCEENLTLWMPHISNAYQLRQDALQGKQTLSTQLLEQVLYLIALQHIRDPKDDVARFSVVRFVIRDTARLVLTSPRSSKGVEALELLSLFPVDVSAIPGPSRSRIRTDSLISASERVARSVRLDRVAISAAAPYSFFSSTSPLDEFETKRTAMTWASVKTWLTSFTLGDDELFESVDQRFFSDDWSRSLILPLELSQTDAAARLVEAGQSENDLFARKAWSRSRRLGSIGLAMRCLGMRRLVEAFHAIRTTPVDLDESDRLYRLADSGRLQT

SEQ ID NO: 41200 - protein, 419 aa, Oryza sativa
MSMPPSMQNTVVKSREHRELSQSFQYDRNGIPLSQVHQRHSSMPAYMEYSPAPSFVSSHYEDYSTRGMSFEPLTPPQHQIGLGAEPAYIANEDTGLYSAIPDLPVPNTFNPLMNMPPSNLMGSGYPGVSRPFAPGNVYSVIEGSPTYKQRRRRSSLSAGVAAAVTASGAGAHQVHRPSDLRRSMSSSVVPLAEVDESNHNSPNSQNGTSYPQMPEAKPHLDMSRQGTPLNTVEESPEPQSASLHHDDLNTLVNGELFESPLQHSAVARTAGAGPVFRRARSATMMEIGPYPQKPHSCPIPTCGRLFKRLEHLKRHVRTHTQERPYVCPLCNKAFSRSDNLAQHRRTHEPRADGEPLSDYQDEEDLEGEDDHLNSLQDELSPESGNEYLGLSHSINDIPGPRLGMTMAPPQRSLMAASHY

SEQ ID NO: 41201 - protein, 989 aa, Oryza sativa
MGWAWSAAEILIQQDQQKAKEQGKTFDVGPRTEREAVLRAICESLPSKQMAYQLIDVYESRVRYLCGHVVHVPCLKREMEAFYALDSVEKRARVVNHVDPGWLAMFLSVLALGLRFYPCSPKPGWQPANHLFDGKTIYAWHSAAKTCLVLANYLNSTSMSVIQAILLLYLFTSVSGASCGGEADSGTTNTALLRIAITNAQEMGLHRLGDLDKQPKPNEPSSKVIRREIAKRIWWALVFRDWSATGTGCSKDYIIRAEHFNTPLPGNYNDEDLMITPLPAPRPREEFTEMSYVLSNLEFGMVVKEVVDVRFRRELHAATNGGDRRLTCVEAQRLDVLYRGVLENAPSYFKVGSEIGRVTCIEVQRWLLQQAVFSKLLRIHRPNLSSRKESRTNCVLLARSILDMQKKIRSRCTVIDRLWVNLMQSFSAAIVLALHLLHTRPTADHRESVRSEITEAIRALKQVDGNDCAAKKCIRVIEALLEEEAERWQAGNAALARKDGPGTQEAAKPKRKRQMDVDAADDEGAASSGGGRRKNLLSLAQRVAQAAREDGSAAKARSAPAPVDEASKRQATMAAVRSMADDGSRAAADRSLEVNGVTALKDDASLFRMNNITLPTSGPSPMSMSAQANTDDVAFPQMLSTMPFPSNLFNFDGSNEAAQRLVPPNGVDLMLNNPITPPDGQSFDLAAFLEQVQNSPGSSTDVSLSSGHDERSASTSSDVSGMDDKASGSAFGRASTSSVGDGTDNTSVSRFGEPLLTKEAINRQQQHLQGANGASVLAANAGVGVPQAGSAATGAARPDASTDMDSFWNWIITQGANGITANTGAAGQAAPVLVQPAQNNATPSSQASVGAPVAAHVTPQSAHSGLTPFLGPNGFFANAGMDLAKGGAAVHGYPTPSSMASSTPPSKAEPVGAQATQPSTTGPAAGGAFGDDAQKADLLSVGTPSAGFGLESFLGAPLYDFTDFANAWTASNPASAGQVGASMGPVSDP

SEQ ID NO: 41202 - protein, 112 aa, Oryza sativa
MRSPTTCPARRTSRVWSETSLTEPARTTRKQMRVQKYHCRSGTSAPRHSRSRWCTTSDAVRRRLCVCTRAHCSGRRCYSTRQQVHVSVSRGSCSPLQTSMSRRRVCAQAKSA

SEQ ID NO: 41203 - protein, 758 aa, Oryza sativa
MSRMLNILNRVSQPSLEAAADSIGAVQAYFGANLAWRQKQPIDQVLAQLHESRSKLESTRRDLLNDRRLELLQPYAEHFRATHPDFDLEEHFLQTKESIHSFRSGARPLHVCLVFVTNLIDTLESISQFHAEMVAIADRAGTKKRIWWPKHLGRLVRVLTSDKRGSSDGLDRFGPAEGEFEREDDMDRDFRQDRAHTASDGASSQGHNVADHLEGESEAEDDDTLAAQSGTPRDRDEEKAAVPAKAKKARRERKQTHYARDPDALPPTSVAHRIGRGVAATYYFVSGPTGVFALRMCIATFAIWITAVLPNTAQFVYTNRGIWALIMAQTAAALSGGELVFTFAMRFIGTVIGLLYGAVLWYISTGLGRGNAYGIGAATAVGFLPLVFLRVFAPKMLLLPAIMLNVSVVLIVGYSWIDTHLQVTVNSGVGIEVAWKRTLLVIIGMAVALIVMVLPRPASSRLLLRKSMAKVTRQLNELFVEVMEVWIARNRLVEQESERAQFANQLDTNGADAKVSSNEAILQLWQERESLIRARFMGVNARVAMYPMQIGLATMDFHIRGRWPAERYVQMAGVHATIVESLGAILCSVRAFDGIATLSEGDKPRATPGTNARSHMDWEVMLSSSTALLDPQYLSEICLTFDVLSKALRNGERLNHASFSLQENHFKYSARNRRIGELLRKGADGGRGEGSDVLRWSVLRDPMYLRYTTARMAALTLATELDKLRAIVQSLVGESSLRGFDMLKDQHDERLYRVARQA

SEQ ID NO: 41204 - protein, 1045 aa, Oryza sativa
MARFDDHMPTRPVDRDEAESELSIHIKKATSTEETAPKQKHVRKCIVYTWDYRTSQSIWTGLRVQPILSDEVQTFKALILVHKVLQEGHQVVLKEAQAQIGWFETCARTVGADSMRGYGALIRAYVNFILAKLRFHRHHKEFNGLFEYEEYISLKNIDNPDEGYETIMDLMNLQDQIDQFQKLVFAHFRGSANNECRISALVPLVKESYGIYKFLTSMLRAMHRRTDASDALQPLRERYDSQHHSLRKFYYECANLKYLTSLINVPKLNHEPPNLFEPPEEGPYLPPRQTPKAPTPDPGPSQAEIDEQARLLKQYEDKQASLKAQEEAERQRQADLAAKQQRDFEEQQRQQAEQQRLAQEQLMRAQMDQMQGGRLAELEREVLAMRGQYERDQLMLEQYDRRVKALETELANIGQNFGAQMQGKDDLIKQLQDQVTLWRNKYEALAKLYSQLRTEHLEMLGKYKQMQIKAGSAQEAVDKMERMERDVKAKNLELADMIRERDRARFDLDRIKASQKEEFDRLKRDLMFANERAEDATRAKSSELSGMMSTLNRQIAELEDSLREKRMELDARDAELARIRDEKDAELAIMQEGMDATIKQLTDMQLNQGESDQAVNAQIDTLILDNSKKLNAIIDSILQACVDKVDDALYELESPSASGNTTATPEYVLSMIEKGTTSTNEFATVFSLYLSGEVGGEHVEVIKRANQLAQTISDTLTSTKGITRLAQNDDAADKLIGTGRETGNVLLRFFSNLQSYRLAGVAPAQRRDVVARQNMEARAAFGNLNSVVETMVKAGNTMLANANGDIGDIVEREMMNAASAIDAATAKLQALLSRPRDHNKYSAVDLQVHDAILEASLAITRAIAGLIKAATESQQEIVAKGRGSSTNQQFYKKNNRWTEGLISAARAVAFATTMLIEAADGVIMGTHSLEQLIVASNEVSAATAQVVAASRVKAEFMSKTQDRLERAAKAVTDACRALVKQVKTITDRQSNGAADFDYSQMAVHEFKVKEMEQQVEVLKLEKELTQARRVLGAMRRAGYHATEDD

SEQ ID NO: 41205 - protein, 671 aa, Oryza sativa
MADQLNMGGLSMNDQPPAGARSYIPPHMRSKMGAGAGPGAPPPGPAGPDPAMNGGLNNSAWAGNQGFDARPAPGGWSGAGGPGGYPPRGGGYNNRSGFDRNAYGGAGGGAGGGGGGHARGSGDGQWRDGKHIAGPANPRVERELFGTPDDPSKQHTGINFEKYDDIPVEASGHDVPEPVREFTNPPLDDHLIRNIDLARYKIPTPVQKYSIPIVMGGRDLMACAQTGSGKTGGFLFPILSQAFQTGPSANPTAGGGGFGRQRKAYPTSLILAPTRELVSQIYDESRKFAYRSWVRPCVVYGGADIGSQLRQIERGCDLLVATPGRLVDLIERGRISLQNIKYLVLDEADRMLDMGFEPQIRRIVEGEDMPNVQDRQTLMFSATSPRDIQMLARDFLKDYIFLSVGRVGSTSENITQKVEYVEDVDKRSVLLDILHTHGAGLTLIFVETKRMADSLSDFLINQNFPATSIHGDRTQRERERALEMFRNGRCPILVATAVAARGLDIPNVTHVVNYDLPTDIDDYVHRIGRTGRAGNTGHSTAFFNRGNRGVVRELLDLLKEANQEVPAFLETIARESSFGGGGRGRGGGGRGRGRGAQTDFRKYGGGGFSSGGGGGGGFNGPPSGGFSGGGYGGPPSGGYSGGGGGYGGGGGYGGGGGGYGNPSGPGQASWW

SEQ ID NO: 41206 - protein, 1007 aa, Oryza sativa
MRSRFTNWLASYTRSIPSGSFSALVVAPNAAPPLLERNFRCFATKSSHRSVKMVPDTDFTAALNKPLEVVQKIYSDAQDKSPDNITKLVTAHFQQLFASSDAKSKIPTLSAANIATLLPKANADAGSSHRLVRFRAMIQDTGLGTEVFLAKHQQGDRNITGLFGGEAILPASESSVDTEHAEPDHQNLAERAVMYAVSVPGQTEWAAQAHREAAAEASSDSSVDELTSATAAVAIEEPQSPQKVEEVRQRIRRAAEKGKAIGSSGKVPRLVAISKLHPPSAILAAHKKAGQLHFGENYVQEMVDKAKVLPREIRWHFVGGLQSNKGKLLASIPNLYLLETLDSIKAANVLQKALSSPDAAKRDEPLRVYLQVNTSGEDAKSGLPPVLSTDPEQAKESELLKLAVHVITKCPNLRLRGVMTIGAAANSSSADADQPKSVDEIVSANPDFERLIHTRKNLVELLRKDPDVAKADQAHVKEAYADLLEGSEANGGLELSMGMSADMDVATMAGSDNVRVATDCFGRRPGTREEAMNGMKRELEVGPEAAAEELKGSSAPSQGGAASSSSSGADKFTLPRAYLAKSPLPEAPHVGGLVKLHDLEAAEKFKTTELVEVIGILDKASLPQAEWQETGSGAASGAEPAEVPCIHAVCAFAVELDSVRAQESTGGSSSGNALAQPADRDALITFLSGGLAGDKLAAELVLLATIARIHVRRANLCLGALTLNVSNFGAAGKTASSAEQTQLSRRLNMLLPAVVDVSMELASLNDDRKPLYARSAGEGTGLEAGRLQLVNGTTIVVNEGTMGEGQLKESGIRNIRALSSVLESHKLPYAFPYSEFEFDTDLNAIVLSQGKSFLPFDIHCPLSPEAGSEDLYSSSVPKDEAEQLAGWRSALLEARGLATAKAFEIPDSVSEHIQHEFVAERRKEQQESKDAHGGVASKEGALGQEDLLRRMSLVRLLAISHAEKTLTIERWNSAVELDKQLMQRVAAAQPQSQQNPASGSAGAGVSR

SEQ ID NO: 41207 - protein, 858 aa, Oryza sativa
MLSSKPMDPIVHHTTEPDQERRGADVVHLATQTNQMTLRENSAAPGYTTSPRGQAVSSAQPSSTSTSDLPTPVASNNAHVVSSPAQMASPVSTGGLDASSGIVSGPVDAITGPSASAAKIRSENLRKLGLSERADHSGVATPIGTGGSSAHFQPNNASSEPVSPVVSQPKSGLNKVLSGAMTGTNFQPVQGAGASGLASARGVDASGNETATSTPPQFIFPKLGSRRNTDRHSGSGSGAASPSDNDGHHKKKKDKDHSSHHHNPLSDLRKFLHNHIGHHNSDSRSDSSRSGVATPKRHGKDSPPLGEDHAHLAKKYGKWGKVLGSGAGGTVRLIKRSKDHTVFAVKEFRQRRPGENEKEYIKKVTAEFCIGSTLHHVNIIETIDIISDHGHYYEVMEYAPYDLFSVVMSGKMCRQEIYCVFRQICDGVDYLHSMGLAHRDLKLDNCVMTTGNIVKLIDFGTATVFHSPGKTKVVATGVVGSDPYLAPEVLSQQTYDPRLTDVWSCAIIFLCMILRRFPWKLPDMKTDPSFRLFVNSHPELCKPPASEAKSDGVPSRQGSTTSSTLASRVNSGNDVSAIRRTLGMSSIDPVTSSDDAATPQIRSAKEAGYMTPHSIHSNPHSPSLSDSFDAHKMLGEDSNGNGGAPVASPGAVSPVVSSPSSTLGDSAEGGAFDDVRPHQHRSDSVSSASSQTTYTSGAADSIFRLLPRETRSALSRMMAVEPSLRCTLGDLLRGRRFSDTDSPLTRTPVMSRSNSTDMLRSAIDGAHAQAHPEGSGTVSPRSGTIDGISRDAHAAGLGSIGLTEFEDDDDHGDDWLKGIRTCAHIVKDGKPGEQPDHPHVKVMSEDSKRKNSLFHRKD

SEQ ID NO: 41208 - protein, 821 aa, Oryza sativa
MPVGPHKPAYLVEFCGPASVEAAKLQQEVHVVDWHVDIYRKGQTNNLVPPDPDANWVVNVSLTLLTARRVERPSVRIAIPSLGVAVPDTLLSLPVIEAGLNERVHAAFEMHSSGEGAPLLWWPRGYGEPTLYTLEVHSDELHIHLRRRVGFRTAALDLSRIPRAQASSEHVQPGSHFRLLVNAREVYVVGTSLIPLDTLGPRAAPGYMHWLLDSAAAAHVNLLRIWGGGSYPSRELLDACDQMGMLVWLDTMFAASLYPAHDAFVADVRAEVAQAVAGVVSHASVVTVVGNNEGELYFLGGYGHRTRDAEWKRAYEMLFDHAVRDEVLDTTRALSYIPCSTTTGYVSLHPYRGRYTAYPHNELHGTGEHYGYDAARAWDIASYPRVRFMVEFGMFSLPSIHALDQILPSSCSDALEPACVVDSAGNLDYPLTADEDVQQFKAQSPMLRSCNDVAELACSVEGASNLSCPCAADEGVQRLKVGVQTGSKPQCTVDSIVMHAHLKHPPAGNLSYPFAADEGMQQLKAGVQTWFADPDQSGKSGRALLRRWTESSQLYHALFVANQVAEYRRGAARGERNRGLIVWQLNDVWTGTTWSSVEYSGSWKLAHYTLACAQAPVAPVAIYNTSNSLLDIGVVYTGASHEGGYLVVEWFDFYGTLLEERRFGVHVEEDVGWWCAWQLNPTQLCGDTRCYVRLTLVLTGTEVVSYWTHMPSLAASLAQVSTHARPIITLHAHHPPEAEHWHIRITNTGTATAPWLTLTSNTAGYFAHPTTLAPTNAFFLNPNAELTLVFVRATSGTQTYKDWFDQLTASSLLDNLPPHTP

SEQ ID NO: 41209 - protein, 830 aa, Oryza sativa
MAPLRPEASRASSHSSYVDASDDRHVQQAGRSNTNLTAAASAQSLRERARPGSRPPSRSPSQPNLLQKKIRPSKSNILAEEPLSPPTQAPGSFRTASPRAPSHSSPLVSRLSNSSSEASSSKSNSDDARGAALLPAQSALSNLSSPQEQRPRAFIPENGSSLSISSQPPRTVRDLGSSYTRYYNPFASQNNSQIDVSTPFPRTNSSTHLMAGAGMSSEDLQKRLSNPFKDTNRMSNPFGSANNTAPGTPVQRTNSGDNEKVPIAGAAAVGTGAGAVAAHEMVERHGTPLLIRENDPEKAVFFPYMDDRLGAPIAEFPLYTDAVEDDDDMHMPQWDDDIKLKPHWKDHFSRGNISSTIGMIFMVLGLLTVFIVLPVISFTGTNLIPYSYETPLDQMPGAWDAQDKNSWAYVNDREYPLMKNIRTGLIDPDTPDSAMTRKDINGDTMNLVFSDEFNEQNRTFYPGDDPFWFAPDFWYGATMDLEWYDPDAANTGDGVLMLQLDAFLNHGLQFRSGMLNSWNQLCFKGGVFEISASLPGPGGVHGLWPGAWTMGNLGRPGYLATTDGMWPYTYNDCDAGITPNQSQSDGLSYLPGQRLPSCSCKGEDHPTPGTGRGAPEIDIIEVSGDWAGMGVAVATQSFQVAPSDVNWYPNYEFMETPDYRLSFVNTYTGGPFQQAVSTTTMLNNSWYDGMQYQKYAFEYAPGAGEDAYIQWFVGDDEMMKFDGRAIGPNGNVGQRLVSEEPMSMVINLGISENWVNIDWDALKFPTIMRIDYVRWYQKEGSEMVTCDPPGYETTEYIKNHPAAYNNPNYTHWEDAGYVWPQNTLMNGCEA

SEQ ID NO: 41210 - protein, 612 aa, Oryza sativa
MGKEEAENILEALKKNIDIFAWGSDEVGGVSTDLIMHHLAVKPDAKPRKQKLRKMSADRQQAAKAEVQKLLKAGVIQEIDHPEWLANPVLVRKSNGKWRMCVDFTDLNKACPKDDFLLPRIDQLVDLTASCELMSFLDAYSGYHQIHMNPADIPKTAFITPFGTFCHLRMPFGLRNAGATFARLVYKVLYKQSGRNVEAYVDDVVVKSRKAFDHASDLQETFDNLRAAGTKLNPEKCVFGVRAGKLLGFLVSERGIEANPEKIDAIQQMKPPLSVREVQKLAGRIAALNRFLSKAAERGLPFFKTLRGVEKFHWTPECQAAFGELKQYLQSPPALISLAPGSELLLYLAASPVAVSAALVQEIDSGQKPVYFISKALQGAKTRYIEMEKLAYALVMAPCKLKHYFQTHKVIVPSQYPLGEILWGKEVTGRLSKWAAELSPFDLHFVARTAIKSQVLADFVAEWTPALAPEPEPVKQPWVMYSDGSWSHKGAGIAAVLISPSGVPIRYAARLQFDTTNNAAEYEAILLGLRKAKALGVRRLLIRTDSKLVAGHVDKSFEAKEEGMKRYLEVVRSMEKCFTGITVEHLPRGQNEEAHLGKICCLWWTAFAWHLF

SEQ ID NO: 41211 - protein, 1095 aa, Oryza sativa
MPRSAPSSPTKKAQPASLAAEKPSAQLSAAMDVDAEPSNQDASTSQAAASGKNRSRKSKKSIFRSKDRSAAFSPFQTISEGRISRLPVIFTRDADYFFAVSKTSVRIYSRTTGQVVSTLSSGPGSHFAAITAIMINPANPLQLLTASLDGCVKVWDSLDGILLSSFDLQLPISGMTAHESSPNTLYVLLKKFRHRDADTAPKNLSEILAVLESGAPFNSIIAHFSLDLASHAHAYPALPKFARGASIRPEVSRIGKTREAVSIGVSPNGEWLVVVGNDKVQVARTHDLASGFTRFISSHPGAQHQRDSMTCMAFHPTDPTRLVTGDASGRIRVWYCLQKNFMAPSKAEADGGMERHAPSTVLHWHAHAVSSLCFSPNGAHLLSGGEEGVLVVWHLGASGNAASKEFVPRLGAPLSAIAVANGLDGREQEYAVSLADGSITFVSSMSLKPTRSFTRIKIDASRYLPGASLPASTHVPLAVHPASRNIVLLAGHPSSLQFYDPIKDANTAELEVAPSNRVSRVEDEQIEPTRVERVVFSPFISAKTAEAGEWMVTFDSRNLSDGDDDVEVIAESSLKFWRWNPINRRYVLNTRIDRPHNARRITSITFSPIDALVVTTATDGKVRTWHLASRKLKSGKNESYWACRSVFGYRQQLPTTTAFSADGSILAVGQVGSVTLWSPESNLMSMVISAPELANGVESLAFSGRYLGIAAGSAVLVWDLILSRQVSRKGLETGKQANLLLPTTSSADTAEEVDRPLFTLVSSTADAHDAAGSEASATRQAKTIVETVSLVSDREMATSSAAVSAHAASKAASGSGQRVIFRTSVAAVAPVPLPAGARAQAQDFVAVSTEMDLVTFSSSPSSSTAAGADATAESIRGISSVKKTLFDDLFGPSAFHDARDEAQDDDDQASAVANANLVAGTVGSGVASLFSTAPHLLPPATLLFDAFLSKMLPPAMAAPSAAAAPTTNAHLDATVDDADKKDAEARKADAVASGERGISDVLLADTDELVELFKNQILTEDVTKTDAPIKVNGTSAVATPSKKSSTPVKANGVSKTPLSKGLSAASQNGTPLTPAGSEQEALVQSPSVSSRKRKQ

SEQ ID NO: 41212 - protein, 348 aa, Oryza sativa
MGSSSYLHLARPLAPAQISQSTSTTAPCSVTIQPQALFSILDHASRRPADQERVIGTLLGTRSEDGTEVEIRNCYAVPHIETAEQVEVDMDYQKSMLQLHQRAAPKEVLVGWYATSDELNTFTALIQNFYSQQGEGTWPHPAVHLTVSTVAGKDIAANTYISAPIGVTPERAADSCLFIPVPNEIKYGDAEKSGLELIAGAREREDRTQLLQTDIETLERAIEQVLEMLERVSNYVSNVLDEEAEPSSALGQFLMNTLALAPKVEPEQVERDFNNHIQDVLLVSYLSNTIRTQIDLSNRLAIAALTMGPEHKKSEGKEGEQKQGGDRKGGNQREQRSGAGPRGQREQQ

SEQ ID NO: 41213 - protein, 1533 aa, Oryza sativa
MAGAPRSQASYRRESSLFERVLIQVTDDNERFAVVDISGVDSADAIKERMFAKLHLFDADHSSFQLFRTEIGQSEATGPVVNDDALLVLCLQMGDDRGTLKFLVQQTAPPNATVRAMPPPTSAAGQQRALNEVRRVSGAGSATSNHLRTDSQSSRSSISDALIYPEMVGADGAHEGSNRNSGSSLTRSKAQARRALPSAPPMDDLRSPTGYHDRRSIASSGEGHAQEASSKHASSVSEGSGTPVMLSQRSSSMNATQPAPTASSNNARRPSHVEDERPRFDADASANRSLQAPANGLGHRQDRSDEGVRDQSRQQAPGLTLHNAKSMDDLHRPAHGSTHAPAMIPQAEVRAQAGLDRDGRYPAPSIMRPSTAAPAGPGARDGGHGHRQYSSDALGTSKGPVDPASLDPRMLQRNRSAQAAIPSSQQLANHGPTRMASTPQIRSPPTQPNYPARGPVDPRYARPAGMDDPRFAGMPTHPAQSLQPRPTSPAARPPQFNAPSTYGGPNSYSVQSFGQAQRPLAPGYVNEFGVRAPNATPNFNTFHGHDPRLGANGMQGSLTPRPYSYHEASSTHHPAYRPYSPQLAPSPYRTREDPFTTRYFPASSSRQVSEFQMQAGRLEPGMTVQQTLRTHEVLRNQAVSSPQGQAYLGHAHPPGPSYGPRDPRQPGQPNQYMGMQPYPNVSAPPSMPSMPQRSSHPSSAHANPHHAPSSRPPQHSHPPARNAHDMANSNASAYVSAQPRPHSSASSGGRGVTPQPSPASHASAPAAESHRRDPPVRVNPSERSSGSSFSSQTSSGPGRPSQEDRNSRHSTDDSFSAPTSARSSQSGPASAKPTNGENRSSYAEQERELADDELARVRPLPKLPTSSAGTPTDTSSAKSGGAEAVRKSEDEDTLRAGEWAQLRRALEPASDGTVIGTAVSGSSGGDGDTVRAEPSTPGPSRPHTKDGLGSASPSLDPPRAPSPSMAPEENGTVASFGVFDDDESESGTWAQPLDSDVNAPRLPLRLDGDEDAAADDHGTLLPGQGALLQSPARVGGSSPKRPELRLTIDPAAGPTLLAPASQPAGLSPVPSSSHLSSSLSSGGITRSNSFARRDDDWAFRPPPEQLYENLDDFFPKHDLDKPLLDTTAVPESPMVSSPGSEAAAAAGSMASSPPTAPQQAMSHRSRLKRSIRLVAQDRKRFLDRAGKRATEKDAEASSGLVRRRSTKLWGTRVVEMTPGQELATPASATSAESPLSDTSPPKPVFKWVKGDLIGKGTYGRVYLALNATTGEMIAVKQVGLPRTASDREDSRQKGVVAALKSEIETLKDLDHPHIVSYLGFEETTTFLSTFLEYVPGGSVGSCLRKHGKFEEPTIKSFLHQILDGLAYLHSKGILHRDLKADNILVDFEGICKISDFGTVRRSDDIYGNVENMSLQGSIFWMAPEVVSLSKKGYSAKIDIWSLGCVVLEMFAGRRPWSDDEAVQAMFKIGAERKAPPIPADVKLSKQAAHFLKNCFEVDPAKRPTAQRLLDHVFSVPDESWHFQQSALWRSLQR

SEQ ID NO: 41214 - protein, 837 aa, Oryza sativa
MAIHQLSFVLLLMLHAPATSRARDSIAPGEPLAGHDTLVSAGAGDSGGFALGFFTPPGSNDTYVGVWYARVSPRTVVWVANRADPVPGPVDGNAGATLSVSRACELAVADANSTVVWSVTPATTGPCTARIRDDGNLVVTDERGRVAWQGFDHPTDTLLPGMRIGVDFAAGNNMTLTAWKSPSDPSPSSVVVAMDTSGDPEVFLWNGPNKVWRSGPWDGMQFTGVPDTITYKNFSFSFVNSAREVTYSFQVPDASIMSRLVLNSSGGGLVQRWTWVEAAGAWNLYWYAPKDQCDAVSPCGANGVCDTNSLPVCSCLRGFAPRSPAAWALRDGRDGCARETPLGCANGTDGFAVVRHAKAPDTTAATVDYDAGLQLCRRRCLGNCSCTAYANANLSAPPGRRGCVMWTGELEDLRVYPAFGQDLYVRLAAADLDSTSKSKKKTHIIIAVVVSICALATILALTGMYIWRTKKTKARRQGPSNWSGGLHSRELHSEGNSHGDDLDLPLFGLETIASATNGFSADNKLGEGGFGPVYKGTLEDGQEIAVKTLSKTSVQGLDEFRNEVMLIAKLQHRNLVQLIGYSVCGQEKMLLYEFMENKSLDCFLFDKSKSKLLDWQTRYHIIEGIARGLLYLHQDSRYRIIHRDLKTSNILLDKEMTPKISDFGMARMFGSDDTEINTVRVVGTYGYMAPEYAMDGVFSVKSDVLSFGVIVLEIISGKRNRGVYSYSSHLNLLARAWSSWSEGNSLDLVDKTLNGSFNQEEVLKCLKVGLLCVQENPDDRPLMSQVLLMLASADATSLPDPRKPGFVARRAATEDTSSSRPDCSFVDSMTITMIEGR

SEQ ID NO: 41215 - protein, 1028 aa, Oryza sativa
MQSSAAVADALTAEAKLGARHNIFYTRDIWARATATRVSACLSAAFVLALWYVAYHALVGTRASSRGAKPLWQLSTMLADDANIDRLDTELDSDEYEDEHESRASGFLANARERHALRRMLARNEGKRSSIVRITSSDPSSSLSDHPMQVDLEPPTRRSFWPAPAFSTPPSDSAASSPTSSTPPPASARRRKESGRLAAAEPGRRQHTASPSRSPTLLSGSLPVRPTRIRPVERSPLGRVASRNKRNGSPSLATDAADARDASPSPTSPLAEDWADESQLSPTAAAPADHDALLTTPSLASEASFTSAIPASPASSTFSLRAPSILKRRPQSFRTASLRDIDISYSLMQRKASLPALPLADIQQQQQHDFWHHAVMHSSPAPPPCQPASPDAIHAVERSVKLIEPDWRPHLDSHVRAQERHEAATRFATAQGADGDFWFERFTQSTAAAGRDWDWRKRRARLQRAAALGMALGQSGLAIPASPMPGNVGKTDVQLQHQLGTQPTPAAQAASPVRKVLPAAPLITFSEHELKSAPVLKVDTESGRRPARGSVDATSPTYSATPLSPTPSGTGTPLGGIFGAVLPSAESVSAVMAARMAQRRRASDDATASSALPAADDANTMRRGVVDKAMRRRLSASTSSAVPSSPGASPAASPSIEGRGSPLRDSSPFPSDAGRTSMDAPSSPPGASAMSVPGRLSSLGTAGKKVSLTNLRAGLRRGSGSTDFMHDASGIELVPHSPDLSEGDTHVDAAATPSPEGPRSSADAYSAHDPLQGIVLSRTDSQLRHVEGGGDGGPKQRMRSESPQATPQFRGGSRVTKLGSAPAAVLNPPYDVVEELRDRGGERDSISQGSSDSDSLRRRLRSQTDSATRARMDLVLNSTLRRDGLSLSPGTASSPPIAKARARGGSRSSIVKSASGASHHLDRSAMRRSSMRSGSDSGSLASSTSLPSMARRRAKDATPDPQLQPEPAPRGMAQRARSASISSNASSLASGSRKSSRSNSFREAAGLGMTSNPGTPGSPEERGATRLA

SEQ ID NO: 41216 - protein, 1243 aa, Oryza sativa
MAASDFHANGESSRTTTDATAAASVPSSKPSKRKAEKMQTSPSAADLTDANGVKPLARAVLVCKRCRSKKIKCDQAFPACGSCVKAGEPCVGIDSATGREVSRSYIVDLEHQITQLRAQNAELERLLAERPSSGPLEPGALGMKRPLQHVEDEFPLVASDKSTPPDARPLKRLAASPESDRKPDPARPFLPGLVLGPAGVEVLPSDADGHTTSGARPSMGRLNSHASGLSPARLLCQAFQQSAQAGLHVRDPGSAARVRRSGTQRLGDELNRRATTLSSQDPAKLLSESREAQDGGAKAEARLGSPQSGSATPSDTKKNSPFDDGDPMQYATATETADITVPAPEQALKPSPLPAPFPPLSIARKLIDAYFERVNPQLPILDRSSFMTRFEKACKLGLERARAKLSAHERGTQEDDDDKLAIELQPADGHLFHLVFAIAAAMDWTRSSWSAENHHEAAMRFLDPRRLATPNQEGNVGAIMGRDALEQLQCLLLTALYSIMRPMKPGVWYCLGVALRLTTGIGLYTETPGVLEASASASQVVGETLAEKKRRLFWCSYALDRQVCVHLGRPFGIADSDIKVNLPWVDSAGDMIQVAIEHQDSDVRQAGSAENDGDSSIEIARREAASTLAALQSSTSEQHDSNRQVAPVSLPKPKDASRWVSLSFFRMRILQSEIQSILYQNAELPRRFSSYGHWKNDVLQRLHAWRLYAPSSKAELEANGCGYNPIFLELNYQQTLLMVYGLSPRFPNASRKDLASVEECSRSIINMYATLSKEGQMNYTWMTGHNVFIACTSYLYAIWQISATDPASFRSSVTLGFRNKVDEIHHFAAACDKVLSSLQWATAEKCRKCLRTMFYATSVVVEKIDRAAPAAIDGGSRMKNPHDRPADRSTQRSKSGANTIKKPHPPSPGRESNSLHASASPQRHAQGTSPAPWSLYAQDRDWRQPTLDRTSDSGPAQPPAEASAHAPRWNQRPGAARSPPQQSTASWPAAELGHDRSATLHDPYASSSGATPSRGLDTGGGITDASSTSHAWYEAGPGTSPRVMFPDSPSNFDISSLMATSAMELEALFREAGLSAGPSGDQRGWETSTPAMQHSALGPAPTLHGAAGGREPSAQHYVQGEALSFYDSVGGSIEGTDASKWGFSAGAGPGINVEHRMAEGMGQGEAFDSDWEALGFGYRIAAPTAYNTFAETVTDAQQRGFTSMRGEVQSTGAANAASAGNPATGNMAATEFDHRFLDSHMGF

SEQ ID NO: 41217 - protein, 1001 aa, Oryza sativa
MAIVFIFALLNPLIIPFALVYLALALVIFKKNFAYHYYRRFNEMEGVIYYIRLLRYSLDAIVVMQAVLLIFFSVIRRGSVYIGMTAVLIPITVIVKLIATRLWKSQCRAVDDEEAEALCGIDPRPLWQKMQRNDLGPNTADEASDSRSPLDALASGRYPSVVAPPPTTSAFQRVWQRLHDSFNANGLDKTSYLAAAHARGQAPGHAVGVGAKGLARTPRYLLKEGAKHAFHYRTAAKATLGMEDATDSPRASIRPSTEDRRVAGLPPTSKIEAHPYRTSHESGKAEHFDGEVPNDTSQVFHRSRSAMRKARGGEHVVHRRRGSSRSEERPFLSGFDAISAHAPLPSEDDYDLSFEDGDAPFLEHDADGGLGRHASRRSRRGASRNYGTLRRKPSQLATVADDESAQIGKSELQDREPVDGPSGSDPLSEYADGTEKPASATYAGAGGAPYGHSYGGSERKLLDYHEDDDSLKGRAVVRPHPPVRWDDTPNNTARYNNPFYNQEMDDFLWLPRNPLAPIDLFDTIEWYGPALVSSQGGGGVLGDWEDEQEDDYDDEYDSDCEKNHVDDIPLGGEAATLARRSEGMLEGDEEIVLPDHLARHLEETLNVEEVADPAASVPKYLMEDYKRAIRRSERAGSVSSAGRSPSSLFRRGSDVSASSARGYGGPALLQVPSHGSWRSAEGPQAPASPTSVRASQRPGTGGSEPLASVAEAGVMIPRRSSSRRKRREESGNDAAAEDARADGDADARDEAPATVERRMSRRTRRDASGALSGFSGGTTQKTVTLKAALRAEALEEERRITLKEKLASRKGRKKANLSRDASGQLEGLEEGLTDGEEGERGIEAGTIMERYAAEHRRRATQASEFGQLTPQRAGAGGMLRDASQGSALVDTSLLERSGSSAYTGKRFRTAALGVLSLSRQTKADANAAHPTSMAMQELGGAPASTAATSAAAPAIAGQGEVAPERPSGVAERSLTEVALPAEASRTTALNETVDVAESHQN

SEQ ID NO: 41218 - protein, 830 aa, Oryza sativa
MPMLLDIQRKLFAKSERVKSLDFHPTEPWLLAGLYSGSVNIWNYETGAIVKTFEVTNVPVRCVKFIARKNWFVAGSDDFQLRAFNYNTHEKVISFEAHPDYIRCLTVHPTGPYVLTGSDDMAIKMWDWDKGWRLMHTFEGHTHYIMNLCFNPKDSNTFASSSLDRTVKVWTLGSSVANFTLDAHDKGVNYVEYFHGGEKPYMLTVGDDRTVKIWDYLSKSCVQTLTGHTSNVSFAVFHPSLPLIISGSEDGTVKLWHSNTYRLESTLDYGLERVWCVAYKRTGNDVAIGYDEGAVVIKLGKEEPSVSMDAAGKVVWARNSEVLSANVGTTADDAVPDGQRLPVSVREMGSTEVYPQLLQHSPNGRFVTVCGDGEYIIYTALAWRNKAFGSGLGFAWASDSNTYAVHDGGAKLKVFRNFKERPGLLTLAYNVEAVAGGALLAVLGGGFVCFYDWETGALVRRVDVEAKAIHWSTTGELVAIVCQDSFYVLRFDRDAYAAFLDTGAEVDDEGVETAFEVVTEVSESVRTAKWTGECLLYTNSTNRLQYLVGEQTHTITHSDHEIFLLGYIPQHGRVYVVNKDLAIFSYALSLALIEYQTAILRGDLDAAAELLEQVPADQRNRVARFLETQELKELALQVSTDAEHRFDLAISLDDFETALEIARSGPQVGSESRWRTIGDKALARWNVALAKECFEKAQDVSSMLLVATSTNDRAMLARLAELATAKGSTNVAFAALLSLGDVDACIDVLHKAGRTSEAALFARTYAPSRAAEVVQTWRDELKSANRHKQNEIAASIADPTRDEAAFEEGWKQSLEREAKLRAQSKVNGRA

SEQ ID NO: 41219 - protein, 803 aa, Oryza sativa
MPNLALPSRSLLLGPRKALRETSPSPPTRTSSASPLPSPAVAGPSSLSRSPPKPIASGKELSEQYELLEKIGAGSFGTVYKAMHKETRQIVAIKQVDLEDSDDDISEIQQEIAHPAQCDSEWVTRYYGSFVKGYKLWIIMEYLAGGSCLDLLKAGPFSEAHIAIICRELLLGLEYLHNEGKIHRDIKAANVLLSASGKVKLADFGVAAQLSNNKSRRNTFVGTPFWMAPEVIRQAGYDYKADIWSLGITAIEMAKGEPPLAEYHPMRVLFLIPKAKSPTLEGNFSSAFKDFVDLCLIKDPKHRPSTKELLSHRFIKYAEKTVLLTELIEKHHEYKARGATRGGAIVRDHLRGVDASESTIGGSTIMSEWQFDTMRSRMSVYDDPDGDGDDDADALATWARSRGPPATGEDRAGYDTVRGARPAGQLMEAVDSAMHTPRRGGVLRAANGDQDDISDLSTEAYTSSDALSRSSSTLATSTASGPSTPADKARESIHVDALCASFRGMQPSDARDRYAASGIGKNAAAASSASHLAPPSASGLAESSVDIATAAATMASSHAGSTATQHIRCARDGKASPSHSRNGSAASSAPRPDSRPRRSSWNERNDINGTVLREGDVANGLETLRPVRRLDAGGSAKLSQQYIGSLRSGSAPSGLEKSGELAEAVPRALRHSRSALASSSSTAQAHATAGENLVKDVILPVMERAKAQELEAGEVEALEMIAKGFEDLSLLNSRLAYSTIVDLLLSMNDNEQARENLSTTFRQRLTRPQMAKLQQPDEQPRSPIADLLYGRWLEGLRNRWIGY

SEQ ID NO: 41220 - protein, 568 aa, Oryza sativa
MSQALNDGSNLDLPVFQDDLLRGRQRVFSEFLSKDEYQDAVRRMLRMDARRLIINIDDLRSYNREFATGLLNEPNEFLPAFDAALHVSVELAHNAIKDDIKNKQYYIGLRGSFGDHHVNPRTLRSIHLGKMMSLEGIVTRCSLVRPKILKSVHYCENTAKFHQREYRDATMYGTLPPSSTVYPTEDESGNRLTTEYGHSQFRDHQMISIQEMPERAPPGQLPRSIDVVMDDDMVDRCKPGDRIQLVGMYRSLGNRVGQSSSSTFRTLMIGNNINLLSSKAGGGIAQAHITDTDIRNINKIAKRKNVFNLLSQSLAPSIYGHEYIKKAVLLLLGGEEKNLPNGTHIRGDINILMVGDPSTAKSQMLRFVLNTAPLAIATTGRGSSGVGLTAAVTTDKETGERRLEAGAMVLADRGVICIDEFDKMSDVDRVAIYEVMEQQTVTIAKAGIHTSLNARCSVVAAANPIYGQYDVHKDPHKNIALPDSLLSRFDLLFVVTDDVDEQHDRMISEHVLRMHRYLQPGLEEGTPAVDNLTRRSMWALPRARMPTAPRCSATRRHLKSTTRCCTLA

SEQ ID NO: 41221 - protein, 918 aa, Oryza sativa
MLDLDRHMAASHWPFGPSRPQDLYRDAYLAHPDRFDWRRRCTVPSQPVVRSGSKSTPLQRRKASASMLIGEESKFAAKARRTAERKMDDRSFRMSREKAAQLIQRNGERQPIREQARLYRQNWTQLLDHERNQELAAIAERRKAPIDKLVDEGIAIDGLQAYWQDDSRRHFGKKVAVFKLDAAEPLPRTLFRAGDKVTIMPSTTSGPYAGQPLAEEEVIEAEVVERQRTFLRLKFDERDEDVDLVACPSWRLDYGFNDLTFERIKAALEAIEHDVEFIETQYGSRFQYILSGTRLSDVILGIEPPADRVTRGAFWEDARVQSWYDRFSRPDPVVVDGDPQPQLNRSQTQAVAMMLRERVSLIQGPPGTGKTRTIVTAIKLLKQEFQVPHPVMLAAHTNVAVDNLADGCIKAGLRVVRIGPSARARAGIDEFTLDAHFLRHPAKPRLDDIKRRMDTLEKLKSDHEMVRGPVAAPAVRDEGEEGIGATGGGAALSWEDVMAEREEEREVAQLQGGTASEEYESIKKRLNRLKATYFFLRASIRGEILNGADVICGSAIAAGSPELDMIDLPVVFFDEASMATEPVSLVPLMKGCRHLSIIGDHKQLPPVVTSAEAKQGGLSKSLFERLIESTAADGSKIPSTMLNVQFRMHPRLAEFPNKTFYSGALENGSGTDKIPAVESGYWPQVEGKDEAHRLCFIDHKGRESKADNSLSLCNVAEARLAVDVAMDVLRRNPDLTGDDIGIVTPYAGQQILLEKMLHNDTSAERRRAAGALGARSSQLGCIDVHTVDGFEGREKKVILFSTVRTNAQGYVGFLADGRRLNVALTRAQSALFVLGNIDTFKNAQLSEAAYSRVESPDLGALKSYAEYLEQQGAVYTTGQAHKIVDTAEHDDQDVDAAETHSLADAADWQHVMAERSSA

SEQ ID NO: 41222 - protein, 657 aa, Oryza sativa
MVAYVGGFVAQEVLKACSGKFHPLVQHLYVDSLESLPDSVPGLPESEFAPANSRYDGQIAVLGRTFQSKIANARQFLVGSGAIGCEMLKNWSMMGLGSGPDGIIHVTDMDTIEKSNLNRQFLFRSKDVGHFKADTAAAAVAEMNPDLKGKIHSHQNRVGPETEDVYGDEFFASLTGVTNALDNVQARQYMDRRCVYYEKPLLESGTLGTKANTQVVVPHLTESYSSSQDPPEKSIPVCTLKNFPNAIEHTIQWAREQFDELFLKPAENVNAYLSQPDYIETTLKSGSGAKEQLDQIKQYLVDERPKTFEQCIYWARMRFEENYSNVIRQLLHSLPADAVTSSGQPFWSGPKRAPKPLTFNVDDPMHLEYVMSGALLHAENYGLKGEADAALFRKVLGSMTVPEFVPKDNVKIQVNDNEAVNNAGSGGDGDLTDVTSSLPEASSLAGFRLQPIEMEKDDDLNHHMDFITAASNLRATNYGISPADKHQTKGIAGKIIPAIATTTALATGLVNLELYKLLDEKKSIEAYSNAFVNLALPFIAFSDPIAAQKLKYNDTEWTLWSRFKVERDVTLQEFLDIFQNEHGLEVSMLSSGVSMLFSAFLPAKKREERLKMNMSTLIETVSKKPIPAHAHWVIVEIMADDREGEDVEVPFVAVKVK

SEQ ID NO: 41223 - protein, 1189 aa, Oryza sativa
MAYVALCKALYDYVAQAEDELTLSEDDYLYILESDDPEWWKAKVRRLDEDGTPIQDGPDEGTVGLVLANYVEEAEPIRLSRALYDYDAQTEDELSMAEDELLRVYESDGTWLLVKKQGNDPLSGGEGRLGYVPANYVDEAEAVDTGAAPATEDQYDAADDQDDENEDDDDDGHVTAIPSMQMPQTTQLGKGDEIKMWPVSALDSKKKKKKGTLGIGNASLFFASESDKTPVQKISVLHVAGHSLEKGKTLHLQLSPDAGMAESTLDFHCGSKDAAAEIVRKIETSKANALTASSVAPASAPAAPAAPPIAAAAAIPPPPPAPPAPAASLPPPTRTASAVLPPPVRKTVSFQSQQEAQQAPQEAEEHAIAMYDFEAQGDDEFTVAENEHLVILERENDDWWKVRNDAGHEGVVPASYVEATDGPAGGSADPASSAALAAQQEEDERLRQEEEEAEAVAQAERQREAAEAAQRAQERREREEKERTRREALKAQPAPAPPKLTQRPSTTEVSRAAKNVAIPQGRSAPERPKDAGGRSKPSPNNTRMWTDRTGQFKVEAEFLGFNQGKIRLHKMNGVVIEVVVEKMSNTDIAFLEDITGKKLNPTDDEIAASTSAPRRERERERERQMSRSQASTTSGMSREERERERERRKEKEREQRRREQSRTGPKRNVDWFEFFLAAGVDVDDCTRYASAFERDKIDETVLGDLDASTLRSLGLREGDVIRVSKFIDRKYRRDKTASSRQSSRASANPAADLERQIKADEELARKLQEQESSARRGDTVSPAPPQLFSGPDGTLKNNTRRGRPTPKNTGGSNVDAASLAAASESLARTTSPPARVSTVSPAIAPKRTGSAVANGFDDDAWTPRPPSTKPATPARPSAASPAPAAAPPAPTPPPAPAAPAAAASPAPAASPAPADPNSALFEKLAAMKPPSAGASPRPGASPSPASSFLGQSQAYNPNAPRGPFAPVPANQGLLQPLVPTQGTGQFVPTKMQPQQTGYMGMQMTGMQPQQTGWGMQGMQGMQGMQGMQPQMTGFNNGAMSPMSSMGQMGQMGQMGMQPQQTGFGGAGGHGFNQFGQQGVASVQSPQQMMAQQTGFGMGSQQQVQQQQQQQQDKDKFNASNIFQQMKSGSFAKDPNAAPQTSDKYDALRPQPTGFQPGGVMPQFTGMGYGQQQQQQQFGNNGFGGGYGGY

SEQ ID NO: 41224 - protein, 859 aa, Oryza sativa
MPHQPAYGQPGYADPAAQQQAAAYGQPAYGQPAGYEAPQTGYPQQSAPGVAQPGVQGVTQQFSQMGMGGQPSQQPQTVPQAAQRLNPLIPTDISMQGQPFHVSDLDQPPPAIILPPNSSVTPSPHANRPPKYVRSTLNAMPTTSSLLKKSKLPFAHIIQPYATLHDAEDDVPVQYDQVIARCRRCRTYINPFASFLDHSHRWRCNMCNLTNDVPQSFDWDSAKQASVDRWQRPELNYSVSEFVAPQEYMVRAPQPLIYLFLFDVSYAGVTSGLLATAARCILESLDRIPNTDRRTRLGFMAVDSSLHYFSIPRDGSENNDPKMLVVSDLDEPFLPTPEDLLVNLTECRANIETYLTKLQGMFANTQDNGSAMGSALRAGHKLISHVGGKVVCLSASLPNIGHGKLAMREDKKLLGTSKENALLQTQNSFYKSFAVECSKTQVSIDMFLFSAQYQDEASLSNLPRYTGGQTYFYPAWNAARTEDAIKFATEFSDYLSSEIGLEAVLRVRTTTGLRPSAFYGNFFNRSSDLCAFPAMPRDQAYVVEIAIDESVTKAFACLQVGVLHTTCNGERRIRVLTLSIPTTQNLAEVYASADQQAITHYFAHKAVERALSSGLDAARDAVQAKIIELLQTYKKELGGGNMGGGGLQFPANLRGLPMLFLGLMKNLGLRKSAQIPTDLRSAALCLLSTLPLPLLMQYIYPRLYSLHDMPDDAGLPHPETGAIVMPPPLNLSSANLVPYGLYLLDDGQTQFLWLGRDAVPALIADVFGTEDKNQLKQGKTSVPVIDSEMNERVRAVVEKSRDHRGKGCGSITVPPLYLIREDGEPSLRLWAQTLLVEDRADQGVSGAQFVGMLREKVIS

SEQ ID NO: 41225 - protein, 777 aa, Oryza sativa
MNDYPMDAAPQSLSELLQQSKKLTNHLGRSDLPQIQLGLDQIENQSRKLVSKSLRSGSTQPADARAHYFLANGGIDAAQLADTTNAANIASTFEPLQPIYDTDVESYLTHEHQQVVISAIEQGRRETLQDFHRNLDRTMHRDWERQKRKIFEELGQHQPASAAGRDADLDTSASGFGASTSAHTLPSSSSTMLGSNATSQMHGKMARYLMVVSRLNSSRLEGYNLALAHAFIDAISGLGEESKNKELADTINAANIASTFEPLQPIYDTDVESYLTHERRLPRLLKDRFVAEYNSRFRTLPEVHDPYKLGLYKLIGRIDVAKKYPALLTSSIQNWLWLQLSMVRETYDEDADAQDSVRDRFTLADLGHKVEKFGEAYFDPKGNRPLFYFRLLLLCGQFEKAVGFLFSRSAHQVDAIHFGVVLAYYGLLRVPSQAASSQVEYLVVESDAQGGSVASIDFAKLVQRYVRTFSQSSRRDALQYLYLICLHADVAEPVGSEQVRRCHDLIRALVLEAHPTEFQELLGDVRTNGAKTAGLIERNLPLIKIKNEREFLSTIVQVAATQCDMAHRTESAILLYNLAGQHDTVVAVLNKELGARLMEPSSASEWKSDGLSSGASFSAASNVVTLATAILSTYEKQYGYAGKNRDTCRRLLELKKAVGLQSEGRHLEALQTIEALRILPLDGESRKDVVAITRKAEEFKEVDENIARNFSEIVLMTMTMLYKLHQELKESIHRSGTSAMDEYRAQARALMMWAGMLRFRMSSETYSQLTRLDVFIH

SEQ ID NO: 41226 - protein, 496 aa, Oryza sativa
MTSVQLETPHSGKYGQPTGLFINNEFVKGQEGKTFDVINPSDESVITQVHEATEKDVDIAVAAARKAFEGSWRQETPENRGKLLTNLANLFEKNIDLLAAVESLDNGKAISMAKVDISMCVGCLRYYGGWADKITGKVIDTTPDTFNYVKKEPIGVCGQIIPWNFPLLMWAWKIGPAIACGNTVVLKTAEQTPLGGLVAARLVKEAGFPPGVINVISGFGKVAGAALSSHMDVDKVAFTGSTVVGRTILKAAAASNLKKVTLELGGKSPNIVFEDADIDNAISWVNFGIFFNHGQCCCAGSRVYVQESIYDKFVQKSKERAQKNVVGDPFAADTFQGPQVSKVQFDRIMEYIQAGKDAGATIETGGKRKGDKGYFIEPTIFSNVTEDMKIVKEEIFGPVCSIAKFKTKEDAIKLGNASTYGLAAAVHTKNLNTAIEVSNALRAGTVWVNTYNTLHHQMPFGGYKESGIGRELGEDALANYTQTKTVSIRLGDALFG

SEQ ID NO: 41227 - protein, 1140 aa, Oryza sativa
MNPSISIPDRLPVLPLPYPLVLHPNLLLSINISYAHSLSLLKAALQYSTLKDDVESSNDASPRSRHQGRSRLDSNKPIIIACVPTLRAPSGTASSDKPVSRATNPALPSDAAARNLTSPEDNDVRIRINDLYDWGCAARLMRLVRNPQNQTCTLLVSGLTRVRIDRWLSIRAPLTATTIDPKSNLAIPDVPIPLATATAFVDDESWPTFPEASPGDIDLVVRLKKASAELIDAIAQLNPPSDANANTPSPIVGPALPLLPASLLKKLRGFMQDCRESQAALLADIVVGTLGGACEWSERVAILGDWDQRERVRHSVDVILNGVKRVKLARELIVALSSPLNPSNKKTVIRSQLEALLTQLAALNQGVAARISAITSNSSNRDDNKLGGGVIIRAPNSRNNTNNDNGSMPIITGPLGGRRGAKPGIKGMPGGGGGLPGSGGGDDDEDELAELAKKLDQARLSPEARKACDKELKRLARIPQQSVERGVVITYLEIMAELPWEKISADLEPHRDPNEKAVVLHRKSANANASAAPAEEEEEGIVDRARRILDADHYDLEKVKKRLIEYLAVLELKTTQARERFDAEEDAERKAVAERRKATPSASTDDAAADGADDDDLSALAGAEEGEDLVAREQGISKEQIEEEKRRRRNEKLRVGDKGPILLLVGPPGTGKTSIAKSLASALQRPFTRLSLGGVRDEAEIRGHRRTYVGAMPGSIVSSLRKVGVSDPVILLDEVDKLGSGNGLHGDPMAAMLEVLDPEQNHTFSDHYVNVPIDLSRVLFIATANSLDTISPPLLDRTEVIHISGYTHDEKTAIARQYLLPKQIKAQGLAPDQLVVSDDVLLKVAMGYTREAGVRTLEREIGALARAKAVEYSQSKKGTLRDDNGQPKQYDPVIREADLEKYLGPDTYEPEVAEANARPGVSTGLAYQGSGSGGILHIESLLLPPGSGYLKLTGSLGDVIRESAELALSWVKGNAFQLGIVRTRDSEFPKNDIHLHLPSGAIPKDGPSAGVAMTCALVSLLTKTPISPYLAMTGEVTLRGVVMPVGGIREKLTAASRAGIRKVLLPHRNRKDVESDLPKKVRDELEIKYVKTVWEAMEAAFGNKLFENAALALEANGYGHEHEGIREGRRLMHEIEDSRL

SEQ ID NO: 41228 - protein, 917 aa, Oryza sativa
MLTSLRPRSPPFFDVAARPQPHHITSTLHPAHCGSPAYPSQMEGSGARRYTTPPPGRQAPPYQHTPSHYLADAGPHPLEQRPSPQSRQRSWHHPYMSTSRGAQGPSPPAPLEAGAMPLTRAPDYGPHDPLAHGLRHNTSPSYRSEPLHPAPDARSRASSRAEAQPLNISALPTHPSRDVERIGGIGPSRNRGRSSTLTLPHPDTTRVRGSSFIGARQHTPSYGPVHVKYDEQSPLPPRSWDEGRSFRDGYHNHGGEMYAHRHHSPGLRPSSRESPILFAPLSPSQDPHMQVPRRISGAQHGNPSVMARPGQYRSRPGTPVSPLNMEGLSMEEASMPSASGMAVPSLHGQGRSPAEARVRNDYFGPAAAADWTRQKHKNGDLAASPPSVSYAPGLRNDPRDYGYRPATGMHGEVISPESEMARYHQASYPVGQPPMHPGRAPGPEPIHHHPGMSRLEQIDRERFAAVHHPVAASPDTYLGAGATQDHGFHAEYTSQPRPGSAGTYVANAPQQNAPVDRIAHSRRRRRPPYSYSSMITQAIASSSEGRMTLRGIYTWISSNFSGYPMAGPDSQGWQNTVRHNLSLGKIFIKKARTAQDIYDSCSSGNPSQSQAARGKGGWWTLHPVVLAQIRSGQRTHNDEFDDVERLVETENAAAKEGAVARVAGAAVMAATSSVSSADGRSAPRRSSAEISQHKTLSRQRSYSDSMDPTAVEHRRVGASQHALTAPVSRKTSIGASRNEANARTAYAPYSTPLSDRRISGSSSDRTRVDMPSVLQTKLGGGANDERVQALGRFRGHTIGGLESSSPRRSNSMPQAEMDGAGEEAHPHVLRRLQPDASTSPRAAGRVRAQMVEDVEMEPWAASSRPSSVVLQEARETLANTKQQQQEQMLRQAHDDKVALADAPEGAGRMAIRGLLNS

SEQ ID NO: 41229 - protein, 1014 aa, Oryza sativa
MADAQVLTPDQVAQPLAAQQQQQASTSSTSSASTPSNRLKTSFEKRRAFEPFYTGGATALTPDGTLLFAALNEDVSVVHVATGNIVQRIDGDTEEITALAVSPDGARLIVTSRSLSLRVFSLPECTLVRTVPKAHASQVNLMCVDPTSTLLATGGSDGVAKVWDIAGGFCTHAFKGHAGVVSALAWNLPPAETATKSAKKGKKPQRVMHLLTGSVDGKVRVWDLNNQAELHKPVATLAGHDSVVRGIAVAERGDVVVTGSRDRTLVVWRLGSNAPSAAAWKQAETLSANEGIESVGFLPTRNTFWTGGSDGQLRLWDVSSSTIIAREPRSFNERLAAHQSDDEETRAITAVHLVSPAQGEAWLVSVHADLNIVVRSASPTQPLKKVRQLIGFNDEIVDVALLASHGAAETHLAVATNSRALRVYELGSDETSAELLAGHTDIVLCVDRSPDMRLLASGAKDRTARIWAWVPTNRLSPTDTTDADGDTGKRIRRPTAALSDEVDSSEGEGEGEWVCVAVCEGHAESVGAIAFARRATKPGAPYAPFIVTASQDRTIKLWDLSPLTALLESTAAISAPLSLKSLLTQRVHDKDINTVDVSPNNAMIATGSQDRTAKLFSLSFSSSPSGSSARVTPLAVLKGHKRGVWACRFSPVDLALATASGDKTIRLWSLSTFASVKVFEGHTNSVLKLGFVAAGMQLVSCAGDGLVKVWNVKDEECALTVDAHDDKIWSFAISRDEGWFVSAAADGTMHVWEDNTQQRLEVEREQREDEVRMEQQFANLLTTRDWRNAIVLALQMDQPRRLLNLFTQVANSRPDTIGGLIDDALGGSTGGDAGSITGLASVDGVLATLSGSQLIQLLNYVRDWNTSTRTSAIAQTLLHAILSTHTAASLLALFDREAKTQRAAIAQRAEDEELGIALPRTDKVRAQQRRQHQQLTLDLASLVDALTAYSQRHFQRADRTRIEAAMLEYSITAMDSLLGPQDDDDDQPQDAFGDQIHLESEQEQHEDSDVDMSE

SEQ ID NO: 41230 - protein, 641 aa, Oryza sativa
MDYFKSLSSAASSVLSATRSGPLANFTIGQELVEYRSRSLWSLHSATKRDDNSACTVLAFDLSHPHNATRANLLPFAKNAARKLRTTRHPNVLKLLDSAETNWSVYIAVEKATPLYKVLAQSEDKRATPQRQDWIVWGLSSIVSALKFLNADAASTHGNLRPESIFITAAGEWKLAGFEALTPHAEAPHGLLFTQGSLLPDANRYAPPEVRQNGWNILSSMDSTLLDSYALALVAIEAFNGPLPPQTGTAAPPRGHVPQQLYSALQRMLVPNAKTRSTVAKVWEAGEGEGGFFKENTLVKAARGLDGFLLATENEKADIIKLLQQKPDSFTPDFLMYKVLPTLVAALSAVPPPGTIPSASTQASVLLPLVLRLGQPLPNDEWTANVVPPLLKAYASPDRSTRMALLENLSLYVERMDNRTVTDKLWPNLITGFNDSVAVIREATLRAILPLAPKLSDRILNNDLLRVLARTQVDPEAGIRTNTTILLGRLVLHLSVSTRKKVLIPAFSRSLKDQFVHARVAGLMALMATGDSFDHDDCARQVVPAVAPCMVDKEKLVRDQADKAIKMFLEKIKSGRAGMPDTALSPEQLDSSTSFSSSTDGTNGAGYASSMAASAGSAASALAGWAMSSALSSLSNSSSAP

SEQ ID NO: 41231 - protein, 1182 aa, Oryza sativa
MSEASAAASAAQTSLPAVQNLHLSSAQASTSSVQPGREPSRGSNRGRGRGRRNDGSRADRTAKATDRSSSGADGTPSSSSATAQGARKPNSKKKSRRGGSSKPSQSNGFAADVAAESTASQQDNAPQPRVAARRQQFGGKLTGSSANAGDAPASSAQQGAKASQNGRAKKPAVKVPAVAEPVEYADLRSRLLAELSSGEYDCVICYSTVTTRQATWSCSQCYSVLHLPCVRKWADSSVKKAEEHNAMQEDPEIRNRRGTWRCPGCQYAREDVPKIYWCWCGRTQDPPGGRGANPHGCGQRCSRGKCAHGCADSCHPGPCPPCAVTVSQKCFCGAQTIPMRCSQTAAKEARLSALHQRGTSCGGVCGKKLDCGSHTCEDVCHPGECQPCGIQVDARCYCGKRTRTMRCGDGVPQDSFDDESAIGFQGRFNCDDECRRPFDCGVHYCSKPCHARDPQRPVCPSSPSLVKTCPCGAIPVTSRTSCQDPIPTCGNTCSKVSICGHPCPAVCHLGPCPPCRVPVSTPCRCGETKQSRTCHERQQEELEGRQEVLCSTVCQSLRHCGKHQCNRQCCPLYFQAKSKSKKRPTLAELQALDPAGLHECSIPCSKPLPCGSHECPMTCHRGACPPCLQASFEELICHCGRTVLEPPVPCGTQVRCNFPCVRPPPSCGHPKMPHDCHEDEPCPPCVYLTDKVCHCQKHIVKNVPCSRWRVSCGQPCDALLNCGFHRCQGICHIAGQECSPCAQTCGKPRRLCQHACQEKCHAPSSCPETEPCQAIITLQCACGNLQSRIKCGVSIHAPNKEKSLKCNDSCMIAQRNAKLAEALGLNPSEKTAPASYEYGTLAYCAVPANRKFCDELEATLNDFIRSPRAGMILPPANKFQRAFTHELAAVYKLASESVDQEPRRSVSIRRKQDSRIPKPLLTEAFASARATLMSNQHQPSSSHLQSGKSVGLAQLQRPSAEAPKPLNAVFLPGVFGHDQDSLRSLLQPVLRAINFVVTWKGDEDVIVTSPDSPTRLIMMKTELKALLRREQFARDAILCTVDANKNVVRREDEPLLSNGGRASGGAARGSLAMKRGGPGVGGSGSGSAGLGKASPNLVGDRGWASVASGSGRNSPAQVNEPVWGQPTMAAQTNSVRTTAPIAGIIPNPNAPRPAAADVPAAAPATEASTAEGPVPESWEDES

SEQ ID NO: 41232 - protein, 944 aa, Oryza sativa
MSNHPAWHDQQPQYPPPPPQPTRHHSGMDAYQGPSPSSSTQQPSPYNSAPQHTASYPHAHLPPPAARHTPQQQQQQQQQQQQQQQQQQQQQQQQQQQHPQQPQWASGTSQDFGGPSPANSAPRSNSGYTGFDPPSASNNSPMRQHGGSHSSAYTSHSPYAPSQSHAPDAAMHPQRSSMPSHYDYQNNYPHPHHPQNPQMPPQHHPHPHPHPHPHPHPHPHPHPSQQQHHQQAHWNTGPLPSVLQPQSAPLSSTPSSNRGPSAPPPPQHHTMDRAYPNIKHDDDMDDDDTGNYDDFDPKGKARAAADAMQAANKGTSDFVKKLFSMLDDKAYDSVVAWSPSGESFIVKDMNDFTKHVLPRNFRHSNFASFVRQLNKYDFHKVKNPEDGAATVGEHVWEFQHPDFVRGRDDLLENVKRKIPAKKKPAKPGLVDADRDDSPAMPAPVQMEAPERAESNAELRAQVAHLTAAQDQMQNHILALTKQYQGVIGEMLTFQRNTIQQDQLMQNLIQYLINLDQDRRVDGAPAPPSASSFLAHMGANQGFLATPAPASAGPHTVGVPAPVSGADAGPSSHAGAAPPLSPKSVASPLDATGSTPEISAQLASLRQSNPLAPMMLHPPHLDADPADSSLVNAAASAARNPSLSSFEKAGLRVFTVGTLQPRDSPGDPTPAPPQELAPAGLRNGSAGSSFDVHANGKGKEAADDKKRTPTPGEGHPSKHLRVRRSTLVPGWAVPPRVLLVDDDEVCRRLSSKFLQVFGCSIDYAVDGMSAVNKMNLEKYDLVLMDIVMPNLDGMPATSLIRQFDPRTPIISMTSNSGPSELVNYMSSGMTGILPKPFTKEGLLNMLEKHLLHLKAARGTGQEWPKGVSPAPAATPSGTAQTGADDGTLNPLAGMGFTDEEYVAMLQNLIAAGTQDDEAFGIDLKDGKRMADESGGENKRQRFVDS

SEQ ID NO: 41233 - protein, 1190 aa, Oryza sativa
MYRSVRALSRGANSAASQVASTSNLKLPSVARSLHSQAATASLHRASLATSGTKIFRSRFSTSALLKEPAPTAVAKAAVEDIQPAATGLQKWSKYLPKVERSDVKKVLLVGSGGLSIGQAGEFDYSGSQAIKALRESGIETILINPNIATIQTSHHLASQIYFLPISPEYVAYVLEKERPDGVLPTFGGQSALNVGVKLDEMGVFDRLGVKVLGSQVDVLRMCEDRDLFVQALDQINIPVAKSEAVSTVNQALKAAAEIGYPVIVRAAYALGGLGSGFADNEDELRDLSARSLSLSPQILVEKSLKGWKESEYEMLRDQEDNAIICCNMENFDPLGIHTGDSIVVAPSQTMSDDNYHMLRSAALKVIRHLGIVGECNIQYALSPDSREYRVIEVNPRLSRSSALASKATGYPLAYTAAKLALGYTLPELPNAVTKTTTACFEPALDYVVTKIPKWDLSKFQHVNREVGSSMKSVGEVMSVGRTFEESLQKAIRQVNPAYDGFDAYIAPEDLDHALSVPTDTRLFAIAYAMLVKNYDVERLHALTKIDRFFLYKLQNIVDINRQLEALGSLSAVDKELMKLAKQRGFSDKQIAKLTNSKEHEVRAHRKAFGLTPFVKRIDTVAAEYPAQTNYLYTTYNASTHDVEFDNDGTMVLGSGVYRIGSSVEFDWCAVTCARKVRDMGHRTIMVNYNPETVSTDFDEADRMYFEELGFERVMDIYELEGAQGVVVSVGGQLPQNIALRLKETGVNVLGTDPLMIDSAEDRHKFSQILDNVGVDQPEWTEATSVDKAKEFANRVQYPVLVRPSYVLSGAAMNVIWDESTLEHHLTAAAEVNTDYPVVISKFIDNAQEIDVDAVAYKGELLVHAVSEHVENAGVHSGDATLVLPPFSLDPNDLARLKVIAQKVAKAFNISGPFNMQVIRKPPTEGETEAPLKVIECNLRASRSFPFVSKVLGVNFIDIATSAIVGKDVPEPVDLMAQERDYVAIKVPQFSWTRLAGADPYLGVEMASTGEVASFGKDLYEAAWASIASQTAFRVPQANTGVLMGGDISKEQFPRIAKKLFDLGFKLYCSDAEVEEYINSLDGVRAKRIRFPVKDKRKLREVFDEHEINIVINLAKFRGRDLLDQDYVARRNAVDFGIPLLNEARSAELFVDALKARMPHGCLRGYEEGKIPSEVQPWKYFVKEEAEAHK

SEQ ID NO: 41234 - protein, 1053 aa, Oryza sativa
MLSSRAAAGGDPTEVSETAQALLKAHYGRLRTATHSSDRAVLTKLESAAANLERICLQLDNIQVAHELRSGQPSAHQASRILQPLGALAFWPAQLHLKDASVFVRQDVAGLSIADQLALEDAALATLTQSAGKERITSSVRLNEPSRTIEVTYVKTSIKDAQSHLQTRRSRFLEHAAQLRDRIAPDSGTKQDQALPKDIHMVNDENQALNEEGLPFFEPIEKVTDEEAAQRKEAYMQPFVRDNDERAADKHKRRLWLEQTLSKLEQEEEQEQDDDADTDAAVEPSTSAADSSAPATQKDDAIDAAEETRVVLRTRTPSPPPSPEDQANAKSLPEIVSAARPPPAKSALKMGLARPPINQRPSFGASGIRHGFLNLNPSSPGAIKSSYSWEDLEKEDGQERPSRSHTPTPLSRTSSTAETSLLGRVTDAASSPMTSGTSTPTKKSVRIKSPERAHPEASARSGLTPLQRALRSSIRVKENYADTTPAPSAAADAASARADSGSGTAEKRHRDDVGVEEEAERIVALLGPDVVEGHPSAPPTDVLRQMQQAHEEDQRLSTPEAVAARQKHEEEQREKERMQRLAEKPALGHAVMERPKATAGAAEGKSAANGATKFSAFKKGFLSQKPKFVPNAPGPRVPTAPTESLGMSALDRASMGDDELSARRQAMGLPAAVPHAGPSKAYAEKMRQRQEGRVEQDASRPGEGAGADSEDEYFDSYLSSRSRRAAAADSRGIDVDHDGNDDDDDGDDFDDDAEDWDMDDDFDDDEDEYDYDADDLMALAPPMGGDADGLASHPDLMKEYEQARAKLAAMGLAMPGSSGAGSSSAAVLPAEESDDDYEDDVVPLDAAMEDPEYQGNTVSDTSGRSRISRFKASLQQRSSAAGSSQKLEDLLSSAQNLGDGQAANGATSASAAFGMDGFDGPGEKGPVMIIPQLAPVRFPKDGDLVEGGVTGPVALGGADSDDDDEKAEMVMRSRLERREWKQNNPEQARREKESRHNRDMVEQGLAPPSVAPRRQADKAEEHAGAGEGGMQKEEQQQPKPKKVSRFKAARQAQ

SEQ ID NO: 41235 - protein, 769 aa, Oryza sativa
MPSVEDPSLWGVPCKPGRERDIVMTLVRKAMAENFTSNPMRIISAFCRDTIPGKVYIEARRADDIVKARNGLAGVYARQTTSLHLIPISEMADLLKLQKVQNEIQVGGWVRIKRGKYAGDLAQVLDVSENGEEVGLKMIPRIDLSPKDSGIYTDSLGRKRKKGPGASAATVAFRPPQRFFNPEEVQKAYPKDTPTKRGTVWVFQNDSYRDGCLEKDVRVTGIITENVNPTLDEITKFAGESSAEDGMSKLGAVDLSLIADASKKATEALLQPKDQVEIFEGEQAGMYGTVKAINNEVITIQLEHEDLMDQIVEVPARSVRKRFKPGDHIKVMSGKHADETGLVVKVEDNVTTFLSDLSMQEVSVFSKDIRQAAEVGSGVNVISGYELHNLVQLDAQTVGIIFNIERESFKVLDQTGQVVIVKPHQISSKKDTSRAFALDHDGNEIRAGDMVKEVSGPFSRLRNGQVLHIYQSMIVFLHNREYTENGGVFIARARTLEPLAPKSVSTKAKKEGDDLSRMNPALSNLGGGANDVRVEGVGRFGGRDMHKGKNVAIIKGPYKTYRGRITETTDNMARIELTSVSKPITVRLDWLVEKDPITGASSKLTGGGGGSQGASRGGYGGYSGGSSGMGSMSSNPYSSSSGSMGAPAGGAGYNPYSAPPPVSAGGGYGGSPSGAGGWDSGYSQPAAATASGGYGGAASAKTPAYNPYAADGGKTPAYNPYAADGGKTPAYNPMGDGGKTPAYNPLGDGGRTPAYNPYADGGRTPAYYP

SEQ ID NO: 41236 - protein, 1135 aa, Oryza sativa
MASQHPLSLAAISEAAATASSSAAATTTATLASALLSLGRHPPAGTPGNNGSTDDPAIPLPNQRAFEGPWFSQQVSLSLFIGLFSFCIFVIVRRRNAALFAPRTKLKGFSPLDDGHDAGYFGWIMPTLKTEEMRILQTVGLDAAILLSFLKMGFWLFFALSCWSVVVLMPVNYWQNGVLDGVSPAEDRDNATDPNSFRDTVTGVWTQLIYDTFTKKHDDPNAPLPQLPLPAKPPQAQVYHAVHLLSTYLFTLLAMRAIWINYQRFVRARQLYILEILESIPARTVEIRDLPAHLRDEKALAEYFENMDMPVESTAVVRNTEGLSRLLNQRSNALHNLEKAWVRWLGNPTDAEGYDPEKIMLLAAGAHDDVVEPSSDDAERPRQSRDDLESSRLLGPSATTVFTGADTIRTHRQRPTMRRSWWNPFSEKIDAIDELTRQFNAVDRAVRRRRKTGRFPGGNVGFVTFQSAASAQIAAQTVHYPIPAYCATSMAQEPRDIIWSNIDLSNNDRRVRQVVVSIFIVAVLVFYIPPLVFLASFVSPGAIKKYMPWLDRLLDTDERLRALVQNNLPSLVVIGFNALLPLVLEYSSYLQGLKARSLVEYSLLKKYYLFLMVSVVFIFLIATTAWGVLQELAENPMRVIDKFAASLPKARFFSLSYVILQGIALQPLQLLQLPTLILRGFYRLLLTRTPREFAELNAPPTLAMGNVYPQALLIFTLCILYSIVSPLIVVFGAVYFGIAYVVNKYKLLYVFYKPYESQGQAWPISASRCIWALVLFHVFQFSLFSVRKQLLMSTLMLPLIVFTFWFAQHLQTTFGPLTEHVNLSSVVEVLKEVEPDPATAGLAQNGPPSMARADEVTTDTSGPTTPRQAQGLTGANSSRQLLSLDPSHKIDPEFTKLSLKRYSHDEEDETLFVAQRDTKTDYREPPGAGYYPGVLNTGRRRYGHPAITGILPELWLPIPKHRMDEGGDDVTAPDDLEGQTALASGTTALGAPARERVESGTGVQSAARIRARALSKAEPLILSLRKRKSSLLSRSTRTPASESSPAHPDTDALGVWSDGVAGPQGSSSSAAIGEALSGPYAVAPARKHVRENQGADTDGADLDQEEGVYIHRAASLARPARPRSGVPTSKTHYHD

SEQ ID NO: 41237 - protein, 997 aa, Oryza sativa
MDDYDEFGNHIGPLSDSDIGSDDGDDYQQNVAPPPLQPSAPLEGYDDTHDDDDEQRLADIEVDEDGNIIPQRQLIRVDEGPSNAVVLHEDKQYYPSAADIYGDDVETMVQEEDAQPLSVPIVEPVVERRFAVQEDGLPETRFDRSFLANLMGFPDMVRNVAVVGHLHHGETSLLDMFVYETHKIDHDMDNHLRYTDAHTLERDRAISIKSAPLSLVLENTRRKSYLVNLIDTPGHTNFQDEVAAACRLADGAVLVVDVVEGVMCNTAHVVRHCLRHKLPIVLVLNKIDRLVLELRLPPTEAYYKIRHAIQEVNNLIASIDADPALQLAPERGNVAFASTHMGYCFTLRSFAKLYAETCGAGVDVDAFAHRLWGNIYYNPESRNFSRTPADANTPRSFVHFILEPLYKIYTAVLSSDTPSLRRTLATLGIRLKPAVFKIDVRPLLKIVLGEFFGPAQGLVDLVVDHVPSPRAAAAARLADAYTGPKQGAAYEAMAACDADGPLVVQVCKLYATVDALEFRALGRVMSGTARAGMRVNVLGEGFSPDDDEDMVGATIDSVAISETRYSVHVDGVAAGSWVLLSGIDASLTKTGTLVDATVDTEGMGIFAPLEHMTQSVLRVAVEPLVPSELPKMLDALRRVNKSYPLAETRVEESDEHVVLGSGELYLDCVLHDLRVLFAGIEIRVSDPVVRFCETVVETSAVKCYAATPNKRNRLTIIAEPLEKGLAEDIESGAIDVHAPPKVLAKLLQAKYGWDVLASRSVWAWGPGERGANVLVDDTLPSEVDKTLLYAVKESIVQGFQWACREGPLCDEPVRNVKFRILDASLSPVPMHRGGGQMIPTARRACYAALLMATPRLMEPIYEVEVSTPQDGIAAVYTILAKRRGHVVQDTPKPGSTLYTVKAYVPVVDANGFETDLRIATQGKAFCLLMFSHWSIVPGSPTDTSIKLRPLEPAPALALAKDFVLKTRRRKGLPETIALASYLDADMTMALVQAGIEI

SEQ ID NO: 41238 - protein, 856 aa, Oryza sativa
MAVATDPSKAGGSSSQDSVLSSVPFRDSSVPRSRKVAATTAMQPPVASSSHTSRTAPGLAYSTWLVLDADDSARPFLSALQAKAAGPSIVPSGAVSPAARSAEKLTELTNTSTAAAAQAARKASASSHVRVQASKFDAANAEAKDGVNGLDKDRRASLQHAASHAGASASITGSIGRRSFMSRLRGAGGSVSSASVFQAQGQQGAEDAASVSASGSWSIVNTPAPIKEEGQDASAARKVVFAFSSMATSSAVQQASGLVARCSAMLSLSPEDQIVEQVHPDRVDATSTAALVQTHRAEAIYIGSAQSSTSSTQLYAFLQAIVDASSAPVKFIAVEPVTVRRLSAEQAAALFDAARTRRVQLSLPPRWTVMGRTDLDETLQALELLHEVEAEQARSAQSVGDNEEADVSGNFDVSLSNIPTGMSSDKLDESAELETVKAQVAQLERDLQNKDRRIAELVRQAEALTAENKAAKVASELASIPATAAAAEEATAVSKADTSAPAPPATISASAVAAGTSAELLKPAEEQAPTTSHTPVRTPTARQLNSNAAATPMSTPVASSSRNLAAAVGSNTSSPHGAVAGALGAAAAITGSPGSPSGGARSSGKVIATLTAELSETRAILEATRAALATVRTQSAAYQAQADEMRGTLSRARLENDSSVGILARKDRQIVEALERARKAEAEAKELGRAGREWGTRVREVEDELGKERIKRSRAEQAYDALSSEWKSARERLRAEVDELRTTHTDQVQALAKEYDTLLAFKTRLQDHANITIETGNADFGAHALVKDLERVNTDMQTYLSTQVHPLVDRMAKLEQRENQDIVDRITMLTDELTRIKTLMRRGDITSPDQIPPSTL

SEQ ID NO: 41239 - protein, 652 aa, Oryza sativa
MRNPPPGPAPTAALPALPGLPSAPAHDDAQRTESAATGEATDQHQDGDFNSRRASRQLQRPLILPTLRSSSSFDRLSNMQQAAGGTSAAQPSMGPSPPRSGGVGADRKVLTLSRNASTDELARSLDIPRDTVRQMLDTTQHVWRNHLLGSSALNMKFEASSPQNHDQLPRSSSSPMLSTLFASHSGSAGGVARDDGSRVPRSSAGGIPYISSSRPSFEQQSPSWAVVGDAADGQRATLLDARAERAKHRRTFLGRSSEDGLTANYNFSRPIRRDATGSDQGLGSSASMPSLAAARQAPKPPALLQSPLLLKGESEATGFAQFAVDDEEEVLADSASEAHQLSSAGHALHTEEQHGQAASVLTSRSGPFALHKPMPALPGQPMPTSPRLVRRNSDTVLNRFAPEFGKRAPGELHAWSVCIDDDGIPAIRPSASAFHRPQCALAGKTNATWQCGCRASHGADLAATPSSQLSRFATPALTVLGQSSPGRNRSLSASSVMDPARQAQLWSQVERNKELIRKHEQEIAGLQEQVVRISTEIASARPSFSSTLRTPELASATMMPSQSSKPVANVVARKPLPQISSSDADGSRPPVPSKVEAAEPFPSMSATAKPGSALASSEGVAGTRTLRGRIASLSKINLAGRDEETRESNRWT

SEQ ID NO: 41240 - protein, 966 aa, Oryza sativa
MEGEIAETQAVADHVAPPTERHADEAIITDLNHGPGEQLLDAVTATETRSLGKDATTKADVPVVDAPTDTTLLTTTSAAGAPVDAPALSSEVLASQPLQPSADTDNHAANVIDQISDDQSAGEPHSADQVSDLATSKEDDESFVPPDMEHIVSTGATQDSAASMQALRELVAQARASSGQPRESLPPGFGDDDMEASAAPPTTEQRGEKRKAEAELEDLLQTSSGIEEAKAAAEKSQHPETKTLLQKALSSLSGLVSRRPKADASQTASAPSVAAKRDKVADEESDSDSDSSSDDESSSSDSSEDEDEDAENNAGNADQALAADDDDEEGGGPGGSSAPATKNEILAPEVEQPAVRMLSDTDKVTLRKLGKVHSIVDSVVVVEQDVQQTSKSDPASSNPAPVDSTGRQGEREGEYSVLDTGSLLCFDDGQVLGLVFETFGSIHNPMYSIRFPSAATIDCDAVQTRRPVFYLPGQSTYVLTQLLRSMKGSDASNMWDEEVADDEIDYSDDEQEAEAKRRVKAIRSGKVDEQGNPLPSNSNRSNKRQKQHAAAAGNHTSGPHHGPAGPSFHQGPPQSAAGARSTMTSAYNGPNAGPRRNAGQAQPANPLPPASAASLGPAFPHGIASLPPKPSAGLPSRPSFIAEPPSSSAPRPSAPGRDPTGELSSMPRSRVGTAEGHPSGQSHSRMSSGASVNLPAKPIDAAAAAAAVAATSKTGSPMPPHRAPASAGGMGSPSQPSRLASNPASYPSQASPAWYSGSGPATPNTPASPAMPSPHTAGRGAAYSPGGSGVSQPAPTGHYNPAYAAHWQHGYAPAPPSAAPLHAPGAMPWNGSQAYPAPPLHFGQGGVHAQAYPGYGGGYGQYGAGPAGAWNGSGYPSMQYNGYAAGPGSSAAMQNSMHGQHASAVPPHAYPGHAGGGDAYSTYGYGAPSQQAPGAAGADRYDPRSPAMASNGNTSSAQPDLGPQGQ

SEQ ID NO: 41241 - protein, 745 aa, Oryza sativa
MPSVQDITNGVDELDIIDDADIDFSDIEQKYSVKFDEGLDDVIVIEGVPVITESRQQKLFETIQKRFKTQAGIDIAVDGMHIPYADNGESKGYLFVEMASAEDAAQAIRQMDGYAFDKKHRFSVHRFTDVEKFASLSETYEEPAEEEFKPREHLRSWLADPAGRDQLVICRGDDVEIAWHNRSSDPQVEHSRPRWTESYVQWSPLGTFLTTFHRQGIQIWGGPSCERFMRFPHPGARLVDFSPSEKFMVTWSHEPIQVPDNAPIGPQFFGPEDEGNRIAVWEVRTGHLLRTFPVPQDENGQPGQLKGFSWPFLKWSPDDKYCARLNPGQAISVYETPSMGLLDKKSIKVEGVVDFEWCPMGDKDREVAEAGKPNKKARDNMIVFWQPEVANQPARVTVMAVPSRTILRSKNLFNVSDCKLHWHPQGDYLCVKVDRHTKTKKSMFCNLEIFRVREKEFPVEVVELKDPVTAFAWEPFGTHFALISSNDPQLGTPAPGITIKTQLNFYHLHPKGEFRPLKVLDNKTLNTLFWSPRGRHIVAATLGSSQKFDLEWYDVDFMHEVRQGNPSADPADDVKLIGTGEHYGITDLEWDPSGRYVATSASVWRHSLENGFAIWDFKGQELQKHIQDRFKQILWRPRPRTLLSKEDQKKVRKNLREYSKQFEEEDAAEESNLASAERELYQRILEEWKAWRARSRRDLEQLREDLGREAVGQSVDHAKKLAEEATEEVQEWMEEIIEETEEVLA

SEQ ID NO: 41242 - protein, 963 aa, Oryza sativa
MSITGTPKPKKERAKPKPRSKSATKITRFRKITSCLQCREKKQKCDRIKPICTNCRENPTDDPCHYVDDRKRPGSDEDDFAGDSSIGSPMVRKRKEPEDAFGSTNGRIFKRADFPRLDDRRQAVMVQTRREQVEKLELVGKDRSRDFNTRVNAARAAAIAGVLFESAITLPTADEISALLYTFKTQVEPFVNVVVIDINIARIQSFLRWWHSKPTTMPADPALVPLLLVLLALTLQVKRNSPEHEGHNLRNFDPIPGVQCSDERTLLSVAGHCIDALQIACPSAWSSAFQAPIDLIKASLLRGIWHLNELNLQFAGTCFALTTRLAHAAGLHRDPEHWSGMRIEEAQARRNLWWNIVFYEVAHAHRIGQPPCLTHEGFDTRYPDDYDALYAMYERAGLADPDPSRIILPPGATALVPRVPSQANFDYHWSRFRIYHIFLRQSQQLFRFGISSPPDPNLNDEYAKWRENLPDKLKQHFERRSKGSVRPSDELLAQVAAQSFDKGVYDPKITEELQDYQQAYSLEFIYNQCMITLHRPYIDEQGAWKPPESVQKSLEVCLQSAEALISTVEDVLAVKPANSMYNQCAYFAFNAGLILAIHCKLDSSSQVHRPHIEKALHLLDELSSMLRLTNVAEQAGRYSSTLKQMLHGIGGDIASLATSKPDGSAAAAGTGANGESIADAKSADGARASGIMGAIDPSLGESEAKDSNDDSARTDVDGGPDRIPAFLLPFVGLPTDPHNLGPQTGNSYWNEALLDRPLVGVPVAYPVGFGQGILNHSEQHNGSAWATEQQQGEVESGGASGLPTGAEAHSQAHEATDAGAGTSGVEGGEVGESSEAYNLYELLGGRELGTEMPDRPMSFSQHYNHQNPGRGDQASSASYRTYVQNSLARTYEQQQAKAGTDKAENGLADAMPSESALNAVAAAAAAAAEAEGKEALDPAAQGNNLAGMWYAWENFSQMLNNRQ

SEQ ID NO: 41243 - protein, 535 aa, Oryza sativa
MTPIATTFVWPVPPCRWTVSSATGRYRFGYGYGGASSSSTAPAAPTITRGPTPLLLLVVPSVPAPLVPAPPAPAPHLVVPHGGWTVSPTTDNDRFGDGGASSSTAAPLTPIAHSAPPETTPYVPALPVPTPSTVALVGLTVSPTTARYSFSYGGASSSSAMPRAPTASLALRAPPHLRAPCGLAPPVPTPPALATHVPMPPAPAPPVPTPPAPTPPAGVPPRFTVSSTTICHNFGYDGASSSSTMPRVRSTSLSLRAPAPHLRAPSCTLAPPAPTPPAPTFHVPTPPTPATPAPPADVPPGFTVSPTTTCHSLGYDGACSSFATPRMRTISLALRAPAPHLRAPRTLAPPAPTPPAPATPVPMPPTPTRLVPTPPAPGPPADVPPRFTVSPTTTRPSFGYDGASLLSATPRMHTTSLALRALAPHLHVSRASAPTVPTPLVPAPPVPTPHAPAPPADVPPGFIVSLTTARYSFDYDGVSSSSSTPHVPTTSLALRSPAPHLRVRHMPAPPVPTPPAPAPPVLRCPRLPLQFIRRP

SEQ ID NO: 41244 - protein, 1055 aa, Oryza sativa
MRLRWIRGGASLHSAASRRDCVRSVSTTSALYATSNGAAKVTSMAARDSPKIMLDEYGRERRPLPPLASLAAAVEPETAPREVPVARLKRTVRRTSVTAQREPPQADPNPELGSNLGQEIASSDKKKKKKEKKDKVVRDDKDNATMSVLEASVRKDLETYPDAILLTQVGSFFESYFDQARTVSSTLGIKLTSKLFGRGVHRTREPFCGFPISHLKRHVSTLVEHGHKVVIVEEFKEAGATVAATTVTRRVTRIVTPGTGVDEAFVDLDAMNFVLAIGAIEPEATTTTAATTTTDRPAGDPAHDDDAIGLAYRDISTGASFTRVSTLASLRDDLQLVNPREVVIDERLEQTRVGTEILGILNGERLRESLMVSTVSTNAIPSSSRVVASARSNAEDVLLAYLAATLVDLPAPPRSTRTKFVDPAEVMQLDSVTLKSLEVRESLRGGLKGSLVHAVKRTVTPGGTRLLTERLTSPSTNLDEVHARLELVSVFLNALPHSRSYVRAILRTLDDTPRLLQRLYLQRGSAFDLLGLKKTMRALDTIRQDIDARIPPRSVGGGAGDDVRSGFESRHQVDVLVKAIDKLGQFDALALEIEMAIDEDALMRRTRDEERKAMIEDAYGERHREREEEEETAVRARGDGLWGDDQTWVIKQSFSRALERLHDELKRLRDEAYRLQTSLRERYESRNLTLKVLPKIGAAAHVLTRDGVVKLEADERAHLYQKSNSTRAYVLRDWTLLWKKLEAVSSEIERVERDTISILTARVLDNYDRLLATSDALAELDVAIGFAELAQEKHWTKPLVDSTRSLEIVKGRHPTVETALLHQNREFTANSVTFRHPHDDHLEGDTAFEPSFIHVLTGPNMAGKSTFLRQTALITILAQAGSYVPAERARVGVCDRVFSRVGARDELDRDRSTFMIEMDEATTILAHATSRSLVLFDELGRGTSPIDGVAIAFAALEHLLQVNACRTLFATHYHRLGDLLGYDESDAKGTGQWRGVEFWCTDVEEDFDSVRYVHEIRRGLNKDSAGLVIARLAGMPPRAIATAKQLRDKFLAGLV

SEQ ID NO: 41245 - protein, 1048 aa, Oryza sativa
MDAAGLRSRIEATLATDADHRRQAETELKAAEENPGFLDTLLTILENEQNPGIRLSATVYFKNRVTRGWSLPEDSTGIKPISDHEKAAVRSRLVPVLARAAPNTRAQLVVALQKILHNDLPKQWPDFVDLTMTLLNGSDMPSIFAGLQCLLAICRTYRFKLGDSREDFDKIVEATFPRLLAIGNGLVDEESLEAAEMLRTVLKSYKHAIYFELPMQLRSHQAMVDWCTLFLRIVAKQAPQNAMMEDLDERELNHWWKCKKWSYVNLNRLFVRYGNPSSLAKGNGDDYAEVAKTFITTFAPEILKGYLQQIERWVQKETWLSKPCLSHTLAFMDECVKPKTMWDHLKPHMPVLIEHLVFPVLCQSDEDIEQFDDEPAEYLHRKLNFYEEVSSPDVAAVNFLVTLTKARRKQTFEILNFINNMVSKYEAAPDDQKNPREKEGALRMIGTLANVILGKKSPIADQVEYFFVRHVFPEFRSPHGFLRARACDTLEKFESLDFKGPNNLVIIYRNILESMADPALPVRVEAALALQPLIRHDPIRTMMQQNIPQIMQQLLKLANEVDVDALANVMEDFVEVFAAELTPFAVALSEQLRDTYLRIVRELIERNNSKEGDADYGDFLDDKSITALGVLQTIGTLILTLESTPDVLAHLETILMPVITITLEHKLYDLYNEVFEIIDSCTFAAKTISPTMWQAFEMIHKTFKSGAELYLEDMLPALENFVNYGWRSLMENHQYLDAVVDMIRTIFKDDKVGGIDRICGCKLAEILMLNLRGGIDNYVPEFIGLAMTILTNEELKVKSYRIHLMEMVINAIYYNPRLSVHVLESNGWTNKFFSMWFSSIDSFTRVHDKKLSIGAITQLLTLRADEVPQSVQQGWPRLLQGVTRLFQTLPAALKNREEAQREEDFGLGDDFDDDEEDDEWEGEDWDHEEGEEAVDVKDESTAYLDFLSQQASKFSAVAGDDEEDDELEEESLLETPLDQMEPYGLFKTALQSLSESQPQLYAQLTATLSPEEQQVVKTAVEEADKIALAQAQAQAQEGGAAPPALNGA

SEQ ID NO: 41246 - protein, 864 aa, Oryza sativa
MARPSSSSRLVKRAAALATTALAISARGAAAAKAGSYEVVNTNSLASAMMLGLMDEQNVFILDKAENNSQRLADGRPVWGSFFGLSDNSVTGVSVTTNTFCASGATPGNGTWVVAGGNQAVGYGGAAVPQNLSPYADYDGTRAIRLLEPGSKTWIDSPSTSTAQVNMMQSARWYPGIEVLEDGSVLFIGGAVGGGYINRNTPNLDPFYQGGGSNPTYEYFPSKGNQTVSQFMGNTSGLNMYPHTYLMPSGKIFMQANFSTVLWDHVNNNETYLPDMPGRVIRVYPASAAVAMLPLTPQNKYTPTILFCGGSVMSDTLWGNYGGPGGDILGITASTDCSSITPEDSQGNQNTAAQYVKEEDLPQGRTMGQFIHLPDGTMVILNGAEKGTAGYTNATYNSAQYNGQAINTEGLAQDPTYVPVLYDPSKPQGKRLSNAGFGASTIARLYHSSAVLLPDGSVMVAGSNPHQDVTLNMPTGTTPQAFNTTYEIEKWYPPYWGQPKPSPQGMPTSIQYGGSPFNITVDGSFMGSSANAKAANTKFAIIRPGFSTHAMNMGQRAVYLDYTYTVSDDASVTYMVNPLPNTKAMNRLVVPGPALFFVTVAGVPSNGKMIMVGTSATGTGNVPFTPTLGSALVSLPAAVNSTKYTATITRAGDSSSSFGLGKIIGIAVAGAAVLALIAIGICLWRRKGKNSRGEKAAARQSAAPWTSRDVGSGPEYKRVDTPVGSVNGGRFGGRRMDSSNTFESYRMHDQGSVIESKEALGGYYDHPRSGSRGGYAQSPLGYEQQGRGSSQGGYQQGWAEHHAGDAGAYYEEGNRYGGQSYDDYPPRSYQQQYHQQQQQYSQQYQQQGGQYHDRQGSGGYGRAR

SEQ ID NO: 41247 - protein, 663 aa, Oryza sativa
MSAAPESDAVRQDDPKSAQPEAPESDTQLKRMDPDSILADEADPDQVLGTDSSSDAAAKRTSAFHLPSDAGQSDLKRASAASAIFSQSDSINSPRAPTRSMTTEQHAIPEAQPLPTTQELQAQVSDLTNQVTGLNEKLVKSFNRIADLEDDYSDAQETIRTMSAKIKELEKERAEHLDALNTGLLVEKAHVSSEMQRMMDRVIEETAQRGKAESDKSKIEAELDELSSSLFSEANKMVAVERLSRARAEEKSRNMEERLKDTEGIMLEQQKVLADLQRQVEKLQADPASKKITADTASIASPESDAVSFHRLNTSSLARSISQRTAVRELKHKPAADLPAQARLIINIVPYHEFRSFIAHLRKLRKQLAPFYNYPLPHGARDSLTGTPTPRTASPAPQQPSSAVSATTNSIATASSAYSQGIGGGLYSSSPFAIAGVSRHRDYPTLPSNVDNLVSLPNQLSLPFIKRSQEEDVEPCLRLDFAPGLNWLSRRQANTAILDGNLVIEPIFSGSTTLDEDRIRRENAHLPPAACAMCGIPVVNVPCQAVWQLPPCPPNRVAKLPSYPAASPPQLPAGPAQPRARSAPSLEAPPAVDPTRPPSRPSLPGEACSAHSGDRPAPTKPRTQRRPRPRPRPPRPRPRMHTSTCLSKRWSRPTCRCPRTFSD

SEQ ID NO: 41248 - protein, 273 aa, Oryza sativa
MLMYYTNRPLPHRKYFQTVLCNSPEFNRTVVNHDLHYSKWDSSSKKEPLLLTLDDVENMTQSGVAFGTRFSMDDPVLNHIDEEILHRQPEEPAPGGWCIGVGDASPCSVSVDLQACLINSRAASTSAQTLTPRRLRPTLPEKTLKHSSSDVVPATRRSWSSIPSSTNSATYRLSDRIMATASSMVYRRIRGTTMDGRLYSLRTCTIVFASAASVTLAAARLARSSSGSMNRSICAARPRKMLSTLPFSAMIVLSTLVAPAATPLSGSRHSSPA

SEQ ID NO: 41249 - protein, 957 aa, Oryza sativa
MSSLSGSSPPPSSGGPAKASTRQAAANGTMFSSLQKRFPRTAFVAHKIASSRTGRTTAKAWSYRRSLLFGFFATYTAIGYLKLRRDAYLRDLIHDDTYLVWKIYDGSIVESKGPPSVSALINAPAAGEEAPRVMEMFEVIRALKWAQADQRIKGIFADFSGLHLPSSVTPNRLGLAQIEELMQAVHEFKIAKKEQFGDKAKPSIAWADTFNSQGQYLLASAFDELWIQPTGSVPLTGLGAQIPFFKKVLDYFGIKVLAEARRGYKSMVSTFSREESLPAPQIQNEAELLGELNRGLVHAVAVNRFPDEDPDAMSGKLEAWMKEGPFSAREAKELGLINGTAFKREIVKRLIDPKHGGNEEVKFKSLHHYNKVNDRTLERQLKDDEIVEVGVVYLLGGISSAPGEFLTSSVLKGLKEAAEHEDIKSIVLRIDSGGGDVVASESIWDAVRRVREDYGKPVVASFGNAAASGGYYAASAADAILACENTVTGSIGVASLRPTITRAFFDRFNVGIQSFFTGSTSMSTLHELDDAQRAKSAKHIDEMYNDFLQKVCDGRSISRDVVESLAGGRVMTGLSAWARCNPDAEVEQVQVNSTAGSQAATPTAESVVELRQDAEAVKAAADTEGASGEVQESVKSAIRRIKAVSLTSQWRTQEVSASSGNNTIMIERVGATPAPTPVAEAADGQAGSGDGDSNGILSDLVAKAEEALLGRASDKSATTSDAASKPLTGTEKLKKRMEEEESRLAVAAHSAAEQSRKSQSEADDEIKTAGVAASEASAADTAAKPYGKGLVDSIGGIWDSAYYAMTLALQAEIEAMVTKDNLTLEQATAKIRPSASREVTEDGTLALATDLRLVRFPEDKPFWKKVQEVNAKGDQPQLSLLPRAVTNTVALMLEEAGQKAARAAVRMMIATAADPSGIAAAFDDPQLAQKLRANNGLGGGNTRGRARAEYPLASLFS

SEQ ID NO: 41250 - protein, 935 aa, Oryza sativa
MRRPAPPPTGDVLDLDYGSADGTAVETSQGDVTNETADHARGADEVKSSHALTRAKPDELVGSTRKLPAAYDTDDVDPAASSTGPPSLGPVATAAAISEGFQVPAHNQDANAVAGPSSAKLAGANAVTDSGAAAEGLWVDSAQHHPPPPTYPPPALPHGDAVQEQQQLPSHYGYDPNLPHLHHSAFEPNHQGLHGGVYLGASAQHPIANGGSDYAQMNHPFVPYDQPYDPRMPMPFGPFAAGSIPPPYAFLPYPQSNPYPGGYAAHLMDPNAMDDSTAQLNRKQRKKLLKNQKKKDKKLRALSATAAAFDPAPANVEPVWTEDGKPQALAMISELHSRGVPPARLAEQGVPLAMIEVCCAELGVSAHVAGPPEQPAEPPATAPSDTEIQVAKRLVQTTKAENELLEKQEQGVPLTPLEELRRKALASRLAKAAAASTASAQEGADRQSNGSSPSSAETSSKKSTAFDRVATSGEADALVSQISGVMRSLLQPAQPAAEQSSTSRKRAYRDIDAVDPSDSTWDGDLAAADAATSPLPVRRQRISYADNFSRAAVAPSGEVDLSTPLPELPDAARSPQPRRPRPVAADFDTAEYVPKPPNRFLDVPSGLNTVVDLSDEEPEDAEVAAFDSADGWTEVRPALDPRRVLELRHRTATEHYDTFCLLNGLSPSRRPGTPHRDSGGFENDVGAVPDALIAQISVSGTSSGGPSTPSREDLLRKELEIKQLMRKIQMMEERKKQQEAAATAPSRSPAQRPGAQDRLDGAGLRPGGANGSESAVQPADASGSNPAEKDASSQMGSTASSSVRLDPALQKQREQLLALLASRRKNVSAAAPRDAASTSEAAMDEGVPSPAVGMAVSDAGQERKEKTRGSRYVPLVPSLFSSVASRVRAYLPLSWGTSSGDVDRLAIRWCPREADGAHCTDTRCTQRHAKEFNAE

SEQ ID NO: 41251 - protein, 856 aa, Oryza sativa
MQHGRSHESGADADSESSFSANDDADNDHPIPASAAPRAVHTAAANRPVASSRSDFLTASEPRDVAPLLAKAVSASSSGSGSGSGSASASASTSASASKIWVDRQLDPSGNGSDSPGGSNSGSTGGTSSSQLASSFTSASKQSSAKSSNAGGDHADVKVDTDTVGAITTDDAADETLAFKRPTTIPLPKRDAAPAPRRPASRSGSGSGSASESGRNRSDLSYSRTPDDWDTSAKADHQRWARHHRPPSGTPGERIKLPEGGFVWRSDGADAGITGVPAAPGSLPWDAEAFAASPEAAAARSGSRSARSSSGEASSNELEAGRAGASGASYFGASTLNDLQDAWPSGTWAVNQEGANDPASSLPRFIPSPLQKYGSPSRSPTPHMPDANNPFNFDSRPDVNHNMATAILPPGMYEDRYALASFGPGVGIRGLDAFTDRAGREGNFLAHMDSKSDGKKRQMDDPDALPPLVVNGVPYHVPVSAYPVGSTAMTTGGFGYLTRAYGLSLDNIVEVEMVLADGRIVTLNEESKHKSQEEQDLWWAVRGAAPCFGIVSRLTAKAYPVPSVYSGNLIYPLNPATAGSLIRHWRDCLKAGLPRKFYTNLILTAGPSKTSHVIVIQVCYLGPKSDGEALVQAISSWTGERLLLKDVEERSFLSQQDGVAKVLKGGTGRRWMVRGDLISTLTDDVIAKSVRNFQGLGSRAVWLFELMGGAIEDSGADETCICPEARAAKFTVGSLQQWSGKDEDRTCIESVERWLNEVVHKVSVGGPYPCFLGRSERMDRVIGAYGLDNFRRLLDIKKRVDPNNLFRHTFGNGFVVDEPDKLLQDLDVRQTERRRLQEADLRAAAAANGQTSSSQE

SEQ ID NO: 41252 - protein, 965 aa, Oryza sativa
MYSSRALAARGPITGSLRSRCHHATALSVAVSRASLQLTASSARSHHPLFKKAHASIQSLRWGSSAALASTSPEAAKVAEDAETETENDPFRKIGYLYFDTVFPIRLGFWDIRYMLASLEKRSVLDRVKASLPPDESVGYGFKVIGAEERMKDGGAFVTFSYREDPNEKSEDSLNHIEKRLKSGVRRVFNPLLFFIGTPGVHVVRGSPFREDMNIFPSTRIFVKLEGGDASEEQLWQTLRPYGRIVSIVKEKPSEAFVTFSRIRGATSARNCAHGYELPNGARFIITFRSKLRSKQAWDWISNHPRIVFPLVAFLIGGISYIVFDPVREFMVESKVHNTFSLNEYRLYSWLKRNTVGLFKDTDGNADGRVDDWWERRQSAETIQEWIREKPSTFVTISGPRGSGKTGLVSKAITRDVQHLVIDCDAIAKTAKNDSLLITSLANETGYWPVFSWLSSINNIIDLAAVGLIGSKAGFATPTDAQLKQILGVVTNALNSMNEKTQRRLAKAEKARLAAEKKLKQPAQAGTTDGNRSLEEKASALAHDTLGSIQQFVSPSDAKDGGNDAKKKSFDSPVVVINQFHHKGIKQAVLHQVLAEWAAELVTNGIAHVVFVSDNPVGMGKELAKALPNVPFQGIALADAEEEKARSYVYNKLKEMGRLAVINAAAGKGAGGAPLRATPFGSAAAQPAIAEAGAPPEYAAALDDETASWVDKLGGRLTDLETLVQKVSLGQTVESAVHDIISRSVVELRKNAFGDDASEASSLAWTRTQAWTVVQKLAAKGEIAYYGLLHNEFKGNEAAIKSLEQAEIISVRHHDGRPSAIRAGRPVMQEAIKRPVADRVFNDTQTLLANAAAIESAEKSLRTIETEISDISRMIQGSPFKVASGAGATDGAVLPPPGDKKKDDGWSLKLSWFGDGEGAPSIRTSEAAKARTEFLMSKMAELQTKISKLDAQSTAIKARLAARMD

SEQ ID NO: 41253 - protein, 1220 aa, Oryza sativa
MIPSQRYAAGSASRWRTSAVNAATMNSRRIVSLSSNLARAAPGPSALHLAAPRIGKSIDATASAALRTVPARSLFTSPAHSLPRSRRLEKMLEDGEEHQNEENEIDEDEQHNKEAEQTGAKAESSGSSSGARSATGGAAASGSASGSGSAAGGSSSGSGNRSGSNSLARSTVPSVYPQVLALPITRRPLFPGFYKAVVIKNQAVCAAIKESLKRGQPYIGAFLLKDEAEDADVITDLSKVHKVGVFAQVTSVFPVQGGGQSGGAKKGKDGENAEEEEGITAVLYPHRRIRIDELITPTGQTIPSPPPGTEGAGPANPVSDEAANEAVKAASIAKVHDIQQEARDDGVLPEVNDASAAHLQQNAPPAPPKPLDGESQPEGDAADTQDMPSHSTPFQTSFLQDYAVSLVNVTNLAAAPYDKRNDQYIRAVMSELISVFKDIATLNPLFRDQIANFSISQGAGNVFEEPEKLADFAAAVSTGEVSELQAVLEALDVRERLQKALVVLKKELMNAQLQSKISKDVESKIQKRQREYYLMEQLKGIKKELGIESDGKDKMIEKFREKAAELRMPEAVRKVFDEELNKLQTLEPAASEFNVTRGYLDWLTSIPWGVHSPENYSISNATSVLDEDHYGLKDVKDRILEFLAVGKLKGTVEGKIICLVGPPGVGKTSIGKSIARAVERQFFRFSVGGLSDVAEIKGHRRTYVGAMPGKTIQALKKVGTENPLILIDEVDKIGRGHNGDPSSALLEMLDPEQNGSFLDHYMDVPVDLSRVLFVCTANTLDTIPQPLLDRMEVMEVSSYTADEKRHIARGYLGPQAKEASGLQDANIVLPDETIDFLIKHHARESGVRGLRKLLEKVYRKIAFDIVKEHGESVFPEPKEGELASAKTEAASASATQSVTPPNVDGQAADSAAAPSAFPEPSASTSEAPDSKPLQDGKVPGKDAAPEPPAKVTTEKRQPMAVPKDVKVEITIDSLRKYLGPPVYHKDRLYTSAMPAGVSTGLGYLGNGSGSLMPIETTIMPGKGSLQLTGKLGDVIKESASIALSWMKTNAFDLGIVKDANDSLLENKDVHLHMPEGAIGKEGPSAGVAFTVPLTSLLTNRSVAPTLAMTGEVSLRGMVLPVGGLKEKLLAAHRAGITKVILPAQNQPNVEADVPKAVLDDLEVHYVNNVWSALNHAFGEGPWSAKAKEMEELERKEAITSDQPKQKIMPDDGASQDQPVN

SEQ ID NO: 41254 - protein, 1002 aa, Oryza sativa
MAANRAQLTLRLQPLLATQHAPRLALARTSRRHASSSIVRQSDYKFDDRKAPPPPSSRRSSLSSSSPSSSPSSPAIDKTFVRGDDTKARTVFIRPKDGDHLVSVVHTLSLLAQLASKFGPIQSFHFPREPSSQRLLGYGSVTFLDRESLRKALANDGIHTVVLPPVLPSRAPRTYLSDEEHERIVGTAPLISCDAPSKHGSASQTHHSSRSLQNPSALRPGWTDIAPLVNMEAALSPRYYVDESRATAETPEDAVIAHDASFYLSTSSVSVETKMEHRITALASRAGARADRRSEELRRNVRAALHQFGGFNDTFKNTFKRSEHEAEGGFGEGHFDLEGLNDHRHGRTRNSGSAASGHSRAGSRSGSAWNRRPDSRMQRGGHGTRSLSTSATAFNSEMFKAKCKAEWQRNRHSNFIDQLYLRVTGGKGGDGCVSFHREKYVQFGPPSGGNGGSGGSIYIRAVEGPTTLARISRRFRGADGPHGQGSFLHGKKVEDKVVEVPVGTVVTATRRLRIPEEVEAETYYQDLLRRAAKAKWDPTGLVAKEDIVLAAEHEGRRRLARSQPPVEADQQAVSQTEVSELDSTEDGAASGAEKANEAEEEIDGEDLLDPEDARQLQLLRDRVWRHYPRAEETYYRRNEFRAAEMRLAIDRRRRRRYQAQAQAALAAAADTVASSSIAADQSSAASVTPYEDEEPLEQPWRIDLDEPTPADSPGVLLAAGGRGGLGNPTFLSSANRSPKFATKGEWGEALEVMLELKRPSDIGLVGLPNAGKSTILRSISASKAQVGHWRFTTLSPNLGVVRLGQDGSVMGVDDSEVQEGYGHDRDGSVADADMPSDAEEFRLVLSDIPGLIDGAADNRGLGHTFLRHIERCSILAYVLDLTEPEPWKDLGVLHNELASYRSDLPAKARLVIINKADQFTTPDEIEAAKAKVDRIRRQVNEIWEDQQALRTGEVNQGAERAPMKVLTLSAKKKQGTQGLAKTLVELLREARSEAQQDVESAE

SEQ ID NO: 41255 - protein, 1041 aa, Oryza sativa
MAVPLAVPARHDPKQSIMEGRSPLTPTDLGLNTSLSPSTSMARLFGSTCALTILKGDADHPVNARAPIHQKERASKPSTPATNPPRFASSFSSLRSASNAASSGFDSTVNVHAVADHGILLPFLDRPTEVKELLFDTKANEALMYRLCRVFGGDPERPTQRGCDERWDEMLELLTELDRPLLDDEDWLVRLESLVMERSPELWAQLARCLGAEGLTLHPSAQPASSRFDSWALPSRYSLSRDNDSPLSAPSPSSSSGDEDGAHRERSLSVSVEPLDNLPQSFSQQPAGKMHSSSLRDAASPMEANESSSPAEPFAMSAGDESGAPGSLEDIIEEPSLAAQADRSASRRPRSHSGKFAGLRISAMTSVSPPASRRTSITSASLAAASSRDASPLPTGEMSPAGRAATSPARSPSRGPSASFSKHRRLSTMMMQNNTSHQPRSSHDSSPSTSPKASIGRRQRGVSEATAGGAHAGHHHRQPRRRAQSFARSFAELKSPTEHLEQLRADHAQAEADRLADDTRRISLQDGHLAQSGNADNATSGALGLYGDSLSVPKEGKPAKAATRRLRVGSMGSRASVSSTGSTSPSLPGLLPDGRTRHPSGSFGSRDLSESIAAFRATMGMSTSPAPSETNFADNAEASSDADQSTSSAARKRKGSGGAELPKPTSRTAEIVEAKVSRTGSPRNNEQAQDHLQQPKHMQELESRNRAAGGGGSGLALGGGFSFAKSGANFRAKNHDDAPTSQGGWRSSFARRDGPRSRGEPYSYRSPPAVHRRPGGFVSLAQEYERARSGRRASESVFSFNSNALASSPSSSQASFDHAGDGSMPRARQASSEDPIPRLELTVAPDSSEASMRKGSTPDVGKGEPTPKAGPGGGITPRASFTTSTRPPSREAGHGYPFPNLLSRRGPSEELKADSSSTLAPATLLSPLQACHTHLGATPPAARASPRSPSIVFPISPNPALSRARASSAVPSRRRGARTPLRASATCVATRRRAASGRSSPRRSAPSCRTRACSRRWRTVSASSTTSAPACAAATRRNTPT

SEQ ID NO: 41256 - protein, 856 aa, Oryza sativa
MLRSISSRSAVSRFGLAPSRSAQISAALPSTAATRSFTHLSASRSQIASSSRSNAAKLALNKSALFLQLRQYATPAEDGDKKKNSAQEHDDDDKKKKEFEESVERGLKEARQGKAGGSLPENLKQFFDSDDKKARASKSDKEPARDEDDEVAEKKKKKADKSSGANGSTGGGPNGQYTEIRINANTIFATIVSTYLLYRLTSPDQPSREITWQEFRTAFLDKGLVDRLVVVNRSKVKVYLHSNATGSMYPSSGGSSSPASGSGHAAYWFSVGSVEAFERRLDEAQRELDIPGNERIPVAYHEEISTASTLLHFAPTLLIAGLLFWMSRRAAGGAMGGGGGGGPGGIFGIGKSRAKMFNQETDVKTKFKNVAGMDEAKEEIMEFVNFLKNPEKYEKLGAKIPRGAILSGPPGTGKTLLAKATAGEAKAPFLSVSGSEFVEMFVGVGPSRVRDMFANAKKHAPCIIFIDEIDAIGKSRGKGGNFGGNDERESTLNELLVQMDGFGTEEHVVVLAGTNRPDVLDAALMRPGRFDRHIAIDRPDISGRKDIFLVHLKPLTLHSSTDRDLLAEKLSTLTPGFSGADVANVCNEAALIAARGGAESIEEHHFEQAIERVIAGLERKSRVLSPEEKKTVAYHEAGHAVCGWFLEHADPLLKVSIIPRGVGALGYAQYLPKERYLFSTEQLLDRMCMTLGGRVSEEIFFTTITTGAQDDLSKITRMAFEICASYGMNKELGPISYRTEQESMHKPYSERTGEMLDLEVRKMVSEAHKRTTQLLSDHRADVEKVAKLLLEKEVITREDMRNLLGPRPFSHADEADQYLDKKGMLKRKGESSAPPPPPEDLPTPGLAASKVQDPKL

SEQ ID NO: 41257 - protein, 535 aa, Oryza sativa
MAPLCTSEEVNLLVYHYLKESGFHHASFSLRHESRLDDTPLSKEAIVEPGQLVRFLQKGLLYASVEAHVADDGSEKPCSAAFHLIGPPHVCDGNPRPTPPPAPATRLSPEPDPFAALQPRSDHKEAATQTPAPAATANGVHLAKASTTSSIRSADDSDRSSRVASSSKKKIEDVAEEDNASSALKPKDVKRKASASVSSEADREDKRLRTSEASAKQDSDALRVDGEHASSHKDRRNGDASSRSASPVAEKKAAVQEQRSKDREASSGKKKKGGKSAAGENGEGSKKRTDKEGSSRSKDPKAPIPRPKGDNFVEDAQITTLSGHTGEVFISAWNPTVPNMLASGGGDATVRIWEVPEQAGESPEAPTICKHLPATQSKDISTLDWNPDGTLLASGSYDGIVRLWTPQGDLHLVMSMHQGPVISVRWNRKGNMLLTGSADGTIIVWDLNSGKPRHTFPLHSDSVLDVEWLSCRWLAQAQDVVGCAASHAARPEPVGSRHLLCVLLGGQQHHVVQARRAQAGQDVQGPHRRGQRDSL

SEQ ID NO: 41258 - protein, 889 aa, Oryza sativa
MGGKDANTGLSRSASRDVGASAGLHSSARSSTSNPFYRQFLPSQLSNISPNDAIPSLDELSALAKHLERIKAESSARLARLETRSSDPFKPIFFSAPNDLFSPPGLPSGPANLYSDSSRQASSAGSASASISKYQKARERSFASPAPSVSGANVSGSASATAAGGAFASKNKVKVKRERDNDSAPASSLYPDARSPSGAGSKANARSKAARAHSFDVGGDDESIISTDPEWDLDEDMPSRPGRTYAKNKKRRRKDADAESNEDESGSEFEAGALLGAAGSSRNAATSKHVGSSASASAARTAAAVPGSISRRGSEVDTSSGGVATPKIPAIGMRLKANAASQNAPGFPRKASDATQVSTRRNSVLPSPSPLPSTPAHLTAAMVAPVIYQPAPGWELPARTPATFVPKLEKSRKPRAYPTKPQQVNEDFANKDWKEKERERDRLLERESIGPGTPAGPGPGQSMVKEATTGRRGGRDLQQTPIHTFYNYADAFFKTLTEDDLAWLSSKSDDHEPFQMPALGRHYKQTWEEEDALIASGAVDAYGNPLSALSRSPSISLGVGGGLPLDASLLAASRSGGADESKLAQRPELEIPPPPSFRTKQMTDEHLGLESPAVVDARSGPLAERLVASLLPPRQGDDDGDASRAMGSADDAGPALPMNVLARLNGHAKHEDEMGDDEDADGEPDLDMQGVVADQDMATFEERIAKELKALEVLGADEALDWSSRQDDEISTTLRMVQRELARQQKVNEMRKDRLFGIAKDRMAHQDYLNCLHSLEKEIEAGWTRRLRQIKASLGKRKKGGHAAASHHDDSTLSQHGANGIQSASGTPQPGGVPYNGPVRPQLPENLVSAMEKRKKLQFAFKELFDEAKHAWQTPTESVYADLHLDEIE

SEQ ID NO: 41259 - protein, 1069 aa, Oryza sativa
MDNPRPSTPARSQSSGASPLLATHSITQTASDPVNAVSPSQSRDVACEALFGGHTADADRLDSKGPNDDTGSSPPTASSPSREAFAQLHPSGSNRQSETVAYTAAAAARDRSLDKHGRFEADSDPNARTSIGSSTSPSTLLKTLPEAASKTPETTITAPARSFDAIKSKLQTPSTTQKSKSEIPNAISEVERDMSGNRDAPGAFAETANPSTPSPPHAATQKKPTKSGSFTSFLRGRNNASNSTSARKSLRKKGALQEASKNGDNPAPHAEEEEDEEVVRQRIKDQQKRLEDLEEAQTLGLLRTQQEAGIEPPASLASPTKPSKLIGLPRFGHINGSPNAADDESDHAEGSSSRRSSFHLRRGRKMERDQSSATAKVENDRHTSDSGGLRRANSEKLKSGRSSSRGRSAPPSSASASRTGRSRSRRRNDDHGDTPRRAGSGKFAPPRRSSTTWASKLRTKIPIKEFPLQGSGRESEFNQECPIWARQPYKYLYFTYFGLSVGFYYLPRWALSSMVPSHRGRRDWSWKKATMVKLYRHGTQLTFRTRTSLGRDLQKEVPHSKTVRCKFTWVEPVADDDVRGELRRAMLAQKVDPQRTCGFWYGDVPEHARHCKRRRNGSANQSSEETPNSGTAAQEQGDPMQESTASLGGASQRTAQSDLCCGVGRPAEPGEKVLYHFHGGAYWIGTAHEKDVTAAVNTESLRYMAEIYKKREAEQKKKSNSSGASTSPGSESQSGASASAFDGKLLRSFSLDYRLCVPGRPRSGSYPAALLDALSGYLYLVRDLGFDPENVIIAGDSAGGNLALALCRYLRDERGEVASMPGALLLVSPWVDISRSHSGPTRAPNLDSTVYTNQKSDIISSMLAFRNTAVSAFLGDLPARETYRNPYMSPVSLQLPLERGGSAPHYGFHGFPKRIYITSGSAEISYDQHLTLAHRLAAGTKKGRPVYAGDRLSAGCNAVEMAERRDRPRPKEMLDVEQDAITNTPLDELHGLHLQPLTSNDAAQKPQSPAAGDKKRFAASPPPEPEGKEERVVIFDEVKDAVHDYLLFKWFEPERSNTWRRVAKWIDEA

SEQ ID NO: 41260 - protein, 335 aa, Oryza sativa
MFQLNNASEQWAVGTNQVISDTNAKINEDVFGWVNTTTGAVNHTLNVFVDGMVDTLNATFGQTILYEPILDVLNCLVLLKIEGIQKGLTWVSDHAHVDFPLMDANMFSAGASEKVSGSQNELLAQGPAQGAADDIAAAVLRVTNALYRAIRQEAIISTCVLIIWFIILFIGIGRALILMSKGGSEGTYRQPHSQDLSKPGHEKHELDDFSRRGRVPTYEQATASPDSEDHSGNKYNGQSYTLTPNPLPTLEVHSATSPAMPNDAFSTSKSEKLGNVGSQSVDAAIRRPTHLRASSHGDYDISSPTSPPHLPSQTLSSNPPPPSQSTRDPFADPGR

SEQ ID NO: 41261 - protein, 797 aa, Oryza sativa
MYPSPSPSPAPSPPAYLYLNSHHHPSGSHGGGPLSQPGGQASAQNHNNGYNGSFTPVGRFPMPNAAWSQRSHQHPHHSHQQNPSLSSLPGSIGHSSAASISAGGPSSPGYANLAAHHHHHHGGHGPSGLSHMASPGGIHSSGHLGSSSARSDAAAAAAAAAAASGSPHWQQQILKAEISRQSASPHHHARAAALAARSATSSAIAIQDPNKGIVPPQVAANGLFVAKKESSAANGGGGDGDKGSGAADATPGTPNATPATTTSSPTAAKDKQTWSTIDMGGLALKNIANEVYRYSFLTSLFINHNALTTISSDIVKLRHLTVLDASGNKLNAVPAELGMLTSLRELFLFDNNLVTLPPELGTLHQLEMLGIKGNPLQDNLRTLFQRDGTAAVIAYLRDSCPVPLPPPEREWIMIDPDLPDLDAEKHAPDAPQESFNVLSYNILCDRYATAQMYGYTPSWALTWDYRKEFILQEVMSYSADVCCLQEVDMEQYEDYFLHHLSQQDYEGVFYPKSRARTMRDEEKRRVDGCAIFYKATKYQLIEKQLVEFNQIALQRPDLKKSEDMCNRVMTKDNIAVIALLENKQSGSRLVVTNVHTHWDPQFRDVKLVQVGMLMEEVEKAGSRFAKLPPKLSVAEGYPPAPKYTHGTQIPTIVCGDFNSVPETGVYDFLASSSVPGDHEDFMDHVYGNYTAHGLQHNYRLESSYAPIGELTFTNYTPGYEGGIDYIFYSKNSLSVTGVLGEVDKQYLSKVVGFPNAHFPSDHICIMGEYKVKRLEHVQPSSTAREVHHPSSGTAARR

SEQ ID NO: 41262 - protein, 944 aa, Oryza sativa
MDEELVDDRPRIRNSQACLECRKAKIKCNGKRKDAQNCSRCEAKGLDCSWTASRRGKKPGTKNLATRAREQSEALQRQLEQQLHTKVDRSSPPAYDSQPSLYRQAWDPASQPRASTSYPPHPAETEQRLMHRYGSDVSNHQSPQSTATASSSSGSHLSSSVPTAMSSNGHNGSHTSNFSGNSSRRTSKYHDGLLIRESRMPPSSTNPLLCLSEAALGKRCTESDSEEDELAADNEPIEADAQLLGDQKDGKKRSALHPFVDDLINEEDDAQAKSAREIASMLESSGWTRSCLAHAACERASYFSGASASASWDTRRCDPLEQGIVTMDEARRLFQLFMDTVHEQFCILDPVIHNVATIKESSNFLFSVILAIATSIDRSPRSIRQFELLRKLVDSLVVEVLSRNVKSVEVVKGLIVWPMWAHLTPLMAEDRAWLLIGTAARMAKELDLAMRDDVPQEDELARRHARDRSRTWALAAIMERSFSSFSGQRPNTTLDVDWGTLNDWLKSPISLDGDIQVVAFLHLRRIEEIMRTRIFSQSYYEVGSIESIRVSANVLLEAWSEAWCEHPALDKHPLTSTIMRIIGLHVRVLINTHAIRESDRRRAICESSNMRILRICGESVKAARECCVMLLKDACRLALDNLQGQAHTVSRIVAAMLGWSGVHLLKNGPIDTRGLVVQLGLLLAGDPLDSAHSRSFARFYGRFILSLSAELVERDRAEKHRRKRQRLRGSSHMSTGSSGVGIASPRGEASNMARHNTAGSAAASHDAGKAVVAPDLGTSVPAAAMSDMAFAFESAAQSGLQTPGMMGRPAMMGHPGGAAANSMSPSISNAAGQSHAYMPAAGTGAASSTNHMAGMLSGGSGAGGASPFSSAYRSATVPSSMASNGASGLDPVTSTWLGTDDLLDQYMQSILPIFNDFDHATNNTMMNSIGGGGGVGVPISEVGR

SEQ ID NO: 41263 - protein, 1194 aa, Oryza sativa
MPPPSFSHQTAVVLPRAVQSWLKELIQKIRSALTANDEIKRHSILSAIEAAVEKHAQSLKSAAQADEANHPPAAGPSPTAQIKSQVSLRINDAIQNMLQGELGAQQDEKLPALVDVLFVAMPLLGPTSIVMEWWDLVLHPLLKSASIQNITANRARELVVRAMAAAPTTAYDDEPAPVAVWPAPASRPADASESAKASPIPSTSPRRARETPYPTSATTPASSSPSRQPQRSPSLTAPSASAGRSASVGSRQDTFRRFTQRILDLYLAEAAHESQQLRAEDARPRRGSAPDLAISRDLSGSGHLLRDSATLVWKGNLESILLVYSNQKPKEFFHHIAESFSEPTARVPLLFLLSTFLRLYPIHAYHITATALPRMLILSLQLDTSTTCVSLGVTALIMLIPHIPNWIANGGAGGLPTLLSIFARIVDWRRLGNGWETRIGDDPELAELRREKDEEFAEMDRLGKRLNIKPALRWNRLESSFDTTMSSPPNAEHLFTFLYGLFPCNIIRFLRSPVDYLRKASFDSPFEGPWEEMMDEVAVQTRAGPILRRHTLHPALVTLDAETELTDKQRWLDHDSADINAECLGLFLGKWHDVNPSHIVQAERQRNGSLDNDVPDDESVFSSEARLGPFDMGRRRSAAALMHPSSPSGSAHRHYQRVPHSVNPDDILLTYASLRSGAPLMSATVSAQTPSFDASPAPSPFGGATQPFTAAAQRLDDSIGPTAVPQAKAPSSSSAMTASGTLARLLPAASAAAAATPAIITAVGSSSASHVSIPASPATHAAHASIARVRSRSGSLSSVLSSSSPSPATPISPTLPGRHPLAASHLPSDPLTPQPEPREKPALAVPSFAGSSLEVGSSDASIISFMQRENLLLRNELNFELYLKEQHLRHIGRLHREKVTDTALEAERQNLYHTVRTLRTTNAAQHAELERCRAEAASTKARHVQWEADLNNKLRAYREERKAWTSEARELKAQAEEDAAKITTLTRQLEESGAQLFELQTKMEADEPKLAKLEQYEAKIAQLTSCLAYWDNDVLKYEQQRNEMEKLLNKWDEMAYLVESTEATLSEVEQTCSRLEAENERLKQELNTAFDSVKALKLEKGKLVAQAQPGHEQALDTVAELEHQREVLRDENEALSEKVLELSARIETMQLQHAANGHSTVDGPHGASGLAAASHPDEDDDVPALPHGLPAPQA

SEQ ID NO: 41264 - protein, 947 aa, Oryza sativa
MSPPASVTITQLEPVIFLRGQSSSGEDARGRRRPVNFDAPPSQLRALVMVHLPKPSKIKEISISLKGTARTDWPEGIGPNRVEMVEEMTIFQHSISLFNAKDANDSVPRARPRSNSVGPGIGLQEDVDWDYAAAAASARTSARQPSGSVPRPINTTGRRDEEGSKNSGSQGQSGSNLARQIALGAAKAGSAIIPPTLRPDLSHMKLRDSPTSPSHLRPPARPPLQRTGSGTTSWTSEQTSPDLEATSPRLSPTANFSGSWTRSGPSTNGSATSPQDLSRWHDYFESQGYERPPLYGPRSAPLQGYDSWPTELPSDASATAPQVAGPDSQAASSPGSVSSSAAPSTSTTPLDRSAANSAQGLARLNAALTAVAQPRSKFGAAVHSASPPSTAPGRSILHTQSPSAPRSKEQTVRFDPQSRVDNAAAAASNASNNKASGTRSNPSSRRSSMELDKNSLKGKSSSKAGHDTKGKKPGLKNLINGLLKEPAADSKTPSEEPALSDSKEFKKGTYTYPISISLPSNLPPTLHADFGFNRYILRAHVVRSGALTPNLVAEREVTLIHAPDEDALEETDAIVVERCWEDLLSYMVVFSGKSFPVGQKIPLWLKFVPLGKVKIYRILATLEERTDYFAKGRRVARHEVPRKWTLLKIGHTSSAEPTLPVVSDSADALDKSPLAPLARAAANEDEDSDALASILDPTGPWELATELPIPAGASTRINLSTNHSKSNIAVHHLVRLSIRVGRSQGEWQVWSDGAANASSSAKPAPQLYDIIIEAPITLNHSHTASEWTALPNYWSLPAEPEDADSARASPERESAPTRPALPLPVLTSRTGLVGQSHSTTPSRAGPGGENSPTGSPPMSRNPTQLSRRWLALSADQNARDGSASAGSNGGSVPPPAYQANARTGERTVASTSMSRSPSTADTSEGAVRDATGPPASTQAANAVGMAH

SEQ ID NO: 41265 - protein, 841 aa, Oryza sativa
MVNFTVDEIRGLMDRPTNIRNMSVIAHVDHGKSTLTDSLVSKAGIIAGAKAGDTRFMDTRDDEKERGITIKSTAISMYFPMDKDALDAIAQKKDGNEFLINLIDSPGHVDFSSEVTAALRVTDGALVVVDCIEGVCVQTETVLRQALTERIKPVVCLNKADRALLELQVGKEDLYQSFMRTIESVNVVIATYNDPVLGESQVYPEKGTVAFASGLHGWAFTLRQFANRYAKKFGVDKDKMMVKLWGDNFFNPKTKKWTTKDTDADGKPLERAFNMFVLDPIFRVFDAIMNFKKDEIPKILEKLDVKLTQDEQDLEGKQLLKVAMRKFLPAGDALLEMIVIHLPSPVTAQRYRVETLYEGPLDDESAIGIRDCDPKGPLMLYVSKMVPTSDKGRFYAFGRIFSGTVKSGPKIRIQGPNYTPGKKDGLFVKSIQRTVLMMGRYVEPIGDCPAGNILGLVGVDQFLLKSGTLTSSETAHNLKVMKFSVSPVVQVAVEVKNANDLPKLVEGLKRLSKSDPCVQAWIAETGEHIVAGAGELHLEIVLKDPEEDHAQIPLKISDPVVGYRETVQAESSMVALSKSQNKHNRLYVKAQPIDEELSRLIEDGKMTPRDDFKARARVLADDYGWDVTDARKIWCFGPETTGPNLLVDTTKGVQYLNEIKDSCVAAFQWATKEGVTAEEPMRGTRFNILDVTLHTDAIHRGGGQLIPTCRRVCYAAALLAQPGIQEPVYLVEIQCPDSGLGGIYSCLNRRRGHVFSEEPRIGTPMVTVKAYLPVNESFGFNADLRQATSGQAFPQSVFDHWQLLPGTPLDAGKTQDIVLAIRKRKGLKDSIPTLEQYYDKL

SEQ ID NO: 41266 - protein, 555 aa, Oryza sativa
MKGKKEAAHALVEKLGIKLVGEEKDLEGKPLLKVVMRKFLPAADALLEMMVIHLPSPQTAQKYRVETLYEGPQDDPSAIGIRDCDPKGPLMVYVSKMVPTSDKGRFYAFGRVFSGTAKSGIKVRIQGPNYVPGGKSDMFLKSIQRTILMMGRYTDPIEDVPAGNILGLVGIDQFLLKSGTLTTDETAHNMKVMKFSVSPVVQRSVEVKNANDLPKLVEGLKRLSKSDPCVLTYITESGEHVVAGAGELHLEICLKDLEEDHAGVPLRISDPVVQYRESVAEKSSMTALSKSPNKHNRIYMIAEPLSEEVSKDIESGKIAPRDDLKARARILADEHGWDVTDARKIWCFGPDTNGANLLVDQTKAVQYLSEIKDSVVSGFQWATKEGPVAEEPMRSVRFNIMDVTLHADAIHRGGGQVIPTARRVLYAATLLANPGLLEPVFLVEIQVPESAMGGIYGVLTRRRGHVFEETQRLGTPLFSVKAYLPVNESFGFNADLRAATSGQAFPTMLFDHWQIMSGGSALDPTSMTGKIVETTRVRKGLKPAVTDYTNYYDKL

SEQ ID NO: 41267 - protein, 1135 aa, Oryza sativa
MARGGNRGGGRGGGGRGRGRGGGGRGRGGGRGGGGRGGGHNGAPRQSYSHGDQKNARLEAYYIDQGILDPSEWATFMDYLRTPLPTTFRLTAGKETTPQLLKALQDIYIPFLSNVTFDGEKVDPPKQLPWYPDGLGWHLNTKKTVIRKSPEFKRFHQFLVHETDVGSISRQEAVSMLPPLFLDVQPHHLVLDMCAAPGSKTAQLIESLHSPFTSGPSTYNPMPTGLVIANDSDTKRAHMLVHQSQRLPSPNLLVTNLDASNYQSIQVPYKSADEGAEVVQTAMQYDRILADVPCSGDGTIRKNVPIWKEWTPNNAVGLHALQLKILIRGLNQLRDGGRLVYSTCSMNPIENESVVAEALRRFEGKVRIVDRSSRLPELVRRPGLTTWRAAPGRGAHLFGKSKYAKQKAAKSAAADAAAADGEGDIVDADMKDAEGEVDEAIVDVEDAENEAANGGAPAAPEPEIGSAEYRDRLPEIAWIDNWDQLNELDADLASRTPKSIWPQGDEEQLGTQHCMRLYPHLQDTGGFFVALLEKVGNPDDEGMAAGMIRAMDHLDAHRPDGESLTNAIKRELSPEADAEGAQPAAKKLKDDDGSGVSTPVDVSTADATEAVSGDSVKEDKHAADRARKAAQQKAVADGHGVPGGLPYKEDPFAYIPPSNDQVQACKKFFDLKDTFPLRNLLVRNEDHQPLRSVYLTSTTARAVITGGGPGRGNHPHMNPITLRLINCGIKSLGRQDAGRDGTLECKWRIISDGLLSIRPHIEERAVLKAQLKDLAFLIAGHYPILDNVPGEFGELLKSKKMGSYVIDVLPSEHEGRKLDYKLSFPIWRAVNSVNLMLDKQEKSALSFRIFDTDLSSADGGRQFSSQPSKKATKAAKDAEVQQSDAEDAARAALASANASTAPAVKVELAAYQSEYIQLALDSAILKFDGPYTLKSGRLSPYFFNAGLFNTGAKVAKVAECYAKRIVESGVKFDVLFGPAYKGIPLAAATAMALQLNHGIDVGFCFNRKEAKTHGEGGSLVGAELKGRVLILDDVITAGTAINEAMDILASQPAAELAGVVIALDRQEKSQKDGVPGTTSAITEVEKRYNTTVFSVVTLDQIIEFMNRDKEQYGEKIAQMVAYRAQYGTSHLAKSS

SEQ ID NO: 41268 - protein, 788 aa, Oryza sativa
MGYRARRLAIDRSIPLVTNVKNAKLFVEALARHRKAGSNFDISPVDFKTSHTAFTLPGLINVNTFVPSIADGKVSTDELAAITRASIAGGFTTLQVMPVGVSSSIVDAASLATAESKIVEGAHCDVSLGVSATSDNAETIDELADGARSLLISFNGLGSNVHKAATIASHFASWPADRPIVTDARNTDLASVLLLASLNNRSIHVTNVLSRDDIQLIALSKAKGLQVTCDVAVYALFFTTEMYPQAACLPSADDQKALWENLGDIDMFSIGSTPYQLAKEIGEVAAPEAGIEETLLPLLDAVNERRLTLDDIVSRLYTKPKQVFGVQSQADTQVEVEIDRPTAFVRRDYWSPLESRATVGSINRVTLKAKTVFADGEVLSDASLGSNVSNVAMVAKQAKSAGRRVSFSAATAGASTTPGVSAQEAPTSPTPLSLALRSPVLGASTDSQPRSGSLMAAFANESTALTSVPAPSIGSVLYHPTFARRHILSVKSFTREDLHALFSVATEMRMLVERQGSVDLLRGRVLAALFYEESTRTSCSFEAAMLRLGGQVVKVQPDKSSVQKGESIPDTIRTLGCYADAVVMRHPEAGSVHLAAKHSPVPVISGGESSIEHPTQALLDTFAIREEMGTVAGLTITMVGDLKYGRTVHSLVQLLCLYGVTVNYVSPESLKMPEDVKQTVARKGIKQYESTVLSDDILARTDVLYVTRVQKERFPDLSAYEAVKDSYVVDNATLAKCKPSTIVLHPLPKNKELADDLEYDPRAAWWRQVKYGMYIRMALLAMVLHQRA

SEQ ID NO: 41269 - protein, 1379 aa, Oryza sativa
MGGDQHGDFEPISIVDNVTANAAAEDSAPVDITINEEDHKKVFGQDSSVPFGTKLEPLPPTITGWDVPVSPPPEYAYNEAGPDSAAALPDRSKSTPVGTFHLLLPTALHESGLLFDPQLSLSKITAHRESEPSQPSPPTQPAEAVAASSTDSVPAPSLTEIQACLPHPSALFVAETLEWRVILDQSDVYRTPLPDFAVYDASHLFDVCNLPPNSVSVFETAPTSIPPQEQLHPIRLLDKWDAQHPEATLPVIEEFNMHKCWITGRRLLSTPPDTIVSVIDHHVLSRFKESRVNDPAVGLTGPETFVRALRVLLRIIGNFVHGERRPAPTSSIMVTQKLGWDQHSRQIFLDLGWKEDRLLDGRNAIRPPLVAPESAPVDAPSTTSSDDVVLHRHIRAWFELHVWLTFHLQALQKTKPASSLLQNTEPTLATQLKVESASESVIEMIREQRDHLDMSLNRDLSNDTLAALFAVGVSSTTRDELVKFGYLVNLEANPKHAADLFASLDEVYEAQRRTSRVIQELVAYERSQGKYSPRDLDKAYERLNLTSNHLGPDVERDSIPHDFIAGQYKARAREVLVNADVAEHAAVKDALKIIIAHLGMPPTLVQALEEDVGMDVDQAYTTLDANRDLDDATLLAIYDLYIADAPARRDLLRHALRAIAEDRNSNYLRHFLKTGEKDAAANEGRQQMPSADVPAGIDNIGNTCYLNSVLQYFFSITEIRSRVLQVAPVVQAEQDSLSAVVSERRVGGQRITPRELERSRRFVAQLAQLFHHLIYANALSVRPERELAYLALVSSRAEELEVESNPFTEAQTEEPPSVTAETTEAAPADVAEPEAISAPTVDAGESMDITGDGPETSAAAAPDPLEPAASRAPPLPPRPARKPTAPAVPPPARRNSLMQLGAQQDVSECLDNCMFQLEVALAVGQDGASNASNGMDVDDGPRVSGSTGAASSGDSTGEDLLTRLFLGKTCQRIEADGVAADGSADRGGRPQQVKQPSMHIKHEVFKIVPIDVLEEGRDIYDGFDGFFDSDTFVATSGAVQRRSVTLLSAPPLLQIQLQRVQYDRATMRAFKSQAHLDMPEVLYMDRYMDLDAKDPENAPRLAMREKYQAKRRRIEELRAHLAACRDGASTLTQTPSQAANTVEELARLPSLADVEAQLADIQAEAARRGDADVPPAVSPRSRARQIADAGVDTISITPDTPDVKTEVQTGVSGLVDAGLATLLRDEAQVLREQMEQAKSEIAALKSEMAAIWAGEERYTYRLVAVFMHRGEASHGHYFLNLRGGKEDKWFKYNDSAVTSTSLGSVLRDSSGATPYLVTYVREDYVQLVDPICRVIEQNPEQVEGANGWDGEVRMPEVVTDAARDAGVESPVKRARTDDV

SEQ ID NO: 41270 - protein, 826 aa, Oryza sativa
MSSRQPSESREGRRASGAGGASSSRSSSRVASRSGSVHRSKEKKPVCIGQYIIQQTLGAGSFGKVKLATHALTGHRVAMKIINRRKISSLDMGGRVKREIQYLKLLRHPHIIKLYEVITTPNDIIMVIEYAGGELFQYIVDRGRMPEPEARRFFQQVICAMEYCHRHKIVHRDLKPENLLLDEYLNVKIGDFGLSNIMTDGDFLKTSCGSPNYAAPEVISGRLYAGPEIDIWSCGVILYVMLCGRLPFDDEYIPTLFKKINNGIYTLPSYLSQEARHLLSQMLIVDPVKRITIHEIRQHPWFNVDLPAYLRPLPPTPAAENRGFNFGLTESPRETGSPTDAASSVASSSAATSGASSSQTSASASRMGSQPAVLDDLGPIDAEIVDELVGKMVGFNRDELLHHLADKSDNQVKVAYQLVRDHRRMLQIHHMEDAHGMENFLAQSPPAWNEGLEGFMGRSTSIKRKNRDKEVAGGAAVRSTTREPVPPLPASAHATGTAADDEGDSFAVDAAEVDPSDDGNETLASDDDDLLTDDDGQLTDAEDAAGERMERIAVLETSLPGYLRAREAERLATPSADKTAWPQCTPLSPTSGSGTPALPAAAAAAAASAAAQIHKKPRSRWHFGIRSRSPPMEIMLELYRTLQSLGMEWRQKPVARAAKAAHEGEGEGEGDAADKDKHAASESEASAGKGVELFFLETRWKVGHVVVRMDLQLYHVDAVNYLVDFRNVGYTMLEPEVGARAGTADAGEEVDADGEVAKLEAAFERAMGETQQAMRDGEPPAQHRFDGTRIKPSLAPAVPAGRKEVNSPFLFLKCATRLIVELAGGA

SEQ ID NO: 41271 - protein, 214 aa, Oryza sativa
MCRDDACGSRAEQALGIRAALACESELRIHEQSREIGRCARGIRALEAVLQSRGVFQTAVCVCAANGIDDSTHALARSAARARRVHVASRDPALVDVLVEELEDGCGACGRPGVERRNLDDRRRRGLAELEHAAARVRGIRSDAARCIGRRDGLSKMKRVDVRLVVDNAVRASTMRAVPRVAHNAHHVAIIFRLAVVIACRNKVARRDSGRSRG

SEQ ID NO: 41272 - protein, 825 aa, Oryza sativa
MAPSATGRFLALGCEDGSVKIIDLENDRFEHLAATSGRDRQIAPRFGKAKGKVISLCWGPPVRSSPKRTTTAARKQQSTANDSDDSDSDSSDEGDDDDGDDEEEDDQWHESFLVGGLALSSAMVWDASTGNIVTKLGVHKSRTEPTIVWSVATLPDGTIVTGDSTGRVTFFDARTRIPLTDGTFRAHAASSDVLALCVGPDGRTVYSAGVDQKVAEYTRIDADNARGRWIHIASRRLHAHDIRALALDPPYSPLDAAQSSRSVGVDSQQQPARLPVLLSGGVDFNLVLTPAAPPSAVVKAQKAATIAQIPSASTKATKATLSKVEQEHAAINPISSNPLTTFADTTQRRVPFVPTAARAGLLGGGSVAALCASKRWIVLRREQSIGIWELGSHDELVGVARAADAGEPSAPPAWAKLLEMELKVDSNLVCVAVSADGRFLAVSDLYETKLFELKERRTPGAPVELEPRKVKSFGRAFGGVERVAPSASALRFSPDSTRLVLCSLTGAYVHVLELASAPNGESCKLLRSFGQHRRAAAALHTAEQRQLAGRSGANGESSNGHANGASEGGDRSERAERTTTTLIQHAEISCDGAWLSTISSDLQHHVFSLDSLTYGRTLPSPAALPAGAAFHPSTASRLSSVLTLVFADNKIEFWDVESGKELTSAAGSDDTPKQVRKRGGAGSAGTDTRSALAHDLGRLKHALQLRLAGVRDFAVNALWCAEPGADLASSTLVVYGATWIATARASLAGSAVEEADGDVEMADAERVPTPGSIEWTVRTTAKYQPLLLVAHVHAAPHALVVVERPYFELAKKLPAAFHRGARYGA

SEQ ID NO: 41273 - protein, 1168 aa, Oryza sativa
MALSGRLARQLQQELFHQARQTAPRIARRTFGSQAPRCIRQQRQTKATPNNIRSFTRSARQSANQTETAPNAKAYLESGAIAGAQNLVDVKKVLVIGSGGLSIGQAGEFDYSGSQALKALKEAGVQSVLINPNIATIQTAHVLADEVYYLPVTPEYVTYVIEKERPDGIFLSFGGQTALNLGVQMNKMGIFDRYNVKVLGTSIRTLEVSEDRDLFAQALKEIDIPIAESIAVNTVDEALAAAESVGYPIIVRAAYALGGLGSGFADNAEELRNLSARSLTLSPQILVEKSLKGWKEAEYEVVRDAADNCITVCNMENFDPLGVHTGDSIVVSPSQTFSDEEYHMLRTAAIKIIRHLGVVGECNVQYALAPDGLDYRVIEVNARLSRSSALASKATGYPLAYTAAKIGLGHTLPELPNAVTRTTTANFEPSLDYIVTKMPRWDLSKFQNVDRHIGSAMKSIGEVMAIGRTFEESFQKAIRMVDPKFAGLQGDHFEDIDDVLQNPTDRRWLAVGQAMLHEGYSVDKVHDLSKIDKWFLYKIQNIVDCTHELEKIGSLYGVKKELMLKAKKLGFSDKQISNAVNSTEDEVRARRKNFGIKPWVKRIDTLAAEFPADTNYLYTTYNASSHDVEFDDHGIIVLGSGVYRIGSSVEFDWCAVNATLSLKELGKKTVVINYNPETTSTDHDFPDRLYFEELSYERVMDIYELENSSGVVVSVGGQLPQNIALKLQETGKAKVLGTDPLDIDKAEDRHKFSSILDSIGVDQPAWKELTSYEDAKKFADSVEYPVLVRPSYVLSGAAMTVIWSEAELKDKLLAASSVSPDHPVVITKFIEGAREIDVDAVAHNGKLLLHAVSEHIENAGVHSGDASLVLPPANLPTATVERVKVIAEKVAEAWNITGPFNMQIINADNPEGGESLLKVIECNLRASRSFPFSSKVLGTNFIDVATRAITDTNVPEPVDLMKVDRDYLAVKVPQFAWTRLAGADPYLGVEMSSTGEMATFGKDLIEAYWVGVQSQMNFRLPQPGEGLLFGGDTTTGDLAKIVDFLNPLGYKLYAANPEVKRHLEESSKDSTVNVEVIEFPKQDKRALREVFEKYDIRGAFNLAKRRASSMVDEDYVMRRNAVDFGVPLFMEPKTAVLFAQCMNVKLPKVEGVPAEVRRWSDFIGGKPL

SEQ ID NO: 41274 - protein, 1237 aa, Oryza sativa
MTQPRPSPPPGPDQRHPPRLVGKGASRGNLHRRPHPRPPRRRRWSRFRFRFHRCKAGARRLGFRLGHQVAPRKGQDGGLGQGSLHGLHRVEKGLDGPHRPQARRVRIGAKKKFWKIGSSAGDRSSIMSVNSVSTAAPGAPGADGKDLPPPPGSNGAPGVASFFESKKDKKPFASLIYAAHAFAVYPSRPELVEGSSLFKIEGVFPNSTVLSATHRVRTTGWVMLMPELDTAGSKGANAEMMKWIIAFMDAFKLYGRPDAFVWEARDPVSPFFTYPIGPFKDRLFLDRELAEFLEIAREDHLTTRSALHGIMAARMRGERTKILQPLPPPSQNTVLPTRAATSVPMDDSRSAASSNSRLPPLDFASSQPAAQTAAPALAPTHHQQQHEDTRELPAELPAKLPQTFKDSARGDARNDDEARPASPDFDGYRPPRETRPGQLPPTYSGAQTQTATTAVPAALTPAGPAGAVAPVSLAAAEPLVNRAPVAAPQTATLVSNDAHAAPAAVVQPTSQPAAATSPTAQQPTHAQESSLAYLGASSTSHATSPTVASEPAAARAAPVFGPSGRGAQQTTSDDVRGARRESLPTNYDESALFYMASISDQLPAATAQPVVMSGPSRAVVTKESSLASRPQSLAPASGTTSAIQSESTHTTRLSSDQAQAANVAAPALPATAAVVPAQDHHVKPVDQPVSKANQTADDSINDDALAAYSFLEQPPSPALRTAELAPRSTDAERSPVPSVAAPIVTQTAPVSTNGTSSFNTRPAAVQYPSTFGQNKRAAERKSIAQMQAQAHQEALSKPGRAGGAKPKGLRRPGWVDDSEEEEDEEEDDEEEDDAADAAQAGSGVAQRAGAGSAVRSAASSSRGAPGTDSPVNLADSVGSLGRSHDAAGRAGAPGAFPRSASGYGASVLGGSRSASPGQSPARGGMTHPSIQAYQRQSMFNTHLAAAHGDDGRSHTPPQAPQGPIVRDRQTFLQLNPEEQPGAMTTVFTPHGLVQAGAQDKAERSAKAQEAEARAMGSHLVNVPNKPPPPQAGLLGAITAHERDRKGAGGFGATLTERERERVAAERRQRDEDATRQQAQQMQQAQMQQMAYFNPMMYQQMMMSGMMSGMPGMGGMPGMGMMGMGMPGMNFGGSQIGGSQMAGGFDPMMAQQQAMQAAQMAYMNALQQAHEGSVVGHGSPGQAPASAMGMQMPFAASPHMSMMGAPYPGFVAQSGVGNSEYNAANSPSQRPNKPSGQN

SEQ ID NO: 41275 - protein, 979 aa, Oryza sativa
MSDSSATQEGRNEKALGGVSEEYSQLIEFIRAQKSASTDEEGQDETHIVKKREFPAFWKTKEVRVNKHGEVEEVAQKVPASWLETDMLKGVSEADVQKRRALFGYNELESPKENLLLKFIGFFRGPVLYVMELAVILAAGLRDWIDFGVIIAILLLNAFVGWYQEKQAGDIVAQLKAGIALRTTVVRDGHEVEIEARDLVPGDIVVIEDGKTVPCDGRVLAAYEDKDGSQAAAILEKARASRRADDDDDDEGVDKGPAIIACDQSAITGESLAVDKHIGDTVFYTTGCKRGKAYVLCTDIAKQTFVGRTAALVLGGETEGHFQKVMGSIGSALLFLVIVFTLIFWIGGFFRNTGIATPTDNNLLIYTLIFLIVGVPVGLPCVTTTTMAVGAAYLAKRQAIVQKLTAIESLAGVDVLCSDKTGTLTANKLSIHEPFTSEGVDVNYMMAVAALASSHNVKSLDPIDKVTISTLKDYPAAQDELASGWITHKFTPFDPVSKRITAEVEKDGKQYIAAKGAPNAILKLCAPDAETAAQYRKVAGDFASRGFRSLGVAMNTDGQWKLLGLLPMFDPPRSDTAATIAEAQSLGIAVKMLTGDAVAIAKETCKMLALGTKVYDSHRLIGSGGMAGSAIHDFVEAADGFAEVFPEHKFQVVEMLQHRGHLTAMTGDGVNDAPSLKKADCGIAVEGASDAARSAADVVFLDEGLSTIITSIKVARQIFHRMKAYIQYRISLCLHLEIYLVLTILILDEVIRSNLIVFIALFADVATIAIAYDNAPHAKQPVEWQLPKIWIISVILGFLLAAGTWIIRGTLFLNNGGVIQNFGNTQEILFLEVSLTENWLIFITRLGGGESDITLPSWQLVGAVLGVDVIATLFCLFGWLSGAPHRNPVTAPHGGWTDIVTIVRIYAYSIGVTAIVGAVYYVLNSWEWLNNLGRRTRSQKNPVLEDFFVNLQRLTIVHEKNADGEELWAFHPRTEIEDE

SEQ ID NO: 41276 - protein, 914 aa, Oryza sativa
MPPSGRKGKTRARRGGHAAEPHEPSDVDTPEAIATPSRVSRKRARGTDAPAPAAAARNTRRRTKDTRNLDREDTEGTEAQDLSDDGTEPALPSELEIVASLKVADRQVNATEDFANDLLEGQENVPGYGKIAGRDWAFIIRKVEVNIGRPEAHERLPVEESAGRPGTPSHKTVVDIDLGPDRQVSRSHAIISYDGATSNWFIVVNGRNGLRVDNNLLKRGAKSFLRNGSVIEIAGTQMAFITTPNDDGDGPVWDASIIRRAQKSSEEDDDGYDDSRMNGARQHAHPQHRGQLQDASRQAPHYNNPPQQQQQQQQQQQQQNRTHPHSQRAAGLHSGSVVGPPGTPLRPTTATMGKSSPSANYSRGITMESTESIDYSADTAKDLKPPHSYAQLIGMAILSTHEQQMTLNNIYKWIMANYAFYRYNTGGWQNSIRHNLSLNKAFTKIARRTDEPGKGMKWMIEPTEFDTFVQQGMKGCRRPAVQIPIPGTQSTAASPSSPLHPVRNPPSSAMGIKRRDDETTPPLPQFQPPYPRTTEAFTPDRGSRRRPTDGPNMGLGINEGTIDAAGQEAAYNLDYLRSTPRNGLTAAANAAGSPPALYVNDEGRIGPMDTPFPLRPTARFAPPSTLRRPSDFIQLSSPAPFWKMEGLVGSTPFKPYDMSPLKTPFPMLKPKIESADEEEKKLIPGEEDEEKAGSAGETEGIKNSPHSTEGGVKLGIEEKIIRRQGPIIPSSSPPRATSVGRFIGAESPSATRPGTASSKGLSLLVEAGKEAEKMSESSDSGAVDTAATGSFTHGQPTSHPLAAPPSLRPSPMITNGTGNVNLSTGMKNGYQQPSQAPAPQGIPQHQPHLQHQHAYPGMNSGAQDSDDEGIDLAKGFQPIGSYHQHNHLAMGMHNMGNSHPLGVNPVPRAGSFSR

SEQ ID NO: 41277 - protein, 962 aa, Oryza sativa
MPVKRPVDDDDDGPSTAQLHHMPAVKASRHDLQQHQEHHQSQHQSQHQDYDPHHQHAAQQHQQHQQHQQHQQQASARKKGVSNRTGQACDRCKTRKIRCDPQPGGCSPCAQNNTECRTTDRITGLARSRGHAENLDRENAGLRAYVESLKKQLKDKGHEPVSAPTVPSGYANLSSDNQSQPSPVEQPTSSWGSLHQPTGDNTPAQGVRLSEFRTGCIGDNYLGVSSGNSWLSPIEGTSVSLFGATLDLAEYIPEDHVDSGTSYQNFLDKAFVEKQIPEPQLPAYDKAKMYAEWHFRSIQPMLPILHKPHFMQLLHDVYHERHQCSAAELVMVHMVMSLVLFQYNTRNTTTAHNFQHWNFSLSLVPRLIKGHTLQDMQGLALICVQLRAFPRPGACWMFTNTVLGLAIELGLHRSATAWQGSAAQQDPHTVELRKRIFWSLMLVHVPVSGKLGRPMPLRLEDFDIEIPEEAHDYLPEEAHLDEWRKCSFRSGKWGFVLLKVQMKVYSSIYSIGSNTATYDANVKRLEKELKDTVASFPDELNGGPKTKDEDRVTALYLQLGATGCQLLIHHPALCRSLSPQVMSDNLDACLDASHKMLSIATQLKQLNSLDSTLYWNMDFLASMFTMLFVYTERRDRLSMNDLRGLRQAMKGWLDVMGFVGNLLGTGDSLHVALCNLVEWSLNNISRHLAQKTATAAVASSTTSPAPDHSQQRSQPPSQKQTPVYENGHDYNHNYANGASQEQTPVRNNHQVQAQPLPPPQQQTPQPPRQPSQQPQHQVAHQQPHQQPLQPPHQPQALPRAADNGYANNPAYSYADAQGSNVPSFAPTIIQAYHPQGYAGEDVKPTMDAQLVAHAAMAQQQVSQPAADNYMMYQAPAYNVADTVGPLAWRNFAEHMVSGMQTSAPGMADGTLASYSGMMTEPLGNITVKNGAFMYSNGATFGQMQMPPQDGSNNVAEWPMVQY

SEQ ID NO: 41278 - protein, 911 aa, Oryza sativa
MVEVHRIKVKRGLRKPKLSADLSLDSDSPPTSPLSDSSASREPSPTPSQRPLWQKIFKTVFGYAPSEKRRKSENPLGRLKILLVTCFLVMHSFNLISTLTRQSAISRHHATFEPSPYQVVVEQSPIFGPAASSSIAPLLAQLSLSHPANVDLVAHISEPTILVLLEANESVSASRSPLASAALNASGVYAQITSAGVRPVPVGRSSSSLAVLDSLMSGWTVIVGDPVISKWMSLALGISIFLNAYLLKGIATGNAALSEGNAAGAAAYAAARFIGAHLDSEAKAIEEHGERVRRRWSSRENGKPVAPVRGKSADGLNDYHQRLAQMSATAASAPLNKLARESDKIAASSQSTEGVNAVPAGAIKPDAMDAVKKSNVAPSSEGQGAVAAPEDRAQQIRLQDATYVAPNGETVVRPLEELVDIYAGGAGVFFLTDEEIVTLSQNGKIAAYALEKVLQDHERAVRVRRALVSRASHTKTLESSLLPHRDYDYAKVMGACCENVVGYMPIPVGIAGPLNIDGQVMPIPMATTEGTLVASTSRGCKALNAGGGVTTVLTQDAMTRGPALEFPSVVQAAKAKRWIDSQDGASTIKAAFDSTSRFARLSSLRCVLAGRTLYVRFATSTGDAMGMNMISKGVEKALSLMTEEHFPEMKVLSLSGNYCTDKKPAAINWIEGRGKSVVAEAVVPGSVVKSVLKCTVRDLVNLNTKKNLIGSAMAGSVGGFNAHAANILTAIYLATGQDPAQNVESSNCITLMEAINDDQDLLITVSMPSIEVGTVGGGTVLPPQRSMLEMMGIAGAHATTPGANAQRLARIIAASVMAGELSLMGALCAGHLIQAHMKHNRSVPSTPGTMTPLPRPETPKHFAASMTPLVAPPVGQSNRGSPTGNRSISMTNLAIPASDSTGRAASLSSNQ

SEQ ID NO: 41279 - protein, 1067 aa, Oryza sativa
MLRRCNQHRLSTLSPSSRKILISRPSAAFTALPRTPIASNNLQNSVRTLATGLSQTSKHVPTTSIFAPLDTFTRRHVGPQPASVQKMLEYLGYESMDAFLKDCVPQDIRLEENAIRDEGAGGIWALSEGELLRRAKEIGKKNKVTRSFIGLGYHQAVLPQVILRNMLENHGWFSQYSPYQAEISQGRLGSLINFQTLTTALTGLDIANASLLDEGTAAAEGMIMAFGHLREKRKTFFVDRSVLPQTVAVVKTRVAPFGINVVVGNVKKLLSEEHGDKAQHKDLIGVLLQYPDVRGEVADWKAVADRTHKLGGLVSCATDFLALTMLKPPGEWGADIAFGNAARFGVPLGYGGPHAAFFACSDALKRRMPGRLIGLSKDKEGRPAYRLALQTREQHIRRDKATSNICTAQALLANTSAMYAVYHGPEGLRAIAEKVHGLARIVKAAVEKLGHKVVNETFFDNLTIRRSGTAATLVHESAVAAGINLRRVDDQHVAVSFDESHSLEDIVDLLNVFVSNQKGPRRINQIQPYTTESLVEFADSLNVPAPRATRSSLGELSSGENIPAIDSPAIPSDLARTSPFLTQPVWNSHHSETDIIRYMHYLQDKDLSLVHAPIPLGSCTMKLNSTTSMTPFTWDEFSRIHPFAPEDQALGYKEMMDELAQDLSLLTGLPGCSLQPNSGAQGEYAGLSVIRAYHLSRGEGHRNICLVPASAHGTNPASAIMAGMKVVPVKVLATGYLDMEDLKAKATQHSKDLAAFMVTYPSTFGVFESGVEDACSIIHENGGQVYLDGANFNAMVGLTSPGKVGADVCHLNLHKTFAIPHGGGGPGMGPICVGEHLIPFLPGHPVVPTGGSDAIGPISASPYGSASILSISWAYIKMLGATGLKFATQVALLNANYAMARLQDHYRVKFVNNKGRCAHEFIIDLAEFEDTAGLKVMDIAKRLQDYGIHPPTCSWPLSTAMLIEPTESEGLRDVDRFCDAMIKIRQEIEDIAQGKQPRGNNLIVNAPHPQQVVTADTWDRPYTREEAAYPDARLRRAKFWPPTSRVDDAYGDKNLFCECGSVDEYAS

SEQ ID NO: 41280 - protein, 819 aa, Oryza sativa
MSNHLSPASVSEHSSYAASSSHLGASPAPSHHSSATSMSSSSPSPSNKIKSSSASDNGDFVPPAKPITCRWDDCGKIFYDPEVVYKHLCDDHVGRKSTNNLCLTCKWEGCDVSCAKRDHITSHIRVHTPLKPHNCDVCGKTFKRPQDLKKHERIHTEQHQQQRQHKAAQNAAARAYTMADPSAAFGAYPYPVHASNAYLGYPALPTQQQQHHQHGLYPTTAAAYPSAYPSLPNRDHYAHSTSSASLSPMSSRIDTPQGTSPGPNHHVQDAGSYMHLAQGLDSRNKVTSDPTSYTYLAHGATTSHHLAGNKRGHEHVEDFFGDLRRKKLAPAYDSHMADRLNQTFGMGGIDDVSLNAILSTFDPSAAYQAPNNAGGAKMESGVHARAPVKQDSTDLAQLNAFLLQLGASAASALPASHSHSFSSSSSVGSSASSSFSSQGHAADFDLSSLSQYGLTHIPGFDESLLANASNPQRAIAQLPSRAHHHYPDSAYASGSHQMHQPAFDSVRVSRGNAIVPQLAPVDVGGHSHRRVEALTRAAPEHADTLRADALRTAPVKAEEDAMEEDELDDDASSHAGDRYRSVSPAASSESGWSEAGRRDSSSPSHGLYPRVSPSEASRRLPPLRSNSTASTSASISSLLDSDARLPSMRRQSAAMESVDTRHSAPASSPSPSASSSSSSSSLYPSLTERVSQMEGLGRPLARSPSVDGEAREAMAREHVRLIRDLLIAINFPDQARAKLQSQQRVRLPPILTSAARSKTEDGETTPSAEAEHVRDVDSDRNSTPTPPGRPTLPTLSQLLNDMPEPRQRPMAERQMECDV

SEQ ID NO: 41281 - protein, 376 aa, Oryza sativa
MSRIDSRAASMTPQHSANMTKTDDSSSSLTPAGTSENSVAYQYVAVQQMTTSRDHIEYQLTVREQPKQSRMCGVGEKADRRPIDPAPIVQLRVITHDRPVRQSDVVEDSSVAPPIERKPGHGPKQPQTPGVRRGVPVTTALGDGWEDKAWYLENPYFFMYAMLCNADTDEELHLLNDGKTRYTSGSCVSCLYHLKDIDGSHQGFFVFPDLSIRVEGRYRLKLCLFETIGHSVHHCKPVYSDPFHVYTAKRFPGMEESTKLSKSFAEQGLKVRVRKHPRSRRRSSKRTKDDSEASDLEAASSRARDRSPKRARASDILPQPSLAVPQPTAPRLNRTLDSRYERPAFDRRASNASVSTDPQAAGASHPYSLRDEEEAM

SEQ ID NO: 41282 - protein, 1519 aa, Oryza sativa
MAPDAKPESPGTLASSNSTLPANNAAHDGTRRRDVEKEDRAGEVEEESPGHTPSDESAEYAPIKTNTQTGKPKLERRKTIQSEDDLFRVLSQRRASRTNTGLSTAEQEEESQEIERLMSRLFGRARQEHSEEEKTRHSGVVFRDLTVKGVGLGASLQPTVGDIFLGLPRMLRNLFTKGAKAAAAKPPVRELISHFDGCVRPGELLLVLGRPGSGCTTFLKAFCNQRAGFEAVEGDVKYGGTDAAVMGKHFRGEVIYNPEDDLHYATLTVRRTLKFALQTRTPGKESRLEGETRKDYVREFLRTVTKLFWIEHTLGTKVGNEFIRGVSGGERKRVSIAEAMITRASVQGWDNSSKGLDASTALEYVRSIRTMTNMADVSTAVSLYQAGESLYDLVDKVLLIDGGKCLYFGPADDAKRYFMDLGFECPERWTTADFLTSVSDEHERSIREGWEDRIPRTPAAFFDAYRKSDIYSKNIADVEEFEKEAAEQARVREERQSKRTEEKNYTLPFHQQVIACTKRQFLVMLGDRASLFGKWGGLVFQGLIVGSLFFDQPQTVAGAFPRGGTLFFLLLFNALLALAEMTAAFSSKPILLKHKSFSFYRPSAFAVAQTVVDVPLVFTQVVIFTLIIYFMANLARTASQFFITVLILWLVTMTTYAFFRAISAFCRTIDVATRFTGISVQILIVYTGYLIPPKSMHPWFSWLRWINWIQYGFECLMSNEFAGLSLECVPPYLVPQVPGAEPRYQSCALQGSEPGQTTVDGSRYIQDAFSYSRSHLWRNFGFLWAFFIFFVFLTALGMELMKPNAGGGAITMFKRGQVPKKVESAIDTGGRDQKNDEEHGPIAHVTPAMAEREANKEESSNDDGHAMKRIAKNETVFTFRNINYIIPYEKGERQLLQDVQGYVRPGKLTALMGASGAGKTTLLNALAQRINFGTITGDFLVDGRPLPKSFQRATGFAEQMDVHEPTATVREALQFSALLRQPREVAREEKLAYCETIIDLLEMRDIAGATIGTIGEGLNQEQRKRLTIGVELASKPELLMFLDEPTSGLDSGAAFNIVRFLRKLADAGQAVLCTIHQPSAVLFEHFDELLLLKSGGRVVYHGELGKDSQTLLRYFESHGAHRCPPDANPAEYMLEAIGAGDPNYHGKDWADEWAASKEHETRGREIDDMVSQRSHVEPSQSLRDDREYAAPLSTQVSAVMKRAFVAYWRSPSYIVGKFMLHILTGLFNCFTFWRLGYSTIDYQNRLFSIFMTLTISPPLIQQLQPVFLNSRNIFQSRENSAKIYSWFAWVTAAVVVEIPYAIVAGGIYFNCWWWGIFGTRVSGFTSGFSFLLVLLFELYYVSFGQAIAAFAPNELLASLLVPIFFLFVVSFCGVVVPPMQLPTFWRSWVYWLSPFHYLLEAFLGAAIHDQPVICSDDEYARFSAPPGRTCEEYAGSYVAQAGGYLRTAADGQCEYCQYATGDQFGAGFSVYYSHIWRDFGIFCGFIAFNYAIIYVATWLRFRAKNPLKPPLRKIQKPKE

SEQ ID NO: 41283 - protein, 1001 aa, Oryza sativa
MSLILPEWVAHYNDEKKAKRSTIFSVAVHPDSSRLATAGLDTKIRIWATATMLSEATEADANSHRLLSTLSRHTGSVLVVRWANSGRFLASGSDDTVGLIWDLDPSGMGGGSFGSDDVNIESWRPHRRLAGHESDVVDLAWAQDDEFIATVGLDSKVFIWSGSSFDRLRTIDAHQGFVKGVVFDPLGQFLATASDDKTVKVWRTSDWSLEKSVTEPFTTSPSTAFFRRPSWSPDGSLLLCANAMSGPVFVASVVKRAQWTSDIYFVGHENAVVVTAFSPKIFVGFDGGTHSCVVALGSLDQSVSIWVTGLEQPVLVARDVFERQVMDLSWSADGYTPYACSSDGTVAVFNLTPDIISDALSAERLEQSRAKHGVKRIRNTVGPSSSAVALGTSDRPNVLQPRKAGQAQPARASVAPVPIAGSVAPVRPASAKTERLQQTITITKDGKRRIRPTLIGDDLAPPPPPAAQYTSEPANANAIRQHHLPAMREALGGTTTDGFGPGPDVNGAHTGMANGSLPSSTAAMAAQSSVMIPHATAASMMPYVPVGLPFGIMPEGATPEAMMEFWAEFQQRFMRGKKRRADQTESDSEDIEPIGKLQKGKTRSDIGRTLGGDTTRDPPGPKKVLREALTGVSGIVEHGVRKGVHLAVPETLSVYRREEDGVTIEVRNFDESRPTEITQIDSADKDRVLWIDFSPTAATLATATAFFSAVALEDATVLIYTTRGRRIGNLLLDSACYRLESNGVVLMAVTVSGLMYRWNIRSDREIHRPVSVLNVLGEPENLVSMSVHTNGAPIVILHSEKAYTFDDKKLGWVCISDGWWAEHSEAWDGRTRSRGNEASSRDPVRAVEAEINTMYVRRVHGDNPVGAQEESEDDESPPVEMSVPEDKKSDFVIAVTLRHLEARMMAAVILDSATEYKNHLMAYAKRLGEEGIKNQAEDLIKSLIGPIYYKPEKQQDAYWESSILGLDKRQLCGQVLQILARPRNLTSLVQPYHEILANMKS

SEQ ID NO: 41284 - protein, 1213 aa, Oryza sativa
MAPHPPSSPIASEHPTDELKLKQGIQTASQAASTSRSTGDASDATSSNAESSSAAAAHPNASASHAQFHEWQDQRRCHSVLADYDYLHPTEDRRDPRSSNARLVMPVSQQSQAVACSSSHDRPASEMDSHTSLQPPPIALQHDDSANDVTRDTAPSHTGLGPSPSLPLSPECNVSPSPSFAAYGYPDTPPRVSQRLSSSLSQDRPGTAGASTSAAASSHRLSSIAESSNERAGPADACSTNHIASETSRPWTRATSLRFDQAEQRERSPLGEATHHASQSQDPFRLQPVPPSKRRKLDDSLAGSTHADLGSPTRIDDTQRSSDAGVASDSAQVRSSVETKAGEALSEDKPGFLNHTQRAALVPSAQPSASASLSVARTSSAHAARLDQSTDARHAAHAPATTTRNAHAEAIQRKQHAWPSRKYSRLTRAQSVPNLRAKATLDVSAPSHHRLILPNHLAGYVSSHSRQSRSGQNGSKGSTMRLSKGLPLNLAHYSVGTSSSRSRSTFTPTLHPPITRHTLRELDLLEILKNPQLRHDVVFDPNVQFRPNFDGERGRRKREAGERYWAAVVREIETGCTCTAFSHGQLLPCTCRAKGRSLPAGVACLRDAAAGPDGKRDSKGRPPLPNSRIPSRIPLLVQELRTICLSILPSNYPADSAGVVAEEASATSTDDSKVGDEAGSDRDRLASEKAAASASSGVPSLATTHHQLIAHTLDPHLIAQELQHGVLDVPALITFMGSILKLHCAPMRDEAIEKMVEVVCIDHDIGKGLRLCFEILELIKLDIANHQLRSARPFLVETAVDFEIRWFKEQIEQGKMSLDKTTAWMRHALSEASDDSGLPRSQVMVTAFNRGMLQLIFDVPGTLPVLSQVATPLGSPSSSSLNNTFATLYPETFQFDAYRMMTFHNDVSDLTIVYMLLLLFRQLCGTPLDDGAPLPACVGSLVQRQLKSIKGEIWCLLSDANLCLSGSGGTSSAPAGASSASGPSRRAAGVEGKPFLGSAGGFAKLDHPRWRRAMQNVLLQIAARAAAVQTAARTGTSDPSAVKTAAPSAKTQQLLNSWMETNLRSGSALHKICQSRLRDVVLGMLTDKVRSSLQIVAAVPAAASKGGEPSASQQKRASSSEDGDADDGASASKRHRTDAGSDATSSDQVANAAGVAAGTGTPWDAAMNRAGLEPFAAEIRLLSDRVAKVATFHLRVFRHLYEGFEAGRAQPAQ

SEQ ID NO: 41285 - protein, 696 aa, Oryza sativa
MSAASSSSVAAPPDYTKATDGTGVIGGDPWLEPFAPALRERYALYQDWKNKISVSEGGLEAFSGSYRNMGFQVDPKTQAVTYTEWAPNAVEAALISDFNNWSRDSHKMTKDDYGKWHITIPPLANATCAIPHDSKLKISMLLPSGERIERLPAWILRVTQDLNVSPVYDARFWNPPKEERYTIKNPKPPKPDNIKVYEAHVGIATPEARVGQFKEFTKNVLPRIKELGYNTIQLMAIQEHAYYASFGYQVTNFFAASSRYGNPEDLKELIDVAHSMGITVLLDIVHSHACKNVLDGLNMFDGTDHLYFHEGAKGRHELWDSRLFNYGHHEVLRFLLSNCLFWMEEYGFDGFRFDGVTSMLYTHHGIGTGFSGGYHEYFGPSVDVEAVVYLMLANDMIHKYNPNAITIAEDVSGMPALCRPVSEGGVGFDYRLSMAVPDMWIKLLKEKSDEDWDFGNICFTLTNRRHLEKSIAYAESHDQALVGDRTLAFWLMDKEMYTNMSDLTERTAIIDRGLAYHKMIRLITHALGGEGYLNFIGNEFGHPEWLDFPREGNGNSFHYARRQFNLVDDHLLRYQYLYAFDAAMNNAEGKYKWLASSQAYISLKHESDRVVAFERAGLLFVFNWHANNSYTDYRIGVDVPGKYKVLLDTDAKELGGHARIDHNTEWFTTDMEWNGRRNFVQLYLPSRSAIVLYRAD

SEQ ID NO: 41286 - protein, 954 aa, Oryza sativa
MAAGPPPGLGIAAPPAAALPPNPFGTNGSQHSHKSPLHHHSDLQTPVKYERPSDCPRTYSRGALLAFSASTLVVKPSSMASLREWFGEWEAYHPKSSYNYRENSRRAHAEDAAAAHAAADAHAVESEEGANNGGIIGGALGGFAPRREGAGARFGGRRNEDRERSEGLRLGEVGGRRVAPAGKNPFGQISASGTFKPAGTPGGGRGLPRDANPDAMGDVRRGMGERSTSYGKDRMRELLPDDRRRDPARDRRRGDRGLDADDSREEGEIVDSPRTRRTGGADTASDWRRPGDRDRAGPFSSLPSDRLRPGERRGAQRAGGAPWTGDADDNPAWLEDDSEPLPVDNRAPFGQFGSRRKDADDPLSQADGMGGAVDSIQAFKAQMKERERRERLARGEPEPVEKAPLESHSESLGAERHSSHEYPFGSDAASQQSELDAIRAEMMAAANQRSASGNSMFDSISNSHGGAGAEGQAPPGLPGRSSRFARFFDGRGAPPRDPQAAALAAQQKMLESMGAQPAPPASDDKEASNIHSPKTPQNASSSSINISDLFSKSSIRDKPDATGKDASGKNVSDADQQSMQKLMAMLQGGGGGGASGAGTPTSNKEHANEHAHHHQRADTDDRLKELLGGGGQARHADHLGDRPRSIVSPGLSSAEAHGHAMEARSPLPYPQQQQQQQHQRESSTSSGGVGHGQHLGPQHQHQHQQPHESQQQFPQYQQQRSDSPAMGGGNAYNDPRQQLSSVGSPTSPGAPGVGSPGAAPGMGGFGGFAGAMAGRPPPPGMDPRMMARPPMGAPGFQQLPPHLAASLGLARGPMPPGMGSMPPPPPMGVPGPRGPNGGFPGFAPFPGGRPPPPGMPPQLYQQLMSMPPHIQQQVLAGQGFPPGMPPPPGSPYDPSAPERRSQSPAQFPYYAQGPGGMQPPASPQQHQPVAVGAHAINGANLMALLSGGRNTPTN

SEQ ID NO: 41287 - protein, 1072 aa, Oryza sativa
MVDPRVVPRTSYDSQATASDATVEERDEKPYRDDASSDDAPLYPPTRVSSRYHAHDELEDGLGGVRLDDDEEVGLMQADRDARKPHQGSRIWSQLRSLPHRSGKRRPTAFSGCLIFSGVVIGFMLALPLLQWLSSNTASAAPASTSVGTAKPSNNISADASMESSQSWKQPASPNTPAGHYALANTQLFKVDFQDPGWETVAQAAAGTGLTEAEVTSFKTHDGHDLMPLGMDTVFSGTLAPQTGDLTWSEEDPDEGVFSHVDWTKRDIWLEDVTHARHQKTGSGKVAPFGGKVLVVEGKNVLDANGRMLTWTSFKLSPDLRWVLFFTEETDQWRYSKKSHLWLHDIAAKRTTQLGSGPKAPPKVTYAAWAPRPAGANKDEAPTIAFVEENNLYVVPRAGESAVKVTDDGAATIFNAVPDWVYEEEVFGTDSVMWFSPAGSKLVFLRLDETAVPVYEFPVYNPDLYRAGMTQAYQKMTRMKYPKPGFANPTVSVKMIDLDEIRSATRQGGAVRPTQYTLHSPMSSKGKAADEVDRLLSTDAGVKERLVTEVKWVSDSALLVKETDRYSDVMRIVHFDVARGMLPTIKAGSAGADVEGEVVRKQDARADKSGWIRAAQTIEPLSHHNLSVGSTAYLDIVVSPQGFRHLAYYDSATSDQPVFLTDGAWEIAALKHVDARRRWAYFVAARPAPALRNAYYVELPDWQASASSRTPATYTLKEPVPLTDVSKPGSYDVRFDPKGAYYVLDYQGPDVPYQKVVGVDDASFELMLEENVLLRQMSSQYVKPSSTFYQLVLNSTLADGSRAVASVQEIRPHDFDASGATKYPVLVRVYGGPDSQLVDARWARADWHQYVASTLGYIVVVVDARGTGFRGQAYRATVAGKLGDAEAHDVNEAAAAIATLPYVDEKRVGVWGWSYGGYLTAKSVELDQKVFSLAVSVAPVTSWAFYDSVYTERYMKSPHTNRKGYDASAVHVNSAFGKTKYLLMQGSADDNVHFSNSAHLLDMLTKAKLRGFRFRMFTDSAHSISVRGAYRELFEEMTSFIAELWGAGGRREPKGAKAKNRPALHNSVERRA

SEQ ID NO: 41288 - protein, 902 aa, Oryza sativa
MSKFASTSSPSLAAAASRASRARLAASSTRPAAPTPLLHQRTTMRSPRSSHAAASSASSRPVLHLSNTLFQQSATPNRTFASAASDTLDSDIVIVGAGVVGLGLACDLVASGAVGDPAAHAAAPITIIEASDLARLRSWTADRAAYLASHPSTSSSSDTLDWENRVISLTADNLAWLRRIGVYPYLVEHRLRPVSAMRVWDGLSGALLDFDSADLEPGAASQISAMVEISNLQQAMLRFLEQGPGKDAVSVQDGVKVDAILPGSKVEAGSAVGEKDPWPVVGLSSGESVRARLLVGADGPNSPVRRYAGIGDYGWAYNRKGLVGTLRCHGAEAGEPPVGYTAYQRFLPSGTIAFLPLSDSTASMVWTLEPQVAAVLTMLHRDTAGSSHEPLARLVDAAFRLPWAHIERLFERVVAYTTHPLPEGIGRDWSWLSAGIPDEAQWVERALGEPLVESSTGDVPPKIASLDAKSVASFPLNLKHADAYLGASLNGASLLPSGLLAGAMAAVGLAPQGAGQGAGRGRTVLVGDAAHTIHPLAGQGLNLGIADVRSLSATLRSAMQSGQDVGSYNALKPYARERYWENQKMLSAVDHLHWLYAGVPVPLAQQADGGRRQRSVDGLVKSAAKEVVGRGVVWARSTGLEVINELGFVKNAFMRQAGSTRQTRSLHSSHRPRAVARQAVQVRMHSSSTTGPLASDAYTGVSNGDAATTSTPSLASLTPSQRRALQDMLRVDHSGEIAANTIYQGQADMFGALGDRANRDMAVEMWKTEKKHLDVMRVLLRQHNVRPSLLLPLWSVAGRVLGGATALLGPRSAMARTEAVESVIGEHYDDQLKELATILEQEEKAHPSLPLLSDIIREFRDDELEHLDTAVEHESQQAAGHALLSAVIAAGCRGAIWVASRV

SEQ ID NO: 41289 - protein, 1333 aa, Oryza sativa
MFTTPSRARDARSSTPLAGAARSGNRPSRAGTPVFGSHDPISPPSFLSPSTFRRDDNTHNDAGDVSASSLFLNGARTRTSRARPRPSSMLAASAGPSASLLSPSAAFDREGSVVSEDAEMRSVADTVHSASHAGYNRRPAPAPKDAKAQLDEGTVLLGDQWLHVSAYSRLPTEVLELLAEADMYIDAFQGHLDVHTGYACLLSRTQCFVWNYASRGIGTGSPTCFVFPVPQYASSSMSAINDLSHACFLPRGGSEREPALLLVTPDGQTCLWEGISSSLTRQDRAQRIAAPLSSGEAIVKLQRIDESTVVLATSASRLLRVSVGSRAGILQAEVRPFSQPRGLLGRIFGSSSAMGSANDHIQAIAVAPAQASKQGREVYAIGRKTLQKWHVLDQGGERLLAEQDVQQVVASSVLQLNDERYSAAQSLAFDLLDGAVQADGKLVLLFSQSKTEHEPLQYGLAALDVVKDAASFVVAAIQPIKYTSYADPRPYATPSLSLPNGGPAAFVTFADAVVAKQLENGCESFEELIKLKDDVKNRFIGSGCDTVHVGANNAVAALSLISAASGSLLVETSIDAIRKRCTASAAAADRQRADTERLKGKLEQALYYSESPLNPLTFRLPEHLQGTLMTACQDLSRELLTFSNPIAQSVPPPVDLRAALKDRLGKLRFLVEFVARCGHLEKLPQTTKRQLRADAELAAALAELWVYQNEFYSASHAQASAAQSPLARAIETVMAEQGLGVGSDDVVRRFFRHHADLSPRVLDRLLRQASTVSAQPLRTRSTDVLELNRTVLAAFRAALRYRKEHGRLYGIDANKDAAFEAWTAQSGNVQLLETLYSISVNLIPDRTRELGSSIDVAPTEYSGAGDEVKREQRVQAELKAQLCTLADVAMACYEERLRYLQAAAAADAAYERELSVFGATLRSARPLFIRPLVGIGRSDRAFALAEQYEDFGTLVELCNEAQLRSPARLDSYLERYKQPFAFELYAYYLAHGQPRVLLEQKSEHAQLVLDFLAQPGHERIAWLHDLALQRYGEAAHTLERLALGEGVLAQRRLMMSLGKLGVLSTLALQDLQTVGTQKQIEFFDDQLDLIAVQDSLATLWENALGGLPADLPAAGSAQARELATEIVDAVATRLREYPGYREHYVELVQRLLFENRYLGSEDLVDVLTLKDTPENQLEDFATALKVLVRAKDAPEPRLREALKAVWRRAVVRDDWFALSETTNVSDQTVLADLQATALYAVLGEVLADDANRSAYLDVHELVGDGEDAKALVAARMADKGDVEVDAVWHDRQKEQATVAAFLDDSDLPRLAVELARIAAGHDTADVEDSMALE

SEQ ID NO: 41290 - protein, 849 aa, Oryza sativa
MVNPRSPGSLSRKIRITVVAADGLAKRDVFRLPDPFAIVTVDGEQTHSTSVIKKTLNPYWNDSFDVTVTDSSVIAVQIFDQKKFKKRDQGFLGVINIRVADVLDLELGGKRLLNKELKKSNDNLVVHGKLIIDLNTNVSTPINNNSTAGPTNLLVPGTSNASSASLATPSSTGAARSDARPSTSGSGTTTPVAASAANGDVASRPASTADGVSPSTSATAAAPTAASSTAAPASSGPASDARSSAAPASSAARPAGSQDARSDEYGPLPTGWERRTDHLGRTYYVDHNTRSTTWTRPSTSSSANTAAAASTTAADRQRHSNRALADDFLGVSDGDTSRSSATGSAIASPGAAAAANSLPASSSTTAGNGPLPAGWEQRHTPEGRPYFVDHNTRTTTWVDPRRQQILRIMGPNGSNLTVQPQSVSQLGPLPSGWEMRLTSTARVYFVDHNTKTTTWDDPRLPSSLDQNVPQYKRDFRRKLIYFRSQPALRPIPGQCHIKVRRTHIFEDSYAETMRQQPNDLKKRLMIKFDGEDGLDYGGLSREFFFLLPHEMFNPFYCLFEYSAHDNYTLQINPHSGINPEHLNYFKFIGRVLGLAIFHRRFLDAYFIVSFYKMILKKKITLSDLESVDADYHRSLQWMLDNSIEGIVEETFTAVEDKFGEMVTIELKKGGEEVEVTDENKKEYVELMTEWRISKRVEEQFKAFISGFTELIPQDLINVFGERELELLIGGMSEIDVDDWKKFTDYRGFTEQDQVVQWFWQCVRAWPTEKKSRLLQFATGTSRIPVNGFKDLQGSDGPRRFTIEKSGDVNQLPKSHTCFNRIDLPPYPSFETLESKLALAIEEGMGFGNE

SEQ ID NO: 41291 - protein, 974 aa, Oryza sativa
MLTPRSDASGFEDTSQYSPSVHQDPFEADELSHGFDLQNGHKRTRAPQPAAQNGHAEDPTATQPVPNRASSRAPPPLPVKAASRSSNESLHRDHSTSADLTLTDGTLALPKRSPARLADGTLVPKMPPVPHTSDLMQPRKAKARRDRSPILSFDGGAAEEEKMLVELQDRLANDVRRISTLGPKVKKNAPAPWELGGDDAVTAAGRPSLRETLRPSAETFEKPFSRFKTRPSVDHAHSGGRSPNTAHSPSALAHSTSNADSLEQEAKKEDDAQSLFATQRSRSKSVSSSAVGMLKGLGLAAAAAPASKKGKLTKALRLVGGGGSSANDERRPAYPGSGPFSEHPAGANVNASGAQHASSLGFAKPQALGELPHSRSSRTINSNGPSAVPSKSTADLANIIMSANAKYRDQASSPPIPSPKHANGTLPSPLLGGARSLGYKKDTLSPIPGNSFLTEHRRGSGSLEQTRSRTPPSRDASSRQPSEANSDVVMARNSSIESEGAFASTVPEGESTPVGKAAAAEAFAARGAPGSPVGPNGGVLSASSSQTLGSLPLPGNIEGVPYKLISLEQAREQARQKQSEWLASSGAVGAGRNAAESIHDEHAMYRDPSSDGQTNSRILKNKESGSLMRKLKKEKGVSIDLDGVSTFPPSGSSRDLNASAKSPMPSFSVTGLDEENDALGPLGLSEKPALQIRPVSSMLSGFAADFLDASALSEGHLREASNGSSTSSTGLLAPHSPAPSSFRTPSPVLSDSGRFAPSSTSHKPQLADIRPPPHGAKLPGPAVPGSADSTWSGNGGASGASRLPSLDAGGSVSDTQSQFHSPATSPLTPSFHHSVHPPSSNAATTPLLGSSEAETALSAPASPQIPEEVRQRAREIEAQIQELSNELHELRVKHVGHGTAPVFRPSEAADGERKEHCAVGACPSCGCGCAEQRRLQSINEAAVLKGISVLDRGRALKPSQNMGNTGKFGGYTNR

SEQ ID NO: 41292 - protein, 678 aa, Oryza sativa
MGSFSLPSAGGVVSLLNDRAPSAIKPEQTHPSFSDHHDPRYHPSPSIMSHSAFDSTSSSTESLLRSGDRSTASTSPPTSLDYSYDSRAHRHKAYAEPVRLPRIEVPGEFSDPLPPRGLQGHKVLRGNHISSSPQAIGMRPGEPLPPSATGVFPPGQWDRSGAYLDPNDYSRRSSSSSSDSTYPYDRSMPYGDAAAHAGMPKRTSKDGGSGAITIGGTKRYPCQHPGCDKTFSTSGHAARHNRIHTGQKPYRCTFPGCKARFSRQDNSLQHYRTHILHPKGRASQSAQARDAAAQLELDHLDLDAADAEAEAKAELGRRALEDGTAIAVVHEVKDQHGRKKGETIERMVGMPRSRRESLRGLDDDARSASPSSMDERVKREASLPGGPGLPLDAAAYEAPNDYWSAQMVKQGRLSLPHQAAAYDPRYRETVPPAPYGREMNGAYGGAPPPPPPAWSQSQPAYLDPRFAPGYARTGVSVSPHRRDVYDPAPRIGSASLDPELAGAVGRPDERQYDSPAEYHRRSVSTSSSRGGGVSSLPPPLPASRPSAAAHAASAPVSVVPSARSSQSPKSSPTSSAYSVPEGIAASALDKLAGAATAPAAGAGLGARGRLMAPASAGYQHPYSSDRSTNYGGALPPISSARDRGADDELDRKTSSLRSGLAADPKNTLPPLNPPARRW

SEQ ID NO: 41293 - protein, 976 aa, Oryza sativa
MSRAPPLMPSSSGSHSYSSPKLGAAAIYSTSSPTGSPRPYFAQHLPGTLSPYRDASSRYAHLGSPRISSLSRDATAALKASSYPTSSSRPTSPTPGSRSPSPSSDSGASDASVSRESLAPGQHHHHDSREHAHPPLSRHDSSGRGDSQFARHDGHDEPGTSASAKGASADPPNSLRRAHQLQPIDTKNAATRRTSAGEPLSASSPRIGEAYVNSPKRDPLRDGYRATPPSSAWRHSGSYSGRDGSPWYTDARSSPFASSAARDYATLELESSLGAPTHPAGDPSMHYGDTSNADNVVALLHAAAAADEANKHADRSNENRFPSPSAFYQQGMPTYGIPPYSAAYRSSSSGLSFTNSPNLGFARPYRGVDGSMDAPSPYGQAAATVQPSATASSAQDEDVKTQIKTEPATAEVDPQPAAKKPRARGRKKSVVKVENDEASASVSTSNAPTALDSVVSAALAASEAPAAYASTAFAPYGYPDYSATAMPATAFSANPLVSLAAQVSGALAAPATTSQALVSSEPTAQAAPPAAKAGSATSAASPTSPGKSKTESDAGGPKLHECETCGKSFSRRSDLARHRRIHTGERPYPCDYPGCGKSFIQRSALTVHSRVHSGERPHKCEFEGCDKSFSDSSSLARHRRTHTGRRPYVCDFPKCGKMFTRRTTLNRHSRCHQPGYVKPKSRGKGRGKGKKSGAEGDANAGDDDDDDDEDDDDEDDEDEDSEDDEEDEDSEAESGSGSEPAESVTPPETSAQVAKGAKRAAPGRGRKNSNAKKANTGNAAGVVNRMNRSASDAEAAMTLAQAALQAQFNPYYAEQINAPGTDAPSSNATSSMPWSYPMSAQDGTAALLAASNHSSFSPGMGSNDSNEAMEAAAAVLGGFANSPSATSNGADAAHASSLSEAQLLLDAAMSPVSKHATIPGTSDANKGAAARGRGRGRGRGAQAGGRSSRPSNLSTATGAESSEAASDETPAAEPSS

SEQ ID NO: 41294 - protein, 827 aa, Oryza sativa
MSAPPPPPPNASTPAPAPPLPPSLGAPDPPPPPPPVMPSRPPPAAPPPSPPAASPPPPPAPPVAPRPTPSPPPPPPVMPSKPVKPVPPSSPPPPPVMQPPSPSPPLIPPPPPPTPVMPVLPPTPSPPSPVNPPPPSPSPPPSPVNPLPPITSPPSPVSPPSPANPLPPATSPPSPANPLPPATSPPSPANPLPPTTSPPSPAPPPTVPSQPPEAAPAPTTKPPPTPLPPARSPPAPSPASREPSPSPSPSVAPPSLPIFTPSPPGGGRGAATPSPPSSRPSPRSPPPPSSAPQGVMIAIVAAIVALLVLGAVAAGLLCFCSRRRRRRRRRQPTSPGDFLGPLPVTSRHHQQSQFIKPTVTYPPQLNAHSPLQSSSNSDPPSPLLQPSPPPPAASGGTVSYGDLVAATNGFSEGNLLGEGGFGHVYRGELLLHDGRRQPVAIKKLRPGSRQGEREFRAEVDIISRIHHRNLVSLVGYCIHADHRLLVYEFVPNKTLDFRLHGSSRPTLDWPQRWMIAVGSAKGLAYLHEDCRPKIIHRDIKAANILLDYKFEPKVADFGLAKIQPGDDTHVSTRVMGTFGYLAPEYAATGKVNDRSDVFSFGVVLLELITGKRPVISTEPFNDETLVSWARPQLTKALEQHVYDDLIDPKLDALYDAHDMHRLISCAAAAVRHTARSRPRMTQIVRYLEGELSIDDLNAGVAPGQSSLRSQEHSGDMTELVRRRLRRVAFPPGSGVTVTGTGAVTDSGYLSEATSEYGVNPSISSSSGGDDDDTAGEVVGGVTATSRPHAAAAASSPDTSEVASPHAGELAADAAKPMSRRTRLGRFP

SEQ ID NO: 41295 - protein, 1135 aa, Oryza sativa
MDGSHEHHDAPPSAYDDPHHSHPPAKHEHDHEHGHEHEHEHGHNDHDHSSHYQPPPSYSSSSMSFSTPVRSSHAEAQAALEAVAAAASAGKIQMTPDHNSSSTGSNSYMTTPATAAAAAAAAAAAAAAAVSGSEPASPGNPSSPFGTHLGRNKACQSCRARKLKCDGQKPVCGQCAKGWQIKFRMAQNKAKNKKKAQDPAVRAELESLPETMPPCVYLPITQRTSSRSARPSLSGQDPDSSVAPDTPQPSGAAPPMDASPMPAAAKKRKRADDASDEHVLQMQQEIHHLKQRLAQVTGVFNGAQQPLDPQQQGNHPSGRHPSKDELAIAHMLATSMPSGEGPSSGPGLPLTSSFDYQQAVAAVAANGGLGAADGASFDVLDPALSAPTAPLPGTAAAAYPHAHAADARTDPRSAAHKHAKVTAVQDEMDEDDLANPLLELMVTSWPADFPPPNLVNQLVSTYFERTTAQSLFLHPSRFMENLSHGPQHPRFPSFGLLHGIFAMAYPRLHDSEVHSDTSGQNIFLGAATGEKLASLQAAASFHAKKAKHLGDQACSQGRFEEAAQIQALLCAYYYLNDRSMEAWFSAGNSCSLLKGMELNRLPPIKSYASNYTAPDRNQPKPAVYRAVVKAPAATPLEHEERIRLFWNCFYSDRAACSSTHWAASIDDLDIKTELPGAFDDFINGSSDLVYRPRQTLESPDLFTDGHYDPAILHLKAAILHSKCVSHMSRLPIDASVHDVLSPDFYKLDGWVTALLQSVPGKWRDLASFDATLRASSGHEEMPYLSDGVNYRPQKQISLMTNQLVLAHALMYGSCISLHEPVAHRMPDSARKSAQAAQSIIKILKTFIAARVELLQVSSLMTLMIVLAARSVTRQYKKMRREAGSTYVRLRKTQPELAQRVAEAGYAAGGMSAASPASSSSRGATYNALGMGLDTSSSDLAGEDEAVDSNIATSEINESLEEELEFALDVDPALRAQIDPEGQLASLRDDLELIFWSLVKYGQMYPLGVGQAKVVAQLLGKDYSSELEQAGLFSRSGGPSVAGSASDVGSWAEKSPAQFAQPMRPPAAPQAAPPPVPQQGYGGAAPGFARAPVQGAQPSLFHPTEGGYRLGSFYLDRPQVSDYYPAHAAHFAPTHK

SEQ ID NO: 41296 - protein, 961 aa, Oryza sativa
MVKEVVSATEFDAELQAAGSKLVVVDFHALWCGPCKVIAPVFQQLVTRHPNVTFLKVDVDRVQAVAQRYRVRAMPTFLFLKNKNVVDTLQGADPNRLTALVKQHSSGASSAFSGSGQTLSGTGSSNSNSNSFGARAVAGITDGHTSLLKVVEPKQSSALNEKPDRRLHDILAGPSGGKWLESDADDQLLISLAFKQQVKLSGILLRTLPSHFAHAPRQVKIFVNRPGLGFEDATTENADQEFELPDEHVRGAENGGGGKAYSLRFVKFQKVDSLTIAVLSNQEEAETTRIDAIDVFGIASHTTDMSELQKIAAEGRGRDMFDRPASRTGLKGGSPSSAPAAPSGFAAPRSSSIPNISTYTERPARHTRSHSTSSLNPPMPRYRRSASSSSAPPMQHLSEEEEEDAPDFSAKQYTRQNATHPGFVPHAPPSMTEGEEAEFEAAQSAARDTLGGWHYAPLAVALAPPLGALLGGHSDAWSDAILLILASFWLYQFLRVPWEIYYASRTRQVLAHDEEQEDEDVASDGTTPRPNPTSAESEQQNETRQQAAAELRRSELLSLLFCVLSPIMGAYMLYWMRETMTDGNKYLNAFNIRLFTLAAGVKPWSHAMGLFRRRMLHLQEQVHYPSSKVERMNQRLRRLEADLTSLRKLYATKSEVRILRDYDAQLSRAVRRSERKEEHLRLSAEEKFSIVESRLEDLLRETAINAELIEEERRERERAASLRISLFEAVKYLLGSGLTVRRAGPKHYLHDMPRSLPSTAALGIGTGSTEAEMSPADPSAGAHSQPYVSQAYGSVVSSREVGGSAPASGLVSPPGAGTPPNYSATPPSGADSRASRARNDAGAQRSRSRSTPHRVSDPWWERGVAFYLFLPLNFSSAAIRLAGEKLKTVVEDSENEMARSQRKTLQYQKHLADQQLQQHHRKVSHQVLSPPRNRPTPPTIKVVSSPPAAGATAHGVSSRTR

SEQ ID NO: 41297 - protein, 1093 aa, Oryza sativa
MTPAPTSSTSNHPSAAATATATAADSTNSPHRTPFYARFARRPRTSSSAVNPAYAASTSNLLSPPARGNSFSDLLRSSSYSQVNLHSPANNSTSSSPHRESPSRPPRQATSTHMASTNSSPAPPATSGSALGRMFRRYSQGGASRNDNARPSTRDRDSFNVQRNTSSPALDRDSTGSPMRPQPHHMPRSGSYATNIPTQQSSENLITMPGSRTLTAIPAASAAPASSPVASPAPAVAATAAPAQPNRTSQDANVASQADAPPAPVEASSAAAANPAAASSAAPASGSARPLNGMHRIRLVPHLEATRSLHFEPIERDLKEGAGVVKVGGFTDRQPSQRDNSAAAAAAAAAAASATVGANGDLTIPAGTDSSLTPQQTRGQPGARGGAIPISGTNGGGGRIDSSRIAFKSKVVSRGHAEFWCEPGGKFFIRDTKSSSGTFLNHIRLSAPNTESRPFAIKDGDIVQLGVDYQGGTEEIYRCVKMRVELNRGWQREANQFNVNALRQLRALQGSPLSPPTEKGQPSSASALLPTNRQGVSVTDCCICLFSVTVCQALFIAPCSHVFHYKCIRPLLNLHHPGFSCPLCRTFADLDADVEEDEAWQEALMREAAAAEARLAQGKLPIEVGTPAVELDAPITAAALPSHPEALGGDAAVTAGAPLTNATASRLTAVALAEASNSNPPLPKATVAPSRRKNDWARPDTAVGSSAGPLGGDETLAVAESADAARMPASVSRISAELGEMAVADRLLDENTSVPAATLPTLLGAHVPRTSLGAGDGGSPARRTSGPIVIGQSHQQRAASGGLAGGQPALDSLEEGWPNVGSLGGFSPGLEESGTPLNHTFLSTLAEAPHVAPTSSAPRDFPPGRSAPAPKLVPAAASVGTSRVRPAEHEAREAREAREASGGEAGARTKRSSDGDDVDTAEEEAGGMGNGASPEHLAGGDAPKGKTRMGNDTSPSRGGAYDAMLSGDALGKHAAHDALASNSPPAKSASARRRSRSRSRAGREAGPSDSDEQEAAPFQSYDLPRTPRTGPNLNASAYMSHQLHHGHGHGQPAVQGARQPGDRSQNADGGSAPTSPSTEGKMARFKRRISHAI

SEQ ID NO: 41298 - protein, 875 aa, Oryza sativa
MMASSVDTGLNSSRPSFARIAAAGIQPSNAQQHPQHRVGNIHSPSSTSPSPIGAARGPLSQNSQQTSNHAQQTPAAHISGRNLQEPGQLSTFGGPEVLVQAADMTSPQSRTVLTSGGLLQPTSTDETGTLLSSSDGDGKPPSLDGKSVASGTTFALDEKESLRPDDSASVQASAEDDDLCYPPGTGVPTSRMGSEDGVRAFRDQLHEIHAMEPARRPQAGPGANGALPQGVLYVPPEGPGVGSIPRPSRQAALATEGAAVAPDTKLLEALENPRDRIWVLKLEQDVIDFVKDAKESSLNLPQCNSFYRMLAHKIADYYMLGHSVDDSNSAVRLFRTPHCRIPQPLTGVVTPSTAASTPPPSGPQIKLLRRGIDPGPAIANGSNVNSKTNSDDDSGDDKKRPVTREEREARYEAARLRIMGSAKPTGSETSKEKDDSRSSSAAGKRSKKKQRDNSDDGFEARSAYSSYFAPSFSSAGYTSQPVAYQNPQGTNAAQFSPSPYGNQDMGAASPYGVVQNQNSHWSGSPYTGSEGSQSWYQVPQPYDLSKNFNQAMSFQNSSMADQQQPVYSPYAQVYAQQSYGTSSAWQQHQHQQQQSQQHQQQQQGYNATQPPSTGFGPSPNFSDRNQMPVYTSQQQQQQQLHQQQQNYPFGQLPSQNLGRVPSALEHPLPGSWKSPHFNPQSQTFVPGPIGNSNFSSFTPQRPATGNSNNGMPQGVPYSLERQMSSQSQGSAFGSPHHGMHGAGGPRMPSQPLTHPLPQPVFPRQPSPNVALPPKPISGHQMPLEHARQSPSNVHQMSPQSSSIAKWGAPASLPAKPPPSVEPFDASRFTPSQRTPSFNNAAAARLPGGGLSGFGPMQPLNSGSMANGNGSPSRSR

SEQ ID NO: 41299 - protein, 1012 aa, Oryza sativa
MLVTNPANRATLAEVLAHPWIVKGYDGAPDPHLPDRTPLRPHSLDPEVIKGMVGFEFGTPEAITAKITEVLTSEAYQTSLHHWELKNLPASLNGLSTAANSGSSLDSSTLNRLSTRGSMSAAGGSDTVKSKTGSRRFSGIEFYRKKLTTNPLAAAFGSKDDSSIGSANGSNGLGSGTGLLPFGKEPLDPTRGFHPLISIYFLVKEKMDRERLYGHSFFASSNLSLNGPPVPPSGAAGIGAGAGAGTGARAAASGAMPTAADIPQEALRVPEAPHVSHRAYDPSRQEAALAGPAPPRSVAAMMPVPASPTPVFESREKSRPTGIMAGPPRARANAEEMEAALREKGLPSPNEAAFAQSSIGGMTPVPAASTAGKRQSFSVAPPVAEMVAPPSHRHSMMVPDTSMAMANNHKRSVSLTSRRAPVALTTPAVAAGVVGVAADAAAADGRKSSTFSPARADKNAAQLQTPPKSEAGTAASSPSAANTSSTLGYGATLARRFSSFMSRSPSQPLDAEARERKKQSRMSTGGMLLGNNAQQQRRGSAHMALSGVQEDNRASGDAYDYDEAEEHATTHEDDDDVPLNNATTVRRSGTLGDMPVSRPNARNVREGLMGAASVGRAAGLSMSPKAAAASNARRPSTGMATSTSAPLNMFSAAGAGDAASRPGGQTSPAQEISPSNSGTGWMGPTTPGQAEVLPVLATRRQRFGGGGSGSGTAGSPGGAQNGSVAAEGASKPIFLKGLFSVQTTSTKPRTVIHASLVKVLDRIGVQYREIRGGYECVHLPSLDFSGSDSMGKGNARIPLETVAAAAAAEAETAERSPTSEEGGKGPKRKPSRLSFVSGRSKDKDRAGRRDGSVADSIGGGGERGAGTVRSRTPSLTSSAAFAQAGKAAASPPLPPKTPSKPSLLTRSPRQRADSMGANSMLRRSGSRDSNLMLDASVAGDTSVASPATGGGGAVMAKTMGAAQATELAVRFEIFVVKVPLLLGVNGLQFRRVGGNPWQYQMLAKRILQELKL

SEQ ID NO: 41300 - protein, 740 aa, Oryza sativa
MAKLVENVGNGKDSTKRSSLQTIGYICETDDSELRDALAKHSNAILTAVVQGARKEEPNNEIRVAAITALGDSLEFVRTNFENEGERNYIMQVVCEATQAEESRIQEGAYVCLNRIMGLYYEKMRFYMEKALFGLTIQGMKNDEEDVAKLAVEFWCTVCEEEISIEDDNSAAEQEGSTELRPYFNFARVATLEVLPVLLELMAKQDEDATDDEYNVSRAAYQCVQLWSQAVGSQVVPPILAFVEKHLRAEDWHYRDAAVSAFGAMMEGPDEKVLDPLVRQALPVLIEMMNDSVVQVKDSVAFALGRVCEAAYESIDDENLTKLITSLFSGLGSHPKMASSCCWALMNLADRFAGEPGCETNPLSQHWQASAQHLLQVTESTQDNQLRTAAYEVLNAFITNAANDSVHMVAGLSDVIIERLEKTIPMQQQVVSVEDRLTLQEIQTSLTSVIITIIQRLEREIAPQADRIMQLLLSLLQSLPGKSSVPDTVFGAISALANVLDADFDKYMSAFVPFLLSALNNQEEPALCSVAIGLVSDISRGLEEKVQPYCDQFMNSLPNNLRSAVLGNQFKPAILQCFGDIAQAIGGAFETYLSVVGQVLQQAAGISAQEETSFEMLDYIVSLREGIMDAWDGVIISMRAGGKVQLLQPFVESIFQLLSQVYQDSNRTEGLLRSSMGVVGDISEAFPNGEFANLFRADWLTQMARDTRSNKDFSSRTQDTARWARDQIKRQSASTGNVMS

SEQ ID NO: 41301 - protein, 1316 aa, Oryza sativa
MTNTTTESASASASAHPSPSSTADAPAASAAAPHIAVSDANQAEKQHHADAINDNAHNAKRSTLARHWKPFARRVGLDPLPSYVAWVAPCLTWPKLKPVIRSALLAWICLLIFLISPSERALGSASFLVLVACAIQPAEVPLAAVVEREFFTLLFVCIAWAWSNIGIAIAHAARTTQLPPTQTSIQRVLAGDYIEARSSIVCAVFLSIGSAVVLYIKVRFGPSPFLFATVLSCILMNICLTHAPLYPYAFYSLGQAVVVPLAVKAAVNIVLSVIFFPKSVNSQFVERLIAVLDPIAAACGDQVKLLQTSPLDTAAPADKDPKEGFDFDLVARKLAAAEGGLMPLSLSSRLLTREVSFGLANGDDLREFERLTRSLVAPADGWAYYYSSIKADIQSAHFPKTPVPSRLATLAITPAITPRTSLDHARNTSDSGHHATAHHVQLHPPSRPHSPGPAPAQHHPDTPHVLLPASASGTSTPHRESPLHAQLFPHDSTADSASASATAFRQLDEHPSVQPGNELSSSRFRKMARSIASASRSSSPRRWIHHGPHSSADARDHSTPHHHAWERSSHMLHNFVHRRDPAPVAIWESIRFGNLETYLHTAAANHVTEMFARLIRETSSELLATDAAAIRHIIAWLAHLNSHRYAFLRDRLMLSASQRAEKGRQQAEATRTVIASVESALSDFRTSKRLAVLEPYKAALRAHDASGGNDDLAAELDLRTGPGEIGKIHHRYLYQAWLHQFHTINFTERLLTLLRDVEHVQSERTAARVWFPHWPRIFPADVWRNASGDAHDDDEPSTDPEHIPDISSDTPLASRQRSRSTNTAVDEHVPPKTAHAHAHAHFGGTETDTATAAEPIVDLGSTRRRDPDALDPEGLLQVVGHTIYTWIRRPFRGNALFGIKAAVLIALVSLPAYIKSSAPWCYSNRAIWAIFMAQLTLARFRGETAFALLSRILATVIGAVWALVIWYISTGSGRGNAYGLGATCAVAFPLLFLYRIYYPGPPITPIIASVTTVLIVGYSWKDVTNPTPGSPGYGWSTAWRRLVAVIVGVSAAYIFSYLPPSSTLREYQRLSHAATIAELGKIYCAVVGIASHGHHDHSSRKIEGGSLAEVEASELVRKRIIGVRAKLRRLSMISVNVSYEFSLRGRWPSSRYAALFSVQMEISKLLSHCIAVLERLGPAYSIALLRRTRFLDPRFLGDVLSVISMCSTALKTAEPLPQVTPCPLVDRFMDTPHGFNAYLPDDPHTTADPLLAELPTKITLQTLEDAEYMTFAVGVATLFGLVVRIDRLCVAVKQLVGESYAVPVDVHRMLSTRKTQ

SEQ ID NO: 41302 - protein, 447 aa, Oryza sativa
MREIVHLQTGQCGNQVGAAFWQTISGEHGLDSSGVYNGTSDLQLERMNVYFNEASGNKYVPRAVLVDLEPGTMDAVRAGPFGQLFRPDNFVFGQSGAGNNWAKGHYTEGAELVDQVLDVVRREAEGCDCLQGFQITHSLGGGTGAGMGTLLISKIREGFPDRMMATFSVLPSPKVSDTVVEPYNATLSIHQLVENSDATFCIDNEALYDICMRTLKLSNPSYGDLNHLVSAVMSGVTTCLRFPGQLNSDLRKLAVNMVPFPRLHFFMIGFAPLTSRGAHSFRAVSVPELTQQIFDPKNMMAAADFRNGRYLTCSAIYRGKVSMKEVEDQIRNVQNKNTAYFVEWIPNNVMTALCDIPPRGLKMSSTFVGNSTSIQELFKRVGDQFTAMFRRKAFLHWYTGEGMDEMEFTEAESNMNDLVSEYQQYQEASISEGEEEYDEEAPLEAEE

SEQ ID NO: 41303 - protein, 983 aa, Oryza sativa
MRFTSFASVAVALALVSLPASRAQQASSTSSVPGSSPTPAPTAPASSTPANTTVLSTITTTLSSGQSLPTSLTASASSNGSVWYIPVSTVVPVSQNATSTTSSAASATSPASVKAANTSLPLDTIIDPAFGVLGVILIGAGLPMGFYGHRNRWSSYFLSGFFALALICISIILKVGVEPAINPPSKAIRGLFLVAAVIAGAVGGIISIVFWRGAGLLACGLGGFFFGLFIQAVRPGGLIRPIGLRFILYIGLYALFFTVSCIERVHPLMLALATAIIGATAVTLGIDCFSTQGLKEFYVRNLGFDALFSNKYPPVFQNGHFPMVQGMQIELGVLGALVLMGFAFQMRLWSDLRTQLAVLKHSDEKRNLRSKAERAARAVARTAKRDLAEWEARHGYKKTATGNPASRDEEMALPAASTPDLKDARSRTSSFMTLFRSNTDNTQLATPTSHAEKLADSPGASSTLDNAAFPFPAQSAGRRSSQFLEYIQRGPERVEPEGPLQLDLSTIGTPLGDMQPPAESFPMSPMSNAPRPGAYTPQPPKSLDMARATSPDSAGGPDSFRRRSASTAALMENNASFLDPAPPRLDLENSTGRPTVDSNRTMSTTSSTFAEDAARFLPSAQPKRSASATSGPQIGLTAASAAVSHERTFSNPSAPSGPGLASMTPMAKSHSHQGQLQLHTAALYADAHAERYTAEMQRQSPLASPTYAPSISASKMISGGQSNAVMQARQSLAKRRSDQPMVPWTNPGATGQGGSAHKRAASADSQPRVRAMSIEELEARHRAKLAALQAPATQTVHEADALRRAKEDWERKQKLERRRMQEREAHKDAAAAAAGDGLVSPSHSRIGSPDMQRPVSGSSRDERRRSRALSATLLEAVGEESRDSAGMSRAAEWRKSVSGMNQLDPRAARPSNPPTPSSTRPTSPQPNAGLERSTANPFPAQAAQQRKRLSETDRRRLSQGAGDRSQRRHSQPLLDFNLPRGGS

SEQ ID NO: 41304 - protein, 1386 aa, Oryza sativa
MHRPSIKQQSATDPEPGPSRKRKVQWADDDDRDDVRPLALQDEAQGDFAETRVDENGMPIIAPTTDTEHVDAADPQTHKLELGSEIYNPIEYGDFRSYMKHKRAKLKVQEAALLQEEEALLRVQANASESTAKQSSLAAEIEAEGGQRSNALKGCCIYINGQTHPPYSELRRLLVLHGGDLMAYLDQKSPVTHIVASNLTPKKRIEFKDYKVVLPGWILESIELGRKADWRKWRCDAITGSNSHTSHSMVAKSAHQQHGGNARVSDWRNLDRTAKLPKPLPRIGDEDQDTPWGKPTNQTTLLDRFTRTDNQPLIALSRPQQNDVVADVTESADASTASKGKGVRFGENHLIEPVAPLPEEKAQPARPEPVTPIKPKDDTIPASVGTDPASKKAALAVTKSHYASRPSNTHAARLLASPSWRERNTATSEGFLAGYFAKSRLHHLSTWKTSLQDMVSSALREAGRPLSSADLPKGVQRVIMHIDFDSFFVAVGLRKRPDLHDKPVVVCHGTGTGMPAQKPGDENRPADNQSSSTSEIASCSYKAREFGIRNGMSLGQAKRLCPHVETIPYDFEAYNNISLSFYAFLLEHSDALQAVSVDEALVDVSLLLQGMRDGDAAPGSLYDRYRDHLGSQGDAWSAEKQLAEAFRDEIRDRCGCEASIGIGSNILLARLATRRAKPGGSFHLTDDSKQPFLDALDVDDLHGIGWSLRERVREMFETINVGQILAKTTERKLTTEFGPKKGKMIWDKMHGIDADRLEGNKLRQSVGSHVNYGIRFLTEQEAETFVTGMCQEVAQRTRAVKLKGRQVSVQVMVRAKDAPVEAPKFLGHGVCDTHHRSVQVSGPGGVAIDDEERIRAAAWPLIRDLRADPKELRGIAISLNKLEPAEGNALSPAKPKGGQAVLNFNNASSSSKAAPKQPVVGRETVLNLHKASETDQDDDADGEACGQIDEPGLELPEFLEKGPTAGTPRPPTAASAPQGSVERTPAALPLSTQLMLPSRSQIDSDVFDALPTPYRRQIQAKFGEDSISEPGSQTRARILPRSTPTTPQKAKAAPSAAMAEALMLPSASQIDPAVLAELPASVRKEIERQVGLVPDDSAGSSSVESTPTRRKNATTATLTRFLKQDPKQALFRSASESPTKKRVVNRLLHTAGQYAPKDQRAVDREEVLAMDPSKIATETLQGLGIDAEVFRALPVELQRETFRHHSEQRKSEQARFKAGKTGTFGELTHAEQRRRDTLRAAHSDPTAPPAYLVARPRWRIPRAEARILDSAVPSAVETPSIRGLTRYEDVEQLIRQWVGAFASKGPRKGDVDRIATYLADTLRVAAQTRVEEAHKTDAIVRLIDETIRREEDRGRRLARDAWADAVQRIRNAVQTQAHSSFHGARL

SEQ ID NO: 41305 - protein, 84 aa, Oryza sativa
MTKWTWLYHMNHIMLIRMMIHRLANMKMFLREAWVPQIKVTGYCHFQTVKLTIMIGTLYQEVLRILKPPKGEVVPFLVKSKRSL

SEQ ID NO: 41306 - protein, 914 aa, Oryza sativa
MARKALASDAKIVVASACELEAHFAELQADLHLAETEHTWYKIEQSLLYIQAITRGGATKLADFVALIKEAAGPINGALLSERTKLSGTAADLLNSIAPRLGERFEPLVGVFVPTLLQICARTNKVAVKRAEKSLHFIVKHCRPVGVVPLLREAVRDKGQGLRAVAAGTLVAVLECTDRDRLARRVADVEAAIRSGATDSNAEVRQISKRLFEQYVAVWPERVEAFTKPMTPTIRRYLALPKTGALVVDVPTPQSKVQQAVRETQPAPTTTTATTTTQPTPQYSFFPDLHRAPAASTSRGFGVNDATYAKRGLFADQIAAARNARLARMPSFNFDDKPVETAATTAIKRQPSFEQRRGDINSHTPGFATGGHGKSVLLAAYKQAFVDQHSAPSREKSRDKEQRKHVERKRDKTAVRFERVTLDAPRAAEEEMRRSKSAPLIPATEAELGDEPSTPTESGEDRPSTPPQRVVQTPRTAVKASRVPAQRVVASAVKVSAARVVVPTPSAKVAATRVVESASVEASPVPKPRQAKTPEQAIQPAAAMPSKDSHPKAPVKKAVSVPSTDPREAVKAAKSTEVGKVASKVVARPAVKKAVPTKPAAPAKPAITTATAPAKPTTTIAPAKTVRPAAVKPPAAAPNSATMARAKLAATNRLASASTASKKPEGGGVRVSTATASTASTRNKIVPSAAVKKFTPKATPTVGGAGMRRAKSSIAESIAAKSKIVGAQQKASDKAVAVRKARVSAALKMQRRASAVAATKVSTAAPTPVPKEEKAVVGTPVQSPSKTAAPGGGMRTPLGAKDPNVPSTRSSPLKSPLRPTPRSTTAPRVLDVNVLDSQSERPTPLKPAPRVLDVDISNGESESESDSESDGEEVVQLTLGSKQLVLGPGSASSDASFGASPDDETVVLEAVPAL

SEQ ID NO: 41307 - protein, 618 aa, Oryza sativa
MPASTSAATASPGPADAADPLAGVDHIIVIDNGAHNIRIASIPYPFPIAASSTSRLDPTVLAQSIAVDVFPNAIARTRSPHTISPHAASSSPTAPAPGTKTSVFVSSHIHTLLDDYAALHLRLPHQSGVVVDWAAQKTIWDHVLANHLAKLPQRPKAKGRLLAGKAVVIAETYLNLEPAQYATDLLLFEHYGASAVWRTTPAALVGLGIPAFATPSPIPPPQASSSAEIAEVAASGPKRSRSARTEAVDKEQAAGLPRVLAPRRPQSMLVLDLGYSFCHAVPIVNGQVVYPAVRRLELGAKMLINLLKETLSFRQLDTMDESWLVTHIFRHTSFVAAEVGARSHGANDDHLARIRDTPAALWTYNDLMLLAKQRASSGMAVTWRLPDYGGTTPGAGEAQRDRARYGYIVDGPNPASKGSQDVEWESAYIASEGSSGRRGHAEEHDEVQTLILESERYSMLEHLFNPAALELDQQGLPELVASAISAVASSSQSLRAAADMMWANIVLVGGLSGAVNMRRRLHAELAPLAPADVPLHIVVPDDPQRAAVDAGVVLACEIAAERAVRDDADKPRKKRPRLSSDARSQRWMTYAQWAEVDGATNAHFYPPRAWVHQSSDTK

SEQ ID NO: 41308 - protein, 909 aa, Oryza sativa
MAHLYPHLRLHQVFGANTDVGKTIFTTALCLASSALPLGSTSAGPEDVFAASAQGLGERVHYLKPVSTGALTDADDAHVSRHVPRAQYKTLYRFTEPVSPHLAVELERRAKLAERETGQEPAPPSDEEFVRDVGNWIHAAAAAQHEGAVAYVETAGGVHSPGPSGLSQSHLLRPLRMPTVLVGSAELGGISTTRSAFESLLVAGYDVEAVLLFPSPRYGNVEYLRKFFADEHNIPVFGLGGPNDSHTYGPPPTRNVDSAADCAAMARFYQGLVRGRTPESAEESADGVYGVVRHLRGRHAARIRELGSMAQRTRDTCWWPFTQHQLTRTNAEVNVIDSAYGDFFSMLDQRPANSSGGGGGLLQPVFDGSASWWTQCLGHAPQRLVTAAAHAAGRYGHVLFPNGTHEPALQLAEQLTGKNTAEASLQTNPGYAWADRVFFSDDGSTGMEVALKMALQASIARYGVRASSDRAAEKAKPGQQPGYRGGRPKQEWEVLGLKGSYHGDTIGAMDACEPSVYSEAVHWYRGRGFWFDPPTVEQRSAGSVTISLQVADRDLADRMRTLHLPNELKGAEGAVFERTYSSMQEVYDVEARLKANDPLVQFYTDSIRDTLRRLTKEQGRKFGALVLEPLVMGAGGMVFVDPLFQRVLIDTCRASQDLFSLTDPPLSSSTAVAAEGWQGIPVIFDEVFAGLYRLGACTTASVLGTTPDISVLAKILTGGMVPMSVTLASSAIFDVFNRSDSKVDALLHGHSYTAHPIGCAVAIETLSAIETLKQSSDWKQARAQWQAGEKGVWSFWSKDAVEELTALEGVDHAVAMGCVLKVAIKDNQGGYTSTAAVDVLKKLRYAKSTSQGHPSVPTQQPEDEEALPYNVHARPLGNVIYLMSSLNTPPSVLRTSERVLHNALRSATS

SEQ ID NO: 41309 - protein, 1530 aa, Oryza sativa
MAACNDGVFTPVSDCRFFDFTIAFSNAIFVLLPSCLALLLMTVRLVRLRRKPDIPTASAQPHLSLLRSCTPHSDPISLFGAFVYVVHAILSLVLVAVLAAPSSRSLRHALDDSTGMASVVLAFLTALLAVPLSVAERRKTRGGYMLLPLWLLASLFFTACRIRTFNAIPAIRYSPFFYVYILTFACQAFMLSVENANGVRSTQLQSSHESRASFFSRLLFIWVIPLLWTGLRKPLEMQDLDELKPEYHGRSLARAFIASWTGAPIEPDSGSDASEHAQLARTEHIADLKQSPSRTSSEAYPLEKLGTSASESESGAHGSVPKAMPPYTRASFPKRRVSRSLLHATLHAFPLAALAPVPWKLLLTATELAQPLLVSTTLAFVQSYSDVSEGGQPSAAQPAVYGWGLVGAYAFVYLGQALATGQYWYASSQLMTRLRGAYIEAIYRKGLNLHLRTARTSGGGKAANLMSVDSERVVKAVDVIHSLWSGVITIAVGVYLLYNQLGLVFFASMASVFACFLLTPLASRGIGAKQAAWSSQTDKRVNLTASVTSDIKGVKFSAYEDVLHDKICKARADELSVRSNMMKQVTGVVVFTNCTSEMLGLSTFITLIIVDKLSGSSRFDLNTIITTLTIFSVLQDPLLKIGQEYSYLLQAYASMRRIEEFLNSEDKPDVQSAVDDGLAARAAAASSADREPSGFAARFQNAELGWQDQAVLSQVNLEVPRGSLTMICGRLGQGKSTLLQAMLGESDLLSGSQQLPLLADRIAYVSQDIWLQEKRSIRENIIFATGEYDEERYVTALRACALLEDIDGLQEGDATTASSLSGGQRQRVAVARAIYSDAESYLFDDITSALDAETAAHMWRSLMGPSGLLSGKTVVMATNAVHLLHHAQLIVRIDGGKIAEQGRYEELSLKGKDAISRASLDSKRALPAADVANDKPVKSGAAEKQEAVMTGSVGWGVYANWARAAGLWNFGAFVACSVLSTVAQIGTTYLLQAWATSQQRDPFKALGAWIAGFVALIPGNAVALGLGFWVISLYCVESAGNKLHAGELRGVLSAPISFFSKWSSGQITNRFSQDLYNLDQTFTQALTNLVFIACGVVGALITMIVPAPYLAALAVGLIGSSWALQRLYIPSSRQLRRLEMAAKSPLYSLFSETSSPSGLATVRGLKREASLVELNTQSLDVSQAPYYHLFAVRRWLQTWLLLLTTVVNVMLVLLVVVLRHSSKAGLFGVALVEATSLGIMLNHTVISITEVEIAGVALERVREFTDLQPEEEASPERKLTNDNARETIRGDIEFDSVTVAYGADLEPAVKELSFTLQAGQRLGIVGRSGSGKSTTLLALFRMIEMRSGAIRIDGRDISAMGARELRSQMTIVAQNPLVLAASIRENLDPEGVCSDEEMWDALHKCHLAEFVKKQDNGLEEVLLTGKSFISSGQKQLLSLARALLRKRKILVLDEATSAMDVETDAAVQNVLETQFADCTVIAVAHRIATIIGFDQIICMSAGRAIESGTPQDLLQARGEFWALAAEQKCV

SEQ ID NO: 41310 - protein, 669 aa, Oryza sativa
MAPAAVPNGEASSANDNITRFAPPSRAFTPQPDHKLFHPKTRCFAYGMQTKAVQGMLDFDFICKRKQPSVAGIIYTFGGQFVSKMYWGTTETLLPVYQSTANAMAKHPDVDTVVNFASSRSVYQSTMELMEFPQIKSIAIIAEGVPERRAREILHVAQKKGVTIIGPATVGGIKPGAYKIGNTGGMMDNIVASKLYRKGSVGYVSKSGGMSNELNNIIAQTTDGVYEGVAIGGDRYPGTTFIDHMLRYQANPECKVLVLLGEVGGVEEYRVIEAVKAGTITKPIVAWAIGTVAGMLTTEVQFGHAGSFANSQLETAAVKNQTMREAGFHVPETFEDLPAVLSKVYKDLVSQGSIKPQPEPAVPKIPIDYSWAQELGLIRKPAAFISTISDDRGQELLYAGMPISDVFKDNIGIGGVMSLLWFRRRLPDYAAKFLEMVLMLTADHGPAVSGAMNTIITTRAGKDLISALVSGLLTIGSRFGGALDGAAEEFTRAYDKGLSPRDFVDTMRKENKLIPGIGHRVKSRNNPDLRVSLVKEFCQANFPSTKLLDYAIAVETVTTSKKDNLILNVDGAVAVCFVDLMRNCGAFSPEEAEDYLKMGVLNGLFVLGRSIGLIAHFLDQKRLRTGLYRRPWDDITYLLPELSQGTAPGQASRVEVSANSVKLIILQGF

SEQ ID NO: 41311 - protein, 773 aa, Oryza sativa
MAPADIPPPLEGKKRRIGVMTSGGDAPGMNGSVRAVVRMALHSNCEAYAIYEGYDGLVKGGDMIKEMKWEDVRGFLSEGGALIGTARCMEFMQRDGRRTAAKNMILKGIDALVICGGDGSLTGADRFRDEWPSLLEELVERKELTKDQVAPFKHLNIVGLVGSIDNDLSMTDATIGCYSSLARICEAIDSVDTTATSHQRAFVVVTMGRHCGWLTLMAGVATGSDFIFIPKQPAKEGWEGNMLHIIQKHRAMGKRKTIVIVAEGAIDENLNKITPHQIKEILSEAGLDTRVTTLGHVQRGGQPAAYDRMLSTLQGAEAVKAVLEATPETPSPVICMIENKIVRRPLLEAVAQTKKVAEAIEKKDFKTAMDLRDAEFSEYFKAYQITTAAEQPNLMLPKEKRMRVGIIHVGAPAGGMNAATRAAVAYCLARGHTPVALHNGFPGLIRHHSDKPLGAVRDIDWLDAETWANKGGSEIGTNRGLPSEDLETVAYVFKEYKIEALFVVGGFEAFTAVSELRKGREHYKSFKIPMVILPATISNNVPGTEYSIGSDTCLNALIQYSDACRQSASASRRRVFVVETQGGESGYIATIAGLSIGAFAVYTPEDGISLKMLDHDIDALRDAFTKDKGQNRAGKVILVNEKASKTYSVQIIADMIAEAGKGKFESRHGVPGHFQQGTIPSPMDRVRAVRFAFRSMEHIEQYAGMDPDDIDDDAMSTAVIGIKGAKVLFSPMEAIEKKETDWHRRRPKKEFWMELKQYVDILSGRPPNNKAQH

SEQ ID NO: 41312 - protein, 847 aa, Oryza sativa
MNKKEKRHATKLATALGKTLEQLAGQGLSADDEAKLTASHQPSNGSSDQVMDTASSVAPAAVRAAEPFLSLDSNTRKGLVEMADNLVTLVWSLCESGDKAFAKLVSWKWLDHDIVGAAAANDELSGEGLASWLSSAIALGSRAAAVLSTAGADGSRASSSSAHDAADALGVLSNEELSLLLDLALASGNALCALTDGGEADFVDGLLSRKMPAHIPKAAKKKAASVSIDVRVVQSIDEQPEAATRRLAAIQTAVTLLEACVQTDQSGIDKLKRYILSQSTMLGVLCAGVLRNVAAAVDSHASTRSSGKARKNAAAAAFSSDNVFLPASSGAGVASKSEKGKLDASQGVSLKRFEEATVLPTLTRLLAGVDMTRLAHDLDGRGDVGDVSLDGSKDADEAAVRAKMQRKAEEQAQTLMLALEVVAEMAGSLDARAGADGDEGEWLEDLDAEDAGDEDMDMGDEDDDVPEDMEAMLNDEAGDDDMRVDAEQKDTFADAVKRSGSMPFEAYAPVLCAIFGDASSLTDALLALARPFEASFPSLSSGAKSADADATTSGQLRGLHLRSLSVLNNLMLRLASFSPPPPSQPATEPKLQRRIAALRAWTQQPTPARTLGSVWTSLFDIAKGCASVPAVAGAGAGAIVEDGVVGSIGSADGREVGEGEGGDGMAMVETCIGTMWSVARIVEGNVALSAEPAVRVTDAGAVSSEVVSLVAGYASARSDAMRVKCVLLLSTIARAPAVHANLNAHIGNWLVSLLEAIPERGSAGTTPESMVAAINGLIDVYADETATYDAHGFREQGLLARMRLTLFRCKALARTIDRRKQISLRASAEEALENLAGFIQYRQSLGL

SEQ ID NO: 41313 - protein, 884 aa, Oryza sativa
MSTFFQKQQQVAALDPRLGGLMASAGLYNLKALIKAIRSCKTLADERSLIQKESASIRTAFKDEDPFARHNNIAKLLYIHMLGYPAHFGQIECLKLVATPRFTDKRLGYLGIMLLLDENTEVLTLVTNGLKNDMEHSNMYVCGLALCTFANIASEEMSRDLCNEIEKLMGSSNTYIRRKAAICAMRIVRKVPDLIDHFADRTRQLLSDKNHGVLLCAVTLAIEIVRQDADALQDFRRAVPLLVQHLKSLVTTGYSPEHDVSGITDPFLQVKILRLLRVLGKENAQASEAMNDILAQVATNTEASKNVGNSILYETVLTILEIDADNGLRVMAINILGKFLSNRDNNIRYVALNTLSKVVSMDTNAVQRHRNIILDCLRDGDISIRRRALELSYALINESNVRVLTRELLSFLEVADNEFKLGMTTQICLAAERFAPNKRWHIDTVLRVLKLAGNYVRDEILSAFIRLVCHTPELQAYTVQKLFSALHHDFSQESLTLAAVWVIGEFGDVLVQGGNFEDEELVREVQPKDVVDLLSSVLDSPYVNGHIKQFVLTSLAKLHTRLPDSAQQNRIEQIIGSFESSVEVEIQQRSVEFSSLLRRSDIREGVLESMPPPEIKQTVLGTVSEAKPVGSTRTDKDALLDLMGDEMPVASGGAAASAGASTQQSTQDLLADIFGASDMGGAPAPAAAPADQPAQKPKSSVNDILGLFGDSGSTPAAPAAAPAATASASSAFGGLDLLGGLGGSSSSPAPTQAAAPPAPAPAAAPAAPAGSSAKAHTVYEKNGLKITLTPTTNPARPEIVNITARFTATAGNVSGVNFQAAVPKTHKLQMQAISNSDVVPGATETQALRVMVPNSAPVRLRLRIAFTVNGQSIQDQTDWTQPSA

SEQ ID NO: 41314 - protein, 594 aa, Oryza sativa
MMSRTPWPPTSTRSSPTTACLRVRTACPCSEEPTKINRCLQNGRCSRAQQPVAMKAEPSNGDTERTSPSDQTDRSLFFNWDSPSTMLDPYQHLSTQILHFLCPPGTATQTAGLNAHLSPANTKDFIEKYTHFHVHFSFLHIPTFRILDAYTGLLASMCCIGACYSHRLSPDQVRDMTNLLQAALERDTELLTGGLHADPKSGTAIDKVQLEKLQALTLLIILLTWNGTPSQREDGGRFFPHVAEAARQLGLLRVSSGPYLRSVLHQPDFSLQNVRPEYDFDWVTWVEQERRIRLMYMIYLTDVAEGLYFNAAPRFDSLELHIPLPADDAAWEAHTPTECAEALHLYGSDAAKIRNPDGSQRSKQPELDLALRALFHESYQIHPGSTNLYGKFILIHGLLAQIRRAHAEGNLVSLNGFSTPLSHNDWVFKPGSEPPSAAGSANNSGRATPVSGLGQGISPQAYKSIYTALDKFKSNWDMDMAIQFPPSIQNHRRYGFSRDGIHYFWLAKYIVKNTRPGDLHLPSDHRFMQVIQLIKSVKAWVMSDGAQRGEELGSMGQIDNDFGSHDLTLNMPSLFKPLPEVVDSPGMAVVKTEM

SEQ ID NO: 41315 - protein, 1001 aa, Oryza sativa
MHNKLMAAILRHPAPRIGETFRLPSPDEDLAFVCTFPGALDWGRGLLGIDFSMWPLFKALSIDNVLTICEVALAPAGRILFMSRHPALMGMAVETVKYLVELCGWKGVAHQNCHARDVRIYLEDPGSWLIAINTELRSIIKPPKEVCIVDLDINFVNCPRPPLKAPSKGAARDRKRRKLIAALGFSSADYTIPREYVEAFPSGRFRPLSKVESTSRDVAYERLETPQWWDQGALVGAFDHILHEGTKPSFLKKVLRMRTDKQAVASETEQAAVLALRKRASTFVDARDGLENKIGRLNKRLAFLMSEGEMWRQQFDKIQQLVDRLTREAGDLRAKLDKERRESRRLSSTLQQRDLEYVQAQIQLKETEQAREKAQGELLRVRTAMENLESEREAMMDEIRNVLSTSGDDFGMASLGNLQSMTQNYTRLDGAGSPAASDASHNTEMHIMKSRALAEQRISMGQPRTPSRLNKGSVAPSEDAHANGAQPNASASNHFPDEQMNNEIQKRTTAVTDQIAKIQQQLESTLTQLEGRRSVTLERSRRLSSSSSVGSHRFDAASSVGHHNAVASSIGHGDDGLYAHRPSEEVETMNGERAAVPRRQRTVSSTNHASTQRSNQLARPTPVLTPKSPARGQRESLVSSTAPHTDNSSLEANGHDTSSPPSEPQPAEATKDAAPVATAATAGAAAAIVGAAASPAALGSSKQEVKLAEIEAAGDRSKDLPDVPADLSSADVDASKLDEPDATDDEDGDALNMFDEPEDFRPKTPPATVTYYEFPGTSSKVTLNLVGSHPLWGHLAWNASFIMADFLCAHALTLTKGKRVLELGAAAGLPSIVCNWASASHVVATDYPDKALIDNLTRNIVENCQDGASPLRGAGETFVEGYIWGRDATPLLEKAGGKFDLILMSDLVFNHQAHPALLDTCDACLSDAVADEGVATPCVLVFFTHHRPHLAYKDMQFFDMAEVKGWKFEKLGEWFKQPMFPQDPGDEVVRSTIHGFKLWRA

SEQ ID NO: 41316 - protein, 875 aa, Oryza sativa
MGSPLLINDNWSNHIDFSLPLTLDAISTARAEAEDDSESGAVSTAICQARELCECQTRWGWRAQQKQCSMHLDEQCEAEASAAAQQRTQVTRQNQASALACAWYNATARAMSTAGCQSHGMIADSATGALSMNCSCTFGSQFGVLVAQQQAKVAAPLPVNCALTPAWWYLVFLVAYILLGIAASRQFWRLLGAARWYYSLLLSVHAWLVALAALRAINVAVLWLAYQQLQIGTQSLLYALPWLCVAPTLSGLLQHWREVQAALAPKSAAGAGAAAKVAPAQLQAAPVDAISRVGLTDVRLAEYNGAASDAPVSAKAHRRASVAQLQLHARQQTRKVTRHRWQVLLNLLLGVVFLALTGLIGNTDSIAQKETYTDGVLWLAALANLLFATALAYEASQLNAQWRAVLLREQEEPQHLDAKQSEAAVAAAAAAVSARLKAAQTVRARTATAMVLLVLGLLGAAAVLLVTVAFSGARLHLDAVFDATFYSCDVVALGMVLLLLWAATAQAVRTGVPLSTKAGPHARREVSSQQNGWLEEEEDQEEEEESRCSTDEGSAEHSLSSLSPSMYGRAHAAAEGEEEAEDVAAAADDGPLHGGEEDSSAAAGAQQAVSRVASHSSHQWRITGALEQRTNSWILRTPNWSQPVRPMRLPPLPATVTLKKAPSQTSPPATATVADDDLIAPPIDRLGVVRVHSYSGSGSSSSHKSDKSESSESLPGSSSTEAERVTSAATETVDDAHTSKRLSGGGSSRSMESSPSMQPRVSPASPSAGAALAPPTAGSLSLSSLAGSAASAAAHRRREQSITRKMTLLRSRSVSRSRAHMPLVSNKIAHAYQQAFVQAYADATRRAAPTQTATAPAPPATPLTPPSQPSHTQSL

SEQ ID NO: 41317 - protein, 723 aa, Oryza sativa
MAGREGLIDTAVKTSRSGYLQRCLIKHLEGVHIQYDNTVRNADGSILQFAYGEDALDTTKSKYLGQFDFTAANFENYNKRYDPKQLGEVVEAELAAEHMKKALKKPHKYEPVLSMYNPSTHFGSMSEKYAKEIEAYIEKNPSKLLADKKKKSKKRKSEAAGDADGNNDGKVAEKLRFAKEKLGVEAFRAMCKVLYHRGLVDPGEAVGLLAAQGVGEPSTQMTLNTFHFAGHGAANVTLGIPRLREIVMTASQNIKTPIMRLPVLDGITEDQIKTFCKDGSRLVLSQVIDEAIVTEKISPKSSQTGFHRQKTYTVRLNFYPADECKEEYNCSTQHILHGLQETFAPNLENNINNEMRKRRREHAVQAAAIGRGRTFSDNAAAGNNADEDGEERANAAQPRSRGNDADSDDEEDASSEVGDGDADEAKRKQRSAAHASYEEGDDEVMDNVPSTMEDIEAAFSGESSKKSSNAMDVDSDSSDSESSDGSVNEDWAEQTSALEKALQENSKYINAFRFDEVKARWAEFDLTLAAQSQKLLLINIVERVCRQSVIHEIPNISRVMKPPPKAGEDGVSLTAEGINFRDLWNFGFGVVDLDNLYTNDIGAVLHTYGVEAARAAIVAEMRGIFDTYGIAVSPRHLFLIADYQTAAGGFRPFNRSGIAESSSTLLKASFEMTMAFIGGSALHGEVDTLKTPSSKLVVGRPVSSGTGTPEIRLALPNPIGAAA

SEQ ID NO: 41318 - protein, 1018 aa, Oryza sativa
MASFFAKARERAEAAAQQLQAHHAASSASKTGDTSSSCTTSGTGSSFYTGSVPHLLRHGIASVDPRYESTRQFHLLSQAVKGFNIDHEAAGREAKNLAKATFTWGQHHLPEKRDDSVGDEVLVDVTDRLAYVWHEIGQLETAHSQSAEQARNRLKRFEKAEMELGQRRASRNKLKKELHALVPERAMSAGSERAQEAEKRLKDLIDDDQADEESLSRSKRESLKEGYSAMFDSLIELGEKMALVARYGKLMTTLIPTDKSPFPATVKPRGETIPLWEGAARTAEVRAALASALTSFRPDLSVPSLPSEAALSSGTSLGRADTVSYAVSHRAELQRDEAASDAATPATVASAAPSSPRRSSLSLDRNDRLQPASADGKGSTQKLNLSPSTLPAPLLPPRPNRSPSATSDTLRSPQPDPFADPVAATSAAHPSVQDEEASGPPGPTVAETGVVPSGPGGPKSGTLRPRRASAGQRSASISAGAVAYLGPTGTYSHQAALKVFGETGTNLIPMQSITGAIDFVRRGTPGNAKIAIVPVENSTFGPVRDTLDNLLNISNGDRHAMRPSEGAHLHVVGEACLAVDHALLCGPRTYQRLLALQDDSDANAPIRDDTLSNITNVISHEQALGQCARYLTRYLPQARKKAVDSTAAAAITALEFEAGTAPGMASGESLGFSSNSLVVAVGAEAAVKTVGVRVLRSKIQDVQDNRTRFLVLASEPLQSLLATNSLPASLSRLYSASAPVGMVGRSLLGVHDAVSSDLVAESGSYSDLPSVLDRVVPELSRCTEVSIRKVDRRPASMVAASGASSVWRGSYVFELQYSAAAASMAEAKIRQLVTQLTVGSSAIRTVGDAAPVAYLGSWLVDGASLRGEPLLGAQSGAPLSATPQRIGPGMASSASAASGFSDLATPGHSGAVHLPASGSTSSDLSQSTLHAGAPMSERERKEREARQEAAEVQQHAAQARLVRQQQQAELYGVEAQPSGAGATRPEPLAGLQESEAEERLDEGEGLPAYQPFDPSSRT

SEQ ID NO: 41319 - protein, 710 aa, Oryza sativa
MERKIRRNDSFSISGSGSLSGAAAVDGASSSASISGSGSISGSASDSGSQSSAKSQSDSGADSSAKLGADSGAQSSAQSSAQSSAQSSAQSSAQSSAQSSAQSSAQSSAQSSAQSSSEASSQASSESSAHSSSQSDANSSSSSSSSNSSSQSSSQASSHSSSESSASSSSHAESQSGSSANSSANSDAGSDANAGSDAKGSSDSGAQSNHASGSSSSAGPTSTASASGTAATTSSTPCTDHKTGTHSSSASGASATSTASHASAASAASAASASATSTHSSGSASAASSTPCTESNKASSTASAATAQKTPEAESSSGSQAASESSSQSDAGAQAAASSNADSTAQSSSQSGSSDDDEDCDDDDESEASSTATSGAASGASSGSASNSGSSSNSGSGSNSASNSGSGSASHSVSHSGSNSGSSSSGSNSGSSSGAVSGSSSGSSSNAGASSTAGANAGSSSSGSSDANAGDDDCDEGGDADATADDDEDCDEDETSNTGSDETDEDCDDEDSGSSSNAAAAAAASSSSSASSSSNSGSDNSSNNQQQPKAASSTSSSSAAPTATPQAQHDQNSNKASSSSSAPASSTSASGAVASAAASASSSASSLANAVSGGFATFFYQNGNAGACGNRNSDSSAVAALQSQTYAGGAHCGKRIKIFRADNPSKSVLVTVADECPSCVNSESIDLSVGAFTQIASESEGMVGIKWEWA

SEQ ID NO: 41320 - protein, 932 aa, Oryza sativa
MPSSSMAAVEATLQSNGQADGARPPLSVALHVPTSAVDQVNSVQGGSAPLSGNPNRRSHIQQNVQALPMLPEASHANALNTATGPAPAALGLTVDLDPTTSAALNGLSPAQKTLTLSRSQGYDAIVLELANERWKDRWERLCLANPADLPSASGSSATPSPLSAVQMSSGGAMLARSSSRQGLNSFTPGGVRQSPSPAVSSAGQSPFGSIAREAEEWRKAPAFKRSEVNLTKLEETEGVIALASQWIELDSPDEGVRLDCELALRQELAYASYLGIPNVVIPPPSSDPARKPFLADYARAINSCLASGSAETAPAGSWMTLTIQLPVSSPYQLNKILQRQNGKNGFGLTASTTAGSNASASSQASHASATSSAALLRAEDDWAWETWEQIRQLCAYNTRLQIALDLGSPLPGPSILARWMAEPVSMLWVPSVSYLANAKGFPVLSKASQSFFRTMFKKNPTVVLSGVQSPPPTHSRGGPLAYLQYLRHLEKAAPPDGAVDSFARGYTDWLQAPLQPLMDNLEGTTYEVFERDPVKYALYEEAVYKALLDRPASASTLIWVCGAGRGPLVDRCLNAADRAGRSVKLVALEKNPNALVTLQERQALEWGDQVRVQCGDMRRHPVPPSMADRPDIVVSELLGSFGDNELSPECLDGAMRFLKPNGISIPSSYTAFLSPLSSAKLHTEVLNGSNAALTSAVQKAAETPYVVLFQNVALLAARGGRLNSEQVQESWTFEHRPSAVTPLVYDEQGLPASNGHNIRSAKHTFHIPQAGTCHGLAGYFEAHLYDNVVLSIHPDPVRGSKDMLSWFPIFFPFREPLYLPANAELDVHMWRMTASDRVWYEWSAEAFLPIPTAVDAAKQRPVSLDASSSIGSTSTAADQHFANAPNTPRIPSLNLPNGPDALQPSPMQISTRAKINMTRLHNPGGRSSWIGL

SEQ ID NO: 41321 - protein, 759 aa, Oryza sativa
MGPTASAAARRSTRQPSTMTTTMSRRTAAAVAVSVVLLLLSSCLPCCSEARLHYHRRQHRRAPHRGHHRAAAAAAAATNGGSHISQPPAALPPDFDSGESPAETPGLPPAGVEDAPPRRSPREKPCPTMQPPVKPPEELSPVGAPRSRVRAMPPSPSLSPPAKAPSHSHAKTPSMPPAERPALPPTKAPAAISPATPPQLSPANAHSTHHHAKPPSLPPAEPPVPSPSPEHPPRHSPSKPPAYAPAKPPTALRPAIPPAAMPKPPSVAPVQPPQRPPAPATKPPPSFPPQLAPTMPPPAHAPAETPAPPTTPPALPPATTAPSPKNSSSSPPPPCTGGGGGISNVFDVRAFGATGNGSSADGDTRAFRAAWKAACSAESATVLVPSDGVFTITSTIFAGPCKPGLTFQIDGVLMPPDGPASWPAADGRRQWIVFYRADGMTLSGKGTIEGNGEEWWNLPCKPHRGPNGSTLPGPCESPALIKFVASSDVSVQGLRMENSPQFHLKFDGCSRVLVDGLVVSSPASSPNTDGVHVENTSSVRILNSRISNGDDCVSVGGGCSGVRVENVTCVHGHGISIGGLGARGARACVSNVTVRGARVVDSDNGVRIKTWQGGAGSVSGVVFDAVQMVNVRGCIVIDQYYCDAHGGAGAGCANQTAAVRVDGVAYRGIRGTYNPRGGGGAPVRFACSDTVACTGITMTDVELLPAGGGDEGGGASAGAKLADPYCWNAYGVMETLTQPPVHCLQEGRPESLQDQLASC

SEQ ID NO: 41322 - protein, 955 aa, Oryza sativa
MAGHTPNPLFLLLFLGYLLFAAAQPPLTVTVGLIIDGGSPVGKIANTTIPMALDDFYAAFPRSPARVRLLHRDSRGDVVAAASAALELMEGRGVRAILGPQSSVESAFVADLATRAEVPVVSFSATSPSVSPGGGRFFARAALSDAAQAGAIAALARLFGWRRVVPVYQDDDYGAAFVPFLVDALTAEGSEVPYRCALPAGADADAVAAAMYRMESLQTRAFVLHARPDLAGRVLAAAEAAGMMGEGFAWVITDGLTGLLGSINAPQGVIGLAPYVPTTPRLRDVRRRWVRRFMAEHPAADAEHAEMGSYAVWAYDAAWAVASAAEHLTAGDLSPPQGGLVGGKGGPTDFAGLGKSRSGKKFLEAITSTTFDGLGGRFQLVDGELAVHAFRVLNIMDRGKERSIGFWTKDGGLTRHLGVGGGGGGELAPVIWPGESTVVPRGWVVPTSARRLRVAVPGSVNPGYRAIVHLDVDAATNRTTAGGFVVEVFEAAVRLLPYALPVEYVKAESMPYDKLVQMVADGAFDAAVADMTITAARSSYVDFTLPFMASGIAMVAPLRDVGRGGERTWVFLKPLRYDLWLASAAFLLLTGFAVWFVEHRGNAEFRGPPWHQLGTLLYFGFSTLVFAHREDLRSNLARLAAVVWFFVVLILQSSYTASLTSMLTVPRLEPSIAGYAALWRGAERVGIMNNSFMRGAMTRSGFPPARLVPYGAAQSFHEALLNGTIGAVVDETPYLRIFLKSYCDRFAMAGGGGGGQPNKTGGFGFAFPKGSPYVADLSRAILALTESEEMNLIERKWFGESDGCAAAQAAGGPFTSDSLSFGSFWGLFLITGVTSLLCCAVHLATFVASNRGAIRDIVATSTHPFRRLAELYDGRDLSAHTFKAKDGGAAASPPVVHDAAGSPISLHMGAWSPQPSSTMAGGEIEPAGGEANEEEATTTTAARDPDGAGENGRGQ

SEQ ID NO: 41323 - protein, 900 aa, Oryza sativa
MAPSELRYDGQTVVVTGAGGGLGREYAIFFGSRGANVVVNDLGGSFKGEGAGSAAADKVVNEIRSAGGKAVANYDSVENGEAIIKTAIDNFGRIDVLINNAGILRDVSFKNMKQADWDLIYKVHVQGAYKCARAAWPYFRKQKYGRLISTASAAGLFGSFGQTNYSAAKLALVGFTETLAKEGFKYNIFCNVIAPIAASRMTETVMPPDVLEKLKPEWIIPLVAVLTHKSSTETGSIYEAGGGHIAKLRWERSKGALFKPDESYTPGAVAARWKEIVDFSNAEHPEGPAEPMSLLEAATQLKPSPKVEQPSFKDKVVLVTGAGGGLGRAYALLFAKLGAKVVVNDLVNPDAVVQEIQKLGGQAVGNKANVVDGEAVIKTAIDTYGRIDVLVNNAGILRDKAFANMTDEQWDLIHQVHLFGTYACSKAAWPYFLKQKYGRVLNTTSTSGIYGNFGQANYASAKCGILGFSRSLALEGKKNNIYVNTIAPNAGTGMTRTIMPEEMVQALKPDYVAPLVVLLCSDKAPEPTSGLYETGQGWVAATRWQRTGGHGFPVDVKLTPEAVLEKWERINNFDDGRADNPFDNASGLKSIMANMESTSKGKKSDSSKVDYLKAIEDAKAAKAEGSEFQYDEKDVILYNLGIGAKRTDLPFVFESNDNFQVYPTFGVIPQFNAVPPYSFDDIVPNFSPMMLLHGEQFLEIRKYPIPTSAKLITYPKLIEVMDKGAAGVIVQGTTTVDAATGEEIFYNESTVFIRGSGSFGGNPKGGNRGAATAVHKPPQRAPDAVVEEKTTEEQAALYRLSGDRNPLHIDPEFSKVGGFKVPILHGLCFFGIAAKHVLATFGQYKNVKVRFAGTVLPGQTLVTEMWKVGNTVVFQVKVKETGKLCISGAGAELLGGGSKL

SEQ ID NO: 41324 - protein, 1173 aa, Oryza sativa
MAASDAARSAHASLGAAAFAHHPALSQPQAAPDTLSQEESAAYDLQKAMAPSPVAPVSLLVRRANEVIRQLAAIATEQVGTNGLAESDGPLWSPQSGVYLPRLAHATSSVVSAIRDVPYATGSLSLSTSDLAAISKLVSPSPAEADSRTALAPDFPLEHKDIDLNLLSSVLQASHASAHGKGASTALQRCGVYSKDSLAPIPSSLHPVGRKLNAVVSKLVLSSRQVIDHTVTLASSPTSSMESTMTDLDADVFSKLYQCRQRLREDALELMRTLQSLSSEAEKVRSTALSAPQSRGWLRRVEGSLESDLGLNGIGSTSFGSGMAASWLGNGFVLPSKFEVALIKAEGKGTRKHNPFDQRREAESAVVRGMLTLRRIPDTRFDQHVVKQAQQLSSQLEATNDTIVAAAKPAAAVQPGLSLLSQYGAFEALVEAIDLASALDVDGPSPGEAKSSSISARNLTNAQKARSLMRRLVTLKQTAYDLSCSLFTAVQEHGEQTTTSSASSHLQREASRLTRLVSTVSKTLEELVQVAEEQLRDASPYLGARAAVHGSEEGFSLPSTGIFSHKINTTSNGLHEEVEEMARYAANGGPDAEEESEFMYLGPGIAVPNGPRARSGSRATTGSTGNSPSTSLAPARFGMSNSFRNRSTSVTTGGSTRSMQSYTDASSRILSRRGTLVDGSTAESIDEDSESVRTGGGKLRRLLGDDAPLTHTLTHDSENSAGTGNTGSTLARRKEDEVPWFLEPDYMGDDIVIAQDGSVKGATLEALLARLTMHNSFDASFNNTFLMTYRSFTTTQTLLDLLAQRFRILPPDGLDEDELALWTEKKQVPIRLRVFNVLKMWLEMHFYEGEDEPYLDQVRRFAVEEMGEIASMKAPSQHLQRLVERRQGEGEQMIRKMVLPTSAPAPILPKNLKKIEFLEIDPLELARQLTLMESRLYNKVKPAECLGLKWTKPGNEVHAKGIMESINTHNRISAWVAETILQQEDLKKRAALIKQFISIADRCRALNNFSGMWAIVSALSTAPIHRLRRSWDAVSQKHVAVFESLENLMSASRNWANYREMIHKLNPPCVPFLGRYLGDLTFIEDGNRDRLKENDQLINFGKRQKTAEVIREITIHQSTPYNLAVVPALEKYIETNLVDARSADDLYEQSLALGPREREDENIARLLQESGFL

SEQ ID NO: 41325 - protein, 884 aa, Oryza sativa
MAIVSGASAADLRHMAPTDDQLSALPMQRGALLSRRISSSASLGRSDGAVLGTGALTRGNLAALPNGSYTLPGRLRSHTLAHAHTNNEFAGRPALARVATMDSCRASILTDSTEFSTSSTVNRGYAARIDVNGKVKPLSSAPARHACQTIAFLEGPTDSLDYKTYRPGDEIKGAVHLLRNDPERGYITGIKARIRGDLETSVFGVGDSSYYSMDNEHGIARRQLLFFSEQKTLATKADLESGSFELESTGLVDHGRRNNLAVPFSFVLPLKLHASALDMLDSKLKKSFKRGKQYIDLPPSIDMETRYAPPRPNQLFGHVKEKLHGQKLRPMAKIKYEIDIIVSRQRFGSVLLPHKRGERIILAFAVEPYPPRTAGLAVPTLEPIRARRVASRDNRSPSTERVAAPDAASVHSADGEGEDAIDEDSWAPDLGGFRRTQEVFGALPLEDAPAFAPSSIARPASVRPGLPPLRRKSYINVKEGVDGRMKGWLTHSLESMLPDGMGSFEAILSVPAMAALYMETKIPFSLELRMPAHLVDTYVPDVELGLVRSVMTYSRLGTLVIEKEDPDKLAGFSGPHSWSERIRLVNMERQTDNHLPPFYEQGKARQFYTGNFAIGRYEKMIKAGSSAPLKQKLIRAPELRLVVPSFSFKALRVEYRLRVKISLPGATEAFASTSAKPGAAADSLVMETPPVHVAANPDTVDFTRQNAAEALDDDALSTVDVLDEDEERLVEASATRIMRSAVAAQFTSSAATAMDEDDEADEDADDSAQATPLARTPLRRSLDMTMLANSGDVAARGQELASFAASISSDSASSVLEVPSLDPIPDEADVDEEDELTEHLALGLIDREHAAAAAAQSRRRATISQSHRDTNSLPSYSDSIGILG

SEQ ID NO: 41326 - protein, 1551 aa, Oryza sativa
MLWLVALVALAIAYLVWLRSMRAPTAAPAPAAERRQHRRNSSVERTVSSRSSGSSSTAATTEPDHSSSDRTTSRRRRGLPASPSSNQAAAGLAIRPVDELPQGVPQGSPISKHALQSPWGANAPLQRYTSEQREPVAQPVYSTSGASMTAFTPARGNTTAARAFGAATPFSFGSSAATPAAVTVASAAAAAAAAGNTHVAPSPFGTRTAQLQQLQQAQLGAASKLASASASVPPSSSFSTQQPLFNHTPAKFVPAFRQQQQQQQQQSPYGSLYSQPGNTSSTLAAGARTPFGRQQQQLGLMTPVAAAVAANPARGALPSPPAALAEQRGLASPPQAQPVPVPALQFTVRGGKESVTAMDTTSSEQTKSNISNSDESKPAHSRNASGAAAMRKRARGAEEEEEAEESKRAPSSSRSTAARAEESAAMEDGEASGKVNPWLQWVKSIPLAGGSATAQQGAAKRAKPAAPEPVPVSDTQAPAVMAMMDETGDAPDKQRAGTKRAAAETPSSPSSVAASRNRSDAEGKDGADDEMRDQADAADKDNAADARKKSKVAPVVVPAAVAAEEDARPPTRAQSQEVVVVSAAPAPAPQPIVLTFPPAGAVPLALPLNGAPTREPQGRLRFPTRSGSVTRTGSNTAAAAASRSKLFASGSSTAEGSGDESDAGSQALALVPASSTSAVANLIGEQERLADRVRSHQSVMKILATSASSSKKPRKQDSTSGAPAVAVAAAPLASSPAPSFGGFGAAAAPSTSALSSSTAPSFGFAAPAAAATDSTVAASATAPTAAASAPTGFAFGAATPAASSSSSSAASTAASSSSSSSDTTSASAPGFAFGGFGSTTAAAASSTGSALGGFSLPAASASSAASTSSSASAASSSAAPSFGFGAAPSSAASSAAAAPSFAFGASTAASSAAAESSSTAASTSAPAFAFGAPAAASASSSAAAPSFGFGASTAPAAAEITAPAAASSTGGFGGFVLPAASSTLGGASTTASSAAAAPTFAFGASSSAAPATSAAPAAAAAAAAPVSTPSFQFGGTAAATPAPAATGGLSFGAAAPTGGLSFGASAPAATASSAPSFGAAVAAPASAAAAGGLSFGAPSTGGALGGFGAGSAPSAATPAAASTSSAAAPFAFGAAATPSFSTPAKPAAESGGFAFGAAATPAATATPTPFAFGASAAPVASSSTAGGLGGFGAAAAPTSTPSFGGGFGGASTAGLGAPTSSLPAASPFGGSSSALPSASPFGAASSAAPAFGAPASAAASSGGFAFGASTAAAPTSTAASIGPFGAQSSIGLGASPAPFAFGASTASAPVATPSSAGFGLSMAPPAATPFGSAAAPAPSPFGGAPAATPFGGAAPTASPFGGAAPAASPFGSAAPAASTPFGAAPSSLSGGFGSGAAAPGASPFGGAPASSGGFAFGAGAPSSTPAASTPFGAPTPSSGGFGAPVAFGAATPSSSGGFGAPSSSSAGFGALPASSGFGAPSGGLTQSASTGFAFGQQQPQAQAPQMSQSFGAPSSGGFGAPAPAQLTSQPSFSAGGFTAKPTGRRTGARRK

SEQ ID NO: 41327 - protein, 1072 aa, Oryza sativa
MPRPPGTPADAPVSGSSSTSGKAGDVKCLTFYLVLRFPRRPSGHVSFVGSRPSYSRSSSVAGRSQRTRSRASSAVGADRDARELHRDASTDSLARLGRLHNAHSEFAAAIHPSRKAMIDSNHTTPRASRTASPAHAHGNLKKRDGSMASHREGDRHRRDPHELERSSLGLTIETSPELLRLAAKQSSAQNSPSPQSAPNSRATSRARSRKSSRARGMSASHRSHASNKVFVHVTDTRALDAVRKALSIGGTTTDYNPDIEPDYDDAGALWASPDLRAREAMLGEDSDTGFSAGALDLKLRRPGSSRRRHASYRLASGLAGAASEDADVGETPTTPFRPTWSEIPAGAGKQRSTISHGSDDHEQYSRGRSLGPAGSVSAPAAGIPFPENPPRLRASSNLAFDVVQEESSPSTTAQSASQSRTMVDLWEKVGATATASAPNETPTTDDAGDFDLSVTLASLAALTGAFSREDQPPSWDEITKLVSAVSSYLFRVQGEDLGRFAQELDALSFDLFKGLTPVAGVVDRDSGGTVQAADMAQRLLDLLGENASSREVYMAVDTRCGEMLETQPLYFELVASGEVGWSSAAETIYLMRLLNTVLPRIRTKKPQGFSPVFGRLPQCLMLGLDAMSGVAEAMCQKLADEAIKTCCSTALIVADWELHCMGTCEREPVRKTSREVLGRFLQGVTVCLPHLDGAKRALAEELFFSQNPRYAIAARAEASSVKRNEPLFAEVSKTLSSLEVDLGSIWSSALASMARAPEDDDTRETLSALGVAGFVLHVHLLYSGYARDRPSEWKGVRAQTQLEAALPVALLALGEQTKAAASPELDEGKEDALADTSLVWMQWCMHGLERDASASRYILSADLASCLAQTLATQSVISPSPSARLIRFKLLTSLLVDRCEKAVSVRVLGQVISESPFAQLRAGAISILRTALATWTAPMQAGQDGDEVPVQGIVALLGQIIVVPARLLPTKGRVSEDKQAQLGAVAEEGAGLIETLSLLYSLEMQKKAGVASAALDGIVRGIDGYKASFVEPLAAVMEGLGSVEPNASDDSAAQQRMQLQLVQSALHRLQSL

SEQ ID NO: 41328 - protein, 1310 aa, Oryza sativa
MAFEPVRGFLAVGTTLGTIHLFGSSAVQLSFSLRPAHRVSHLAFKSDAGLLVCIDEKDNISIYDLARPDPQIRAAHGTSSNQYRPSTASTGHSITGPPHPDTPQRVGVHSVRNKVICVEVSSAHSHMFLGLRDGTVDAYDLERMCPSPYRVPNLWWEEEEILRKSGVPDAPNRRHVPLIIDIKTHPKDINQLLLAYEGGAILLDVRERAVLKTFQLRLLPGARGAGGHPDLVWTERAPPATCVAWRPDGEVFAMGHEDGCISFWHARDDDKPLMVRTLDCLDVDKPITDPSLMDMPRPPKEPIFKLAWSGFPEKSWMSMASESAASWQSQPHQRASSSNEPIDEPVKGTLLTVLGGAGPEMDMPGLFCSNLPPYAAAITLWGGANAEASRKLRQALRDSLVPTFESVCPTSSQVEDFMLLPRNNPHYSGSYDPTAVVVLLAADPALPTLPPPAAARGLACFAYPPRTRSDSRAAPDPQAFQPGSNSVPIQPQKELHLPLPLTLAGPGAILGAKVETLMPHAYRKLVGPLDVTGLNQKQEQEASGSALRSSFNHDKPPLELAGGKASACLSGEGSDGIPELLRSSSFRILITWHLDGSVRFYDASPHLLLMGRVDEDDLKRQLASPRIWLQQSFPSPLPHLTIDARALLHSPAMQGHATFDRIRARARIQDVQFATEVLEASVVLSTGQVLHMRFGFAQLSETEMINDEVEESIKRQEEQTHLLIPPVKSPRSSMHRSSMSIASPQSEAAAATSQALDAEMSKAMQELEVGTDAAVPGTTAPPPRPRRDPKRASLNPGQQAALQQPARIPPGPPAPVPGPPAPGSFEHEEIVLLHHLADPRYDGFKPNLMVDPMRGEITALASSDIGFLAVACGTALAVLDFRCGELILKEGFGGHESEAGGPGDAKTLRKAIEAESKSPILQLMFSMCRIAEDPSLAPRLIVVRANGVTTVWTLQRTLDMWMVERSGTHKLEELVDARGLHVLDTKGRACNAHPQDLQRALREQEVGLAAGSTTELPEADVLLGFSERQVTLRYGITGPVVSRAEMGEGVLGCSVVERAHDKVAAVVTASSIRLLSLPKLEPIVRLQRHHREVGESAGWRACISFDANGDFVEVCSSLDVRLWTMFASLRRPGQPSLTLVDPTAAPTVPLHPGAVGSAAGVATSIAGWFGTKTTGVLSVGAQMDAVLAGDKRPEPPKLGEALAPRDYRPPLPPAADTERVEMSERPTATGSSAATARRDPSRSKAVAASADSAWATSYQNIDLLKARGAMMSGIEDGLTNLERGASNFLKSTREAAIKGAAKDKLNKMFF

SEQ ID NO: 41329 - protein, 943 aa, Oryza sativa
MSVLAPPPSPSPSSCFDAMLSDTDINIDRAMPPTSLKRKASSTKSRAAAATHASSSDAENRPLIQSSSASTIAKPKRAAGVADMAPSKSASTSSPAPAAKKAKLTSSAALVELKNGKLVLKQKPFNWASTMPVLKAVITFQEFLDVHEKLDSIPQDHLHVIAKLAQESDKSLVELAKAIRSKILPEADLGSSESDDSATSGAGAKAKLPLSCIQAAISAVAERRNYGIDAAIAAPHASSSDAADAVAVPAPLQLWRWEVTDLTMLPSEFIEKLLQRRSERESARTQAEQLFSSLTEQEKQALLSKSTKAKISATVAADAQVHTPAGSSASQSIAIDDDNDDGSVADTEHDRKAAQAPSTPVASRKRKSPSSTSTPQSTAKSSAMAGDTSASATSSPREKKRAKDAVELSPEKQKEKEEKDAAKAERLKAKEAKRLEREAKELEKQKAKEAKEAEQKKAEELKQRQVNFFTSFVKKAAPKSPSKSVVTAAASSTASGKPAEDVSDFDRTFLPCQYKDLAPINRFASRSGSKPELEMGQDDLSRDEMLSQFLTRASALSGNAGTRARRRKGVHPPASVREIKRVVTESDVLGGNAQEQAEKALETLQDRGKVQMKLLQFESDRRPGWYGTWTKSTNLISPRCPLGQDPVSLDYSYDSDADWEELGQVEGEDVQDGEEEKEDSVGDSDEDSEMDDWLVDDLEVEEEEEQARSAANAMDVDDEIVEVDKLGMPVPAQPVTTNLLHPKKKKKVKLLGRRFDAKLVPFSTGPHWESEFGRCDYDLFSSYRIELLNDACFGLNPFTFTSAEPASSTTEPDEAGIVDTPTKPRRGLPAGGVLAALWGDVAVASDAPPAHGAPAADKPEAAAPTAFKHQLHPDAIAPLLARIHGSTKTRAGLVDDLKEMLDQLAMPASKNAIGERLTAYATKEKKPNAPWVVKPAFAHLLPS

SEQ ID NO: 41330 - protein, 933 aa, Oryza sativa
MQGGDRRRGDGAALDEPGMEGRDRAAALAEQPDRRHPPARPIARRVEHRIDIAAARQEGRDHAGCAATSDLGPLSGRSGHHGGRQGARRARDGVAHASGRRRARSVERQARCDQDAVSGPKGAAAPSVTLEKSLTAFYFELLVAAIDACASVVEMPPAFKGAEVYAAIWRNALCGMVPEIVLQLEQWLDVHPDLPLRGQRVEAPHVRFECALRAALLVMAARLDVCETAVSEPAVANGATDATTGAEMDVVGLDTPPSQPIKAWLLRACIEHSLARPEAIADAFPEGHKLASEVQSLAQSLRMDAQLEGLALNTLFETRVPTDDPMELLQRVASDPGTHFSFARQLVVQVHAWLEQHDLESIARWCRALGDDATHGGAMLDTIMLYIDPAELVHPLAGILDHQDLGQTSDEPATLSNIILFVQLLCYRYSVAPSRISRSTSGASGEMEIDDTTGSSEAAGGRPFLASYLASASVCYPLAALGEEERGLVGRWVHALFGNEGISDDLIQASPPTTLLRLAPLLFAQSIGACVHGVIDLETLRGGLSYFLQDLLSFTLPGALAWLLAEIARVPLQPILDVLTEAGLQASVVDVPSSDGTLANGLPRNANSRTVHLEVVALLLDTDACPAIVRHLIARPFDAFVQAVEAGGAATLEVGSETFNMASLKARMEATGVTAQLLSRRNSAWLRALANQTVAQQYASVTAESETITMLCGPDAASSTLDRLMGAQGRGLTAHSVAEQKALATWLCLLAPQANEVHPALMFVERVQLADESNVEATLRTTALVLSLARAAEAVRSHDTSTTSTAEAIFALATSTESNGLRKDSSAADLFDDEPTTPPLPGVNGDAANDSQSNGARAGQSVAALLSSRAFGLTSAQVEDLLARKLVRLEPSTPAIWHSVEAALLDPSELGNDEGKESAHKDAIKTWIEVLRS

SEQ ID NO: 41331 - protein, 825 aa, Oryza sativa
MDLPSMSDVQVSELPPFLQKLVRLPPADRALALAQAFFDIEKAEQNRLIATMQQHSAESDCDPRAKDFAAAQAAAMQKPSLGVRHLDARSHAFPFSIAAALERGADNRYNNIWTYEHSRVRLSKPQSAHDSGSDYLNASFVQPPQQLGSQRRYIATQAPLPSTFDAFWTAVWEQNSRVIVMLTREHESGRLQSHPYWLASQYGDHIRLTKLEEIVLDQQGNKMRSDECEGVLGSSADQGGALFPSMPSQPQHHSASAAKREPTTVRRTFLLKNLAEPHAEPRRVIQLQYIAWPDYHIPETPESLLLLIDMAAGAQNAADADVRNAVSRGRTGTAGPMVVHCSAGVGRTGAYIVIDATLDALRRVRRRQKLAATGRVDPSQVPEPPAWENALAGAGGAVAAAADATPEVEMAPASSPLGDRFPRTPRRSLKRELSPTGMDIDMGSTHGGSSFGRDLSSPPPMFRSRSYESSSGIDAASNLSSSLGSQRSAGGISQQLAPEAQAQAGESAAGPSGFINPFSSPTFKFNAAAMGKLRASAMHSGGSNDSAASAVASPKQEGDGAGLKLHSPTRGGGALQLPPHLSSDAWRQASSPFSEVSTPSFHGGGSARSSFSSAAGVHSRLSSANGLSPTTGAVADGGSRSIEEALLSAMNPFELALSQSSQGDEAGQADTNGPSAAGDQSTSTITGSNEPTPFDVASSNSFGFGAARGDSMSASDSAGSGSFDALTGTPSTSASMTSVADTAAEPQVLVAKDNVRLTSALKHDGASPQKAADQAYVEGVDLVKTTVETVREQRMSLIQTGRQFVFVYSAVLAGLLADLEREGVH

SEQ ID NO: 41332 - protein, 1243 aa, Oryza sativa
MSQGPSMPQMSLLSQAMQQHLTRQQMDAMASHDPNAASATHTPSGSALPSPALAGPGSPFSYGPMSAGADAASRPSFPHQGSFGAAAAQMPFGSYMAQSHSRRASGYATNPHSAAPSAGPSRSSSPSRAAHAPFDATSDLASHPARSFSGASQAGPDYGTSFGSQRTHTNGVPHAMPVHSNPAAMTGPGSWTGQQGLSFAPTPQNSFVPNQSAMLPPNNFQPASLYQHQPQSHPQHPQHLQQHSQHAQPLSLSHQQAAQFNNYRGGPDALLSPEAVASADSAGFFASAGGATAAAAAAGAAPLTAPSAAASRRSTQDARSRQSTAGFPDELGVDALPGSLNMSRRGSAGAEDAADDEDLDPDEMSKKDPLATQVWKMYAKQRSQLPNGARMENLTWRMMAMTLRKKKEQEAAEAKLALEAQSNASRSHASSARHSPTLSSKSAGGSRRSSGSFPGDPAAFAGGFTAIQSDASDVPEQRSRAASGTGANAVKGKTRFAEVIQQEEEERGRRGRSPRTPESAATPAGAVDIVDWRMKSKSRSRSRSVSAMDVDWRGVSRSRSRAPMRLDTFDDEGNMDGAALFSRSAPNANAFDGFNFADLAQFDGTDAFGAFDSALDTDDFSDLLRPNGANAFQMPGYGGASAGGSARRTSSAARKVQMQNAFRSAANTDLFGADLDAWSAAQAESSRAAELRKASMDMASIGAANSFGAPFSTLDSIPGIGDFVSIAANQHPEYGFLPRLVRKTSFDHKVRERSMSRGPRRDQLAAEAANNRKRPFRDDLSPARPPMQIPITMDQRIAAGLSRNIASLGSRGAPTSSLSLSSVPSGSFDFAVPHPGSLPHQQLPLGANPALGHPTNRSHETATDFDCLLETLASQAGTPTTNLMTGASASPQTALGSGSGASPITLPNGAAAAGQQNPADLEAIMNMFYNSDAGLGGPQPSFTHINPNQVFGGPIDNMASSLGNLTASGDEASSNWTYSPSSGAPSNAATPPGLQHHAQYHRSPLSGSAKRELALAPESSASAASRSNASPSMQAIQKAAAMSEASRGKKVGSGPMPGGPGDAARGGPGAGPGPSVNLKDLPSASSMATADPPTVCSNCHTTKTPLWRRDPEGQPLCNACGLFLKLHGVVRPLSLKTDVIKKRNRASGAQRADARGRGSSGGGSGNANIAPAGGANSTAKNGTGSGNAGSGQGSGRSRTNTNVSVAGIRTGNIPIAPAPTPPVSSPGSTGLGSSVKVEKRQRK

SEQ ID NO: 41333 - protein, 150 aa, Oryza sativa
MGGQGGLPLIQQACLLLQLLGPLRLFLAARVLFALAPIKDLNPPTDRGFKLLHGAGTIVQGLAFSLECRSPGLQRGVGLRCSPLVGSGCVEGATRIPDPLRQVLGMGLVLKANIAQRFVQGARGDQRRLPLLLRLPHDGVQHLLARLDFS

SEQ ID NO: 41334 - protein, 1398 aa, Oryza sativa
MLSLIGSSVFHPSKRTQLLERANAKLGGDKLASIDAVYVHFVNPANEAAQAVLADAASPQRNVLDSLLVYGDNVDLPNTRAAVQSALAAKPDPSVLFVLPRPGSVSPWSSKATDIARMCTLKDHVARIERGIAYVVQPATASHLQPDEPAGLNDLLHDRMTQFISAVPPTADALFHKAQPAPLTHVDLLGADGTEDRAVAKQRLVHANEQLGLALANDEIDYLVDAFIAGKGDASAALRRNPTDVELFMFAQVNSEHCRHKIFNADWTIDGKDMPNTLFGMIRNTHKLHPQHTISAYSDNAAVIEGYEATRFAPSPAAAANGLSVYQGVKEPMPFLAKVETHNHPTAVSPYPGAATGSGGEIRDEGAVGRGSKPKAGLVGFMTSNLLLEGDGRQPWEEDFGKPAHISSAYDIMIDGPLGGSAFNNEFGRPGLSGFWRTRCERVPTDDGKQEVRGYHKPIMLAGGLGNVRPKNALKDKITPDAAIIVLGGPGMLIGLGGGAASSMASGSSSRAALDFASVQRDNPEMQRRCQQVIDACTALSDAPGVIEGQVGQGNPIQSIHDVGAGGLSNALPELVHDAGLGARFEIRDVLVDDPSMSPMEIWCNESQERYVLAVAAADLPRFEAIAKRERCPYSVVGRATVEQELVVTDRLLGSTPIHLPMPILFGKPPKIARQAASKTPLRIPFDSSLTTYLPSLQSEPVRMFAEAVERVLHLPTVASKNFLITIGDRSITGLVVRDQMVGPHQVAVADVAVTRTSYGFNESLTGEAVASGERTPLALISAAAAARMAVAESLTNIAAASIESLERIKLSANWMCAAGHSDEGARLYEAVQAVGLDLCPKLGLAIPVGKDSMSMKMAWQSDGGQREVTAPLSLTVTAFGPVDDIACTWTPQLRTDVADTVLLFVDLAAGKQRLGGSCLAQVFRQLGHEAPDVEDAGVLKAFFEACYTLKQLRVQKRDEGSLVLAYHDRSDGGLLTTVLEMCFAGRCGAEIFADVVSGDKADPVAALFNEELGAVLQVRAADVKAVSAVFTAAGVASNHLHVVGRVTEVEEIKVAAGGQVLMATTRAEMQKKWAETSFRMQSLRDNPQTAAEEFGLIDDESGAAALRYELTYNPRDDVLGSAVVEAEMEARPKVAVLREQGVNGQIEMAWAFARAGFCAVDVHMSDLVEGRVTLDAFVGLAACGGFSFGDVLGAGSGWAKSILLNPSVRSQFERFFQQRHDTFALGVCNGCQLLSQLAAAGLIPEAEHWPLFKANVSGRFKGRLSNVEITSTGGAQSIFLRDTAGSVLPAIIAHGEGRATFRAEGDLDECRRRNQVAMQYTDQRYPVNPNGSPEGVTAVTANGGRVLALMPHPERGVALSSMSWAPVSAHARGDKGWNGKGPWFRMFENARKWVDSH

SEQ ID NO: 41335 - protein, 972 aa, Oryza sativa
MAQNPRPGLRSQESLPDSFVQNGPASPPYQPQNPLDAMPPIYASQSNLAEHASHPDQHMIRDAALAALASGDAITSGSQAPSPDRKVPHQAAHDTGILTESRTDSNPSSRPGTAGPRVAITDPLAEFRDRNLSKPAGLGPKSDFPPHETNRTPGAFNYQHNVAYRPPFVRQDSELSSENGDRDYGEFDWSDEDDLDEAARFENEQAKQVRMGRLSLWKILNFLATTFLGNLIISCCLLVPVIVIQYVYRRRGPDEGHRDFVADNVQAWFIWAAFNLHVEWWIHLLVELFPKAVLGVIQLIWGRPSQRVLSLAEYFNAIKGYLKFLCYAALSWGSWAIIFNSVYGLYNHTHPRQSRAAYLYRIYQIIEFFFFFTLTICAEKVIIKHIAMSFHKSAYADRIAKVTKSLKVFDWLRDHKPKLKGRETGSAFGIPMRSARGSPSVSGANTPMTPNDFVLDGDNTNSRNASSSSKGTWFEKHSKKRPSDQAAYAGENDRAIDPATGKPAEGQAPARGSGKSNIFARTAARSRHRIRATAGQASTLARVAMNDPFGLLRNEALGIGTDVNSPAEAKRLARSIFIAFRGSHKRSYLVPSDFDSAYTNPQDARDAFSVFDRDGNGDISQSEIKNTVMQVYKERRFLGRSMQDVNHAVGQLDGIFLVVALVIIMFEALAIFNVDIGKTLSTFYSLAIAFAFVFKESAANVFDSIIFIFITHPFDTGDRIQIGEAVLVVKRMSLLSCLFVDSLNQDVYISNVILAGTSIINMRRSGYQWEAITAQFDFNTPLDKLDAVEEDMIHWLQTEPERLFVPSTAIVPQKIEYMRAMECTIGMTHADTWQDWGRRFYRKNAFFAAFSFYCKKHGIRYANPVQPIVYWTEDAAALPPSYDTTSSAQRRGSQEGEDESNGYVLDDFTASPYASPQIRAAGGAAALPPKKPKSFMNFTPPLDELEVSDSANVRLRKVKRGDKMLTTQGGDG

SEQ ID NO: 41336 - protein, 320 aa, Oryza sativa
MHSYSCRRLCSAPSFSATTSLSRAFSPRASSSDSLTTLASATACFRMSRSRAFSTRITRCDSTSLVFSWRSRFTSSSDARTQSRSTRSLSPHAAAHSSASSLHRSCSSDTSRSLASAASSSCLSRSASALAASSSACASDSHIFTCFASIVTSESATDRSSSAFRLFSSPCIAVRSSQRRALISSSPPPNTRSLTLLCSTAPPRRLTTAAAAEASRLALACCRVVISSLASSSEIFVCSSCFVWYISDSSILRSDSLAFSTSRCKSCTFSAASFSFLSSSSISDTFCRIAPSRRLCQKKKTRQSKSSRDKKKGKKKGHRL

SEQ ID NO: 41337 - protein, 927 aa, Oryza sativa
MQLIALFPVCALLSGALAQINYAAATDANGIEFWNAELSTDVGTGDAQFGMALPPADADDLAEEYIGRLVVPIPASGTWFGLTHKSGMTGNLILMAWPSGDEVITDFRYASGYTSPASYTGNATLTQISSSVNESYFELTYRCQNCWVWDHEGAAGSNIPGTEETSRQIMGWAQAAKAPSTPDDKHSAITQHASANMFYMVAASARNADYTKWAALAKPSETEAPYPSGTNGTSTAGPTSVPTGVACPTNNMNANQTYDYIVVGSGAGGIPLAAKLAESGKKTLLIERGPASSGRHGGTMKPDWLVGTNLTRFDVPGLGNEIWVDSDGIACTDYSVMAGCVLGGGTAVNAGLWWNPDPLDFDEGFPEGWKHADIEPAISRAFEKIPFNERPSKDGELYKAQGYNIVGGALAAAGWKNVSAGLEPAEKNRSFTHPNHMFSNGERGGPMATYLVEAKELPNFTLMVNTTVNRVNRDGNVATGVNVQAFLPGGQCGDIQLATGGRVVLSAGAFGSPKILMRSGIGPQDQLEIVKKAEADKMVDEADWINLPVGENLDDHANTEIVITHPNVEFYDFYEAFDNPIKSDADKYLDARSGILAQSAPNLGVVFWHSQVGPDGITRSNQWTARIESGHGVKSNKSISLSHYLGRGKTSRGRTTITSGLNMIVSQTPYINNENDLAATKGSIEMVIAALTADKQVEVVFPAKNTTIDAHLENYAQTTGGRSGNHWMGSCKMGPDSGLENGTAVVDTNTKVYGMENLFVVDASIFPEMITTNPSALIVSVAEHASEKILALEGSSSAGNTTVVPEVAPVASNATLSAQPTAPLSTGIATIESSVPAGNNTEVATPTATTVPEPVTSAAEATSAAAATSSAASSAAAPSASSAGGSTAAVSEWGTCGGNSDYKGSTTCAEGLTCKKWNEYYSQCIKA

SEQ ID NO: 41338 - protein, 1093 aa, Oryza sativa
MPDADTPQVRTQSQDPSRRGHHGRRRARGGRARGPVDGSHRGGSNAPGDDVASQASSPTPSAPRTSNEPSRASGEQRARRGRGQRGGGRGASGRGAAQPPAHRAFGGHLTTGTDDATPSARTLSGDAPEFVPGQPLATRTKRPKAPVSQEPHVKQPKSTAADLGTRIHDDISNWNYECAICTDDVLRTSHVWSCTVCWTVVHLKCAKRWYGNQKKQDDLQSSEPQREFLWRCPGCNSKLVDDPGSYHCWCGKEINPPPTSAALPPHSCGQTCSKPRATCPHPCSLQCHAGPCPPCGLVGPNQSCFCGKNASQKLCRETDYENGWSCQETCEDLLPCGEHLCSRPCHSGLCGECDVKVEARCYCGRVDKVIPCYERDELQQSYDTTKGTWFEGSFKCDQLCKRPFDCGIHTCNETCHTQEELPSHCPYSPDTVTHCPCGKTPLEELLDSPRQSCEDDVPPCDRPCEKLLPCGHLCKAKCHVGDCGFCDETIDISCRCGRTTTKSMCHQGDLQHPLCMRTCQANLSCGRHKCGEHCCAGERKATERQAARRKNRAAADVNSIEPEHICIKTCGRPLKCGSHDCQQICHRGPCGSCPEAVFHEISCNCGRTVLQPPQPCGTRPPECRFNCQRRPGCGHPAVDHHCHPDDISCPKCPFLVDKWCACGKEKLHSQPCHLQEAHCGRPCGKKLKCGLYTCRKLCHRAGECEDASLTGTHCEQVCGKTKLFCEHTCQNTCHGQTPCNETAACSAKAVVSCPCGGRQQEVKCLASSSNPTPTRPEIKCDDECLRLERNRRLAAALNIDPSSHTNDHIPYSDATLKLFKENLSWAEAQEREFRVFSKSPDEVRMRYKPMSATYRQFLHLLAEDYGLESRSEDLEPYRYIVVFKGPRFVSAPSKTLGQCVKIRETQAAEAAAAAAAARPPSPPMLAASEPFNGFLLTSPRFGLTIEDINQAFAADFSTQPSVHFAISFLPTEEILLRATSNYSAFLSPAGMEQALTALKPRLAKTVEHVDLAGNILLCHIDANDHIGRREDLSKKDALGWSAVAGRAASRSGTATPTEEPPTRGGRKLLGLKKKKVDKEMDKPWAALGGDVEC

SEQ ID NO: 41339 - protein, 1164 aa, Oryza sativa
MSIRSASCRALLEQAASPSSRTFHSASALLASRDAKSSSAAKSKKINQRRKEDEVSDTLLTASRLGGQAARIEKAISDRFSGWKPTPGPSSRRNAGRPPLSPDARKSLARATSPSNLEHLLGAHSNAVLSESLTDVDSARPGAKISARDFVMPRRDLRPGDFVEIRRKVAAIGIVLPVPEDEMPIETDADDKSKKVGHKDLYVLVTTGSVVLYRDTDVMFQIPNVIEPELVQAAAPTSRRFVVTTNSHETPVDTDGSYEDHSAGTSADADPIDGAALQEEPIDQTRFEARAAICTKMRILERQKERELQRLLPSFQSLFLVPGASQQSREVAKLRNKRTDLRTGTITTYEAAKLMQELFEMRASRAPDGKKKVGSREPAPFTASTVYAAYALLIEQPSHFLADGLSHRKSQLFNCRSEAERANLATISGWIAAPAGSEGQGFIDSFCRKASKVRQWSESQQYDASGAPRVIDTPEPLKDMEWTAEDRAIIEFLQISLGSRRELQADTHGSIASEIIKRAGGHFRLLPHPNTKQLLGLDEAARMLLTDSEQLLGRAILETVGTDLAGGPDLQHALVTRFLTEIGAMPPWRNPTRLDATFRSAMMSDDGGEPERDPTEAERAQPTVVDSKSIAKTFGVSTDEQVEAIRHDFGRDHPVYVIDDETAFELDDGVSVESVPGREKEQAWVHVHIADPTAWMQPGDSLAKRSERRFSTLYFPEARWAMLPDDFVRSGVGLRSSSSSDSGDHSEGQRVMTFSALADLSSGLVQDTKVRPAFVHDVQAITYKRASELIAGAPPAASEARRAADLSLLSLAATRLSENRTRSTALFPHRPTSSVSVAPLPLPDVPASASALQRPYFFAGFPQISLLSRAMDSQQGKKDEVPAMANFVVAEFMILAGRVAAAYGAEHGLAMAYRYQNAPQTRSVIEELLAMRTNMPDLSTVGAPPVSPIDDSGLIAHGLVPYDDLIQRGITLGSGGYSVRSGPHFSLGITAGTDSPYAPLPHMRDALTNGGYVRTTSPLRRYPDILAHWQLKHHLVHGKPRFGEHDIERLLPQLERQEMSGKQLMRISERFWLHLLLQRSILGTDAGAGLLNRPLTAVVALSEVRVNIQTLTARVRVHIEELNLPADLEWETDGPLPESGKSYKVELVAVSMAGIRAALLVRRV

SEQ ID NO: 41340 - protein, 764 aa, Oryza sativa
MKSLSADDRIAFDKDVDQDGYILPYGAKAGNNAAASAPFSSTKAKEAQNKVADWIRMRWNETVELLCALLAHEVEALRLEALQMIVELETSASSSLTRIAAASKASSKAGSSSKESPLALSTTPALWSASPWRALTLALIAGPPSLTKLGHGDAGTRYQVVRVHAGVSEDVRSKLIQSGLEEYDDVRFATLREISLALRKPAPSTLGNTQLRAHTLALLIQLTAIPTSADDLNNFLVDELSIPPLGSSGGKKKKKKKAAAGGKGLSVVDDGDSDDGQEEEDDDMTGWFSDSDDEGGVRAGATEGEQRRAADKKAISGLGAAARAAGASKRKRRTLHEMVHSIGAQRGAFSAAWLELLLPRRQTEKSAAAAGVAPGSLIGGELSLAATHEVLVRLHAQILPHLSRPTLLHDFLVSCLDSRGATALLALNAIFTLVTKHNLVYPQFYTRLYAMLDASVLHMKYRARFLRLLETFLSSTHLSATLVASFAKRLSRLSLRAPPAAIASVVPFVYNLLKRHPRCMAMVHKEWDGDRLNIGPAGVDDPFDADEQDPLKTQALESSLWELASFGAAAVAKGNSGGLAMGGDEGSILPGEAHYLGSVTSLARIFAEPFTRERYNLDDFLDITYGTLFETEAKKTLQKLGTKPDGTPRRRPVPALAYSLPGGFGAGGSSDSTTCNRVDIFPSESGRARAKASLAAAKEEEQREVEREREERKRKLGVDGDDEDDDEREAREAIEQLKSAERAKKRKVDQTGTHDACAMLFSFA

SEQ ID NO: 41341 - protein, 928 aa, Oryza sativa
MDSIPAEQWVAEYARWLRVHEAKLGDAAASAAAAKRNAAAARSASDASASTLSSTFWNVVSLGTANTSSPSPSAPTSASATAAALAARPMLLRQNPHNLYYLLIRFEALGLPVGSLDTNIPVAARPTSYFSFVAANASRKDRDDTMSISSMASRISVVSSSFSSSLSWFGGSAARADPSSDIKYIYSCFTKIPSLRLGPIPARRLIQDFEDCPGQSAVPLDVFKNLHLLELDDVDPRTLLGWDRLSIQLRSLSCKKSNIEDLTDLLVDLVILDTRRRRGEKVDPKRLRRNDPPPAETETETETDAPPSLPKDMPSLAWHFLRHLNLSSNNLTFVPVEPLLALSALTHLDLSSNLLNVVPPSLAHLPALVSLNISDNLIDSVLGIYDALPVVRVLNLAKNRLESLCGLERLYALQRVDLRANAIFKAGEVGRLAPLPAIAEVWVKDNPLVEELVDYRVDCFVEFAREARTIALDGEAPGFFERQRIAERIGSSTNGAATAARTTATSEHEEHEAQVAQDAATTSRHVTVVKNVRHRTASRSAPDAARGRGEHLDLPGQSQAKKASGSRSRSNSRSRRDGAGRRRNQRVVDLDSSPQKPMTEQRRERTLTDSDRIKHAALAGDTSAAMDSADPARTSDAATNGAAPSSTDALAAHAAMLFALPPGMAPSEPHEPSKAKLRTLTSRRNPIDSNTLGRKSAARPVASDLFATSDSATNKAGATGEVSESANASAAQEHVEDSPAVLARQRIARPRTGSAAALARRSRVTTSMYDPDLSVAEPAVSLHAGPLTGLVEEGAPSAVAPASEAAKPVVAAPPGATGKERSDALRRRIEALKSEVGDDWLRLLARGGGTAGERNSVLMLSSANDESTHSTAEAEAEAVNVVRPKRTKPSKKKVRNGDESTLSGRRSTEQPHAEASTAATRRREARIS

SEQ ID NO: 41342 - protein, 1101 aa, Oryza sativa
MTITTAGTAVNLAPTVTKTFFKHYYKKAKRSLKGRSGKAGNGSSTHNRHDALDEFMFDEAFHIVKAFIEIGTSDTVEAIQDFTDAPAPPIPWATTLPVMIPMESCDKAAKLIIDHLGPEDLQKLVGGEKWWQLRSTPGVQGEWIAMSNDWKKMKSMEKKAQNAAAQAESNKADAASGDPKASAKQHKRRRNKRHGRALSEIRAMRAKTESALKRRSQSFKRPSQDRKRSQSRPPVPGAPAPPADDAASAASSDAENAQPADDATDAASEADTDHGETESEELDRLQRVMLYFHGGGYYFGSLATHRYQIVRYARKFGGKCLASIYRKAPQYPWPCALQDAVASYLYLIDPPKGAKHRPVDPKKIVVAGDSAGGGLSLALLTVIRDMGLPAPAGAVLISPWCDLTHSFPSILQNTATDIIPPYGFIHKPSTLWPINATKPENEDKGKQRESSDEPQRKVPVGVQDADSPKSDAEEDTEPAARKSHDAGNLRPSQASAKPDQGQTSGSSRKENGGVPHAPDLLWSQPIKIKTADAAKQDIELREQIQLYATNDQLTHPLCSAVLSGSLGGLPPLYILAGDAEVLRDEIVYLAHRAAHPQRYPLREDLLDHSQRNRENAAKYDSQPTKVHLQIYDQMCHVLTAFAFTSQSRFAYRAVASFVKHVTGAPTSIKNPFPEVPEGAHGRGMDDEWHEDGAESDDDEIDDNVGGEVVSPPLASSLKSSQPSLMVSEREGASVGELATISLDDGVKGASHLRSEPDHISPAEAGQGELVSKAVESGGHADAVTDKTRHRSVSKVVSDALHGHPSGSQATSRSGSGLSPTATRAQRGTGDVANEYTGQVPLLRPSFQSFMIRERVDVRGYLRQLEPESDLPALQLRPDEIGCIKEGPVARYLDGQTQWAKRYTKTARKVEKHRARNEKLATTMLEEAAAQGLMDRDALRKLHGQLVRKASSGATEPGAVSAPSSTSRGLGLSAGDVATGADRCREKWSWLVDFGPMDLVDETPPPAAVAGRRDTNDALLLLRKSLQIRARAYGVQRKSRFWGAEDRPVRAHLRATTEEHQPGSAASGDHSSTHHHRGLRVWNLLMVKKPPSVASSKKPGKP

SEQ ID NO: 41343 - protein, 1060 aa, Oryza sativa
MFDEAFNIVKAFIEIGTSDTVEAIQDFTDAPAPPIPWATTLPVMIPMESCDEAAKLIVEHLGPQDLAKLVGGEKWWQMRPLPGVQGEWIAMSNDWKKMRTMERRTEQDEVGDGKRKNKTATVSAKKQRRRRDKRHERALSEIRAMRQKTESALKRRSQSFKKSPQEAKGQETAATQTDPDNAATPVDEGHVPSPKFDAAAEATTDDETHNHDAETEELDRLQRVMLYFHGGGYYFGSLATHRYQIVRYARKFGGKCFAPIYRKAPQYPWPCALQDAVASYLYLLYPPKGAKHKPVDPKKLVIAGDSAGGGLTLALLTVIRDMGLPAPAGAVLISPWCDMTHSFPSILQNTATDIIPPYGFIHKPSTLWPINATKPVKEENEEAAKDEDEQPRRRVPVGVDEEGTTKDDSDAEPAARKNTDGGNLHSTTAEATASAKTGNTPTTKRNGVPRAPDLLWSDPITVNRADPSKEAFELREQIQLYATNDQVTHPLCSAVLSGSLGGLPPLYILAGDAEVLRDEIVYLAHRAAHPSRYPLRKDLLDHSARNRENAEKYDSQPTKVHLQIYDQMCHVLTAFAFTSQSRFAYRGVASFVKHVTGAPTNIKNPFPEVVEGETAPEKNEGWEDGGKDADSDDDAGSDNLGGEVVSPPMASSLRSSQKSTMDSSGMGGLTPSTSATAENSLGGLTALSIHDGNSGSQSNSDALNTTESNADQPSSAEMRDEPEPMSAVEQSHDSPTGTTNGTSAVNTTKPRHRSMSKVLSDTLHGHPTGNGQTGPGASTRPRRDTNDVANEYAGQVPLLRPSFQSFMIRERVDVRGYLRPLEPESSLPALQLSPEDIGRIKEGPVERYLDGQQQWAKRFAKTARRVEKQRAKNESTAQKMLEEAAAQGLLDVEGLERKRGGLLRRAQAEGGEKPLVAGSNSGRLGLNSLDVALGADKCLEKWGWLCSVGPMDLVDETPPPAAIAGRRDTDDALVLLRRSLQIRARAYGIQRKSRFWGAEDKPVRAHLRAEEETPETATDPTSPADAEAEHRHRGLRVWNLLMVRRPGKAPSASRREKHTS

SEQ ID NO: 41344 - protein, 924 aa, Oryza sativa
MTQEATDPAQAKAQPQDVALPPSNTESSAPDGTTRPPAPPLERRASATQQPLRHGRKPIYPDSDAEAEGLDADVDDEELETGMLPGHGDHERSSLLSSSARKSNAIAAAGPLDRAWLKVSKLWGGDKAHAARIARRRKQRRSAAVSASQRNSRSIHTSSAASFAAWRHEHPYLVGTVYAILALLFTLIVLIGVAVAHLYLGTLKTPSPEAQSRILDESLLLKGPDRVQLLNISDQGILVRVDARLGLDPDHALDLWLGERGKQGWWKNKERKLVEWAMGKVAGVQVDVGDVRLSEIGAAWDQSVLPPAVLASSPVQDPQDMLAFHLDPLVLPLPPLNRKIQHGDTDQDSLRPPILGNHSTPAAQHNMSPLNLTVLLKPVVPAPYIMAYAQHAINKGIAQLDVKIAGLRVRGLAKSEIHGIIHGHKAGFFDVPRRIDIAQHHIRSPVLEKVPKLDNDTDIDDLLKVNGYEFFEIGKDDEPEPSGGGVGSMLVRALGIKAKAMAKNPLGKMLQGNVRYSLPFGIFLPVDASTPAKQPKKPKQPKGGKLGAEDAEGDQSEPDASVLMAAVATEPFRLSGQKIVELELLGRVVPPPQDALETRLPSEQLALGAGAQPLKSAYASADTQLDGKAAGDSPQQLALSNFLSRFLRGEANTVYVRGGSPFHVPVPAGSASGNETETMPGDGSELPEWMESALRLVDVPISFPGSKVTELIKNVTINDLKITPHPFEHDKLLCSGTVMGEISMPGQMSSIDVQITHLWPDILVSDGKPPSMLQSLEAAVASSWTMVGGALESLKRLAFVGVEEHDEEPKPEPEPAPPLPDPLPERAFGRVRPYDFAPAETYVDPTDPKGERKLLRARLTDVPFTVLPGRGGIFRSFTWKLVTGQGALVGIDGSSRAKIWNSGLGALQLRNLPVKGVFMLGKRD

SEQ ID NO: 41345 - protein, 930 aa, Oryza sativa
MLPFLQPSASLARAAPQLARQLPSTIRNRHGAHCLRRKSTVAGRATRAGSEQEALEESDDPYQSHSREGRKTRFSHFFDRRIPVTPSRQEPRFGESKTSYDITAASRQAITALRRAVSFGSSIEIIYAYDNLVRAHHRHVQDVTSSSSKFLAPSEVGFPMHKDDIQNAIQTLLLNAQKQGPIPPQIAEACQRMFQDLSRLFGFKIAANDLHRQLYCISRSTDVDQVAAFRELRESYPNWRVAPLRWGMIISPLARRGRYDQAIDVWQEMMESGVQPDMRLRELMVNLCLESQDTPARARLEGLAQGADDTAFHTCIIVVEGLCHFAARVLEVDEELLLRLRTHASHLRGLLESRAPDEARTAARDALLRFEAVDAGLTPAPETASRAHEPESPDQRAIEELLLGLHGDELNSVQSSDEAVELLDRILAATDPGRTIHPDDQCYHLLMLGLLSTSGTDINASAVEDAENGSTQSRALPTPNQVREAQLLYDHARAIGVSPTPQLVVPLLRAYCEAFIPSISAAIKLVQDMLDHRAERKTTDAAPSRSSDRVGMDVIGPVLDACVRTRDVAAARGLLSRLQSARIAIDVDDKALLIRPLISMASSWSEAFGIYRALLRLPISSTGESRGLDKRGYTELRRSLFELRFTEDQGRGERVMLAAPPEDLLGTLQDMRADGHPPTCAVYTAVLDYYSKTQPASAAGVAATHAMLKWDEELEPDLPLVNALMNAYNRIDEPTIVLAIWESLLATRQEFDSVTLSVFFDTAGRHGLLTLARKVVSTVHRAEEEAKERGTKRRTPMTKGAWDAWLECLARCGRLEEAIEVAFGEMRTTLLRQAIESHDLDDDGNAAGTVAEVMVRSMQAPVRDRNGHIVGPDAKTFGTLLKFAARKRDRRQRRQTGRESPIWHKLRARLREELSWLYPHVKRIGESTKA

SEQ ID NO: 41346 - protein, 904 aa, Oryza sativa
MPTSKRKRGHSDNAARPRDDRSVDAHAGIDLDDAEKLPSRLDSLSLPRSGLSFVADEKWGRVPFGASSRSIGQVVAHRRSALQHNIEREQFRIRRSLGGHTSCVNALAISRGQGRWLASGGDDCDIHVRDLFLNIDSNDDPVTPIVSLHGHQSNIFSISWAAQNKYLFSTGNDSQILYYDVEHSTMPLRSCIEKGPEARSPLNHGSIGGHDDSVPEISAHPTNPNLLLSCDDAGNLNLIDIRLPHERVSATRSDAIAGFSSVQWNPNESDGNTFAAATCGRITGSTRLYDVRQCFSSDPDRPLSSKDAVLNYHTSLMQNSCSRGLIAAAAETNSICFDPSGRFLASSVSRYHPTIYAINDPDPLATLESSIVEDHVPLHSFRYAGVAPGTPAAPKKLSSCCTIKHGSFGLEQQTDDLHYAIGSDDFRAYIFRIPPVEDLKLRREFVSRKDWLRETSQLHKQRAPALKPQGLESETKASPQRPGSESEAVGSDESDSDSDIAGEGEVDHDSEVAYCSGSILRADRIVRPAKLDRFSYVLGGGQSIVNTALIHPTLPYIFTAGITSDITVHSAAPLHRRNLGPKARYLATKTNGGGTRPRFLLPPSGLSLLGLDSDDESDAGILSSGGEGEQQDDEGDQDDDQDDDQDDHDDEDDEDDLDDGLDDDQDDDLDDDWGDDGDEGDSSGVRSVARSGFDEADRTGRSASHADGTEAGVQSDDATVHDFLAAMRTDPMYASAAPAELDFHHDRHISTYALSHLPSSLVPPADAESLSFSSSSHAYEDGGRTSDDGDGGVSDDDDSSGASSDDDDGDGSRPVFRRRHSRNSSDDGQLSAMMRAISPGPQWVWRQLHASDRREPSRLRLFDQLLRRDEMRPLTASFRVVPTSQPTAPTCASCHRPVRPPDEG

SEQ ID NO: 41347 - protein, 980 aa, Oryza sativa
MSVSTQSGTESRGSSSGSPSSSASSSVTTPEPSSPTLSAAKAISQDAAASPDPFLPRPYYDDKLLPAIPSSETVQPLATDSNTPDNWIARDERMIRLTGKHPCNTEAPLADLFSKGFLTPQNLFYVRSHGDTPRVTQEQAEQWKLKVHGLVHREIEFSIQELKEKFPTYTLPITLVCAGNRRKEQNMVAKGLGFNWGAAGVSTSLFTGVYLADILEYCKPKSPLLSSFPAYDVVVPGRARHVVFEGADVLPKGKYGTSQRLNWALDRSKGMMIAWGLNGEDLSPDHGYPLRLVVPGQIGGRMVKWLDRIEVSDRESQHHLHFHDNKVLPTEVTADQARSEMHWWYDPKYIINDLNVNAAICSPDHNQVIDFVGSSSSQPQILPIQGYAYTGGGRRIARVEISLDDGNTWKCASIHCPEDLYRMYPIQDHPYFGTLDLSSSEMSFAWCFWRLDIDVQADLIAKEVKVISVRAMDEGLATMPRDMYWNATSMMNSWWFRVAVHREGPDGSKIRFEHPTLAGNAPGGWMQRMNEAGANPRYPDFGGASSSTSQSSLPAAETQSAEKEAKEDDRAVMLNPAKADVVVSATDLAAHSDGEGPEPWFVVHGHVYDGTGFLKDHPGGDQSIRLVAGEDATEDFMAIHSMDAKKMLRDYHVGRLQEVDSSAAATTPHSEPDVIDTSKPFLDPKKWRATRLVSKQIISPDARIFRFALAGSDQELGLPVGQHVFVRVRRKDPKTGEIETVQRAYTPYSGNTQRGFLDILIKVYFPSLPAQAGGEGGNVSFEGGKMTMLLENIDLASQADANLSIELKGPLGSFTYLGDRQIKWRPTNAIRRVRKLAMIAGGSGITPIWSTLKAIADEVLAGGPAASDPIQMWIVYGNRTEQDILIREELERLRTALQGNLYVWHVLSSCASDSTWAMGRGHVNLDCLRQHLPPPPPVPSSPEELEDTLALVCGPPPMEKAVSAGLKQLGWDLDRTVVFF

SEQ ID NO: 41348 - protein, 1046 aa, Oryza sativa
MPPRRSSRQSAAAATENVIVISSDDDDVAGPGAATPASVRMTRSRTASSVATPTTARSSRTSSTYASGSHTPATSVEDGGDNQDDSKFDLGADALQPGRRTAAPLTTRASRSASLKTPLKDEVKAEASPPATSDSRKRKRAVTAVKGESTSTALTDETEADQPARRKGRSSTASNVAMKAKDAGGFLDDDPEGLDAFLEQEFSQLSSSSRKVKTPAKGKGRAQPQAKKEEESDDAFDEIHLTPRSRRIPRRSASSGKKELKPYIDESDDEIDGLKDEDNVSAGGDDYEDSLSLLEEMSSDDEPLFSRMRSERSKASGSAAQAGPSTFATLDDIKFDSDETEDDDDFHPRGNNFYAEDTQYETEKQRKARIRSERHQARLKKVDNRTQYDKNAQALHKHHPQLKNVWENLQKTVAVIKPEEAEQPAGLNIKLLPFQREGLSWMTRQEQGTWKGGMLADEMGMGKTIQMISLMLSDRKKPCLVVAPTVAIMQWRNEIEQYTEPKLKVLLWHGPNRTQNLKELKAVDVVLTSYAVLESSFRKQESGFRRKNEILKEKSALHAVHWRRIILDEAHNIKERSTNTAKGAFALQGDFRWCLSGTPLQNRVGELYSMIRFLGGDPFAYYFCKKCPCKSLHWSFSDKRNCDSCGHTPMHHTCYWNNEILKPIQRSGAQHGEGRDAFRRLRILLERMMLRRTKLERADDMGLPPRTIEVRRDLFNEEEEDLYTSLYTDTTRKFSTYLDQGTVLNNYSNIFTLLTRMRQLANHPDLVLRSKTGMASKLLGDAQSEIHVCRLCTDEAEDAIMSRCKHIFCRECVRQYLDADIEPGAVPDCPYCHATLSIDLESEALEPPESTIRMNDSGRQGILARLDMDKWRSSTKIEALVEELTQLRSEDKTIKSLVFSQFVNFLDLIAFRLQRAGFQICRLEGNMSPEARNRTIKHFMENPNVTVFLVSLKAGGVALNLTEASRVYLMDPWWNPSVEVQAMDRIHRLGRHRPIIVKRMVIENSIESRIIELQNKKSAMIEAAIGKDDGAVGRLSVSDLRFLFTL

SEQ ID NO: 41349 - protein, 173 aa, Oryza sativa
MLDTLHQTGRDARLIGQGNPNDFLVSAAVAEFKGPVIFGVVRLAQVNMELAIVEATFSGLSPGKHGWSINEFGDLTRGAESTGKVYNPSDYRSNKPLGDLGTLEAGEKGEAQFSASKEKLKVVDLIGRSIALYATEDRSDPGIAAAVIARSAGVGENYKKLCTCDGVTIWESS

SEQ ID NO: 41350 - protein, 808 aa, Oryza sativa
MSYSPHLAYDSRNGEASSGLPASQSIRNTLSGAISSTKAYLQPFAPGSPYLGSNGTNAHTEPGRLLSDVAPQLMTTRIMAAVANSNTALGLTPDGQRRARLLLTPGFSISSPARSLVRIGGSLIQSGIGRGPMNGITSHELFVLEESDRILATAAQDLALTDTSSNSRAAIQDAKSRSEPPVSLLRGFQATIPSSTEGRQRRRRVRAIASGYEDGPEGPTKLGLKAMGDKARGLMVEGVETEPVSAFQAREQRHARRNHASRILSRGKDGARASMIQLEELERQLREIEREQDDVGVKRALIDAEVSAVDAKIQVLEKIKAGLHTKLLGLREEELELADEHEGVGELLAVQKHLRAMPGGPAAAANAAASGATTSQGSSRRRKGPLFMPSEHDELPSGVAFMTLADHSAPITSLDFTEPYGTLVSASLDETVRVWDLASGDEVGRLRGHSGTVKCLQVEDEVCITGGTDHAIRIWDLTKVENFEARLSMTASGELRARKRSPDLNRSPELGDQSMDSIKIRDGDTTVGEEDEEEVRDGFDPCVKSLEGHSKSVTALYFDDNCLVTGASDKTLRQWDLNTGQCVLTMDILWAISNPTSSQAISQSEFGFPESPSRKASSSAILGSTRPELNSRDSFSVLNNVSGAFAYPTPPYADGSWEMYQDFVGGVQFWGYALASGSGDGGVRMWDMRTGQAHRTLLGHTAPVTCLQFDEHHVISGSLDKSIRIWDLRMGSISDTIRYDHPVTALQFDSRKILAATGENGVKIFNRTTLQHGALTLNGHTSPVERLRYMDTYAVSGGKDSVVKVWAL

SEQ ID NO: 41351 - protein, 826 aa, Oryza sativa
MPAMADNPPLIMLLAFLFSALLLLSPAHGGSRLQRGQSLSVERASDILVSSNGVFAFGFYNLSSTVFTVSIWFAASAGRTVAWTANRDRPVHGAGSKLTLRRDGRLVLADYDGTPVWQTNSSSGAAAAAELTDSGNLVVTSHGGDVLWQSFDYPTDTLLPGQPVTATARLSTTDVLHPTSHYALRFDDRYLLSLAYDGPDISNIYWPDPDASSWANGRISYNASRRGVLDDAGRFLASDNTTFVASDTGAAAGGVTWRRLTLDHDGNLRLYSLRDADGGWSVSWMAFSQPCGIHGLCGWNGLCVYTPRPACSCPPGYVPADAGDRGKGCRPTFNLTCGGGGGRPEMGFARLPQTDFWGSDLNLFSSISVDGCKAARLELCNCVAFEYKDDVSDCYLKSALFNGKTYPGYPGTVYLKLPANLVAESDTYTAAPAAAAAVNLACDAARTEEVLLSFSAASPDTSSWRYYYGFLSAFFAVELCFIAFGWWFTARSRPATSEQWAAEEGYRVVTDHFRRFTYGELRKATKNFKDVIGHGRYGSVYRGVLAGAGDDRAVAVKKLKAATPQRGDDEFETEVSVIGRINHMNLVRIRGVCSERHRRRRLLVYEYVDNGSLATWLFGAKETLNWNQRYNIAVGVAKGLAYLHHECLDWIIHCDVKPENILLDEDFEPKISDFGLAKMQQRRDLDDPASFSIRGTRGYMAPEWVSSLPITEKVDVYSYGVVLLELVRGARMADLATDSVGDAEIAMRQLVWKIREGLKIGDRTWVISLVDRRLNGSFVYSQVALMLEVATSCLEKERNQRPSMNDVVKKFYTSDKKVEFIGEMSS

SEQ ID NO: 41352 - protein, 967 aa, Oryza sativa
MVFIVKIPGRSRANTPEPATATATASTPSDQQPSAPPLADIAMDTPPRAAPPMSIPVQPTQDVTAASLASSSPRVAAQPSAAASVASGAPSAAQLDILLAPAVLNHRYVRGVDKSLIVERPERIRAVLLGIATAIGKSTTDDHPAIPSLPSTYPAAAPGPAVSDDDDLVARLGSLSMQAKPDNPQQHPPPRFRVLHSTASVPLNPPHPAVAYTHAHADELVAVLESAYDLAKQRRRDAHTAQVKHEAREDTPTPAQPQPEQTTSMAAPQQTSHAAYLERLCSRAPNHPPVSQVKHQHSSPTKHPPEDSEAYTSSDGEGDEAMHASEVPEHLPQGDLYLAGPSQPDSSDGGSAQAIQHAMGACCEAVDRVVAAATASTTTTPLREIRHDQALPHTTSDAHPAPVPAPAAKRAFVLSRPPGHHCSGSTPQGFCWVNNAVVASAHAYLTHGIDRVVVFDIDLHHGNGTQSLAWRINADANKRDDERAERIASLRAAALERARQALGTGTGRAHASRVAKVALSEQDEVEIRKQAGPRAMRIFYSSLHDIESFPCEDGDASMIKDASTCVEGAHGQWIWNVHLDHYRSEAEFKRLYTDKYAILFDKATRFLQATSATPQSTLVLISAGFDACAYEYPGMQRHGKHVPPSFYHTFARDAVRFADTYAHGKLISVLEGGYSDRALCSAALAHVTGLSAEGTADPEVEAEFWKLDNLVAVEKVAKKMAAHAAAAGGGGVGVNLTPKRRQAELVPWLARTSRAFAAFEQACGKLNVVPLTATGRASTVPSAVNSPGVVAGRTLRDRGALKTRGDATPQSKKSPNKSPTKPRVAASHAEVTPVKIEGTAMDLDTSTPTKPRAAQDSSPAETTATVGGLTPTKPAPIITGAEGVARAGAVDISSFLATSSTPQSPVLSAAPVTLVDALSPTHIHDANSTHSIIPLDYLDQDAPGSPDPTLDTVDYFPPQIHPQPDWT

SEQ ID NO: 41353 - protein, 697 aa, Oryza sativa
MSSEKVTTMPQANPVMAPPPPPPLPPTSTIKKKASPPASSSSSSSTSPSVSPSTSSGAVPTKAAANPQLPPLVPVYTKPAILGLPPTAVLTKQEMDFRANLLNPNNDLFWTARGLIRPPVLADALAQGHAILKYEGHLTQKQGGRRLSAQYGRSGATSAAAAGIPLSFGAAVVTPTNVTAAVQGSWRSPAPVLPTNPGFVTKEDMDIRANQLNPNNDVFWSSRGLIRPAVLADALAQGHAVLQQEGHLTQTQTHKTRGRLNSQPSLYSNSDLVGRPADTRRSISGQGLPGSGSGGIGSGAGRISGSRAGDEQQPMAMRRRASTTGSIMNRPPALDGSVTKDEVDLRANLMNPNNSIFWTSRGLTRPADLQEALAKGHAVLEAEGHITHNTGGGRSKSWNRRGSRTELHGPPSVSPLVAAAQRQWSTPFLAPNAGITAMPPTSLSARPGGLPGAAWVAGPPSVGAASTRHPDWQPNAPQRRRYSLPPPGFELFTPPSHFALFRPPTVAQQKPLQPKQGMPFAGKEGAADSEWDKMDAEALTRPLAPHSAAIPIIKPTAADIAAAKKNESAWVKKAPSADSKKSTGVFLRDDKSSTKEEKDKAGGDDKKKIEAESKAMKQEDKKESTASSDYSTKSGVETRDAVIPSEPTTPATAATTTSTSTSDKVGSLAWQLTQVKLRTRRPSEARESDISTKSATA

SEQ ID NO: 41354 - protein, 125 aa, Oryza sativa
MHGHGSWWLWLRQPCTVTNENGGSQDSNAFDEAVSAAYPYERITARFRRVIRHFHSLQQTQLLKHTTETTSTCIPLLLSSRCLHLPQPYLQLLRRCIPPPEVCRIFTKSFATLPQLTEGAFLAST

SEQ ID NO: 41355 - protein, 139 aa, Oryza sativa
MAGATSPWPTPATMDMVMVIDSSRWNLVCLAMDASTVRRNSSASSAPQHTSASRAVTDDRRLRPLSDSDRRSSGDTARRNAPREPIFSDLLRLGARALLTRTACLSSNAAAAAGAAGATDGAQGTTGAGGAATTGASVA

SEQ ID NO: 41356 - protein, 99 aa, Oryza sativa
MAPAPHMAAMVIFFTALLLLASSSSCLARARMMMMPGDHAVNGKETSASSKEATSPHDLLQGVAPPLPPSPPATEIIRPDSSGWMPQGSVPSPGIGHRA

SEQ ID NO: 41357 - protein, 376 aa, Oryza sativa
MKAASSIFTALSAAVFGFFIGISFPVEITPKLQYCAFLPCDGTNTNSSSSSDSNNNMLNFWAPSVRNSTSAPSNATISGNGTTTAAAAVAKKPQGAERLPPGIVVRDSGLHLHRLWGHPTSDVASGKQYLVTLTVGYTEKDNINATVHKLSDKFDIVLFHYDGRTTEWEEFEWSKKVVHVSAKKQTKWWFAKRFMHPSIVAPYEYIFLWDEDLGVDNFSAEEYISIARKHGLGISQPGLDATKGKRSRYTATARRPAGDMHTSGRFVEVMAPVFSRDAWACVWHMIPNDLVHGWGLDHNFWRCVDEPEEHIGVVDAQFVVHRGVPTLISQGNGEQEGSSAKVRSRQFDEMRTFYRRIADAEKAQADATAAAADHHR

SEQ ID NO: 41358 - protein, 400 aa, Oryza sativa
MVKGELLTVGAAATAIGGAYKLGEFMYKAKRVRDVGPSNAVYVRIIGRVQSDLDEVRRLLSVREVHDALEANPEKSKWVYGAMRDVRGALENIAPHTERVAGDVEAGRRIGVRHRLYWLLSEKEKLENREKEVQIAHASLSEVLGYLTTLEPVEETKKPKKEKKEEHHETHKDTHIDIDIHRDAPRHTSERVEREVFIERDAAPRRVEEREVWIERDRQGPPRYEEHRDIHYDQHAPQHIHYDQRGPNQHIEADIHIERGGRDPRYEAQYDERYEQHDQFRSQYPEERHHEQRPFPEPLGRRPEAYEDRLPERESWMQSSARRPQQPGHWGSHGAHGEYAEYGAPQPIGAAHYHLPLSKEYKEREMWIEQKEDYRFDEYGNKLPDRYFNPPVPRPYRSRM

SEQ ID NO: 41359 - protein, 295 aa, Oryza sativa
MAGRRRRPFAAPVINYLLLALWLAASSSFAVAVAVAGHGRGRRSHVSSIVTEAMYNKSLFIHKDDAACPARNFYTYAAFLRAADQYPSFGGAGGRDTRRREVAAFLAQVSHETTGGWATAPDGPYTWGLCFKEELKPASNYCDAAVAARWPCFPGKSYHGRGPIQLSWNFNYGPAGEAVGFDGLREPEVVAGDAVVAFKTALWFWMTPRPPSKPYSCHDVMTGRYRPSRADAAANRTAAGFGLTTNIINGGLECNNRTGGDPRVEDRIGFFRRYCGALGVDVGDNLDCAHQLPYS

SEQ ID NO: 41360 - protein, 182 aa, Oryza sativa
MPQEGNFKFHQYQVVGRHLPTDNDPTPTVYRMKVWAQDAVRAKSKFWYFLRRLRRVKKANGQIIAVNEIFERKPTTVKNFGIWVRYQSRTGYHNMYKEYRDTTLNGAVDQMYSEMASRHRVRFPCIQIIKTATVPASACKRSNTLQFHDSKIKFPLTHRLARPSAPEHRSLYKAHRPNVAMI

SEQ ID NO: 41361 - protein, 235 aa, Oryza sativa
MASKEPSGDHDHEMNGTSAGGGEPKDGAVVTGRNRRPRGRPPGSKNKPKPPIFVTRDSPNALRSHVMEVAGGADVAESIAHFARRRQRGVCVLSGAGTVTDVALRQPAAPSAVVALRGRFEILSLTGTFLPGPAPPGSTGLTVYLAGGQGQVVGGSVVGTLTAAGPVMVIASTFANATYERLPLDQEEEEAAAGGMMAPPPLMAGAADPLLFGGGMHDAGLAAWHHARPPPPPPY

SEQ ID NO: 41362 - protein, 772 aa, Oryza sativa
MRITTLIGLVAGLASQTVNAACSAPLKIDDFSKQSSNQNSLGEWTSDDGSMSSISASAGVLSFKPKAGSYFYETFPCQAASTNGYNSVSFQMKGPAGGSATLEIQTKTSCSATTYTSKYVSITGLTGNTQTINIPLSQFSGANANAVTGFVWAGFSSTTATWQMSNIAFGCGSSAGGSTSVSATKGATTTSARSTMSTVATPTASAAPGSCSPLLIDDWISQSRLTFLYYNAMGYPTSDDASMTSITVGKPATNRVEFVPKADSYFYSQFPCVDAKKNKYTGISLRIKAPKGATLALQLDSSDSCDATNPKSTYASSTDLGWTFDGTEKLYTIPFSKFAGLNTEKLTTILFSGFSGTTSFGPMAFYCGNSGEYVVPPTSADPGASATVPAPSNPSATALVIDKFANANTNAMGNWHGGDEGMTLKYASNKLTITSPDADYAFYTQVSAGCSDFTKYKGSYLHIAYTGTTAFTVAFQQHNSQCKAEIAPYPETWDSAEASRYAKNGHIYIPINHFNIELSRVVGFALKGFHTTESVTLSVIEIVSSVPAGTTIPKKDETGNLVFACKRPNSFAFAIDDGQPDLAQEVLKIIREEDVKVTFFTVGAPLLDASTNLTNVYKEMMAAGHQLALHSFTHPKMEGLPDYASIDWEYNEDVKAMKSQFNGYTSTYFRPPFGTEGARMRSRLTKAVGNTASIVNWSVDVEDWLWAETDTPEQQKVAFQRDVDKGGNLVVLHYLYPSTVSYLREFIQIAKATGKQLMRVDQCMMDPNAPPL

SEQ ID NO: 41363 - protein, 351 aa, Oryza sativa
MSSSINSHPPASDADVTMATADADEEIEMLKRSVAQLEAETDGLFGGSAPSDVGASSFSTTMVSTTSATTPAVHSPIVIPPEKEESDRRSVHISQVEYATTSDQLKAHFDACGQIVRLTIMLDKHTAQPKGFAYIEFATLEGAQAALALNDSTLNGRQIKVTPKRTNVPGLKAGRGRGRGGRGGAAAGMMPHYPPMMMPYGYPYPPPGPYGYPPMGPLPPGAYPGYGYPPPPPHHHGGNGYYAGGAYRRGGGYQQGGRGGRYNPYGGGRGGGGYQRGRGGRGGGYQNRGGHGHGRDADREDMFVPNDNQQLPAPGQHDGGFDGGEHQHGHEYQHQQQGEGEYPVEEPTGRW

SEQ ID NO: 41364 - protein, 758 aa, Oryza sativa
MAESEAAYVPLEAEPKAPGPSGISQSQEFKQPLRAGEHSLNPSAGAGLSVKIAREREGPQHSRHASTVTSASASMGSGQFGAARRTPRGTLGGTGQGRVHRTTTAIRAHADIPASPLAPRGSVARPGDVDAAFVATRVCLQADEQSERRSSDGGGPGNGGGGSGSLALVPYWSEKFPWRVLPKAFADYFWILTRLSIALVVVIGASVPHMLWPLNGEGVPMWKGVLNSAIAVFLSVYFGQMWLHVHKSRMYDRNGLDPKRALPAQSVRHWSVELTGLPLHFTPNQNEALVQGVTRVLEERYGPVASVTIGYIWTTPDGLSGAESRQQKRALEEARTLLPMTHDSGARPRELQRIETELLRLDAESHATGCSGHAYVTFEDERAAVDARNETEPVPCELAGNAAGHGVERFDLHIGPAPHPHDVLWDNLQYTWCERAVRYVVVLLLSSVVLVIGLISLVYFVGTANHSASAGTNAGANVLIIVSYIFIFVLVPVLSKYQRSHSDSARVISVLIRLVVFQVLAATLVNLTVFGLFGVAKDTVLTGQLVDALIMNLLLEFLLTAALLSCSVVAKARKFARDHPDAPFDALALAMRGLPFDLALRYQFALKSFTVAVFFSTAYPVTLFPSLLHMCIQYFGDRWMILRARARPQLTDTRITEFVVVWLLPIVPVMYLSVGLVVFHREEANTPALVPMAIVLVVISVLYVLLRVYFRFRRPIGVWCQSNGVDCCGDRCLAREQPLAMGTVPPFSADVQPFEQPH

SEQ ID NO: 41365 - protein, 788 aa, Oryza sativa
MRRWCGWRWPLVPSRAHGLGRALAATARAVHARRGVATATARSAAVKRPHPRTTTPATARRAAIAVHTTARSSGRPATGAGGVQRYRAFLNDIQKWLTSRPRASDEPLSNAIRLALDDLSRTGAVQPVRVNGVLQFLRVMTHQLDNAQALYLLAFGLPPRPLIPLSVQQRTGVTAESVPLAHPDAATFYALCMSCAEARQWMAATQWFDLMIACLPPPETSDRADGRLGEQLVTQFELQRLLECAAHAGHLDLAERVFSASSLRLPHMRITKMPYVPALAPVARNTMRAGLEERLWCALALAYGAAARHQRPGVWGRLQDMVQRLHAALERAAHVRMTGSGTYAQRTGPDAVAWSLRPSGALLQALLAMYQQFAAARGDGDADALAADQARVVDTVQELYARWTGPIPSHSQRKDALRVEAAAAADSAAAAAGRAGAVEPAGSATAAAAEAAATERRAPPRIGYGVQPTITAMRVLYDTVATASPRVFADASAVTVSVEALFPAVVALERVRDEVESRYPKLQPQPKHDVFYYHALMKAFGRSWEQPSALGGGAAEPAAVEVAVTELLGIVQHMCAAADAAVAAGTANAVAAGCEAPVTLAPNAFTLHQTLDALARLRPTAAGAAAAERVWTRLTVPRADGRPPYVAVDRTHFTTLLELYARCGLFFEAAAVFGRITAANLEVPVKAALTFLSFAANDQTQAVLRRSGLTPQRAARFQRDAAALMHAIGPERFSDPAVPLQSQRTPAAPMRAARAYAPVTTLSGEHLQRLQQLVGALADAWQPQQKRG

SEQ ID NO: 41366 - protein, 324 aa, Oryza sativa
MAAAVVVPDGHDGVHAVLLRRARVVDMARQQVDGEVGGIGEDGLDGGVGVGEVGEGPRLDHPLDRLDAMDAPLQILCLAEVVERHRRVRPRVGGSQLDVAGGHRPEDLLQDEASPERPPVQPHHRLRRPLQRLRRPLLRRQRAELPRLRRQHPEAARPPERAVRHRHAELRPAHPLDEAAGAGDADDLHQGELHRHRRRDEHRVHRVVGDALPDHGLVHDHLDAVRLQVRLRPDAAQHQQLRAPQRPRRHDHLVLVAVAEVHPVLHPQRAREHHPVRHRVRHPVCTPWQKLAVVRSSFFGAQHIFHFHRSCVPWLLKRIRETVA

SEQ ID NO: 41367 - protein, 299 aa, Oryza sativa
MCGGAILADLIPSPRSGGHTKKNKRRRISDDEDFEAAFEEFDAGDDDSDSDSESEEVDEYDVVVDDDDSEDGVVVLPPPPPPPPVIPHERHGARRFRGVRKRPWGKWAAEIRDPVRGVRVWLGTFPTAESAARAYDAAARRLRGAKAKPNFPSAPPPSAAAHRRKKRRAHAATRSPSSPPATSEVTAASASASSDVPAPAFASFVGEPGHGGAKSMPTTSHTSQPAPPATVASENVDDPEVFDPYDVHGGLASYFAGGAYESLESLFAHGGDSAAVDQAASDHWPAALWSFADDGSFCF

SEQ ID NO: 41368 - protein, 310 aa, Oryza sativa
MVSLKLQKRLAASVMKCGQKKIWLDPNEVSEISMANSRQAVRKLVKDGYIIRKPPVMHSRARVRKNLLAKRKGRHMGVGKRRGTRNARMPEKVIWIRRMRVLRRLLRKYREAKKIDKHSYHELYMKVKGNVFKNKRVLMEYIWKAKAQKIKDKAEQEQGELRRQKNRQMRERRAKRLDERRKVLLGEDKKAVKKEEAAKKVAAAPAAASAPKVSKNQKKKEAAKAAAGSAPKAAAPAKAAAPKKEETKAAAPVKAAAPVKAAAPKKEETKAAAPKAAAAKPAAKAAAPKKEAAKPAAAKPAAKGGKKGGK

SEQ ID NO: 41369 - protein, 1040 aa, Oryza sativa
MEATVPVLLLVTVLSLILPSGIGAAAAGDERSALLALKAGFVDTVSALADWTDGGKASPHCKWTGVGCNAAGLVDRLELSGKNLSGKVADDVFRLPALAVLNISNNAFATTLPKSLPSLPSFKVFDVSQNSFEGGFPAGLGGCADLVAVNASGNNFAGPLPEDLADATSLETIDMRGSFFGGAIPAAYRSLTKLKFLGLSGNNITGKIPPEIGEMESLESLIIGYNELEGGIPPELGNLANLQYLDLAVGNLDGPIPPELGKLPALTSLYLYKNNLEGKIPPELGNISTLVFLDLSDNAFTGAIPDEVAQLSHLRLLNLMCNHLDGVVPAAIGDMPKLEVLELWNNSLTGSLPASLGRSSPLQCVDVSSNGFTGGIPAGICDGKALIKLIMFNNGFTGGIPAGLASCASLVRVRVHGNRLNGTIPVGFGKLPLLQRLELAGNDLSGEIPGDLASSASLSFIDVSRNHLQYSIPSSLFTIPTLQSFLASDNMISGELPDQFQDCPALAALDLSNNRLAGAIPSSLASCQRLVKLNLRRNKLAGEIPRSLANMPALAILDLSSNVLTGGIPENFGRSPALETLNLAYNNLTGPVPGNGVLRSINPDELAGNAGLCGGVLPPCSGSRSTAAGPRSRGSAQLRHIAVGWLVGMVAVVAAFAALFGGHYAYRRWYVDGAGCCDDENLGGESGAWPWRLTAFQRLGFTCAEVLACVKEANVVGMGATGVVYKAELPRARAVIAVKKLWRPAAAAEAAAAAPELTAEVLKEVGLLGRLRHRNIVRLLGYMHNEADAMMLYEFMPNGSLWEALHGPPERRTLVDWVSRYDVAAGVAQGLAYLHHDCHPPVIHRDIKSNNILLDANMEARIADFGLARALGRAGESVSVVAGSYGYIAPEYGYTMKVDQKSDTYSYGVVLMELITGRRAVEAAFGEGQDIVGWVRNKIRSNTVEDHLDGQLVGAGCPHVREEMLLVLRIAVLCTARLPRDRPSMRDVITMLGEAKPRRKSGSSTGSASAKAPTPAPPAVAAVVDKDKPVFTTTPDSDYA

SEQ ID NO: 41370 - protein, 118 aa, Oryza sativa
MNLAPVLCTASASKSFRPQKISTSSPSQDHNLNKFIYTLLILLLFIYFNNIKNNNKNNNISNNYNTNNIRPPSKPTTSTTTRRKRTTTAHIHLIFFSFILHGECVYPKPIPIPKQQQQ

SEQ ID NO: 41371 - protein, 744 aa, Oryza sativa
MISPLPTPRQTAAEHTSHHSTYGAFSPESAAVDGPADKCGSTSRACPAHMAPADITQRGGTAAHAITTTNSAVVVAAQQQVHHPSSQPASASNGLPGLQPQAELASKPQRQQPPQPAAVAAVAAAAPQPAALNTPEQQLQQPTDSEDDSWTPGQQQSSGDAHADNEYEEEETWDPHGPPPQYCTNCTARLCSSECSDCGHSSEQDEALFDSSSSGSGQPVTATPTAARPLIIWDDEMLLHEEGKAVPHPERPDRLRAIMARLVGNGLTGGCTRVAARLATKQELLRVHAADHLQRLHLFCSGTVPATIIPADTYINQHTLHCAALAAGSAAEAAVRVVWGEAAAGAAVIRPPGHHAESNTAMGFCFFNNAAVAARAAQAAGAERVLILDWDVHHGNGTQHIFEADPSVLYMSLHRYDRGNFYPGTGGADEVGHGRGAGYTVNVPWDAGNIGNGDYMAAMEQVILPIAREFAPNLIIISAGFDAADGDPIGGCCLTPECFGNMTAELLPIAPTVLLLEGGYNLLSTALSTEACLRVLLGEEPQTLLPRPSPFGWLAIQAAKKAHSRYWSCLAGAFPQLHAGVSLQQQLRLIGSDSGQQHGWQDQQEDGDEYEEPEYEDDEAEEEEQEEAHMQQQRQQEAEGLESGYGFSSGHGFGQRHSWDGQSSFRLSRVGGQGISRASTAPAAAAAAAGGQEVTGRSWQRQQQRRRRPLSRKQEMLRAIHRQAMKCFWRRRLRRAAAQQQRLQ

SEQ ID NO: 41372 - protein, 130 aa, Oryza sativa
MDWSALHIPMLRAWGCQYLPCKYIAFSIVCLVCSFIIIFIEIPLLLRICPTSSKFDGFIRKFSSNYMRAAIYLAMSVVQWVSIWAMTTSLIAAAVFLLIAAIFYALAGFKGQVFQGSKTLGGQGVAQMII

SEQ ID NO: 41373 - protein, 237 aa, Oryza sativa
MEAMAQPNFGEECRAELRKRESAVKNDYRYDVGVLTGCKSDIDDYCREERMMLRGNATVLKCLVENFDKTTDACQNEMSRAVRFALWDYQNGQSLTKECDADVDAFCPKGAKARLGGMFTIGAVGRCLSKALVQAKALTPKCRQLVLVAAPKDSRMYLKYPESTNALVQKIADLQRSAGLESVLVDPYRRDGGSVTVTGWVALACILSLILVSVGGMVMLVRRMTGGQATHAVCEER

SEQ ID NO: 41374 - protein, 845 aa, Oryza sativa
MDADADRVADYLDDKLQTAADLETGNLDALLARITEQQTLLKHQVTAAQQDLHDAKEHAHAHHARVQQQAHEFTREQADIDRRLLVITASDTSDEAVPRFEAVLDQLHRLHVASNYVKLLRDVDVLSQHAHTQLHTSSEAALHPYQRLRTLHTRLLRLQDDAEGAAPQLLHHVDTITRSLRANILDAFSSDLNRVLKKIHWPTPKASIPAPLRDEWEAAVVKLLDLQMPELEGMNYASGPGDKVKLPPVLFPFDVLVQPLEMRFRYHFEGDKPTNRNDRPEYFLSHITTLLNDYSGFVTDHVQPILLAHFRGTDLALNPVYIDAMSAFVTALLPMLRTKIRSLLPQIAGQPQLLSHLMHEMMSFDSTIRAVWGYDGGYGVDGWKGLSWEFLVQGDWFGRWLQVEKDFALARYQSIVEAADFGDLDYESVDPKATKPTKGAIRVNDLLDTITDRYRPLTSFSQKLTFLIDIQIAIFDKYHEKLQSNLEAYLTMTTALGRAMGGVTKEEQERLLGVEGLERLCKTYGSADYLERAMRDWSDDVFFLDIWEGLQDRARQEHSIGGMTVADVAERTSKSVGGDDDGGALFDETASWYARLRERSEKLIIDTLNSSVRQALRPYHHINPWATLSGTSASAPANLSPTAEIDPFLSHLSTTLGFLSRALASAPLRRITRAVLATVSSTLWDSVLTRCRFSTAGAAQLHADLAAICQVVDKQVGPGVAGAGLRRCLEGVQLVGLPVKGGKDQAAASGDEGSASAGGGGGGGGDEDWDDAWGAAADDPAPLPQQETDHGGTTSAGASLGLWEVEKRLFADNQSARDVLDELGLETLAENEARALLGRRVELAG

SEQ ID NO: 41375 - protein, 288 aa, Oryza sativa
MALSFLNTPPSKLAPKPSFPPPSRQFAPPQRQRSLLHLSLLLREQQPPRPVRASSSTQAGAAPSPPSSREEAVSQARSCLAAALRKPLGKQRKQQRQPRFRAEIPVVDDSPGSLARLASDVFSSGLGLSRKGGGGGAPARLLLVWPSSEEMGVALREPHDWGESTAHAQLDAVAPDALSSCDAAVFLAPGRSQVEKMKAAADALDTKPVVMFNPAWSFDEEEEGFAGGARGFVGSFSVVYSFTGLEVRGLLSKKKGVLLRCVDGGRFGGESWVLMVEDDAAAPASEQF

SEQ ID NO: 41376 - protein, 661 aa, Oryza sativa
MSAADLDLKAALDAAKGGYRGLLTKRDAPETAEQKAARVAVKQQKNSYLSKYLSADDKADAAAAAAAGVGAGAKGGDGKEKKKRKKPAAGAGAGAGAGAAGAAGSGKRPGAGGIVDVDHDWRKTAMPVVPDSEDGPVVVRGADAKPRSSGSGGRGGRDDDDEDGTDALEKVRIAINDGSGWSAGGSTGNGTGTGTGSGSGKPQRLPSPDQSPPRRKRVDSPPAERRPAAAAAASGSAGALPDLSPPLRKREPTPDLSPPRRGGAAAAAAVAADLSPPRKPKAAAAAAADLSPPRRKREPSPDLSPPRHNGRGAAAATASSSSHVTTAVGGSSSSSAAPAPAASHRSSRRSGSRSRSRSGGRRGSRSRSPKRRRVESPDQSPPRRSGGGDSGSAMAGDASAPVKTGLRRGADFAKEAQANEQKKRDALAAMSAEMSGVGAATVVRDKRGRKLTPEELAARQAARNAQEDQSKGMEWGRGLVQGAAARAKAQDDAYEAAKPFARYKDDADLDALQRDTQRRGDPLAHLSRNKAEAARKAEITRSAAAAEESVASLHAHHQSVSDAKARDRDLSPDSRAQAADDAHAALRAKQAAAKAGATRVVQRRPRPRYTGAAWHNRFGIAPGYRWDGVVRGNGWEDKIAMHSNRSRLMKETAYKWSSEDM

SEQ ID NO: 41377 - protein, 844 aa, Oryza sativa
MSHLAFGEKKTLDDVWPVNNRRFFIRTDFERMIEHGTQQPPHVLLTTILRVLQGGGKAIIGCSFGVNKNAVDMKLTPTQRQQALRAFPRHLSTEPLAQLLRKILPETCTVDFAPDCLAAMDQVKKLQRGCVLVLENLRFYKAELSERAEERAEMAAVLERYTDVFVNDVFATLHLRAAATVELPKLLRHGVCGSLMAQEVTYFSQVLTNPQRPLTLVIGSVHIEEKMRLLEALIRKVDKVPISCAVAIPFLQVKGISVGKLSPNICDTAGHIIWEDPSTSPQDFARKIMRLAERYNVKIVLPEDFVCNRTIEPTRFPTVTPTNRVPADLYIVDIGPKTIQRFTAEISDSHTVFWTGRMGCADKADYTNGTTAIAIAVGHSNCVTVVGGKNTVQAVRTAGVEDSINHMTTGPNSMLRVLEGTPLAALNALSDAHPPVASDINVTAPQLLRCCPLFRDLTPQQMRAIVAKAVPRCHAMGDVLAHEGDKISSMFVVARGFLHSAPKSQQGKSIASRIIGVGESTGEFSFLNGKTSTSVVQAGSDDTLTFQITASSLEEAFSESAELTLQVLKCAVEPVRVQHLRSVQERWSEWYLLNATLRSTRKPNPWGNLGGLAEVVASAAPALLLHHVLDRQYTPFKLEAGTCFFARFASGTFMMVAHNVFREICFQNIASAFDEWTPVLATVAATVLATPLRLAATGLPFPAMTRSDLIGTALTSAALSAAPAAAHAPFLFRKSAAEANAWRHRRVLDPLSELFIAVACRVAVSIAALPLVAHRFKSDVTVRSSVAYVLRQVLALLIETAVLKVWRAIAQRRAEARSAKPIAPPETPLALMHQSRVTGDKGIW

SEQ ID NO: 41378 - protein, 284 aa, Oryza sativa
MVQLMPPIDAAEIPWVSLGSTQERRRYNIQNVFKTNRLMALAEMIICNTFREIESEALELLSNALPVGPLLAPASGPTGHFLPEDMTCLTWLDTQAPGSVIYVAFGSSTIFDIAQFHELANGLAVSDQPFLWVVRPNFTNGIQEDWFNEYKDRIKGKGLVISWAPQQRVLSHPSIACFMSHCGWNSTMEGVLHGVPFLCWPYFSDQFCNQSYICNVWKTGIKLFRDKQGVVTQEEIKNKAAQLLEDKEIKERAVTLKTTARASIQEGGSSHQNFLELVNLLREQ

SEQ ID NO: 41379 - protein, 150 aa, Oryza sativa
MRSVAARFTELTPSEREHYNHLANERTAARQAEYSAWINAHTPLQIQRANSARRLLRRKLPKRRNNQNPANTEPLKDDRLPSKPANPFALFTKERWASGDMKSIAAPNAAKLITEEWKNLSAGEKKKYQDAAAAILAQYRSDMAAASPPA

SEQ ID NO: 41380 - protein, 1293 aa, Oryza sativa
MRSPSHSLHRRSDGGRCRTGVSGATRWAALTSALVVMASLVAVTAAAANADPPYPSPHVLLPPSHAAAVVSGDGGSASASSAAADARLLRSVARNPRAANPFPSSLLPPRTRMPTAQKLEAERAEARQQMRFEDARDRFVVTAWAPPTGPLPKRNADSSTDGRGFGLGLGLGLGLGSGSDDDDATTGGDEQQPLQPLQRRAGRTVEHNIPSAGEAVDCSLGARTMAGCVAWPMRSALGATTRFASAAASGYGEHRRVRRRRAGRGAAPSAPALTEHYDVVVARVPFPLPANAVFGSAAEHNAAVAAAADTIVLEAWTQPNPRDASGAYPLQRLRAYRLVPPNPPPATTAAATAGSSTTTPAPASAPAASANAPANAPTASASASASASASASASASASASASATEAANTNGLLKPPSALTATKPNGAAATAADAGAGAAAAAAAAAAAGSGDDGGAGVEFLWDTTVQARQWLHPHAYLVRALPYAPPANSSVSGHDGVTHDGVTVDPRHVWLAYASSHAFAPPPSADALQADAASHAYPTAQPAPLRLLRVDVLTGFVQEMKDLPVPQELLQPDHPMHGTGHGSGHGTGAGAGAGGGGWFVAGSITRQSLVANASDPNNLWWLYETLQPLRTAEPAAEHDASGSAAGKVGPLFGAPLPIVTHASSLVSHHLVTGISRAVSAWDGAERITNFAALWHVGAASVPAAACSAAATATATRTTTGATTTTTTTTTHTLQTAFSTGAAHSVVVGEVVAERALSLAELRRLRARDREAAKRAALKPAATATATSGKAPAPGDNDDDSDDDDDDGDGDGDDADASLPENRFELHRMHLQYPVGAAPSLAALHDVEVEVGPRTQSMRVSPLPPRLPTTTTTTGTGSGTASSSPSSTPLAPAPQHRVGLRFDRDLIEIDDRVRAMDHVTLVGARGSNCGAAAPPAAAASASASASASASASASASASASASASASASAAASADSTASIAAAGVPVLSSSGGEFRESDHTHQHVPVGHLGGVGALAFSPSGRHAAVVSRLLIPEWMVVDGHGHGHEPVTPQHMRHDRYLRLHQHRRAATHAATASAAAVERHLSATAAAAGPSAAAAAAAAAHAAAASPTAAVAAAGGSAVTSSDGDGDVADGSAASAASFAVVHSVVLVVSIADTRAYQERTFFDVALPFDDRRIHRACNRASTLMRLHWTEQRLLLLELNCGSDPGHAWLIAITLPEHWVPVPAHLRTGHNAAVEALELKPQPLPNTEPLGVWPMMLFIACALLLFYILCASRAHSALAESHSHHAINAAD

SEQ ID NO: 41381 - protein, 501 aa, Oryza sativa
MIAGRQLKALDSGGTSDPYVLADVGGTQYKTQQVLKTLTPEWNETAIWILASQQIPATVSVFDWNRIGADVAIGSIVLNLSQMPSDAVEKVAWHTLVSPDHSPGAGEIQLGITLGGFQSSVAEVDPVMDFYLKYVKRGADGKMIVQNLPEAWAMLFAKAGVNEEQLKDPNIISNLVKVRHDALKNPSQLDAAPSGKPPRQKVICVCTAAYDFTPQVEGDLGFKAGETIRVFEQGENGWWRGKIGDREGTFPGNYVENIKTTRKGKKNIPARPDKPAPAPPGFEPPPPTEPAPEPPTPGGDMPKPPETPAPLPPSGSTSSPTGSTSSPSGGIPHHVPPNKPIPAPPSSPLPPIPTTPAPTPTPTATPTATPTTTVPPAPTVVPPAPTVVPPAPSVVPPAPTMVPPAPTAKVPPPPPPPPPAPSGGAESSSGRSGMLNSITAFDRSKLKKADSTTNAGGRDLADLDDSQLNSLVGLLSNAIQGRRVAIKEEGSDDDDDDDEWE

SEQ ID NO: 41382 - protein, 217 aa, Oryza sativa
MDGAFPSERGQPFDNGGRGRGPGGGRGFRGTAENAKTKLCTRWMSGDCRFGDRCNFAHGEQELRSLPPRDDFGRGRGGYGGPPPARGGYGGGGRGMGGGYGGRGRGYDDYYGGGGYGGQAGYGAPQAYGAPQDPYGGGYGAPPRGPAEDPYARQGQPVSEPNGWVAYRTPDTGETYYHNHNTNVTQWERPAEWLGPMQAGELLFASAGLPVGSAVRV

SEQ ID NO: 41383 - protein, 585 aa, Oryza sativa
MSVTVGSKGKISPRVPAGAVMGAAAIAAAQQQQQQQQQQQQQQAGGGGAAAASPHTPHTPGSASPVRGSPQMRPSSGGGGGIVPALQLGGTPHAQGHPSPTTKAVHTTTPGRVSAVTGKPVYIERRDSKQSPSPPCGGLLAPPTRLFERRNSTDGSVLHESKASRTLWDTVEAFFKLIDLDGNGRVDVHEAHHSLTICMASIRATGNTRLEEAVKKQVEWLFQSADDNKDKVITLDEFLSCYRKLLRAGYEPEVLQLDLNSAIQSLSRSRRMSLATENAFFAKVSKLFHLLDANRDGVVSIAEARDSLRLCFTAVNEHTNTPHSSTHSGSGSNSKPGTPTGAGAAAGAAAAAAAVAAAAAGAGAGHSSTAAAAAAAAAAAAAAAAAAAAAAAAAAAAAAATAAAASSAAAGSSSSAAASSSSSSASSSSSSSSSSSSSSSASSPHTPSSPGGAATTPVSPHTRDDIVDKQVAWLFSMADLNHDKVLQEHEFVGAYKKLLAAKYEKEVLELDLDRAIAALEPIRKAAAAAAAGAGAGAGAGAAGGASPAHHASPSKPPPHGNAPSGAPTAAAGGGAAAASAKSPAK

SEQ ID NO: 41384 - protein, 697 aa, Oryza sativa
MGLNTAMLLVIEGNYRVTIVEKTNGLDSRWNGILADGALYEMFARELDLNLDANPSQTTWIGTLAEYQLVMGATLTHIGVEILYNTMYLQTCVDPRGEGHNQVHIAQTPTDETLRRKIYSEAELCAAAAGGLSPPPLPAGLQHHAVVQDVKILIGADGTHSAVRSTVLNNARMPPERVPSTGRARSSSAHAPSRLVAPVSPIAHHAAGDHAVAAAAASPGSPRFVAVHDPPVARLERQHSAPVLLGGHHHPAPPAPPPAAAVAEPFPEVRSVTLPLLHHKPAVPLTLQNPLPDSPIEPLMTHVILSFSTGLPHPLNSPDTQPPSPVPGEAELSEADIKDIEEALNIDPRVTRKPGGAGGFRATSMLKTQDLSYEEVTELVSSTMPHLSRYVDSHGVVRTRLYVEFLLRHRASAAFREVYGQVMKNPSIFMSVKGKKIVPDDKEQHEISDKKTISNVQAALAEKLFPFMFFVVKQMGQHSPFAAKVEQLFGAGEKPEHSPRVHADQKFLHRIEKVKIYNQQLRAASQVATARPGFIAVLVGDATRDAYYAYGNSINSAFNAFKQHYLQLFNFRAYPNIARTYHEAVVTKFVNFIGSDIYLRNFCGCAFRTFSVSELRYGQVMCLSAPGSNRNPFKTLAPPAKASNKKSKKAKKEADAATCDLLELQTTKTTDEVAKCTFGDPHAFKMVLTASQICDAV

SEQ ID NO: 41385 - protein, 856 aa, Oryza sativa
MRPTQQHHGHDNTAVLDVAVTFLDTYYRQLFTDASKLIPYYTSNCAFQHEGTKAIRGDVQAALSTASNWVGRRVHVADVVPFTGVTEANVVSFTAFGTMTDASGSWQFRHDFELRLIPGYGVNSYAIQSDLLHNQDRPHVTVSVNVPVPVPQQQQPAPAQQQQHATSSQAPPSALASAMSTKSKGPAPKPSHPAAHHPAPAPQATQQHAPVTTTAVVAPKTTTADDHLAPPPVAAPKLSDAWSAETPPMFAQKAAAVPPPMDFDDAPAVAPTTQPTAAANTTSPVPNRAAKNAPSKAPPKARVQPPAYRPPTEPAPAPTAAPTPAQPTATQQPTPAVVVKAEPTPVAVAPVPVVVSVKTNPPPAVATTTAPATKAAAPAAEAAAPAKAAPAVVAEAAKKEATPAVVEAATKPAVAATAKAVPAEAPAKTAAAPKASTAGTSGESKPAATTATTAGKTTAKPAEAAKPSAPAATTTTEGGAARTFADLFRAKNQSTAAAPAATTESSQQASATATPPPEPTSAAASTDSPKSPPSTPAVAPVAAAPVETPAAVATATATAAPAAPAAKQQSPEAKPVSPPTEAPAAAEDAKAPLAEQQAATTTEAAAAPAAVADAKPKNAWSRGAPTISATDAPKHSGPVQVVTVPVSSSKPAATGDKAAKEGAAAAKTDAAAATDDKKAPAPGAKRTAAPGAAGPRGADKPGGLANSVNHYHVFIKGLPESCTEAEIIELFSKVAPLKKGIKIDTKAISEKPRDGSEAKAVDRIRTFAFACIEHKDSADLAAKLDALKASRLTHARSGARIFCDEVHEKPVFSQDTQPAAAAQPAAGGAGNGNKGAATAQSNAGAKKAADSTAAKK

SEQ ID NO: 41386 - protein, 899 aa, Oryza sativa
MLCRKVQGDLLDELNSHEDAVTSLQSNIRAMLVRNNLDTLLAELEGEEGMVVALQSAMRGFLVRQTFAEKKRHFQENMSKVIKIQSFVRAKMQGEAYKSLTTGKSPPVSAVKNFVHLLNDSDFDFNEEVEFERMRKTVVQQVRQNEMLEQYIDQLDIKIALLVKNKITLDEVVRHQSNYGGHASSLLANSSMASTNQFDLKALNKNSRKKLESYQQLFFNLQTQPQYLSRLFRRIREQAMPEKECKRIEHLMMGLFGYAQKRREEYYLLKLIARSIREEVECSRTLNDFLRGNFFWSKLLGSYARSPRDRKYLRDLLGPLIRDNIVEDPALDLESDPAQIYRSAINNEELRTGRPSQRPLDVPREVAIKDPETRELFIDHLRDLREICDQFLLALEDLLPRLPYGLRYICRQMFEALCQQFKREPQHILLQMVGNWFWRFYLQPALVAPENVGVVETKLSPLQKRNLGEVAKVLSQVASGRAFGGENIYLQPLNAFLGDSIARLTHILGELIAVPDAERTFDIDEFNDLYAKNRPTLYIKLGDIFAIHHLVSSELANICPNRDDVLREIMQELGSAKNNESEMTATGSSDIQMFLTPKLHDVEDPDAEIKALFMETKRCILYIIRVQTGSTLLEILVKPVTQEDEHKWLTVLHDDFADGGGTRGAYSDVNMVDVTRMTYLDLKRTALENVMRLEHAGRISKHNHYQDILNAIALDIRTKSRRRVQRQRELEGVRLTLNNLHEKAKYLEQQRKSYDDYIEQAMATLQNRKGKKRFLLPFTKQYNHQRELERSGRVPKFGSYKYSARALMDKGVLVTWSGATERDLEKINLTISCDEVGIFNIEGSRGHIQIPGASALVPIEDLLQAQFESHQFMNLFEGNLRLNVNILLHLLYKKFYRTQ

SEQ ID NO: 41387 - protein, 709 aa, Oryza sativa
MASQHLWLFFNPQEIPPAFTTPDADVDKAARERILLLAKYVMQNGTSFIDMVRTKQAGNPEYDFLHPGGKNNAFFRWALYATGCGISVDQPPPEGFIPPTPQPAPQQQAPVQQHYMPQVQQQFAYAQQQPLAMQQYQQYPPQAHYQQPVMQQQAQQQQPLRPTPPSIPPEVAGGFSQVLDALTGSKDSIKASQGWFMACAPYAAGMAYMMASRASTTPEFDKLLHLIYLANDILFKAFTQQQQQAQAAQQEDGQQQQQTEAAKMWASIAAAFAPALGVMLAAAQAAAASSGNDAGRDKLSKMLAFWQDKGLYDVHAMARFQHEMAAANATASLLHNYPPPAAAAPPPEQQQQQQQQPAPASGGWGSIPTAAAAAAYAPQQPPSSGWGPPPAAAAAPAPAPAAPSGWGPPPVQQPAVPPGWPAAPVPPVPPVGMPWAGAYPGHPGYPGSTVPPGMQTPAYPGAVAGAVPGAVPGGYPPAGVVPAAAPPAVPPPGVPLGVPPAAPQSAVPAAPGTPEPEPVSSFHFPPGLIPQLVRDKSKYSEPYAPMDPLEIDRAGLPPPPEKDAYLKTRVDKFLLEVRDYKPGTSRADLEEARAAARAQQGLEPDSDEELALGSTGSRMARRKALGLGSGAEGRRRHRYVAGGMADDGSYVGPGGARGERLGLGAHSQGQDAAAALGDVYSSYRKLRSTSYHEMTVRGVGQSNVAKGGH

SEQ ID NO: 41388 - protein, 543 aa, Oryza sativa
MCESSNAICCSPKGMRAWATTLLLLAIGCLTVAIFVPRVIDKAVDDGINDFVVIDAQAQADNNKYYRTYTDPDDPDSTAVYYSVYMFNLKNAEQVLTGIKPDYEEKGPYVYRKKVYKRNTVFGADVYGRATVSYQTQTQFIYDQARSTQTGGEGDPITNVNLPFQLTKGLGAATHGSLYGYAYNARFGPLADRYRYFTTQNVSAWLWGWPDQVLATIHGFYPCCTVSSFPGLLGPNENVLNPSQPQDTLFVGSKPEVSLIRQYIKYQGMDSMQTFTFTPPTTVTYPPTWKSGLANRVFGTDGTQFARGLEEGAIINAYVSQLTRTVTLGNVNNEKVKFKNIDMLHFTLPDIYLGNATEYPFNGDFYMLGYRGMANLTATGRGDFYVSKPHFMDAAPELLDSITGIPAGTKDAHDTYLNVEPISGATMQAAKRLQLSVRITSEIAIVANSTVAPIGYAPQQWGGALPNPGGMGQYMPIYWAEEYGEVSDSSADAFVAGVYGGQKAAMGIYIAGEVAACALVVAAVIMYWVAAAKDQAGTGSTRL

SEQ ID NO: 41389 - protein, 800 aa, Oryza sativa
MRQPQLRAATSRPLSWRSNCTAAAASASQPSEPLSAHFTNGRPLSRAPAVVRDLSSVLRAILAASPSSHSRAYPLLKSAAFDARLAPDALVDAVLSAVGGPGSRQATALLSRLLASLCRAGRAGAAAAAYASMEARGVTPDAKSRTDLLAVTARSASAADALALLAEMRGKGRPLDAWMFDVVMRACFKEGMYDDAVRLFDEMPASEIEPDQRVCSVAIASLCKLRDANRALLVLRKMQDAGFVPWDFTFNSVVDVLVKGGRMEEALHIKDELLATGKKMSVVLATTLMHGCCLQREVRKALDIFEETLRDGLVPTDVTYTVLIRGCTEEGMPEKAYELYRQMRDHGLLPSTNEFNMVIKGLLNDKLWKDAVSLFKEMADSGIPDAFTYNILIHWLCQRRKIREALNLWEKMNETGVKPYIVTYHSLLLCYCVNGCMDEAVKLYTEMPGKGFTPNVVTYTTLMKGHINKAAFDKAYALLAEMKQNGVSCNDYTYNTLINGLCVVGRVCEVGEMLKRFETEGFVPTAMTYNSIINGFIKAGMMGSAFAVYQQMCAKGIPPNIVTYTSFIDGYCKTSCCDLALKMLNDVRCKGLRPDIAAYNSLIFGFCQEGNMSHALQVLVLMLKDGLLPNISVYNSFITGYKNLKMMEEALRLYEKMIKEGIDLDTATYTTLIDGFSKDGNVTFALKLYSEMVAKGNIPDHITFTALTHGLCRNGDIDDARKLLDEMNRLDIRPNVLMYNMLINGYLRNGKLQEAFRLHDEMLERKIMPDDTTYDILVGMKSLGSDSPIDAENPNLSSTG

SEQ ID NO: 41390 - protein, 381 aa, Oryza sativa
MVGMKKNSVGLGRLSLMISMVQVLGAVGGGGVHPSKMRLVPAVYVLGDSTLDVGNNNHLPGKDVPRANKPYYGIDFPGSKPTGRFSNGFNAADYVAKNLGFDKSPPAYLVLKARNYLVPAALVMGVNYASAGAGILDSTNTGRSIPLSKQVVYLNSTRAEMVAKAGSGAVSDLLAKSFFLFGVGSNDMFAFAAAQQKLNRSATPSEVEAFYTSLISNYSAAITELYGMGARKFGIINVGPVGCVPSVRVANATGGCNDGMNQLAAGFDAALRGHMSGLAARLPGLAYSIADSYALTQLTFADPGAAGYANADSACYGGGRLGAEGPCQRGAALCGDRDRFVFWDSVHPSQQANKLGAKAYFHGPPQFTSPINFNQLANYNS

SEQ ID NO: 41391 - protein, 776 aa, Oryza sativa
MPKLEELRLANNNLTGTLPSALSNWTSLRFIDLRSNSFVGNLTDVDFSGLPNLTVFDVASNNFTGTMRPSIYSCTAMKALRVSRNVMGGQVSPEIGNLKQLEFFSLTINSFVNISGMFWNLKGCTSLTALLVSYNFYGEALPDAGWVGDHVRSVREIVMQNCALTGVIPSWLSKLQDLNILNLSGNRLTGPIPSWLGAMPKLYYVDLSGNQLSGVIPPSLMEMRLLTSEQAMAEFNPGHLILMFSLNPDNGAANRQGRGYYQLSGVAATLNFGENGITGTISPEVGKLKTLQVFDVSYNNLSGGIPPELTGLDRLQVLDLRWNRLTGTIPSALSKLNFLAVFNVAHNDLEGPIPTGGQFDAFPPKNFMGNPKLCGRAISVPCGNMIGATRDDDPDKHVGKRVLIAIVLGVCIGLVALVVFLGCVVITVRKVMSNGAVRDGGKGVEVSLFDSMSELYGDCSKDTILFMSEAAGEAAKRLTFVDILKATNNFSQERIIGSGGYGLVFLAELEDGARLAVKKLNGDMCLVEREFQAEVEALSATRHENLVPLLGFCIRGRLRLLLYPYMANGSLHDWLHERRAGGAGAAPQLLDWRARLNVARGASRGVLYIHEQCKPQIVRRDIKSSNILLDEAGEACVADFGLARLILPDRTHVTTELVGTPGYIPPEYGQAWVATRRGDVYSFGVVLLELLTGRRPVEAASPPHGQQRELVRWVLQMRLQGRQAEVLDTRLSGGNEAQMLYVLDLACLCVDSTPFSRPAIQEVVSWLDNVDTIGRS

SEQ ID NO: 41392 - protein, 821 aa, Oryza sativa
MDALPHDLDTVESVRDSFTCALALLGVFPKPVDNKALRAIPDAELLGNSTPLNISTYQAQSSENAKCLFWKSNRPSDPQVLFLNDESLRIHAYRTSTVGQLAMVDLAVARQIAQVDPSEVVVLHGESGSGKTLNAMLSAGAHPASSKAALCVCVGPNDVGLDGKATASQGQIGTAYLNIEDQTAINEQIKHNFQVKLEATWNALKKMDGRLAEKATEGHVTVLFDEFGSLSEAVRAICAMQDVLVNATRAALHLDTTVTVQIIVAGTGAHDGTHVIGSDPSRYELKTVTPAVWKTLRPRNDDKRAFAIEVCDAVEKGNSRAASAAWRMVSTNARACAIFLIEVEGLGSGEGKSVSPKLLRDLVERTAVKFKSLNGLNGASEADYREYYFHAVALSLYAATEDPFKDDNAYILSCFRECGMLTDRAVMQKPANRQTHTVISVHKDQSLCLPNDCHGQRFYLSEAQIVIAQTLLGLGDRDFSGEGLEALVADYLVHAAMLAPKLKGKQLIKPYEISTGGAQQNAVQLLTPQGSPPIPPSTKGWIHPLQLLEEVTKSAGETTMVARARLKHKIEPTKTGGRIGGDKIFDDALRKDVDAVLINADKSSYTDLIFKQGVGHRVNKKVTMWLIQTKRYDSKKLTAETTMAELYKMGDLKGWPWHVTLALKKKVRQDDKAPELTVMKSLNSALKRHSLRTLKPTKIPFDDPEFWSHLALRLAKKTPRRTDHADEALKTIAGGDYDVKRVVFVWGTAPEEVAHKTSAGTRLVHAWDPDQRVLTRSPALGSLYPFTVRDADFAELRLSIDRKDHRIGPFATKGLCFRRKL

SEQ ID NO: 41393 - protein, 110 aa, Oryza sativa
MTGVFATSSHHSSDPRLRQPCPVGRRGMTCCRVPYTLMWSLPAPPNRILSFVYYYFLLAILLSFGITDLVIISDHFSILRDPNTPFLPASSFLRYQATIEKACIPLAFHH

SEQ ID NO: 41394 - protein, 751 aa, Oryza sativa
MSAEAANAALPVQDGADASNTQINTNVAAAGAEAPTPTTAQAAHQNSASLYVGELDPSVTEAMLFELFSSIGQVASIRVCRDAVTRRSLGYAYVNYNSSEDGEKALEELNYTVIKGKPCRIMWSQRDPALRKTGQGNVFIKNLDHAIDNKALHDTFAAFGNILSCKVAQDELGNSKGYGFVHYETAEAANNAIKHVNGMLLNEKKVFVGHHIPKKERMSKFEEMKANFTNIYVKNIDLEVTDEEFRDLFEKHGDITSASIARDDQGKSRGFGFVNYIRHEAAAVAVDTLNDTDFKGQKLYVGRAQKKHEREEELRKQYEAARLEKQSKYQGVNLYIKNLNDDVDDEKLRDMFTPFGTITSAKVMRDAMPAERAESPAAEEKKEEEEEKKEEKKDDEEAKDGSSGEQNGEDTKAGDKVTIKGEKKILGKSKGFGFVCFSNPDEATKAVTEMNQKMIEGKPLYVALAQRKDARKNQLEATIQARNQLRMQQQQQQQFGAIPQMFMAPGQQPMMYPPGARGQMPFPAGMPGPQGGRGAGFPGGMPGQQGGRGGPNAQQMPMYMPPGMAPGAFPPGPYMNQQYMQLAQAAQQAMGGGRGGRGGPMGAMPGMPQGQMAGGPGMRGGQGGFPQGGRGGPGGRGQPPVPGFPQGGRPGAGGPGVDMSVLNAAAPGQQKQMLGEALYPKIHEMQPELAGKITGMLLEMDNSELINLTSDEAALRAKVDEAMSVYDEYVKNKEGEGEKEAPKEESKDEKA

SEQ ID NO: 41395 - protein, 797 aa, Oryza sativa
MENTDHLQFSLFEGDYWRTVWIFSGTLSRSNGKVNGFLFENEERRLFRGRWTNTLWKHSQPLSMEFDASWSAFEGVASTGDTSQSISGLKSSGTESPPRSSTTSLPAPPSPILDAIPKPGEPLEFFYVDLIVVPVGEEVPPNYEIMTIKPVYMWDPELKDGGHIYFLKAPAEECDNRPIITDATIIYTELEPLPEGYKAVTKSPHGSDATLKCGAGDGRRLSLCFKTETSSSKVARGIYISFNWGDTIPNCYRRLMRTNDFHLEANLSTNELDILGKRYEYVYLLVWTGGRYEHPIVGEWETTLGVLTLQVDGKSRGRRVKATHGSSGNNLISGEYLQSTREIHATYREANNANTACCGFSFADDQWRRLLGHYVYADVRGSWLGWKDIFMQIGMQKDYLCQWRNGEEVFSVAGENNHIESLFSQAFCPELMAGSNRVSCSKCNDLRDTERYTCISRPPPHLILTLKRFAYDYRSGRTDKLLHKVEFGPTLSLPACPPELVSSVFETPEDHQLQLQNKYGLYAVVVHAGTKLDGGHYYTYARDPNSLHLSEEDDPDNAPWCRYDDQSVTVTDWKSWKEQLWSSIDNSEYLLFYRRFDLPLPQPLVPESKVAPLSAIDSVVQHNIDHLAATNRKNSSLQLLQEIEIDTRLKRNYIGPFPVPAHQLLQQEDLLNGLTFSPLTIPKPSTPLPEQYAGLLPTECPHCHRLFPASDLSSHFIEPDSCVFASKWIIEQPASPDTSSSSSSSSSSSAIEGGEEPASASSVGNSPQISNLDMNQYDYSPFPDDSTDYSLLVDDSP

SEQ ID NO: 41396 - protein, 625 aa, Oryza sativa
MDRVVTLVNRLQQICTQLGDTAGNSVLVDKLSSIVVVGGQSSGKSSVLEAVVGRDFLPRGTGIVTRRPLVLNLVHVDDPKAQEYGEFMHRQGQKFFDFDKIRQEIEDETERLLRSQPGQKTVSPVPIYLTVYSPLVPNLTLVDMPGLTKVPIDGQPLSIVQDLEEMCRQYIKGDNAIILAVTPANADLATSDALRIAREVDPTGDRTIGVLTKVDIMDRGTDCREILLGKSLRLKRGWVAVVNRGQADINKRVTMSEARANELGFFKGTDAYRDLDNTGTDYLSKKLSTHLINEITRKLPEIQSYIDKTVHDYQSQLKALGHDVTGNRGKMLHLILTLCQKVEKAFNKIVDGGEGGGERVLEVFDVKLKEAIHKLPFDKILTLKNVRNTINEADGYQPHIIAPEAGYRRLIEDGLTLLRDPSAKAVEQTHQILKSIVTQAISEVPELQRFVNLKSEILAHSAVTLDKLKESSEATVRTLVDMEGSYLSTNFFREIVAAESFSYDPSRPKPQFVTLTGEILLEKRYDGMSAADAHLQRISDHVSAYLQIVRSQLLATVPKAVVHCTVVPAKETLLSDLQEEVAGKEEEQLRRLLNENEEVARQRDSLRKRLELMERAAREIMQFRV

SEQ ID NO: 41397 - protein, 734 aa, Oryza sativa
MKGFRQRLSRAKDGNKSSKKKDSASGTASPSAGASSSPSNSNQPTPTSSQTQLADARSKIQPTADSIQTPPGSLQPGQPGASGPMAGAPQFGGQQGMAGASGAGSGGAPGPGTPSRLGQPLAPSVVISPSAPHIPPPGAAETMPGDLAPPKAGQKSLIFDRLQATPKDAIEGIRTPKRQHSSRFDISDQRQRELEKLPGFHEVPPNKREELFMQKIDQCNIIFDFNDASGDMKSKEIKRLALHELLDYVANNRQVITEKMYPRVVEMFAKNLFRPIPPPMNPQGEAFDPEEDEPVLEVAWPYIQVVYEFFLRFIESQDFNTNIAKAYIDHSFVLNLLELFDSEDPRERDFLKTTLHRIYGKFLNLRSYIRRSINNVFFQFIYETERFNGIAELLEILGSIINGFALPLKEEHKLFLTRVLIPLHKVKSLSMYHPQLAYCIVQFLEKDAALTEEVVVLGLLRYWPKVNSTKEVMFLNEVEDIFEVMDPAEFAKVQEPLFNQLAKSVASPHFQVAERALYFWNNEYFCNLVSDNVEVILPIMFAPLYENSKGHWSRTIHGMVYNAMKLFMEVNPQLFDDCSHDYAESQNNASQIKQSRQDRWDKLAKLAEDRQNGKVPKPAPSTSTAASPMRVDDSDPLSQGRLENLRLQDDASRDRRPKDYERQSSQTSRRHHSQQGESSSARRSSGRPRSNSGHGHRPSSAGNNVVSPRTGAPMGRVRANSGSTISRVTPNLTS

SEQ ID NO: 41398 - protein, 809 aa, Oryza sativa
MAGSTTSATLMPEPNIVPGVGPVIGLEEGWAKIYRDGVQRVFHMVAGRDAAAGRAFNNREYMALYTTIYTMCIQKAPHCWTAQLYDRHELALVEYLDGTVLPAIEQKKGEFLLKELVQRWANHKLIKQWMCDFFRYLNRFYVKRHNKKPLEEVSILRFKTNVYKKVKGKACTAVLELIRRDRDGEQGVDRDLLRDAIAIFVDMGMGNGKTYQYDFEAAFIDHSANYYSRQSALWLSGDSCPEYLRKAEARILQEKRRVAEYLHSGTDEPLMETLYQTLLIRHQSELLDKENTGLRVMLKTHAEQDLARLFILYSPVPSSLPPIARTLNAFILDVAAALLDKCTASRTTATEYIPELIRVHERYYDLVSGACFCGHATFHRALKDAFELIVNKKVLAAPAAPAAPAAPAPAAAPAAAGAGAAAAGAGADAKAAGSSSSSAPAAPIHTAELLANYTDVLLNKTGTRLDEKKLESTLNNVVRIFSYLTDKDLFSEFYRTLLSKRLLLGRSASTDAEKSLIGKLKLKCGAQFTSKLEGMLNDMRNASDHNQSFKDFLRDKKRDSELNGIDFSVQVLTTGFWPNGVSKTEDVKLPAAMQSCMDVFRAFYDTHTNNRVLTWLHNLGVVTLTGFFTKRKSDLVVSGVQAAILLQFNEHNDLSIEELAKVTGLTPENLKAQLRVLVSGKYKVLLKRPAEGYKPDHRVSVNLAFSDAQLRVRIPPAMVVGGAVSEKEREKDVESVEEDRRHAVEACIVRIMKARKTLEHQQLMLEVSQQLMQFFKPDPKAIKKRIEDLIAREYLERDAEKNTQYHYIA

SEQ ID NO: 41399 - protein, 911 aa, Oryza sativa
MAYQGGPGANSYGDPHAPHPYEARHEEEEVGRSLLHSNPTGTQQGPFDDHHGVYGHDQRPQSTYSLTETYASDAPQTQYAPQSHSGSDVYSATGGYDPSTEYGAPHRATSPYARSETSSTEAWKQRQQPGGGMGLKRGLTRKVKSVQGSVLSADYPVPSAIQNAIQAKYRNDLESGSEEFTHMRYTAATCDPNDFTLKNGYNLRPAMYNRHTELLIAITYYNEDKVLTARTLHGVMQNIRDIVNLKKSEFWNRGGPAWQKIVVCLVFDGIDPCDKGTLDLPATVGIYQDGVMKKDIDGKETTAHIFEYTTQLSVTPNQQLIRPHDDSASTLPPVQMMFCLKQKNTKKINSHRWLFTAFGRILNPEVCILLDAGTKPGPKSLLALWEAFYNDKDLGGACGEIHAMLGKGWKNLLNPLIATQNFEYKISNILDKPLESSFGYVSVLPGAFSAYRYRAIMGRPLEQYFHGDHTLAKILGKKGIEGMNIFKKNMFLAEDRILCFELVAKAGSKWHLTYVKSSKGETDVPEGAAEFIGQRRRWLNGSFAAGIYSLMHFGRMYKSGHNLIRMFFFHIQLLYNIFQTILSWFALASFWLTTSIIMTLVGNPEPKANPPKKAWPFGDKFTPTFNTVVQYIYLAFLGLQFILALGNRPKGSRWSYMTSFIVFALIQFYIIVLSIYLVVVAFSGKGTKGINTDSAKSFFTSFTSNDGIGIIILAMAATFGLYHVASFLYMDPWHMFTSFPQYLLIASSYINILNVYAFSNWHDVSWGTKGSDKADALPSAKTEKASDGKHTVIEEPDLPQADIDSQFEATVKRALAPYVPPVESNEKTLEDSYKSFRTHLTTAWIGMNALLAVAVQQDDMTKFGFTSSSNERTAAFFKFLLVSTAILALIRFMGCLWFLGRSGIFFCVRKR

SEQ ID NO: 41400 - protein, 668 aa, Oryza sativa
MQKGRHYAAVSLEEAESLRGVIHSREGQQFVPGAVPAGAQPAACAPRVGSMLLDRSTNYTAAYRYQQHTAEQVYRFFNSDTFYEEHELAWLLRGIQDNPTSERLEWFVETRACRRRQQNHEQLAHTPLQRVFVMPDEFALLSFRALLASIRMRITVVGMNVLDAFCAFDGDRDGVLNCGELWGGLDWLGLTHLQPDDIYQIVNNVDTTGKGVINFEQFSAAFKEEAPGVLQNNSAASNDDVGGEGSDALEGSVPKQSEQFKRVVILPKAIKELYQPKSENLVLDIPAHVLTNMKVKLNTISSFKLVWSTKSTKARADVSIWKPDVGSNFLHANKLKLCLGYYATPGLKDKFVPEVKILELTDTTKGRIFKSAVLDAAHLAKLVPFPVKYRQAWHHREGGDGSSHGIYVWRAVPPTQDFVALGMIATTTPDEPPLDSMRCIPRKWVKPTSVPATKLWNDSGLAGRKGSLWSINAMGLMSSADGHEKPETKEGSYYDMWSDRFFATQGVEVRASQLDVKGAGAAAGADRKAPSTPTNASAGASAAAASGVVATPSPFANSNLASALVKAASGESRPTPPRPSIDLKGHRPPPPPPPAAGPRPSVAGAMASPSVTGTTAARMTVSTGRLGAAAKPPPPVAASPVAKPPPPATPPPGAVPKKPPTPANPFGR

SEQ ID NO: 41401 - protein, 667 aa, Oryza sativa
MARARARSMIEAEGPASSSTMSAPAAATTTAAENEISRCLVYCRMRPSFTRDYEDGGHELLSLQDKKVVVKDERTYEFDGTFKGDSRQEDVFRIVALPCIQHAFKGFCSALMCYGQTGTRKSFTMCCTKPGQEGIVPQAATTIFSMIRRDAARKYTVTAEFIQIYRDQLGDLMTEGGKDRVDIHFDAVTGVTLPGCSTHELSSPEEFMAFYHEGDKRRVVTATAMNPESSRGHTALVVRINSIPVDDECGNRISGKVTFIDLAGYERFSKTGISNSNAVMKDEAKTINASLLSLGHVVTSLSNGDKHIPWRNSKLTRLLQDSIGGRSRTTVILTVGPSSEHLHETTNTLQFGMRAMAVKVQAKVSTTVDFEKLAARLQAMLDEKNARISDLEIQAAANDAERQELLDRHRRDTEVLQAAHNAELENAKARGVSAEQLLEISKQLNLEANSLKEQQEEEISYREDQHQKDMMEVFAEEQKKAQRDLTRERMARELAVVELEKRLEEARGGGNADLEHALRELADRDTRLMERATKLAAMTARCEQLALALQALGGEPTFSESDDDEPTNLFVDVSQVEDMKRRFSTERDALVNQVADLRGALDHTVATLAARTQEVESLKEAAVAREASFSDLGAPSPVPAKAPPPAGITEAEVDAIKASLQSDIDFW

SEQ ID NO: 41402 - protein, 155 aa, Oryza sativa
MVAAGWRREAREKAASGRHGWRRRRAAWRARGGTCGERGHARRQRRLARRRRRRLWRLARPARREVRPAEGTGRWRRLGGCEASVGAVASLRGRRGRRHGGRRGESSRGGDRRGARRARHGAAASLPHWEVGWSEAVAMRPSGPSRAAWLRRRRR

SEQ ID NO: 41403 - protein, 799 aa, Oryza sativa
MTRRPARDTGSGWTVVVEALNSYDDEKKWRWKLACDPTDSVLDLKFWIAERAGVAAEVVQLYAKRTDAPAPANGAAAPAPHLHLNLHSDNDTLVKLGFKPQGTVLRVQYVFPSTTPGHGAVHRSEPRLVEFDDAHNRNLCSNFRLAAQKHQDRNFLGTRVFTKNAQGKEERGNAYTWQTYGQVAARVAAFGNGLRSALGLQRGDTVGIMSLNRAEWIITDLACSQQGLISVPLYDTLGPDATHYIVNHASVRAVVVCREKLGEIQSVRDKCPTLQFVIVMNEYPGDVEYVAKADRNTAPFSHTFTELEKAGRDAPQLPIVEPRPDDLLTICYTSGTTGNPKGVMLTHGNILCAALAIANRLPKEQEQVETLMSYLPAAHIYERVVESSMVARGHAIDFYSGDTTKLVEDVAVLKPTIFPGVPRVWQRVYDRVNSQVHESNPISRYLFTKGYAAKQDALRRGLDDTYNNNKSSPNVWDRVVFSKIAQKFGGNLKVMASGAAPLSPKIAEFMHLAFQSGFAEGYGLTETCGGCTATHVKDVNFGCVGAPIACSEVKLVDVPDMDYLVTDQPYPRGEIWIRGPNVFKGYYKQEDVTAEVLDSDGWFRTGDVGLWLPTGDLKIIDRKKNIFKTQQGEYIRPEYIEGVYKNCKYVANVFVHGSGLENYLVAVVVPNFENVTAWCNTNGLQAVAKAGPEAMAAHDKVRAVILRAMAQQAEAEKLRGFEVVKDITLTHVDFTVDNGLLTPSFKLKRHQATKHFDAAIQNMYARTNAALAAGDKPAAAAAAAAPAAGGAAKPIKAKL

SEQ ID NO: 41404 - protein, 239 aa, Oryza sativa
MASASPGTAGARAAAATRPAFNQFARPPTAGQKRPPPQRDAHTAVAGTVAAAEAARAYLKRSRVELAEESDAELARHRRTLLQREYAERTRRAVVWEFKRQCDALCAADGKPVASAAAAAAAAPGSADTSDDRAAVADAAADAAVDDEPPSRVLTDQQTATALRVFAAEYPVDAPAAAAAVAAEDGGGRAPQRTRSVPESLRAADPAAAAALEAARAGGGGGGSGARKYLVARYTDFWW

SEQ ID NO: 41405 - protein, 935 aa, Oryza sativa
MEGPVSASMGVMVPLLSKLIESMEQPRFKDLKNDLKSLRAELASMEAVMLKFATQDDTDLQVKEWMRQVREVGYDTDDWIDSHPLVAAETKGSRIFSRNNRRRKLAELIKELKDRVEDASQRRTRYMLQSAPVVDDVTDDLRPSNVTVDPQLLYGVSRRLVGLDEPMEELARELRPGGGAQQHFKVVSIVGGGGLGMTTLAKEVYRKIHGEFVSCAFVTVGQNPHIPTVLLNMLRQLNPLQPQGDDTEQQMDEPTVVGKIREFLDKKRYFITIDDIWSISAWKDIKYALPENTPGSRIVATTRISDVAKSCSVRPTDFTYPMKHLSKTDSKQLFLGRLQSPKKIYSSETDLEEGVFHDVWNICGGMPLAMIVIAGMLNRKSPGCPEDNKSIKKALEKHPTLQGMRRILRICYSDLSLPVRTCLLYLSIFRPEDETVEKNRLIWRWIAERFIPVLKQEQVTLWETAESYFNELVNRQLIQPVEAGDVVKVKVHDVVLEFIASVAAEENFVTSDMVLRCKPRDIVRRASLNCIDDDESTGGLSQVRSLTVFGVLAEPMKSSIVYLQLLRVLDFKDAKGLKDEDVQGLERLFFLKYLGLGGKFVTKLPEKWKELQNLEALDVRETAVKELPEAIARRCSKLACLLARRLAVGEGMHSLLHLQELSMVSVTDAASLDRMTNLVVGLTKLRKLGVSLFFDATGDQHQHAVAAAAPDDAKLAASLERIEKCGVESLLLDVVGEGKTRAALDQLVEKWALPRRLQKFTMRSEHYYFPKAPPKMAPHESLSHLEISIAELRKSDVGVLCTMPSLFYLKLSTRSSPLEADQTVVITNVGFQCLQVFWFKCQDGGLGFDFGDGAMAQLLKLDLHFKQAKKPKLTGISNLSSLRQFHATVCCGKDDSEFKATEENIKQIVSNHSKNPTWEVTMEMEIDKPTAAISI

SEQ ID NO: 41406 - protein, 1224 aa, Oryza sativa
MSEGASVKVAVRVRPFNQREIDKKSKLCIAMPSRETTIINQPETDAPKTFTFDFSYWSHDGFKKDEKGVSVPDGDTKYASQEIVFQDLGKLVLDNAFDGFNCSLFAYGQTGAGKSYSMVGYGADRGIIPMVCDKMFERTGELSKTEPNTTFQVTVTMLEIYNEQVRDLLNPKASAQKDGLKVREKKGIGVYVEGLVPRPVANYAEIEARMEEGTKNRTIGSTKMNATSSRAHTVFGILFTRKAKDPGSGQEAETTSKINLVDLAGSERADSTGATGDRLKEGCAINQSLSALGNVISTLADNAGNPKNQKFVPYRNSVLTRLLQDALGGNSKTIMIAALSPADVNYDETLSTLRYADRAKKIKNSVVKNENPTDRIIRLLKEENDRLKKLLEGKGVDLNAAMAATPGGGAGGADVDAMKKKWEEEKKENDRIIAEMKKSWEEKVKEAQATAKSAGPDSGTSAVLAKTAAASRLPHIVLLNEDPQLSGNLVYMFKIGTTKIGKRHSDGAAEKQDIELTGLNVLKQHAVVENDASAKVSIEPLNKSRTFVNGELVKAKRELKQGDRLVLGNNQHVFKFVNPATPGFKEDDGNVGEDEYNQIMKEFSDKQGLNKSSMSAEVQKLEEEEKKTRKELEDKLKAMEDMLKRERENARKDMESVRSVILKKGALSDADKASLQKLEAEFNDKVGKSDAQLKERKEMEAQMLQEQLKRKRENQKVESQLSALIPLVNEVNQMAEEMQKPVRFEAKLIIKPTATINFSTLDEIQHLKKIDVVVRVHSLANGNVWTWVMEKFENRLFMMRDMYQAFQDFGPQDVGQKDPFWDPPEAIEIGKAYVYLKALSQLVEIENEFAIIDHAGEERGWLRVEINPEGLNGEEKEYLGTSDELLEKSVVFNVKVPYARGLPAKYGNGVHVVFKFNGETCETEQCDSKTADPKWKFAAKIKLEKVEPKHIKYLLTEACVFEIRGFTDNSRPPTAAGAVGGAAMAGAGAGGGGAAAGALAPALCPICEERPTAIKCTDCEEKKQFYCGTCWPVHHKSAAKKTHKKLDVTPGTAGAAGAAAAATAGKDEKARPGGAAGGGGSSLMRPATTNAALLCDWCSEQRPTVTCVECNSAFCDTCNGVKHKSKTLQAHNRQPFASPMGPPSPGPAAAAPIPSPVASAPAAAAAAAAAPAGGGGGGAGLCQNCEEHAATIACEGCEGKKFCDTCWAANHKSAAKKAHPKKQL

SEQ ID NO: 41407 - protein, 607 aa, Oryza sativa
MDLQKAAADRDPLNDPLQFGMQNEPLDSHHDDLPDAYGSISHDETQHIAAGTATTPSAPEHNPLAPVSHDSANPLWQHYPEPPAPIATAIAERPLTVAAGNQASSSSGAGSRYPEVPTATDLNVPLSPTSTFSGSGTPSAAAVGAAAAALALAAAAHGGAVSPPPVGNPELRIVVQNPLKHMGPSGLVPGLEEAYISYEVTTVTSLPHFSSTRLAVRRRFRDFVSLSNLLPKLLHGSFLPARPEKNLVESRRMTSEFIEERRAALERYLNRLAAHPAAARSEALRVFLEAEGSLRSNPQWLALKPKVLTPIQATNRLLRTIVGARKTAPTPGEVVQPAAANRDIYRLLHENLQQLRGSFKHSPLNAEEVALRDDTVVVEDEAAALHVALHRAEAWTRAAERRSALLGEAAVALEALASFEGSYTYCQRANTAAMEAAAQAMQACGASSSAAAAASSKLLQPLRDNHAATPNVMAALHGRERQLLTVMTLRQDLEDKRARLSAVQLTPASQAKKVDSLRTVVGQLEVSSAAAEAEYNRQLARNRDELAALRQSRGQELTAMLGALVSLELKHQQQQAAVWQQLLQQLPVPGMTTAYMAQHGFHIGSLS

SEQ ID NO: 41408 - protein, 687 aa, Oryza sativa
MASGHLVAVAVVIGSLCVAAVGQGNNIALPFAPSCSTAGNYTGDSQYKKNLDQLFTTLSAGAIAGDWFNTSSVGTGADQVFGLIMCYADRNSTQCQECLAGAPAGIVQVCPGSRTADANYDACLLRYSDKSFFSELTYGADPTIAWNVYFTPFVDNMTTMNDTRRRLMSQLAERAGDTKLRLDNGSLPYADSKLGTSALYGLAQCTRDLAASECRRCLSGYVDDLSNTFPNNSGGAIKGYSCYLRYHLWPIDITLPPPPLPPPSRPPSSSPAPPSPPPSVSGGLVAGSTVGAVSFLVVLGVSIWLLLRRRRKRAGEARELEMDEGDFFDDEADDFEKGTGPKRFHYGELAIATDDFSDEHKLGEGGFGSVYRGFLKELNLDVAIKRVSKSSKQGRKEYASEVRIISRLRHRNLVQLIGWCHGGGELLLVYELMPNASLDTHLYSANAGVLPWPLRHEIVLGIGSALLYLHEEWEQCVVHRDIKPSNIMLDAAFNAKLGDFGLARLVDHGRGSHTTVLAGTMGYMDPECMITGRANAESDVYSFGVVLLEIACGRRPIMADHQSEVDEDRIHIAQWVWDLYGNGRILDATDRRLNGEFDGGEMEAVMVVGLWCAHPDRSLRPTIRQAVGVLRGEAPPPSLPARMPVATFLPPVDAFNHTSSSVATGSSSASTDTTRSSRTTETSSLLK

SEQ ID NO: 41409 - protein, 1162 aa, Oryza sativa
MLHPLHPHPLVRDFSEHRWHCDGNAQPGGCRRVQKLDMQKPVFGTETPRFRCAAGCDYDLCDKCFYAIPRIGEDAQPFDERLFQSKIDSAVQAVELILEKTRNPRDPMTVRHVYDDKFLFVEALTDAALSSLLFSLEQLGVTPDAWAKMRQWVYKEQRAANLRFKSTEKCVFVKKVERKVEDPSSIQARKNDDSLLGQIFQTKLIHTIVDYYWALTVEYELVVFPGNSPEEGIPLQKRTGGAQLINNTEFPLPRPSVSVKDPIDVNLTWLVSEHVRASESGHASPLPFQFKIDRRVKEGRCRTPRRNGRVEECLEYLARQYQWATRVRNYFADDLLAIPNAEKTDYSLMNAERVFNPVVPLFESHVKRVRERAREEATRALLPSDTTTTSSSTTVSTNANTDAIASVEASESGEIASKLPAVVLAASDIASFLSEERRTFTEVIVDMGKIYISAESLEKGRDGRAVIVQARELVTAAEGKLVLALSHVLHVVQRYYDAVNFVEDMLRRQLIAAIGREVNHVDFDNFMHFHLFRILRTPYQPRPFSYGFNVPEHCADGVLQLDKIGARGSNPIYTFVNKMPMQKPLEFFINAATKITCRGNQHVHGFLKHSFSNSDQNDQFKLSLRAKQFSCFVVLIGKLISSTLFDPQYAFLVKDKDELSIPLELAQIPSAKEFKDAIESLSPEQQRFCRAYREMQLSSTLFGICLVHVKPQLEKILNLPPDGLAKEVNLTRNLLDLFITYQIPSDMLSFDAKTSKQNKQRAERGDQKLLADSAQAKTATTTDASSTTDSAQQQQQPGEAAPLVEFTPDMKLADVMAHAEGLLDMIQGLKTEELAQKRREAETRLAQQTSHITRCDGLDMLDPFSPFGGGYGGGGPMLSGGLFSAASTGGPGNYAFGSAMAVPMASPFLAPSSSSTSTNSASLGGATRGLSAGKRKAVIQSAPPSDARGSGAVAEQTRASPQPADQTGKNAAKDANINNSNNSNSNAADQSLASTGEDSSPQYDFTQIPNQLDAQFLSMMQPPPPTDDNANLPRRPDNDHSAVRSAIITCGPLWAYTEYENLFAGPKMRALDNTEQERERTRAYDLLQALSKSGALAFDDVDLHVVIAMTHCFDETVMRTVIQQNVNPIESVEHSALLVASTIHQVPDLTELLTPAVLENRG

SEQ ID NO: 41410 - protein, 828 aa, Oryza sativa
MATALSSQVVMGPLSFDVPPDYLGLQYDLDTDKLDQTLVKLSQTIAKNAKVTNSAKDEIAALRAHIDNSVAKVQRALQVVDDSGRAVKEQVLRVYDEVKALQGTSVRRQEYDVDKDLTWKELNNLSAFVAEYKETQGHMSRVQDWVKAYVPEWYAHVSAAMAKTLHDTLMKAKDETREAIVQDVAEMQRRAMESAKNAHAILESRFDGIDAKLRAHEARFEDVDVKHARQVAITSAVSTGYDELKDKLREWMLDFAEGQMVQDAQLEAALAVLGFNVAQVHDLVEIQYAPETTPLPAASVQGGGSSRQSPTTTGGDRLLPPRPTPSGGSHARKGSVMSTDDADPAQRRPSNAMNTSLPQLYASSENLPPPQRGSGSARTTIVRVRDPEATAAFVATLPAFRLAQSQTAADAKQLVADVAAKAAAQVQSVAKEVQIQLADKVGVSRLKELIEKNKDDKLYWTVDSLVREVKEVRETKVDAARFDSAMSAKADKSTVDDKADKHFVNTAISHTASKADMVSGELDAVKSQLKDALQFIQQMKANGGAGGGSMMQPGGAMQSSQMQQQQQPYDGASSMMGGTAGSMGRSHGRGAQGPHSSSVTSPNAATGAAVGGLYDATQGPHATAAGWDGLSPRSRQIVQGEATPRGAMPYGRGGGGGGGMYPSDGPRGGGDTLSLPALGSYHPSAGGGGGDDDDAEYGYDSSSSPRQGGRGQHGGGGGRPPRRGRGGGRGRRGGRHGAAVDSGDENGSGATGLPTPPDVNSLGLGDVLHRLTHEEFLYGQRPDPHLVPPRGRQGSAPSGSSSSRGLSSGGGARAATGDAAQYAVPPPE

SEQ ID NO: 41411 - protein, 566 aa, Oryza sativa
MTGCVDAAHDAGGGTHADASLSISSFQCSICFELLLDPVVGSCGHDFCLHCISAWKDERQRANKSIQCPICRAELCSPYPYQPFGVCIRIRETIEKLFPEQLAARRRDVEQARLAAAAHAAALNASSPFSSYVTADAELQASFSTYADAYRQLSQNLLSLIARQQEAAMGQQYQQQHQQLQALQQMHSASLRANLQGSLQQLLRPSAHPTSSTTSSSSTATTLPHPHLQQQASNPAPGAAAGGADDMQIDVAPPAADGSSDPSVDASLPQRHVHMQQQSSPGLDPQAAGVAALVLQLSHIQQQQQQGLVSLPDSQAALLYQQQQEVMMHWYASLLAHQQQQQTAAVGAVPGHGAPPGNASMPGTPTAALPRAVLGSWMVPAALTSEADLMRLYASLQSRIQTCERLLCMSGHADMVAARQAADAQHAGAALAAAAAAAGTPPAGPAGQAAVPQYLLYLQQLQAQQQAAAAAAVFSSGGHAWQQQQAVDGSAGANAAPGGSAYPASSAGLPGVPGSPRYSSSQQLLQERIMMQRHMQQQQAAQQQLWWQRQQHQQQQQAPSQPDLQQ

SEQ ID NO: 41412 - protein, 659 aa, Oryza sativa
MRCYTSFVPAVVSTPLNGVVHAARNAVATVTSPRRLFSTSVKLLSTYTRRTPSADAATPSIGDAATSVTHATRGVAQYATAAAPVDVEVAAAPPRPRASQPTSAPLTSSPQYLIDVTPSADGAELTFVVAPTSEQSLCFDGHDTSAPIHFRVPAGRMLDHDSRQFQDLTFQRVDPLPHNGDRRVTSIEVRDDDSVVVARLAPRAAATPDSGWSEGEVECHVPFSAVLSSAIAAAAAQCADKRTSVVALYPGLCRALQSQQCMVSINSKAYNPIHVDTVRRMVAGSPILNGGNGRPQWAVPPAVVTSASALADPQYWLRPRGADVLRAATTRGYAIETAFMSNADKVAMASKRVTILRSVARHGFAVVEQDQGVVRGVLQADLDELTQRGTVDMPIGSAYRAEPHPTLDPTERLRRRITGVASLIHSTFGVVRNTHYGGTSTWGDSSIIEAGEEKRRTNGHHHSETPTHLDTAYVQTGIGLHTDNTYFAEAPKMQVFSCLHRCPVLSRGGENYVADGFAVAEQLRRESPELYELLTQVPVMAVYCKQGRGFSGCRPVLTVDGTSEVTQVSYNPYDRAPMVGGLLSSQTLDKFYTAYARFGTLAQENSICFQLHVGDVLFFDNYRMLHARKAYAGPRIMGGAYVGADDTASAMVDAALRGL

SEQ ID NO: 41413 - protein, 125 aa, Oryza sativa
MTKCQLGQSARSCPTLAPFLAVRVYGLEDLSEDKDFIHTKNLRMTRKALKNSLHKIGGKMVMISKRMAMRRKLMEVMKLKRMEMMKMVRKNKKGGGDMISGIVQKFVDPPHGRKGSTEHNHPVEY

SEQ ID NO: 41414 - protein, 1135 aa, Oryza sativa
MEQDNKTHKKKLSGAKAQKKEIHDKERRGLDVEPNRGKNNKAFAGQHASSHKTLGAKRSADKLAANMHMPVADKTFSGIVPDAPLLVAVAGPPGCGKTTFIKSMTKFYASRTLQQLRGPVTVAAGRSRRITFIECPNTVSAMCDVAKIADLVILMVDGAFGFEMETFEFLSIAQVHGMPRVIGVVTHLDLLKTNKQLKKTKRLLRHRFWHEVSDGSKIICMAPLINNAYRSADVLKLHRILMTVEPKIQNWRNAHGCMLIDRHEDITDQEEIAANPNCDRTIAMFGYVRGHPIKANQMLHIPGMGDFEMAHITTQDDPCPPVNHQDKAQGNKLRHLSTKHKKIYAPYSDVGGVVYDDDAVYVYQDPDKQNTSRSGEGLEMLRSLQRVSAIDDQLRRPVDFINDDMDIDVGDIASGSDESADDEDEDDDNSLNAFGDNDAVAPSHGAQGAADDAAEMRPRLPHGEDTVRVNQRTTRFNWHDPVYQQKLKSLFVTGWKGAAGAEGGEEGGEEGAEGSDEEGEDGSDYGSKGYESVDDAEGNEDDADADDGEHQQPSSAARGGLAASSALRRAGQKATREAADMHPDADRFDSAPSSGVTHRDNKVQELLDFFIAKDLRTDSAASDFMQEITASATANPKRGKRGDDSDDDEAAAGQQKGAGGAPEAPEDMDDYIKKKMAKKKAFDGEYDAEGGKNNTTQFYQHLLEEQATKKRALDDTLQLAGEDLEKKIALLGYFSGLYVRFVLKGVPVEFLRTFDPSVPMFAGALNPGEELRQVVHARIKRHRWYPKILKAQDPICISIGWRRIQTQPIYATEDPNGRHRYLKYTPKHMHSLAAFYGPAVPPNTGFIAIPIKPLRHATFRPCASGFTVGVDAGSSIVKKLKLTGVPEKVEKTTCFLKGMFNSDIEAAKFVGAKVKAVSGLRGIIKKVLKGKRGVVRCSFEDKVLMSDIIFLRAWKAVEPPRYCEDVKNLLSANWVGMRSMAELRRDLNVPLQLKPDSEYREVAKRRDIDTTGPVHVTLSRNMRLSLPFEHKEEYVPLVEEANVLARVKAVTAVVPEQHDLQKKALLASLTKKEADMDAHQKKLRHDSRKKSLKKYKEDQEIMATKIKEAKKEMSKRKEFKAQRKSRGAVGKKESA

SEQ ID NO: 41415 - protein, 138 aa, Oryza sativa
MNERARLLLNQALREVPNKSRAVVLIECARLEEYVGQIEKARLFLKRAQQEAKHEWKVFLEAILLEMRAGDMRRAIEEAETALDIRRGTGRLWAVLIQLKHIDGEEEQLKVFKEALEEVPKSGEVWCEGARIRLNPLS

SEQ ID NO: 41416 - protein, 940 aa, Oryza sativa
MAPAQRSVLALLGLTAGINALPAGLQDRQILAPPQQSVSFENSDPQPTTEPSKGVELPPVIPPKPTDQISLGTPSYWVSWETDAPAATPTPEKPTYPAPGKPTDQISLGTPSYWVSWETDAPAPPTTTDRPTQPAPGKPTDQISLGTPSYWVSWETDAPAPTPTPDEPTKPAPGKPTDQISLGTPSYWVSWETDAPAPTPTPDEPEVPVPGKPTDQISLGTPSYWVSWDGEGPKTPISSPNGFSYKSTVTASKPATTKKPGPEYPHWQPWPPKPTKKPSSIKASSIAVSTPKASPSPKPTPTPTPIEEPPQPPNQISVPVPSFIISWGDKRDVNAPPPRTSKAPPKPKPTKPTSSSKKPSSSSKKVTPTPTPKPSPKPTPTPSPPPVPMPSPISEPEYPEPTEEPTPDPEEPWEPEDPEPEPPRQSDEVGIGKPSGFLSWDKRAPAPTPPPFPWPTQPNQIGLEPVHATVIWDKRQEDVEPEEPEEPVPVPTQPNTIGLESPVATVIWDKRQEDELPEDPDFPEEPEEPAPVPTQPNTIGIEPPTATVIWGKRQEETEPIEEPEIPDDEFPEDPVPVPTQPNTIGLEPPVATVIWSKRQEETEPIEEPEIPDDEFPEEPFPEEPEELVPIPTQPNTIGLEPPVATVIWSKRQEDTEEPEVPEDPDFPDDDFPPVPIPTQPNTIGLEPPAATVIWGKRQDASLPVEEDPEPTATGPFEIPPIPIPTQPNSNEVGQPTATVIWGRRNAAPAPAPTAIAKFEDREAAAQFTCGSTTTVSSIKPCPKVRCEPGCHYTPEYFEPAGSDPINTVTDIPKCPVTKTATNVCPICACPTAPPKPTKPPVIPTPACSPTTTTLVVTVKPSPPCAAPTCPPRATPCDLNRPVPRMEKVVRSIVTLTPIVPTPPPKPTPTKCGTTTKTVSVAVGCPTYTCVPGCDAARVVR

SEQ ID NO: 41417 - protein, 373 aa, Oryza sativa
MEQSTLARRGLGLRGVDPNKVSPGYTLYAHLTSPGTVNLIDNHGTVVHQWKLPYRPGRHAQLLKNGNLAYNGVHPDAPRLFPLWQKYRGGVMMEVDPSGTVVREHRDPLAHHDQHHLDNGSLLYTTVEGLDPEQSACVLGGIPNSEAPDGKVYADCIKHVSPTGEQLWHWRAIDHLDPKIFSLQPHYPREHWPLINSVYPLADGNILASLRSVSAVIIISRETGQVLWHLDSTVVAQQHCASELHDGSILIFDNGTFRHHESATYSRVIQVSRESKEIVWEYKDAHPMTFFTPFMGGAQRLKGGNTLITEAAFGRIFEVDERGEMVWEYVVPEFADYKGLDAREIEGYFGYPANAVFRAYKYSPEEVPWLHPN

SEQ ID NO: 41418 - protein, 677 aa, Oryza sativa
MSWQQQQQPSGFNANAPSWQSGQQAQPQYGSYQPGYGYQPAANWNQPGQPQQPQQGYPTYQPGYGYQPGYGGYQQHQQYGGYQQQGGYQQYQQQNAYQQQQQQPSASPSVSVSVPAAATAPAPAPQKEPELSQADKVKLGLAKAEVVLPPKREGGRKRLTLGAEEPKKEEAKPAAPAATEEAKKEASPVSSPTTEAPAGEAPAAAAAAAVAVAADKPTEKAAAKKKSTKTYVRDPRPHYNVVFCGHVDAGKSTINGDLLIAHGAVDEREMQKLKREAEMNHREGWEKAYVFDLSEEERAKGKTHETGAGYFETANRRVTVLDAPGHKAFVPSMIGGATQADLSVMVISARRGEFEAGFENGGQTREHTTLLRTCGVKYMICIINKMDDCEWSQERYDEIVGKLSPFFKQNGFVEKKNLTFMPGAGLLGLGIAKPIPSGACPWYKGPCMLDFINQLTLPETRSDKDVLCIPVVGCVKDDGKVHACGKIESGSVAVGDEITVLPSKRTFTVDAILVENTEIEKAYVGDNVHIRVKGLDESDFHPGFVMTQPGEVGDEKMRTCEFFQAVIMILEVENIISNGIKVMLHAHAAQEEVVFDKMLAQCDPKTLKPIKKDPAFAKAGECVIARLELSQALTLAPQAEFDKMGRFMLRDKGRTIAIGRVLKLYDSTHDNIIRRDE

SEQ ID NO: 41419 - protein, 153 aa, Oryza sativa
MACINMYNPDGGAAFGGGQPPALGPRISFSSDFVVEPPPPVQNRAMNLRCQEEDINFEFSVGSHPMMAADQLFSKGRILPLKDGGFSSGRPPTTLRDELRCDDRASAKGSSRWKEMLGLRKPLCVGGVNGTAKKSTTVDTEMVTDVADSKQEQ

SEQ ID NO: 41420 - protein, 972 aa, Oryza sativa
MHGTGTTLYANGNKYVGHFVEDRREGRGKLTCTDGLAYDGEWLQNNRHGVGRLDFPSGGHYVGDWQGDKKHGRGKDTFANGNSYEGAYVNNAKHGHGVMIYSNGDAYEGSWAHDKMDGKGVYKFANGFVYNGDWKADSRHGFGEYIFPNGHVYKGNWANDRRHGAGVLTLSATQGDANAGETYEGTWADGKMQGRFRVLDSNGALIYEGEWHDGAPRGAGTYIRPCESIPGAFLTLDGTWESQAGQKRGMGTIDAIPQPLVLLAEQATAARARAAGELNLPRSGAYNAASVKIPVPPVPDVPLLQLRLNRTAAALATERPEFAEAISFMHDQATVACQRATDDLRTECDTLRAKLKDRDALVKKHGADYAAALRVAVDRAADAAAQMDLTLHAAIAEADAAAKSRAEADAELSKLVAELEEVKKRHAAAKARASAVEASRKEASAALAKMQQLQSKVDDAEREALALESELSGFTEMTIKPAERHVTELEQQNAELRSKIAAAEAATVALQSDLKNISAQHKAHLKATALQRADMVANIDDVNKATAKALKDVQDAQADLEALTKKQREAASARHAALDAMRHRIEELHAEAETIRTDTLDVDSERATIQTEVSRKEMAIDASKKAIDKLTLQLSLFAEEQARLEAAQEDAERRIAHAGERAAAQAAEAAARDKWSRLRAELDRELLTAETALRDAEASLEAERQRTTQLEQAMAQADQAAAAAAAAAAASAANSAKSSHVGAAGRLRKLKSATEADFQEARSAAEPTASSSAAAEIAALQEEVANLQRKEAKKQEKIAKMHAEAREAAASWMPLELGREDTSVLAAASKEAVLHQVIKLRSQYEKSVKARDEARAELERLRGNADSDENGGSFDDSEDVIETMYIRDIISSIKAEEKDWRLNYLVEQLESRKAQIAELSKQAQYAKQLEAQVASVNSAISGMKQQQQHQPRSAGMKPPSSTELAKVRPQYL

SEQ ID NO: 41421 - protein, 620 aa, Oryza sativa
MASAKRIASAVLFGLALASGTSGVMAFPKCLICTLLTGIIEQVALDTQQPVGTAIDNLCTDVTKDLPFLDGVCEIAGGIAFASTVQQCVNDGTSPDDCCKKLAWCGATSTCVLFKQWPPKVPMVQRHLGPQLLELAKGADFNALPKQQSLELVRAFSGVASYLGLSQDKLMRSNANANNHLSGAHGKHQPVTPARGVQHQHTGKRGVEDVKDTPIPVADHLPLFDDDKDRFSPYGALRGYHWRGMDCNDKDATIYPGRQLTSHPASVDHNCNGIYGSNAQGEAWEDVLCKDTGQRGIISLGDSVTAHFRIPDYMLRPAYINASTYDNLIPLVEDEADWPMCSWGTGFANASSCPWSKLGVDSLALRLRANNLCNHRDFQNAGVNGARTGSMAPPGGIVTTIHNRTGTDQPAVVIYALVGNDVCNGHPDFSRMTTPADFEANVVAALEYLDAALAPDSYVIFVGLADGRILFDTLQNETHPIGVPYPDFYDYLNCYETSPCWGWMNTNTTVRDLTWTDHANLLNNVYPKIISERSYNNFEMFYVPPDFQRIIDAWLAMGGHARDLIEPVDGFHPSQTGNVLLAQQVWADLKANFSQAIGPENPNNAQIEALFGDQGGYGPV

SEQ ID NO: 41422 - protein, 673 aa, Oryza sativa
MAAARAAVDEPSLRWTSPTGNRYDLNGLADPALSPAVSTWTQPTRWPNLDGLMNVVAYDVGRGAMRFRLGPLGLAGAGDDARCDAMLCVYPRTNPKLRALPLSANATTAYVEDPAVVALPAGGARPWSMAPRPLVLWNASTPPAFTESDDPELRSVTLSFARNASAAAGTCWTDEWADTGGAHALDLLVVCADDAFAYAYTREMPPPFPTPDDLWWQWYVDGRREWRKRCDAFNATGELYGADVSFGLMKSSGEADCTTSLLAVVVSPLGCPNRTVASVAAAHTARTGQPVAPPAVDGCARYHACGHGSTCRVDTTAPRHSGAYNCTCSPLLPFGGRNCTTLWHCARDFAGVATQRCSASGACDAVTGECRCAPGRTRFDCSVTAAALTDAQVEVTHHTSLSPTRLQLQLCEWMGVARDACSSDVLRVAVRPGPRYTTVSVWGLTAAAIAACPFALLTLETLAATADAEHMTAAGVAAIRLGVAQPWIWVDLTVQSQCSASSGAPGGAECAQTDWFQSRGTANANTNDIPADLAVMWALLVAAVLLTTGFVVLRWRWAMSGALLERWRQSRTFSAANAEAHARHHAQLQQPQQQPQAAIAIVQASGPEQPVPPAAPAPAPVLVSVPPPAVVPCEPPPMWAFTRFVPPAAAAYLQSAPRAVVVVNEDERGEWYE

SEQ ID NO: 41423 - protein, 764 aa, Oryza sativa
MSMALHQTLLLLLFVSIAIHRAVAQTTTSTAVRGDGNRFVTYSFPSFANALLHLQANLTVLNNASISQGALQITPDSSNSADGYLVNQTGRVFFSTPFTLWSPAAGGGGNGNGNGTYVASFNMVFRVNIFRTNTSDPGEGVAFVVASGLDPPPPGSYSGFLGLTNASTDGDDANRFVALELDTVKQGYDPDDNHVGLDVNGVRSVKAVPLAPFGIKLGAANASNFFVWVDYDGTSRHVWMYMARSDDGVPSPKPPSPVLDAPLDLSAFVAEKAYFGFSASTGTRFQLNCLHMWNMTVELLDDGSRSSGGGQTRRKLGLGVGVPCGVAALATGAVVAFLYIKKRRRRVGDDPESLSSTAAFKFNKSSINLRSLAGTPKEFEYTELRKGTEDFAAKNKLGQGGYGVVYKAVVAGDSDGESVEVAVKQFSAANTKGQGDFLAELSIINRLRHRNLVRLRGWCHQNGVLLLVYDYMPNGSLDKHLFGGAAVAPVLSWEQRYNIVAGVAAALNYLHHEYDQRVIHRDIKPSNIMLDSAFGARLGDFGLARALDSDKTSYTEMVGVPGTMGYIAPECFHTGRATRESDVFGLGAVLLEVACGRRVSFGAGGDGGAIGGCSQLLEWVWRLHGAGRILDAVDPKLAGGAFDADDADRLLLLGLACSHPDPGARPTAKAVVQVLARAVPAPAVPPSKPAFMWPALSGADCDDSDGGGAGEMSSRHSARTTSTEQTSSTYYASSSSYSSHGCTRTQVTSSGDAIADETRYMSIG

SEQ ID NO: 41424 - protein, 881 aa, Oryza sativa
MLTNSATAAPHARPHPTVRTSISVSRTGDATGPGAVSVAISSPSNEAGAARASFTRTQSESQQPLSPAPEDAVSPTHAAALEAAAKAAEANGHSGGAANGNGHAAAVSALGGVDRRVSTGSGDAVETRAAGDPELKDFHVVTRKEKSAAQAAIEADQKAQKQAEDDDENSQNAAADAVDADANAKGTNAKPPRSRGPPFIGRKEEPSEPLSCGGQCVAVLTSACKWLALAIAVPIGAAVLLVMLGLRNMHVLSALELVLSVAFFLRTEYGFSDPALFRTQQQGLAFDTTLVDLLLIAGLRLCVTWSAHLLLTADYPSRARRIAAAAVAVAITVLLHFKANVFWPADGVALSPDYTWKDYSGTGPRAMFALALAFSWIHCAAEWWVPTSFKALAESEFALLASVMKSEHNAQSKKAAADGAAAAANGNGNGYAATNGHGSAHAQVAANYGSAGASPRPPVGSHAANPRKGAYRCVSRIVAGTSFLEVTASASGTFEVVGLHGHTATSHPVGGTKPKPKAAAAGAAAAGDVKDEFSAVVTNSAAGVGAGAGAADAEHSKPAMVLLHGFFGGKSMYAQSFPALSQYFRLYCLDLYGIGMSRRSKFSAKSTAEAERYFTDALEQWRVAMGPALAQPFIIAGHSFGGYMAAAYALAHPRHVSRVVLISPVGLPVPPPRDQILQRSIRRVGPIAPIIGRLWETGLAPQCILRLFGPFAHLLVRRIVDWRFGTMEGWGDVMDLANYCFHLNAAPDAGNNAFAWILMPGVFARAPMEPRLTALTCPAVLLYGFHDWMDAKSGRRVTDALRAKGQVAIHCTVAEAGHQIFLENNDGFVAALIGGCQLLPFRQPNGEDGLLHAHGLPPGSHLDAVANAAATGAANCRDKSA

SEQ ID NO: 41425 - protein, 764 aa, Oryza sativa
MTYPNGATYSGEWLRNQRHGQGTYRYPNGDLYCGKWDHDVKSGPGTYLVAANKTQITGDWVSGKCLNGTWEFYDGKPFFGVFTGNKVQSYAVLKEEVERFHAAHSKELVQSRANVLQRVFDAMDDNHNGWLSVGELHAFCKLVDPTVHVDRLFGLIDTNNDRRIDRREFLAFGVKFANATAGAAMGGNTDQFALAMRLALAGKAWLKKSAAKQELKWAQQQQRLNAGPAKPVAAAAAEDKTAGGAPAVPQISYCANSALAADSDPKTIARVDAICRAVASEASDFQTFDKTAVKAFLMAMNDDIKDIDAFADASMKKWGGTPFGFAETLLQSQLDQKEETAAGKPSLVDTAELAISRVHAANGVLTAQVQSRIDSAVRFVSFESNPNAFELQRVRAWVNEIEDDIAGDADVAQLITKIFGADPAAFKATLTAEVLKQKSLSHLEQVESIIAQLRKKLSLPGVSGTLIDQSVLQRIDNIVGLVAADPPQPSVSLAVLLAPAPAAAASSAASAGAGAGAGAGAGKDVKDVKDDGKAQKSDDELPPPMERRAFNPTAATAWICEFDEDIGAAPDTAFAEFQSAWGKDPKEFGANLLRRLETSRSLEALEAAERAAAVVRGRLKIPTEEEKARAREKQRLLEREETDDDDSTFPDMIGAEWADSFTLWVAARVGSIAGLARLLAAAGANAGLVVNAKDSNGLTPLYYALLCGHIRASKLLLEKGALWDYKCYLAAQKLSLKNLLKTQYTRQRVIEGSKAKPKNQDEDE

SEQ ID NO: 41426 - protein, 620 aa, Oryza sativa
MKRHNTAEVPVPVSYGGKVEKTMGGAKQGRGGGGGCCSRLWFMVVLSATVTLLVRHCYDSGVIGHGAVAGGVVRIEPVHRGLYHTRKASPVDRGGGGGGTSFSGHSPSPPDAGGSAKPESPHDSGVKAPSELTTVEHTKQPSEPASTGTESDDGGKPSSASSSSLPAAAHPFARALAAAGDKGDRCGGRYVYVQELPPRFNTDMVKNCATLFPWTDMCAFTANGGFGPQMSGGDGGVFQETGWYNSDQYTVDIIFHDRIRRYECLTDDPSLAAAVYVPFFAGLEVARHLWGFNVTTRDAMALEVVDIITSRSEWRAMGGRDHFFTAGRTTWDFRRLNDGDAGWGSKLFSLPAIKNMTALVVEASPWHLNDAAIPFPTAFHPASDEAVFVWQDKVRRLERPWLFSFAGAARPGSAKSIRSELIAQCRASSVCSLMECADGPSNKCGSPASYMRLFQSSTFCLQPQGDSYTRKSAFDAMLAGCIPVFFHPGTAYVQYTWHLPRNHADYSVYISEDDVRRNASIEERLRRIAPAAVERMRETVISLIPTVVYAQPSSRLDTMKDAFDVAVDAIVDKVTRLRRDIVDGRGEEEKLEMYSWKYPLLREGQKVEDPHEWDPLFAFG

SEQ ID NO: 41427 - protein, 784 aa, Oryza sativa
MPATSPRPPSRSVRSARSAIGDGHESGVEAEHTGSDRETTRLRPARARRGQPKRTDKRPLAWIEEAQGLSLIMAFHLNNEKVQKIVTSKPKKKALPTIEQERQERRRERDRERRERNRRAAQAARESPDVPHYPAIHLQYPTPFAGFMDKETDESKSKPYGGVLSEADADTSKTYPTQADRKRFDDARIKAEEEWKAKQAALYPPEPVRSHKQAATASKIKCINFGGWEIDTWHAAPYPEEYSKNRVLYICEFCLKYMNSDYVAWRHKLKRPAKHPPGDEIYRDGKYSFFEVDGRKNPVYCQNLCLLAKLFLGSKTLYYDVEPFLFYVMTENDQFGCHFVGYFSKEKRPSSLNNVSCILVLPIHMRKGYGQYLMEFSYLLTRVERKTGSPEKPLSDMGLVSYRKYWRLVLCEELLNQKSPISISAISDRTGMTADDIISTLEGLRALVRDPVTKKYALRLDLEYFKSYIDKCNAAGNPKIKPECLVWTPYVMGRLGQYEDGPALQTVQQRDEADEKPAPEEGVQVETAKANGKSEESEPFPPAPAHALATEDSINGGSPAPGTPLANGSTIALAGSHMEEPAIPPTRYEIFPPIPGQPTHKRRPGRPFGSRRRTSTPNRVRNTTNMTIHTAPVSKIQLSPSRGAKAQMSPSANGSGALTPGTISLRRTRSRLGESVTNGDDVEHDSPAAGGAVRSLVTNGRRSTRSSASSSRASLDLKGKGRAVPIHEEEEEEEEEEEEHEHEHEHEQEEEEEEDVDGEYDEDDGLMDVDAEGEDDDDVIMGGA

SEQ ID NO: 41428 - protein, 819 aa, Oryza sativa
MQVDFGDGHAHYEFRQPIDPSLEQTSAAPRHGHMSASNHHHHQQQQHLLQPDNASLAGFYSDMARSSHTPPPTSSPRFSAISPTSQPKQLAASYGPDDRTPPPCDVSDATIDDAYASFILYCNPNFATSTDTTELVKLFRTPPKSDGNAFSSWALFELIRKFDAKEIKTWTQLALDLGVAPPDTDKGQSTQKVQQYSVRLKRRMRAMHIDAFFEYLLGKQHPYYLQIPPPHDPFPPEGRDGVPLEEDLAIRALDPKFKPKRGRRKADEGDDDMDMDDSTPARKRPQLDTSIPFGNALQPQSAYPTSAHPDHMGGFLTPQDPWTAASTITPSSAMTAASAPSRLGQKNLTPYSASPMSGQQLRWRLNTQDNPQTPHPMSAVTPQSAHPFFDEPQSAVTPSSAKPRSRRRHGPAVSSAWSSNNSSSSGKPRGRPPSNRSTRDGPFVTFPANPSKRESSTMDMSRNSGNLTPIVERAHSDPPAIEHTFRFPPTPASAISPSTLEGSLHGVPQKQRLSLQVPQIVGNPVRLVTPTVLVNGEEDQISSTAYAPPTQIAQVHESQADTFDHRPAPTHHTYHGALTPSETPAQQRPLPPARSQTQPTQSTSSLPTVPLESLNRALAAELIRAPLTGRRKRLRGTEAKHLASSILQPLYAKPTVGSAAPAKLMSDEVLGIAVSSCLGLTGTVGIGAGGPTGGVRRVECIRFRVGGDGYESPIDEDDEDADNMHEGGTIKETFDVSFAVSFGGLTGEWMAKGLAATADDAEDDENAVSGRSASEMDAHDGIQTTPAAWKTKFLEAQRKLWESQEEVKSLKDKILEAVL

SEQ ID NO: 41429 - protein, 674 aa, Oryza sativa
MAAPAASAAPAATPALDRQGSAKKGGTGFPVATPESIAAAIKLAEEWAADDEKNTQMFTLKPNAAKKVIVVTTADDSVFSISLDPPHPITAESAVLETLEDSTSTFCYGDGKKFTAESKQKNPPTVADVLSHAAKFLTSSGGWDDDGDAGDGGDAGGDVDDWDDAPSSSAKLTRQKSAGPAAAAASAAGARSTSDVKGLTPAKAADKKDAGKGGAKDAKAGGDDKKKDAGAATGPDGQIVITRSRSYKILPKHELMPVQREMIEGVASKLSVTISAAGQLLRAHKWDDEALLKAWSADHAAVAKKANVTAILRQVMSAPADPEKLCSCGVCFDDVKEGLTFAMKCGHRFCIPCWKDYLKSSVDSGASAGGNCLSSTCPGFKCKELLGEQIYEMLCDEASFKKYRDVQLLSFVDDNESITWCPGKGCGNVIAFSKRKKTVYCTCGQRFCFKCKAEAHAPTTCKEAADWLARDKGSQNLDSKFLLEETKPCPHCGVRVKKDGGCMYMSCTQCKKAWCWQCGKSDHHVWECNRPPYEVGKPGDKDDVNRYLFYFERYFNHGQSLKIADKQRQATMDKMKSLVKEGLHFQRVEFLLRATELVLECRRVLKWTYVKAYNFKSKADRTLFEYRQSELEKYTEKLNQLTEGSLEELLKNRLGVLDWTRALQKYLDTMEFEG

SEQ ID NO: 41430 - protein, 489 aa, Oryza sativa
MDDDDDCRRRDVTLGDEFMVLQPENGGARSLADLLLSCKVGENKAVRCGRPGAEVAPPWHRWIIAVSLLAQMLLRLSKGVMAKVGRAVEYWMNLVSENDNVLGLIRNALHGKVKTPDRNSPNYRSFIGLLDTRIDLDEKIKPGDSNYHAALCIMAAKLAYENELVIKDAVEKNWKMTFLEFFNCWNDFQNDYTTQAFMFADKPEDAELVVVAFRGTQPFDMEQWSTDVDISWYEIPGVGKVHGGFMKALGLQNNAAAGKKPSWPAEIAPPSAAKNSEKTKSFAYYAIRARLRAFLAANPRARLVVTGHSLGGALAALFPVVLALHGGEADAAALGRLDGVYTYGQPRVGDAALGEWVAAASSLEGKHLRFVYCNDVVPRVPYDDAAFLFRHFGRCVYFDAAYRARAMAEEPNKNYFSPAFALAKHANAAWELARGLAIGRVAGGEYAEGWAMRAARVVGLVFPGLPPHAPQDYVNATRLAGASLRKLLD

SEQ ID NO: 41431 - protein, 580 aa, Oryza sativa
MSKQNQQPPQVAGAAPAAAAKPAATGSPQQKPASADAKSKPMTVDEKGDRLSLAGNSSVQKMLAKLGNNKPSPEVVSFSDFVIKINKREKEQTRVMLITDKAIYNLMPNNYGKCKRRIGIEALVAITASQISDEFVIHIPDEYDYRFKSSKKDKICETLGILFKNFQTAKQKKPTKLPVTYIQQSDLKDLAVTKAMARMQTREDVLKRKQALAAVAHESDKEETQAQKDEKADKVTQLMENTEKVRLDDFELLKVLGRGSFGKVMQVKKKTTGKIFAMKILKKRAIIARNQVEHTKAERKILQALQHPFLMTLRYAFQSKEKLYFVLDYYQGGELFFHLKNKRRFGEDVARIYVGEIAAALGHLHSLGVIYRDLKPENILLDDNGHVCLTDFGLSKDVDPSDKAHTFCGTPEYLAPEIVTGAGHDKAVDWWSLGILLYELTVGIPPFYSQNVNEMYNKIQHGVLRFPPFLSEGCKSLIVALLNRDPAKRLGSGKDLDDVKSHAFFKDLNWDKMMRKEIEVPYKPKVKSGDDTQNFDETFTKEPVVDSHVPTSKLTETVTNEPDAFKDFTFQQNESKLLQG

SEQ ID NO: 41432 - protein, 638 aa, Oryza sativa
MATTTTVKPLLPVKQPVPSDIEIAQSIKPRHISQIAELGLGLLPEEYELYGPTKAKVKLSVRDRLKDAPNGKYVVVGGISPTPLGEGKSTTTVGLCQALGAYLKKKVLTNIRQPSQGTTFGIKGGAAGGGYSQVIPMEELNLHLTGDIHAISASNNLLAVAIDARMFHEAAQKDEALFRRLCPTDKQGKRHFAPVMLGRLQRLGIDKTNPDDPTPEEVSRFVRLDIDPEQVMWRRVVDINDRFLRGITVGQGPEERGQERKTGFDISVASEIMAVLALATDLADMRSRLGRMVVAQARQGQPVTADDLGVGGALTVMLKDAIEPTIMQTLEATPVLVHAGPFANIAHGNSSVIADQIGLKLVGPDGYVITEAGFGADIGLEKFMNIKCRASGLAPDAAVIVATVRALKMHGGGPPVVAGTPLAHAYLAPDVDLVKAGCSNLVRHIQNTRKYGVPVVVAINAFASDSQEELEAVRAAALDAGAFDAVVTTHHALGGAGAVELAQAVIKACSQPAEFQFLYDVDLPIKGKIEAIACGTYGAASVSYSPEAEAAIEKFTAMGFDKLPICMAKTQYSFSHDATLKGAPSGFTLPIRDVRASAGAGFLYPLVGNMMTMPGLPTRPCFYDIDIDLATGRIVGLS

SEQ ID NO: 41433 - protein, 1159 aa, Oryza sativa
MSKQQPATQAQAVPVTENRSEEYAEVACTAALKLSSLWKKKQNVQLLAQPVPSAICAGKHAEIMTQSINLARAMDEALGVIIKQPATADAVLMAVLQRFRPAVVLATLMLWVSNSSTDAAGLASQLSFLSEDVCHFSEELPDMIALDTTTLPALLFLGCSSTLQMLLITASDIYQVNPQHLRVLLDQLNGLGSMPGNGKGFASRLVDITRQIVQPAEASGRLHPFPLLSLLRLQSRLHSLHVMHTAPANRAPDASRAAIPLLQLVQRCLAVPPAPDSGAGSSSGAGSSSGAGSSSTAVADATADSGSSSSFLRNRTMCEVLVDLQTHLVVVVSTVPALMPNTTASQYAAHVAAYTGKEVAEVRLQQLAAFCCLQHQHHAAALAPAGASAVTAAQQQWQRQQQRAVQLRGQPLRIDRLALCPAAAVKLLPAWGEQYVRTVAAIEMLEPLQVVYGTECQVIAMDTTCLRVETLVSGLSQAASAGILAACGTAAVSAGAVQLSIELLLLLAAELQRWKDQQDSRQQAQPQQQQQQQQRRARSIPHMASGSAEVAERLACILCKIRDCFHTQMARVSLLPDSQWHSLSGQLLQESGLQLLQGLIYLVQLPAAEYMQQQAEHQPAKPVAVAMCLCRLLLAGACKETQMISENIIASPLTSGSIMGVNMMVSPCPLLTQLAAQHPVAYFGLVDSSVRCGLDPADILLAAALMRYGCCQPVFRARQLLEQPAAVAALSSALAGLIKLAAQYTKAADAMPAVATTSGSSAATAPAAVAPERFAAVVPNIIKGVLTPCCGLLLAVVPVGFQPGVLRTHISSHSSNNSSSSSSSKSSSRGVGAQAAASGLVLTVLIARSLLVLAEAVDAAAAAAGLSQERYLARAVTGKPVFTNPGPGGIATKLDIAYRPAGDKVADYWSNFQYELCCIVQFVACLLAHYQLATPIAAANAAGQKTASAAAGAALPAKAGQNTGSLGRQHSEQHQHGELHECKAELVGPADVTWGKMLELCLSRKLRTAAAAFMRKWPFTLQQAALEANRKGRESCQAPAAAEPAAAATAAAETTSAVAAPEETAATARSGAASPPLSLDELYRDSLQLCRVLFSAAPLPLLCNSPACSNLSGLCEAAVAGKVCGACGSRWCSEECFRAAWRQHKKACRRMAELGLAVK

SEQ ID NO: 41434 - protein, 712 aa, Oryza sativa
MNATMQKQARVQGCPARTAKLAALRPQPVRAPRRAVAPQAAAVEAPAKVSQETIDKCVNAIRFLAIDAVNKAKSGHPGLPMGAAPMSYVLFNETMKFNPKNPAWANRDRFVLSAGHGSMLQYALMHLVGYESVQLDDIKQFRQWDSKTPGHPENFLTTGVEVTTGPLGQGICNAVGLAVAEAHLAARFNKPDAKVIDHYTYCIMGDGCMMEGISNEACSLAGHWGLGKLIALYDDNNISIDGHTEISFTEDVAARFEALGWHVQHVKDGNTDFDALRKAIANAKAVTDKPSLLKVSTLIGYGSPNKADTHDVHGAPLGPEETAATRDNLKWPYAEFEVPQEVYDVMRGAVSRGAAAEEEWNAAMAAYKSKYPKEAEELEGLLSGKLPAGWEKALPSYTPEDKGLATRQYSQIMLNALAPVLPGLIGGSADLAPSNLTLMKMFGDFQKDSNAERNLRFGVREHGMGAICNGIGLHNSGLIPYCATFYIFTDYMRAAMRMSALSEMGVIYVMTHDSIGLGEDGPTHQPIEHLASFRAMPNMLMIRPCGGNETAGAYKVAVSNRKRPSTIALSRQGMANLPGCSVEGVEKGAYVIHGGDAKPDVIFIGTGSELPLAVEAAKKLEAEGKKVRVVSMPCWELFAEQSAEYKESVLPKDVTARVAVEAGSSFGWERYTTSNGKFVGIDDFGASAPAGILYEKFGITLDNVVAAAKSLL

SEQ ID NO: 41435 - protein, 436 aa, Oryza sativa
MDSESEPHPQARVARQTRDPLLESITILEMPPEHWQQGVKHLVLFHIEEIHDYTAVAVDLRNPKSCRPVTRTLPSWHLGVLDGERPPPRLFEYFPHHLPPPLTYTFRHGRAEGVEDNDAALQQEARDQGSRTVRDAIDRDGERLHGEEHRDRRHDSRDNRGGQDRRRGRNRRYNNDHPDDDLHHGGQRDNDYDDDRDNRGRDVTCGRGGIRGLDVNFRCERTRSPRARDRGDTRRRDGRRHQAGCGDKEDRDNDCGNGDSPQAALAPTVAASSSARNAHLTSPPFDKGPLLPPRRPHDGAGYEARSAASIPAARVFARINEAVAAASAEGALRQMLVTAGVAVALDKLAAPVALDKPAANAAVPSPMVTAMASLATISSTTRKLLPIASTEKTLLSLNAECAAAPTLQDALATNGSSPAKDTETAPAPDIAEFDSI

SEQ ID NO: 41436 - protein, 359 aa, Oryza sativa
MALAPLAINLVKNKLMKKRDDFDEEADFINLKKVWGVAKNIGKSYLSSKYGINLDEEEEADSEFLSKLKNWWNTKGKDLAIKGLQIYSAVKNGGAQQGDEEEEEESEFIKINWKKIGEVAKNVGKSYLSSKYGINLDDEEESVEEESDAEFLNKLKDWWKSKGESLFQKGLQIYSAIKASKKAPAPTPAPEVAPEAPVVEAPAEETAEVESDSESAQSINSAGLNLIKQAEGWRACVYKDAVGLPTIGYGHLIKAGEKFNCISQSEGENLLRRDVASFESCVARNVKVPINSNQFSALVSFSFNLGCGNLQSSTLLKKVNARASADEVCTEFKKWTKAGGKVLPGLVTRRDNECRLFRS

SEQ ID NO: 41437 - protein, 1002 aa, Oryza sativa
MKAAVKVLLLLCVVLASCGVSVWADASATEVAAATEQAAEVQTADASDAAAEADAEMEIDAEADAAMEADADAESELNAAAEAESAIESRADLDAAHENAVVTLESYAEKAHALRDEIIESEHSLMEQMASIDSCPPSELSGLMARAKKQITHLFQIKALYLAIKTQEKQLRALVDAGTGKRVPNIAPKTPAPAKLAKPAAAKPVASGAVNVNGLATLNAEMVDALKRLETVTARLAVVERRQKKSHKATLLIAGQMEKDEKRLNKHSRVLRRVRSGVKKIKRSLKALAASCKRGRIAEKRIARRSRSRASRRGRGRKAGRKAGRKTGRKGRGFDVNACYAKCARRSVKRQSKCVRVCARKAATIAKRAVAKAKGKKVARRSRGRKGGKRARRASRSPALRRCLNRCRAANRNPKLPAAKRCAIKCIRRHMHRGKRARKGRKGGRRVRRARKAKKFSLKKCLVKCQGAKSKRSSRRRGVKCSTRCYAKARAVRARNGRRRRTNRALKKCFKTCRKGKKWNKKCVRACRAKHGKRARKGKGKGKGKRAAQLKSCFKTCRGKKRVVLRRLKNGKTKRVVVAGKWNMPCVRSCRKRFGRKVKRARKPKNLALQKCYNTCKKPAKASKRGGKRAAKRGGKKARRVQWGMKCVKRCRKRFGKKKRAPVTAAYKACLARCRPGKGFAKCKKACAKHNRLQKLPKIKSPSSKAVAAAIKGVKKPKAVRKQRPETWEDVVRQSRRLLKKTVKLRNLVHKQVAKHFDTEDVEGRKYNGWWSFHDVLKSIKPGKHFTGRAKEIDADVRQILAPALARAEDGPYGDVVAALKGADAANPSKYTRELGSPALDLSVDPKFSGYVEKPLPGARIRHVPYNPVKPYDPAQHTWHKTPPLSRLPELVDEDYNDNLSPIYARQFKVTPRKTPEPKQPFELKTKSYDYPQIPYSYPVTMVSHDPRYKNPHVRAATPGFHPDWPEFRFQQTATSADAAADAAPAPAAEAAQEQPMTEGTA

SEQ ID NO: 41438 - protein, 1091 aa, Oryza sativa
MMDDFAAPELPAKRNRPEVPKTGNDDFQEPFAPTPTQRKRWDSGPAGATPKQLDGMTPTPQRVRSRWDAGATPTPVASRWGDNPTPSMGASDRWSDRTPNAVTPGSMGTPVNQEWNTETPMASDGATPGYDKKWSQGPTFFPTQNAATGETLSRSEIMMQRRNQYLTDEELDAMLPPGYEIVPVPAQFEREYQLKKTTAEAKAAWEKQQQQHAKRVDAPENVGENLPSLRPEDAAIFAPLLQYRHIANDADLPADVAKTIMVLRCLLRVKNGDAKQRKVGNRIISEKAKYFGAELLFQHIFALWMSETLDEAEKHAIVKVIDRALFKLGDLVSAHVPKILTLIQPLLTDPDPFTREEAREVMANLARAAGLKQIVLALKKDLDDSSDDIRQLTARTMAVVAEALGIEPLLPFLNVVCGSQRSSTARLTGLKIVTEIATTMGNGVRKDLRGLVDAVARCLGDSQVRVKIQAATAIAALAEASYPHGIEEFNPALIKAILTECRSNRGKVLGSFLKAMGCLIGLMPPDHAYEHARGLSDVLVRGFSAVDEELRRVIIRVVQQIVVCDGVTVEFINESISGQFFEAFWSVRMAIDRRTARQLVEATVSIAKRVGTAAVVFYLAERLKERDAEQFQKVTLEAVQRVLERVGSSDLRGDLVNALVERVLECLHSDDSGQGFSALHAMVAVVKSLGVRMGPYAAQLVGLVTARLTSPVNLVRKQAAELIAKTAPTVAACNQQHQLPAVSELISERLGSEIDADVLAASLKALKCIFESLPDPSQFRPAPATLLQQLVPIVKNPNDDVQENTIELIGSMAKAINQFPHLSDANLRLRFYNLAMDGLFYLLKAKRKRTRVVTAETFGEIATAITPIPIVRQLLNNLKKDDRTERICTEVALAVIAKRCHPFVVVPFLINEFRLSQGTELAEKTQHAVLKTLRFLFEYLGSDAVPYMASIVPLLDWSLTDKSLQYRRMACEVVRHMALASVGKGQQDILLHLLNSIHPNLIDTTIGSEQERLTTATVEALEACCLAVGPSYIIRMIEQGLCHPSRKVRDAFWRAYNAVYLTAGEALVPAYAPIPNLGGATYARTYLEVIV

SEQ ID NO: 41439 - protein, 584 aa, Oryza sativa
MRGLVLQGRQQSLQGRLRSSSKFCVSRPVAPRPCKACRRAARSGSSSCSRAVAVQVVASLDYIATASDEGVLKLPARTELDPEEIKSVFGYPRNLLDSYYLGRVIGAGSFGVVREGIEVSTGRRFAVKTVSKVPKRGSPTPRYLLKLRAEVEVMQQLGVSLNAVHLHDVFEDDVNVHMVMELCEGGALLERVESGVYSELYISKLVRSILRFIAQCHAKGIIYRDVNPDNFLFLTAEEDSPLKATDFGLSIRHYSHEPKLTSRSGTPAYMAPELVMQCYDEKADLWSVGMLAYQLLTGRFPFWEDVRNETLSDVWKAILSSEIDWNAPELQPLSSAARDLLERLLQRNPVMRPSAAEALEHPWLAQEGAANDMPLKGSVVQRLQRFATYTHLKQVVLRMITEDMRQRGKAPSFNSALQELFAAYDKDKSGTISFEELAEGLRGQGYVVNESEVRQLMEKMDMDHDGNVGGDEFLATLIDWGQVMQEQEWQSYVDQAFNRMDLDGDGFIDLDELLSELPAAYFHEPSSEDERISEAKRMLREADENGDGRISKQEFYNLLRDNVAPDSLSMYDDRLSHNVAAMSV

SEQ ID NO: 41440 - protein, 669 aa, Oryza sativa
MTAVAKEAGERLAIVIGVVVKNYISFTISDGLKPKIDSVLNKLIEDSKEAAAPADEKDKKDEKEVIDSFVFTSPGVEEPAQFKVVIDDYPHKWPSYQNAYVAYDTHCIRIDKVKSGLLTLAKNYVIRFRQWDNLIDKLKAANKDYKLPQLPEEHLLGTYCCCLNRSWNPNHRNEMDAWLKGVQKEVGSGSKALANHFFMGDEWRNQQVTKAIFDKAYAASARELGVNAWGDLPPFDEGEAVTMLCQNVLVKEFLPKALQAVPANAPCRWRLEWTAAGTLYALTGAAMNSAWVPAQAGIDEVKKGIMKIIDDGGQDLVDKLSPLLTKIFEIVQSKMPKGDDDKAEEEKDAQGKVGSVVKDWQFQKTEIGGKFHAELADKDAGRQAVTNLKNGWEKALTDALGAQMDAAVQGSCSPKFARSGIVQLIVKEFAKYITGTFKEFTTVTPLINASRNLDQKRWDLEDELVKNKDDKAAFEKTINEASAAMWTQLPDAGLSLFKDLLDIKRKLFSYYNALPHDAQLALAEVSTHMFQIQMRALNHLRADFTNKLKAKFADPANAASEDAVRAAVRGLWRDIIFDLISVIVTEGWTKTAEGLIDVAVANTLAYFFEKAWPIVVEPLKALAGLMPGPLQKLDVVALAETVVEKIITKGVLYAFTKIFFKLESAIFKQ

SEQ ID NO: 41441 - protein, 107 aa, Oryza sativa
MRAARIQIATTIPGDLLTRRRRTLRVSILTLTHSRAAMLHPRLKRSQLKMMLGVSVALGPRSRRRRRTPCSMILFRTSLRPPRRRKTLPGTLPSAMQRTRRRKRKAH

SEQ ID NO: 41442 - protein, 649 aa, Oryza sativa
MQLLQQRSQAARGHLQVCNVAVPSRPPAFKAPKRSKVEIIKEKSDYLRHPLMEELVNDKSFITEDAVQLMKFHGSYMQDHREKRSFGEGKFYQFMMRTRQPSGLVTNQLYLVMDELADKYGNGTLRLTTRQAYQLHGVLKHDLKTVFSTVIKNMGSTLAACGDGNRNVMGPAAPYKNKPEYMLAQQYANDIADLLAPQSGAYYDVWLDGEKFVSVYKENPKVTADRAFNGFGTNFNNSPEAIYGAQFLPRKFKVAVTVPGDNSVDILTNDIGMVVMCDANGELQGFNLLVGGGIGRTHRNEDTFPRLADALGYVDKDDIFHAIKAIVATQRDYGRRDDRKQARMKYLVDEWGIDKFRSVVEQYLGKKFEAFRPLPAWKFEDYLGWHEQGDGKLFYGVYVQNGRLKGDAKKALRNVIERYELPVTLSANQNIILRDVEPAWKDDIQATLEAAGLVDAVDLTGIERLSMACPALPLCGLAITEAERGLPDVNKRVLSLLKRVGLGDEAITMRMTGCPNGCARPYMAEIGFVGDGPNSYQLWLGGSPNQTRLAKVYQERVKLRDLEAVLEPLLVAFRARRSPGGAFGDFVARVGFVSLRGYADGYVPADKLDKLPTVSIDEDTFKALEAVAAAEGKSIAHVASEKLQKLGGH

SEQ ID NO: 41443 - protein, 280 aa, Oryza sativa
MWQMNLGEAMEAGPYPERIGEPDCSYYMRTGLCRFGMTCKFNHPADRKMAVAAARMKGEYPQRIGQPECQYYLKTGTCKFGATCKFHHPREKAAIATRVQLNALGYPLRPNEKECAYYLRTGQCKFGSTCKFHHPQPSNTMVAVRGSVYSPGQSVTSPSQHTYPGAVTNWPLSRSASFIASPRWPGHSSYAQVIVPPGLVQVPGWNPYAAQIGSSSSDDQQRTAGGAQYYTGSRHSETPNMGGQGMFSSYQAGSVPLGLYTVQRGAYFQSDLTNQNASSI

SEQ ID NO: 41444 - protein, 128 aa, Oryza sativa
MSFTQFAGFELNQEKAVDGEVEEIEFCIFQPEEGSVTTSMPPMAQSASRSYVSTTASQSNSTSYVAQHNAGGRRLPPKANAPPRMPPPPAIRGAPMPDFVTPELLRDLSRMTLPVSLKRKTIAVVASS

SEQ ID NO: 41445 - protein, 751 aa, Oryza sativa
MTHAAHALCNRYAAILSSAAGDGGRTGVRVAGAVHCLILKTFLQAPPTFLLNHLLTAYAKSGRLARARRVFDEMPDPNLFTRNALLSALAHSRLVPDMERLFASMPERDAVSYNALITGFSSTGSPARSVQLYRALLREESVRPTRITLSAMIMVASALSDRALGHSVHCQVLRLGFGAYAFVGSPLVDMYAKMGLIRDARRVFQEMEAKTVVMYNTLITGLLRCKMIEDAKGLFQLMVDRDSITWTTMVTGLTQNGLQLEALDVFRRMRAEGVGIDQYTFGSILTACGALAALEEGKQIHAYITRTWYEDNVFVGSALVDMYSKCRSIRLAEAVFRRMTCRNIISWTAMIVGYGQNACSEEAVRAFSEMQMDGIKPDDFTLGSVISSCANLASLEEGAQFHCLALVSGLMRYITVSNALVTLYGKCGSIEDAHRLFDEMSFHDQVSWTALVTGYAQFGKAKETIDLFEKMLANGLKPDGVTFIGVLSACSRAGLVEKGCDYFDSMQKDHGIVPIDDHYTCMIDLYSRSGRFKEAEEFIKQMPHSPDAFGWATLLSSCRLRGNMEIGKWAAENLLETDPQNPASYVLLCSMHAAKGQWTEVAHLRRGMRDRQVKKEPGCSWIKYKNKVHIFSADDQSHPFSSRIYEKLEWLNSKMAEEGYKPDVSSVLHDVADADKVHMISHHSEKLAIAFGLIFVPQEMPIRIVKNLRVCVDCHNATKFISKITGRDILVRDAVRFHKFSDGTCSCGDFW

SEQ ID NO: 41446 - protein, 90 aa, Oryza sativa
MEGVAAAVGRRAGLVAGVGRDAVPVARRVVRRAHGRRRGGHRHVGRPAGPAPGGEPAAAGEIAEDAGALGHQPHRRDPTGARRIRRARHA

SEQ ID NO: 41447 - protein, 639 aa, Oryza sativa
MKVVPRGPAPPLNATSKDSLTRKVNDHQTHFTQFYISLVEGDSTGRRAISSRAIKAGAEVLKERPFPWIVHLSHDKVVCHHCAVFLDSSSNAPRTCDRCKRAHYCSAACQGAAAKVHGVECAALTQLERISDAAMVNVDLVRVALRILVTRKHPPPIVQMTKPKPNAADAKAADGTAADVKTAPAAAPAAAPTAAAAAKGANDSKDSKDSKNSADAKATAAAAAVGTDAETGIFQSTWEDVEAMVSHADALNASEVANTTKAAHAIIGLLPPEYAMPAAELVACMGRVNSNCHSLNLAEDPNIQFGLGLFPLCALFNHSCFPNVLYTNEGNNLVFRAIRDIVPGEELLVNYVGLYQSRWSRREELLISKRFICQCNRCMLQPHTDEELKAFKADQYVGAIWCKNRKPTKPGAKPCDGHYREYVVADPPGLATLQSGADGKVTLPVPLRSCSACGHKADPKYCDDIEQRARKALAEAEGVYQTRDARAVQSRSKLEGVIAEFKDVLHPSHELFFNISLPLINCCGHLRDYRTKLMYCKLVVDNAEACWPAMFSPKVNYLQGLADTYFQLIESRPTGIAPGAKGAGGGGAAIPKKKLLEYRALRIEALEKCVAIYTTCFGPNHRLTHLAQQQLARGKAHRI

SEQ ID NO: 41448 - protein, 540 aa, Oryza sativa
MANYTGPSALSDQLHALPHLAWDMRHVVVAPQPIADSPTRYIESLTVAAALPTIFTLIYVLFDLTWLCCRACRCMRCCRRKYNMAESRFRCLLIAGVVFAVAAGLTVVMAFSYAHQFQTKLTAVINSLEDADAYRGDLSAAAHGALDDVTFESAALTAVVANISSSGAVVPPNLMVELQQATGAVSAAEGTIASVVQRVDTHFTLSTVTNKLYNYNDLQLNVSSLVFSLLIFTMSMLVLMLLLSDSPNWLRNTLEGLTLLSFFVSTTSGWLHLGVAIGVADVCQQPYDYTMAFSAKGFSADDLSVVGYYLYCSPGSVNPLIGNVETGYVQLNATTQPLADLISYLNSTQQPAATALLPAAQALQQNVSATLEMINATSSVLDCSRLHGDVVDALTTLCDPALTTFHSIMLVQLISAFFLLFARCTLPTRQTDVSKTTQMMYEEFAEPQDVIVTSSDGTSPNSSRFARYASSANHSVRTQQPNDRYALAPSHDSPPTLLARANARAAAQGAVSTPQPVAAEPPLLQPIGSAEGMNDSLLGR

SEQ ID NO: 41449 - protein, 701 aa, Oryza sativa
MSGPETNQNLPLAVREGFGKTAPKVAAHLGAIAKATGVNDWKLECDYEAVFKVLDAVKKADQFAHLTCASYLQTLEQTLTKWLADAFNKETFVRAVTAKAILLEVVAAHVPSSSRLTFLRLGAGGRLIVQTEAKSWGVNVGNDIGFQALDTLFDTFVDGDPLPAPDAKAAPAATDDKAATVDPISNKAIMLTVRRQFRDNEKKKDTALEAIGKAMGLGPNTDAKASAGAGAAAAAAAAGKFGLDVDYYGAYRHLAANNRHLKFGYELWGCYLPETAKALEAFFKDPYCLADFKKYCSANAMVWRLRLPEGPAKEHRFSFESGKFVIETDVKCWQKNTSDINSGNIEDAINVMCDREPKVVSDPNDSKTWVDPKTCPYFALTTRRNFRDAEKKRDEFLSGASKALGYDEKAAGGGLVPQCNYAAAYDQMRAANKHRTFGHELWYGYCSSFKINMTDFWGKDEFNRNDFRKYVSTKTILFRMQELPPEYWKRADAKCNRLSVESGKLVIETDVKSFASNVSKDVGAGGVEDAINALASSIEEKALNPKDPIDPITCPALPLTARKFWRDNAKALGDNTAACKASTGIDWKFDIPVWRAYKLVDYERSYNKLGYNLGKLYTGYVVTMFADFIKTDAAKRKEALKAKIGANGVITFDISEDQALYAAQTTHTVHVEPGKLTIRFHFKNFAQNTSTISAQALVKCL

SEQ ID NO: 41450 - protein, 1021 aa, Oryza sativa
MLLSKQAGLRACKHNTTIVASRCHVTPIHAALQRPMHTSCLASGRPSVVAGQRLAGSKLLRPGTHSRRSAVQSRAFFDKIFKQDPSDKTRKQYQDRVDAINALERQMQNLSDDRLRAKTAEFKKRVQRGESLESLLPEAFAVVREASRRVLGLRPFDVQLIGGMILHEGQIAEMRTGEGKTLVAVLPSYLNALTGKGVHVVTVNDYLARRDSEWVGQVPRFLGMQVGLVQADMTPETRRAAYTSDITYVTNSELGFDYLRDNLAGAPAELVLRTNYPFNYCVIDEVDSILIDEARTPLIISGTSDKPSDKYYKAAKIADALTKDLHYTVDEKQRNVLLTEDGYEAVEDVLQVPDLYDPRTQWASYIINAIKAKELFIKDVNYIVKKDEVIIVDEFTGRTMPGRRWSDGLHQAVEAKEGLDINAESVTLASVSYQAFFRNFPKLAGMTGTAATEVSEFDGIYKLPVAVVPTNRPISRADNPDVVFRLEQYKWRAAVTEIKRIHKEGRPVLVGTTSVEKSELLSEMLAQEGIKHQVLNAKPENVERESEIVAQSGRRSAVTISTNMAGRGTDILLGGNPDYMARLKLRELLMPEVVSQADAADAYAKTRTGRANVASFAADPAIFPCQLSPETLAAGKAAAKAAAAMWGERSLALLDAEDRLSVACEKGATDDEVLLRLRAVYQAMLSEYKAVTDREKADVVALGGLHVVGTERHESRRIDNQLRGRSGRQGDPGSTRFFLSLEDSLFRVFGGDRIKNLMVAFRVEDLPMESQMLTDALDTAQKRVEPYFYDIRKNLFDYDQVVNTQRDRVYAERRRALLSDNLTPLMIEYAEKTCDDILEANVDRNADPSEWRLDALAARIAQYCPLLQGLTGQELSQQSGGNFEGLRAYLRQLAVAAYQQKAAAVDDIEPGLMQEAQKFFVLTQTDNLWKEHLQAIKFLQQAVGLRGYASKDPLTEFKLKGYNLFLETMAQIRRDVIYNVYVFQPQRIRPDAAQQQQEQQQQAAAGTGSKQSRRKAKASAT

SEQ ID NO: 41451 - protein, 300 aa, Oryza sativa
MVTELIKGEPGSASQIISKHGMGATVTVQCPKPIVGRIIGKGGETIKGLQRKYHVSIQIDQGGDPMSVTITGQKQAAEACKAEVQALISDTSGPGGPPFGPRPGYGPRPGYGPPFGAPAPYQVPPPAFGGYGAPYGTPYGAPPPYAAPGGYGGYPPAGGYGGYAAPAAAGGYGGGGYSAGGYGAPAAAGGYGQQQAGYGASGSAGGYGAATSPGAGASSYAQQQPSYGGAAAGGYGGAADSSAAGGYGAAAGASSATGGAAAGGAAAGSVWQAMQDDQGRTYYYNTQTGVSQWEKPAEMP

SEQ ID NO: 41452 - protein, 442 aa, Oryza sativa
MSLDSSAKLRAIDDFSPDGADEMSLAFIKSQYSYLDFFLFDKTNAPGEQIYTRELNPIDFQQFVSSTEIYKTPVSFLAEVFRFYRGGLDFMFKAAKTGFHRGQIAISFVPGPAASTVTLTETSFAYCEIYDLATGNVIKVQTPYMVPLEYLRAGTSMGRMYVHVVTPLQAPETVGAQVYFSVYVRGSPDLEFAGPIEPRYIPCFTQGPDGPSVDRTQSEAIDAPVGSAPTQAFGLTASQNAMSEIVLSLSSLLKRHVHFGAPVNEASAMSSFYPWVLDAEYTVPSTQLFRTKYQSYLLSPFAFFRGSVRFSTKVDNLTPTEPTVAESTRDMVAYTSYGVGTTVWTAVPVQPAPTSGSRGYLAYTHNSRENGVLSVQVPYQNVTRVAPIRYCKDPTEILEYDAPLPRLTISNPTGTGGFTRAYGDDFQAMFFVGIPRLAERSD

SEQ ID NO: 41453 - protein, 1060 aa, Oryza sativa
MSAAATGTGTGAGTGDDAAARAEKQRQLLALAKAQVARYIEQLTKGCGRTGVCVNRECATGASKALNPADATKRALELLRLKPDEQKALLCPPRPQPNFSPATPATPAPTAADTKSHPPALSLSGTSTPPRAATPPAGAAAPASANSAVKPVPVAAAPAATAAPATPAPAAVTAAGAGTKTPAPATPATPAAPATPATPGTAGGAGGGAVVTASGHVTSTTPGIQYPELMALMDLGAATGDWKMVVRTVDSTFGDAAVLTHSFLLVDGKRSAVPEPEPTLTAAQIAAASKAAAAAATNKLSAVSAASAASAAAAAAPAAAGSGAGSASAAVGAAAAAAAAGAGAGAAAPAKHGPAPVSATAVAAAVVAPAPSPAPAPSPALGTSGAEAKDVKSNGGSGAGAAAAAGTGAGAGTGTGTAPSASASASSGSGSGSGSGAAASVPTPSFAAYYNANTPLTGDELYPLDWRALDAVLARLLSVDATRQALASGVARLCSTLDRSTSALKPLLPLDLRKFAVLLEVPLWNDAEYHDTLAVLCRAFTKLHGNTRKVFVKWLTAYHDTARLERHVRDLQQFLTVRWMTAPGGRVVATEVMGAVSVMELLYAANEAHARLWAGQPDKALVPDTDFYNEMVNADLNPREDYRRWRQRAPFSFCAHPFVLEPVNKARILTLDAASQQNASFRDAMMQNLMERLHNPPQRGAGAADDRGPNPYLVLRVRRDMLVHDTLGQLQGKSSGDLKKPLKIQFIGEHGVDEGGVQKEWFQLIVAAIFDAKFGMFSYKQKSRYFWFRSASTEISEFELIGNLLGLAIYNSVILDVRFPLVVYKKLLGIQPTLEDLCAIRPALGRGLKQLLTFDGDVESVYCRSFAVTVTDKLLGTARNVELKANGAYIAVTNGNRKEFVDLYVDFLLTKSIAKQWRAFDEGFKTVAGGDTLKLFRPEELELLIAGESKLDFAALQEAAVYEDGYNKNSRVIRDLWSVVHELSEDDKKRFLFFCTGSDRVPIKGLGNLEFVVSRSADSDRLPSAHTCFNHLLLPDYSSREKLKKYLLMALANNKGFGLM

SEQ ID NO: 41454 - protein, 633 aa, Oryza sativa
MSAPAGGEDGGDKPLSKNAQKAAAKMAKKKAEQEERAKARAATAAAAPAKPAKAAAAATTAAAKEEDPEDDNKYMEARVRAIADLQAKGVNPYPHKFHADMSLPHFAKTFSNCKDGERFEDKVVRVAGRIDSQRIQGQNLVFYDLVSQDQKIQVMADRKMAKDDFTIHDTLRRGDIIGVVGIPGKSKRGELTIFPSEVKLLSPCLRLLPPKASGLKDPEIRYRQRYLDMIMNPNVKQIFHIRSRIVNYIRRFLDERGFLEVETPMMNIIPGGAIAKPFETFHNDLKLPMFMRIAPELYLKQLVIGGFDRVYEIGRQFRNEGIDLTHNPEFTTCEFYWAYQDYKDLMNITEEMVSGMIKSITGPYKIKYHPNGLDQPEVEVDFTPPFKRISMVAGVEAGIRAKHNDPTFKIPALSDPKTQAFLDSVCTRLGVECPAPRTTARLLDKLVGAYIEDDIVHLTFITDHPQLMSPLAKYHRDLPDMTERFELFVLGKEMCNAYTELNNPKVQRDLFADQAKSRDAGDDEAPKVDEGFCVALEYGLPPTAGWGMGIDRMTMLLSGALNIKEVLLFPAMKPRDDNAHLKEQKDGGEPAAAAAGAGAGATAAAAAAKAPAAATEKPAAGAAPAGKPKKGGK

SEQ ID NO: 41455 - protein, 625 aa, Oryza sativa
MTTALNMDLERTPQLRLGAAIGFGGKVTSGLHIHPDGKHIVYALGSCIVIREIGNPRATQFLMGHNDKVSCIAVSRSGKYVASGQITHMGFQADICVFEFDTQKLVHRMILHKVKVQALAFSADEQFLASVGGQDDNTLVVWDLASGRPLCGGPASNELSTCISFFNNSSDKLVTGGHGVLRVWDVDFQNRKINPTDVNVGQTRREFQNIVIEALDRYAYVGTSSGDVVCIQLQGPKNLKMTGPQKKFPGGILCSNLDENGDVLVGTGGGEVVLLSKIDLAVLKSVAVQGAVTSISTMGEHFFIGTAKSNVYYLNAHTFKEELRQTCHYDSINDVVFPYNYSEVFATCSANDIRVWNSSTSAELLRIQVGTLECNCLSFAKDGKSILSGWSDGKVRAFGPQTGKLIYVIHDAHKIGGMKRVSGAHTGVTSLCVDNSNQRIVTGGADGEVRVWKVSAFAQKMEAAMKEHKATINAVAILSDDSEVISAPDDGSCILWDLQRFVRRNIMYSQTYFKAACYFTDESQLLTTGSDKKITYWDAIDCSAIRELEGSKSGEINSVDISNDGELFATGGGDKLVKVWNYDQGSVVAVGVGHSSTISKVKFSPDGKRIVSVGEEGAVMLWSFE

SEQ ID NO: 41456 - protein, 163 aa, Oryza sativa
MFLSSQRCSRVLLLRCFRACSAVPEGSSYASLGPAAAAVQLDQWGIQQQQGRCYSGSFWDVPHPAPRHELFSELHTVKGMLSNRGEFTPLFNAHGVHLVPHQLAQNSAQQQQAAPAGGAVTPAFEEGHVEVPVLADSVKRKRRMKIKKHKFKKRMKKMRHQMK

SEQ ID NO: 41457 - protein, 968 aa, Oryza sativa
MGRGGRGGHKKRLMRKDYQGDGKRDNAWNEKKTHRADQFLESGDMHNEAFEEYYKMQDIVPEGEWEAFLEILKKPLPITFRINGSGRFANQLREKLESDFFSHFSQGPVMLDGEQVDPPRPLPWYPNKLGWHMNFSRNQLRKLSWLADIHEFMKVANEAGSITRQEAVSMVPPLFMDVKPHHRVLDMCAAPGSKTFQLLEMLHNMEGASAADGSSSSSGTTPTGFVVANDADAQRCNLLTHQTKRMCSPCLMVTNHNGQEFPRITGLSAAPGSAAAAAAAAEAAVNGSGGVSGASQAGEVLLFDRVLCDVPCSGDGTMRKAPDIWRRWSVNNGNGLHNMQLRIALQAVRLLKVGGRLVYSTCTPNPIEDEAVVAELLLRCKGALELLDVSDQLPELKRCPGRRSWMVRGKHQWYKTWEEAEKVGFKLDPTMFCSPEKEQLPLQRCMRILPHHQDTGGFFVAVLQKVAETPDLPDPSVAHRFTRIISSGRDGRLIKIEGADPHQGAEDAAAYALEAAERAVAALEAGDAAAAAAANAAAAATARGGLAMDAASEVYKNKRKYDSQEARKQQQLERQQQRQQQQQQQQQEVAAEDTAADVAAEETEAAVVDEDAAAAAAAAEDDMDGVEAAGDDAAVEAMDADATEAAAAAESAAEHEADGEAAATAGDAAAGAGAGDEKAAGWKPSWVRGGGGRGRSGAIGRFRGIDPIIPVEDPNTIKMLVDFYGVEPSFPLATHLITRSLEAAFPKRLYYVSDALLSVLLADVKESLKITATGLKIFERHELRGKEIGKCQYRIAQEGLPFLLPHLTKQVLRLPVNDFVRLLTERNLPLLIPEEANGRTEQDAAAAAAAAKTPSNQVPLSTPAVLKQLEHMESGGAVALLEEAAAQELGLATDEASSGALTVNAPLAISVWRTRVSLSVLVAKNECEQLVEKVKGAQQRQAKQKQQQGATANAAGAVAEKQPEPAAV

SEQ ID NO: 41458 - protein, 1055 aa, Oryza sativa
MLRLVLKHASAQVVRNKARSTLLLRSVTSTAKKDTSHPMEESYSPGRVEKGWYDWWQSKEYFRPKSDKTGTPSDKYFSMVVPPPNVTGSLHIGHALTVSMEDALVRWQKMRHVMQDVTWIPGLDHAGIATQVVVEKQLKKSQNVSRHDLGRERFIEEVWRWKEQYGGRIVEQLKRTGAALDWSREVFTLSPELSRAVTEAFVRMHDEGLIYRDTMLVNWCCALQTVISDIEVDYEDLPGRTMIEIPGRQKKVEFGVLYKMRYPIRRRDDPSTVQHLEVCTTRPETILGDTALAIHPDDARYSAFHQGWEAVNPLTGATMAIVCDSAVDREFGTGVVKVTPAHDHVDYQMSQRHNLRVISVLNTTGHVIGTNTPYDGLDRYEARARIVKELQSRDLLISTSSHAMRLARCSRSRDVLEPLLQPQWYVRTAPLARIATHLSRTNQLRFVPEEFADDWHRWLDNIRDWCISRQLWWGHRVPAWQIIDGTYQGPARWVVARDMDEARDRAVKQYGVSRDCVLEQDPDVLDTWFSSGLYPLSVNGWPNKETLPFYPLRVMETGHDILFFWVARMVMLCAYLGPKKRNAAVNVSLDDLDAYQSPFDTVWLHAVVRDAQGRKMSKSLGNVIDPLHVIEGRALDLVLADLNQGNLDPREVKRATELFKKDFPQGIPECGTDALRFGLAAYSKQTRNINMDINRLVAYRHFCNKIWNATRYIMTHVNQGVEAVDAHQLVTLARSDLDQLFLEAPTQFPIHNGNLSLSLIDLWVLSKLGAMVREVNQGFEALDLSRVTAAIHGFFMYDLCDVYLEFSKLVLNTHAGEGATDLSSDMSKRGARHVLVTCLNVVLRVMHPLMPFITEELWQRLTNDTDSIVTRVYPRVEDPVIAGWTRMPKIELAVSHLVEIVSAARSLRKSYSLKSDQLTRLIVRTDDAALVSVVQQYSHALQKFCKLSHVIIEEPTATRDEPEASSTRLISERCHVIMPADEGLVDLAQEIAKLDKTHRQLVQRRESLERQMTDVNYAVKVSAEVRAKNSNKLATLHADIAHVELSLRQLKSKLK

SEQ ID NO: 41459 - protein, 665 aa, Oryza sativa
MSARRIGVALTGCALLLTLAAVVTASTTAPAAAAVAEVPVGLIESQALVHAAPKRTARAAVRPAKRTAKRVGKQHAARVAARKTAAKAPAKSKPAKAVKRNAKQPHSKRTGRGGAKGPHPKRSAAAKPNAKRSAKANTKGRGKGRAKGRGKSNAKANAKGNAKSGAKAHAKARGGGKRNAKARGKSRGKGKGKGKGRAKANAKANPRATAGAALKSANPNASAAKPQNTAARGLDLTGDQGTVPMPPRTGAGAAAGQQCCEPGSAGAHRFRQLRRMGVTEAAANAHLLRRSAVYNCVHCGSKKHESDAHPQWDDAHGFPDVGRDQRKFSPEQRQAVEEWARDNNRKPNVDNRNPIVFGQHPHSDLNPTPGPDAGDKGVAFAGARTIEGANPAHWRQDKFGNVMRWNKKDGSPQPKIGDKSTDFNLEHQKEYSSYAKDAHAANKAEKTARDAAYHTAKAAYDDPKNKALRYGHPNKAPHPSQTALPPVHPAEQHYANTAKQMQSIGGPHSANPEGNIVAMNKDQNTFRNDWKKQPHNKLLAEKDQYPHDLPSDDVSYVQPQGVAVKGAGVRAGPNAQPDKHYLNPATGTLSKSIQRKDAGDARLQYLKPGMAAGSHLHPDGSGRGIVDQNSPGVINGHYTLDAETTAANQRYIDANKSRWGAGPPK

SEQ ID NO: 41460 - protein, 904 aa, Oryza sativa
MSAQDLRYDGQTVVVTGAGGGLGREYAVFFGSRGANVVVNGLGGSFKGEGKGSSAADKVVEEIRSAGGKAVANYDSVENGENIIETAIDAFGRIDILINNAGILRDVSFKNMKQADWDLIYRVHVYGAYKCARAAWPYFRKQKYGRLISTASAAGLFGSFGQTNYSAAKLALVGFTETLAKEGYKYNILCNVIAPIAASRMTETVMPPDVLDKLKPEWIVPLVAVLTHKSNTETGAIFEAGGGHIAKLRWQRAKGCLLKTDETFTPGAVAAKWKDVINYSEAEYPTGPVNALELLEASNQLPPNPKAKEPDFKGKVALVTGGGAGLGRIYCLELAKRGAKVVVNDLVNPDTVVQEIQKLGGEAAGNKADVQDGEAVIKTAIEKFGRIDILINNAGILRDKAFTNMTDEQWDIIHKVHLHGTYACTKAAWPFTLKQRYGRIINTTSTSGIYGNFGQANYASAKTAILGFSKSLALEGKKNNIFVNTVAPNAGTQLTRTIMPEEIVQALKPDFNAPLVLLLVSDMAPEPTGGLYEMGSGWYAQTRWQRTGGHGFPVDVKLTPEAVLAQWKNITNFDDGRADYPFDNASGLQKIMANMENTSKKSKRPKKDAKSNEEVLKAQKEALAAKSEGTPFEYTERDVILYNLGIGAKRTDLPFVYEGHENFQVIPTFGVIPPFNADPPFSFSDIVPNFDPRMLLHGEQYLEIRKFPIPTEAKLIAVPKLVEVVDKGAAGLVVYGSVTKDAKSGEEIFYNESTVFIRGSGNFGGPSKGTDRGAATKAHKPPQRAPDAVVEERTTEEQAALYRLSGDLNPLHIDPAFSKVGGFPTPILHGLCSFGISGKHVLQTYGPFKNIKVRFAGVVLPGQTLVTEMWKTGNTVAFQTKVKETGKLAISGAGAELLGGGSKL

SEQ ID NO: 41461 - protein, 819 aa, Oryza sativa
MAVDDACHWRTVRSAGTTAGAHVSVWRSVWSAWAATEQRRTLPAALERLGAAVDAAVGHLRVWCGEPSADAVAKGSARRAAMRQRLTPDVCEAVDALCALAAQRWAVPSAASAGTGPHRQSAAVRRLVAAHAQARAHAVRCLASAVAAAGHSAPVRAVVAAAAAAAGPAACALSAVAAAAAPATDAVIAATSPASPPLRPQRVMSAAAPPARRQPQHSDSGGNEGVGHFKATRRLNASARVFVPRTAVTLGAATASPPPLLPAGAVAAAGAVAAAAVGPPPSAVALPAREQRQQPQHQHPQYRGDTDADAEETKETAARAQWRRHVSALIGKLTAETCERLALRFVADSPGSFGADVPERVQRVRMADAVALIVYYAQSEYMYTPMYAAFMAHVRDAFAQADVALAAADSAAATAVPTAPPGGAAPDGNRHHKPARLPAVLPWDRARAWFATVSECVTGEVNDFFGADAFLCTPTLADLQPHTTNSSSSSSSSSNNNNNNNNNNNNNNNNNNNNNNNNNNSRSAYGIPLDSDHAAAAVVADAAGASAGDGIGLPIACGHYVIPLGGWCAAANTAAREHASGDACGAWELVPEMEAVKVLEDLLSSDGEHPAPLHAASMVAAERERRQQLMTRVRRRIHGCVALVCELHARHMARRRVLLTVLWGLRGVALGTGTGVAAPPFWYGHAPVLPPTWALEMLCRALSGRLGAALMPPSQPPPQSPPASPASAAPSPALAPAVSRAGERALALALSELHALSVRKDLLPSARARFLVLDTLDDAAHHWEPNWRARERRTRYQQQPQQHPQQQASGVGAAAPLTS

SEQ ID NO: 41462 - protein, 1006 aa, Oryza sativa
MTTKYGTDAAETIIGSNESDFLIGMGGADKLVGLFGSDTMSGGDDKDQLDGGFQSDTLLGDEGDDRLNGGSGDDTFLGGAGADTMQGGLGDDAFTDNMIGDYTGDVIDGGLGNDTVRFFLSERATGVAFTAADPTETVTLFGAKLHNIEQYYIDGSNTGADNMTGGRWNDFFQGNGGADRLDGQGGADYLSGGAGADVLIGGQGGDYINGGDDKDRLFGGYGDDNLSGGNGDDTIEGANGRDALYGEDGNDKLVAGAGNDYLSGGAGSDTLDGGAGDDYIITGDGNDKVLAGSGNDQILATVNSGKKSIDGGSGVDRLELRYVNGAFTAKAENLVNTLSDGTTIQHVEAYDVHGSNASNQFTTLGGDDNLYGYGGDDTLRAGAGNDSIFAGDGRDKLYGEAGNDIMFAQGEKDVLDGGTGIDTAYLYVDNYSQSMSFSVSKGKGVLSNGTTAANTEVFNVFTGSGSDTLKAGDALQVWFKSGAGNDKLYGGKGGDLLDAGIGRDYVNGGAGDDRIMDMGGDNTLIGGDGNDEVDITVMEKSSDGLSKVSLGAGNDSVEFNAGLGDIYGSLEADGGSGVDYAEVDRSETTKNLSFVLSANAHLVNGGAVLKNFEQVHISGGSGADDFTGGKLGDTFEGNGGADKLNGLGGNDWLYGGAGRDNPKGGDGDDHLYAGNNYMETDRDTLDAGAGNDDVYINSGDQAAGGSGTDRLHLDVSALNVGVSFTLTSGTVKINAATTVSGMEALDFTGTSAGDAVTAASGSDTLRGYAGNDMLKGMDGADFLYDGAGNDKLYGGDGNDQLTRDEFTGKDLFDGGAGVDTLTFNFYGDSSVKLDLADNSVNDGLAEGLTALNFERVMGTDKDDDIRGAGASEYLNGGNGDDVLFGRAGNDTLVGGLDGDLLGGGSGKDVFVFASTMDGGDEITDFTRGQDRLSIDAIHFDLTGKKSVNIVVSNDVEFSTTAPTFLFESDAHRLWFDADGKAGDQEAVLLATIDNVKSLSQSDFMLV

SEQ ID NO: 41463 - protein, 571 aa, Oryza sativa
MLLLSKMASFKTSDEMRRQKELEEARKAGLAPAELDEEGKEINPHIPQYMSTAPWYLNSDKPTLKHQRNWKQQLEDSGQWYDRGAKVFQVTKYRKGACENCGSMSHKVADCLERPRAKGARWTNKHIAADDKVQQIHLTSYDSKRDRYNGYSTDEYAAVVEKYEQVEALWQELKAKEQVEELYKQGKAAEAAAAAAAAAAAGDGADAAGAADDAKIADDEDAAFGEVKKRVRTTAGGSTGSVRNLRIREDTAKYLLNLDTNSSHYDPKSRSMREDPNPNRPANEKTFFGDNFVRTSGEYQTWQALNLHSMQAFDKGTEVHVQALPSLAEVMYQQFKSKKEKLQTKSKEEVLAKYGNTAEKPPDEALLLGQTEAYVEYDRTGRVIKGQEVKKRSRYEEDVLINNHTAVWGSWWGDGAWGYACCKSTAKNSYCTGKAGERAAAESAAQMVKNLEAKAARAAEEAEARAKSTLSNKHLEKGQAHWGDDAPAGDEELDPDKVKAALQKLEKAEREAEQAGQDERKRKFNSLADGGGDEAMTAEEMEAYRLKKQRMEDPAAAFRDGGSGTDGYSLL

SEQ ID NO: 41464 - protein, 740 aa, Oryza sativa
MVMASPAAKEDDEDDAEPTPARHSESIAADLPTQSVAAAEPTIPVQPPSHDANASPNGTTSSRAPSPLSPARNRRVSFAGQPDGAAMPTLRRAVLAAPHASMLSSLESLTRQVHLDAVEEQERVALLAAAQSDRERITAALRPPSPPPQIYNGSVPYREDLCRRVPSEGSSSADDGWSEGVGGAETVRVPEPDDSLTGDVAASTSASPGGSFHQARPHGAPTGKHHHHAATVGRSSAARDRALKQQARSRMERRVIEVDEGSERAALEHRYLTQSLPAAHQHTMLHSIEPFHRQLHVNACRDHVADAAIQLEAATRVQFLRDEFLAPHGLDRPFGTDFDAALRVVWQRVFVGKIYGAEITARERFLRLAIEATEHEAAVLLRDRRLELERLALDDTLRRADELCDAVTEAPLPTLKTMLPPPSSTPQSDGDIGVDYDEDDAASALHFKDDLTPRAPPRRTTQSAAKRDAIAVTAKLREIRGAYRASPNTPSSRASSASRSRPLTARRSSDTATVTALRDLLAKTATLPRPNTVGFDTPASTVGSRVVLTYERPPLVPAPPQTHDEHGRSLALQRSRELNDAAAKEQKGRAYAEVASLTGKPSVKPAPPPPRDAVRSYARVLQRQEIQGTATAQGSVAAAVDEVLQWMRPIASSTLGLPTNVAPAPAPRARRKAKKVKRRKDAHATVNVEEAEGELFLGSDDDGDDANNNQGSDASPPSRDRDDASTTSPIGVAELASTNA

SEQ ID NO: 41465 - protein, 676 aa, Oryza sativa
MSDDKKKQKRKMAKAIAEKDKGNAAFAKGEYLQAVQAFSEAIKIDPENHVYYSNRAAAYAKLEKYDESEADARRCIALKPDFVKGYARYGAALFAKGDAKSAIEAYSNGLKHDKDDKLCKEGLFQCQTHMESIDKQKAEEAKWAVEAERQKKVIADREMAAFQAQKAAAAAAAADGKTAAAPAGSAAPAGATAGAAGAAATEGDDAKHAAQLTGQGYGQSALRSDAEYKEFLKWKQSKEYAKYAADATGAGAGADAKDAKAGDGKAGDAKAGDAKAAAATEYVIGIDLGTTYSCVGVWKDDKVEIIADAHGSRTTPSYIGLLPNGERIIGEPAKSRQAAFPKNVLYDIKRMIGQRFTDAGVTKDVRHFPFRVVEGPDSKPQVEVEFENKTTKRFDPEALSAMVLSEMKSIAETYLGTSVRKAVITVPAYFSDAQRNATKAAGAIAGLEVLRIINEPTAAALSYGLDLHSLGKKKRVNTLIFDLGGGTFDVSLITIEGGIFEVKAIGGDTHLGGEDFDQNVVQHLIAEVKTAGCTKDVTADLKAMKRLRAASEKAKRELSNSQTADIKIENLVQDFDFTYRLTRQKFNELNNNLFLRCIDTVKHVMKDARMKVEDIHEVVLVGGSTRIPKCRSCFRSTSTAKSCVRASTRTRPWRTAPPFRPPFCPVCVRRRRRTCF

SEQ ID NO: 41466 - protein, 739 aa, Oryza sativa
MANHPYRPGGLEFRSQSFDPPRSNNNSSMNNDVSNMASASMSSLSLADLPSPRAGEVPPALSPLDALALQGRLLAKRFEQADKAGRRLSRLAPLTIQNEFGNRPGYFSNLSSGVNSPEEGGHIAPQQPEPSPRQQVPDKHKSFYPQFGGDDPYHGQNLLARSPMGTIEESSPLSGPNPPQGYFDIPRAQSPDSVEPRIGGLREATPITPSAPAPSSQLFLSPQRQMSTDSQPRSQPRSNLLPPRSSSSLHGQRSPRMSPSIRSVPGDGGSDVEDMSLSGSYDSLQQNRNLSPSSSLSRTHSPFTPITGSTIPRSPSVSSDMSASGPLPRPSYNFSRPISRQSTRPSIDTRPSMDVPSRQMSDDSAYMRPSFDSQPIRQDSTDMPTTSYANETVHTPVSMASEDFRRSGDFSTNPAPTYTYTKFNLPRGRPVDRRSIGIEDFFKSQITWDQPTNQDRPPSPISPPRSFDSSRNQQGTTSARDASFDRGAPSLTSSNSTIRGRRGGSFDVTAQEHCDIGLDLHEAGELLKSTYHLRLAARSGLPEAMFWYGLACRHGWGMRENKAEALQWLRRAVDSGQLEVAEDEDPSKQGQPADQFKKKQRRAQYAVAIYELGKCYMNGWGASQDKPLALRCYEIAGNWGDADALVEAGYCYAEAVGCKKDMKKAARFYRAAEAKGVSMVGNSWIYKDKYMEDGATAPDSRSVRSGRSAKKDFSEKKARDKSRTRTIFGRKKSNTASST

SEQ ID NO: 41467 - protein, 835 aa, Oryza sativa
MSGEKVPLPVPEKDKPETDAEREARLAKERATGKDELRDLQQKVEKAPTETTSADVQHDDLSEDDLKLKENLAMLVTRITEPNNPPELRKSAIDALSTEIRSSTSSMTAIPKPLKFLRIHYDTLKKFFETPDAKPVQPYLADVLSVLSMVHQQESARDSLKYRFLGSQGDIGFWGHEYVRHLAAEIAVELEEREKAKQDTAEIFKLVGEITPFFMKHNAETDACDLLLEVDRVPDLTKFVTEDNHARVCAYLVACSEYTSDAEDKLKLLTTAFESLLQVKLYPDALRIAFKLSDPELVSKVFNECEDELVKKQLAFIAASHRYSVSALSDQSQDIQDIVGNVHLVKHFKVLAQDLDVQEAKTPEDIYKSHLAEGGGPMRRMRQNQPQKVDSAKQNLASSFVNAFVNVGFGNDALLLTKDSEWLYKNKEHGQLSAAASLGLLMLWDQENGVNAIDKYSHSSQVHIKAGALLAQGIISNGVTSEMDASLALLSDHLNSDQHLMRVSAVFGLGLAYTGTCREDVLEQLVPIVVDPNQPFEVVAFAAVSLGLVFAGSANEAISSTLVETFMERSDTDLRDSLARLMAIGLGLLFLGKTDQTEAVLVAISAIEHPIKDFLALTVETCSHFGSGDVLEVQKLLSIAGEHIEEPEKEEKKEEAKDGAAAAANPAANPLLASLGLGGAAAGAAAGAAKDKDKEEKDENVNFAQLHQAVAVLGIAMVTTSEELGAQMALRSLDHVLQYGDVNVRRAIPLALALLSISNPRLSVVDTLSKLSHDVDQEISQNAVLCLGLVGAGTNNSRIASLLRQLATYYSKSPTISSWSVSPKVCCIWARVSSR

SEQ ID NO: 41468 - protein, 403 aa, Oryza sativa
MAATMMKANQQLARASVQGRAARVSSRRVVQVRAAAAASEDLGFKTMRSGVKEAAAESLLTPRFYTTDFDEMEQLFSQQVNPSLDMEELEAMCTEFKNDYNQRHFVRNDTFKKAAEGITGETRKIFIEFLERSCTAEFSGFLLYKELGRRLKSCNPVVAEIFTLMSRDEARHAGFLNKAMSDFNLALDLGFLTKNRKYTFFKPKFIIYATYLSEKIGYWRYISIYRHLQRNPDNQLYPLFEYFENWCQDESRHGDFFTAILKVRPEFVNDWVSKLWARFFCLSVYITMYLNDHQRSAFYESLGLNTTQFNQHVIIETNKTTERIFPAVPDVEHPDFFKKMDRLVELNTRVIELGNSDMPAPIKALARAPYVERMIAGIFQIFIMSPKDTGSYDLAADKAELVY

SEQ ID NO: 41469 - protein, 393 aa, Oryza sativa
MAESNPMNRSFSVDDLVGGIFRLGQAGAAFGRTDSEAAFQEFLKRIPSATNLAANQQYEPSQLQQQAQQLLASGSAGANNVPASLPEAGQAGEGGMPRVPSLDVLRQLVMQNPGFSAPPVSVKAEGSAGMLAPPSAATPPALSAPLPALSMAPAVDPASLSAAVDPSTLSVLGGVPGLAAAAAAANPALMVNPAAAAAAALQLQQLQAPLRMGTVSGHDKSDYDKSETRRQRRMLSNRESARRSRKRKQEHMHLLELQIEDLAEQKREKEAIADMAERKCRTLEDENQRLREENDRLRDELRFLRSELTERKERNGYYRREHSSDGEQEAENGKAYHAGSKRQRPSEAAAADSKGAEVLYNQQNGKQHGVGEGHPTDPAVEGAQQPVGEDDLQ

SEQ ID NO: 41470 - protein, 671 aa, Oryza sativa
MDGNKRRRTRRRLSLATATAGDGDGDGMAAAPPPAKRQRCHAVEELPSPRRGLLRQSVLVVVFLRRAMLLAWGGRKADDDDGGGGAAVGVSRIGGVVRDELRRCLGPIARSFSLQFSKLERKLESRLERIDQRIENLNHKVDQITPLRRSHCNHQHPMQGTNNEGANAEGVETNEDDDKNTCVRLRFLNEMKPPIYHDDELKAENSEDIRIGIFDGEQMIKSGPLSKVKLEILALEGNFPYNSMESWTTKEFNEHRACGRDERGDVLAGERTVQLINGEASLGAIKFREGSCKARKGKFILAARVCDSARTGVHVQEAVMTPVVVQDRRNKSNEKSHPPKLDDKVHRLEEIAINGIYCKRLVEKGIKTVKDFLKALNKDPDNLANILHMKKGSKAWEKMVTHARDCSLEGKPELKSYPVAQTNVVLIFDCVNSLVGAWFGGSYIASDSLSSAQQVIVDKLKGEAYQLLDQLPFDYIMEGGFPILNPMNANADYRAQGTEAVGGLDHAQIDPSFANANYQDQSTAQAGQEQFSSAAVAGWCQDSIAQPSSSHQTNHVVYPGGAQVNYSHQTNCVAPCDYPCQGASMVPGFDQVELQGRPFLGRDDLEASTSAHNNLPFPPQQQFTFSGDPGSSAQVNMQSQGHSKPSTSTTQGNLPTQQQWSQSQYHGNNWG

SEQ ID NO: 41471 - protein, 1065 aa, Oryza sativa
MLQRCPALHARYARKRQLHPSNKPSWISKRTLVVASFIKNGKASGTGPTDVRLWWHQQSTQVVQCIDKQFGLALYRYFRDWRKDAFSDLQAILLLALAANVMLAAVKVLVLGESGIHAWEDFYESAVVTFGEAWPAETAPVMQQVSSIGLYLSGLIGFAVLLALVEQSVLQVYETRVELGSPVLETGHILVLCWCKSPADVSKLETILRQLCAAYKCSGGRTIVILCQRRKTEMEDLLRNAIPQQQRGGSRFVFRQGNPLTAADLKLVAAGDASAVLVLADSAATADASDSQVLRVLVLLDESEVAARQEGRPRPSPGHVVAEVLTNDAMPLLKFVPSKAVLPLPSHRLNATRLAVLVTRPVVSHLTDTLWDFENSSAVFMHHFPQLAGQTVADVALRFENGIVIGLLEASTGFVLINPPPAYKLNADERIILLRPTQMNECDVQPLPLPVPAPVGSYSAEAAVAAWRQSQQSLNMPMVISCGCSDVPETSDQAVGQQQPPTPLDNIASNSCDDPVGAMQEQLLQHQQLQQQQWDPLQGQQQAAAGASQNAAEASKNGSQLLLGAESRPAAAGGAATNGTAAVNGHRAAAAATTGGQNGSVPADGGCSVASWDLESGGSMPSYEVMDLLKGTRPGFSTCRMFSLAESSVQLSRFTPLNLLVLGWGDSEFMGQLLLALGTGSSALPAGSRVVFANAHSVEATLQLALAAAGPPELLAGLTVEHVQLDPLSRSQLGKLNLETANAAIVLCDACWRHQNTQNSWSIASNGAAAATAAHATVYSSAHKSLAASSSGGGSLDTAAGAGAGSGGLSHLSEGFGLSGGGGGGGSVFAVGAGGSGMDADVLQLDALLLRVQLNLRSMLENIGREQEVNIITEKVGTEQDTRFEDKARLPLGVPVNLSSYTACMASQLAVCPLMVLPGRGGARTLGAQIDPLIVDADLYTDVGDRVSFWQLMRRAQLLGHVLLGYYVLPVAAADPIEAVLCPSGPSRYEKRIWNTGDNRLKFIVLQDAESASSQQQQQQQMREEAVAASIASPAAARAAAAAKAAAEELATYYPVDGGWQWWMR

SEQ ID NO: 41472 - protein, 309 aa, Oryza sativa
MAEPARRHDPAGDRQLQGARAHRPVPERAHRPDPEKLRRLAEPAAAAAQHQQAHRRHPAGALQLHVADRHRGGQQPAHRRDRRRLPEAAQPDAVLRVAEPAHRRNSGEPRAVRGLAVAGPLVQQPHRRHPEGALCAAESHQASPAQQRPRRFHPAGDRQLHEPLPAPAERQPAFRHDPGGDRQPEEPQLPRPRRQPPHRPVAGGDVGVRQPRVHGPALQCSHRHVARRPPAKSPVRRRLRQPAHRSSWRRHWVIAGADEAEPREEPDLRWHTAGARLLREAPAARPRRQRALRWHPAGAQEAPFLGDFA

SEQ ID NO: 41473 - protein, 1031 aa, Oryza sativa
MFEKSLYDLIRGLRNHKGSEKEYIAESIKECRKEIRSNDMDLKATALMKLTYLEMFGHDMSWASFNVLEVMSSSKFKQKRTGYLAAVQSFRRDTEVLVLAENQLKKDIMMPTPPYIALPLGAIPHVVNPSMANSVLSDLIPRLTHSDAMIRKKTVVTLYRLALVYPETLRPAWPKIKERLLDDNEDPSVTAAIVNVVCELGWRRPQDFLPLAPRLFDLLVEGGNNWMAIKLIKLFATLTPLEPRLIKKLLPPLTKIIRETSAMSLLYECINGIIQGGILEAVEGTSEGEDVAKLCVGKLRGMMVIEGDSNLKYVALLAFEKIVCSHPNLVAQQQDVILECIDDPDISIRMRALDLVVGMVNPDNLTAIVGRLMRQLRNAPIAAPTDDSSHDRVRMTEIIPYADDDSDAEENLPRHEQASDQPPPLPDDYRISVIRRIHEVCSRDTYGNISDFDWYIDVLVQLVRVSPSTRNTSSTEEKGDAERLDDIGGGIGRELQNVAIRVKSVRSEAVDAAQALVLVDRREQMFPASGNGGQGVLGYAGWLVGEYANYLSRPEPVMTSLLHSSSLQLPSRTLAVYLQAVPKVFSSMAGNEQISWTPERKTLMSLLMARIIHFLEPLSTHPSLEVQERAVEYLELMRLAAEAASGTAPGSDDGDFTDPPLLLTQAIPALFSGAELNPVAPGAQRKVPVPGDLDLDTPINPNLQHLLAQAEAEGIETDEDDVYAAYSEPIASYTEAPIIIAPAADRLDAPHKEPSSYQNAVEEEYLDPDIIARRKAERRERHKDDPFYIDPDGDKGSGAVTPLSRIVRDGNRENNDLDIDSIPIMDLNLERASSSDHIPRARSPRKPTRKVEIMGDETLGAGGDDPAESIAASQVSSRTKKSLLDIDSSGLGSLSLVDDDGTSSRKLTALDMERKQQEDAEMKRALQEVERLRLEMQRASERLHVKEEVAVKKKKKKVRKVDVEGDDPNATPPVEPEAGEDSTVAPVKKKKKKKVKAEGEADGGEEAEDGKVKKKKKKRRMVVMDDGEGEQ

SEQ ID NO: 41474 - protein, 896 aa, Oryza sativa
MLSSSDSHRRRKKDTDRSRSSPKNKDKDRDRDRDRERHKSTKTRKPRSSASRQDDSEDSQLRESTSRERIRTSSTPQAPKSHKMAVVPEMERRGSLGSANASRTSLPYPTLSKTYAKENIYSREDADRRKAAMTPQATDVDTSLEPDKDQDSRTTNHPPDRAAPPPPRAPPSPPLTATTAADLRRAASANSMRRTRAETIAQEMEGARRSVDSGTRMTSQAGPRAASRSSIRDDIDGTDLTSTTGSQPSTIRAKSPGPPSKMKTSSASNTRPSSRTSTPAKSRATSEATLDSEATSVRPDRRTHLREPSPSRSDTSPASAVDSSPRTPTQHSVLPSILSSVNDDASSIEIITDPMSRTQSADPAFSKSAVNPPPPPPPPVMLEVPRVDYLLQNGGLAKAIPRSLLAAIDGVPASTYSQYTTPRLSGAQAHDVRSFFKPLQNVLNSYNTVMDTSGSLAVATGYRSVARRLLDRLENVFARNISSEHCKCMMCFEQPLVEDSSGVNWGEILELVSGRCELPPWPPYEGEAAPGLGISSTLEAPCQRIDVDVPEQYREHYEKQSKKTKVAVQSWLSDQQENVPEDADDETLTFIMLTRLEQPQRPLFYALLWGLDKLPNPRTQKPESGTPPYLAKASVALQRLYRLHTAPRDQLVVMYLINHPEMHNMLATLAAVSKHEWEILVSGRFDGFLWSGADDLPDMGSSPSRTASRNQSGRIPSADGPQRFASPISPSRFGPFSPGPYSRPASARPGSTRPPGGAPVQIDEETEIAVLAEIEREIFLGMEAMEDAFEHLHNQAEQVRRRLRERGAALSMVAQQRRGSAASGVEVRIDTPASVRDMDEGFEDLRSEIGPDDSASNVSHNRRRKAHRARERKTPAPVEEESEEDIALAERIRRRF

SEQ ID NO: 41475 - protein, 581 aa, Oryza sativa
MQQASSHQHHYQHSAKPPVSRSSSWIRRSPPPSPPHKKLWGGGGGGGGGRSRYVCRIVPLLVLTVYSIFTVVRIPSSSLVVSTADSERVERREDVEAFKTHLPSNQNNLEAREETRSPASLPCSALINGEAGGGQAAAESALCCDRSHYRSDVCYLRGDVRTDPSTSSVLLYNAPRGSAPEKVRPYTRKFEGSIMSTIDEVTIVPVVDAGSGSNGTTAGDTGKDSLRRRCDVRHPPGVPAVVFSTGGYTGNVYHEFSDGLIPLFITAQRFAGEVVFVVLEYHYWWLGRYGAVLERLTNYKVVDFRYDRRVHCFSEMIVGLRIHGELVVDPKLMPNGKGIQDFQALLHQGYSRTPSATAAAAAAQPPVPLALAAPPSRPCLRPDDHAKVAKPKLVIFIRKQNRVLLNLPHIVTACRRAGFAPHVMNLRRQTPLPAIHAALSSADAMVAVHGAAVTHFLFMRPGSVLLQIVPVGLDWAADAFYGKPAQQLGLGYLEYKVAPEESSLAAEYGVNSTVVRDPSVISSRGWWEMKKVYMDRQNVTVNIKRFGELLRSARLHLKNATACGKAASAATTTAASATSWS

SEQ ID NO: 41476 - protein, 157 aa, Oryza sativa
MASRARRGNRKGVCRGRVMQRTLGKLNTLSRRPTSHLYLDACLSDLKFEVLLFHYSTFASSSYVKKTQAALSSLGGAVFGRKDGYTCDDLDIQHHVIKYGCKRKEKTALWITSGFVDPSRTSICTCASLARALALVCSTYLLTRIFRIVSTRAWIRE

SEQ ID NO: 41477 - protein, 750 aa, Oryza sativa
MEVESRPAAPQHPGGHHRGWLDRQSLESGRASLPSLRSPPATEPLQQSPAQKALPPPPPSSSTVSKSTQQSQALSHPPPKEIRNGLPTDSSASPVLTAHIRSPREPQHHNGLRYPRSSNEVGLDAVERLQTQISQNSGVLEAHTRDIRRGEESFKKLDEALRQEFQGHIIRQSSEIRRVDEAVATIHHELQRTRQVMEGLSMELHAVRADRQSRASTVPPQAPVAGAQDSAVELIAQQVAIISQKASEIDMLKITVEIMKNKIQRLEGGGTEGAPAALQQSHQPQAETHSHTAQGLSAHQASLPSAQAPRTQSLTTQASHSTTTTQPATSPETPHTQHESRPETSTGWASINAGSKRPHPSDEESSRVGRAPDLSGSPKRPRTATFENPETGPLGHSSKVFAQPTNPEAVLSSQLPSSAYRPYGAPDVHFDDGWHAEAQRVPEHRPRGRGRGGGPGSRGGRGRKSMPLPSHPHAWTSEWERDDWQGVLDSQATPDSSYMHHTRGRGIARRGSGGSGMRTAYATPHDRALALGMAGAAAGMDMSPPGDPYAHTKKTRTKPIRNADGVLIRKDGRPDMRSQSSAANLRKVHARKDDAAHSPSAAHTPTKLQSPSVEQHDETGSPDEGHAEHDTESPSIGGKKHSAIMSKMFPSGVEESRRRHDFTRQVFDDEQEHTVHLRTQGQGQGQTSSERAAPTEDSYSTARRASRATDAEERVEREREPGQAHAEPPRPEAQAVTAKGEERDVKPVVE

SEQ ID NO: 41478 - protein, 842 aa, Oryza sativa
MQLRAVVKALSAPQHSNAASRSLDGALLQHLQVVARSTVGNRDVARELTQAINFAADWRVAVSMVRHVPSEVVPSATLSHWLAAAVKCTARRADWVASLRVVASARVSTDPAFTSAAASLPVQTALSVALLRNWEECLRHAAPLVASKSPATLDLLCDAVRASGEAGAWERCVSLIASWPPSCRKPPKKTLHYAMESLTSREGPTDRWHTAAALFGVIQRLYKVPFLNTWCAYSYLLRRGGRWQAAISVAQRAPWHEVSDADQPRNTGGMSAPQGFTTTHFWNLALGALHQAGHTSVARRQAAVVLREWVSDHAAPNDPRVPVEAVVKLAALGINAAAEDVTRFGAVDVDVSVQQAWAMFCDAAVALAATHVGAAQVFREGSPDWIPQSADACLSRPRLSPPRASLLSSATTLSAAMLRLLVRLPATHRIQSTAPSASSNSEATLPWISALQIMCATAAAKRKSFGRDPSIAVEAFVATATPASMVTDEVLALVTAVVSKAARQLSQDPTPTAAPKRQLRELLREAEARGPLSANAIDAIVTGSCGTATQNGGAGVGALAATTAAATAYHSAPPSATSPLWTPEHAKEHRLALSAAAAAHGVGTLGIKKKIEAAAAAIRCESEPDARGKLADHYVTSAQVASASGLTDVVSFALRSAMCEKALATDGGDAERWHDAMMESACKSHNWRRALFLLARQSTRPLSPALATQLCSVLMPQAPHLGVTWRAATVIVNLVPSDTANGRQDEADTAVAMALQLLVRVGRWVDAVETMQRKLPQMTNPAALQPTVKDVARTLLHSSLSAATPATAADQEASKAVANRIWCWAEESGVVGWADALDLFPR

SEQ ID NO: 41479 - protein, 950 aa, Oryza sativa
MKGQVLSLVVLVAAVALSVEGARRTDRSASALFSADDDAALLADGAGSSPSLLATDARASASALASASLAGRKASAVEAASALGGLDVTSLGALREAISDDLSSDSDLSGTLDRLLTGSTVDVDEQDAAAGEAYGDEVHSAEQHSVASAVAASDVAAAEQQQHGGAQAHADEEVEAAEGSAIENTITEITADAVDAASPAATAHAQQETSAIIPAQQSAPTIVTAPELQQPQQPQPQPRFRQVTESDANGPIVPLTGHNTHPPVPVKGPLPGLTTDGEASGSAAEQTHKRQHSRDSDKEESDAEDGEESELAAKDKPRFLAERALNRAIAEFRAQQMADPSLTPQQKALASQGGSDPSLKAATVSGASTADRIRSAVYVVLAIAGVIAVVEAATYLTDYALKNQNVQIDRILSKTYKAMMLLGLVSFLAVCFARLSWMSTVLGDYSPNFLYDLLIVMGVMGLLYLLTMCGLVGYVLYSAAQYRTIELKHPTEGDLTRLENALTKQRDEYNARGCCTRTFASCFAQYNLRQTEFEVQYLQIKQQFVRQHHRRFLAPYTASALASTVPPTPIEAQVQAATAVASSPAIAFQKFEFYMYLRKAMQQGMEEVAAVHWQVWCVVFAVVLINALRMLAFKSVEAASFVYISVILLWAVLVYSGFLAYSIAGATEELAERYTLYLPERDAAAANGPRDLEAQSDDPDDEQLRESYMVQGGGCCGRACQCCPGCRAVECCSAPSKQQMLFWCQTPSSVTKGVQVAVLLTCLIIPAYIVDMADLVTTTNVAARYAVNILLFLPPVLLLIFLIPMVLPRFLLATSVASMSRLTALRATVVKLNSTAYRAHKLELDKARAAAKGKSLNGASAGGGVVASLNTDFDDTRSAMSEEDDDDSDLENDHKSQAGDADADRPSRAAYPDVSNPNAASLGGAPLLPSASGAARSDAPRKPVRDHLDL

SEQ ID NO: 41480 - protein, 852 aa, Oryza sativa
MSKVTTPATAAAAAAAAPAGAAAGGAAAAVPGPPGLKRQPSIDDQNKAATKIGAFMRGALVRATNKDNTLFQAWSQLDWRDESDLMESHENYVKLVEQHKLTKTGSSDQKAPGVVAADTAKPTGAAAAPAKGAPPAAIAPAATGSSSNAAAAVSSSSGHSAIPGPPTLARKPSHGQGRTYADTKATGGAGADAKAKAAAAGGKKEPESAPAPTAAKQQAPAAAVAATAPAVAAPTKTADAKAPAVAAAAAAPANPPPAAAPAKPASRPSTPPQAGAGAAAPAAAQAEDEFGPGPFPKVLTLDYVTAMMDWFKANEILELSAVEELPKRALPIMRAEPNVRRITIATKVTVVGDIHGQLDDLFEIFSLNGLPSDRNVYIFNGDFVDRGHNSLECVLTLLAFKVLYPDNFFMNRGNHEARDINSRDGFEKECRRKYNGAVFDTFSAIFAALPMAHIIDGRVFVVHGGLFNKSVTLDELDKHDRFHEIPPAMSLLEQMLWNDPDPAPGIAPSSRGGNALYFGPDVVDTFLQQNKLERIIRSHECVPQGFESMFDGKLYTVFSASNYTGSVHNDGAYIVFQKDCVPHPVTYYAGPKEGLTNYRMRHALEHDVINRLLHRISDERLALIDHFRSVEATKGLISRQQWADGLKKVLRLDIPFLEFQDILGLPKRDVAGGNSGIDYMAFLARFKPVNSMFQQAAGSAAAVKDVKAQEHLEKILALLSKNRYELESLFRHFDQNGDGEISTSEFREGLISLFNMLKTPWDEHTLQVLIKHMDKDGNGTLSYEEFFGSFEVLDPALAARQRELRAKTNAQRAFKRQKSSDSGGRAASPRNAGVAAAAAAAPAAAAAGGKKK

SEQ ID NO: 41481 - protein, 513 aa, Oryza sativa
MAAVANGGAAPEWRVTVPEGATVTVEREAGRCRRAAVVWAWQLVSCVAALGSRASGLAGRVWKIGADDPRRAVHGVKVGLALALVSVFYYTRPLYDGVGGAAMWAVMTVVVVFEFTVGGCVYKGFNRATATVSAGAVALGVHWIASKSGDKLEPVVRSGSVFLLAAAATFSRFIPTVKARFDYGVTIFILTYSLVAVSGYRVDALVAMAQQRVSTIAIGIFICLAVCLLICPVWAGQELHRLTARNMDKLAGAVEACVEGYFVAGEEEAAGPEYKRRPAAAAAAEGYKCVLNSKASEDAQANLARWEPAHGRFGFRHPYAQYKAVGAAMRHCAYCVEALSGCIRSAEAQSPEGVNRHLADASTRVATRCAAVLREASSSVAAMTTPSRGLDFAVADMNTAVQELQSEVRELPSKLAAAAGEPAAAQQLMDAVQLPTVTSLLIEVSARIEGVVDAVDTLATLAAFRSADDDDDDDDEKPTTEADAKLQTVSDHVTVEPEAAAAAARTTKNIEQV

SEQ ID NO: 41482 - protein, 1168 aa, Oryza sativa
MSAVDDTLPWRWLLDAGSQNLASRQAPPQPTQTSQPSPRSPNLTSSEGTRDAATATSTDESSVPPLFSVNTRGISSRPQNDLSVPAHQVLRRGLRLAAAQRKRSGVAAVVSSQIRGSGRRADGPREWLQRGGLAASDGGPTTSSTANSGAGPSTAIARVQSWLPKVLSPFLNPTIEAEFWRFAMWRVRWEQPLATTSIGTLFLARLMVARSFALTLILSISGAVLVVSGLCLLAVVIRTRNRQPQQMVGVVSVIRRAAAFSQFVALAGCVAQHALVASNCTPEPNTATNECIRQFPGDYAFILITTSLSVQSPGLVIMLLLVAHCGAIASFSALGNYDQLSVFLFALFGFAVISHFSVWSVLQMDRHRAQFELQVRSLVGLWDAMEQTKALVDIATIAVPFHVAGRMRHAVTAATSDNKALQRLVYASQNSVLVTAVAMKQLAGQPMGHVLAMSRSVSAICTQLDAICRSLRLDVAGVIGDCYVLTSGLHTDVCDEAAVALLLRQLPSVMNQAKEASGVPVGWRSAAVLLAAAVARGPATARLVGDTGVRYSVTGAAVVTAVRIATLLRSGEVSAPPEVLCHALPVGDMDATLRRAGALESSANVVVPIASIEDPHRRRGRDNPFEGDASASGTTNFTSDAFEDSDTATTHTEEADATRQESGTTPTPNTADSSSDPEAAATAEPLPDSRFDARTRNATRRRRLPKGSGSGDRDGPHALAWHGLFRDAEVETAFQTYCAAQCRPLFLWLGAEVALIGMMCVAIVVLEQLLDSSLSSRTTTWALALSIAAVTLSVAISAAVILTARSVTRTVLTPRMAPPLCIVLAAGFWPLAHALRYSFFTNRPAVLMMVLCPAMFPTLRHLAWPLSGLVTLVAISPMMGTDYVFQKVGVVNTVFVVVFTVVFCVWLCRLTCLDARRRFAESSKTRAAAQNAANTAVVLHDLATSLFPNVAVQRVFEALLSRRTQILDADPGDHYSELIVCRVTFPAHFESYASELFAATAAGIARLPQFAQVQAVGSSMVIVGGFDQRSEANRQLLAMQLVRLLQELQVRAESAGAVFTAAIAVEEAQDVLAGNRHSLRYCVVGRAPAVAAALVEACEVPPFDHTRCVIVATPNLLLSSATPSADLAALAGFRLVKLRDTVVGLRDVLVMVPPPSSAPLTLPLPVAV

SEQ ID NO: 41483 - protein, 858 aa, Oryza sativa
MLSQSALLGRPCLRNKPAAAQTKPSVLHRRPLQCRLHAGSSGSSSSSSSRPAAEPQQHDAGPSSSCNSSSNQAAANSSQRSKQQQLLGGAVLGSAAAAFPSIGGGSWGPGSGSGGSSGGGWGWGWGSSSSGGGSSGGPLYDIAAADDKDKSGRKKKKSKKSKKQEEEERQREEDDDGMDITESEEEPVGPEAETRAQVLITSETEAEENREGLDPTKRHGTHRCVEVVIEGWPEVGALPRVGELKDLLNVQEGFYFDYQDVVEDRRKLELQYDEYIASVDIRTEYVDDKTNHQRVVYKFRPFVFEGIDTIEIKGSSLMPQRVVDDIVKTCLPANPYRVDIGLMDKVREKIEKWYQDRGLPFCYVGYFDGMEEGTLRANVIEAKVNNVAVRYERPRNGESDNEVYSQGEVVPAEKIITAAGFKKGEHYHIDDGQDAINNIYACGLIEEINIEPEQDMSDPSKINIKVVVEEVQPKSMELDLDWAFQLKDGVPQISRQSLIPGGSVELTHENLFGDSQSLSLSLSSSDWRNPAADLGFQMSYTEPFYAPNTTRNVQVFNTRKMSPVFTPGAESDVPPVSVDRFGAKAWTSHTGGQDNKVEHNLLLQQISTVDENGQMVVKGTKVARGYYADNGPPTTLSGSGRDASLSYQGFCAVDNVQFVNGNQLGTRALLQVDQGLNLQVPLPGGRKLGFNGGLYNRMVGSITHFMQLPGLKTLTDEDVWLKRKAPNTLVLHTRAGNCIGDMASYDYFTVGGPYSVRGYSPGELGACRRFLEAAAEVRLPMKNWTDKLPGTLYAFAEMGSDLGSSSSLAGSPTEFYRKAGGGASYGVGVKALGACRFEYARDCNAGTGAVFVQWGERF

SEQ ID NO: 41484 - protein, 558 aa, Oryza sativa
MFVVGGIRDAASTLDGIDSYDPSTAQWRHWPHMTSKRWAPVCTVCGGKVYAVGGGVVSKQSYDTAECFEPLTGEWTRVSSMSQKRSAGGAATVGGKVYAMGGFDGASQLASTECYDPALNAWRRVAPMTCRRRGLAAVAFKDEVYVFGGYDGVQRFNSAEAYSPATDSWRKLPALMNVRRDGCCAAVVGTAIYVLGGYNGKRRLATAEAYDTATGVWRVLAPMMAERDGCAAACVNGKLCVFGGYDGKAWLNTAEWYDAAAGQWRWLPAGPLKRSYCAAVTLTVTPQIAAVAFAAHSNAVTANAAGAGAGPAGASVSTPHAVVAPGSTHGPASSHVTAGGGGATAMAGSGSGFQQSPQPSPQQSPSMSPHHSGGGYGGGGAHTLPYPAVGSGPHHAHAHAHAHAHTHGHSGSFDGTGLVTLTGLPTGAAVMSALALPASAAAHAGGAVPASTTPHGSSGAHSHHFAHPLAALTLSGHHIAATGHIGAGGGGGMGSGVSPFSPPATPNAKGLSGVVGAQTPHHPLSSHATTVHVSGGAGAGAGVVHASAPSSNRGIRRG

SEQ ID NO: 41485 - protein, 923 aa, Oryza sativa
MSYADLQASIESGDFNQASAVAARIVAERSSAAAAVEHENLVEALCVQASLAALSGATNVALGEMTSKLRGAVETPFETALAYYVEGVVALTAQKATQLARRRFDLARESDDTFIFARLGLGACDFMEEKYDHCFNHYKNVLRQLGDDAPNIIRVVLAISAFRLKQFDHARLCVQRAIAVDDADPLALLVLFGIQIHFREVTAAARTISQLMRNQPTIVVTQKYTDLLFFNALKSSRIAAQRNTILALILKTQGLATASNNKSLIAYAMMQRGRLLHAEGRLSDALAEYDAALAINAQLTAAVVHRVQLLHDLQGEGVAREELRLALERHPNDPEVLLMTTVTKATLGQHADAIRQATYLTQTVAKELPAAWSVGAWANRLDNARYCELATFAQNLLQKANLPTDRALDANAAVLAGKIYAFVRVATEAIGTDLSTAAPESLVVTDTTYPYIFNYAYLLESTDAKKAHGIYRQPVKRGPHEAAAFVRLVYMSMSMNRPFEAARWAKLLSLTHPNDRSGIVLLAWVLKEQGHAREALEIVHEETKSKRDVQLALVTGALFMHDSQGSTAKTEKVTRAMNGFQFALRHDADNVLAAHGAACCVALQGYLGSAAQILERVAEADCNSDTVTKGIREHRFNLFVESHAFRSAIGLLGSLPVEKLTRWQCCALATCYARISQHDRAIQILNAALALHHNDASVCYYLVLCLLASVFEALEKEDTLSEQRGTECLDNIKRALSLVKYAQRVKSDQQRHTLEQIVAFVNSNNLDASVKKRMRDRTKEREHTEAMRARWRQTHQSMIEDEIIKQRAAEEAAAHARAEREQREALLYARTQDFIQRSYTGTVVEQNPVQEAPAEEMAELNADELAAYMADIADGLDEAPLDDGIRARDDVAADELQQPPRPQPTAEGAGDAIPATLFAGEQQ

SEQ ID NO: 41486 - protein, 957 aa, Oryza sativa
MLVPLRRLVLQPFAGTGDVNANAIATALAGTRVELMQACDVMGERFRVVDATPASVGTVVLGSTVVVLLPAEEGGADVTDDDESVIAQPTLLEVSDEVFWPSSAVVQSTSSKAGASGIVCVATDALVALTNLLGEASDATLRGVLGVIAHSNRAMLSDASPLGGVTLNVHHAALLGCQHGSQLHVTNKLQTHVVVATDADQCRALNALAKALRSAALLVLDATTFAGLRDRTPAPPSSAPEASLVVRLPIDACTVRSIDGPVARRAVFANLSGLDPRVSATADVLLARELRRRKRRVAVRDVIAVTLNGQGAGSQDPARIEPLLADECAAAEHHCAHALPVYFRVEELEGGNVVDPATTEVSLAGPSSVVPHVGRVPPIVSASPLNLALSSTPAFAKVTQLLAKTTTAVPTGKAWCNVMVVAGTPANVPATLARLAAEVLGMQVFEVDPMLLDTPTALSLLARVCYQGVVVLARHMDKADAGSEFARWCIGAATQASWARDDLESKLPAELAPLSKLRRATVVLVFEGNDPPAPAFTAIACAPPIVCGTPDDAAREVIIRSVLAATTTVDDRARSVGCPRLSIGVDAAALASWSTGLSVADLAVWITIAATTHAAQYSCGEATAVIDAPDFEKALKAFQAQHGHNLTSTKLQPVKWDDVGGLEEAKKEILETIELPLKHPELFSGGAKQRAGVLMYGPPGCGKTLLAKAIATEMGLNFISVKGPELINMYVGESEKNIRLLFQRARDNSPCICFFDELDALAPKRGAKGDSGGVMDRIVAQLLAEVDGVGGTKSDGSASAQVFIIGATNRPDLLDPSLLRPGRFDRLCYLGPPQNKKEQVAAVKALTRKFKLAPDVDLAAVVEPLEPVYSGADYFALCSDAMMLAVNEAVERLKAQAFAKDGTVKEAPAAATVPAKQEPLLIEMRHFEAARAALKPSVSPADLKRYEGMKHQFTAKS

SEQ ID NO: 41487 - protein, 837 aa, Oryza sativa
MVLYALAVLGHQPDAALLDPLLHSLVKAGRAALATGCSLDNSKQHGIPVLLQQQQQQHHCMQAPLQQQQQHMPPASAQAFANSAWALARLQQPALAHIWLLPLLALLHSSMQPAAACSAQLQQQTAYYQPVVQPKQLQAVANALWASATMLCSRQAHDRDIYAAAGSPDEHGGAVQPKPPPRLLPGVRLMATRLLEQCSSCLCSGQPRELAMLVWACGRLQVRPSSQWQSRLWQASGSTFDGYTGDECVAMLLGVAQLRLSPPAEWVAGLFVATQPQLRSMTGQQLAPLLWACGVLRIRPPVGWLAAAVRGFTEQLQRSSVPPEPAFVSMVVWGISKLGYKPAALDASGIEKAARTHILAYRPHQVAKLLLGSARVGWQLQPDLLTVLLEAFGSHLEQASPTDVSMALCALATTVQPVGRHAATIQQQQPWRLRTPDQLQMQQQRWRRQSLLAVQSTVQSMFAVCEDSTLVRQLQYVGSGQLWHQAGQSQSSAGLPGAVTTSPAAAVACLGPVSSQVQWPVQQEQQQTWQQQHQQLQRHHQQHHVSTDAAHSYASHCSFSSHTAARSEHVQLLFTRAEQLLWAMTASELCQCLWSAARLGADLSPQWAYAINHTLPAQMQLLGPGDLCILLWSLSRLQHMVRVKGVLRVQLLLRSQQLLLASQFSARDLSAFVWNYQQVFSHWRQPPPRPWVVAYCRAAYRTLPSFTARQLGVMLRACVLLGVVLEQPLLEQAGLMLDLWSAKMSKGELATCTASLLQLQRRRLDALRTSMGERQASQQHRLAWLPGKQYREYWQHGQGLMATTAPGWCRGDEQGVGTKLATLQVQTVPQCFAGSVI

SEQ ID NO: 41488 - protein, 821 aa, Oryza sativa
MVAKNSNKQDAAETATATAAPPAATSAAAAGSTAPKFLGAFEIPQLVLSMLVWLAQSAGLVYAIYNAYRIRLYALHEYGFVIHEFDPWFNFRATQYLSKHGWYEFFHWYDYMSWYPLGRPVGTTIYPGLQITSVAIHRFLKAIDYKMSLTKICCYVPCWGGAACTFFMYLITAEATGSRTAGVLAALIMAIIPAHMMRSVGGGYDNESIAMTALTMTFYFWMRSLRTHNSWWIGIIAGFAYGYMVAAWGGYVFVLNMLAVHAAAISIIDQFRNRYSSRVWKSYSLMYVIGTTIAIQIPVVGMTPFKSLEQLFALVVFVFLQVLHFSERLRKQADAEVLSVETIRIRVKCFLVAIAVMFGIMCLLWPTGFFGPLSSRVRGLFVQHTRTGNPLVDSVAEHQPANADAYWHYMHYCCYGWQIGVFLLPFMTKRVYAGTFLFAYALVTYYFSLRMARLIILASPVAAGLTGFCLGALLHWACRQFFWSDFDANKEALAAEGKDVKGKKVATANAYTVEAMKTNALLAYDGARTLRVAIAVAILAIAAYGKQWRDFNDHSENMARSFANPQLMFKSRLSNGREVMIDDHREAYFWLRDKTPKDARVMAWWDYGYQITGIGERTSIADGNTWNHEHIATLGYCLTSPVKRAHELIRHLADYVLVWSGGGGDDLAKSPHMARIGNSVYRDICPKDPLCSKFGFYGQNHENPTPMMRASLLYNLHAHNIRPGVRVDPKLFKEAYSSKYGLVRIFQVMNVSQESKEWNADPKNRICDAPGSWYCTGQYPPAEVIQKLIAQRREFGQLEDFNKKNKDDEYHRAYMARMGGH

SEQ ID NO: 41489 - protein, 1070 aa, Oryza sativa
MADEQPPPPPPPQDMDPEKIRAKRLAKLGGPSTPAGSSQNASAAPSTPASNSSSPKPAEAQAPPPKPQPSPSQPANPFSQLGMQSGEAPKPRINIKKAAPPAGSAPKPQDVSIEAWEDRTLSSAFRISLDPARTQDTHGNRLYFASAAKSDLEDEGKPLRFSTDMLDSVILESASSHTQGSALEYLLGCWKRVAKLFKSLTNKADPKHEIVKEARRLCFSYCIFAATMPDMFGEEAPVTNTLTDHILLGPDDERGICYDFLTEASHRLGEDDTVKEALVGAMEDVSRRLAKISMNGDYRPFMLVLRVFIRFPPLVAALAEAESFLPADIEAQQIETNTFLGPFFRLSPMQGEVALNYFAGSAAQDKGLITNAQRALRMTLQTHQDELLDITNAFIKNKESREKILNWFALTVNKNHKRRALQVDPKVVSSDGFMVNVTVILDRLCEPFMGASFSKIDRIGIDYLRRSPRVDIKDETKINADDQASEQFYSQPASGTNNFISEVFFLTVAAHHYGTEAANSKLSNLQKDVKWLQKELVRIETERHKYAANPMQLAVFDNHVKKVKAQIERGQCTILAIQGVLLDETTQARSMQLMRYVIVWLLRIASPGTGFPKQELQLPLPAEQSTAFKCLPEYFFEDIVGNFKFITRYMPHIITSTQCEELVKVCITFLRSSEYIKNPYLKSGLVTILFHGVWEVPGRPKGVLGDTLFAHAFATKHLLHALMKFYIECESTGAHTQFYDKFNIRYEIFQVIKCIWPNAMYRDNLATEARVNLDFFVQFVNLLLNDVTFVLDESFTAFKEIHDVSKLLEDPPADLDQAIRQENEEKLSAAQGKAKSYMQLTNETVAMLKLFTEALADSFTKKEVVVRLAHMLDHNLAALVGPKKASLKVENPEEYGWNPRQMLAEVTDVYLNLQSKQSFIDAVATDGRSYLPEYWSEAHKILAKLALKSPEQLREWEQMAAAIEAAKAQADMEETDLGDIPDEYLDPLLASLMEDPVILPISKTVIDRSTIRSHLLSDSHDPFNRTPLKIEDVIPNDALREEIQNWKANILAQKMAERKAATAGEPMDTS

SEQ ID NO: 41490 - protein, 970 aa, Oryza sativa
MSKAKAAAAGAAAPAAAVAVDAKAAAGGAGANAGAGVEVPNTFLCPIRSTVMLDPVTDNEGNSYEREAISEWLTRSAVSPLTNQPLSAADLRPNRALRELIDSWHTERGLPVPGAAEAKAKTDAAAAKPAAAAAADEKKNAPAAVDKPLLTAEVFRAGVAAAETDAKDVDAAAGGGPQVLVTVRAPVDLTNGDAKAAAGSGDRVPTDVCVVIDVSGSMGLEAKIKVAADADGGAGGGVAGQKPAVEEAGGFTTLDLVKHAVRTIIHSLGDADRLAVVTYSAQAQVVVELTAMNGAGKKKAEALVEKLEPDGQTNLWDGIYTGLEVIRKGAQQQAKAAPAPSPRAAKNRKVAAAGAAAGAAAGAAAAPRFTSNAAVLVLTDGQPNVEPPRGHLPSLAKYAADNKGLPAVLHTFGFGYNLDSQLLYDLSVAGKGFYSFIPDGGFVGTIFVNAIANALTTVARNVTVTIPNADANAGAEEAKAVDLGSVVMGQDRCAFVSVPALAANNAADIKSLPLRLQYDSNASAFGARALQATDAPLQVTSKGAAGAAAAVAAAPGGPAAAGAGAGAAVVPETTSVSVAAQRCRLGLVRAILDAVKLADAKDEAKAKAAIARASADIKAALATAPKAASEYDSPHAYLTALQTDADGQIALAVSRTDWYRQWGKHYLLSVARAHTLQSCNNFKDAGVQLYGGEKFRALRDAIDTLFCRLPPPKPSIQPAESFAAAFRAAGAGAAAGGVAVGHARGGRGGGAGAAAAPRKARVANMAAYNNRSNPCFSADSLVAMADGTRKPVCALNAGDVVCASARDAAVTRVVQCVVESRFDAAAPVHLVTLSKGLRVTLYHPVRMTDALSGAWSFPHALAPVQEHSGAEVPAVYSILLTEADAAHSGKGERYDCVLIGGVECVSLGHGYGSGDAGAGVAPHPYFGDRARVLRDLQAMKGFDAGRVVLNAATAARRNSQSGLIEALVQL

SEQ ID NO: 41491 - protein, 840 aa, Oryza sativa
MSLELGPNVTNTLNNMTAYMERVRARQAEDEARRASGADEEVEGVVSTPKKLGVSPNLLKEQEAVEKCTALVEELRKDGLVVLGLSAVQYRQLGMLREAVSSLSVSLDGLKYDRCVSALKDVQAQLGPIGAAIQTKLAATEEEETRKLMGEQKALAVDLYNKLQAFLSFEEDIRGPLKKCLRELGSLAGGIGAPRTTIGCSAAALKLEMAAEEAQKLQDLLADMAGSRGESSAAAAPDSVAATQKVVEALQGTVEALQASLGQLAAHVALRVRALNPEVAAAAAAAGLEGADLDLNTLEAMEPELDHPLHILGATPEEQQADWEAAGFEQVARGRVATLLIATATADGAHTHPADTAKPPAAAAAAAAAAGGAASSESGSVPRAAVGVPGLPSGKSVLQLTAERILRLQQLAAEATFGRHAPVSRHVQWYIMTSPATHDKLQAILRDHHYYGLNPSQVTLFCCKTAPPAFAGEPLKALAMGPSSLTRGAPGSGEVFAALKRSGALDHMKRTGVRHVEVNAVDDNVLARPADPLFVGFAIDKGLDAAAKVVEPSSVAAAYAAAMSGSSSSSSGGGGDDAAAAVSAQMAEQLDESLSFLAPGIGSYYFSFSALSRVAGFYEQNPLGMYRLVPAGKLPSKAPPPAMTVNLPPNATQAQRMQAQQALAAAQQAAAAAPPKPVEGYVPTRFISDVFAATSSPATPTAAGASGAGPLSGCSLAYLGVDREEEFSCVLGGGPHLVVPEPEAAAGDLLALTTCWVENQGAVVECEEGVEVSPLVSYAGEGLDVVAAGGTVFAEPYDLTLQGATGQGRARHNAGPWAVPVLAAYAVGAGLAVAKQLAQK

SEQ ID NO: 41492 - protein, 1017 aa, Oryza sativa
MALPTVALVVLLAVSVVDFAQCTCPVATLPDTRTWGGDALVFLRRRGMDRVHDAVRRISNPDDSDFGSRLAWRDAAALTAPSQRAQTAVLRWLRERCGAEVTQQQPMADESVFMVQGASVECLCSPSRPHDVSHVSFPQRRQRRTKKNTNQRGDGVANHATFQQAVVTPAVLQATMGLPRPPATGKAKHHPRNVQAFFQSGEHTSLTDLTTFAKLYFPPNMTSQFTVEKFINTNPPFMGYGDGESNLDVQYLVGTSLGVRTWVYSYPDDRFCHDLARWGTDTLESVKANPSEYPLVISVSYGAADVPSYCAPALLARLNEDMAIMAALGITVLIATQDDGMAPSGLSNFNLGYYAISTPSGSPFAAAVGAVTFVAPNTTDTKLRCTAYGGGGVSQLFSDTPALGAVTAYFSWVQSAFASVTTKYAFSTRPGARAVPDLSTLGSGFQVVYEGSTSPASGTSASTPVIAGMVSLLNDVMLDASNGTKSLGLLRPFISKAVAAGCFTDITLDDGDEMIGLWPAAKGWDACSGYGMPNFVCLRKVLQASLDVAMSSTQQPSHAPTSTATVAPAPVEEDYCKRIRNEISSWTNTLHAPTPGFEPLFVDNSTALVVMIGEGGVMKVSSADGTVQWATVEALPAPEVHHCPVFTCGGMVIAPSVNVTTGLNSSSGVAMWTLSRGTGVNQTHYCAACTADGRRVVGVIASIGEFTEVDAVSGVVVRRVSLGSFSTQAPAFYPYNSFLPDRGYPLLPSATRISPIVKQDASVFVVLTNSNGSSVTRIGSTGTLDVLPLPSAAAGSQIDVQTLDARSELLFVRAFNSYDLFAFAVNTSGAKGITLQTQFNNITSGPLGLDGVVVLDGTWVVYDAGTGNGGLYDLSGDVKWAVTVLHNLNGNLFFHHRSFLRGTVIIGTALNYSATKVFALDRTTGKLIWTRNIVATVHLPNFAIRALGDDRFVSLTGLGPIVMSATDGAVLGACQSMLDFQASAMACAAADDGCDSGAVVTTQTMTTRVNFPTAPRK

SEQ ID NO: 41493 - protein, 905 aa, Oryza sativa
MAASAPSGAGAGAGAVSGSGGAQKIKNRARRQPVALDAIRAVVAAAPQPTIVVAPPPPPATSGAVALLAGAGVGVPSGDRDATQQQQPAATSPVLAPEPSHAAAAAAAAVTTAAMLGMELAGSPPPTGPGMGTGGGRRAHHHASDGGVAAAAATASTSTSTTRTTTTSVFVSGVLGCNAFGLDDRLRAADLLAQALMSVDGGRDRSDRIRAATALVDTGRTDGSDAADAAGAGGATRVARARYVTLYRRAWHADSVRLAMVGPSAARGGARMASAFDGAVWPGVVTRYVRAAVEAGVDSADAASEAVDADPPRAVCGACMADTFAAVCPLLPVYAPAVVRCVLHALLRHGLAPAPAPNRSSASGSSSSSSSSSSSSSSSSSSSSSSSSSSSSSRSEEHDDAAAVVERDAVRSHRWGGHLLLHALRTCKDAAMAVSLLELPVASFGLNTATSHMWPPDIAFSHARVNAAWPHVWPYVPLPVKPPPPPPPPPGAGAATAEAAAAAAAGAGGDVAGGTADAYACAYADSDGDDEALLSVRYPAHLSPLHVYVAQERGSISPFGMATAIEALVARTPTHVLRGYGRTDDGACNARALAQWAAERAQLMRERGGGHGGGRGGGRERDIVVAADGAVAAAAVAAADMIVAEPPHVFPCAWTTTYSLLRRCVTGLTLPSPNALRSAHGFDPVTGGAVQLSAALAVVELPTAKQALDVLQFAVPYRHCDDANDPAALRALGVVDVFERDVTNGGRTLRELLRAAVLAAAGVPRVAEAEEEGEGFDARTSGGGVVKPSYEFMAVLNAFDATEAPVLRYWRVATHPDGLTTTTTSRHHHQRSRRGGSGGGYDGDGRDGGAAHTRRRVAAVGVRLRVCIDTAALALSAHFPVLRCRHATSHTPRPGSHRPRPFFSA

SEQ ID NO: 41494 - protein, 508 aa, Oryza sativa
MKWSRISEISAYKRADAHLTRQTTRGAVVTLLGVILGVTLAIHEITWYLSGKGTTKMAVDLARRHDLNIHVDITFPAIPCAGLSVDVMDASGTAGSDANHAKGVHLHKMRLDTRGRRIGGKEGEYVTPQSQKMVHDASGTVMQVDLGAAMTQMSDMDDEMQKHEGCRVYGEVSVRRVAGRLHFAVHQQSFIDVLPQMLTGHVLPKLTNMSHIIHKVAFGPEYPGQVNPLDGFTRINLPGDVPRAYKYFLKIVPTEYYTRVGMVLESSQYSVGEYAMPLRSGPGVPTQKPSDKDKEGHTHKIAEGTGAEPTDGSAAAAGDSHPTSTVQNAFVDFSYDLSPIVMTINSNPSSLLHFIVRLCAVVGGVLSVTRMADKIVHALLVSSGASAARARRAATAAAAAATAARGTACLATRRRTCQAAQSAGEGRTAAPASTRILCAPQAAAVAGWPWVTQPEERHRVQGLCTQMAASTSACTPATRVVVWAAIRSAGSTAAAPATVERQLSAAAA

SEQ ID NO: 41495 - protein, 538 aa, Oryza sativa
MAPGDALPWPSLGKAPVPPDAQTTLARMSAPGAMRACPMTDADRYQLASAMGHAKRLVTAEADGSAGVLKLKSLTAFVRTHDTALNRLVLSCMPARLLLSLRDAVQRRQPPMDRAPYNAVAWAPLLTGDVVNSAIAREQDAHVQQWMAKGSTVKLYDIADARYGSVQTAAAAGANADADASAHALATDANAEPAAPRVAAAAGAAARAAAAAGPTWADDRALRAVAESAVLDAVLPLFGGDRAIGDAVARYYQRAVTGSPVLLNVFHPTTGRLDAAFRRRALDADEQTHPAIVPPHSLFSRHTNRPVGALSAVRSLKRFERNFDALTCGAVRALDLHRYGAVVGGGAVTAALMPLPAALEQMHADVERYEHVLQGLARKRGLPRVLVDRIRDMADPGGDAEQRLFVALDEWYNWPARRLATYRNPAPDSTRGNPFWAADIDIFVMADSVADAERKIDGLTRQLLVEYRAHRREMRRVRKRTRDAFERDAAARRPQNRGWTFAWQYSAERLACRVPQKPRLLRTANSVTVVSEHPMRHV

SEQ ID NO: 41496 - protein, 925 aa, Oryza sativa
MASTHIAFLSTRSEARGVVDEKSLQPLPTVGSVIEVVAQWYFARITAKMEFANATPAVVKTFVALETPHRVGGFLASVRVEAENHFLQSKVTEMTPDPRAAVASAKTNKVFTVDVPWSLHGGQSVLVTAVFYVPLSVVNAHGVSIVIPKELVPKKIVAKADDDGDNATPGATWSSRFAIASTHRVPPTVLVHGRGTLFAAVDGGAKSTTPGAAVSKMGDPRRFEVRYENRDVIDQLPQDFEIVANMIPDEDQLVVQAVREDAPFVNDAHRVALAIACTPQFGIATATKDKAASAAAAAIANASPNIELSILVDCSGSMAPHSAHVSRAVAELIATLPSSVFVNLARFGETIAWALPESVQLTTQDLADQLLAFPLDVNMGGTRLYNAIGEAYLRPVVEGHARIILVVTDGAELRHDVKLVELVAANVHSTRVAAISLGDHSHTALFNKLAEVSEGVHAHVKQVSNISNDIAAALNPLLVPTLCGTTVEFTYDGVEEHPPVRLTVDHPRMIYAGTRRVMYAFGHKTMRGCTVKVAGLVGTEYEEIKSFTGAADKFDVNSSNDNDVSTISLVHAAAAASRIDSLVNLNANAALSAAEKAEVTALSVSFSVPTPFARLVCRTDDSPATTFDPQGRTVWAPFVERRETYNVPPPAAARGRDGFAVDADFATPAAATTSGGTATTAASFLREVVHEAVDRVTAPSSVNNLVSTQKRGGYWEAARSFLALDFVGLPMAKLRSTVPAELTAVPHKTQAAAPVAPPTAATLATGSAHATPDAAHASASPTPAATAAHATPAGAAPATPAGNAQATPTAPASNASPKVPPAAHSPTPAAPSPLPAAAAATPAAAPVAATPPPPPHVEAPPTYLGASAEDLWATAVIAAWLDRHPQWKQHPRTKWTGLRANAYLTAVGASGVKALEKAKALVATL

SEQ ID NO: 41497 - protein, 582 aa, Oryza sativa
MDYLPENNDFVNPADLYSYASYSTSDPAIKTELDLFDGALGSGSLDEWTNPADLTHSHQDSAVDLRGFYQAPGTFPRLKTEDSSELDNFLNTPYSTPASNSSNTASPHNDMVFSNANSPGDYTRDQSQTSSPDASNDAFVRDSIVIPQSIEPPKVGIFFDKTKTRAETQIKTTVTLDPLPRQYQWARFPRHTLSKSKQLAGNEEIEANENGDSAIRVDLTLVCATAVEQPAGLERALRRARGAEKMPRRDPGTQVSDIDKEDPTHPQNGGAVVICEGCKERERKRYDRKKKRNQEEENEWSNYEDDRIIMINEKEFKRWQDVEQGHQQGADAKKVEFAMRITCYCRHQEEKSPVGYKVIFTFRDTSNTVLAQKVSEIIQITDDHKNREMPIVSTLTTDLSMPHPQPEEQMPQYAVPMNNYYSTAPTYGMYSTPTTPIMSQFQSPLSPMESHYPQAASLGMAPQVPQQSTFAFSAANVAPTPAPSYASHQRYQSYSNTPMLSPTEQFAQAGFPLHRPHSMDSFASAFAGMYTGPNPYSQPFASQPPSRNVSRPASPSWEQGASRSKKMRAVPGFFMVEDPDNE

SEQ ID NO: 41498 - protein, 350 aa, Oryza sativa
MDSVCKLWSRPSDAGSAPEILVSARPSTTRLESLENDSGISPPRSRLPPARSDSSSRSSPSDAGSSPERRLSKSRRSLSDAARLPSDAGIGPESWLELSASDAMAVAFPSEAGMGPESELPLRSSTARRRHRWRSSGTPPVRLASETTSDASDGSAAQMPGGSGAARCTDWNVTEVTLPVAASQPTCDHLHGDDADGDQSGGRAAVVLSHCVRKATSDEAEAAVEEEKERRWSKRRRKCMGLGNNGGNGSCIKNRAVLAWGSAQYTMLTKLAWFKRGDDLYEHRSHSSLTHHGSRVKTNTLFLSLSLSLSLSSYSLSLFLLKTLNRLSCLLVSWCLVACSRWIVVVVVSW

SEQ ID NO: 41499 - protein, 880 aa, Oryza sativa
MCNSQGTCVYNAASNSASCSCTAGSNFFGPSCSTTCPSSGGQVCNGRGTCSFNSGTGAATCTCTAANFFGPACNVTCPSGTNGQVCNSQGTCVYNMATNTASCNCTAANFFGPSCSTTCPSSSGQVCNGASNGRCLFNAATGSASCNCTAPNLFGAACNITCPTGTNGQVCNSQGRCSFNSQTDTASCNCTAGSNFFGSSCSTTCPSSGGQVCGGRGSCVFNSATGAASCNCTTANFFGPACNLTCPTGTNGQVCNSQGTCAYNVLTNTASCNCTAGSNFFGPSCSITCPSSGGQVCNGATRGRCNFNAVTGVASCNCTAANFFGAACNVTCPTGTNGQVCNSQGTCVFNSQTNLASCNCTAGSNFFGSSCSTTCPSSGGQVCNGKGRCLFNSATGTASCNCTDASVLGPACNLSCPLGTGGLVCSGRGVCSLSATGVPQCTCSSGYSGVNCSVLTCPTDSAGRVCGGHGSCTLVDGIPTCSCEAGYSAPACSPNCPVSRNGLMCNGTGTCRGSTCYCSSGFGASCSDQCSDDCHCDAPNNPNTPCLVAGACVNGTCTTKPCQVNAAFAGRALLYPANSNYFCYWPLYGFFVNQLDLITSTTCPFTPSVSFARCAVISGTPPDANGCQWFSNLDMFCLRADPGVTYSIGAYISNPCGRQYANTTVTVVNSIPNGKNYPSDAVYPPLYAAWTSTSAAQVLIPEDAVPGSDGFSTTLIVGIGVAVAFVLLVVAVVVVVRRRRLATHRARSAAATTLPYNPESRDSEPSQSRSNLGMDETSRLGEVNVFSLPLDPSQEAIQEAVHDAAEADKQLAREAAAGEDAKEGVPAAEAAVAAAAAEDAPNAAMSPSEKRKLTRVSAMYSYLAARTEAAAGELENETDL

SEQ ID NO: 41500 - protein, 755 aa, Oryza sativa
MPAWSSSTGKPQLSYADRLRHASKSSASPNHDSLSAAAASSSSSAFAPSSSHPPSATDASKHNASLIQRPDSTSTSPHTKQSPGNATTPAHAHAQTTSSTEATTAPSHASTTARNDAAPTLNVWEARRKQIAEREAEKSRERQQSPAHQRNDPPSSKASIATAASNPNHAATKHKLPTAPLATTASSKKGPKPSSNPTASDKKNTKPTNQSATANPASASSQPASSLSDTKNASASASSSFIAPSAAKPTTSQASQALEVTREHSSKPPTRHPASSTPSALANSADMPSAQPKDTSNHGDNKEHRARREPAQFNSASEKGTAARAQSASTTSSRQPAPTPMPMHDDIPGSPATVASAIEEVLKNGGPNGAQTEDDDAWLARIHLLNGGQNMPKFGGIGPNGALGLGGEEEAQAAKKAERAVAAAWGAGKSVWNKSQQHNAQHTAPANKQSAAPPADTSASQPLHLSHAMRLCGWMLTRRLPRALQQPKSQAIPLRPESPTPARQLPQRAPKRPPPHRRPSPTPPPAPRARRPRTRRPSRARLHRTPRHQPRVCLRLKTSTTGRARWMQARSLSSTVPSPPRLLRRPPTRTHAMPAPRVRRPPRPRASTRRSTSCSCVWRRARIRSPPARAQAQERESSSGCRSCRTSRTPRPARLPSPPARLVRPSRASRESRHARRVTRRAPRARSRPKATRTPRPRVKQPSSARAARRRTVPLPRAAPQRRARRKAARMPWRRSLPRPLRRRALAHKRLRRER

SEQ ID NO: 41501 - protein, 791 aa, Oryza sativa
MPESPLPATPRTNRTTSGVPSPTNNASTPGSRLSDRAAAFESPSKASQALREGHIPDAAYEAQLRNIALLAERLLLDDMRFAPEPLATCRILPFELLTLNPSIAALSEGDAQLVYHALQVTQNLTLETDRYTGALWVGAVAKGGWATNATAVVHLDLPRNAPLELIAAALQVHTSQHIWCVWIGSTQDPDRLPHVRGAFSRESGYVWYVGFSCGAAAVAAFRDLQNLDVLSLQDGTQVRAHFHPKFTGMRSQRRIDACHPYLGAHTWSTRLGVSGGGLAGTRLYRPLRTQASTRRSSAAAAPPATKPQKRGRSSAPNTARQRAPSKTGGIRSRSEPLRNQRRESQQQPHSGPQYPSFSQTVDVPVATRPLRTMQPPPPAPLMEVADTLAAPTAPCEAVTHPMASASSTRTPVQSAAPAYVSRRAAPPDPTTAVPPNEPPQPQQPQQQQQPQQRPAQQQQARRTHQPYASVAVQPTAETDDLGCRHLVPRCSVGLEAVHAAASDWFQWWWWSSIQRHGVMGAANPEQLPPPQQQEAVQAPPAAEATTAPRVSRLKQQRRRQGEQREAEEEAAASTTPAPTAAEVVASATVQAEVPAPQSTDATANATQEPLRTQPKNKAAEVAPPEAVKKHKIRRRYRKHLHSKSDANGTRTTVTTTCEEVNKSWADEPTCIPGIDDVELPTVGAASSSGLPSTTSPASAPRGESSPTPAARASTSDVAVATASPATAPKLSFAELLRTSRDRPPQQNHVVVVAADAAPAPVPRATAATPAAKPKAAAPLKNGAVPRVAQRA

SEQ ID NO: 41502 - protein, 690 aa, Oryza sativa
MERRRMIADLLRASARGSSLRGGVQLHAALMKLGFGSDTMLNNNLIDMYAKCGKLHMAGEVFDGMPERNVVSWTALMVGFLHHGEARECLRLFGEMRGSGTSPNEFTLSATLKACGGGTRAGVQIHGVCVRTGFEGHDVVANSLVVMYSKGRWTGDARRVFDVIPSRNLATWNSMISGYAHAGQGRDSLLVFREMQRRHDEQPDEFTFASLLKACSGLGAAREGAQVHAAMAVRGVSPASNAILAGALLDVYVKCHRLPVAMQVFDGLERRNAIQWTTVIVGHAQEGQVKEAMCLFRRFWSSGVRADGHVLSSVVAVFADFALVEQGKQVHCYTAKTPAGLDVSVANSLVDMYLKCGLTGEAGRRFREMPARNVVSWTAMINGVGKHGHGREAIDLFEEMQEEGVEADEVAYLALLSACSHSGLVDECRRYFSRICQDRRMRPKAEHYACMVDLLGRAGELREAKELILSMPMEPTVGVWQTLLSACRVHKDVAVGREVGDVLLAVDGDNPVNYVMLSNILAEAGEWRECQGIRGAMRRKGLRKQGGCSWTEVDKEVHFFYGGGDDAHPQAGDIRRALREVEARMRERLGYSGDARCALHDVDEESRVESLREHSERLAVGLWLLRDGTGDDGGGGGGEVVRVYKNLRVCGDCHEFLKGLSAVVRRVVVVRDANRFHRFQNGACSCRDYW

SEQ ID NO: 41503 - protein, 1006 aa, Oryza sativa
MQRRNIFDDRVAPPPGHPAARRQTPASPSPGRSHRDILDDSSLRIVSNRGPALMRTERHDKSFGHDSFIAAIDAATSAIGAPRNVETTPTRPQQQSAAPGVTTFADGTSGMRDLTIRISITDMSTPQALVHLPASGVPHAVTVRVQAASMRQLIEAVESELERTHRLYYRISSFQYGPFNGHGPWQAVPVNDEVYHDGQTPPPTPERSPVEERVAEAVMFHQANAIEDLGMVNAVSAPTQRFASMQAITATAPTFFVGGGRRFDLLPNAFAMKIIPGARRLSMMITAVLPVDRNHVNPDGPTILQRRAAAIVSTSASLYRVVSAAIHHDVLPERHVLLVQDPEGAAGAYRVVRTPAQLSTFSVIMVDLSETLDPMRRAATELEEQQSHRLEAIDLNPVAGRLPQTQREYYEVLNAPPVVPPHLDYRNARSAESFAAAVSDTHFAPPLVTSEHTVIKVQKPTREESARATINGSVPFTTAPGVAASMRFKVPGRVQTPAAPENLESTFTARRVEDHVVEDPGYDARVGRDVRREEIEAMDTDALVAAFGLSTQYHDAVVNPSSSTMAGLVHSAVVAETLEQLAADREPLDFTSIAIAEGVARFPTRGMRVNTPRTAAPVARAMQEGTPIQERKWLIHAALQFVMVHPDHDLFDFPTLTRIMSDVVQSFRASYTAGIAIRFPLSRSDEKQLKELVAETMRVEVVKAEQLDGWTPFVPSEKTDRRLERVKIAQQQAAGVAPSQLRVRPHFASYSPEKVIQARELVATESPIDPRSFVNAPDDRRPPIARPLPESLRGAPKIAMTHPQYDRKAKTLTVYATTNLDIFASATPAQAQARLARSRTLKVLLDDPSPPAFRWILMSGSILKNQKRAQRGGGGPNEVALGAMIDLGVASTDVISMTPPVTLSLTINLIRYSRAFDPTGETGEWTHALEVGVPYTVGCIVDDANGNTLTALEAFTIPTDLKPQLPASHSAPPSPPPRGTSVASSTGGALTSTGGGSSSAARPPTR

SEQ ID NO: 41504 - protein, 389 aa, Oryza sativa
MTTTPERSVPKPVFTDAEAGAKEFPDSNARRFNYYTPAKRKQTHYEDVTVEVQPDPRHYLAQGWLYGFADGRGGYPLEWTALKAWGSDRPVPERGPGSGGKGYEWPAHGWHEFRDPNEEWELSFYRYNANVERQVNQNIDSARQQKAFEQWNPNWVRFVESHVGAWMHVNHGLGLYLFANANRRGPTNMHNTAMAVNSMHRIRSAQDLALYNLTLSEEITGFDGGAHLVAWNSDPCWQGVREVAEGLTGIDDWCEAIFAANIVFEPLVGELFRSQLVQQAAPRNGDFVTPTVMGAEEFDYAERDLAYSVALFDLLTKDREFADHNKALMNGWLSNWTPRCIAAARKLQPLWSQPDAKPPRFEDGLDRAKSRFAAILADLGLDIPKELTQ

SEQ ID NO: 41505 - protein, 602 aa, Oryza sativa
MARFGTVPRVLSDALRIQRGIEAGFTFMKDNQPLLAAKAWFDALRIEWAGFTPAPMLQSLMLDVIIKLVKEPAVARNVHALLARLNWIQGNVAQCASHLGLALERTAERDAYKAELMANRAVAFLHMSKYREALECAIRGIEIVERKSADEKPAAAAAAAAGAAAGVCVRAHPNRDVDWDVSHHYYIRSCAYRLTGDAMRAKRDVDRALSLIGRYNYAHRYAADALYEAAAIQLTRRTGAGAGVAEAAFSGSGSGSGSGGQTARYFYEKAKLAEHIRDDGGVVRGTGVASDAKALLVAKFGKTDAPNAAAVKAYKAALEKQLSEYMQNATAPARTADEKCADVSDCLKRVVTACAEIEAKRKALDDAFDKAAAEKKPATAVGGATAGAGGAGGKKKGGAAKGGAAKGGAAKGGDAHAHAHAHAHANAKDSDPNSAENTVSAVAEDNMFLSRVYAIRAWCCHAAKPADWEQSATSAERALALRPYHAENYFLLANATAGWGRALAPDAPAPAVAAAAAAPSGDAKDKAPAAAAAVAPATAADGKAAAPAAAAAPAVDTAKEKERAEQLMQSSALIAAAKNVVEAGLYHQPKHVDLLMLKQKLA

SEQ ID NO: 41506 - protein, 609 aa, Oryza sativa
MPLALSLGVVLLQALFTCTTYANTSRFGNARILERQSELKESYDYIIAGAGTAGLTLADRLTAYGKLTVLVVEYCYPISNQTIARSDGRNFADPGIFYNITSVPQPSMNNRTQAVRIGCCVGGSSAVNGMVFVRGTKPEYDGWAELGGPNSTWNWEGVLPYFRRASHLNPPTGEMTRNFNVTWDPEVWGRDNSTHLYASYPNYGNPAMIPFYEAAAAMPGMPIPLDGAGGKSGLFWNPTSMDNERYWRSYSRTAHYDGKVNTRDNYDVITMHKVTKVTFDNDLRATGIQMSPRGSLNDTLTIKANKEVIISAGTVHTPQILQNSGIGPKDLLEEAGIEVLVDLPGVGQNFQDHAYLSVGYRWGAGRGPTGPNITQSGNPSTVAGPNLGAWLGLPSMTNTSSQLATAYESQDPSAYLPPNTHSTVLEGYKRFQKLHANLLRSTNANWLWLPLSGNPGGIVMSMHIVSHGTINIDPKNPQAEPTVDYRALSNPIDLEIMLENIRYMRWFMASPSFAPYAPIETNPGINVEGEDLKAWVRRVLIPTNFHPIGTAAKMPREWGGVVDEELRVHGTKGLRVVDGSVMPILPGANTQQPVYMLAEKAADMIKAAQ

SEQ ID NO: 41507 - protein, 690 aa, Oryza sativa
MYSVHVHPHPHSHPLQNMSNGGIGNGIMDPSGTIDPSALNAQGLVGPPQPVAQQPARGLKRSRSPDNSYGDVHAGDDDDGKPRKRGRPPKGIKGTFAGSPGRASHSQPPTPSHQGIAPPVQTPQLQTTSLPQASPPRASPSAKSTPTKPAVIKALPTVRDHTTDQLNPEGDEYIPREIDEAGERKVTQTGHPLDGREYRCQTFFVPNRGDKLFMLATQCARVLGYRDSYLLFNKNRSLFKIIATQAEKDDLIHQEILPYSYRSRQIAIVTARSMFRQFGSRLIVNGRRVRDDYWESKARKQGFTEEDAAGEKRPGAAKAGEAAAAESASAMAFAHPGAYTGNNQDYLGAAVNPLQPFGGLNPAPGSLPTVGTDAYSQRTTTDLQARDYSGVQRPRHDLAGVPYQDLSRPTPSGEILNQAAQTAELNKHLEQQRKNRKEYLDNIWSRPHEPPTPANRPGTAEGDQVPQVSQAVQSPRAVPTSVTMPSNQYGISAQTPQRPGQQMPSQAYRQQSLPQNNMVPSPMAPQHTPLRPDQMHRRPPSIGMPQGMTSSGMGPSGMLPGVQNQSHGYPQSHMWQGPPQPSPLSQQHNMQQYAQRPPQQSPLPQQSPMHASPQLHHTQSSGSMHGTPVPQYQTMGAMGDPGYQNMGQQNPYQPSPSPHPFMQHQSTAGQQPAMSGWAPQQTPQQGWQSY

SEQ ID NO: 41508 - protein, 850 aa, Oryza sativa
MEDEMDLIDLGEAVAEPELEPEPEPEPEPVIVPEKKSKKLKKSSKSRSMPAEDPPPPPPPEPEPEPMVEDASAERDLLDLDDPPVDAEEDASKLPTPPPEPVREPKSESPKKERTKVVRSGTAGSWGFWGAGAAAASTRTKPRRTSGAGDDNTSSAAGGAKPAMVRTKSVRTSSTRDNDTKSRSSGSDKMSMAKSPSVSRSKSQRTSSGFGAIFGVAPPPSRTKSQRTSATPRNLSRRSSMDQDAAMMSPPHTDTDVKVSSKAAKVMGMKSASRRSSTREKGKTRAVPDPYPIDDDLDGLLDEDSPTPTPRPEASRRKSKRDSVQPAEVLTAPPSADDPVVPDHDPMEVEPGLAEAEAERPRRERERDRGDRPRRERGNSDAINTMAGVAGTAAAVSGFKSMFGGFGRKKAAPPPEDDRSARRRSAYETEDERRRRKRSTTRGGMTEDEAKRLRHERRSVRRERSSRLPDGEDYMVSGGASGQPKADDDYDAEREARRAERRARREAEKGSRRGELDEVEAKAERRRDRERERGGDGGNTLAEKKARQMAELERRNKEAEEELRRIAEKEERRKLRAERRPTDERDREHRSSRRKEKDRESARPQNDRRRSHMDDDPERRRRHEERRAARRASEYPPTNGDVPINDYFDERNGTVHRSGTTKRSSRAAREEENQPYINRGADKTSSWVESLSNEPPLPPPISETVLDPVPGARDEEADEITASQDEDIRLRIAGRRSKRDKERGVEREHKDKDRGDRERDRERAHRSDRDRDRDRERKHARRQSHYEGTTRGADEERERKRESRRKSYAPQMPGAYEDQPVRTWDGRPAMDAPSQGAKRGSWFKKIAGGF

SEQ ID NO: 41509 - protein, 700 aa, Oryza sativa
MAEREEYAFQAEINQLLSLIINTFYSNKEIFLRELISNASDALDKIRFQSLTDKSVLDSQPELFIHIIPDKENNTLTIQDSGIGTTKADLINNLGTIARSGTRAFMEALSAGADISMIGQFGVGFYSAYLVADKVTVITKNNDDEQYIWESQAGGSFTVTRDTEGEQLGRGTKIILHLKEDQLEHVEERRIKDLVKKHSEFISYPISLWTSKTVDKEVSDDEEEEKKDDEEEGKIEEIDDEAEKKDKKKKTVKEVQHEWNLLNKQKPIWMRNPEEVTQEEYAAFYKSITNDWEDHLAVKHFSVEGQLEFKSILFLPRRAPFDMFDQKKKPNNIKLYVRRVFIMDNCEELIPEWLSFVKGIVDSEDLPLNISREMLQQNKILKVIRKNIVKKCLEMFGELAENKDDYNKFYENFAKNLKLGVHEDAANRAKLADLLRYHTTKSGDEMTSLKDYVTRMKEGQQAIYYITGESRKAVENSPFLEKLKRKGYEVIFMVDPIDEYAVQQLKEYDGKKLVSCTKEGLTFEESEEEKKEKEELTSKFEPLCRLMKDILGDKVEKVVVGDRVVDPPCVLVTGEYGWSANMERIMKAQALRDNTMSAYMTSKKTLEINPNNPIMAELRTRAEADKSDKTVKDLVLLMFETALLSSGFTLDDPATFASRIYRMIKLGLSIDEDEEPEAVADDLPPLEEGGDEGSRMEEVD

SEQ ID NO: 41510 - protein, 647 aa, Oryza sativa
MSCAPGANAFIEKYFLDCVYNLRDYIGFCLGLAAILFWVVAQIPQYVKNYRTKTAEALSPWFLAQWLLGDTFNLLGCLLQGQQLPTTTYTAMYFVVADVFMMMQYIYYGALQRRREKLLQLQARRRRHHRRQPQQPSSSRSRTPPASQQRHTSGDEGKHHAWQHQPQQDRPQWQSNARAGQGDLEYGIDGSTKEQTQQCVVQQGAAESAAIQDQQSCRAGTSSTEVAACVPCSSGISSSIWHCSAEAAAAAAGASSSTLKSGCGPSSMGASRSVVAVGILVSLGLVSLLVPANSTHGFFPSSQTAVDVAAAAHPRSLEAGMPSSLHSLHTDSSSSSNSSSRSVPLAVYAGHVTAPVHSTGDSSSSGGGGGTNQAGGGQEPVDPPPRDWAFLIGTGLGYCSSLLYLCSRLSQIRKNYTRKSSEGLALTMFMMAVCANLCTGVGIVMRTFTWQELKEQLPWIIGSLGTISLDMVILWQSLRYGNKAATGAATAVGNVAERQHLLHAQHYHHHTHHEVTHHLNQQPQYRPQHQQHHGLPRPGHVAAGGGGGEAAGGGSSTAAAVTAVLFYQQHASGAASSSSGMAIPGVQVVGAASRGGYDSIPMLSSSAPVAPGWGGLSGSTTARRHAVAAAADHAEQSEVFAPLLQTT

SEQ ID NO: 41511 - protein, 820 aa, Oryza sativa
MWSKLLVVACLAAVVNADVYMQYPKGSNNRLNEANRGRNNANRLFDSQNNNRGGYNAGNLYFYAGTTMHIEWTNQHSCGGPNNHCEMILQYMCDPRLRDGSTTNTIPTTAGADGNPTFGRHESFDYYTNQCLYRSRNRGLFTANRNLQTNNGRNGAIYTRQNEDGTRYGYECPEERDYYPYWHPTQWRDIAIFTNQPEKCPSYIAASQNVAERYYCQAPSDWIQDQASRGRNGFIPINGTECIRIKSLYQVDQFNNTVNAQWTFVPSFGIAPPYCTGNRFTRDNHLGNVEEGFPNGYNWTIPADVISERCTLRLRYNISTSDYAAFADINSYDANGAPISAVAAPANLTYLNNSRTGNTAPTANRDPAYIDVWSKYGLQWTDVNVSFNRQTNDPNGAAIKNSRDYVHKDSPKVDIFGNNLIPKSQSGDPNQPAMIRLQLAINTDQFGRTFEDRSHRFAIRSMPDNLQGVRVHNLQVKGKRGNIVQNFPATEYDFWPKRLKVQNGEYIHFQWTGSNNNGDNNAGRGKAGTDRHNVLLLRAPVYPYLQRTQERNDARNAVPTVGALGATYPTRIDGSNATFLGFGRNDLKSLALWSTYQYGGDMDQGDDAGTYFDLGPRQVNLNGIFNYACSRNNDFSNRDQKAQIIVSNEAAAFQSLGAAGGVLTADSGASLEVPAGAFTTQIVVTLLTAPSSTSSSFSGSVNSDYVTVIPINLPLAPGATVRINVPYQNKPLVIPQMYRSDSMNGDWSTVDGASYSGGVASADVTQGGTYVVQTQVNWGAVVGIIVGAVGFVGIVVGVMYWRFKKQQSGGDTDAKLPAKV

SEQ ID NO: 41512 - protein, 652 aa, Oryza sativa
MSDLTSGRAANGGARTTGGPVPVTQADRSQIRTPQMIMNARRQRQEAEEQRKAEEERRRSAERRAQAAGVAGTTSTEPGAQRLPQPGNARPGDQYAQYPPSNTARQPERVVSQPGQPQDTTAGASHTRSRTNSSTQQQPRPPQANVSATMPSAESRRPPPVQQHARRPSGPAGSSQAGPSSAAPRQPSAAGSTAGQPRDSAASSFPHAFERWETLSSHWEGLTSYWIRRLEQNTDEVRREPLAQQMSRQITDLSAAGANLFHAVVELQRLRASSERKFQRWFYEHRQDQERAQEREAELVKSLEREREGRLEAEANMERMATEKKNAERAVTEMKRELQISKEEARRAWEELGRREQEERDRTLSLREGQPTLVGGVQVVPRVQSGGYSGGQGAGSGGIEQHYSYEEGQSPTDTDPFTESARPVYRQPDAPSLAHGTYVPAGAASTSSARPSAYSTALEQSQHPAPLDLPYRTTQAQQAPTQPTSSRPEAFYQQPGSYLHQEQETPIPEDEQSYVTSHGDVSDGEQEYAIDESGQYMRDADGRRIPFRSVRSPASDEYDVQEDRRRELEHLQRYGTAATSSGGYVTSSSAGPSHGGGHVTAGQPDYSGDGYGDEWVGMRHHHPTRLSDVPEEDERSRTSPSRASQASRGRLY

SEQ ID NO: 41513 - protein, 797 aa, Oryza sativa
MRLTRLGSRCGHQHASSVSCMPCSSLDHRAATAQTRTAAWLLQGCSCVPRPMYKNWQGQAVAGVVRSSNGTSASTTPAATAAAATAAMDTALEAAAGDDLDPHRQWEEEIEETLKLVRLLPPSVRGVLEGHARLYELLEVVMDLGRPPLARFPGHDEPLSSEPVTQDDLDYATQQVGEFGGDNRAGIDATLHRISCLRNRAGRIVGLTCRVGRAIRGSAGLVADLVAGGASVLFMGRPGVGKTTAIRELSRLLADDLARRVVIVDTSNEIGGDGDVPHCGIGRARRMQVPDPEQQHRIMIEAVENHMPQVVVIDEIGTEAECAAARTIAQRGVQLVATAHGNELQNLIKNPALSDLVGGIQSVTLGDDEAKRRGVQKSILERAAPPTFDVAVEMLERHKWHVYADVAAAVDSLLAGQNPGGQMRERAADGSILKYSCSKTNPAATAADARKGGSSNGGGSQRVLPELRRPSGSAAGVDAADADAASPGGFVRPRLFAAADGLQDAAAAAAAGTVTRRGRAVRLGCASPEGALLRLCCADLDEERLWEVMSAMGLHDKVYLAPRPAEADAVLAVRSRLKTNTTLRAASREAGVPVYAIKSSSSSNLVRAFRTLLGLEPSAGGLFGSQPGSMDEADVWGGGGAAAAPEAGAGFDAGLFGSPDGSMDTMAGSNDDEPSDDEQQLSSSSLSSSSSRGSSGGAARALAVEEEGLEEARLAVEQIVVPLQQPVELLPRPGHVRRAQAALCGRYGLTWQLIGSAAQARLRILPVAQQPTQPGAGGDAGGVLQTAPSSSNPQQES

SEQ ID NO: 41514 - protein, 1053 aa, Oryza sativa
MRVATVLGFLALAAMAVHAQSTTAVVTNLPATCQRPAFVLDTYAPTTGAISITESGTTWIVYGTTNTIQWYNASCVMQGLPTPATWSATGCVYNVSSMYPVTALIKTGTNMFWAVANDTLTLYTAQTATTTFTVSGSSFDLAALSYPSNPSLRPHTVWNGFLYIGSRNVNGTGMSAVRKIDVSSGKVSWTAWSPNPQSNYPVSIATLTGGTTVAVAQSSTPQDAVFAPFDDSTGAAGNATLSLTAVEGQNGCSATSGGTYNCNIALFTTTTVNGIFYIASTTLSAQLIAVDFTTGFWATAQSGFGGSNSNVLSAFGTWILLAKGGSVRLIDTTKIPVTALTKTGSVIPSASLTGSLSLPGSYTPYAQAVIYSNTTNTFWLVHTAGIATATVADFQSTTTTTATAWWWYWFPFASGTTSTGYTQLNLQGAWVDASNPSMLYATWGKSFTGYTATGSAWGFNTTSKMAAWSFGDNYDARGPAIWVPTNDGGLWYGVANAATSVYGRRVLLAWSTTTIASGQMLLAASSSGTWSSDTMHLSYSNISGLLSVVSYSDNTLTLYNATTMAVNASYTTTSSSYSVRPSMGVITVGTMHCASTYYNLRCVDWVSGASSSFTLSSNSIAGQPIVVGNRYVIARDSYYTVSVLDMSAKSPTAVTQSVSSGSGYISAQPAGWLATDGSLVLAVPMSSTMMRVFYGAETASATSVDIATSGTGLTTATPTFTTNALAFGGYLWVAGNVSKTVATGSNSYTYTYYGQITRIPVSTATVAKAYTKAQASLWVMQGTNKVGNMKNLFASPLFPTMLFTLGDTFTGWDTATGNTYFSVAPQQGMFYWTASNSEGNYDYFPTVDPTNRGVVVGMGNVSNNIFLGWAVLSPLDGTLMRFVPAAANGASGASWSPQSKGVYNGNSLIISSSTHICEDATTYPWTTAISPSVPDYVNARMCTTVNGLAPAYGSVAIGDWYFVLMNGILIKTSRLVQFYQSMVPFTISGSPGGAGGNAPADDDSKTPVIIGVIVAIVIVAIIVVVVVKKLGSGGGSGGSSQGTNSNEMGGKGV

SEQ ID NO: 41515 - protein, 305 aa, Oryza sativa
MCEEYQLVKHCYELTPAYVVEGPKTCPSTQELFFTLQYQGAGEKHKILRQCRPITNFAKTQCQGTLDPHMKSNKGQAFEFQHTGDFKFIITSDGAFECHVRLQHMVPGTKWTGPSAFACRVNGVDIFTWDQGSFRVNGHPVTVTATSQYNLPEGGFIKLESSGKRIRVVSPNRAELFFDLAGTYTNGNDKIQSANFYGLIPSDLGVSGLCAGGDSKTIAHWLNDRAYGLFPFTYEAKVLGSAFPVPTFTAEETKNAEALCTPIFDPKFRKLEFDNCVDDVLNTNFVNRDATLQAEKDAALNTPNK

SEQ ID NO: 41516 - protein, 656 aa, Oryza sativa
MAATAIATLLGPPEARRPSAAVAAAPATTTGDAFLDLMDANFNKPAPRKALTENLSPTFVSSGDACLDFFFHVVPGTPSAAVASLLAAAWGADPATALRLVANLRGVRGTGKSDREGFYAAALWLHSHHPATLALNAASVAAFGYLKDLPELLHRIVNGGLSTRKPGKKARLAAADGIGFIARRGRGRGRGRGCFRGRGRGFARGYHTSSRKQSRGVGSAEERVAASLERDGRLAAKAAVERRCRRAEAAARAVERYSRDPTYRSLHDRTTDLFADLLRDDMRKLAEGNVHEFSLAAKWCPSLDKSYDRSTLLREAIARRLFPKGSLPELAADLPDAHYAYRARERLRKAALVPLRRALKLPEVYISARAWESVVYTRVASVAMKNYKDLFLKHDADRFNAYLADVKSGKKKISAGALLPHQIISSLDDDGGGSGVADLQWQRMVDDMRALGKLRNCVAVCDVSGSMTGLPMDVCVALGLLVSDLSDDPWRGRVITFSESPQLHHIAGEALSDKARFIREMNWGMNTNFQAVFDKILEVAAGAALSPDKMVRRVVVFSDMEFDQASAQPWETDYEAIVRKYTAAGYGAAVPEVVFWNLRDSKAVPVTSGQKGVALVSGFSKNLLKLFLDGDGVVSPRAVMEKAISGPEYDKLVVFD

SEQ ID NO: 41517 - protein, 388 aa, Oryza sativa
MAPRTLPQRPSSRCAWRPVSALAALAVYLIGMPGSAMACIATGYQVKPQLNPKLTVPAFNSDGTFSRYGPSQVFTHFGFQLQQPPLKFANSTRSTFSCVDSRGNTDMLGTPGGDLAEIVAAAMAYFKLQQKPVNKEDVSTIFNAFMARIASPSRPIYFHTDDSRLRQMFVALKNASVNPQPSKFPFKGPDRTKNAALAQKWMDLLLQPQYQGCGHIRLMLQNTTAPYYSIKLSGDKVANCVGVPASDCISSSEVTAAVIDNFFRYWWWTNLGSAERAKVTLVVDLGPLVGKAVAIVEGTDKNGSCRDMSPLVRPNIAGSTLFVYHGKAVSEFRAYAAPRLQVVPADKGAQYGKLWEDVGGLQLGATLTYLPPANDVGIFNVKVATKAN

SEQ ID NO: 41518 - protein, 680 aa, Oryza sativa
MAPPPPSPPCRPRVKPERALLCFSLLLLLTATTANASITDCPTTSSTNSSHVDDGAFGANLRALLSSLSAAAAASSSGFAENATGAAPDTAYGLAQCRGGIVGGGNGTSCRSCLDDSVRDAAKACPGEKSAVIISDYCLVRYSNASFAGAADERTVKLWWNTDNATQPERFKSLLGTLMGNLTDAAARASSPLMFAAGETDLPPFTKIYGMAQCTRDLAAGDCYRCLVGAVNNIPKCCDGKQGGQVITRSCSIRFEVYPFFDAQAAKAAMSPAPAPAPVTTPTGVNGSNHTVSKSVIVPVTVGVAVLLVVILLLIALCLCKRNRKPHKHMMIGSVDLGDEDEMRGSESLLYDLSTLRAATANFSEENKLGEGGFGPVYEGTLQNGQEIAVKRLSATSHQGQLEMKNEVVLVAKLQHKNLVRLLGCCIEEREKILVYEFLCNKSLDTILFDTSRQQDLNWEQRFKIIEGIGRGLLYLHEDSRLKIIHRDLKASNILLDVDMNPKISDFGLAKLFNMEASVANTSRIAGTYGYMAPEYALHGIFSAKSDVFSYGVLLLEIVTGRRNTCLHDSEDLLAFVWRHWSRGGAGELLDGCPAAGRRPQELLRCIHVGLLCVQEDPQLRPGMAAVVVMLNSRSVTLPAPSAPAFVSASRGIGGSPPPAAAAGDAPARSTDHEVPTAAR

SEQ ID NO: 41519 - protein, 724 aa, Oryza sativa
MAQTRLLPLTPNQKRAVAVAVVLGGLGGAHQLRQWVKAAQAKQKQLVKDIHGKQTARGKSSSKVAVNEVFFKRLCTILSICVPGVFTREFFLVLVQGGLLVSRTLLTDYISRVEGYCGSALTSLDFATFARGVVDFALLGIPAAVVNSGLKFMQKNLELSFQSRLTLYLHKLYTSNRAYYAASTLGGLTHADQRITEDVEKFCFSISDLYSHTFKPLLDVLLFTRSLSRVMGYKGQIGLHGYYVAVAWLLRALAPPLAQMTAQESALVGAFRAAHQRLVAHSEEVAFNDPPGGAAEQLILNQHLARLITFSRLSSFQRFLQQIADGYFVKYFASCVALLVYAGPIYFMDPSARGDQGQLTADYIRSMRLLQNTSRGVGDLIMVYKRMTSLAGHTSRVAELIEQVKQMSSEDTEHKELFKRNLSHSSLAALAEAEEELQDGFTYEDHHELQPMSPVSPKRLTGDIIRFHRVALDAPDGMPLVRELSFEVHRGCSVMLMGPNGCGKSSLFRVLAGLWPLQAGEITSPPKQELFYLSQRPYLVVGTLRDQLLYPKPPARVWQGSKPEDKQLFVSVAGEEPCYTNRDEELAACLAAVELDYLLARGQGWDSVQNWQETLSGGEKQRLAMARLLLHKPAYAVLDECTSAVSADGEVKLYEACVTAGITLLSIAHRPTLKRFHQLVVHIDGTVSTTGKGWWTEVLDEKVLLSSSSAVALAAISAAGGQRP

SEQ ID NO: 41520 - protein, 661 aa, Oryza sativa
MALLQRSRLAASGLSRCRPGLQSVRRYQSAALASTISQRDAKSSLSLSASTPKGSTALHNVSPTAIMARPYSTASEDMYTASFAFFEAIWDAGITHCFVNLGTDHPSIIEAMVKGQREKKGQFPKIITCPNEMVAMSMADGYARLTGKPQCVIVHVDVGTQGLGAAVHNASTGRAPVLVFAGLSPFTQEGEHRGSRTEYIHWIQDVPDQKQIISQYCRYTGEIKTGANVKQMVNRALQFATSDPQGPVYLCSAREILEADLKPYSLKQEHWESVELGGLPTSAVDRISEALAGAKAPLLVTGYSGRNHKIPAALVELADKVKGLRVLDTGGCDMCSPADHPAWLGLKFGVDGAVTTADTIIVLDCDVPWVQTRCKPREDAKIFHIDVDPLKQQMPTHYIQADARYKADALTAVEQISQALDKKEFASKLESQAEAEKERAEIHQNKLATIAKAAEPLADGSFGTGHLSKKLKDLCPEDTIWAIEAVTNTGFVHDNVQPTLPGSWINCGGGGLGWSGGGALGIKLATDAENGGTNKGKFVVQIVGDGTYLFTVPGSVYWISRRYKIPVLTIVLNNKGWNAPRRSLLLVHPDGLGSKATNEEINISFDPVPDYAGIAKAAAGGDIHAARVDKASDLESVLKEAIAKVQAGQTAVVDVKVAPDC

SEQ ID NO: 41521 - protein, 611 aa, Oryza sativa
MVVQKNQRKPGEASWPKVVLKKWLNLKSKDSEFNADEEDDDDGSDVDEQENCGCDGGEERRRADGDLADENVEGGAPYRLRRRNSETLRAQYINTKELKLCVGTWNAAGKVPPGDLDIADWLGAGAGEPADVYVLGFQEVVPLNAGNVFGAEDARPAQAWEELIRSALRRARPPASSRPRYKCYSHPPSPSRGDATAAAAATDDDELFPGTDTDTDTNTDDDSLFSSPAESEQQNVAATPRRLTRLNHFTAAADAAAAMDDSGDEHQQRTLLKTLSRSDRVGLAWPEQPLDLLAKHATATVSTTMPSSRSFRTYNSFRPSRAAAAADQSNDDLAMIADLVMDLAAARKRRSPYVRIVSKQMVGVFLTVWVRRGLRRCVHNVGVSTVGVGAMGYIGNKGAVSVSMSVYQTMFCFVCTHLAAGEKPADLHKRNADVQEIHRRTHFAGVGMPRNIYDHERIFWLGDLNYRIDVAYERAHELISTMDWTQLAEKDQLKRELRKGRAFDGWTEGVLEFAPTYKYELNSAKYIGDDQRGGRRTPAWCDRILSFGKGVKLMSYGRAELTMSDHRPVVATYAAEVEVFSSRKLQRALTLTDAEVEAGTVVAVPDHLAGF

SEQ ID NO: 41522 - protein, 753 aa, Oryza sativa
MISEGGVTALVVICVAIGFGFALLNFLATRAVKVDALAGPGEASASDNLLVHAVQGNVAEKIRKIAGKISTGANAFLFREYIYIGIFLVAFTFVLLLVLGLSTKDWSRTGLTIFAFILGASTSVASGYAGMWIATYSNQRTCIRAAHSVGAAFNTAFKAGLVMGFFLVSAAIIMLYILMCICKAYYTNALTVAGAADTTAMFEAIAGYGLGGSTVALFGRVGGGIYTKAADVGADLVGKLENGMPEDDPRNPAVVADNVGDNVGDIAGMGADLFGSFAESACATMVVASNSVGPNGLSMNWASLCFPLAISSTGLLVSLVTSFVATHLWQVRDVHGIEPSLKRQIGLSTIIMTPIAFLCCYYFLLTEGTFSIGSGDAAKDVKYWYVFFCVACGLWSGMAIGYITEYYTSHGWENGPVREVAEACKTGAATNIIFGLALGFKSVIIPVFCLAITIYVSYSLAGMFGIAVAALGILSTLPTSLTIDAYGPICDNAGGIAEMAGMDKGVRERTDALDAAGNTTAAIGKGFAIGSAALVSLALFGAYVTIVKLDAVGVNLLKPFEFAGLLVGAMLPYWFSAMTMKSVGLAANGMVIEVRRQLREHPEIMAQGSEVEPDYERCIAISTDHSLREMMPPGALVMLTPIIVGFFFGTHALAGVLAGALVSGVQIAISSANMGGAWDNAKKFIEGKGLGENLGKHSAPHAAAVVGDTVGDPLKDTSGPSLNILIKLMAIISVVFGPALAKFDKGLLEQWFS

SEQ ID NO: 41523 - protein, 723 aa, Oryza sativa
MGPYPEDKPKGNEVRFAAVQVEAVVSGVQPGLTMVVGPPGTGKTDSAVQILQVLYHNCPGQRTLLITHSNQALNDLFAKMVARDIPARYLLRLGMGERDLDVDDDFSRAGRVNNMLARRLSLLAEVEKLSNLLGYPHAEYTCETAGYFWLLHVLSRWEKFSAAVSAPDRQGQPGMVGELFPFKEFFADAPQPLFKGQNYDEDLEVATGCFRHMRLLFQELEETRPFELLKGQADRVSYLCNKQAKVVAMTCTHAALKRREFLNLGLKYDNIVMEEAGQVLEVETFIPMVLQRQEDGVARLKRVVLIGDHHQLPPVVQNMAFQKYSHLDQSLFARFIRLGTPYVELNAQGRARPSIASLYNWRYGGLKDLPAVTQVPAFLAANPGFGYDYQLINVPEYNGRGESEPAPYYYQNLGEAEYVVAVYSFMRLLGYPAAKISILTTYNGQKDLIRDVVEARCAQHPLIGRPHKVTTVDKYQGQQNDYVLLSLVRTRVVGHLRDVRRLVVALSRARLGLYVFGRQELFANCYELKPAFDRLLARPTQLALAKGESYQTCSRALGDLVPLQLISGPQEMLGLVQAISREQAAIAAAQAAASATAVPPPRPPPGSPPSPPPAAAAAGREPGREGAGAGDAGSGAGTDAAGVPASGELPAPTAAAAGAAAAADVAADGSDAAAAAEAADAADGGDAPAEAAAAGGGRPAAEPVDGAPVVAAAAPDGGDNAAR

SEQ ID NO: 41524 - protein, 835 aa, Oryza sativa
MMEGEQQKYQKEGPPNLIEEWRMKAKEEEKENAPLLASTEQDEEETGSTKPTPEERRRAFVDTPRALGFCGSVASLLSSVPSFASSATISTRRRARPCLRRWRFSFSRWPLRFLGLHDQPLRKQKDNPPAAEEEIEEEEEEDEQIGEDVVQEETKGRAVLLINLLVALIFVNAFVLSLRLWIDGWHHLSSWQSLFSMSVYGCLLWLARSLNDHGRTSAWVSCLYFNLVLIYRCLLYGVRTETFSWIAMMPLVLFCLVGPQAGVVATFGLIGESLLLYALTPDDAHNGQAFDLACVQLKQEQGIVFVPFACAKLDGHGAHIGRFQASLQELLTSKILLIAFMGVFAYVYESNRRSALRRMTVALQQKERVNVSLQQATKAKTAFLANMSHELRTPMHGIIAMAKDLMEMPLSEGACESARIISDCADHLLGLVNDILDFARIESNQLELESIPLSVCEEVDKAVSLHTIMAKKKQVALISEIDIAQPLRLGDPLRFRQILHNLLSNAIKFTPAEGRVMVSASTGPADPEIVSVSVADTGIGIPPQGLINIFKSFSQLDASVGRKYGGSGLGLAISKKLSLAMQGDITVESEVGKGSVFTFTVRLPLYQPKTPLALRRTHPTTEDDTTAAAIKDLLHGRKVLVVEDNIINQKVATKMLTSLGCSVTIAGDGGAAVALFERGTFDVILMDVQMPIMDGFQATARIRHIEHHRAHTWEEYRCEEKPKSKELEPEEDDENENENEDEKEAEIGPATDETEAKRATHGTRRVPIVALTASATRDYETECLEKGMDRFLTKPFRKETLQATLIGLFRPPPPPSAPSSSPPSPAPASPPSSPH

SEQ ID NO: 41525 - protein, 334 aa, Oryza sativa
MFKRSFRSSNKEHSQGGSGGMDAQHRVDKSSRLTRKGAGGNAGSGRDPQKLSKLQRSLSSAEEASAAASKTSSQWKQGASPKSLAPSPIVTLAIGREGRLFAAHEDVLCQSPFFEALCQEQYLEAQSKRIALPEEEPEVFSGVLEYLYKGDYYPRLLHNKHRNSWELEDSDPRQRHTPHSSPNPNKNGGGRAGSASSSPYVPSAVEATVYISAVGQHLLRDTVIYCAAERYGLEELKRLALRKQGLQSGIDVGTILRSAQYCYAHTPDSDSRLRAHYLALITRCRKTFKRSGTMQAEMERGGEGSKLYFDLFVALCNHLDDVIDAGNARSPRNI

SEQ ID NO: 41526 - protein, 1060 aa, Oryza sativa
MLFPRRLARQDCLIGRDLAARLDNPLSLSSPPPSHPPPPPTGSMSTQQQHDSALTAVVVAPTRTRAGKEPAAAHDAPFLSLFESVVTAYPPVLESLLAQIPTAALLDLYHTSRHLRDFLRNYPLAWKTLSFRLPQPAVTVGSPGNETPDSRERASKAYSFDALLKQIIAPNGTRLTSLDLCNTAVTGIALVGSVLAPRISTLQHLSVRGCKNVSIKYHIVPFLEPYTLHDAPWAQKDLALKSLYTYRCRHHRRRPYLPSSLIRRDSDSDPTHQLIEICHQLGIWTDTAWCPSPDGRCFRRKDYHAGRAGPQNMEVWVPFDRLWRSSNRIGAVEGTSVLGDHDGRLWEISETGQDGEPLGTEQGPFQGEGKHVPAHLRKSHKVFVEQVKCAQCSDVILERCESCSVRMHCMGCRKTLCASCAFNRPIPRKRAKTRHFANLAFGSSSTLGGTLGQVAGSLAPMEDRSNEEKAERNRFWWAPGSTRSPNLMNESANDDDSSDSEDGGNFNNGLPALQANREPPKLNMSWCCLEPIFSGGGGIAVLGTGLGGRGADKIRAAPLPRTKQFEDPDFSNSLRPVDYIRELKNNGLYEYVLGEDVDILSYLKQDSLDLQQQTCPRGLCHDCYRSFRWKVSCRACKNPICKEHDFRALKVRKCGYRDMQTERDHVRTHNEPPQRLVIPEFNPNRASTPDPERTPTASQQDLFSADNESESSETPMSQSQILVASSIPGSVEMTATTSFNSNITNDPFAHASSLPFVPVSSARPRSFSVSGVRGRLPETWAMTQKAPRPQIPNSITNPLPLPCNPRHPVQWEGCGAYFCQYPRPVGDNRPQCPGILKECSECAVLVCDQCASASPSCTCTFCTVNYHCPTCTRKPSVRIKCRLDAEVKAKREAELRAMAKLEKDREERGQADELAGAMNEFFSALYVSDMVSGFDNRVSDASDLLGAGPSGSEFPLASPDSITVTTEFGVVEESGTVTIISSSGPSPHHQAFDNDTEDENNVEMTEDLNDELGVEHMQDVSDENDEFDDDAESSFIEEFIDDDLGIDGGMLTPTATVAAA

SEQ ID NO: 41527 - protein, 658 aa, Oryza sativa
MANWFSRAVVVSVVCAAVVLGAADDKSSKVEPPCVGIDLGTTYSVVGVWQGGEVVIIPNEMGNRITPSVVAFTETERLIGDGAKNQVAGNPANTIYTIKRLIGRKYNDPTVQADKKLLSYNVIGDKDGDPRVQVMFKGEKKTYTPEEVSAMVLQKMKEIAETSLGKTVKNAVVTVPAYFNDAQRQSTKDAGTIAGLNVARIINEPTAAAIAYGLNKAGEKSILVFDLGGGTFDVSLLTIDDGFFEVVAANGDTHLGGEDFDNRMMKFFVDGLKKKKNIDVSKDQTALARLHKACEAAKRQLSSQLEASVEVDNLQEGFDFSEKITRAKFEELNMDLFKGTLTPVQKVLEDAKMKKSDVDEIVLVGGSTRIPKVQQLIKDFFNGKEPNRGINPDEAVAYGAAVQAAVLTGESELGGKVVLIDVIPLSMGIETVGGVMTKIVERNTQIPVKKSQVFSTYQDNQPSVTIQVFEGERSMTKDNRLLGKFDLTGIPPMPRGQPQIEVTFDVDENSILHVSAAEKGSGSKEEITITNDKGRLSEEEIERMVKEAADNEEEDRKMRENVEARNSLEGVAYQLKSQINDKEKLGGKLSAEDKKVVEDAVKEALKFLDDNPTAEKEEYEEAKNTLTSKTNPIVSKVYKDAGGAAGGAEEASESTDDL

SEQ ID NO: 41528 - protein, 383 aa, Oryza sativa
MACLFTSTTPPAIAANYSRSTVYRCKCTAGQGGTLRGRIASQHRQQAGWQVQTRALSAATPSSRSLPLWEQLLSTAANRPAACPEVLYGEYATHFGATIVAPQEAADVQALTTLGLVRSRVVKNKRGYWRIRHFQPTDLHAVADLQAAAFHESLPVGALDKLAYTMFKAEVLDALKKKVGVLSDHGFAMMVVETCQLGSAGCSSQDAELCPTDSDSDTDSSSECDWESAVWYGDQQAASWPAGGGSSSSSSSGGSLQDRDCMARPNSIMGVVEVGVQDEADVLQHLAGHSGTYAYITSMAVAPHLRRCGVGRALLQAAEQQAANWGQDVVALHVYDGNIAAIRLYEKHGMRCCGKDPAWKAMIGGKVRQLMVKPVRSAMPRSS

SEQ ID NO: 41529 - protein, 773 aa, Oryza sativa
MSSMNSRFKALGFGKRRSTASIQGPEAPTSHQQIPQQQQHHSNTPHPPPIPPNSSGPPQLPPVFPVRPGPAPSIQSSSSQQSLAGMNHPGAGPRPPSYTANYPPQPGGPAPPLGRTSPLTNQGPTRTPPSQMVGGPPPINTGAPGGVTGYPPPMGGPPPMTNAPPGYAGAAGYPPPGPPQPQGNMPIPAAYGRNPAAEVEGNSRSKAQLIVGIDFGTTFSGVAFAFATNNEAKEDIITEWPGAGSYTKQKIPTVLYYDQYQKVVGWGPDIADALAPTGYPKPGVQKVEWFKLQLMLSGNTYIDPINLPPLPPGKSEIDVAADYLFKLRQAMRSALQKTLGEVFNREERNIRYYLTVPAIWNDAGKAATRAAAIQAGFLRDENDNRLTLVSEPEAASLFCSKAGLLNLKVHDAVLIVDCGGGTVDLIAYEVEDENPSTVAECTAGSGDSCGSTALNRNFSNILRTKIRKMKLPDGSKTAGRVYAKCIMDFENRIKADFRNNGQKWAVDVGIEAEFPEAGIEEGYMTFTNEEILQCFEPVVNRILELVRNQIIAIQAQNRTLQNILVVGGFGASEYLFQQIKLHVPPQFQSKVVRPMDSVAAIVKGAVTAGITERVITHRVARRHYLMATLQPFKEGYHPEAYRVPSLDGKDRCKFTRQIFVQKGQKVKIGEPVKVSFFRQVAPGATLMYEDILYACDDDVCPEYTKDPRIKEVVTLTSDLSRKNLEKDFERMDTPQGTFYRVYFDIYLTLDGSEFSAELVCQGEVMGRCRARFR

SEQ ID NO: 41530 - protein, 281 aa, Oryza sativa
MQYALSKTCGLGLRGVKTNTLVSSRPARLRVVAALRPGALTPSNLNNEGPKQPRGDLQRVAGAAADYPYNPPSYNPQSFGAPDSSGRIGDAARQSLGKATAAMSRYGWIGFWVQLTLSVVSGVILLFSVAFTSQSGPKASLYLTVVGILAGFLSTFWNYGYQRTATRMQEYLDGANVAKVKKQQVMELIMRGILINIVGMASTLIGISTLVGLLVAKTLSNASVNPFMASAAAGYNPVLALDVFLVQAATNTLLGHFLSLLCSLWLLNVVGEGRGLRFQVA

SEQ ID NO: 41531 - protein, 910 aa, Oryza sativa
MVSLASPRSGRAPVIMSWSGELSPPAAASGTRLLHGDLDLTIHEARGLPNMDFLSTLLRRLCLCLRPPARRPSPGQSRGSVPADEDGRRQPHGHHLLPTSDPYAAVVVAGNTLARTHVVRDSEDPEWYTHVLLHLAHHATGVAFHVKDADPFGSDLIGVAILPAADVLAAAAAPIVRRELPLYRPDGRGRPKPSSAIVITASFVPAGEHQSIYDAEHGGVPAAYFPARRGCEVKLYQDAHVAGGELDGVRRRGVFEPGRCWEDMCLAVLGAQHLVYVAGWSVNTKVRLVREAMSPEMAAKVEEVRTTATDDDDNPVAAEGMSLGALLKYKSQEGVRVCLLVWDDKTSHDTFFLKTGGLMQTHDEETKEFFEDSSVICLLSPRYPSSKLSMAKQKRADCGDDVHAAPEVPAGGHAGVGEHAADHGVPRRPRPRRGALRHAVAQALRRPRHRLLRRRLQPRDPAGGEQGRRRRGGAAAAVARHALPRRRAGGVRRAGELRAAVEEGDEAVQKGQGALEGRRLAQARAHLLDPQPLRLRRRRRRRRRQPPLRLARWSPRLLERSGVPVSGLWISERIASLLGDKKDGGEAPGVRQERDGGAEHSHGVRPGDPVGEALHLHREPVLHRIILRMAILQAPRRCWKSGADGDRAEGGEQDRRRREVRRVHRDPDVAGGGSNLGPHPGDPLLAEADDAGDVRGDRGGDQGGGDGGRGAPAGLPQLLLPRQAGGGGGGGGGLAGAGAQPGGQQRAAAPAVHDLRALQGDDRGRRVRHRRLRQHQPALSRRLARHRDRRRRLPAQSPRRRRRRRRPGVRLQDVAVGGAPGQQRVAGAEVAGVAGVREAGERDSGGELEEVRRRRRRCRHAGAPHEVPGGRRRRRQDQRVARARVLPRRRREDPWLHQQQLLGLSHHVGM

SEQ ID NO: 41532 - protein, 785 aa, Oryza sativa
MAGSFLKAAQSAMSKGLKAVGLQSSGPPPDEKLTRALTRLNALEKVIANMTRGFRVYADTVTRASAQAVNLSTDITRFYNDNPPRLTSVKKYAEAQAKVESAATRLFDHDLNFELIPIFADWSPEVQRIKKQIQETEAARVRVYELKVKVEDMRSEQKKRADKGTASYEGGQALARAEEELKKHTAAYDVMFANAKAATKELMDNRFAALDQCYVRLLELQLDFYKSAANAVAPLQTAVDNYRKRHPKTGYAYAVSPTNANGAAAAAAAAAEAKQAPANDAAAGAQKPSPSPSPPASQRKAAAAPSAQQLSDDELEVPSKAVAKAGGGEGPNGVNSNTSRKPQPAPAAAPAAAATPKPPPPLTTPPESAAEAERKRKLKAQADVFGALEGFDAMRGGGAEKPDPLADMTPHNSRDADLSSLAGFGTPKISKAASASSGFDIFGAASPTARVATAGAVGGAAPIPAKSATLEDNFAFFGAGAAPAKPATPAPAPVPSPQPGASASDALGFDFSGGANARPAAATPKPSAPQQVKPAASGYGEFDSFIGGAGASSAGGVSRQQSSSAAASSSSGGGAEDPDMTLPGELDGPPSEVAARAAASASPLDDLDDEPPVRRPPPPQQQQQPQRPAAAVHDPDDFTSHLRGAMTVEQNAKAAAASALQDYQDAEDARIRTAEAKQGVSQALKDKLYNWEYKSGVQKGIRTLLSSMQSVLWPDSGWAALSIGDVSDDKKLHKFINKARLLVHPDKQPALDRGGTPERLYIAERINEAINTAWAAFQANPKGKF

SEQ ID NO: 41533 - protein, 688 aa, Oryza sativa
MDSFFKQLDKGLDSIAGKIEKMEKKWNEGGVAGGEEGVGDVYSINGSRYRVVKKLAEGGFAFVFLAEQVETGRPVALKRILVQDDEHMEIIKREIDFLKTLSGKEGIVPFLGAASFRKPNRQEVVVLTEFCPRGSVLNLMYQRERNRMTETEILFIFETVCKAVYHMHSLEPPIAHRDLKVENVLVGKNGALYLIDFGSATVVTYDTDKPHIRNIAENDINRNTTLLYRAPEMVDLYRKQLINEKVDVWALGCMLYKMMYYADPFDGKLGILNARYRAPDFPPYTPKMHDLLKFLLTADPEKRPDICDVLEKLGTSVPRIQRKSAPAKQKSPSTRATENGGGEGGAGGGSGSGKDLFAMLDWQKNDEGASSSSSSAAAGQRSSAREARARSPSPTAGADSLISDFAQKATIGNGNAANGNGDATDFFATFDVIAQRQPSPTSSFSSSSSAAASTDVFASSSNNNNNGDDAWGDFSTFSSAASATTPAPAAGAGTSAAAFGGLDSLMMGSPVASPTTAHRGHPEKKDILSLYATAPEPAASPVASPMYGGHAAFAPSAPPMSGGVGTTYNSVPMGMPMGMVYVMAQPTPVGVGSPMTSPLYARAPSPLSAPQQGAPYGSGASPLMAQRAPLGNNGGLTPMSTPPLTPLSTPPLTPMSGRSGPGTSSGPASGGGPAQGDPFADLWKTVNK

SEQ ID NO: 41534 - protein, 500 aa, Oryza sativa
MEEKRKLLVEAVAEVDDEVGEIVMADGEPTVEQLKAGIRRATIALKFVPVFMGSAYKNKGVQTMLDGVVDYLPAPTEKANQALDQSNGEKLVVLEPNSSKPLVALAFKLEERAFGQLTYLRIYQGALRRKDTIVEPLSGRRIKIPRVVRMHSAAMEDIDEAGAGEIVAMFGVDCASGTTFTNGELKYTMTSMYVPDPVISLSIAPKKNTDVDKFGKALAKFQKEDPTFRVSYNAESQQTIILGMGELHLDIYCERIRREFNCEVITGNPQVNFRECLTKRAPFAYTHKKQSGGSGQYGKVVGYIEPIPPKEDGSPSDKTFEFVNELVGNNVPPEFHSAIEKGFKEGIARGELTGYPVQGVRVVLIDGQAHSVDSNEIAFRLAAQGGFREAYRAAGVSVLEPVMAVEVQVPVAHQAAVVGGLNRRRGVMQSVDAKDAGFTIIKAHIPLEQMFGYSTDLRSSTEGKGEYSMECLKHEPVTKERQGKLQEAYAEQRAKERDEK

SEQ ID NO: 41535 - protein, 434 aa, Oryza sativa
MKHKWAFPFNQPVDYVALNLPTYPQVIKQPMDLGTVKQRLADNYYETVEAFDADVQLVWHNAMTFNAAGHDVHIMAKTLKGEFDEGLKKIMAPPDTKRKRVRSEKAASSRPAAAAGGAGAGTATPKPPRARAPAAAAAPPAAVDPTPWATIEALQTQVAVMAEQLKKVQEAAATKRGGPKSGPLTYREKAALKEDIAKLPDDKQAHVLNLIRDENPDCALTEEDGVELDIDRLSTPVARKVQRYVKSALAPRNRGGAGTGRKRSPKGGGAAAAHAAAPPPNGNPFATGPIQLEAMNSSLEQRQLHAQHPLDYGLVSHHPSDMHAGSFQAGAPAESDSDSSSDSDSDSDDDGSRKRRKFPQPGMNFAAQAALADSKKKRPSAPPASSSAASPYPSFGDPSLFSAAPLDTGDQSVSHSGIIKTVELSQWQRPVRRR

SEQ ID NO: 41536 - protein, 395 aa, Oryza sativa
MPRHLISDAHEWITFDDILGDALAADSAAAPAEIAPAAPVESVAPAESSPAVAPADETAAVPAALDVSTVPAVLAPLVDAPVADASVVPVEDASPAPVAPVAEVSPALESVASDLDTVAPAFNWPPAPDAPAPVVVSEPLNSTVPEPVSDLSSAIETPAPLPLANVSTVIAPAAESVNIDTSLGDIPTPALPSTPESDAGPVVIDPTTEDVSGTYLDTVPTGPSDEVPSASPVPSSVPIVSSILSSLPSTYEDDTLPPGPDFETPPPTVSSPAAVPAALDITTLSPSDPVSEDSVPVGPVEVPTTAPTESSAAPVAAKIVDLLDSLTSLLAPTLDKSPAPAAALSPAAISSTAPKHRLDTHNLGATLNNLPMNGNWADAECESAASPYNDFLFEK

SEQ ID NO: 41537 - protein, 508 aa, Oryza sativa
MHQPTTGYGGGVSSPSTGGGYGGYGGYGGGSPSAYGGYRGGSMYSPTPRPTAPTTSAYGNYGAPRGGMSHQYSFRGGPTGNAYGGGGGQPNNSANNNPNAGNPNGGGANPSGNNNMPVLPKAPNMPQVPQIPQSNGYNSPQQNQYNAQNNATAQNDGSSSDPSQPTQEGSPQSHSSNPPPRSISVSRENPNYATTPTGNRTATPSYATGNGIRGTQPPMGGTQTYGMYGTAPRPSTNQLVQPEPAQEPPQDKSNAYSTESDDKSNQPTKTENRNSGPTLVSSADKGNKMKMPTMTKSGGNTGSSQPLAKPMNNKNIYKIVIVGGGGVGKSAITIQFIQGLFVEDYDPTIEDSYRKTCTIDGLVTVIDILDTAGQEEYAAMRDTYIAGGESFLLTYAINSLHSYEETASFYKQILRIKDCDSFPIVLVANKCDLEKQRQVPEEQARQQAKQWKVQFFETSAYMKINIEEIFFEAVREIRRYDAAAESARNGGKPPKSSSGGKKPSCTLF

SEQ ID NO: 41538 - protein, 1030 aa, Oryza sativa
MASASASEAARAAGLSVGAGLQDLTVKHYLAGTLKEHVRDFQTQFVGFDFEIPQHLLALTFDESTDTAAGDTADTAAAAAAASAVASAPPVEGKAAAPTSATDGDTDGVATVYDPSAFIVVDPHHSAYSGKQAAGAGAGTVKPAVLIGAAPLGHAPAPAAALAAAKEMSPAAAAGGVSGGVSGGENVEIVEWIQDKRLIEQIERRDEQQRSANSSVSSLPGADPQVPAAAVAAVAPQVPASHSPAAAAASAAASAAASAAASAAASAAASAAASAAASAAASAAAAAASSSSSSHTPLPLTNNNARFTYGNGKITDVGLDKIAIDVGPWPPAEGSSASAADGKPRDGGHARHCAPLDAAAVAALGLIPLSLPEPAPATVPAAADAKDKPSAAKGGKTKNSPTPIPIPVPPVAADPLVPVPPLQCLSLSFDLRFTVTGMSGYWRRISGSEFLASKIASESKGQFSYRCDMTAHVRITFVIDSCGCLFLQPASSSSSSSSSSTALSPASHSPSSSPVSPGSPAPNGAHAHHSRSASGPVVPGAAAAPAAAGGGGTKGLVLNPTTIYSFAPLPPGKAAQAVALSAGATNVGHGGGAVSFSLTPSFSPYFDPHTTLQSPLCFALSHNDIRYKLEPVTISRNLGSRSGWVSYVSPRSWTEWLVEGIIGDRLTLSFVHVLSPVLRDRCCVPFFLRLLSQLPRTWAPFSAAKREHKHAADAARERDERVRQHLASEHADKADLMRLAQVMENKLRAKAAAAEAEALQLKARVTAEVEAARKRAAAEAAAENAKVQAQWDAERRELQRVILSERTRAQKAHDALTHNEKAVAVVRDKAVRDAVERGAAQAQAHAKDAVAKAVEAERKRAADEAQKQAAAAAAAHKQQIAAAAEAERKKAAAARHDAEAKVAALTQQLRDKEAANAKATADATAAQAAASANDAKLKARLADELKARDSELLALRKRLDEAKESHVKQLQDAGEKLCVVCTDKASNHAVQPCGHLCLCEDHAPLYAPAKKLACPMCRNPVTAVQRIFFN

SEQ ID NO: 41539 - protein, 500 aa, Oryza sativa
MLALVASALLPSLRPAPCAPTHGAASCRRATGWQLAVLYLALLCTSLGSGGIRPCVVAFGAVQFDGQQQKQRQKGGGGAAAAAAGRKRSYFNLYFFTMGLAVLLALTVVVYIQENVGWGWGFGIPAIAMFVSIVVFVAGYPLYVRLKPGGSPFTRLAQVVAAAFRKRRAAVPEDPGMLYQDKELDALISTNGRLLHTNQLTFFDRAAIVTPGDIAGSGEPDLWRLSAVHRVEELKSIVRLLPIWSAGILLATAASHNGTFTIQQARTMDRHLTPRLEIPPATMSIFTTVAMLAGLALYDRAFVPLARRVTGLPSGITYFQRMAIGLGISILGVASAALVEVRRRGAAADHGLLDSPAAVVPISVFWLVPQYAVHGVAEAFSSVAHMEFLYDQAPESMRSSAAALFWLSSSLGNYMGTVLVTAVQRATRGGGEWLQDNINRGRLDCYYWLVTTLTVLNLGYYLVCFHFYTMKPLEVAEEDDDEKECELSSVHKNGGPGGLV

SEQ ID NO: 41540 - protein, 462 aa, Oryza sativa
MPPFPWPTKPNDIGLSPPSATVIWGKRQEEENPEDPEDPEGPIEIPPFPMPTQPNSIGINPPTNTVIWGKRQAEAEPSEVPEDPEDPEGPIEIPPFPMPTQPNSIGINPPTNTVIWGKRQAEAEPSEVPEDPEDPEDPDGPIEIPPFPMPTQPNSIGINPPTNTIIWGKRQEEDPEETGPIEIPSGPAPTQPNSIGINPPSNTIIWGKRQEDGGTTEIPPAPKPSQPDSVGINPPSNTVSWGKRQDFSIGLPVPTATVPTAIILPPSNSSSGAGYSATVIWGKRNAAPAPTAAANLKDREAVAQFTCSATSTSTFYRPCPRPMCNTGCHFTPEYFEVTDSTDPIPRCPVIKTAVNICATCVCPTGAPVPPKPTPTSCVSTTVIRPTACVPPKCPPRATPCDLNRPVPKMVKVRQIEKTFVTIQTIVPSPPASRCEVKATKTEYATCPTYTCVPGCDAAQVVR

SEQ ID NO: 41541 - protein, 366 aa, Oryza sativa
MCSLVAQEPCQLHSEGFLASVHSAEQNAQQGMQQVVMASSQPAENHSGMTVREATQYWYTRAHRALKQRWSDYNQMMREYQHVAALDDGIEHTTSVAKSKAAGGRNRYCNVLPYDYNRVVLSDQQYINASLVQVQLPMLQRPCSYIATQGPLPTTAADFWRMVFELKVPAIVMLTNVTECGMSKCAEYFPAQPSGRISLPGFKLQVEQVVPFSPDCTLRVMRLSDLGSDSSHMLSHYHFHAWPDHGIPDSSAGLRAVCRALSTARESGAPVVVHCSAGIGRTGTFCAIDILLQRLDAWPQCQDGCGPDRAEVEAALNVPNLVHELRRQRMGMVQTLEQYAFVYKAVVDDLQARTKSYQRQQQGGTQ

SEQ ID NO: 41542 - protein, 784 aa, Oryza sativa
MSLMRTAALTLTVLAVVFVVLVQGKPVTTDAVTEVNAPSLGEGATAFFLVAIPAIGFAFGMYWWQLAAEISIDPAKAAGRNSFLTTEIMRNVQNISQKVSDGATAFLFAEYKYLFMFMTGFGGLLCFMLGTSLASPTSGEKPVEAPWVNAFLSLVAFAMGASTSIVSGWIGMRIAVFCNSRTAVRATEGADEGDQGAGFAAAFETAFRGGITMGFCLTSLGIFSLFCCVKICQGYFGTSQAMAPQLYECVAAFGLGGSAVACFGRVGGGIFTKAADVGADLVGKVEKNIPEDDARNPGVIADCIGDNVGDIAGMGSDLFGSFGEASCAAFVVASQSAELSASFTSMMYPLLITASGVIVCMGTSLLAATNCGVKKAEDVEPTLKRQLLVSTVVATFVLMAVTDVCLPEHIKVGNTETTKWRALVCVLFGLWSGLFIGYTTEYYTSNTYRPVQEISEACETGAATNIIYGLALGYLSVLPPTVAMASTVYVSYKMADLYGYALAALGVLSTMCIALTIDAYGPISDNAGGFAEMAHMGHEIREVTDALDAAGNTTAAIGKGFAISSAAFVALALYGAYVVRVQIPVVNILDQRVMPGLMIGAMLPYWFSAMTMKSVGIAAMDMVEEIRRQFQDPKVADGTKEPDYNACVAIATQASLRQMVAPSVLVIFSPIVIGVLFGKYTLAGMLPGAVVSGVQMATSSSNTGGAWDNAKKYIERGGLGKGKGKGSPQHAAAVTGDTVGDPLKDTSGPALNILIKLMAIISVVFAPVMQSKMGGILMNYLEAM

SEQ ID NO: 41543 - protein, 939 aa, Oryza sativa
MRLNVLVAIGLVALACTSANAEQADALATAPAMAEPSLMETDAGVAVASPPVTLPARYSEDPVILKAKKDDVWLNQKRRPLARQPAQIVAKGELRNIIAYDAEQRQHELSRAKRLKRIRSGETAQPKLLPAHYHTSTLVSPAQDKVTADVIGFTGDSVEPEVIGHVPTAGAPAAARFVTPAYRAASKKPLSRPANNKRKGPRVHIHKKRADPKAPGASASTSASASAGAKKPAAAKSSAAAAPKRRRSWTGSRPYRGHRAHARYPKNWKSRWAKRKAAGRAVAPRALVKKSALKAQRQRMTRRSVLRRIRREQRRRSQLRRQRARQAAAVVSRRNAGAKLTPATAPAAVSPATLNGADAEAKQLADAANTIRSVKADTTELVKGQKQLLDYARTATRSNPIAERGVKIDETVLRHVDRLEKELFAMSEENKAMRALQRANLDQLKALSAAVQSRGVSKQFPHLRAVAVSITPDADSDSAPRFEQLHGAEAHADAAAQFHATLSAEQHAGAALDAAVAEQRAVSGEHVEAAASEQETEAADAGVKTEEELALEKFMSSLLQTQTQQTAEAADESQAEAEAEAEDESEDESEDESEEEESDESEDESESEDESEDESEAEEEAEDEAEDETEEAAEAEAEAEAEDDMETSGAAAAAAVTAAQTSADDEEAAAIDADSTAESDIIRLAEHNAALVEQHARRVAALQTDEDAAAEQEAANEQATADARAGTLPSLSLSEVSADAAAETDAEAAVDADAADMLGLPQLPSSVPVPRHDDMTEVEAEVEAEFAAHRDADADADSEAEAEEADVAPRFAQLHADAEADSEAVSEADSEASEDAEFEALMHGRDAEEEGINAEVEHELENEDAADVDISDEAEGAVAAIDAGLSHTLSADTAEDQAEEALAVDAIDSHEGVKGLRSLVAKLNAELDKVKAEGQALSR

SEQ ID NO: 41544 - protein, 413 aa, Oryza sativa
MSLQGRLKPLGYRCQLLPTSTILAVRPSAARRQLAVCVQSSSSVPEQHPNSNPLSNGAQPLPSQPTPRLPLISQPQQQQQELRQRWRVNSVPAAAAGGGSGSGNSGGSSSGGGGSGGGGGDEQPDDDDSLMDLSQAEAAAAAAKVRLPADMLETAKSYGIRSTALAKYISLQSLVFTGGLVQRFPWIRDRMIADEKFLLKVVAEVLIDSGCATVAEVRKRGDEFWQEFEFYLSDLLVGCVLDVVLVSLMAPRAVLGGKAALLGQSALQKCLGGIPSAALEASVKGVKQYTLGSRFACLGVKFLEYSLAGITCGFIGQGIANSLMMLKRQIHGEKEDDVAVPPLFRTALVWGLFMGVSSNLRYQAVFGLERAVDLTIAKRVPAIAYGTTVAIRFINNVIGGENFIDMARWAGVQ

SEQ ID NO: 41545 - protein, 881 aa, Oryza sativa
MNLAFRRLLSSRLCRGICHSTHSLSTRQSLCLGVRPVSPPAFQGKCSARPRHWLRPSTTVLAQTSQQVLQQQYGSIHSSVAALSSLQSPSDLCAAIADASTHAALQTLAVTAASVPHQTWLAQEYKVQLLESLDQQEAASLAKSLLFYAKLGPGQLDLFQAAIPVLYNQLGRLTPQDLVRILTAYSAAAQHSPAAYSQELFAAATEFLWESLGQLETCALADVAAAYAAVQHYDDDEDFFNGLVQAALQRLQDFCPEDLSRLCHSLALLRFSALELNAAALQQMSQQVEGWPLSCVGRLLWALAAVQCSPDPCILDRVAGHVSVVLRNLRTSTDGQRVLAGIGSRGPAAADASTAGKLAGDLGSLPGVGPAGYGAAGGPTWQGFGMARSSSGSSSSSSPSSTASMSTSTSNQSLGSIGCSEPASSSAPTTTTSGTDGPPVDSVGSGSSGNGDGAASIWAAANSSMSHYEYTEQDNPLGPDYIMVTNYGPDGKVTTTYIKRTEAAARSRPSPSSTTTTDVSSSSSLTGTSSNYLRGGLVLPPSNRGVSSTSGSRSVAPSSSGTATAGSSSSSASGSTGSSRKAGRPSWTRQQQQQQQQRDECPAASWATSIPVAADCRPVYDNAEALQSALVNLAWAFAMLGHLHSNMAKECFKALALVMPEAFGDEQLVMLWAAHMRYQQLGHVMLDPNPLLAESYSVFLKELSRAAPRTISLPLHLQPLAAANWLLHTVRQSPEYEQQQPEQEQLQQHFSSWKYRDPAVLTQRGLEASVRQALLHLGLPVGEPCITLDGVERVGLPLKHNGVSVACQVVPPAWCSRNPPHSPTAEAQMHRWALQYRGYTVLTVPFHEWAPVLESGDVAVQAGYLQNMLNGLSVRRRVPPP

SEQ ID NO: 41546 - protein, 1010 aa, Oryza sativa
MVTYTLNAARFAQLAAALEGASIAVVIGETKDLPTNSRSAALLCRLFDLPVVPANVAIVASAGAVTVFAKSATVKAEANVPAFSVVTSADAFAAAVTAVASSLRVFPKELTIQTGSWATDLLSKISSATGAAQDGAASAASFLTVKEQAEMQHVQMARGVATRALEVLVVPRLKAELAKFRPATEAALSAEFDDALAAPTKIPGLENVNSADFENAFSPSAVQSNPNHFKLSSRDALVGIENTTLSLRRPCVTVAVGSKCRGYSALSAQTFLVEPCPAAITAAYDFLHAVYEELLSKLVIGKPLKDVYAETLAFAQRTNALLATKLSSDFGFSTGLHYGEPRSGISARAEFAIAAGNVYVVRVALEGVTVTSDVKAEDGDQPEPERYGLVIADTVIVGADKVRTSKFVRKPSAITWSIAEKKEEKKTEVSYEPRMTRGAAAAVGLDLEAARKDRQRELLKQKREAWIAAGSPEGVDAANAQEDTSAIGRLARGALQSYNNSGIPAEFASKGLAVDRARQTLIAPIAGQLVPFHISTISKVTCVPDGHGKTSLTVTFATTQASNAAFARHRNRQWVKELTYVRPDGGFLFEIMASINEVQKMIKDLDTKSKQSSGVAPVENLKLSPNALRLPTAKMRPAPAQVSKGGAITGNLDAHANGFRFSFGSQTIDIPYSNIQHFIFQPSRKDIVVVLHLNLRLPMIVAGKKTDDVQFVAEVLESSVAVSGTRKTHEEELDAEERDLARVAATNKQFSTFAMQVAEKHGLVLELPMKGDSNRFQGVANKKMTWFNINEHAMWSLSDLPFCVVSLDKIEVVALERVLPSQSNFDAMFIHKDYKTVTPITNISMVHLEAFKDWLGESAKMIYFESTANIAWSNILKKIRDDPGWAAWGPDGWIQYVDPSAGDEEGAGEGEDSDADDSDYEDEESDEEEEDESEDSEWAEEGETSDESAGSSDDSDASSGGSWSSVERKAEHADRKRGYNSDDSDRPKRGRGAGPQPARRKPPQPAHPRR

SEQ ID NO: 41547 - protein, 856 aa, Oryza sativa
MASPDTGTTPPATADQQPPKPPSWEYQLREYLLLLSSVVAIATYSAGLAPPGGVRQKDAGGGGQYKAGDPTLQDIASAGGGAAHARYLAFYYCNATAFAASLVVNLLLLVLEEASAVGLAMLRTVMVLDVLALMAAYAAGSCRDLPSTVYVSTLVVALSTYLAIRIIYQTGGNPLISATTTTTTSPAAAAAAAGDDDDNQLRKVLMLLATFATEITYTAGLGPPGGFQDDGGPTLRSAGRGQSARLATFFYCNTAAFVASLSIVVPLLSSRLQRMHLELYPPTLAALLGLMGAYTAGSSRDLRTIAYVVALVAAVLAYILLAMAIALKKKKHDVDLAGGVEDSETARPPRNEKDGQLEGEKGSKNNEPMKDNDFVLLLATLAASITYQAGLDPPGGVWSEDDKLYGRKAGDPILLSTHVERYKAFFYCNSTAFAASLVVILMVQSKIVKGKALVIATMILDLFGLIGAYAAGSCRDVSTSIYVIALAGAVLVYVVIHVVFWPDDCYVSNQKDKEVEKRRERLLLLAILVATIAHQAGLTPPGGFWDKDDGESGHHAGVPVLLDNYPRRYHAFFYCNATAFMASVALIILLVNPKLYKLGIRCYALYVCMMVGMFGLMGAYAAGSARKVRTSIHVFVLVGVVIAFLLVQLVYFNIQAVWKQLLVFLNVKKEPTSNSDSANTTNGSSSDSKHNIASNTEEESKKKECLMTLAILAASVTYQAGLNPPGSIWQDGGNVGNPVMRDNNYPRYNAFFYCNSTSFMASIIVIILLLQQYQKKYGGFLLYAMNMVIVVDLLGLLGAYAAGSCRDWETSGYVIALAVVVLACIMIHFMLLYHNGRSKGRVGGVQEINTLPVNHS

SEQ ID NO: 41548 - protein, 567 aa, Oryza sativa
MRWGKCKIALACGSSTPAVDPFAQCKAKGGNCQTTTCGGTVQRGLCGSGAETCCLPKTTPTADPFPGCTAKGGKCQTSTCSGTVVRGLCGAGAETCCVPKVLQAAAPNPAFQPCVDIKGTCQTTPCTGVQVRNKCGPGAPVCCVPPGALPPAPTIGALGVDVSQPLKSSTATCLKSNHYAWVSIRAGRSNGAVDVNAPASLRVAAAAGYGPSQLSVYIFPMSDTADSASGGRQVTAMWNSLASVKDLFGTIWIDIQAAKWRTTGQNRLFFESMVAACKATGKTCGVYTSKTFWTQIMGSTYTGGSSLPLWYPHYQSPAQQAMTDFSAFGGWTQPWAKQYKETTTVCGIGADINVMNAAWKAPAGAVLQSAAPSSPSRGVVLKASAPPASSSITAAQLRSCMPGLSASKANTVLPFINAAQAGAGINTCKRKAAWLAQLGHESGSLVYMQELASGAAYEGRRDLGNTQRGDGKRFKGRGPIQLTGRANYAAAGRALGLDLIKNPTSVATNSVSFRTSAWYWTTHGLNALADQGTQAAFTSITKKINGGTKGAADRNSRWAKCKKVLGC

SEQ ID NO: 41549 - protein, 528 aa, Oryza sativa
MGPKTAAQLRKAKAAKAKAATAALDFGGGVGAATTGGTGSAPAAGAGGGKAPKFYASLQRALYAHAAPVLWGLPTVRLPRELVRLCIEYIACEQLHAFVHAVERRDGDPQPDTDPRDADACAGGVGHTPSTWYGVARADHVARAAGLGPPTAAQQQRQQQQQQQAAVAGSARAGAGGAPVDAVRFGSEAVLNRVASYGWYSPGPSDPVLMRAEQRANPPSLLGLIGCGITGQLYVVTTYAVCVYDAQRSEWVLQPPPPPPSPRPAAADAKGPAAAAAASGPVPVLSGDALRRGNRDAAAAAPIKPDARERLKIVHYPLLKSHRPRGTAGVCLVENEFERAIYVVGGDMAYVERFDLAAAACSGMSQLPVVRSHLRAVGIGARLFALGGALELDHTDAVNTCYALDLRAAVPVRRPSARGSPPRPWPSAAANSAPRRTTAPARVRATGVAAHSRTASSCAAAGAKACTQPMPTTRLRRMRTARIWCRTRVSDMTWRPTRGTRYRRSMSRAIMTRRVSCWAVRCSCLADA

SEQ ID NO: 41550 - protein, 827 aa, Oryza sativa
MKNCVLELSELSKLPEVKGNPDLHSSIKNLKVQLRAQTDRVQAEVQRSKRKSEFGSYRLGSSKIHPEEASETLGARTSRIVKSDLVFPILESLRLTNSIPSPPSSPSTLAFSSPLSTGAAGSSGGVGGGGVSPSGGGLGGAGGGGNHSGLCTFDHVLRQHGASFLLQSIDSFTAWFTFIKETLFKIKPRTTGGEYDPRSLLACFCYACENLLSLYGHSLIPFLTDKMKTDLSFLVFAYNIKAEFGPKQKDHILSCMAFFRKMLAEVRQALASHYQHIQDQTRTLLILIRKSIPGLTLRVQEDVNLGDCSSSEDLFNYLNTMFNPGDGSSDAVSSEYILYFLDWLVWQQYLYSVPATGPICWPGPGSSGRHFRFASVENNPLVPSAISLSCLLDDMRRDLDLNGREEWVLGHRIVRYLGHYPYAKGWEHLILYSLLEQQFLVGSSALDPHESTLALEQAFSPTVRQLGSKTILLKSNYLWPEKYLFHAFLKCGKQELECRNCSKQCEIATTAPDLTLSAVDSFVRLEDPDALISSAVELGRGAFGIVYRTQYQGRAVALKVALPSENSIAVLYSEFRSELLLGVRLRNCPYPVTVIAISLQPLCQVIELMDLGDLFAFIHKEPSPAFQTRLSLALTIGKALKFLHTCNPPILHLDVKTPNILLKSGPNNKLIAKLGDFGLSRALRLTRHIQLEKSDNCIWLGVEILMGESATTKTDIFAYGIVLWELLFWGDPYPDHTWMSQLEVDIKAGLRPVIPPDSRQIFPEYIILMEKCWEALPAERPDICLVVSELKKIQDGISRNLTVPIKPDPPFCSEPLPRGIRPLSRIA

SEQ ID NO: 41551 - protein, 457 aa, Oryza sativa
MELPDERRRAIHRSPEAAQSPEAELAAAQAAHHQVRRGGLCRNTHPDRRGDGRRALAPAKGGARRHAGGVGAGAPSEDPVQGALQGDQGVQGERAPWRRRLRPGVQRRPPAPLRRGGGDQADLERDTARDEGVRRRGRQPRADAPPQPGRAARVVLARPGPAPRLRVHARRQPRCAAVRHGGVGGGGGGGESATAAAASDVGAAVRHPQGRRPWPALPARGVGARGGAPRREGEQRAPRRRRHGGRPARRLRPREALRARRDAGDDARGRHAGLHGARAHVHQPRHDGHRRVLLRRAAPRGGVRAPPDRAGGGGGGGRRRAPGAVGARPRARRRRRRRRRAASRGPEAGGVLRRGGGEAGAVARADVQPGEAGGEAQHEAGVPVSRRRGDAAGGRHAGGDLLRRRLVRSLRWLVRRVHDVILRRRHHVGQLAARRPVNYRSILYNYTVLNMSVLCVQ

SEQ ID NO: 41552 - protein, 1074 aa, Oryza sativa
MKAELPQWLKFDNKTLEISGKAPSNVALQNVTVRAKDLFGNEAVQSIRLVIESELFIGGIGRLHIRVGDKFEYQIPSPIFTSDDEIVTADFGELSKYLTFDPENFRISGTVPDTFPAQTVNCVLTAESSDRSTTDAQSFQIDVANAKLSAGGSTSNDLENGSNEATHDTHDTSKRHRDAVIAGSVIGSLGCAALLLGLIFLLCRRRKNSKSYINKRPPRSPNKSDISRPTFIPYGWPDIQDPVDEKEDARKVDHEDEDPFVDKTPENPPKLDLALSRVPTDTTSLGESIGDADTRILDTFEDSSWGIHNDIAPSQHPHDSMKIATELAKRSSQKSVHSYRRHKRQTTTVYQDQIHRSTGLPVNRRIVGVVNGHGSAPSRNDTNPTRSGRRPLSESSVTTTGRTSVCSTAPSAFPQPPKARKHTTMVTTPAEERRSIRIIPTSIRGSLRDSRTMHERRNSYIRNRASTPSPFFTSYPHACSSNYSSPPAFISEVQPKDNSDPSLTSRGMIVRPDDTIVEVQEQEVATGQVSSKSPPESPQSDFPGSLRKNRTARSLAATHAKSDRVAKRYARPSSRTGLGRRASTRSSLRAYELKASLNDLTGTKVFEDDEMSDSVYSDEERDIEEAENRTTMKPDHFTLPPLDLVRVDTMRNKKRDSNTEKRKSKRDSKSKKELKRTSERDPTPYYRGFDHEHGGKENAPSSYHFGKRTSPIRTQSTPNAKVLAESEANKSIMTRPRPKTDVHRTTRQSADRVSTHQDTNKVRHSRRSIHSRSGSRTSAPALKKRTHSHTQSSAYPYFDAAAVESTTSLSRHNRSSLADAVTTAADAVTISESPKGGLSNTVSPSASRSSCITRERDLSGNLTFYGGLEDATIEELGSSSIGVRTSNGRISFAARHQSPLAPFHLSSQSITKIHIPAPTPSPQPSTRRVPTTTAVKEKEKEKEKHGVKGTPRIPPKSERRGTVIKSPQRPPSAVGIALFPSEGPSTPAEAARRERETRPGPRPLQAGESDMSMTTNMTVNTKVDQRDVEAQREDEKGTPGRGTWGALKGYFGRGRSWASGEFWERQGRDDKVFI

SEQ ID NO: 41553 - protein, 908 aa, Oryza sativa
MSYASPSLSARSPRQTQQQQQMPVVLTAEDLHSMRTGSICSSGQFSQHSPRYVPPPLPSDPVERARVKGELAADANKLPRLPLLRRECVYQTDNYRRLVLAKRAALHREEALRIAEKALGPEDARLREARNSDRKEQQEREERQKMWLKIMAAVGFAEVQEKAAQLDAMAKLKKLLTPVVRRARERIRLRRRNQLVLAICERDMQRPTFEVVAASTQLVSWWSKSALGALREALVPGVALGDMLVVPPGGVGNAGLFIIDSGAVHVVLNRDPNTMPPPQSAALLTAERQRMMFPLHKQFGLIAPDAVRIDVISTRGTAFGDYGYCLDAPAAVGYRAASGRFLYWTCPHDEFHDLLTREAAMNPTAAKAAMRSIRATMIPKLYPPTYQSMQNCGLNGIISQFDEVDAEALRALLTPLSVERGHVFWDVGDDPSSFFLVANGSVVVQTAAAASKRSATAAAPSLMSTVNGLAAVGLEDGDDDLSRHLSPSSSAAANGTVLTRRPWSAVGFEGAVALDTRSTRVVAAEMTDVWTCDSRRLLDMLLSRASIFLRVLDDVERVKTERMQRSALVDALALEPLFKVVPRGNLDKIAATATPRWLRCHESVRPLHGPPSSTLFYTTRGTCMIKTVVFEDGGDAGAPVGAGSGGLGAGEGKAAQGGRGASPRAGASHSSAYAGDTHHLGKQFRAPAAINIPQALLPNVNACGPLQASLIVGTTPLELWELRAPVVLEALAAPAGSPSGRNQSRSPSPTATVATASRLPTATAAASGASTARSAASTASSVRPATRESIKSVGGSSSSRIGGKPSVQAPAPPPPKTTTTATGSPRHGRTAAANGGVGLTGAGLVAVVLERALKAINDKRDDVLELASTERSYESIRLALEAEASSNAAAASRNEMERSRLREGIADY

SEQ ID NO: 41554 - protein, 346 aa, Oryza sativa
MSWFSRSTGGNWGGRFSPFGRPGNSPNAGVVNDSDFSYITNEDLRRNGQAQAPEIVDWDDKNPERETDVLIFKNGRTNYPTHFPAHSIRDGDLKIGTVRQAAAKKLGVDDHRRIRMFYKGRNLKHDERTGREEGLRGDGSGSEILVTVGETPAGGLAPGAGETQRAYGSEGEDEDDDDEDDVDSGANTTSKKKSRKRGGRKGKKKNASSANASGTSTPGYTTAGAGAEYLPIPSHINATLRPTSAPPLNTKPAEPQTPIGKLDAIASKFHTEFVPMCVQFMAGPPEDKAKRTFEYKKLSETILTQIIFKLDGVETEGDPDARLKRKALVKEVQGMLTRLDEVGKAG

SEQ ID NO: 41555 - protein, 746 aa, Oryza sativa
MSAADATVVHAKELRAKLKADRAAAAEAKAAEAKAAAAAQAAAASAALAAARARAVVPQPVSEQPATEAKAEALAPTHGSGQSMAAPQPQPEREPVAAVAAAAAPAAAAAEVKTDGAAAPASDNGAPAEPRANGVAPVTPVPERKKRSRRSAAPKAAKSAGAPPETPPPAAAPANSVDALAPLSAAKLDRLFSPGVAGRRAVAPLPLVPAFGAAQPAAADMVSRLPVLPDGSSVVIRVFGVVALNAPATAGNALSSASGPAPAPVLDAHHWAQPAALNGKDLPEPLRRIVTDCPLRSLRFGGGGDEKHPDAALTLADPVPLADGELPAPARGLTLAASSVEVTAAGDRFASIEYAARWSAAAAALEPLAASAGGDAKASRRVFEPAQLQACLSRVWYDLYARAESKAAAEPGLRASLPIGSPLFGGALSGAGAAQADFVAALVTVTVPAGSSPAALLPSPPAFGESKASATTSALQQCVQFGLERTEAFTPAALPRPHGLLASATSSGAAIALRVPAVPIMAVKSASAAALDAEDPLLLNAFRLACVSHAAYASLARAPVGGAASPSALSPLDRSAAAIRATERALIDVQDTLEPALYFGSSVRLSEALSSASTPAPPGGSDGRKAASASASASAVSIDDAFLFAQSVSAAFGSQRLKRALQSKLRFGFHSAAANGHGPAAGAGAGAVQSRRSDDGDTGAGAGSDLSPSGLLSSVLQPLDNSSVMWRLFGLLLLFVVCIKLLFRRV

SEQ ID NO: 41556 - protein, 902 aa, Oryza sativa
MAARKSPQTHLRRESPQPEGAPRSVAMSEQLKKGTYECMICTEGIRSQVATWHCRECYQVFHLFCLKKWSKSEGSGVGNSFRCPSCQTHYDNAPNKYYCFCGKRVDPQPDAFITPHTCGDVCSRRRPHGCPHPCAALCHPGPCVDCTQETEPKPCPCGKSTYSHQCGKPDPKFTCAEVCGKTLNCGTHTCGRPCHYGPCGTCEVTLATACKCGKSTRQLVCGSPAYSCEECCGKLQRCGVHKCNVVCHAGSCPPCDADPAVVFTCPCGKTMLPEGCRTACTDPIPTCGQVCARVLGCGRHYCTRLCHEGECGACDARINAQCPCGATQRKLACAEADDFRCDRKCKARLACGRHECSTICCPHRRSANPADHICTRPCGKQLACGHRCPDPCHRGNCQPCINIVTTELSCACGSVVLEPPQPCGTAPPECSRPCQIPLPCGHASVEHSCHFGDCPKCFEKVDRACLGGHTIIKNVLCSGGVLSCGAPCGKDLACGHKCLRKCHGDDCVELDRGGRPRKCEQPCGAPLPCGHTCRGKCHPEKAECAPCSTNTPVLCECGETQTNLSCTAFAELKANTPPGVAIMTKCSADCLSKQRLGFFANRADGAAPNRFPEAEHRDQKCYYSRNLWTVAKDTPDVALEAERHPVNFVRAQEKMSMLPAMARNKRAVIHELAQYFGIRTEAVDQEPNRTICLWRTPLTRLPIKLLSLASHDSSMNPDQMVSNVMRHGAAACILVFEARPETISENTVFGILRFAAGKFVIVPPEDFPNIFPEREVPPRAQAHLGNDTVAYLAIFGRGTDAQEAFKAVRQQGCSILFHKYGEAPPPMNFADPQLAEPRYFFNEATTTTAALEAQAAKSATVAVPKPGSTSWASAVRKETSRQKELAKPVNVETANKFATLRR

SEQ ID NO: 41557 - protein, 532 aa, Oryza sativa
MFRYRRYRVFLVFAVITIFALYKFGRSSTTWRDAASTAAELKNEAEDALGFGHKPRPALAHDTKKLEVHIPAASGSLFLQTPPPVKVFSTPSPPSPPPATRPPQQKPTVPTPTRPRPHGRPPPVGAGYDTISIAAIHWTKLPENFPVPPQSLMKLPTGKSKAIPKIQAKFAPEDDIAKANRLNKLGTIKSVFRRSWEGYRKYAWEHDELKPASGQFRDPFANWKATLVDALDTLWIMGLKEEFEEAVKAVEEIDFTTTTRADVPLFETTIRYLGGLLAAYDVSGAKYDTLLKKAVELAEVLISAFDTPNRMPETYYYWRPQFSSQKHRAPSRAVLAEIGSLSMEFTRLAQLTGEHKYYDAVARITDHLEEYQNNTRLPGMWPTLLDTSGCGKPPIDFPIQAPLLDPDLPSAAPAGPSPTNLLSPEGNKFIPLSKPDPVVFKPATGVKHLQTPSQKTAPILASPAADSMSGSTGLSPEGNKFVPLQKPDPIMLKPATPSAPDIGVVRDWQGKPLERRQLEVDPGPQPPVAAQR

SEQ ID NO: 41558 - protein, 612 aa, Oryza sativa
MRRISRPSRAIDATSPLLLSVPQRVTPSPCQIVVAKVTHLQTSTANFSTTQSNAFLLAGKQDKKKHQQFVRRWQKRLLGESEPIGAHVDPYDPTSPVRIAPEEQGDYREVLEEDKQDVFENHNYHYLPAEERINARHGRNLFFVGGDNWIRHKLEAGIARDFEKLTQRTYTPLSLNMADQIENLTGTPYTLLNDNLKLAQQVQEVTNRPFTNQNFGLQGKVTKHEDLHRRFAQAIAEIYTLKDIKLHRTTTGELALVYPRHWTAKDFIQIIRKAPEWGPSELIEEEDGLVDEVAEEVESEEPTPIMDPATPAFKQEAIVKIDPKKKALDFMSNRPVPREKPAEAQKAEEIVRLEGSAAESPIFTTPRLAKIASAFETSKSTVDVLRYSIIEHRAARLVDQVTVLSAAVHKTKHSSTVQKKSSSAESLGEELKWRQVLINGLDIKFALFKRLFQLTGIRVSDPQLSSSDTLGQLYGYLCAASKPRPTSLFSAIHVEGQKARENAKKQTSAEMASRRRVNLGDLITLGNVELRRTRATKSERRTKTGMAKVVGYALWERKLTGRYNQPKFRHGSKIIEGSRRVPEFGKPLPSKSAMLLAKWTREQMEKAKKTEL

SEQ ID NO: 41559 - protein, 597 aa, Oryza sativa
MSLLVVLFFFFLSPPLAAAAAYTEYSCNGTRGNFTEGSAFGLNLELLAAELPANASSSRSLFASAAVGAAAAPEDRVFGLALCRGDMRDAAACAGCVSGAFQRLRALCGRDRDATYYHDLCVVRYSGDDFLSRPDDNSPVINALDANASTYYGWDGRNATTRSFFLSLVGTLFGEMAMYGSYNSSARRYASAVMYVNPQLPTVYGLAQCTPDLSPAQCWHCFQGLQEQNRQWYDGRQGGRILGVRCNFRYESYQFYAGTPDVRIGLQDVAPSPTANNGTNHRKTLVIVLSVSITVFCFMLVGCLLLIKKLRKGDGRKSNRQLEAHSRNSSKTEEALKLWRTEESSTDFTLYDFGDLAAATDNFSEDHRLGTGGFGPVYRGELSDGAEIAVKRLAAQSGQGLKEFKNEIQLIAKLQHTNLVRLVGCCVQEEEKMLVYEYMPNRSLDFFIFDQEQGPLLDWKKRLHIIEGVVQGLLYLHKHSRVRIIHRDLKASNILLDKDLNPKISDFGMARIFGSNMTEANTNRVVGTYGYMAPEYASEGIFSVKSDVFSFGVLLLEIVSGKRNSGHQHYGEFVNLLGYVRFYVVFSILISFSLSLK

SEQ ID NO: 41560 - protein, 537 aa, Oryza sativa
MAELYPGHLPLMFTLTPNNGAASRQGRGYFQMSGVATTLNFSDNGITGAIPPEIVKLKTLQVLDVSYNNLSGGIPPELSSLTRLQIVNLRWNRLTGTIPQALKELNFLAVFNVAYNDLEGPIPTGGQFDAFPPRDFTGNPKLCGEVISVPCGDRFDATGTTSSKVVGKKALVAVVLGVCVGLVALVVFLGCVVIAFRRVVSNGAVRDGGKCVESTLFDSMSEMYGDSSKDTILFMSEAAGEAASGVTFVDILKATDNFSAGNIIGSGGYGLVFLAELQDGTRLAVKKLNGDMCLVEREFQAEVEALSATRHQNLVPLLGFCIRGRLRLLNYPYMANGSLHDWLHERRAGAGRGAPQRLDWRARLRIARGVLYIHDQCKPQIVHRDIKSSNILLDEAGEARVADFGLARLILPDRTHVTTELVGTLGYIPPEYGQALAVTLRGDVYSFGVVLLELLTGRRPVEALPHGQQRELVRWVLQMRSQGRHGEVLDQRLRGKGDEAQMLYVLDLACLCVDSTPLSRPAIQDIVSWLDNVEFIG

SEQ ID NO: 41561 - protein, 916 aa, Oryza sativa
MTSSFTAESIELVERLAECYMETRQLDKVEDTYNRLFRAVLVADKVDQATFEKSRSLLINFYDKHGYSDKAISIYQELLVYYRARLGPAHEPTIQTLYILAQRCQKHPRNHPYWIDYYLQIITSLNKDSDVCHPNALDAIIVVTTTYWEDRRYAEAVSIYRVLWKTFTTKTKEHKIFSDVKFVQTLYERYYQCLEETKASWSELYQVSNEYRETVKTTFGAESTIAVEATLSLAKVAQRSEEHASQAIALYEEVSSRSKTVTTRTSVTDINQALSSLYVKQMQSSKSSSMKAETVQRALSMSGSQFQESTKAYGYSHESSLTHLRELSTLYSRQQKTDVAVKQLSTAVSEIITKETSSQKQIESAASIASTFRSIQQESTAQSLVQELHRQICAKDTRYASKWSFDLTKSSRSSLAFLAALQYNLRKDLNITFPEIMADLTLEYIYFEQFHNMLRNNESLTNILLAAAPLRWFLRRNDQQDMITVVEDQAVGLFEKRDAQDLNTQSKQSPRIFIIGILDHLGNGRNKNFNRSVIPASNDSVTKLTKAKKFPEAYDIAHLGFLYASKHDGYNGPRAISMGFKLASLLVGRASGEKCPDAALRKKMLELSNRIVKRILEICKNLNINFAQIQLYELSHLSVLLGEQQDYETLEWLLTTLWNTRDAQRTWPAEILLNLGRRLICARYLANRPVKAIRLAEDIAYNMRRAHGPRAPVTIETYELLAELYTSTGLAYQKDSKTASLAAEYFKKAVGVHEDILRLAVSEYGSGDVDDDDDDDTTAELLAREGVNVHRQKAQQETPKALDQNQLDRSALALKHLHLLKLAYQRLGGWPKSYEEYERLNAQLFRVFGSESKWKGVEGTEKWDAKAFGQGKAESKEGVFEGLEDWGFGEEKVLLEAQKRRQGANVGGGMVMMSAQ

SEQ ID NO: 41562 - protein, 705 aa, Oryza sativa
MRRTSATVLLALVCCAALFDAASALDNARRLQRTLQARSKAQASTGVHARLQALARAGLTGGAAKAHALLDHVMAGKIGAGLGFEGYEHSYGSGFDAKGTADAIKFKRINGAGAVEEVTTADRVLVSNDGVNFSYSEMTGVAGDYWAPKDLNSRIIYSLNTKSAKTDVRPTGAAQLKRFTDAFNDMWSNPDYGRNGAILAKPLATGADWKKLSDQEKRDGWMGYMEEQLRLMISQEKAGAMANFQKAPTPGKAVELHPGSMYYEGSAKSALENVISIASDVARAGTRAKEAVSAVAEGNGRALSINDDHFWHCAQETYALGHREAVKAAFAAGQQYATATSPAAKATAAKALNRAYAMDGFVSHFLSDQFSSGHLRTPRVQLRTACSMVTDGAKEAGLTANVMHDEDNWNCVLVKNARGNLWWSCGDHRFFDHENGMNRRMLHDAIAASVGAVSAAFEAGQTKGAVDPTTKASWRAEGLQYIGSTTGLSLRQSVENTCPLYRINSSNKVEHRDGPLAVWPRPAIAKKYRFGSSLRWNMNGAPFPAFVDMTAPAVSAAGASKTRLPFSDLSVSDSAFLGSLGLKAVTSDLTCHDYRPFRERALTSADDCCGVAGRATPQFVTASTTWDDLNAKTKWPSGADPHNVDKRVTYLNKCFITQNVELAGQKVKDVAVTVGTAVVNGATVVKNVIVDGAVAVKDAVKKVLP

SEQ ID NO: 41563 - protein, 1095 aa, Oryza sativa
MPGYTSAPQRPHRRPPLITTLSLLLALAVTLLALAAPASALEVRATNVRGTAPSLERRYLQTYRSIFSNSSIGDRPPNCPPCPEPDCFNCQLPAYECYQFGECNEYDGLCRCPVGFGGPDCLSPLCGSPADGPKRFPKGEPGDDRSCQCSDGWDGLNCNVCRTDAACANFLLGGERLGENGTCYDGGATIQQSSQQCDVTNQKIVDMLPGRPPQVTFSCDKSDASCNFQFWIGARESFYCGLDDCQESIEIGASSNKTSYDCKKVACKCIPDRMLCGESGSIDISDFLTEEIKGPGKMSCKTDADGVRKCRFEEPGMNGLISDVFGDEAIFITCKSGECIHFSQVPGYQAPIAPERPVTWVVISAVAALLIVVVSVSLLWMLGRHYKDDEVRLGSVRLPQEEADLMKDHIPAALHWEDVGYRIGSKALLDGISGCVKPGEVMAIVGASGAGKTTFLDILARRDKRGTTSGTVLVNGRKMADQEYKRVVGFVDQEDLLMETLTVYETVLYSALLRLPRDMSLEAKKFRTLETMQELGILGIRDSRIGGSGFTAGGSKEGRGISGGEKRRVSIACELVTSPSILFCDEPTSGLDAYNAYNVVQSLVTLAKTYKRTVIFSIHQPRSNIVALFDKLLLLAEGRVVFSGPFARCSDYFADVGHACPPGFNIADFLIDLTARRTHGGGEEAEADVEGGAHVRGETSIVTTGTNSRDESTELRTRPNSIAEGSTGNGVRKRTSRLASGLRSAFANGESNGHDIWMPALSSGKLVHLVNAFADSDMAGDTKAELDAFLGRTPRGVENDLPDVANDGALLRTYKKASLWTQFKILSGRAFKNLYRDPILMVAHFGLAIVLALFCGVLYHGVTNDISGFQNRLGLFFFILALFGFSCLTSLGVFANERALFVRERSNGYYTPLTYFTSKLLFDIVPLRVVPPLLFGGCVYFLVGLVPGVAEFWRFILTLVLFSLAASSAVFLISIAIADTGLANLVGSLTMLFSLLFAGLLINRDRIPYGFKWLQHLSFFHAAYEALIVNELRNLSLKEHKYGIDIEVPAASIISSFGFNSQAFWFPDIATLAALFVTFTTLSAVTLVVFVRERK

SEQ ID NO: 41564 - protein, 976 aa, Oryza sativa
MYKSYNPQMVEAAWYDWWERCGFSKPDPKSDKPPFTIVIPPPNVTGALHIGHALTNAVQDTIVRWRRMSGYNVLWVPGTDHAGIATQSVVEKKLQKEMGITRHDLGREKFLSEVFKWVDEYGGRICSQLRRMGSSVDWDRCVFTMDETRSRAVLEAFVRMFESGCIYRDNRLVNWDARLRTAVSDIEVDYIDIPGRTLINVPGYEQPVEFGVLTSFAYPLEDGSGEIVVATTRPETMLGDTAVAVHPEDERYKHLHGKFVVHPVSQRRIPIITDAELVDMEFGTGAVKITPAHDPNDFLVGKRHSLEFINILDDNGNINDNGGDFKGQPRFQARITVVDFLKQAGLYRGVHDNPMRLGISSRSKDVIEPLLKPQWWVACGDMAARSCEAVRNGTLEIIPKEFEAVWFRWLENIRDWCISRQLWWGHRIPAYYITLEGETPEAAGVPGRPSEDMSRWVVGRSQEEAAAAAAAKYPGKKFELHQDEDVLDTWFSSGLFPFSVMGWPAATEDMATFYPGSLLETGHDILFFWVARMVMMGLQLTDKVPFKQVYLHAMVRDAHGKKMSKSLGNVIDPIHVIEGITLQGLHDTLKAGNLDPKEVARAMDTQKTDFPDGIEECGTDALRFALVAYTTQARDINLDIKRVVAYRYWCNKLWNAIRFAMMNLPVGFQPLPQQQLNEQMPSWPLAARWVLSRLNAAVETINKAMEAYDFATATQTAYAWWQYELCDVFIELMKPVMARDEATDPGAAAAKAATQQALCAALDNGLRLLHPFMPFVTEELWQRLPKTPEQASTASIMLAPYPAAQPGWSQPELDKQYEQAQAVVAAVRKLRSDYGLTRQRTTVYVACSSPERAATLQTLAADIACLSTSAEVLLLDEGAEKPAYCSVAIVDDTTTVHVLLKGILDPTLELAKLEKKQAEAQSRIDAIHKRMAMPSYAEKTPQAVQAEDADKLAKAEAEAAAAAQHMEDMRKMIEAQ

SEQ ID NO: 41565 - protein, 830 aa, Oryza sativa
MPPSAGLATESLPAATCPAKKDAYAAAASPESETKLAAGDERAPLVRTTRISTTTIKLYRLTIFVRIAIFVLFFKWRITYAARAISSTDAGGIGMSKAATFWTASIAGELWFAFMWVLDQLPKTTPVRRAVDVTALNDDTLLPAMDVFVTTADLDKEPPLATANTVLSILAAGYPAGKVTCYVSDDAGAEVTRGAVVEAARFAALWVPFCRKHGVEPRNPEAYFNGGEGGGGGGKARVVARGSYKGRAWPELVRDRRRVRREYEEMRLRIDALQAADARRRRCGAADDHAGVVQVLIDSAGSAPQLGVADGSKLIDLASVDVRLPALVYVCREKRRGRAHHRKAGAMNALLRASAVLSNAPFILNLDCDHYVNNSQALRAGICFMIERRGGGAEDAGDVAFVQFPQRFDGVDPGDRYANHNRVFFDCTELGLDGLQGPIYVGTGCLFRRVALYGVDPPRWRSPGGGVAADPAKFGESAPFLASVRAEQSHSRDDGDAIAEASALVSCAYEDGTAWGRDVGWVYGTVTEDVATGFCMHRRGWRSAYYAAAPDAFRGTAPINLADRLHQVLRWAAGSLEIFFSRNNALLAGGRRRLHPLQRAAYLNTTVYPFTSLFLMAYCLFPAIPLIAGGGGWNAAPTPTYVAFLAALMVTLAAVAVLETRWSGIALGEWWRNEQFWMVSATSAYLAAVAQVALKVATGKEISFKLTSKHLASSATPVAGKDRQYAELYAVRWTALMAPTAAALAVNVASMAAAGGGGRWWWWDAPSAAAAAAAVLPVAFNVWVVVHLYPFALGLMGRRSKAVRPILFLFAVVAYLAVRFLCLLLQFHMA

SEQ ID NO: 41566 - protein, 378 aa, Oryza sativa
MGATFRCFGGCVKPDDQQVHEPKKVVAPSSSFDFREEYTSAFRTESYNDFWARVLDITLAHGAALVPRHGGGGGCAASKRLPSYRLFAEHLLEPDQRAVAAALASPRGSRLRPDVRGLLAAYYAETANASFLCSHLLKDIEHIRLRYRPLKHTLRKLASDVGVSGLADVSAALGQPFTALATSQGRLREVQAGSGDLLRGLDAGRKKARHRIRSVARLRRALSVSFVTAVAVVAVVGACIGVHILAAFAAFPMMSPAWLGERFFSGRAARRALVQLEAAAKGTYILNRDMETISRLVARVRDEGEHMVALRRLCVEHRPAAGAGGKGRLVQEVLRQLSKNEESFRQQLDELEEHLFLCFMTTNKARIMVMNFMAAAAR

SEQ ID NO: 41567 - protein, 945 aa, Oryza sativa
MDEKSGLPPYSAPAFDQPRHILRGPRLARRSRAVKVFALACLGFIVLAQWGQLWRAQSSAPLLSQQKLHDDLQACKRLRHRPQDPPGAGRERNARYLGGKATLVKNATIWIGEPVKGTSAEDARAGKGWQWTKGDVLLQNGLIQKVEAEISAESIPDDAIVYEARGRPLTAGIIDMHSHVGVYSLPMLDGSSDGNEMSDNITPWARAIDGLLPFDPQFQVIKSGGVTTSLVLPGSGNNVGGEAYLVKHAIGKADGREEISARDLLAGPEQNWRYMKMACGENAKRVHSDQVFSRMGESYAFRHAFEQAAELVQRQDDWCDKAESLGVDSMSDYLPQEIRWESLGAVLRGQVHINTHCYTVPDLEAMVDHTNEFKFPVRAFHHAHQTFLIPEVLKRTWGGRAPSSAIFADNMYYKTESYIGSEHAGKYLYDEGLTPVYVSDNPVLNAQHVLFEAAKGYKYGLPYHAALASVTTAPADDLGMGQRLGEVKPGFDADIVVWDSDPLSIGASPVQLWIDGTAQFESPVELKKPFSAPIVPDTSLGHIVEEPTEMTDAYFQGVSKILLYNETTYDVSGGDGTLNVVVSKGKITCIGSCKAEFDVAAAAGVEPIRLKNGYLTRALVAAAGTLGLSEIDAESVTNNGANHDTFSRAIDGLALESKKLRAGYHYGVTRAISAPVFNGGATHYGTSVGFVTTARTSLEEGAVFNSDVAVHYTLDLSVRAAGLSYSAAFGGLRTKLMTAASAEAPASPFSEYAELRKVIEGKKVLALTINSADGIAAALRIKSEVDKHIRSLNKDASPLRLAIVGAAEAHMLAKELAAADVGVITASAQSIGDTWDTRRTLSGAPLTNGTTLDQLIAAGVTVAVGLKEDWMVRDLGFAAGTAYHNGEGRITEAEALDLVSTNVYKVLGVEIPEDSHFVVHEGNPLDIGSRVKAVGSGNGKIAVFV

SEQ ID NO: 41568 - protein, 952 aa, Oryza sativa
MLDDHLSAAVKEVEEHDRQRKAARQSAAVTRPTTHARAPSGGAGAGAPPIAAHPSALLSSQRSGGSSTASTPTHSRPHSPVRGNSASKLLLTQEAPAAATASGHGNGTASGSAGGGGGAGAASSVGATLLELAADDDDLSAANGTDLPALGARGNGCGSGAQQQQQLQQQPLSHNSNLISTTGAGAGVPVAAAGHSPQPVTARISKRLVTHTSHSPKASPGPSPQPSPQRIVVDRAIGGAGAAASGTPGASSRSRTAGGAHHLRNSSASSALPALMPTVPYPAGIAAGAGAVASPLIVPPARLTSPPSAASYAISTHTAYSHAPSSSSAHSSPGSSPHSVTAAVALGGGEHHTLQAGAANAPGAVALANALFHLPGASASSGGAGAGANGNSSAVVHYHHAPSSAAPPTASGHLGASAAAANIGRPPVHHRRGHSGLGGGGSGQYDALALRSHSNSLDRMSVAATAAPMAGSAFGSAPTSTMAGGGFGTQLLSQQHVLFSGGGGSGGLFSPLFDSALRWLPVEAQVAAARHVVADIQSHAAVWECVDSLVRRVVTDTEQQRLDSARAHAAEVERDTKQKRERWDIESQRLDDAVPPSNQHIDALSAANAQSQRSIDDLSRQIAALEAEEARLAEVARAELDIRDLAALHTRALKHMARFLVPRDLSALIGTCPRWAHALDRGPLWRAVCVRTARRIERDSAKAREQKPTIPPNVTLMLDNAISKKDKSSSANATDVKQKLFDKCVGAIRDKATAAASETEDAASKAATERQVRAFLQQQVAEARVRIGQSRLEQLSWDRRMEDVQREKAHVAKEIARCERQIGDIERDKQNAEQNYRLTLKQLNERVQALRDIAQYAPALAAATGNGGGGGGAGVLSVEDKAANEAKLEQLKRDKKVLVKGVKKLREELQDVTRARDLYQSQIDTWRQRLDAAQTHAAAAAFGSAGAAGAAR

SEQ ID NO: 41569 - protein, 681 aa, Oryza sativa
MGSPAWWSPAMPELVHRRELMQNVEKWQTMYVRYKCQPEAQVTQTGWDLAMSQRYADQLALEEQQPYLSEESLLYNGLAPTNIALRIVEAPAEFAVPVKQDRRLTPNFKVRVEVTFKHRCSFPLTLKAYVISQQEKDSVPEWVPDDFLDPDLPQRKPVTELKGTTVITHHFEGSAGGSPKHGAAAHKGQQNQLGNLLSGALGDSAAAAQALLAKGADPALLASMGLAGDMDPRMLEQVLQETARGGAVDPATAAALAAAAQLGGGNTTLDALSNALGGGAAAMQGVEAHMSHDYEFSSVELVKPTRMNKVYLVFACSILEQDLMFVVYNIPTVGICRAEQRAKACQKLGVSYAELGGVDALFGDNPLGLGQPSRSMTQPNGAAGQQQRKRGSGQGWDAAMMGMDGLHQRGYGAEGGIMGLSGSDMNLAALAAGGLDPTMGMGMQMDGMLPGFGAEGGMGVINSLAMGVRQGGAAADGDAQPRIRQALRDLLLEEYEGTGLHRKLSPLDLQALECQAGFPIDIDSSGQQVTISQVQWDEFVAQFRLVLKLLRQIANVWNLEDPCVIAGFDMDRLGTVQALSLEPVGTFICRFSMSQPGCLVLSCRVAASHPNADGDGLLHAIIKLDDLFERRVETWIRDFAGATHILDVYKNKRVDKRKVFTSNYTRLRAMDVLDAYDDIYI

SEQ ID NO: 41570 - protein, 726 aa, Oryza sativa
MMTAPNQTQQAFARVPTDVLLHRVANTFLTDRDAHALASTSHLTLRQLRQYEVKRRVRSGVAAEFGAEVGVGVGGSTSSGSVSASFAPRFGVIRRVLFAGEYASFSVACEHLRRLPVTVRALYLETATPTAGDADADADGVWRWPAQVEVIHYANCPAGFMYGTLGAPLPGGLLDLRSTYHQSLEAEMQAQMSALPRTLRQLTIAKDSLFGAAPTKVPLPAALPPNLTRLCLAAANQPTSTLPDLPPMLRHLDFGDYWNQSLEGYVFPPALQTLNLGGWDGEISTLQLPSRLESLNFGARFDRSLAGWKAPASLTEVKMERSMFTGWQRPASELMLPPSLRTFTVPLWDERTPLDGFAPPAGLTELKFQNLPHHPLAAITWPPALKRLELPLNSNGCEAAMLRDLRLPAGLVSLAITTNRWTTDLPLPASLTELSIACRYEFISRLPDHIKTLTVCSLEHPGGPALVASTPAAGATHWPASLTRLSMRNCEGYLAPGWLPEGLLHLSFDRQGADRRRSGAITDMTVYDEPNSFPLPSTLQTLRFTGWFNVPVQQLKLPDGLLELAFDSTGYASDEFKQLVHEWSLPASLRRFIVEGRSFTLPASALPHRRLSDLPEVQHYLQDRARRYPAIILSPSPSDTGCGFGFGGFGSGFDFVRGFGTSSFGSGGSGTKVSDDGASAFRAEAKLRADIAAADADTAQVDDDRDATAVHLDADSPHPSKRQESD

SEQ ID NO: 41571 - protein, 633 aa, Oryza sativa
MVAYEFVVESALLVSVSLAAVAVNLRQIWWNRHQPSVPLLRWWYWRVSAAAGLLLATGGIDSQNGLELFPDQTLPFLTAMFASIAINALGALFVLESAKALYQTERSTAPLWLQRLIVVVASVVACVLAAAVIYAAATQMLFGTVVIVFPAVMLLFVQFVGFVVLYRRFSTTLLTHVQRLEQRQQRITAAGQQHGTGSRSPHGSHTAGTAATAGTGTGTGAEGVTRVQLGVTSQQPPSPLHGGESQHKQRADQPLLPAGAGQPVSPHNVMSAPSPQAAAPGRTLGRTGSVAWNVTAEQQLQTQTQPQQPMSAALDTEYVRKTLRRLWWFCAIGVCGCGLMVTVFFIVLVQALDDPNTPFDLSRPRPVHWDRTSTVGQALCVCALWVVTWYGAAPKPSKYRPHSAIASAPAPAAAAAPAVVAVQLAGPPGADTVLAYDRERESTAGRVDAGVTGGPIVAGPTTGATTPVNAAAGGGGGAGDEATAALGYFGPPPVAGGYMRGSTTLHADSAVEHTVTRTAAPLPVATGAALGATAAARERERQRYGAGTGLPPRPPRAPDGSADVAAPAAAAVAPTATGSSGGGGGGFRVTPTHTPPMLPSGGSRAGYTAGAGGSGAQSLVAGTTGSQGPASTA

SEQ ID NO: 41572 - protein, 599 aa, Oryza sativa
MKRCQSSRPTAAVAAVVAAVSMIIVLVSGTAIPSAAAAAAVEHTFVVSQVNMTHLCKEMAFTVVNGQLPGPTIEVTEGDSVTVHVVNKSPYNLTIHWHGVYQLLNCWNDGVPMITQRPIQPNHNFTYRFNVAGQEGTLWWHAHDAFLRGTVHGALIIRPRHGAASYPFPRPHREVPIIIGEWWEKDLPQVDRNMTNGYFDDYSSGSTINGKLGDLFNCSGVLEDGYVLDVEPGKTYLLRIINAALFSEYFLKIAGHRFTVVASDANYLTPYSADVVVIAPGETLDAIVVADAPPSGRYYIAAQPIQAPPPNTQTPEYATRGTLQYSSNSRNSSAAAMPEMPHQHDTMRSFYFRGNLTAGARLHRHGRRRVPARADESLFVTLGLGSVCRHGGASCKRGGNLKESIVVANVNNVSFHIPAAAATPILEAHYYHRLHAGAGEEEEELAERPPRAYNYTDQALTPFGPEEMRLEATSRAVVTRRFRHGATVDVVFQSTAMLQGDSNPMHLHGHDVFLLAQGIGIYDAARDEGKFNLVNPPRKNTVLVPNLGWAAVRFVADNPGAWLMHCHFEFHLSMGMAAVFIVEDGPTVDTSLPPPPEDF

SEQ ID NO: 41573 - protein, 220 aa, Oryza sativa
MGAACRRGEHHESHPTGGPRPPRCAQGALRRCLPRVRRRGPHRRRRLRGRSGEGGGRPRLHGEPRRPRVHPQADQDFRVPREQHDHDDRSLRRAARLRPEPDREPAAVVRPADRGRLLQQPPVGAGDLRRRGPDVPAAHRAGVQPGRGLERPWHRARGPARRDQLRPDLRLCRRLRAADGEQPHRRPDLDQPRGGRGRRLPGAHPGQRGRRTVHRRPVAG

SEQ ID NO: 41574 - protein, 445 aa, Oryza sativa
MGVAETHQVLVRNELRERVVLRADGGFRSGRDVLAAAALGADEFGFGTVAMIATGCIMARVCHTNNCPVGVASQREELRARFPGAPADLVNFFHFVAEEVRQGLAQLGLRSLDELVGRADYLQQRDAPLAKTGGLDLSFLTTYAGECGTSSIRLAQAVHSNGPVLDDEILADKGIQEAIRTQGTVSKSYDIVNVDRAALGRISGAIAKPYGDNGFKGAINLQLTGSGGQSFGVFLTTGLNVHLTGEANDYVGKGMAGGEIVIVPPPASPFKAESASLVGNTCLYGATGGKLFVNGRAGERFAVRNSRADAVVEGTGDHCCEYMTGGCVVVLGTAGRNVAAGMTGGLAYFYDEEGDFPEKVNTEIVAIQRVVTPAGEQQLKGLIKQHADKTGSAKAKAILADWASAKGRFWQLVPPAEKNTAQVNPAVDDTTVAAAAAPVQVAATA

SEQ ID NO: 41575 - protein, 890 aa, Oryza sativa
MPPSLNAHSSFTRPRTGDREGRPSARDQGGDNLLIPSRTSSLHSRITQPIPSTLSNKPQQRTPKTLTHAYMVCGVGREPSQWVKAPAPAQGKIGHMKGAVGQFWLPEILGSSPRLEQDNEIARALHAAMRACFPHDVEICTGRSQPHCVHHAFVLQQDSSHTLYGISLRVWSRADEKRAETIRDLRKRTEPDFYDNPDETYWIPYCLSFLSRYPLYNLLGDYLRGMWIHWNKATNLFHAEEVSRILSFPAPRLNDLVRIDMKDYALCYQFPSSPTGFQNFAMWPLFTCLSIPNIVGVIEAAISPTRRIIFVSHYPAMLTMAAESIRYCVRVYEWSGLYVPVVHARHAKELVQEPGPYILGVTAECRSLFTAPTDALVVDLDRNFVLTSSPPTALTPSQRNKFVTRLTQSLNGDVTPSGVPQHLRSAYGGGKLVPAGQIIVMRGEVESIQDPEWWNQDSVMAVMDHVCEKMGRNTGIKAVFGGSVKKPLMTKVSMRHLNEIVRERNQYSRDALEAWQDFINLKGRMDTELSKVTKRNNYLVEELESWKQQFLKFQAFAEQLTKETQDLKVKIENHKRENRRLAGLIDQQKDDNARLSVRLTGTEKQRDDALEALVLQQEIAEELERERKRNKKELAQLQHTNATILRQRDEARRVVLHLRSLVGGQSHHMEHIVQSLTKPDDLSSEIEEGYEMEEDDEKSSENGKLRASSRASKRQSGASFVDVADRHLKDKTDAIAHIVRNIAEQCAAAVESLQLAQDAELRENRRHSNLSATQSEDGHSAATSDLGEDSLLQPSGRTSSIPPTPDLIPNRASTAMSFASTTTTPERSSQQYMVKDDIPTKIVEDEEEDFEDARSDNGHAAHESGVVSKHTESLISRPAGARISALGGTR

SEQ ID NO: 41576 - protein, 881 aa, Oryza sativa
MAAAAPAPATTAPAPMSGQMPATKAAAPPVRTGDGLIWLRVAVYQCCPPTLTDVIADLRHRLHALTRGVDRPHYVVFPEHFISTCGRSGLADDKFDHTDATAASAVQSELTRLAPFKAELLSALHELGVGAIVGWHEHSEPPAPAIESGAGAGAGATAVSDADTKSKPHPKPMHNACALVHPVTGAVTYTYHKRGVVSDESLAHITRGTRPGLFALPVPVDADAAAAAAAAGDTKADAGVLGHVRAGIWICSDAEFDGVLRDVLAPADAALTPALVFHSVHIPCSSEAPAGVSAGAALQVHAAAAGVARASQRHKFEHLTRAHGCWVVRADYPLPLGFGTSMCIGPAHTLVPATHSDALFHCRIPLSRAALLSVPPGAAKAAAAGTVTAADVKTPAVRVDVATPPVSPALQWDALMHVPQLTRSDPRDNNGYRAVIRALQHPERVHGDVPPAVAASSPVIACVVLGGGAGAPLTVQWLALLHANSYVTLWDAHRLCVAADSIAPPPDVVGITALEAFSVQSPQPTPTPGAAAKAVAPIRWRYALFVAYAGSAADPKRAGVQRWFAVSPTAGTPPGRAVGQLQHDEATALRVTCVAADALQAGAGRCDWCAAGTQDGQVMLIPIPTSAPGTTSAADAPAPVGAVKYLTSTPVSAYGVASLAVCGRERLAFVTGDNCIGVCDIASGAVVMCEDVSEPAARSHPHVVASDDASLWVCAQQHADDTARCQLTHYRIPTTDGDAKHKATQKPSERRLTVATVDLSPVAVLRHACGALTIAGAAWSDGALRIARLPLSNPAHGVAQCVFPRAATDDRAPSSAADAAVPAVTWAAARQVAPGLSTVCIVTVVVRGATVVTLDSAGGVTVHSLTLNQTPIAWIDALRDE

SEQ ID NO: 41577 - protein, 475 aa, Oryza sativa
MNWLAEVSNLVLGPAEEEQEPAKDAAGTAKIEVFAKAGGGASSCSDGSAADEEVDAESELANLNLGNSDSRDGYLAEVGKVLMQPSKISKYIGMDMTNLMSVPLFIMEPFSMLQKMAEIMEYTELLDQADAADDPYERLALVAAFLVSPFGAAERTWKPFNPLLGETFEMEGVGNGVRFLAEQVCHSPPVSAAHAENDHFTYDIVSAPATKFQGNSLEVYPKGRTRISLRHTGEVFSHVPPQAKVHNLVLGRTWIDSYGTFLVTNTKTGDKVVLEFKPCGWFGAGQYEFEGHVLVAEGNARLAMSGKWNSYVDVCACNPDGSEIEGAELRRLWTCAEKPAEDQYGCTHFAWDLNNTKHLSRPPMASDSRRRADRHALQEREMVQAAAAKQQLEEDQRQERKLREERGEQWQARWFEPAPDMQVLPGEEPADVVPLWRWNGKYSEQLRDSLPIGSDNWQDDVCGKGFSTSVPVASQ

SEQ ID NO: 41578 - protein, 866 aa, Oryza sativa
MAETAITAVLSKFGELASREAAVLVQVGNDIMLLRDRLEWLQAFVRDADRRRRLGSDDFTRVWVRQTRDVAFDAEDALDHFFHKVDLEAQGYRGWRIWRRYLTGCTTQISVRHDLSGQIKRIKSRLDQISENHKEFKIEHTPGAWTSSITEVAAWDNIGDAPVGFDGYLRALENHLLSHEHTPQQRFISILGETGIGKSTLMLTICNKIIKDHENHFDKLIWYNMPPNSSANDLLKQVYERAPDKVPSEGEDTDITKKLRSFLHDKRYLVILGGINSITVLNCVKASLPDNRNGSRVVLILEPESQEVVKHADTLNKKVDADSKNISGSTIQLGRLNESQSAELFCRRVYGYNYTKPRGYKVSYNEQVFKITGGHPLAIVVLAGLLRSKEMPVEWDSVLQQLMPGVEAGESQGNKIAGVLLTKEKPFEWDALLQQLMPTTEAKLSNRMTIERIFSTSFDDLPHDLKSCFLYFAAYPTNITHPADQIMRMWIAEGFIKPEKGKNMEDLAQEYLKELISRFLVEVKYRNECEKIELVQVHNRLLRFLQSEAREASFIEIHDNTDVLAPAAVRRLSIQNDSGNYIPFGNRFPKLRSFICRVEEGEGASATPDLKNDPKNIPRKDPLKFLCGSKFLRVISIGGIHLAELPDAIGDMIHLRYIGVTSCDLENLPSSIGRLLNLQTLDIRNSKVKIIAPKFWRIKTLRHVIAAQLQLPNSVGELNNLQTLHGVKPAENWGGLTCPLDMMTNLQSLELHGFNDANHGVALERALQKLELLGHLKLTGDKIPSSVFTAPSLRYVESLVLDGDIKWADNSSNTSNYSPEVALGICELRPNLTVLKLNSVSKELEEFIEKIRPHLTVYECPTRTDA

SEQ ID NO: 41579 - protein, 870 aa, Oryza sativa
MGKGNTKTKRRDKYYYLAKDQGFRSRAAFKLVQLNKKHDFLSSARALIDLCAAPGGWLQVAAKYMPVSSVIIGVDLVPIKPIHNVITLQEDITTPRCRAAIKKHLQHWNADVVICDGAPNMGKAWIQDAYTQVDLVLKALKLATDFLRPGGTFVTKVFRSADYNALLWVFHQFFKKVEATKPQASRNTSAEIYVVCTHYLAPDKIDPRLLDSKHVFKELDMPLKKPDIFAPVKKKVRANQNGYEEGNYTLFKTCSVVEFIEAKDPVGVLASYNQMAFDDGARALKLDQHASTEIKACCQDLKVLNKKDFKNLLKWRLRARSLLHPEEAEEKKKLAEGLEDVEVAPITREEMEEQLDKELEDKMSELDRKKKREKKKERERKAKLRQRAALGMETPVDGGVQEQEADLFSAESVLRKDAADLLLDQAPDEVLESPEDSEEENEWAGKNYDSYLDHQLDSMYSAYVERTKKRAPAAEPKKKFRMGDDADELPEDERFDGDEEDEEYGERRVRFDVDDEEDGMEEETHRPAARADAKKAKQAALWFSRGIFQDVGAIEDGEPDESEDEDDDEDEDHATEVGGRRATTSRGQKRAAADDDDEEDEEDTEQQKKVKRARKEKLLQAQQGGNPKKKQKKQTKLEEEESAALDEFEEVPVAPSDSDSDSSEAEPESDLDEVAATLAIGKKFFLTKKRKREFEDDGYNRYAFDDRDDLPPWFVQDENRHNKPQKPITKEEVEEMKAKFRELNERPIKKVAEAKARKHLRMQKKVEKMKQKAAKIATADGMSEREKIKSIRTLQKSTLGKAGDAKAAPVYIVRKKHQTAQSRKGPSAGKKAKVKIVDPRLKKDKRGEKRASDKKRGGKGAGKGAGKKRR

SEQ ID NO: 41580 - protein, 683 aa, Oryza sativa
MDTPLLLLLPFLAACLLAPRHAAEAAVTSCAPRRCGNVTIAYPFWLPDSSPPPSSSSAPCGPAAFQVNCDNGSRASLARSFRSGYKILGVSYANRTVVVANDNVQTDASGCPVPKIDVPASLTLAPFTASPANSQLVFLFNCTSSSRPPPAGFVNVTCPGAKAVVRLDTSYNNTAARVVAGGCDYAAVPVVGVPGASPTDYPQLLRGGYMLEWRAPAGDCMACNASGGQCGYDADTEAFACICSDGSSRPGICDAKKSGNKVILIVSLSICATGLVLLACIATVYKCRRRMQNRFSFLNAMDGASRTDTAKVEKLLQSYGSLAPRRFRYSELKKITKSFSQRLGEGGYGTVFSGTLADGRAVAVKFLHHSKPNGEEFLNEVVSIGRTSHVNIVSLLGFCLEGSKRALVYEYMPNGSLDKYIYSTSAAAAAEAEEAEATASPDRDVLGWKVLQEIAVGVARGLEYLHDGCNTRIIHFDIKPHNVLLDEGFRPKIADFGMAKLCNPKESILSMADTRGTIGFIAPEVFSRGFGDISTKSDVYSYGMLLLEMVGGGSNVKAYAEKGASGTFFPLWVYDHLLEDGGVLQSVAAAAAATAGGGAGSPGGEEIARKMALIGLWCIQTVPANRPSMGKVLEMLERSVHELAMPPRPYHSNSSSPSRPSSYPSSASDFTQRSRLSTPGSTA

SEQ ID NO: 41581 - protein, 616 aa, Oryza sativa
MAAALQIGSRPLVGLRSRQHVAPKAPVLRAFSGQNRNLPGQVQPAGLVPLQKPVFQQPAEKPVLVEPVQAAAGDAPSEGKKVLGYDVFTWQKILPLGAMFFCILLNYTILRDTKDVLVVTAPGSGAEIIPFLKTWVNLPMAIGFTVAYAKLANVLSTEALFYTCIIPFICFFGAFAFVFYPLRDVLHPTAFCENLLEQAGPRFAGPIAILRNWTYCLFYVMAELWGSVVVSVLFWGFANQITTVDEASQFYPPFGLGANVALIFSGRAVKLFSQIRAELPPDVDGWGLSLRGLMGMVVIGGILIAGIYYWLNRTVVPRVQKRESKKKKRAKMSVGESFTFLAGSRYIRDLATLVVAYGISINLVEVTWKSKIKAQFPNPNDYSAFMGDFSTATGAVTFTMMILSRYIFKYFGWGVAALITPTVLLITGIAFFCLVLFSDSVAPTLKALGLTPLMAAVLVGAAQNVFSKSSKYSLFDPCKEMAYIPLDDEVKVKGKAAIDVICNPLDKSGGALIQQFMIIGFGSLAASTPYLGVILLSIVLLWIGAANSLAGQFAELNAKTASECGDSMDASGTQQFKYVLDAGSTKGQWVPVTSGETPSGQVKVMTQSEADALNKQ

SEQ ID NO: 41582 - protein, 537 aa, Oryza sativa
MLRAVAIALSVLLVATGAAAAAGDYVVVATNQRVRCPTSGLVHAEMVDELPTATELAAEAQVNVHSLDSANGIVTSHSVDSAELHPLRNGVATTVFASAPILSAEAQAEADTRAQEPGLFTPDAVQSDGLAHSAYVEVEEGVQLLTETERLAMMETAANAHTHAQVGVGSGPRKYLVHAGMNNGGSVLARFEKQTAATCQERCEGDAQCVGFSVVRNPQKRKGLCTLRSTWGSALDNPDFDSYQAHDYSVAPTPFQDIETHVKTAIPGQQLLVLADFARVKPARNQKTAELLVSVDHNQPDAVWTNVPSNYRDANSFRAPSVAGVTNPLKSAGDHTVRIDYSRAFETPAQMDDRSGCQQQRLTAIPFPIELSATRVFDVVGQHWNLAPASSITAKNFVAIPGGVPEGDVEGDGGASAAGDAGSMSIKLAVPEDGARVLVFADISRVQHSHGWTNSVFRITVDNQEIAFTNTGEHYGFQYRAIALRGASGSLKKGEHTIAVQAKTQRGKLFFISDGNGFQQRRLTALVVPKGNLWNKK

SEQ ID NO: 41583 - protein, 116 aa, Oryza sativa
MAVIRGVVVVVLALVVVAAAAADGAGECGATPPDKMALKLAPCASAAKDPKSTPSSGCCTAVHTIGKQSPKCLCAVMLSSTTRNAGIKPEVAITIPKRCNIADRPVGYKCGDYTLP

SEQ ID NO: 41584 - protein, 726 aa, Oryza sativa
MVEKRAAENGSDGPDPKKSRTDGAAAPGKPALNLEALQKAKALLEKQKQLREKLKKLPQVAGAGAAAGAGAAAAGVPSAAALAASAHPLAPGGVDAALVAAKAAKAVEIASKFGVQASLASVPAIQSAAAAGAAAAPRPLLPPGVSGVPSLRPPLPGGLAGPRPLRLDALGREVDEAGNVIEAVRAPITSSLINQRRPEEPLAPPEPAGPSNEDFIDPSLAAKPAARAGAAAAASHRRRRGALEFVEEGTFSRQAEIMRLKQKYGEADFKKHLPSHLRRPPRGPAGPAERAGGDANLTPLGAPPIPALAGLVQGPPGAISDANLVPIGAQQAEETEEEKLRKVLPEASAPPPDVEWWDKPLLEGGAYFTSSSSAAAAAAAAGKQQPHTDGGEQQQQQPEQDGGEPQQQPGEQQQGQQQQQDNIIAAAPDGSGAVMRLRLGKVTHYVEHPVPLEPPAAPPPPPPQPLKLTKKELKKMRTQRRQAREKEKQELIRQGLLEPPKPKVKLSNLMRVLGEEATLDPTAIEQEVRRQMSERQQAHDDRNLARMLTPAERRDKKVKKLFDSGPEASLTSQTCVYRVEDLSHGQHKFKVDVNAQENHMSGIMLVCPGSFSLVVVEGCPKAIKRYHKLMLRRIDWNATPLPQPGEDEEQEEAAPAGDGEAGGKPPNSCHLVWQGVVAEPAFKDFVKEEVASPEAACKLLEDRGVAHYWDAAANFDFDAAPLAELP

SEQ ID NO: 41585 - protein, 523 aa, Oryza sativa
MAQQRDKNWWLRNRQYVIIAGAATVGGFAAYRVYQASQAPLKRAADTLEKYSTAAATAGDVLAILSADIHKFLSSDTNELPNSLQQLGKLARSQEVQDTLAACIASAVKGLLATSPGADGMPAEPSVVDKIIEAVLSDRGHSLVSLAVRTAAQTSSETFCNVLRVGIEAAMGSCSSSNSSSSSSSHQQPAGSPTVSPARHRSFQQQQQQHPGGLQALHPAAATLVSVLANPQVLNLIDALVSTTVGSAVGAYVRQAGQENMFDSVLETLAKPGHKEVIIEVMSSVSAAFCREVAAACVAPASSVASRPPSRLDAALEQQHHATHTVRAASAAAAAAAAAGPGSSPLKPLHPSASRGSLAADNGSEPSTPQSGPSTPEPSVAAEPVGASAAGFASRSSFAGSAVAGLILRRNSFPGLGGSWGSGSNSGIVDPANLGPMSTLVSLFVQAARFQEFRSPMVGVSRSSTREFVLSLLPSSWSLSQRRRDGSASLASAALTACMYRVYTTMSVLLFLMLYAVGPKTLE

SEQ ID NO: 41586 - protein, 1047 aa, Oryza sativa
MDTNVGPAEPPTPASPDSGEGRGRRRDRSDEDGGEGDDAPGSRKRRRSRKGLDKKFECPHEGCGKSYSRAEHLYRHQLNHNPKQIYHCDFPDCHRSFVRQDLCARHKERHTARGSQLLRKDTFNMHNLNPIVTAALGSKNGTPQKPMGMKSQTPHGLQSPASAPPPGLAGQMSPPNYHSPASTLSRNDSLQRTGSDDAYRSGSETKPYDMQSQSAGNFAPPPRPSTLGNYSGGRTPLHNSPHVGNGSFTRPELRAQTSNLSSYGSGSPYNSAVTPSQSYPPSAASTAYQGHSASGFQSQQNFPPFSSLPPPEYPSHSGTPVSRDQENQNQYYNGTSGQTPMNGVESTAAQLDSRMNGVSDAIMDQAPSYAIPMFGGEGYSRSPFAMADDFAAWLFNDNQFGPGGASPMGYPGGGNPVAGASSQIGLQAPYFNYDPSVAGYLNNPAPPSAHPMAVHSILDTTLPESALSEEKRKDLLELIIHRFNETDHALVKKQKEDIMEGNREDDHHVLSLHMMQTYISSYWVHFHPQLPILHKPTFNASTCPDLLLLAIMCLGASCLEKNYGHEVTQACSALSNFLAWHLRWELFMDADFRPPAKLWIFQGLLLLEIFEKMYSTRPLHERAHIHHATTLTLMRRGSSLIGRSALDSPPSIKDGKNNSIGGANTPDEWWNHWITNEATRRAAFAAFVMDSIHATMFGHSAVMVAHEMRLPLPCDEALWSATSSSEVGRVEASLHSNGIKPLSFLDGLKKTLNAQTVRTNSFGRTILMAGLLSVSWHMNQRDLQVSSLGVTHALGGRDKWRGSLTRAFDLWKQDFDSSLARPNDLAAPNAYAYSNGVDDENVFESRTVLHHLAHMAMHVDIVDCQIYAGAGRLLGRSITPQDYNGAQRRMKEVWAPTARARDATFYALQFLSNVMVAGDHSMKPNSSPPSGFSYSARDDFLLNRPWVLYFSTLIVWSYGYALDGPVKQPYSIPKYEDKVKDMVGYLTRVGGVSKPDDLATLRDRNACLGLLIIMRDMFKKTRWELLHEASNLLTKCIDMLVPGAGDL

SEQ ID NO: 41587 - protein, 1094 aa, Oryza sativa
MTRGYVCLVKELFGAFPRAWRPIMDTSALLRHATTALSVPVDRRVVDVHPSFQLVFVGSKPLPADVSNSVTMVSCDDEQGVTEEVWAQLLLTSRPMLDIDDSIFGDLKELHKVEGRRLGCRDSMSSLIRARGARIIDDESLIDQLDDHVTGFVRAVANGSDIGNRISRSDERRRRVVTKLARACDTLFAALKVAERVFRRCFALHVGFFVDMVTKAYTLNRSVNMAVAQQKLAGMSAIEEQKFVGLFVLHSVLDVVATSFPGSVRNIFGAWLTMALLQNELFSDKRPTWWSPDVVSELRRALLQQPSAQVSGAVIINTNIALDLVRALDARDNLTVAATAAQVMDTCGRWMSKGGSEHSTSITRNHVAAELRTEVKPAIRWTEANGVPIMCSSPDGVSAAVAQIQRRGYAEQCRVVISTPVTVDTVFTLSERVRENARGSSVSPLVKGVWHIAIIRDTPLDAIAAEAAIAALLELNSRGVFTEREWRYQLWFVMADVSKTSSPSAAYQSLFPCCVHLSLGYGSAREHLSHCITYGPAYPRDWRESVGHLPAKLAACAALLHVSLAERSHFGAQGGFAPANITDTDLSIVLALLKKMLDSDKCTLLVSNPFSIMRYAAYFVYAARSSTAFYWSRLQKIVGHFLSVASISPDFLLAGLVNVGEGDIYEIFQRSFATTNMHGLALAGHDPRASVLRANGCGCFKWMIAASDPRDTLPAVTEEPLTPLRRKISVVDMALGRRPNSRPNSSASQATLVPQRPSSGRPPSGPRLMSVAIGSAAMRIVGALPTKFADSLWRAEFASLGAAEVAPYTPSDVAEHGRFLERRKAALHRGISVRVADTRSVWLPALAYPHLFLQLFWMSRSKEAFAAVDERQLLNVPQGHVMQPRLVLVVASDDSQLFEQGDCILESAYACPSGDVASLVDSWKKNESDTLRPIKAAIRVQVSPVPVDFASPISPVVSLLGKQADPLPGSSSDTTAASLVKLDIPLITATTRQEQGVESVIENVGLKLLATLPAVYLDAAASAAFVPPLPVAETKVLGGQSAPALLSPTMTAGDSESDDISTLMGDEGLEGALLAEQHDALKKFGVQVSLVFPY

SEQ ID NO: 41588 - protein, 1049 aa, Oryza sativa
MAVCLPPLIFAIVTVYAVAMQPFRFFLLSIALALCLHSVVAIPHQALRRQDGDRSESSQVPPLTTPRSLPPSATIAPSGDASSLRSSAAASTQTSVQPSATGNMQVPAETASLTPQPTSSATIDPKNPLPIHPKVTPAMGLAGAFLLITGLIYAIIGIKNQWIYVFGSAAYLTALAVTVLIVYLMNPPVSDGVQGAFFVAAFFTGLIFGGLALVFSDLTEGFGCLLGGFCLSMWFLSLKEDGLITSSTGRAIFIGCMSAGGYSLSFSHYTRNYGLIGSIAFSGATATMLGIDCLARAGWKEFWLYLWALNDNIFPLNTDTYPVTKNMKAELAGVVIIAVFGIISQLRVWNLVKERREKNEAQELEKQQEKDREEEERGRTVEDKFQKERAQWEATYGNGDKSMQESSVRSSVASPKGSTSIREKEVYADSVEMVNLSKGGVAAAGTTVTVSVLRDDEIQQIDEHGNPIPQHTTVSKSRASISERSVSGASETYSGLAKKSSLNKRPDPRSSLPPPPVVVPLPFTVPTEDDARSPADDNTSVSAVPESNYEPDASRRPMSKRISDMSITRRFSKRASRAFSESSEALVDEYQVEDDRASSIAATLDNDHDNLSVREISPARSPITEDNVATKTSDAVDVKESDVATTPPAAKRAAFRQSLTSSTDPKPNTMDNKRSSLRDSRIRSDTLVGDKSGTGQSEELKSSQGSQNGRPESQVGSLQEGGVLPARLSKVALSYRTNEWAKHLETAEKPHIEDLALSAPPNVILEEVPKEKAAPVSDEIAAPLVGSRRQSKRASVDSAFNKPSGLDRSASTFSQTSLLEQRTYAQPAAAASQPILSRSNSAAQSQADALAPLPTNTLLGRREDLMRKRTSSQSITPGSSATNLLELADQESMSLAQRRQILQHHQASSTPTLQHQPSSASEKRSPPSTSHKWQNKNWAIKGAPAGFDSHQPKRTSSSQSDQKREELYAAWRSNTRDVTPPQTQGYMAEQQRAALIQERRMKEMERQQRVANQQQRASQMESMMRSGHMLDAHKEAMRKMQAGANRHVS

SEQ ID NO: 41589 - protein, 546 aa, Oryza sativa
MQYQYGYPTPPASPSPFELPKCAQQPQQQAAPIEPRYVQPAPEERLGRFLAGTLQLTGILGTGAYGVVYSAVDIKTHVRYAVKTLSKYNADGTPLDRRQVAFQTREIRLHWLASAHPNVVSMPKIIDDPDCTYVILEYCPEGDPFFNITECGQYVGKDALAKQVFLQILEAVEHCHSLGIYHRDLKPENILVSNQGETVKLADFGLATSSDRSEDYGCGSTFYMSPECLDHTTRRPYYYCAPNDVWSLGVILVNLTCGRNPWKQASFEDSTYRAFTRSKGFLKTILPISDELNEILAAIFTRNPDERITLPELKSRILACQRFTEQPSQALPTTQAACVSPVSPPASPESYVSAYEDAIIDEDDEDFEYDDAPLSPASSDDSLSDGSSDDGSMTSSCSSLEELDEDDDLCPEPRGAVTPPPQPEINTAIYDLETQHQVMGYPSEYLHQQPCQPLSFANQLPQEQPMPVQPHINMGFQVPQPQHNFLPSKVAPQPPAPYLHQHHLPYILDVMYKFAHPGQHQAAQPVMHHPHPVPFNQPQVPMFACY

SEQ ID NO: 41590 - protein, 671 aa, Oryza sativa
MGVATVTELRQSFSGKRALRPTLTSRHANEWPPTDVSSDLTVEVGTSSFALHKLLAQFPLVSRSGKIRRAVAEAKDGKLARLGLHGTPGGAAAFELAAKFCYGVGVDVTVGNVATLRCAAHYLQMTEDFSDKNLELRAEAFLRDAVLPSIAGSVAVLRSCEALLPAAEDVNLVPRLIAAIANNVCKEQLTSGLSKLDQLKPPPPPQAVVVAAAAAGDLDSPGDWWGKSVAGLGLDFFQRLLSAVKSKGLKQETVTRILINYAQNSLHGLMARDIAAAAKCGGGGGDTDAVKKQRAVVETIVGLLPAQSKKSPVPMAFLSGLLKTAMAASASSICRADLEKRIGMQLDQAILEDILVAAGPVSAAAAAAAVEHTLYDTDVVARIFAVFLNLDDDSNDEDAVVVGGGCGAFDYDSPRSPKQSLLVKASKLLDSYLAEIALDSNLLPSKFISLAELLPDHARLVTDGLYRAVDIFLKVHPNIKEAERYRMCKAIDCQRLTPDACSHAAQNERLPVQMAVQVLYFEQLRLRSAIQATGTTTTTTNTSIGGAHDAALFFGCAAAAAAPRSGSGVGSGAMSPRDSYASVRRENRELKLEVARMRMRLTDLEKDQVSMRRELVRVGPANRLLRGLARRLGSLFHFRGAAAEPGLQQLGAKATADAKVLFQRRRRHSIS

SEQ ID NO: 41591 - protein, 790 aa, Oryza sativa
MADRVEIPTVALTQVIERLTERRIVVEKAVSTLGEAPQGLRDVFELCRGFEKAFSNIVNESPVANRIKEAFFSEKGLAGNVQRLPFDKLFSIDSVKKITKTADGYQPHLVSPERGLQLMASKALDQVENPVQECVSQVYTLLVSAARDAAAVAGEHTEAAMNGKVPLIVPEFKTFIMPAVIRALDEWRAEGEKMAQMLVDMERSYITAGFFRYTMYRRFEASQSQAAVQKALQKGKSKQGFMERVGLSKSTADADGAASSPEGAIVPAQRMSNSGPAAAPQGISLGSLADPNDYIAAHFDKKVNEESARQSLPVDGWRWQKRFFIFSDSNKTLYYFKTPDDVPKPNGLRGQISLVDCIIEDLDERGNVRPSIGSAMVEMQRGDRASLLLRIRSLDPRRPCVKDHSSIVLRAENVGIKHEWIARMMRAVAASAGPPPPVQAATPQQPEARRTSKDSSDANGPTAAAPPAAAAMSSAPSEASEFLDPVTTEVGVSLERRNSFEVLTTTRLGQGAKFFRAEELRDNHGRLQPAPTIVLGPMAPGAAAQTDNTLAKLNELAKRPLSVQETWETRYEQLMEQFASDMQMYITMVCDTIVTTVPKSVVHCLVRKAEKNLLNHLFGHVHKMSEEELKRMLQEDASVTEKRAAVRLLYDKIKMAIDDVQYKQEKVKRKDHEGDNVLMDAEVLALAVMTEVLSGEQRRRYTDMIDSPFMPALRAPVPLSHVDRPKKLPTAPQGLVEGQAAAAGLARTSVGAGGQPVRRAPAAPSRTGATAANGVPTIPAARRAPPPPPK

SEQ ID NO: 41592 - protein, 884 aa, Oryza sativa
MHFGGGDEVDAPFPDNHVGLSTDEATHRLEVHGRNELAERKTAGWVIFLRCLWGPMPIALWIAIIIEFSLSNLPDAFILLAIQFGNATIGWYETTKAGDAVAALKQSLKPRATVFRDGIWQEIDAATVVPGDKVKLASGSAVPADCTINDEPGSASLPQIDVDEAALTGESLPVTMTPKTHLAKMGSTVVRGEVDGTVQFTGTNTVFGKTALLLQAVEADLGNIHYVLVKVMYGLTGLAMLLCIICFIFLMTYHHTDFKSAIEFVVVLLVVSIPIAIEIVVTTTLALGSKELSAKKVIVTRLSAIEMMAAVNMLCSDKTGTLTLNKMEIQQDCPIFMKGEDRESVLMYSALAAKWREPPRDALDTMVLGAAPLDRCDKYKQLEYKPFDPRVKRTEATLVGQDGVQFKVTKGAPNIVVQLCANASEIQSRVDGIITDLGSRGIRCLAIAKTVEDRWYMLGILTFLDPPRPDTKATIANAKHYGVDVKMVTGDHVLIAKEMARMLNMGTNIQTSHGLPHFPESGDPKDIPDTLGDEYGEMMENMDGFAQVHPEHKYLIVETLRQRGWTCAMTGDGVNDAPALKRADVGIAVHGSTDAARAASDMVLTEPGLSVIVDAMLIARGVFQRMLSFLTYRVSATLQLVFFFFIAVFTLSPARYGVPSVPYFHLPVLMFMLITLLNDGTLVAIGYDRVVPQPRPQKWNLPALYIMAASLAAVACFSSLLLLWLTLESINNFEASLLYHIGVPRFTFGHVVTGIYLKVSISDFLTLFSCRGWSKPFYAHPPSAIVLAAASVSLVISTIVASTWPQSDTGTVPTLGLSRCAPGEEASFSRRMVPLWVWAYCLFWWLVQDMIKIVAYHFLSHSRWMRDEGRVFDDNAAAEDPLIS

SEQ ID NO: 41593 - protein, 660 aa, Oryza sativa
MYSANGGAKPKKERKVTIIFKHTAANQHVAGVEALAVSPDSSRLYTASRDSIVKRWNVTAGRPECDASFEGHIDWVNDVLLYQDKLVTCSSDRTVKIWGTGEEARCLHTVQHHSDYVTCLAASEAAGKLVSAGLRSEVITYDMQTLQAHLLMPYPSSGAASGSSTGADAAAEAAGSGGGGQPPQAPMRSVYALAMSKAGTLVAAGTTESYIRLLDPRSGQKVMKLKGHTDNVRALLLNEEGTLLLSGSSDNTVRLWDLGQQRCIQTLNVHTDSVWCLAASPDFSVVYSGGRDKALYATHILKRKAWLLARESQAIRSIALANEGTRLWVSTTLSTVNGYEIPLEYCNPAVQQQQQQQLQHIQHQQPDRNSADGGVGSSPASPIAVALQGRSLSHTGSGRTIYGASPSMRLRHSFDPGALGEVPLLSPCVRIDGSPGLVALRVLCDKRHILTQDSNGQVQLWDVLAGQPIQQLGQVDLADMERRLFRPLYVESWFTADIKLGALALNLEPPKCFAAEAYALDLGIRDVPDDQKVNLGACLLRAALSQWAHEFSKLYMGGAPIPGVDDTGAEQLPRFSDELPPAVVSTSASGVAWRLGANAFTGREREGEDLPNWVCEAVLRGMLPYVKELKAAFVLLPAEGSGLPSLLQSRLNAPRILQVM

SEQ ID NO: 41594 - protein, 778 aa, Oryza sativa
MLGHSSWPAAALTARDQSRALHCPLYKLPAYGIIELGPGNFINLDSDAFFRPSCNNGQPNGLDDTTGITSIADIRDPFHASITPQAYATGAATVIAWMLVIMLIITPRTFFVGNATGRSGLMGRRGMISGATGGGSIIGVGSRPWLQKVAALTVAISLTLATADTFKIAGRQYREGFIDAMELRDQVVAGMEIKVSRIISDIFIWLAQVQTLIRLFPRHKEKVIIKWVGFALILLDITFSSLNSFGPYENNGRPVHFETAIPALSYLFQLSLSMLYAAWVMYYAITKRRYALYHSMMWNMSVVALLSIIAILTPVVFFITDIANYTIAGWGDYFRWVGAAAASVIVWEWVERIEALEREERKDGILGREVYDGDDMLAPTPSSSDSRWPSKREDQSSQDDKKQGGGGGFVGGLGGIGAFTSMHTDRINNFAHRLGRKMTESPRAQARQKRSIHIPAPAPAHRRSESANRHDRSSRTYVRVQTPPPVPVISSPVSRTDTTSADSTIYTVRYHPISDTPPANQPHQESHVPQQTIPAPQTTTRETRQQTADPEDPEKGGDPHPAPVANKSKWHWQAVANTFRRHGRTPPQELQRGRVIEPLAVDDVTANIPPRNYTGLALADRLGTFAAQQGERFRARKKGDQQVEATLPVTIIPAQPRGQTWSPDIMQQQQQQQDQQQQTAQHDEISASNGFSLARVPIAIEEEEAQSPTRSTEINRPSDGAQHSSSTAVSDRNPHIRFAQAADVLGNRVAHTASSSPVHPTRTSHHSAHTITSTNHDR

SEQ ID NO: 41595 - protein, 821 aa, Oryza sativa
MKRLLPRATAVEALLRLIPDGKLSAQVVEYWVRKRQQEGGPLLPRLWFEQPWKLVAFAEFVVSDDEDFDEHLPFMAVEPRSAHRNRRGGNQRRRPISEEDAVDALFGLRNELEVLRTLADQVRKREKLKRQILMVSQQETQMRLQLGLPLSAPVPRTARQQQRLAPHAGGAGTSAAKAGTSAAAAGTSAAAAARGIAPPERLSPPAAADVSKRLAKAAAAAAAAASPADASHARQTRTAAAAAAAAFELTFAAKREFLAAGVAPAEGPGLSRLQRSAAAAKTDPAGEEVLPAPAPSNSRLLKRRLASGAAAEQGKGRGKGANRQRRDRQAAAAAADAGEADDEMEAGAESGVNPSSSMQAGAEREAADDMAAVEPPKQRRRLTHGQQQQQHKQHQGRQPKAGQVEPDTRVQQQKVAQQQQQRRNQTKQGKASRRAAAAPSRFPSNQHEDDSDDSNDADYTASEEEAEQDELERQQQHQWQQRQRRQQQAGDRQLRGRLGTAYEPVSNGPSSISSEGEGEESAWESDEDFRRRSPRTFRRVKQLQQQKQRQRLKQAASQLPAAAAAAPRMAAEGAENPAQQASLKQQQQRQEQPTAGLQNGRRNGFVIRQLHPVALPAGHRGLGDSNTGSDAEAAGVPPAKVRKGPRTPGKPAAYLPAPPVAPAATATAAARGQRSKQQQGIQPPAGGGGGVPAARRAAAAAAAAAAGHPERTVLRPHNQQQRAGNQLEVQQKSSTRPAATKAASGEAVAVRSSAGAAQVARPASGIGRSVGAGASVRRPSVMAANAKCKRAARSIGKAELHSLGIAAAGLAAPSTQSRRKR

SEQ ID NO: 41596 - protein, 638 aa, Oryza sativa
MASFNLPIRSVSSTSTASSIRNRESISGLSTPPSSTGAAGPARDFAPIADRLIVGVDFGTTFSGVAAVYTSTPDDIEIIKTWPGGNGITSDKVPTEISYDVPPDAPVGTSPTVKWGFQFRPEDSRLRCIKLFLDRSQKLPFYVSQLETATQLRRYNKTVVDAVSDYLTQVHRHTVDTLTRRYGESFMASIKVDYVLTCPAVWSDAAKNTTLQAAERAGMGARASISMISEPEAAAVYTLKAIQPNHLSVGDNFIVCDGGGGTVDLIAYKIMTLKPLRVEESAVGTGGLCGSAFLNYRFEEHVKGRLGASRFDEMKVKKSKTWQMGLRYFEDYVKRNFSEESDEFNVPFPGIADDEEAGIDSGFMILTAAQVKDIFEPVVKEVCDLVQGQVDGLRAKGGVVSGIILVGGFGQSDYLYRRLKAHFTSAAPPPYSERPTHAAGGSSAPGGGDDNASIEVMQPLYAWTAVVRGAVLRGLEGSMVISRKARYHYGTSYATVYDEDKHSVNERYWSPLWERWMVSDRMQWHIAKGEAISPLSPIAFHYTRNFRPGQSLVVTDDLIACEADEPPAAYTRDLIHTCTLTTDLNAVPRSLFTRLTTTKGVEFDNLDFTLEMIVDSAGLGFELKVDGVRYGRVEAEFH

SEQ ID NO: 41597 - protein, 951 aa, Oryza sativa
MTSSSSSLARMLVALVCLCLCGSSLADRTVFSLDSSWKFELQASPAPACQDPNSTFPLNMNDQQCFGLSQVSSASTQDACQDACCADPSCEVWQWCASSDCSNNQTCWIGSMDDCKAGKGWISRGRTVSPPTPGSPCTDARCDPSTDDSGWRSVDIPHDFVVEGNFSADADKSHGYLPFGVGWYRKHFAPPADLSVASTLWLDFDGVQTSSMVWLNGVLLGSHASGYTPSRYFVDNSLIKFGEDNLLAVQVDATKPDGWWYDGGGIYRHVWLTVVDTPGPFIAPWGVYAPSKVTGDITWRADGTPQADSEVWPAVEVWNNASLHDSYKFSLQVSVTDAWGLVVGKTSGEGSVDPKAAAFWNSSQPIELSEASLWHLVAEPAHPALYTVSTQLFVNGDLVDTLNVTIGIRPTHWSNATGFWMNGQNIKILGMANHQDFAGVGVAIPDHLQWHRIKKLKEMGANGWRTAHNPPTPALLHAADQLGFLVWDENHRNGQDDQIPLLIKRDRNHPSVIIWSLCNEVLCNTDNSKRSFSSSLVNRSLSSENWRADSVASMGLDSDDQDGLGDWVSAAKRLKALIRTLDPLGGRPVSANQNGWIGPDTPLDLQGFDYSTDNYDKWHQQAPHIPSMSSETSSAVSDRDEYSNDETGGHVSGYDVNYPGWGQTAQQAWGGIGEPNGQGILTRPFIAGGWVWTGWDYKGEPTPYSWPDINSHFGILDIAGFPKDRFYWYQSWFVQPSPPVLHLFPHWNWETGDNVTVWAYSNADEVELLVNGVSQGRQSMTQYSHVEWNNITYAPGTIEARAYVNGSSAPIVIQRRQTTGPAKKLQIAVKDNVGSTPYAGCRDVTLVAVTVVDAINRLVPTASDEVTFSVSGPATLLGTGNGDPACHTPDKSPTRPAYHGQLLAVLGVGDEPGNIVVTASAPSLGSVSLTITVYPQDGNQSPEWCHTEPQL

SEQ ID NO: 41598 - protein, 1056 aa, Oryza sativa
MWQSVMRPPVPRDYATKAFTFQLLDCMQSKREPQPRVSTVHHNEIPELRLFGTTREGYSVLVHVYNFEPYLWVEAPRGWNPNLAFAFQAVLNAELAQGTRVNDAVVRIETHERQTLMHYQGPHAPRVYLKIVTQLPGFVPKIRSLFSERGVCFEQLYEGPMRYATFESNVIFPLRYLVDAGISGASWVTVSHSFPTPFPGSTAQIEVDCDYTCVTAHEAVGEYMAIAPLRILSIDIECMGRKGFFPEADKDPVIQIANHVVLYGSSNVVDKTIFTVGDCANIAGAEVKCFKKEEDMLVAWAQYLVAIDPDILTGYNITGFDFPYLLNRANALNITNRFAYWSRMRGEKCVPREKQFQSKQMGNRNYVEVIIDGRIVMDVLVVMKRDHKLRSYSLNSVAQTFLGEQKEDVHHSIIADLQCGDSETRRRLAVYCLKDAYLPIRLLEKLMIIVNNVEMARVTGVPVGWLLERGQGIKVFSQMLRKAQTRGLLFPVYEPRGPTDGIGYEGATVITPEKGFYNCPVATLDFASLYPSIMMAHNLCYSTLLRKGAERDMDPESYTVTPSGDCFVKRDVFKGILPEILVDLLTARKMAKKAMAAATDPLEYAVLNGRQLALKISANSVYGFTGATVGKLPCLAISASVTSFGRQMIEETKRLVEAHYSDVRVIYGDTDSVMIRCADLPAPEGEDEVKDAPAGGAEAEKLTRKQSAAATEARDKERLAAAMKFGLEAAQYVSTHFKAPIKLEFEKVYFPFLLMNKKRYAGLLWTNTDKFDKLDAKGIETVRRDNCPLIASVISGVLNRILIQRSVESAVEYVKGTISDLLMNRVDISQLVISKAFSKSAEEYQNEQAHIALVERMKKRDAASAPTVGDRVSYVIIKAAKGARAFERSEDPIYVLENNTPIDVQYYLDHSLTPPLMRVFEAVPPDPMVLVKGDHTRHVSQVMPSKNAGGLMRFVKVQPQCLSCRSNLPNGDNSAVCGACEDKAPDVYANIMAKRNHFEAIYSKVWTQCQQCQGSLHQDVLCSSRDCPVFYMRKKVQKDLDEHQAMLDRFGVVGLE

SEQ ID NO: 41599 - protein, 799 aa, Oryza sativa
MSSKPQTTVSPSDRIAELEKENASLRARLRDVERTLAVETQRMQQRVEVAANENAQLRAQQRDLERIVSALKAELRDVVTAAAAAAAAAPATKKASPKAPPRALSVSKVATLTASKLSSPAAAPGAGAAGAAASAAAARASDALNQAAAARVTAERQLMLLQREAEQMRAQQTEMARRAADVQARMAEMAHVMDVIAAETDRHARAQDEMNAQLKRVTLTAAQAKERAEALKAAAAQRRENAAAVAAGGGATGAGAGAGAGAGGAGTGGGADADAAIAEADAEHRRAQAAAAELRDAAEQRAADLRAVAAKRDAIRREADAIAAVNGELRRHMEEVDRRVEECVERVNAERKRVAQLSIAEAEGKAAAAELVEAAAAAAAAAAAAAAAANASSQASAAQVPGAAAPAPANANAGSASGSAMVTEIERRTREAARLREEAVARLAAERSARERVQLEREQRRRELEFARDRFGRERLEVARQNELEALRVSTGADEQDQRQALDDQMRRERAEREEAERVRREREEQEVMALARERELLMAQRELRAQREREDEERAREALMRERLSREREERERREQLELMRRRMQERAEAERLEAERAAQVRARASVDAERAQQHALEAQLAALQRERAAMAVEADRQLRAAAEEEDERRVAQRRAGELLERERDRRMQAADEKRAKQRLKEQMKAERELQEAQLQAQVEVRAKSSAQLALAGAALGGAAAGEAAGAGPKPVTGKSTVTLARSSLLLKAKPSANAAGAGAAGTAGAAGAAGAGGAAEDDAGPMPPGGAPATHPNSATA

SEQ ID NO: 41600 - protein, 763 aa, Oryza sativa
MDDVAETAINTLLMYLAGSSVSVLVNTLVEKEHLASMIYFYVKSHYDMIIWWTISAVETDKLAEVEARFFEVLKEHASKPLDMSYLTDCLHRFKRQFLYSAETGQDEYKDPVIKDHLFGNRNGSDLEAAMKDLEGFDKLESWTEEEWRAFLNKWLVEAHHVSLLGKPSLALNEKLKAEEQARVKAQQEKLGEEGLKEKAKKLKEAQDENDKPIPEELIADLKVPSTESIHFFETTTARSGLAKKLGVSENKIQKIVDSDENGLPLFIHVEHIPTSFVHFGLILGTAQLPTELKPLLGVYLTNFFATPIVVDGKRIEFEEVITKIEQDTIDVAVDHGSDIGNSEMVYIHFVAEAAKFETVVKWLKTMLVDSVFDIKRITSAVKKMLAEVPDEKRDGNSMAFAVDRIIHYDAASSVRAGNTIVKGAYLPRILRLLKTSPQTVLDKLEALRKHLLTFSNFRILLTANLETLPAPISTFKHLTQAFPPPSSNPSVNPIDDRTALLSDIGRAPGGTHFLIPMPIDSSFAVLTAKGLKGYTHADLPALMVALSYLDAVEGPMWSSIRGTGLAYGTNFFRDTETGLLKFRIYKSPNAFSAYAKARDVVRGYADGSRRFEALALEGAISSIVRDFVDERATVVDAARASFVDTVTRGVGKGWQEWALREVRKVGAEDVRRIMGEVVSAVFEADKADLVVTCGAIMLNALKKDFEDAGFKPQVKNLADFQDTYSLEGGEKGEGEDDDEDMEDADGTDEDGEDESESGSEMEE

SEQ ID NO: 41601 - protein, 800 aa, Oryza sativa
MVAAVTSSLMAGQDPLIHIGAVIGGWVSQARTGFLKIDAALKLHVFRNERDRRDFISIGTACGMASIFNGPFGGTFFVVEEVGSFWNWETTAQMFFACVMSTATANFWVSGITYGKWGVFDPRAIVVFNIGTSTTFYMYELVLFAIVGATGGLLGGCFVQGMLKIQTWRRKYIVHRWQKFTEMVLILTSTCLTLFVLPYVFACAPTYHTPLETTATFGMYNPFRHECNSGEYNEFATLAMQGQINTIKHLVSRDVPDMYSIAVTFTYGLWAFGFLLITSGATVAAGLVTPIWLVGAVMGRLWGEIFLWMFPGSGIDPGVYAVVGAGAMMSGVMRMIVCVVAFMIEVTSDLQFVLPVIVAALVSRSIANRFGQSMFNTFIAFKNIPFLPPEPVTSNALLNKMRAYDIMSRPVVALPVHCRVADALRVCQKTTHQGFPVTRGSKRGGELTGLISRKFLLILLKHKIWRDPTLYTGRDYHFMMQKKILSVDEVKAELTDDDREQWLDLRAFMNRAPTRVHENTNAALTYRIFRLLGLRHLPVINHQNKCVGIVTRKNLLEPILVRAFAESLKRGALAHAKLREAAERVREQSLSSRAPNIKELSPDDDYLIEDIDLEMAAKVAFDDARDILTGKKKLNISLPEIADTLNPFKLGIKRTPAKQGVKAGSKAGSKVTTPALKAATPSGAAAGPAVALPAAAAAKGAIAAADVKDSDAKKPGGHARTRSISKPPAQPRPNPANATPAELAAALPKAPAPKAALPGSVGEGVRDLALLPVKLLDAVLPTSDEGITPDANNDLDVDAE

SEQ ID NO: 41602 - protein, 512 aa, Oryza sativa
MSRFFAASDSSSEESSEEELYSNDEESEQEDSEQDSDEDDSDDDSSSDSEGGGANRFLKDASSDSESEDEDANKVLKSAKDKRFDELEATIRQIENAQKINDWAVISDQFDKLNRQVPTLIKQNDGKVPKLYIQAIADLETVVLETHEKQKVTPKKMNQVNTKGFNAVRQKVKKHNREFQKDIDAYRENKDEFMREVDEVEVAPKEKKKKSKTSQLDLGLVEDATDDGFITVGAGGKAVQYTPEGILKHLRAIVEQRGRKNSDKLEHIRTLERLFDVAINDYQKIRVLLTLISTRFDLTSGTASHMHQEQWKLADQEFGKLLEILENTKEIVVIENAEEWEDDEKLPPITEGEIFRIPGSVVSFVERLDDELTRSLQHIDPHTAEYVERLTDEALLYAQLVRALIYVEGLKKNPSLDLPQESLNRVVMRRLEHVYFKPSQVVPSWKQTVGKLFPIPSILKSHHGPSPTILPPSFRPSAHISSNIAKALFVLGRCCAKSISWLCMTNTTRLAT

SEQ ID NO: 41603 - protein, 923 aa, Oryza sativa
MCDDDPSRNSLFRSRPMSYVSITAMTDIAYDTIRELGNFGLFHVVDLNAGKEASVNDKNLAGYKKRVQDCLMYERKLHDLEEQIKEYNIPAPPPLREHEERRHTHKDNAVLPDIRAHLEPLEERLRRSVQVQADITRAISELTERVWVYKTCRNMQVGRVEAHDDKHEVPYSAAAAAVPGAILVPGTTAAGLPAAAAALAPPPKQNKDVELGERPVGTPPGTTGGGDSKLNQLGVSLLSADHHAPSGAGGAAAKFVLPKFRTTLTGVLPTDKSSFFQRMLYRISRGNAITHFTDIPVPIPDAVSGELVNKSVFSVIIVVSELLEKRITKVCQLFQATLVRMPDTQAAIDEALHRTEAQIDEQRMLKVNTLRDIEQALRQLAGDPQNVSPLREWQYLLRCEKAVCDTMMKCHFYLTMVAFEGWCPVEEVDNLKIAVKRAVPPGDKIPEPAVEVAPEKPIRDPGMPPTYFKLNKFTSIFQGIVNTYGVPRYQEVNPGLFTIVTFPFLFGVMYGDIGHGTFVTILSLLMIIFEDRLTRLKESGNMNEIFRMCFGGRYLLVCMGVMGIYCGTLYNDCMSIPVSLYAPTWEYEGTADEPATRIGAVYPYGVDPAWYHTKNQLTFFNGMKMKTSVILGVTQMTFGIIMGLLNHIHFRDQISIWLEFLPQLLFMLCTFGYMCILIIIKWCTDWSQTSQEPPNLIQTMITMFLGLGGVKEGAQLYAGQSTVQAILLIIAFGSIPVMLLAKPCILAYCSKDDHGHGHAKPQAAQPAAAAAGDVEAKGFDEKGEVIPAEAPAAGAGAAHEEEHTFGDYMIHQSIHTIEFVLGTVSNTASYLRLWALSLAHSELADVFWTKLILEYGMYKNSAFFSMVAVAVWFVMTAGVLLSMDVLECFLHALRLHWVEFQNKFFHADGYAFKPFSYDVVEES

SEQ ID NO: 41604 - protein, 850 aa, Oryza sativa
MKFSAILITALPAVVEAVYSWKNAKFGGGGGFVPGIVFHPTQAGVAYARTDIGGLYRWNSDDSWTPITDSITDNANWHNWGVDALALDPQDPNVVYFAAGLYTNSWDPSPGAIYKSTDKGATWTSSTLSFKVGGNMPGRGMGERLAVDPKNSNIVYFGARSGNGLWKSTDAGKTFKKVDSFKAVGTYIPVPSDSTGYNSDINGLTFVTFDSTSATINGATGRIFVGTADNVTASLYVSEDAGSTWNAVKGQPGKYFPHKCRLQPTEGALYISYADGTGPYDGASGAVWRYALATGTWTDITPVSGSDLTYGFGGLSVDMKKPGTLVVASLNSWWPDAQIFRSTDSGKTWSRLWQWGNYPEMIYYYGISTPKAPWIRKNFLDTDSKWLGWMIESFEINPTDSDHFLYGTGLTLYGGHDLTNWDTKRNITIQSLADGIEETAVQEVASAPGGSELMAATGDISGFTFASAADLGTSPKRVWDNPKFTTSASVDYAGNSPGKVVRVGNDAGAQMVATSTDGGVTWNVYPGADTNKNGGAVSYSADGDTIVWSTGTGGVYRSVNQGSFSAVSSLQSGAVVASDKRNNKYFYGASASTFYVSADGGVTFAAGGSLSGATSIRDIAAHPTTAGKLYVSTNAGVFTSSDFGQTFTKTSAGLSDTYQIAVGLGSGSNWNLYAFGTGGNGARLYGSADGGSSWTDLQGDKQGFGIINGCRLAGSGNVANKVYVGTNGRGVFQGDGSISGGGGSSPSGTSTTARATSAAATSTSRMMPSSSVVSTSTPTSKPVTGSTTSKISSTTLVTSAPPTKTSSAPAGGPTAGTYEQCGGQGWTGPTQCPSGWTCKKWNDWYSQCVQ

SEQ ID NO: 41605 - protein, 905 aa, Oryza sativa
MAQRDRPPLYLPEQRTARHGSDAQRTTTTTSSRTTTTVTTTKSAQPAPAAAAVAGVPSATATAAAQAVPLHATAAPGGAVVAATPARSAPVLGASASVSDIKHSPFPAVATAATAVPRATAANSPGVAAPALPLAADTAAPSASSSGAPPMQALLQYAQRAIEHHSHESQERARQERLLSHICDALQSIARSVETEFPNSYFLVTSDESVVRQLRALTDLRALDAALTAAAGPPAVPAASTSGIPAIAADPAAAAALAMQPVDLLAANAAAAAHIKQLERQLAAASAPIVVAAPLPPPPPAVVAPPPAAVSVAPTPARPASVPAHQPDEEKQPEVDDREPEPHRAAAAEPAPAAAPPISATPSANRNERAEGAPRTANRPVRFGDPVVSRAQPLAVAAAAAAVPHRSDRRSQPPAAAAGDDNDVDVYVDAEPVVAQPRWQREQAPAAAVKQQLHGGYSTATAVHSNGVSSRVRTAHSRDTKPIAADPTAAFAPAGAVEPSGRRERSVTARVTVTRTGQPHGDPRGAQQPAAPVAVHFHTERRSKPRGESVAAGSSVEAPVADARRLHRSTRAPPAVPAVAQPQYISHAPSSSSRSQRHSHDRRRSGGAARQSPQRYARSSRGASSRGASSHRRSHSRSQGHRDRSASRSVSPYSGSEYSGSGSGSGSWCSCSDGGSAYGSDGSRSPSPVGARGGGSHRHAVVHRPRHHDHTHAHSHSHAHAHSHAHVHSGGRRSASYRDALEREVASRPVATAAAVSSTAANGDAKYSTPAPARAVAAVNATARTAAVTPAPVSTTATGGSATATPRNDAGHSRSGSASAVAEAGAAPPSASAADRKIEDMRQRLAQLRAAVANTAATASANGLAPALHSAAAAPTAAGGTPASPAAAANGGDPDASLVLSTQPM

SEQ ID NO: 41606 - protein, 744 aa, Oryza sativa
MKEPTAHMAPVVHRFFLVDVVVLFAAAAAAAIPASAEAAASSSQTDALLAWKASLDDAASLSDWTRAAPVCTWRGVACDAAGSVASLRLRSLRLRGGIHALDFAALPALTELDLNDNYLVGAIPARISRLRSLASLDLGSNWFDGSIPPQFGDLSGLVDLRLYNNDLVGAIPHQLSRLPKIAHVDLGANYLTGLDFRKFSPMPTMTFLSLFLNSLNGSFPEFVIRSGNLTFLDLSHNNFSGSIPDMLPEKLPNLMYLNLSFNAFSGQIPASIGRLTKLLDLRIDSNNLTGGVPVFLGSMSQLKVLDLGFNPLGGTIPPVLGQLQMLQQLSIMNAELVSTLPPELGNLKNLTVMELSMNQLSGGLPPEFAGMQAMRVFSISTNNLTGEIPPALFTSWPELISFQVQNNLFTGKIPPELGKAGKLIVLFMFGNRLSGSIPAALGSLTSLEDLDLSDNDLTGGPIPGNMGNNFKMQGVDHSSGNSSNSRSGSDFCQLLSLKILYLSNNKLTGKLPDCWWNLQNLQFIDLSNNAFSGEIPTVQTNYNCSLESVHLADNGFTGVFPSSLEMCKALITLDIGNNRFFGGIPPWIGKGLLSLKFLSLKSNNFTGEIPSELSNLSQLQLLDISNNGLTGLIPKSFGNLTSMKNPNTLSAQETLEWSSYINWLLYSDGIDTIWKGQEQFFEKTIELLTGINLSGNSLSQCIPDELTTLQGLLFLNLSRNHLSCGIPKNIGNTKNLEFLDLSLN

SEQ ID NO: 41607 - protein, 572 aa, Oryza sativa
MYKAALTDIQSINKTESATDDTREAERRLKDLVAGRRPSLANGGARAAGPSGSSSALRGGRSPLAWPFSAKVTLGNETRLVQLTAAAGYGDLLGQVKAKFPNAGHVLLKYVDKDGDLVTITCRSDVQTALAEALKAMDRRLGVIPPIKIACVPVADASEVPQIPYDELQEAAQLMLQQQQQLAAAAAAAQQQQQVQQKQMAQTTSGEIIEIDDWLVDFANLFREMSGIDADRHIDPHNEGWAATSKAMDVMLGSEEAAPLFDKAIQRFKEVIAIGYLSWGNIFICKGHKAMEIAALAEGEVDAELAAKLTAELDAAEAKVKQALEVKDDLVEGLTTLAGIEVDRAKVAAKFLVKPTPPAPEGLAEGSKEAEAAAKAAQEANAAATREALTKIKAADVEAAKPHIEAAHEWYKKAHAVGLQVEQQRKAEQEAKHKEQAANADAAAAGSQQQQQEGTNPGEMSLSAHAQVLYGNMLYEWSQVLASVGQEWRHLLDDAAARFRDAGCAEKDIRSALKNHTQADQLDLGPDPEPEAEPEPAAEQPAQQQNQQHKPAPPEAKGLPKLERKPKEKAAQ

SEQ ID NO: 41608 - protein, 696 aa, Oryza sativa
MYSKLAVVAVVLMAVAGAFADDFTNNCNAQKRVCQNGGVCHENLPVLGTDAGSVNAWKDPFCICQAPYGGNDCSRTIRECKDSPCQNGGTCSPASCTQSHNSEQYDCFTCSCPFGWGGAPSYQGGSNPSGVCDWKLVGNDCRNGNLCANGGTCTSTSPPLPYAYGYQCSCPTGWLGGQTGQTGVRANVAYNCTVPDCTTSDGACQNGGTCTGGLCSCGFFGGYRCELPRFCDVAGACPDGYTCSNTGPGTGTCTAPSFCSTHTCQNGGTCNNNGGPGNGAYCSCVAPNDGGLSCNSTLFCNSNPCQNGGTCSNTISYVGNQGTCTCPLNFAGKFCEKPVVGCAAQKVKPTDYERCAPGASCDVNEWVSTCSCPSSTTGGLIYYDCGCNSTTISKCPGTSGSLQGAAADMVCQNGGQCVESADQTLCQCRAGFWGDKCQNYDNPCLNSPCENGGQCYITSETSGLPMDDRFWAWRCRCKWPFYGKNCEKQAPVATMDGKAPVVCGDANSPCQNGGTCFARPYNFNLGGYFDSDPYTDNDVEAEPWACECPSVSAVQLGWKGMQCEIPVEQCTASTCQNNGKCTNGAGNSGPNCACPCGYAGDRCEFAATNIDATAVSLFSNGGSGGIGYHLEFCSREPCQNGGTCYHDKNGVTFGCLCKSGWAGTLCQYSVRSSAAGVVPSLVAVAAALAIAFAAKH

SEQ ID NO: 41609 - protein, 737 aa, Oryza sativa
MAAAAAQGERPDLGSLVDELCATGRAAEAHHRVSLLFLSSSSAAVPSRHLDGRAADGLLRRLLRARKPLLTLRLLQAAPPAALVPSLPNYNRLLALLCGSSAPLLLVLLAHRLLLRMRAAPDAATYAALLDGYARIPDPRAVRKLLDEMPRRGVAPSSLARSYLVKALLRSRDVDGAMALVDNHLWSSMERSNGEDQELKNAAFANLVQCLCIEGFFHIVFRIAEEMPQQRCGVADVFAYSQMIDSLCRSGQHHGASRIVYIMGKRGMYPSTVSYNCIVHGLCTSQKPGGRLRAYRLVMEGVRFRYHPREVTYKVLVDELCLEDELAKAKDVMELMLKVTPDDDTRTRIYNMFLAALRVVDNPSEQLDVLVSMLQEGCKPDVITMNTVIHGFCKVGRAQEARRIVDDMLNGKFCAPDVVTFTTLISGYLGVGEFAEALHVLSTLMPKHQCLPNVVTYNCVLKGLLSLGLLDRAMEALEEMKSSNVIPDSVTHTVMIKGFCDAGELEKAKSFWDNVIWPSGMHDDYVYSAIFRGLCKLGKLEQACDFLYELVDSGVAPGVLCYNILVDAACKQGLKKLVYQLVKEMRRNGISPDAVTWRIIDRLRLYSDEKQDGELQMSATDGDPSSADDTVDTLISNRDEKHTPSLPSKTSKFGTVVRDDSSKCEEEEVDYSPCASEDPPNIIEPAKEEACPMNNSGAGTTMGNRGMTREEGLMKPDKQPLKRELLSRVARKVFGLL

SEQ ID NO: 41610 - protein, 881 aa, Oryza sativa
MPEILQPAVYNPAPLGTMDEPRFVSPLDQRHPLNVADDDSTIATYYFAATYSPSSSYLPSAVSPHNTDDFPTPKARLFDMTPRENTQFALQPAPSSRATQSREDSDFDSLYDVTDDEAEVPLHASKSVRIVASQPKRRRFPSIVIPSPSAWPTIEKLKSATSAVPMTPSNLLTPSRRCLAMIDSHNLQVPLHSAAPSLDGSLTSEEMDRLSCPATPIMQIRPVSTSSADSWGPVQLDLQAMETLQHLGNSPSTGQSEQSADQASSNTEGPWEMQEVARPSLGLVIPNAIFGNVSSGSTPISALSVPSPGGFFSSLQSTARHTWSLPKRDESVPNTSTAENFYGVPWKSRRNSSPPPLPARRQSALSGPTLNELEDGLPTARPVVLSPVDENVEVKEINPSKTIFQYNENYNAELQKLSAANLEMTGRWLEEQVELQAALREMNTMGSPIASNEAHSRDNSVDKPVIKKTVTFAEPQKSPVEEESKPEPIMTYVQGLEYLRARSQKRDTFIHRQARAEAMHVQRRCTPLAHRDQLLGKFELSEPDRPAPPRPVSEFFMNDPTVLKERIARAQKERQALDQMLPVQWVLQAQKQLNGGKLLSKASIRCITRTSAPRILDVGGVVANDWAWNVAYDYPYAQVTTVYTCGNNHSTNVAGPSNHKHMPVPNMWTLPFPSGHFDVISARSLYELLKTSKPLGRSADEYDLCLKECHRCLKPGGVFEFNLLDADMLHAGRNAQAMGVEFGFNLKTRGYDAQSTKSFLPRLNKAGFRDVQRAWMVLPMGNTAAKWKDELNVGAKAVEAEKTIGVDGEVGFEKAPVTGTTIDAAQLTGIVGSWAWEKWLLKLQMEMGKDEEKLLEGAVQMLEECAPGGAAWRTLTGHARK

SEQ ID NO: 41611 - protein, 885 aa, Oryza sativa
MRRAGLKLQQFVGQSVADPTLAERLLSNSFAGTSGASNISTTFSRVLHSSGRVAINGVRAPAGGLLSLPQATRGTRQQRLHARLADFFRRSLSAESGPQKSFKNFFPKGSKPSNAASNTENKPLEGGSSGGSGKEDGGNKMPELNINANVMLATTFMGAVLVYQMLMNSGPKAQEISFQEFKTQLLGRGQVGRLEVVNGNMVRVYVRGSPNGSPAGVAVAGGAPGAAGTAGGRVSSEELISAGTSGEGVEPRHRYYFLIGGVDSFERKLDDAQRELGLDSTAFVPVKYSREVSIVNTLLEFLPTLLFFGWAYWLISRQMRNMPGGFGGAGGPLSRIGRNNGSNNRGAGGFFGMAKANVTSVDKNAKDKVTFNDVAGCDEAKQEIMEFVDFLKKPEKYKELGAKIPKGALLVGPPGTGKTLLAKATAGEAGVPFLSISGSDFMEMFVGVGPARVRDLFSQARSQAPSIIFIDEIDAIGRARGRGAMAGGHDERENTLNQLLVEMDGFNTTSGVVVLAGTNRPDILDKALMRPGRFDRTISVDTPDIKGREQIFRVHLAKLRLEKALEHYSERLAALTPGFSGADIANVCNEAALVAARASDTTVNMLHFEQAIDRVIGGLEKKNKVISPEGRRTVAYHEAGHAVVGWFLEYAEPLLKVSIVPRGSAALGFAQYLPNESLLLTKEQLLDRVCAALGGRAAEEVMIGKISTGAQNDLEKVTQMAYAQISVYGMNERIGLVSFPPRQEAFDKPYSQQTAQMIDQEVRTFIDGAYQRTVALLREKKDLVDAMAQALLKQEVLNIDAVEGLLGKRPFTSQTMQNIDRYRHGNAGVPEEPAADPSKAESSEEGSKSGSSSSGSGGEGGGSGGSGEEKKGVDRQLPEGLAVAT

SEQ ID NO: 41612 - protein, 810 aa, Oryza sativa
MEGATASKEAASHGEEGTDGQNRTAHTLTACCRCRTRKTRCDPGLPRCGPCERTNSHCEYYDPTKGRKIPRNYVVHLQHKVRELEKQLADLERDDIEPDAEDVMRGAAAVRVQDTDESKFLGPSSGITITRLVMQLAKQFTESKSISEIIPHARAKSIKTTFTQEDKRPTSKIYPLVSDVAAEELPNRELTNLLVDLFYCKVHPMYPIFHEPTFSKQVDEVYNGSTDPYLNYCLRMVIAISLQKMDTQYAGLADSYYLAALNYFEAAIKPMNLKTLQCFALVAGYSLLTPTRTAVYYIVGLGVRLCQALGLHEEKTITLGPGGRRADPLEIDMRRRLFWSLLTMDYGLSHSLGRPAHFATRREHIDVNFGELVDDVFITKEGIKPAPQASLKKWIGIHFYKMRLLQLEIRKMLYQRKKPEPKDDQHPWFAEMQSKIEAWRDTSPEVDGGSGLNKVWFVGRYNTMVVFMYRPSLQVPRPSLHAAIRCYDACQFNIYMTQKQIETKTVDMTWIFVQAIFMCVNTILWTLSYSEVRRVHSREEVEGHMNVALESIRLCSERLPGVASAMELYYNLIGACMKIYDKDGDVPIAAGSPSDTASVISNNIVDGINRSRTTSPATASTASVSTPSDKVSAPFGYLPNQNQQVFTFANGQSNGTSPYATSPSAQHASMQSSPQQQLHAYTDMSPKTSIDATMPIYSYPPTTQFTSLPTTFAELPQWNPTFSMPQHDPFSAPTMPLSSPFYNEAYAANQGYEVADYLNPGWSQEARGNGLNQQQQMQLMQDFEMHETSKIEEMIQQSNQLFRPPQLQTF

SEQ ID NO: 41613 - protein, 1076 aa, Oryza sativa
MGGETKPAATAPKSYPVRAPKPVGQWISGIYRDRLNQFLSGGQYEGQNLLAMMREAVAAGPHIELSVWSAPNLSRPTFKEAVSHEYKPTEVGAWFGPSWSTHWFRVKLRVPDYMVKLEHLELHWDANNEGMVWSSDGHPLQGLTGGGERVEWILPDSFRDSKWHTIYVEMACNGMFGNAPGGDSIQPPDPNRCFQLARCEMVAINTQARALRIDAWLINDAAREFPEESWERHKALKVSNDIIDTFELGNKDSIIKCRKIAQEYIGTLVDSHRVYESDKTPLVYGIGHCHIDSCWLWPWAETKRKVARSWSNQCDLMDRYPELNFACSQAQQYKWLKQDYPYVFDRVKQKVKGGRFHPIGGSWVEHDTNMPSGESLVRQFLYGQRFFESNFGQRCQTFWLPDTFGYSSQLPQICRLAGMTRFLTQKLSWNNINKFPHTTFNWVSLDGSQVICHMPPSETYTADANFGDVKRSISQHKSMDQDETSLLVFGKGDGGGGPTWEHIEKLRRCRGISDQVGLLPRLHMGNSVDDFFDKLQDKADKFVTWYGELYFELHRGTYTTQANNKLNNRKAEVTLRDVELLATIASLKDSSYKYPKKEIDDMWEGTLLCQFHDCLPGSSIEMCYDDSDELYAKIFKTADKLRKDIYRVLGLSETNATSVQDVVALNTLPWHRKEVVDLGEKECGVACGAGNVLSVRAFKTSATKKAVSVAEESSGVFVLENEQLRIKVKDGVITSLYDHKVGREVIPEGGKANQFVIFDDKPLYWQAWDVEVYHLDSRKELSSGTTQISEEKSHRVSVVTKTKISDESSVKTTISLSAALEGQQSFVEVHSEVDWHETMKFLKVEFPVDVRNTEASYETQYGIVKRPTHYNTTWDMAKFEVCCHKFADLSESDYGVSILNDSKYGFATVGNPMRLSLLRSPKAPDAHADMGTHHIRWAILPHEGALGHTTVRRAYEFNNRLKVMSKPEEAMQSLLSQWPVRLTGSPSLVLDTVKRGEDDEDVSRGELPTRKGRSVILRVYDSLGGRSRGTIETSWDVKKVYKTNLLEDDLEEVAFSDGKFDIDLRAFEVVTYRLQL

SEQ ID NO: 41614 - protein, 1175 aa, Oryza sativa
MQHLPIYRSIRTLSLCMPFLAQYAGASLLERQSLAPPATLPDTWSYQGCYTDSVGQRTLRGATTGSATNSAASCIAFCSAPAYAFAGTEYSQECYCGNAIASTGTKATDGCSMACSGATGEACGGPNRISIYATSSPSGGGLTQVEGTTGTWTSLGCYSDAGGARLLANGVEPLGGVQNNSAQACIASCEVNKYKYAGTEYSGECYCGNTLDNNQQPVDDGCDMACNGNQTQFCGGANRISLFGVNITRSVSSSAIVASSTVLSSTPTPEVTPTPSPSDPVVVVSSAAASSSAAPQKVGWQYEGCYTDGVGGRTLTAGTAIGGGMTNAKCKDACRAAGYVLAGTEYSGECYCDNSLKGTGAPAPDGEAQCNMACSGDATEICGGPNRLTLWKFYTGNEPTGAVSSAPPPVASSSAAPPQATGLPTGFEYKGCYVDGPGFRIMNYQQPDSQQMTIASCANACAKAGYKIAAMEYSYQCFCDNVIRMDGKPATSDTECSSNCAGDATQKCGGPDRLSVYSSQTTLKVIGVPKPVQNVGDWTYQGCISDTNGLVFPWKSVNATGNSPEWCLGKCKEYGYMAAGMEYGEECYCGDVEGIQQQNSQVRPESECNTACPGNPEAICGQGNRLSWYKWTGDPIYVWSYPTGPAAGQYQLIGSGPIIPLISQPGINGKVSLLEKHGTGTTGTTGAFEFDPSDNSFREQQGIKTDIFCAAGLTMPDRAGRQVNIGGWSLDSTFGVRILTPDGSPGVPGTSAWQEDVNTIKLQRGRWYPTGMVMANGSMLIVGGQDGSNGAPVPSMEILPRVGPVYEAQYLRDTDPYNLYPFLAVMPSGGIFIEYYNEARIIDERTLDTVKILPKVPGSVNDPSGGRTYPLEGTQVLLPQYYPYSDPLEVPICGGAARAPRWGLDNCVSIAPDTGSAWTIERMPSRRVLSCMATLPDGTYLILNGAHIGEAGFGLAEDPNFNAVLYDSRKPKHKRMSIMANTTIARMYHSEAVLLDDGRVLVSGSDPEGPPYPQEFRYEYFLPPYLLSGKPKPKFSIAQKDWIWEAQYAFTLTSTSGGAIKVSLLGSESSTHGSSMGARILFPQVSCSGNACSVTSPKGPYVAPAGWYRMFVLDGDMPSMATWVRIGGDPGQLGNWPANNPVFAPLPGVGPIAGSGTSAQSTGANTGTVARSFVG

SEQ ID NO: 41615 - protein, 212 aa, Oryza sativa
MSLTNAPSSMVSIVTPVTDRDSGRTVAGVPPVLVGASVSSAPELRGRAYLVHHVFYEDGSASADGGGVAPASRASIAALREVEEEDDDGEEASDCAICLDDGEESRETCGSGRRKEMPCGHRFHGECVERWLGIHGSCPLCRHEMPPATAAEAEEEEVVVAMVHGERVVMRGRRVVLSVLVMGRAHDDGEGPEQRGTDPIPPLPRVLIDDVD

SEQ ID NO: 41616 - protein, 94 aa, Oryza sativa
MKVTGKRKRNAQHLQENSALCKVCTSSNSFVVRCCVKGSLLEINDRLIKQPDLLNTSADREGYIAIFMPKPADWLKIKDKFLCYDDYKNLRGTC

SEQ ID NO: 41617 - protein, 143 aa, Oryza sativa
MGRGGRRRLHAARPCRRRLLLARAEQSGDAEHRGRGRGGRATAISERRALTLSATDRARRADPPPPPTAGAPPRHPARLHLRAHRCGTILRRRVPVPGGGGGGIAGDLHHGGVCIMLRLRVMEMDTLSPWFLGSLLRVDALLQ

SEQ ID NO: 41618 - protein, 227 aa, Oryza sativa
MASVKAGVVLGVAVVAAAVLAAEGRAARKDLGVNLGGGLGVGGGGGLGVGTGGGLGLGSGIGVGIGGGGGGGGGGGSGSGSYSGSGSGSYSGSGSGSGSGSGSGSWSGSSSGSSSRSGGGGSSAGSSAESGAGSNAGPGGAGSYAGSRAGSYAGSNGGDGGSGAGSYAGSSAGSYAGSNGGGAGSYAGSEAGSYAGSGAGPHGGSGAGSGSYAGSRAGSYAGSGHGK

SEQ ID NO: 41619 - protein, 335 aa, Oryza sativa
MRYSSALVLSTIVVGQAAAANLHNRHASFHARRQAEAKRSADNQVDWSKVAYDLSDVDWDKVFAKPTPSAPAPAPAKPEAQAAEVKQVDSAPKPSSSSPAPQAPSKAPEPTPAKDPLGDILDDVGDIVENALNGLQSMITGLGAKIGKNPKTNENGIWLGKDSKWRAQFTNDNSQDAVLFCWRSNDFKNMCINEMQPEISVGLKSGQSVDISFEENASAACAPVYPGTKLAMFGGVDNTWWEVTMGPQGAFDVSRNVNMNGSNISSKGSKCTSDMDTCVFKCKNGMSSCEKGTDYDLFNCQSSNGGGGGYDPIMAGTGGGCSMGQNGEVIKVVLS

SEQ ID NO: 41620 - protein, 185 aa, Oryza sativa
MVRYGANEIESQKSARARGSYLRVSFKNTRETAQAINGWKLHRAVKFLENVQEKKEAVPMRRYAGSTGRCAQGKQFGVSKARWPAKSAEFLLGLLKNAEANADAKGLDTGNLVVKHIQVNQAPKQRRRTYRAHGRINPYMSSPCHIELILTEAEEAVEKSEAVTSNQHLSSRQRGARIRQAITAA

SEQ ID NO: 41621 - protein, 129 aa, Oryza sativa
MEAKCTRCRTTPSSAPPRSGTGGGRDPTGGSAARSTAPPVTSTTRGPAPWPRTRRSASLLRQRQPPSPRSSVHFLNFQVSMFHRSRTTTFPFVKKFFRDFFVMSTVGVDMIFITWPRRIRTFLSILHTR

SEQ ID NO: 41622 - protein, 272 aa, Oryza sativa
MGYYDDDGHYHSLRHGISKAAHKVAERVAHPIHPHRHQHYSTEHSKTGAKYDDLREEIIVKEKYTTAVPASAPARPVQSGAPVERVVRVNSASTYAPRPSGPAPAAPKSIARPSAPATAAKMSSPNTITIPCHHIRIGDLLILQGRPCQVIRITTSSQTGQHRYLGVDLFTKQLHEESSFISNPAPSVIVQNMLGPVFKQYRVLDIREDGRVVAMTEGGDVKQGLPVLDQSSLLSRLTESFDNGRGSVRILVINDDGMEMAVDYKVVHGSRL

SEQ ID NO: 41623 - protein, 252 aa, Oryza sativa
MRAVRLALAACLLLLAVGVTAIDSQASARSVEDRWKNCSQINRGRLGALHDADGSQMQLAFDKLRYPANATDDYVTIQFSPCVPKYDSWTDYIVITSVSTWGTKNLPGRSTIAAFNQVLVAGTNTVATPNGEQRLVTFTMPDTSDAVPMLTANYRSTSITGPTISLAVTAKCDPSITGANVTVFNATGTQWTMTINTVEACARFPYTNQALPAGGVAALIICIVCFLLEFAACFKYHQDNKNHSPLDEESMR

SEQ ID NO: 41624 - protein, 182 aa, Oryza sativa
MASPGVVCTTVTPTSSAGSDQVVAGGGEAARRPVAPAVMEERKRKRKESNRLSAQRSRARKQQQLDELAGQVAALRARNGALGLAAREAARRCAAVRAENELLRARSVELAARLDSLTDLAQCLHDAAAASSFAAAPPMMMAGAATAFPTGAVGAAAGFMMPQLPPPLLDATTMGMHCNYYY

SEQ ID NO: 41625 - protein, 199 aa, Oryza sativa
MFKSINLMFLGILALVGSAYCAGATVGTDDLEDARLLVVKNFLNNYLVENLDISVKYTIYNIGNSAALSVKLEDNNFPADKFETVTGFNKMKWARIPPSSNVTHSLTVRPKVGGLFNVTSALVSYLPSEKNGQTQYGYSSDIGEVYIQTQRDYNRKFASNLLYWVLFGVMVSPSLALPYFLWSQSKQKRSKLAAKSKSK

SEQ ID NO: 41626 - protein, 868 aa, Oryza sativa
MAEENSQGIAGAQEPRQEMEAADPPRTTEEIVEKKPGCMSRCLGGLFRRKKKSKQGAEEASPKGNPVADEIEGQDVPPADGVANVGTDHVMEEEAVPCKGAHAHDATCNHMEQEHNPEEVPVLEGEQLLRSSQCGEEHRGSKIVKVDDSSRPASLFIQKGIMDRQQQAIEEEESTLGDDSEDDEKPVETPQDIQGPPDATALDQPAFPHVVVADAAAVEPEPELVHAHDTALEEILGKVPAPVESQALDVPETEAAPANIAVDDVDPVMAEEVAMAEESLIDALNEGPPAVVSDAAPEVAEDVVESNEQVESLEDILRAGPPAGLPEEVPSLDETVPSNPAPEVHEGQEEGAAEATTVLNDSNESPIKVHPMEALDGLPQAEAAAETGVVDDIVETHLEDPITAPTMLEPETAALATEDVADHSVPANEQGDNVGEVATMVEDGSNVASGSHHSSGAIPNVVEHADEAAVEEHVSHDFSPLEADKVAEPAIADNSFETPVNDTIEMPQDTYSEALQQSGAAAILAAPLPDVEHNEHILSNMYQNQDEQQPVETEFAAPRDSLSETTGEAPANGGLFPHDFDGEPMPESSADNIVPQTDGEPLAAQTHDGAPVMPLGLEDPAQDVPAAGLFSHEFNTGIDPTHDGAPVMPLGLEDPAQDVPAAGLLSHEFNTGIDPTHDGAPVMPLGLEAPAQDGPAAGLLSHEFNTGIDPAHEIIPDMPSEPMQEAPVLDHPVPPHVESEGIEDVDMDNVDQEDHDTPAVVVDNLTGEAFVVFREAPAETTVNDITAELGEMLAGSKNDSETVPMAADIDTPVDALVKDYLEHQAAVLENIEDGGKSPLEHEIVQKVTGPESSTDAETSEQPISTKEH

SEQ ID NO: 41627 - protein, 264 aa, Oryza sativa
MALSRTGKLLQYVNYRMRVTLTDGRQICGRFMAYDRHMNLVLGDSEEFRKLPPKKGKSDEEREERRVLGMLLLRGDEIISLTIEGPPPAEETRPAKQQVAPAGPGVGRAAGRGLPVGIPGQAPAGLAGPGRGVGAPAPGMMAPRPQMTGAPVMRPPAGGPPAAGMPPQPGMRPPGGPPPMGMPPMRPGMPPPGGPPMGMPPPGMRPGMPPPGMPPPGFAPPPGMPPPMGMMPPGMRPGMPPQGMPLPRPGMPGGPPPGARPPGP

SEQ ID NO: 41628 - protein, 400 aa, Oryza sativa
MRSAVVAFVLPATVLGQSALWGQCGGNGWGGSKSCVSGTTCTYVNDWYSQCQPGTGGGDPAPAPTSAAPAPTSAAPTTLTTTTTASGSAPTGGNSAAGELNAKFKAKGKLYFGTEIDHYHLSNSALMTIAKNSFGQISPENSMKWDAVEPSRGSFSYGNADKVVDWALQNGKYMRGHTLLWHSQLPSWVSQINDRNTLTTVIQNHITNIVTHYKGKILQWDVVNEIFAEDGSLRDSVFSRVLGEDFVGIAFRAARAADPNAKLYINDYNLDIANYAKVTTGMVAHVNKWVAAGIPIDGIGSQAHLAAPGGWNPASGVPNALKALAAANVKEVAITELDIAGASASDYLTVQNACLQVSKCVGITVWGVSDKDSWRASDSPLLFDTNYRPKQAYNSLVSAL

SEQ ID NO: 41629 - protein, 78 aa, Oryza sativa
MFTMLSSSTSSYFSEHVLFSCNCKTVCSISTMIHKAAAVIAGEPEAGEVNGRMELELTDYPGSGANDRHSPWGQERRN

SEQ ID NO: 41630 - protein, 407 aa, Oryza sativa
MALAVDDHEEVADDFRGATMWWRKSKAIPRANVISWAPRQDERRSYHLTFHRRHRALVEADYFPHVLAEGRAVTVRNRQRRLFTNNPGADWSGYDDARVWSHVKLEHPSTFATLAMDPVRKQEIIDDLDMFRDGKDYASVGKAWKRGYLLFGPPGTGKSTMIAAMANFLDYDVYDLELTAVESNTELRRLFIETTGKSIIVIEDIDCSIDLTGKRKKKKKDKKKKKMMPPSDDDDEEKKVTLSGLLNFIDGLWSACGGERIIIFTTNHKEKLDPALIRRGRMDMHIEMSYCCFESFKVLAKNYLGVEQHEMFGEIRQLLEEADMSPADVAENLMPRSKTKDVDACLERLVKALHEAKETKAAGGNDDDDESSSSSDDSDSSSDSEEQDKLAVVTKLDFSLAQPNYII

SEQ ID NO: 41631 - protein, 219 aa, Oryza sativa
MRSFAVVAGFAAVAIAAPHYEAAPPASSSAPVYPVETPSSAPAYPASSAPVYPASSAPVYAASSAPVYPVASSSAPAYTTTEVISATTYVCPEETTITYGPSTYVVSKSGTLSIPQYTATYVHYPVASSAPPAPAKSTPVVPEASASVPAYTPPAYSAAPPAPHYPATNGSMPSVPAAQGTATGAKPTATKPASPEFTGAAGKATVGFFAVAGAVAAFL

SEQ ID NO: 41632 - protein, 237 aa, Oryza sativa
MKVLQRIAYLNVGIYPFTSVFLIVYCFLPALSLFSGQFIVQTLNVTFLTYLLIITITLCLLAMLEIKWSGIALEEWWRNEQFWLIGGTSAHLAAVLQGLLKVIAGIEISFTLTPKQLGDDVDDEFAELYAVKWTSLMIPPLTIIMINLVAIAVGFSRTIYSTIPQWSKLLGGVFFSFWVLAHLYPFAKGLMGRRGRTPTIVYVWSGLVAITISLLWIAIKPPSAQANSQLGGSFSFP

SEQ ID NO: 41633 - protein, 69 aa, Oryza sativa
MRLPRAYEWKANKPGAPPRRVFARAAAAITPDPPPAGGSTAADSIPRQFRRLSPAELAELRKWCSRWGG

SEQ ID NO: 41634 - protein, 344 aa, Oryza sativa
MQGKLLSLGFLVLFLAVLIDGFQTKVDMGAPVAAWGPGAGNTQVFSNLFSAQDLQRSLLSVLGLEQGAAEDFVSPFASLETAPEIVVFFVEPELSTQDLLVHTGAHSALVAVQEAPLTQLRRTIDSSNSVFLTNLALQYTELSEILATVANAQLAQHITSSLLIASDNSDEFALSLLPLFPERATHLALGQLEEHLAQNPQLGTNGVTDLVLVYLASNPLSDNELPAKLRQDDSKIASTIDSVVALTPDYLAFFSSEFSPATYFTGPEAEHYARIIARSTHNGTTTYPSRFPPSVAQGLMTAAVLLLILFVGLCCLCYTQTPDRFPEAVREGQPNPHILYPNKQ

SEQ ID NO: 41635 - protein, 349 aa, Oryza sativa
MTDRHVVRFEPVGIEVEVPEDQTILRAASEQGIMLMHGCKEGQCAACKSFVLEGEDIELEKYSTFALPDYEKDEGFTLLCRAHAYEDLTIELLNYDEEMIRSGLPIKEAVTEVVEIDAVTHDLRRLVLRLVEPTDLTFFPGQYVDIAVPGTDATRSFSMANTSTRDGGLLEFVIKVYPGGLFSEHLDTTLKVGDRLDITGPFGVFTLREGHKADLVFVGGGAGMAPILSLVRSMAERGDERKATFYYGARTAADLCFEDELREMERRLPGFTYRPALSEPVAAQPWDGEVGMVTDIVKRYEADLSGAHAYVCGPPPMVEAAMTLLAALGVEDKRIYYDKFTTTGETESS

SEQ ID NO: 41636 - protein, 479 aa, Oryza sativa
MLRLVLLALICCAALAVEGQTSLLGLAKSDPKAAYATWLRQHGKENEKNVWSRLQVFKSNVDFIHQYNAEHPTHQLDLNEFADLTWEQFSKTRLGFDHKQYLASRQNRGQTPFRHANANPPAAIDWRDKGVVSDVKNQGACGSCWAFSATGAVEGVNAIQTGELLVLSEQELVDCDTITGNAGCGGGLMDYAFDYIKHNGGIDTEDDWGYYSGWGFGTWCNKRKLQDRHVVTIDGYEDVPKNDESALKKAISQQPVAVGICASQAMQFYSGGVIDTCCSELNHGVLAVGYGTDESTGHPYYLIKNSWGGSWGEKGYFRLKYGVGKEGLCGIATTASYPVKASPNPSVPLMCDPFGWSEWPSGSSCSCNWAFFFNLFCIRHDCCPLRGGVGCDDLQHCCPRDAPICNTEKGTCSSEDGQKVLEWTEKKPANYELTNSGSSGEGSGSVAETAKFYRGIQRMQHAEPAEGTGHPAAAAAAGA

SEQ ID NO: 41637 - protein, 187 aa, Oryza sativa
MGIDLIAGGRNKKTARTAPKSDNVYLKLLVKLYRFLVRRTDSNFNQVVLKRLFMSKTNRPPLSLSKLAQFMAGKEDKIAVLVATVTDDARLFEVPKLRVCALRFTETARARIVKAGGECLTFDQLALERPTGKDCVLLRGPKNNREAVKHFGPAPGVPHSSTKPYVRAKGRKFEKARGRRKSRGYKA

SEQ ID NO: 41638 - protein, 137 aa, Oryza sativa
MPPAPGPAGVGGHTAYQANQAAQPPQYYPNNAPQMQQTQPMGMPVKQDGYYGAPPQGAQSPVSPYNGTGAQQWQQQPQQGGQPVYNNVPSPSMSPAPQQMAAPAPYHAEARPFSSELEGSGMQGHGTPELVSVQPKR

SEQ ID NO: 41639 - protein, 392 aa, Oryza sativa
MAEFPEEAELWVAANVARFLPATRITHVVAGDDVVARSPGNAYFLLPAMANLHAALAASRLDGRVKVSSAVSGAALQAPPAWAAAAVAGGLLRFLNATGAPLFLKTRPSESTDTMVDAAYGAMRALGFPGGAIPVIAAPVETEEFGGGATTVVYHSYLLQASGGVGGGERRSLATSAGMFCVALQNADAAALQAGLNWACGPGQADCAAIQPGGACYKQNNLPALASYAYNDYYQKMASTGATCSFNGTATTTTADPSSGSCVFTGSSMAGGSNTSVPGASPPTTLSPPAGLTPPVGTSPPTDFSPPAAGTTPPAGGFTPPAGGFGTPPLGGFGTPPSGFGPPGSFNGSGSSFGPSSAFSPYGGAGHRDGGASGARLAAAALAVLLLSVDLM

SEQ ID NO: 41640 - protein, 286 aa, Oryza sativa
MEGKAAVVASAALLSTLIIPLLLLSQHQPRAIADHLSAGATAATLFDALARLLGLLSPRNHMILLCNAILLLVLRDAGLLACPAPPAPAPPPRHHAAADDDASPPVAASSAASSRRRPQRPRSSAAVVVWRPSKLAVVDVLHVDDEDDGSDGDRRRRRRPAQRHEPAMATTMAPPPIALPPAGEEKQSYDGLVDDDDHVSAGAIVVVDDDANKISSPVPDSDHHRYSGEDTNGRADDEEEAFDQCGGGDDDDDVDDMNRRFEEFIANTKRKMQMESLQLQLVMMKV

SEQ ID NO: 41641 - protein, 400 aa, Oryza sativa
MKGLFTAVLASAASCVLAAPSPVEQGPITARAAGAAAAACATPVTLSGNPFASRKIYANKFYSSEVVSAASAMSDPALASAAAKVADIGTFLWIDTRAKINEVVEDGVKDVPCDQIAALVIYDLPGRDCAAKASNGELPVGSLSTYKTEYIDPIVAIFKKYPNVAIALVIEPDSLPNLVTNADLQTCKDSASGYRDGVAYALKSLNLPNIAMYIDAGHGGWLGWNDNLKPGAQELAKVYKAAGSPKQVRGVSTNVAGWNSYDLSPGEFSKATDAQWNKAQNEKQFVALFSPELKSAGMPGQAIIDTGRNGVTGLRQEWGHWCNVKGAGFGVRPTGSTGNSLVDAFVWVKPGGESDGTSDSSATRYDSFCGMPDAYTPSPEAGQWNQAYFEDLVKNAKPAL

SEQ ID NO: 41642 - protein, 263 aa, Oryza sativa
MELKSAVLAVAALCLALALLLPRVALSQRLATADAPAPAPAPRHVDLAELLSLAGPYGTFLGYLTKTGVITTFQSQANDTAAGAPGVTVFAPEDSAFAAVGGGAALSNLTADQLRTLMLCHGVPRYHPLSSFSALAASGPAPTFAGGQQYAVNVTDAAGTVRIQSGWATAKLVSSVYSTSPVAVYALNRVLLPEQIFPTAPKVAPVPAPAPAPVHGDKANDGAPGAGELGASDVKSSSCRVGAGRLLAILAVMVSSFSDDIVV

SEQ ID NO: 41643 - protein, 235 aa, Oryza sativa
MAAESYWQYQYAAVDPRQQAPAPVPVPTPALMWQQQQQQAGYQPAVAPVAPPMAAPPLPAGPPPSFKRQRPEYFDMPSGQGNSLFHEAMNPHYVHRLNNQMSYAAGANQSAIPLGGMATYSAGMDSGNHGATITESRTLYVEGLPSNCTKREVAHIFRPFSGFREVRLVNKEIRHAGSCNLLCFVDFSSPPEARAALETLQGYKFDEHDHESSNLRIQFSLTPRRRPIGGPRVRN

SEQ ID NO: 41644 - protein, 412 aa, Oryza sativa
MDPSDARRELSEDEPEAFIGEGGVDGFEGEVLDDLDGEGMQGDDAESSGEAEGGDVGPPGDQPMEDDSLQAFEGHQDAVLAVAWSPTQPDLVATGGQDDKAFIWRVGQEAAEATGGSMATTELAGHTDTVVAAAFNTTGSLLATASLDSSVRVWRVADGSCVQAPEGPGDGVDWLAWHPKGDILLAGSEDFTMWMWLAQTGNCMQVFSGHSGPVTAGAFTPDGKLVVSVGGENDCSLRVWNPKTGECTVQLQGRPFHEDSITCLGVHPDGSVVITGAQDGSVRVSNIHNSRIVASLQGHEDSVEAAGFSRHLPLAATAGIDGKLIIWDCGNFTERGVCQHEQPITRMAWASQQPLVATGCLDGVVRLWDLRTSACVKQMHGHSSAVQDLTFSPDGSMVLTGSDDATARVFAC

SEQ ID NO: 41645 - protein, 450 aa, Oryza sativa
MYEIDPILAELDETIGKLKGWMAETPVKAPLMAGLRSQASIRHEARGVVLIISPFNFPFRLMFIPLIGALAAGNCAVLKPAETAPISALLIRNLINLYFQPEDVTVVCGAVPQAVKLLKQPFDFVFFTGSPAVGKIVMAAAAKNLTPVCLELGGKSPVYVGASADIAAAARRLVSGKFMNSGQVCVAPDYILVHHSRFSEFLQQVSTTLLHFFGQNPHKSADFSRIISRAHFDRLMKLLGEVVSTAVVGGETDGSDLYISPTVLENPPLDSQLMQEEIFGPLLPVFSVEGVEAAVDIMKRYPNPLALYIFSEDEREIESILAAVPSGGVCINDVAMHLAVPELPFGGIRSSGIGAYHGHHTFKLFSHDRSVLRCVTWPDPAFRYPPYTEAKKKQLRRVMQAPSLSNVLPPLLIGAALIATTVFLAFKKPALPSSFSSPDFLSSRQIERLG

SEQ ID NO: 41646 - protein, 98 aa, Oryza sativa
MEKNSPHCPLSTVRDLIRQQRVAATHTAKAGAAAVGLSFLDMLDVVMALTDGDFHKAMTTHADDNVWQDVNKPLTHVGQLYVKLTVVNSLLIVSFKEK

SEQ ID NO: 41647 - protein, 232 aa, Oryza sativa
MEGEKKSVVLINCAVSMYGNRVRIALARKGVAYEEKPENLAAKSALLLSSNPVHGQVPVLLVGGKPVCESLVILEFIDEEFAGVGEPLLPAGPYERAQARFWASYIDAKLAPCAGRVWRSPAGAAGAAAVEAARGELVAAMRTLEAELGGRRYFGGGGEALGYVDVALAPFTAWFATYERFGGFSVAAECPELAAWAARCVRENACVAASLPDPEFVYQFACGMRKHFGLDG

SEQ ID NO: 41648 - protein, 277 aa, Oryza sativa
MSEAMFRFMSKNAAVVLFADPEAAAAVRDGVVGGVGVQHGRGGGGERRALVERHARRPRGRGVPREPRRRRRARGGVLGAGVPARRRRHAAGVVQDPRRRRARRPPPAARAPPAQLLPPLPAHRRPRPRRRAPRRPRPRRPRPAASAAACPVDAAGAARVVPRGDGHPGVGDIRRRGGDAGVGGVGRRGGGVAVIDRDAARQRERLPVEKRWKNSSPGRTYFYLFFVLIETLTNPVMGWSNVSSARRVVLRVYVYTYVHARKLPLAAIRMYIQPTYV

SEQ ID NO: 41649 - protein, 242 aa, Oryza sativa
MAAAAEATSKAAAAGGGAATGGGVMGAAAASSVALTAEAAAAAQKKAAKEQVEVVDDANRTVRVASRAEVRGQNLTHRSTYVYVMTRDTEQYLVQRRTAIKDYCPSYLEVCAGGVMTPGETYALNVEREVHEELGIPKAALTLIDHGVFRYRDAKIDTFGGLWTALWAGKLSDLKLQPEEVAAIHLQTYAQVHAAVKAGEKYTPDSLHALELQRKAFAEWKAKQPAAAAVAVAAAATTALDK

SEQ ID NO: 41650 - protein, 262 aa, Oryza sativa
MAAIQLNFTLRTSSNCKTVHLLGSWDGYQGQLPLSKDPKKSGGWVGCFKFQGQTLKQGQRYWYYYIIDGYHVSHDPAKDHTTEPTTGRKLNIIDIPAAKSSSKSSSSSADRKTRRVSTASIPKGRGLSPERIVAPKPQRPNETRQVINTQYDKTTLEELNRRFATQKIEESSDDSEYSSDEDSDVPSLTSRSTNSSSPSSISSGSSCCTCERYGITRTGDRVKLDCGGARCGYSDDSSECSSEDEYVYEEKTTRRQGVVIRA

SEQ ID NO: 41651 - protein, 51 aa, Oryza sativa
MPRTNSSECSLVTQLASIRVPSSGSGALRMTTEAMKSLLTSGPANLGGPKP

SEQ ID NO: 41652 - protein, 344 aa, Oryza sativa
MATKLLAAVITVLALLGHVMGQGGYGPSPSPSPSPSSSGGGLAVGYYDSVCPNAEEIVRGVVKNAVAQDAGVGAGLIRLLFHDCFVQGCDGSVLLDATAANTQPEKLAPPNLTLRGFEVIDEAKAALEAACPGDVSCADVVAFAARDATVLLSGSGVDFAMPAGRLDGRVSLASEALGILPPPTSNLSALTASFAAKGLGVGDLVVLSGAHSVGRSHCSSFSDRLNSSSSSGSDINPALAASLTQQCSANASSGGGGDPTVMQDAVTPDVLDRQYYTNVLNGSALFTSDAALLTSLETKVAVLANAIIPGLWEGKFRAAMVRMAAVEVKSGAGGEIRKNCRVVS

SEQ ID NO: 41653 - protein, 295 aa, Oryza sativa
MKAFTTATALLASASSAFGALTQVTGFGSNPTNVQMFISVPAKLATNPAIIVALHPCGGSAQGWYSGTRLPASSESLGFILIYPQTTRFSNCWDVNAPATLTHGAGGDSAGIISMVNYTLQKYNGDKSKVFVMGGSSGAMMSNVMVGSYPEVFEAGAAYSGTAFACFAGSKSDPTPFGANQTCAQGLTHTPDQWASFVKNAYPGYTGKRPRFLVAHGLADTLVRPQCGYEQLKQWSAVLGVTNTANQTGAGVDEGSQYTKMIYGDTNQLVGYFGQGVGHIAPVVESVLLKFFGLQ

SEQ ID NO: 41654 - protein, 289 aa, Oryza sativa
MAMRLAVSRPLGAAARASTCPRAAVRTFASTGLRAKEVAGQSSETPNMRFAPRDQQGPLKAPIVNPADRFKEKSEQLHKYGQYLMSCLPKYIQQFSVWKDESTIYIPPNGVIPTFTFLKYHTAAEYTQISDITAVDYPTKDQRFEVVYNMLSIRHNSRLRVKTYADEATPVPSLCDLYDGANWYEREVYDMFGVFFVGHPDLRRIMTDYGFDGHPLRKDFPMTGYTEIRYDEEKKRIVVEPLEMTQAYRNFRGGSAAWEQVGPGDDLKPESFKLPTPKPEPPKEGEQKK

SEQ ID NO: 41655 - protein, 342 aa, Oryza sativa
MCGDCCGRGAGGAAEAGAAGAGGGRKRGCAGTALALVALAAAAAVAVLEGTAGGVSYVGDGWLHECAKWDADGRRLLVSNFFGAGVSELRAEAKGKEKEEERVVLADPDVAGRVALGLTVDAPRGRLLIVYADRLPRFAYSAVAAYDLASWRRLFLTRLDGPGDSTLADDVAVDEEGNAYVTDAKGNKIWKVSPDGEPLSVIKNATFFQRPGWINNFVGLNGIVYHPNGYLLVIHTSGGDLFKVCPKTGSVHVVKVKGSLKTGDGLALLSPTRLVAAGLVSRLVESDDDWETAVVTGRYVGPAHRIGSSATVKDGDVYINHIIGFGLGKKTHVISKAAFAPL

SEQ ID NO: 41656 - protein, 236 aa, Oryza sativa
MATASKPAEKAAAASPAKPAEAGKDAAKPKAEDKPKDSKPKVEDDNEEDGDEDEDDDDDMPALENAAAVKDEEGKAAGKGGKQNRAEKKARKAMQKLGMKQVPGIVRVAIKKAKNILFVISKPDVFKSPASDTYIIFGEAKIEDINSQLQANAAEQFKHDAPAGMPDAAAPAAAGGAGAGSLLNTPIDPNEVVDETGLDKDEIATVMSQTNVSRAHAVKALRKTGNIVDAILALTP

SEQ ID NO: 41657 - protein, 186 aa, Oryza sativa
MINRDSRGHSYFIVRGEILGFMKDEQLRKHLPRMFSLITGPLTSTSRRWPPLLHEGRVRCTTLDAPARPAVRASVRCYGCTASTAAGGGGGRDGAGAADAAARRRRQLLQHQRQRRPPRGDPGAAGRRHRPRARQGPPVPLPLAVALLHRLLRAPRRRWRRRRRQAAAAVVTALPVQASGRLVSPL

SEQ ID NO: 41658 - protein, 130 aa, Oryza sativa
MDESRSSSSAAGAGAKRPFFTTHEELLEEEYYDEQAPEKKRRLTAEQVQMLERSFEEENKLEPERKTELARRLGMAPRQVAVWFQNRRARWKTKQLEHDFDRLKAAYDALAADHHALLSDNDRLRAQVSH

SEQ ID NO: 41659 - protein, 202 aa, Oryza sativa
MAVTMRTNVAVRSAARTARPSRTAVVVRAEARREVLAGFVAAGAALLSASQAQAVTPVDLFDDRKARSTGFDIIYEARDLDLDQATRDGLTQARTDLDATKKRIKESEARIDRLVEPSIQKAYWTEAREELRRQLGTLRFDLNSVAGSLGKDAKKKALALRKDFIKSVEDLDLALRKKDKDASLSKLAVAKSSLDNVIASLL

SEQ ID NO: 41660 - protein, 228 aa, Oryza sativa
MKVIVLLTSCIVAAVMFQTSQAILPAAGVIAPVVPPVIPPMLAGVPFGGLGFGLGLGLGFPFLGGLAFSRLALLGLLGRKKRDVTPIAPIKPAPIQCVIATSNSTIECSLGVERRIGCQFESRLSQLPKIKVNLVDLALMEHIDGNIEFLNLVSTKTSSKLAAFLAKAGAPTTTFTFIHPSTLEPHLLAVYADATLGVPGFLVKDRACFNSLVGIAKSANARVKLLIE

SEQ ID NO: 41661 - protein, 377 aa, Oryza sativa
MRFTLAAFAASFVGSAYSQQPDAQGRYTLEAEGIKAQFIPYAATLTNLWVKDKNGVQRDIVLGYDNTSYYPVDPGHPVYNAIPGRYVNRIGNGEYSIDNVTYHTQKNDGPNTLHSGTNNWSFRNWDVTSVTNSSITFSILDKSNSSLGMIGDVSASVTYTVSKNKWSIVMDAESKDQKTPIMLTQHTYFQLDAFARPDNRTIWNHTMYMPEAKRVMLADGNALPTGVIANVSAGDISDFWSAPHELGFASGNANFENNCGNGCHGYNGNWAFNDSRNKSETVLTLSSEWSGIKADLVTDQDAVVLYTCNWNDGKTEFKSTQGVTGQDKFIPRDGCIAIEAQDYVDGINHPEWGRLGKQIFAKGQQYHWASSWTFGTV

SEQ ID NO: 41662 - protein, 505 aa, Oryza sativa
MELTTISPVFLISLLGVPLLYLLWSKASKSPSGAPAAPPPPPGPTPFPVIGNIPDLLRGGELHRALTGLAASYGPVMSLRLGMASTVVLSSPDVAHEALHKKDGAISSRWVPDNANVLGHQDVSMAWLPSSSPLWKHMRTLASTLLFTSRRLGASRGIRERKARELVDYLGARSGRPVRVGLAVFGSVLNFMSNVFFSEDVVELGSETGQEFQQLIADSVAETAKPNISDFFPFLSALDLSRRRRAAAKNLKKFYDFFDDVIDRRLSSGEKPGDLLDSLLELHAKSQLERPLIRALMTDLFIAGSHTTTTTVEWAMAELLRNPSKMAKARAELGEAFGRGAVEEGELARLPYLNAVIKETLRLHPPAPLLLPHRVSSDSEPAGGVTLGGYSVPSGARVLINAWAIGRDPAAWSPEPDAFSPERFLGREADYWGRTLEFIPFGSGRRACPGIPLAVAVVPMVVAAMVHSLEWRLPEGMAPGDVDVGDRFGAVLELATPLWAVPVKV

SEQ ID NO: 41663 - protein, 395 aa, Oryza sativa
MKGIFAAILATAATSVLAAPSPVQDAQITARAASACASAVTLTGNPFASRKIYANKFYSSEVSSAAAAMTDSALAAAATKVADVGTFMWIDTREKIKIVEDTIKDVPCDQIAALVIYDLPGRDCAAKASNGELPVGSLSTYKSEYIDPIVTIFKKYPNVAIALVIEPDSLPNLVTNSNLQTCKDSASGYRDGVAYALKQLNLPNIAMYIDAGHGGWLGWNDNLKPGAKELATVYKAAGSPKQVRGVATNVAGWNAWDLSPGEFSKATDAQWNKAQNEKLYVGLFSPELKSAGMPSQAIVDTGRNGVTGLRKEWGNWCNINGAGFGVRPTSNTGSSLVDSFVWVKPGGESDGTSDSSATRYDSFCGKEESFKPSPEAGQWNQAYFEMLVKNAKPAF

SEQ ID NO: 41664 - protein, 454 aa, Oryza sativa
MYRTLALASLSLFGAVRAQQAGTVTAETHPKLSWKTCTGTGGTSCTTKSGSITLDSNWRWIHVTSGYTNCYDGNSWNTTACPDGSTCTKNCAIDGADYSGTYGITTSSNSLSLKFVTKNSNAANIGSRTYLMESDTKYQMFNLIGKEFTFDVDVSKLPCGLNGALYFVEMAADGGMGKGNNKAGAKYGTGYCDAQCPHDIKYINGVANVEGWNPSDADPNAGSGKLGACCPEMDIWEANSISTAYTPHPCREKGLYACDSATECGDGDSRYGGNCDKDGCDFNSYRMGVTDFYGPGMKLDTTKKMTVVTQFIGSGSSLSEIKRFYVQNGQVYANSDSAIDGVTGNSLTDAFCEAQKTTFEDQNEFAKLGGMNGMGASLARGHVLVMSLWDDHAVSMLWLDSTYPTDSTKLGAARGTCSTDSGKPEDVEKNSPDATVVFSDIRFGPIGSTFKQPA

SEQ ID NO: 41665 - protein, 339 aa, Oryza sativa
MFAARQAFSQASRRTFSSSARQSSKVTVLGAAGGIGQPLSLLLKLNPRVSKLSLYDIRLAPGVAADIGHINTKSEVTGHEPTPSGLAEALKGAEIVVIPAGVPRKPGMTRDDLFNTNASIVRDLAKAAADHAPEANILIISNPVNSTVPITAEVFKSKGVYNPKRLFGVTTLDVVRASRFISQIKNTDPASENITVVGGHSGATIVPLLSQAGFNLEGEKLDAYVNRVQFGGDEVVKAKDGAGSATLSMAMAGARFTESLLKAAQGQKNVIEPTFVDSPLYKDQGCEYFASNVELGPNGVEKIHPVGKITDYEQKLLDVCISDLAKNIKKGVDFAKQNP

SEQ ID NO: 41666 - protein, 282 aa, Oryza sativa
MADKQMASLIIKANLECEKCCKKIQKVLNKLKDKEKIINIVYENSNNRVIISGHFKPEELAHKLRCKACGVIKDIEFGKLAEAKKEEKKPDQAKKEEKKQPEEKKPEEKKKSEEEKKKGDEKKPEEGKKEEKKEEKPKVKEETKATPAPSSTTVNLQFTNMCGICYPWPCSDPTHWGAGVVHPQWPQCEAPAAALPAFVPGHHHHQLPPWGGVPAPKWPCGGPSYCGGCGTCRGGGWPAAAPMQAMCCPGPSSCRGCKGCRLVQEGKFVYEEYPAASACAVM

SEQ ID NO: 41667 - protein, 240 aa, Oryza sativa
MHSKIAAFLLPLFAVANPVPAGGNAAAPDPSQITIIDSSYSGNGCPQGSVSTSTSPDKTVITYGFDQFQTYIGPGISTKDNSRACQLHLNLKYPGGFQYAVVSATYHGWARMDKGVTGDFVTSYYFSQDAGKTSTTRMSATGGGDLINGQVYTKQDNVETTAVVWSPCGTTGILNVNNRISLRSTNSSAFGELSNDDATVAFTQQVHVSWQPCTPKGGSGTSPGDTIGIGNQPGAGIDFE

SEQ ID NO: 41668 - protein, 162 aa, Oryza sativa
MRVLLAPLLLAPLAALAAPDILAPFEPAITGFPTSNNNETDLLAEDGSFELLKRQGGTACATNYFACNNLGAPGLCCPRTAICSADQRGQVVCCPQGNACTGALGTNAPIQTASQTSTGSVPASTTNGFVQSNSANPTAGSTLLARPLIRAARAMLRAARLL

SEQ ID NO: 41669 - protein, 275 aa, Oryza sativa
MACLSLLSGVHPLPLLLLITLLGPVALVRGVTFRVVNKCPFPVWPAAAPNAGHPVLAGGGFLLPPGQSRRVSAPPTWNGRFWGRTGCNFTSTATNHHGNAAASCLTGDCGGRLACNGTAGAPPATLVEVDLHEDQSKGSSYDVSLVDGYNLPVAVWTKPPTPGAAAADRKCVIPGCAKNVNAVCPPELQVTAAAAVVACKSACVAFGTDAFCCRGAHGTAETCRGSAYSRVFRDACPAYVSYPYDTAAARCYAEVYVLTFCPSRWGAGADRVAQA

SEQ ID NO: 41670 - protein, 232 aa, Oryza sativa
MPTTYTITLKNKCGMDHDYFLFVEAPQVSAGPQVFQNVYISSPNVSTDSGTATFTCFADYYAVCGTSPNKALGAKVTVTTADSSPVQICQGPTKLGTHCFMSGGLKPDGSGGRSANFIDSAQTIDCNQPGAYRVDCIDFKANNGSNQFVGLGAQDPNDPTNIVPIAVFDAIPGTQNFLQPHATYYISWGTFTPGQIIDVTTVAPPAKIDFTGKANPNATVVHNSDGTWTVTQ

SEQ ID NO: 41671 - protein, 209 aa, Oryza sativa
MKWLLALLPVAAAVPALSPIELGDAPPAGTVKINKVGYGGTGCPQGTMATQISDDRSVVTLIFDAYIASIGPGISITENRKNCQLNVELLYPGGFQYSILSADYRGYAAVQKGVTGTLKSTYYFSGQSAQTSTEYSFIGPVNGDYTKHDEADSTSIVWSPCGAAGMLNINSQVRLTATNSSASGLLTTDSTDLKFKQVVYVAWQKCKSS

SEQ ID NO: 41672 - protein, 123 aa, Oryza sativa
MAYSWFSPHGSNRDGIRRTSAPAVIRCASCTENPTHPRTLSLCSDSNRRSISSRSGRPVPSITTCTSCPAIHGIASPMMSTPFWWSSRPMNPISGTSSRTCRPSCRCSASLHCFLPVSSVSNV

SEQ ID NO: 41673 - protein, 131 aa, Oryza sativa
MALVFTKQRTSRLQLPRAATSRTARRAVCMRSHKVEIDHQGKTYVLDVPEGRSILEVALDKGIDLPHDCKLGVCMTCPAKLMSGEVDQSGSMLSDDVAEKGYALLCMALPQSDVKIMTVSEDELLDEQLCA

SEQ ID NO: 41674 - protein, 472 aa, Oryza sativa
MDLDLAVQVSRRPVSGEDFAFATSDTDAAFLVLAHLPGYDKEEVEVVVGDGGREVGVVVGARKDDAFAVEAAVVGRRLRVAHRQVVEGFCRVFDVPPGVEVGRITVGFEEDDELLVVIMPKFRPAPAVSGGDEGRRLDVESADSECGSSDVEDFDVESGPRERQDDDVAVETEVELDDDDDDEDELSSLELEYEDWINVDSSESEPEPEPPRDVAVETPVAVEEEVAVEEEVAVETPVAVEEPPPPPPPSVVDIECDVVFEPAYRELPVETPIEVVGPPHAEPEPPSDVPDPIDILCVVEEPKPPATVDEPEQPKPPAAVEPPVQEPPAEETPTATEPEPEPPAAEEPPAAEPEQEPQPETPPVESETPAEEQAPVQEPPAADETPAAGEPEEQPKPRSSDSEDYSTSGEEGDGANRGGGRRRPRGQGPRRRRRRRRGGFPLGMVVGPAVILLALAAAAARRRRQQRGAGGQ

SEQ ID NO: 41675 - protein, 393 aa, Oryza sativa
MLRQFHYIDQNGKDQGINVRNRAKELAELLSDVDRIRTERKKARANRNKFGGVEGGAGMGGFSGSGGFSGGSGGSRYGGFGSESADYGGYRGEVYGDGGGFGGNQSGFADTQQRRERFDEYDEYDEGESVSPTPARRKEPAASRKEPKKEEPKAKAPEPVVDLLAWDDEPAPASTSAGKQPAAAPKDDFGDDDDFDDFQSAAPAAPAAKPAAAAFNMAPPASTSTITSSTQFAAPQAQSASQNTNLSNLFATVSPPPAANKMSSPPSVVSPISQPPQPTGYQATGPNYFTSVPQPPAQSGASTPGAMSAGGRIGGGAAPKKAGGDAFASLLATAAPKKASTPAQKVIMGDLAKQKTSQGLWGAPASSSASSTPAAQTPQSGSKPGGALGDLLG

SEQ ID NO: 41676 - protein, 452 aa, Oryza sativa
MADTVAIQDEIAVLEKKLVEVQDQLKDAKSRLQKAQETAANGAVASDMSFDDKMSLIKVNLQEVLNPEIMEEALKKNGHLKVYWGTATTGRPHCGYFVPILKIAQFLTAGCHVKVLLADIHGFLDNLKAPIELVKYRAEYYRYTITSLLKAVRVPIEKLEFVLGSSYELGPDYMMDVLRLASITSERDSKKAGAEVVKQTENAPLSGLLYPLMQALDEQYLDVDVQFGGVDQRKIFALAKEALPKLGYKERAHLMNLMVPGLQGGKMSSSDPDSKIDVLDGPDAVKRKLKKAHAVPKVAEDNGILSFVEYVLLPASYLKYGEPKFVVERRDAEPLVYTEITKMREDYVADVLSPQDLKPAVTAALNELLAPVQAEFQATPAWQEIEQKAYLPPPAEKKKEKKKKDKGTFHPGAKKVEAKPDGHVEGQDKAEVDVGTQSGEKTIENLTLEEKK

SEQ ID NO: 41677 - protein, 282 aa, Oryza sativa
MGILVISADLKCCRCKEKLSKILCSLRDKYGIEKTEYEDKDDRVIVRGNFPTDKLRSVIWCKAGRKLIRDIAVVDVWPPPKKPETAGGTTPAPAVANPPPAATVAATPPKVDGAGNKGEKQPKTTTPPPPPPVPLPYPWPPCYYPPMQHCQTSSTTWTGSCPTQCHCCPKPPPPETKTKACEYCSRDHCLGGCKITPPPPPPSRCGGCDHADCGGWCGGQPPINCPPPPPPSRCGGCGHGDCGGWCGGHRPPINCPAPPPPCCQQQPWGGGCQYDENACSVM

SEQ ID NO: 41678 - protein, 140 aa, Oryza sativa
MALDESFKRPGTIPFKWELQPGVPKQQPHHGGGGAAVGSSSASSSPAPAPAAASTLLLPPRLLAPPPAAAASHGGCDTGANILASTTTPSPSSSSHRRSMSARFTASLVLPFTRPRRGRSANSKDEDDIAFTVLYGDKIV

SEQ ID NO: 41679 - protein, 48 aa, Oryza sativa
MRGSSSSSAPGCMPWPAGAKTASCSTSRRPWRRASASRAPARSAPPRC

SEQ ID NO: 41680 - protein, 603 aa, Oryza sativa
MDLGSYQRKEKDIWQAMRFGCCASKEEVDDGREALRANGNSQMQIIYDQPQAVPQPRAEPVHHHRPSTSQSMSHHVSQWVNTSRDFATRASSRASFSTLTRPRRSHSIHKARPSISRPTNFQHLENGFGLDGIQSMVDEAPMPVRRNGGFRRLELSIYLPNGCGRLSQLPDFEDDEAWGAKKVDLEKPANALVRVRDSRTNSLSSNPSTSDYLIQRKPANTTASSVSHSRRSSVQSQKSTTSTGTHERRLSGTTMATMRTPTLSVWAEEPMSSPASAVEKPTIRRSRTSGTLSPARVLSRLPSPSRSRANTAPSRPGSLRRGKTDVDEAIRELNTIVEERRASAYRSQTQSPALINRPPPSPSHHVPYIAPSMRMHVRSETLSDIGSAFSAPMQSNKALPVAPVRRRATNLTLAPPSRDSTMALCSNPITPPAPHTPTKSMARLTTWLRRSISATTPTSPSAPKSYDAEPFYKCDPVPTTRPSTAGSHTACHTRQESQESNGTATVTLFSSSQSTSSLSSRAQSPVNSPPKKIKRVPAPLVLAKEIQIEPALKSGRSLRELKPPVSPHANLLRGMEISAKDVGPMGQRRSMLMPSPSAVGVAF

SEQ ID NO: 41681 - protein, 306 aa, Oryza sativa
MVVEEAVVAAGNEMSLSNMVLGFYEEAELQSSPPGDCAAAAGDDDDGSDDEGSGGAAKCRAFWKEQQSQLYEALAKMSSAESRIQADAEEAMRQMRAAAAGACSCASRGAAAAAAGSGGCRSCTLRFLAERLRDAGYNSAICRSKWPRSPEIPSGEHSYVDVVAPTRSGKAVRVVVEPSFRGEFEMARGGAGYRALVASLPEAFVGRADRLRGVVRVMCAAAKQCARESGMHMAPWRKQRYMEAKWLATPERVAPPGNAGGAGDAVAVGSPSSPLSPGMTNRQMQPKFRASMLTLDFGGRTAVEVV

SEQ ID NO: 41682 - protein, 209 aa, Oryza sativa
MAATMKRACFASGVAAPSRSRTVRVCCAKQDAPSKVQGALAAGVAAVLLSVAPAHAGVILEQPQIKKVLQDTTPAVPAPKREIILPGQRSKSAPAAAAASKAAPAPRVAETSGSDLDPRSVALPGTIALIAGGAFALSKLDDGFGEFMDSASCKDSGSDGAGYETDLKTGGALAIKKAGTSKASSKAGTKKVKAATKSTSSPLASFFDK

SEQ ID NO: 41683 - protein, 300 aa, Oryza sativa
MLKGARYNTNSLYSVSKAFFGVNEKVIKQRMKSVGNIQKITKAMKMVAASKMRLDLIRLEAGKSFGLTTSHNIFANESYLQKKQLSFNVKKSLLVPITSDRGLCGGVNSSIVREVKGIVAPNRSAYKIFVIGEKGTTALLRPFPDCLHSSVSECLYPMNFTIASSLAHQVCQAAEEEQCDNLVLIYNEFKSIIASQVKRLEILNRKNFFQQFKYVVRHDTEEPDRDFSKQYYYDLYVTSQVYHALLQNAASEQTARMNAMENASKNAKEMIEKLNLTYNKARQARITMELVEIISGANAL

SEQ ID NO: 41684 - protein, 253 aa, Oryza sativa
MADPFPAAARGGEQGGGTAGQLVSTPSRLRTAVASMLNRTGHARFRRAAPVVVQEEEDEAAAAARDAVVRCDGLSASASSSFPSSVTGVTGDGSVSNARAVLPAAGDGDKPPPMQSASDYASDGRLKRSSDDDGERCHCSKKKRKASWRARRRIRVPAISSRNADIPADDYSWRKYGQKPIKGSPYPRGYYKCSTVRGCPARKHVERDPGEPAMLIVTYDGDHRHGEPGHRRPDEAATTTEHRTTDQTTGRLL

SEQ ID NO: 41685 - protein, 505 aa, Oryza sativa
MVPGLLEPESVTVAESPPSKKLKTAAAQSIQIDDEDVATALPSHHLGVKPAGNAYTASENIKSRCGSFARLPDELLSHILESFDADALVRLGSTCRALYAYTRLDELWRALFVSNPPSDFTWRGTWRATYLNIPSTNITSIPCHNLFSDILYRPFQCAHTSLTPFVTNIPSSNTIARLSDLTPEDYASNWTDKPFILTEPVKKWPVYNTWTPSYLLSNFPSIKFRAEAVDWPMSTYISYMNAQSDESPLYVFDRAFAEKTSIDSSLSDPATAAYSSPAAFGSDLFALLGEHRPDSRWMILGPARSGSTFHKDPNATSAWNAVLTGSKYWLMFPSGPNIPPPPGVIVSDDQSEITSPLSIAEYLLTFHALARATPGCKEGICHAGEILHVPSGWFHLVLNIEESLALTQNFVPRKKLPDVLGFLRDQRNEVSGFREEVCDRAYELFVERLQEECPDVLEEALGELEKKGKSKRGKWEELTKGDGEEEESGGFSFGFGGDDDDADIP

SEQ ID NO: 41686 - protein, 404 aa, Oryza sativa
MASCCGGFMEKAKPYFAMICLQFGYAGMNVITKVSLNHGMSHYVLVVYRHAFATISIAPFALILERKVRPKMTWSIFFQIFILALLGPVIDQNFYYAGLKFTGPTFACAMSNILPAMTFVMAVIFRMEKLELKKVRCQAKIAGTLVTVAGAMLMTLYKGPLMEMAWSRHAGTGVAEAPAAAAAAISGRDWFLGSMFVIVATLAWASLFILQTHTIKQYSAQLSLTTLICLVGTLQAVVVTFAMERRRPSVWAIGFDMNLLAAAYAGIVTSSIAYYVQGLVIQRTGPVFASAFSPLMMIIVAVMGSFILSEQIYLGGVVGAALIVVGLYSVLWGKHKETQEKQADTKLSLPTSKGAAAAAEAEEITGAGEDDGDGDDDAERSKNHRSSGGVRSSSDSNGHGASAV

SEQ ID NO: 41687 - protein, 234 aa, Oryza sativa
MFLEGFSFPRALSGMIAVVAIQRFVFKLIITLALTREFKADTANIAWWTGKWYTMGWHTISQPGREFLCKITELGFFAADFILGHVLLFFMLPILLIPYADKFHSVMLFWLRPSRQIRPPIYSLKQTKLRKRRVIRYAILYFVILIVFLCLIIGPIVAAKFIQIPTSLANSLPMEILQPTGYNNNDTTTSTTGRCVNGQECPQWQGNNADSTGGGGGAAATTAAARRFRRYLAY

SEQ ID NO: 41688 - protein, 187 aa, Oryza sativa
MPVFDLKKNLVFYGAYHREPTNVAIHIACVPVLLGTGILLGTNTPSLKTPALLSHLNLPLNLGTIAAATYTSLYLLLSPNAAGVSVSPLILGAAALANRLSSTYTRTKVNSIALAVHIASWIAQFVGHGKFEGRKPALLDNLVQALFLAPLFVWYEVLFKLGFYKKLQAEVQRGIESEVAKLNAKTE

SEQ ID NO: 41689 - protein, 371 aa, Oryza sativa
MTTMDLRVGNKYRIGRKIGSGSFGDIYLGTNIISGEEIAIKLESVKAKHPQLEYEARVYKSLAGGVGIPFVRWFGTECDYNAMVLDLLGPSLEDLFNFCNRKFSLKTVLLLADQLISRIEYIHAKSFIHRDIKPDNFLMGIGKRGNQVNVIDFGLAKKYRDPKTHFHIPYRENKNLTGTARYASINTHLGVEQSRRDDMESLGYVMLYFCRGSLPWQGLKAATKKQKYDRIMEKKMTTPTEVLCRGFPNEFAIYLNYTRSLRFDDKPDYSYLRKIFRDLFVREGFQYDYVFDWTVYKYQKNAQAIAQAANQGQGEEDDKGRGRHVTTTAAANAGTAAGTKRGPVNARQEGTGMQLRSANKRGGDQYASGGY

SEQ ID NO: 41690 - protein, 102 aa, Oryza sativa
MCYSTSGSSYDPTSPANSYAYHRSVDQDHSDILHAGESQREADAKSSSAASAPPPSRRLRLFGVNLDCGPEPEADQATAMYGYMHHQSPYAAVSTVPNYWGS

SEQ ID NO: 41691 - protein, 57 aa, Oryza sativa
MPPAPPSIPPPPTSLSSSIHRAAPSHLFAFPRVAPPAREGRWRADSPPPVLGSDGGA

SEQ ID NO: 41692 - protein, 72 aa, Oryza sativa
MSHHAALRLAMLGKYVVTVFHSNSERAFLREVLREKLAASLSGLYAGPPVEVFVSEADADPYEIWDVETLVV

SEQ ID NO: 41693 - protein, 250 aa, Oryza sativa
MDLATTPARRPMEAGMARRLWHVVLAVCHMLRRGLCRKRLMVDLHVLLGRGKLAGKALRGLLAHHAAAGHGHHLAASSSSSAALASFYGRRPREVEFSCTTTPSSYPHYGLFPFKSRGGGGGRRGGGGGGEYGGLDAAAVARAFEMMSAEVEGTPSSSAAAVQGGGGGGWATATPSPMVAWILGRSPAGVRPLRVTDSPFPAVPENGGGGGGEQRVDDAEFEDFINKFYEQLRMQPSAATPDCQLRRRGR

SEQ ID NO: 41694 - protein, 318 aa, Oryza sativa
MVDKAAVWLVVIALAAAANGAFAGRVLEEQPAAAPAPAEAPVAPVDPLPAPTDPPADTVVAPAAVPAGGAAATGNAGVGAAGGGAGAGDHHQLTFFMHDILGGSQPSARIVTGVVASAAANGQLPFARPNDNIFPIQGAMPLPQGASNLVNGNNVPYVAGLGGTSSAAIVQGNGNGNGGNKNIPFVNAGDLPSGATLQNLLFGTTTVIDDELTEGHELGAAVVGRAQGFYVASSQDGTSKTLVLTAMFDGGGVEAHGDTLSFFGVHRMAAPESHVAVIGGTGKYENAKGFAVIQTLHPGDEHTTDGVETLLQFSIHLI

SEQ ID NO: 41695 - protein, 83 aa, Oryza sativa
MRTSPKTINPSRCCSILVICVHRSTPCAARSVRRTKTVRWSAVPRLSRPPLDCFTRQPRHVWPYCSAARPGSARNDSPAPYIA

SEQ ID NO: 41696 - protein, 45 aa, Oryza sativa
MRRFRQRPRRSMWHTARTTCHSRRAIPASMGRRAGVVARSINFTQ

SEQ ID NO: 41697 - protein, 294 aa, Oryza sativa
MRADLWLLTLFGVANGSALIPRQDDIEAAADYKPDDSKDWKPEDDKKPPVEWKPITKYPKFFSLAIDETQIGFDGSPITAALTCNPLVTPVKIGLPRTAVAAGLPCYFSNYAVRLSDGKAIVTPYTKWFDPKLPLFLVDDDTKTYTVSKKPYELYVNRVSGLLQYAPVGYLPSDAIATSFYLLGDNPLRNNDPSSAWLSWPSTQGRTPSPWLLCPISGTGQYEIYIGNGNFGTNEPPSNPLADPLGVPGNLIPNIKVPPGTPGGVYKDGRKCFVVSLAALNASPWQYGGGSGPW

SEQ ID NO: 41698 - protein, 398 aa, Oryza sativa
MSATIMQQQQQQMQQLRRSSKSSRPSSSSSRRAAVAVRSQAPAAAAAPAVADAPLMVRAARGETVERAPCWMMRQAGRYQSAYRELAKRHPSFRERSETTELIVDISLQPWRSFKPDGVILFSDILTPLPGLGVPFEIDDNKGPLIDNPIRSTDQLSRLHPLDLSQLQFVGESLQQLRQEVGNTAAVLGFVGSPWTLATYIIEGASSSLYKTIKAMAYCNPTLLDALLSHLAEAMADYIRYQIDSGAQCVQIFDSWGGQLPPQQWDKWSGPYLRRMIESVKSTHPSTPLTLYANGSGGLLERLGATGADVVGLDWTVDMADARQRLGAKAVQGNVDPTVLFCGESAIESAVRDVLAKAGGRGHILNLGHGVLVGTPEEAVAHMFNLSKQIKAAELVAA

SEQ ID NO: 41699 - protein, 177 aa, Oryza sativa
MYPDGGIARFRLYGNAVPVFPQDTSAVFELSATVMGGVATSCSDQHFGTKDNLLLPGRGKDMGDGWETKRTRGEHVDWTIVRLGAEGEIDNIVIDTAHFRGNFPQKVQVYAGSFEKDPSHDDAAWVEVLAPQKSGPDAEHKYKAELKQVQGKAYTHAKLVIIPDGGVKRFRVFGKRV

SEQ ID NO: 41700 - protein, 260 aa, Oryza sativa
MVDGSLHHSRDAAAGSVAAAGGSPRLYRLRRAVAMLLVLAVFQLTQGLVSKRSEPATVADGDSALQWLSPLSDWFWTHPHASRWVLIVTSAMVDFTGFGLLACGSAGHSTRALIGVAFICLMRQLCVLLIAIPTPAHTMFRETGIPSLLVTYQTQNDFFFSGHTAISVYGMMELPRATAFRKSSSSRAVVRVTLVMHAALQVFTVLVLRAHYSMDCVAGVLCAMGADYVALWWAPAVDEWFVRPKKLGPELVVQVKHRTE

SEQ ID NO: 41701 - protein, 232 aa, Oryza sativa
MVSFKALLLTLAATTSVLAAPFDFLRERDEAGNATATLERRQSTANSVGTHNGYFYSWWTDGGGSAIYTMGEGSKYTVQWRNTGNFVGGKGWNPGTGRTINYGGYVNFQGNGYLAIYGWTRNPLVEYYVIENYGTYNPASGAQVRGTFSTDGGQYQVALSTRYNQPSIDGTSTFNQYWSVRTAKRTGGSVNMQAHFNEWAKYGMNLGQHYYQIVATEGYQSSGNSEIYVQTQ

SEQ ID NO: 41702 - protein, 264 aa, Oryza sativa
MFDPFGLNNHINSMMSSMMMDPFMTPAQRQRQQQQQQQQQQGGASSNGGQMRPFDPFSSLAVSPFDHHQRSNPFALMHQMMGNMDSMFRPHFGADPFSMAGGNIINASPNSEVYSSSSMITYSSGGEGGRPKVFQQSKQMRQGPGGVKETREMVRDSERGIEQMAIGHHIGERSHVIERKKTRGGEIEEVVNLENLDDNDVNDFNKEFEERIGAKYRSSQHHGGHHRAHNHHHLNNNHPLPIDDSSQRSKKDKSVESRKTKPKH

SEQ ID NO: 41703 - protein, 205 aa, Oryza sativa
MQTEKKESAGAAGEKPPSFCDRLQRAFHARPAFRPLRRLGVRHGQDDDGGGGAPGSTVDMQPATTTTHGGGPPRPVLPPAAGHAPAPVVLPPAVVKPAAKPAGGNAPAPVVLPSAPAARPPPPSRRHGHAHASTTGSAPAAEKVAATTTRPPPGIPVPVPPPAAAAAADVTTAAADAKEGDGDKEQQGKGKTRVSSRVRKAFSSK

SEQ ID NO: 41704 - protein, 78 aa, Oryza sativa
MIRRFPGVRRVLQGEPPRACAAGAELVEPLLAAHAPLPAAAICGVKRGRERTERVAGEDGKGDGVAWFQFKKVSVASI

SEQ ID NO: 41705 - protein, 58 aa, Oryza sativa
MQQCCCCSIGRGTQAVPAVLSWALRSWPLPLACHVCWRHWKVQHALALLCLCWPRQVT

SEQ ID NO: 41706 - protein, 419 aa, Oryza sativa
MAALRHVGAWPEVESITLRVMHPTWARSRSIDSVQAPCRAEHVMRAYRGVAACAVARYMRETAVGKDHHGARNSTTTKRVTVLDAWVLGMRAGAAGYEPDGLHFGTALNDLTTDAFLLASVCPGQPHPTLDTSSGHGGDVWWSSDAAEIERRFDCDASFPLTAEAVTDRIQRGPLTIGPWDVAHGTAQEVGCMCDRSTATNAVQSDHCSLRLMTKPSIKATAAALFSALCPAASGGKPSPKVVGAGTSGTFLPARAGELLLEVCVDRDLGVDALTSLGFGNATLWAPLRSLSNRSEDYASLGRCHEATSPPSPWCAAQHQRLSQRRRDLFVLRAALGWDGGRTGGGIRPLPFDEFDCIDRELWRAMMLLACHPKWRAERSQSALVGIARVIRPLDAKDPVRGHMDTLRDAIGQFKFSSY

SEQ ID NO: 41707 - protein, 333 aa, Oryza sativa
MSETLRVLVTGSAGQIAYSLLYAIANGDVFGKNQPVILHLFDISPMLTAMGGVKLELEDCSLPLLKDVVVTDKEEVAFKDIDVAIMAGAMPRKEGMERKDLLAANVRIFKAQGEALDKHAKKTVKVVVVGNPANTNCLILSKYAPSIPQENFSCLTRLDHNRAKTQVALKTHVTSDKVKNVTIWGNHSSTQFPDLAHAKVTLPDGSVKGAYEAINDENWIKNEFIPCVQKRGAAIIAARKLSSAMSAAKAICDHMRDWWHGTQGDEWVSMGIVSDGSYGIEKGLVYSYPVRIANKKWTIVQGLSVSDWARDLMDKTAKELIDERNDALEATSK

SEQ ID NO: 41708 - protein, 324 aa, Oryza sativa
MDRHEEEAGESPCVPPGFRFHPTEEELVGYYLARKVASQKIDLDIIQELDLYRIEPWDLQERCKYGGHGGDEQTEWYFFSYKDRKYPSGTRTNRATAAGFWKATGRDKPVLSSPSTRVIGMRKTLVFYKGRAPNGRKTDWIIHEYRLQSNEHAPTQEEGWVVCRAFQKPMPNQQQHRLSYGCIPGSYGAGAYAAVPDNYSLLLHHDNPSFAGRPLMSAAASALFANNNNNSVVDHSNILSSESKLHFSDMMPPLESPTIVDGEGYVSQASSCVDVDQQAGIVDWNLLTSLLPPPAHQLFHHLPSASSSKNSNNISSSGFIDDRD

SEQ ID NO: 41709 - protein, 284 aa, Oryza sativa
MTPPFRPSPSAGSIPRGCGGDRCASGRDAWPLHHVRHDGVFCRLCSSCVLLYHPAAFCSACLLLFPPASASASASAATAVQEPRLDPILSPPGPTAACSSCGLFVAHHSCVPDSASFVCPSCAAAAEGKPFSYTPAGGGRRALDERAARVLLVAARLAHDSVARAAAAAREDAERCVREAAVARKRSREMLDAAFRALEAEAREAKKPAAAPPPKKKIPKSSEANRDKLLKFNAMQQPALAFAAAAAAAASSMPLSIPSSREDKKPVKQEVQGEPTLNSIKMGS

SEQ ID NO: 41710 - protein, 281 aa, Oryza sativa
MRPPAMSPADSLAAGRSRRVGASMPRPKRVRVYFVDADATDTDSSGDERSRPRVREVIDIDVGAASPAPAPKHPRRLVPTATAALARRRAGMAASRRFRGVRRRPWGRFSAEIRDPSLQKRLWLGTFDTAEEAAAVYDDAALRIKGSHAVTNFPSDSDTPSAKAKQMKLHPRRHTTPDKTPSSSTAAAAKASVPDPTPAPPEEDRANDSSFNPFASPTSVLRYAAADEVTAPSFEHLLVELGDLSAPPPSTKAAEFDWLPWWEGEDFVTAGLTASNAVSVK

SEQ ID NO: 41711 - protein, 96 aa, Oryza sativa
MCRLWRPSTRRPAPRCKSRCSWLSRSPPSRRKPTPARRLSAGNSPPRACSFSRPSRTRPSKRSPAKSSLGCAPRTVPSRSPPRPRPKRWLAPRPWN

SEQ ID NO: 41712 - protein, 359 aa, Oryza sativa
MDGGGVDGYEMEMVRNRKVVLRRYVTAGYPTVDDMEVVSSTMMPRVPLGTMAPAVMVKNIYLSCDPWMRGRMTKHDDATAEIAEDFVLGEAMVNFGVSKVVDSTHPVFAAGDLVWGLCGWEEYSLITQPETLHKINHPDLPLSYYTGVLGVTGLTAYAAFFEVGKPKKGETVFVSAASGAVGQIVGQLAKIAGCYVVGSAGSDEKVTLLKTKFGFHDAFNYKKESNDLTGALRRCFPDGIDIYFDNVGGATLDAALVNMRRGGRVVVCGMISQYNLQEPEGVHNVIQILSKTIRVEGFAVFNHFGLYPMFEDEMARYLKEGKVTVLQDVVEGIEKASEALIGMFSGRNVGKLLVAVADE

SEQ ID NO: 41713 - protein, 60 aa, Oryza sativa
MSWIRTWMPCATSRPLTSPWKQPKEERFCRKRTFSGRLCGLAIVRKVPGIRCRSAGCSIF

SEQ ID NO: 41714 - protein, 413 aa, Oryza sativa
MMQFVKGLISKMKTKRSPLDVSDFVAARPAPSATQLWERIDARYMGSTMDPKHLEVHKKRMLFDLKYRCGAEGRCMEGDFRCRFPCCFQMRPSIKGAEIFMERLGLEEKVAPRNHDIATMLSKEQLEDALLLMAERVKDMETKTAPAAMSAATLDEYMNLVCLHATILMNSNRDAEAVDFLLERAPRVPRAAKLELLSTATNWATLNDMEIRFYSVHVVHFPELDGAKARATKPPLLKKVIDACKNDDEAEDHVVHAVVGKEVTGIIARAQNAQDYEDFCEDPMATSVVRDSVDHYRHVIGGSFWTKFFHLAMMPPLDPRDNPPETAPEETPRNVLDALGRSMLLHHIAKSFDADFAQTAEEANAKARKMPQDMTKEELERLPKDQRIALKRMQELLMIVKNYSGPTKAGTKK

SEQ ID NO: 41715 - protein, 159 aa, Oryza sativa
MHGSGVYVWGTGMVYRGDWMQGAMHGCGTRIWKQPDGSMAAAEGTFFHDEYVGDIMPCSKEDAFDNAVEADMAAFQASGPAGKLRASHGSRGQQHMTGSCKQEQVHNQRSRPSCIHSRAPKRGHTPGGQRAAAWWLPPSHQVCIMINGRTSGCKAWYSG

SEQ ID NO: 41716 - protein, 271 aa, Oryza sativa
MAACQQQIWQEGKQQQHLHHGGYDDLSSVYRGTVVLPRRQGGLAPEPPPPRPSSSSGRSAAAQATAMTIHSEAERRRRERINAHLATLRRILPDAKQMDKATLLASVVNQVKHLKTRATEATTPSTAATIPPEANEVTVQCYAGGEHTAAARTYVRATVSCDDRPGLLADIAATFRRLRLRPLSADMSCLGGRTRHAFVLCREEEEEEDAAAEARPLKEAVRQALAKVALPETVYGGGGRSKRQRLMMESRYSTAVVHTHVDPQYCWYNSR

SEQ ID NO: 41717 - protein, 174 aa, Oryza sativa
MARFVDPLVVGRVIGEVVDLFVPSISMTAAYGDRDISNGCLVRPSAADYPPLVRISGRRNDLYTLIMTDPDAPSPSDPSMREFLHWIVVNIPGGTDASKGEEMVEYMGPRPTVGIHRYVLVLYEQKARFVDGALMPPADRPNFNTRAFAAYHQLGLPTAVVHFNSQREPANRRR

SEQ ID NO: 41718 - protein, 140 aa, Oryza sativa
MSKRGRGGSAGNKFRMSLGLPVAATVNCADNTGAKNLYIISVKGIKGRLNRLPSACVGDMVMATVKKGKPDLRKKVMPAVIVRQRKPWRRKDGVYMYFEDNAGVIVNPKGEMKGSAITGPIGKECADLWPRIASAANAIV

SEQ ID NO: 41719 - protein, 173 aa, Oryza sativa
MSRVLEPLVVGKVIGEVIDNFNPTVKMTATYSSNKQVFNGHELFPSAVVSKPRVEVQGGDLRSFFTLVMTDPDVPGPSDPYLREHLHWIVTDIPGTTDASFGREVVSYESPKPNIGIHRFVLVLFKQKRRQAVTPPSSRDYFSTRRFAADNDLGLPVAAVYFNAQRETAARRR

SEQ ID NO: 41720 - protein, 204 aa, Oryza sativa
MKTFTVASIIALASVASAQLDNIPQCALACFVGPLTSDGCAALTDFACHCKKGDELLSKVQPCVQGACSAADQQKAIEAVESTCKAAGVPITIPGSGAASSAAPSSAAAASSQASSAAAPSSSAAAATSVISSVASAASSAVSSVISSAKGSVTPVPMPTVNSSMPSASGSAKPSSVSEFTGAAAQATQAVGIIGAAALAMLAL

SEQ ID NO: 41721 - protein, 463 aa, Oryza sativa
MAEGKEHLSIVICGHVDSGKSTTTGRLLFELGGIPERELEKLKEEAAALGKQSFAFAFYMDRQKEERERGVTIACTTKEFFTDKWHYTIIDAPGHRDFIKNMISGAAQADVCLLMVPADGNFTTAIQKGDHKAAEIQGQTRQHARLINLLGVKQLICGVNKMDSDVAGYKEERYVEIRDEMKHMLTRVGWKADFVEKSVPIIPISGWMGDNLIKKSENMKWWNGMDVTGLNKEKVHIETLLNALNDMVIVPERKTDAPMRVPISGAYKIKGVGDVLAGRVEQGVVKPGDEVIFLPTHTAANPCVGKVFTVEMHHKRVDKAGPGDNVGMNIKGLDKGNMPRTGDVMILKSDQTLKPCQNFTAQIQTLDIPGEVKKGYSPIGFVRCGRAACKITEIKWKVGKETGNKKLEEPHGLKANEMAEVVFEPCQPLVVDSFKSCEGLSRIAFLDGNTAVMLGKVVAVTHK

SEQ ID NO: 41722 - protein, 410 aa, Oryza sativa
MDGAMQESREYWRDGGDVVGEELLREILDETAAVHSNSNSNSNSNSNSKEAEEEDEREYFAAAAADEQLQVEAPCGRRRRESMVNKLISTVYSGPTISDIESALSFTAAGDHQLLADGHNFAASSCSPVVFSPEKTLSKTMENKYTLKMKSCGNNGGLADDGYKWRKYGQKSIKNSPNPRSYYRCTNPRCNAKKQVERAVDEPDTLIVTYEGLHLHYTYSHFLHSTSSSSSSTTTQQQLQPQPQMMTNCKKKPKLHLHPLLHDDPPPPPPPPEMTTMMIMQSFSIQQQQHDDDQLLQPAADDHLMVQAPPDDCYNINGSSSSGLMMSLDDDEQAAGAGGLLEDVVPLLVRRPPPPICNNNNYYYSPATTCTSDNEYGSSASASPSSSVSVSSWTTPMSPCIDMAILSNIF

SEQ ID NO: 41723 - protein, 713 aa, Oryza sativa
MPDKVLLVGPVHGRLLELVSKTSAIQAKHGPFAALFIVGDLFASTPTDDILKQQSDLLAGTLSLPIPTYFYQALGSLPADVVKRISEVRASSSNGLVALTEQLHWAAGKSGVFTTAQGLRVAFVAGNWDAGAFASDGGLGDFDAGDWHESPTQREEDEKTTYITPSTVRRLLAHPSFRLPKPSVEEVGSTSVAKEGTLAAARASASAEQARAARQGAALEMLQQRPALDLLLTNTWPAGVTLFATGADADAGLPDPTARTWGSPVIARLAAHACARYHFALAPSPDSPDLPVGIQEATLNMGAFWERAPYTTDLASYLPAPVRAPLRSVTRFVSLATFGNSGKRRWFVALNLTPADEQGAVVVPPNATPSPYAMPKAAKQAKRTQPAEEEQNFRFGEAGRKRARADGDAPPPGYVCRICGVEGHFIRACPSKTNAQPAASAEEGAGKIELPMGLPSKPSFAQGGRQMIPVGPANCWFCLSNPSVEKQLIVTIGSASYLVRPKGPFIHPSVNEIPHTGAHFIIVPLAHVADLLPGSHPVHGGQGDDGEKASIRSEVESTKAAVRAVWAREGHVMLEWTLVRVRTSPRMTHFQTQLLALKSSIYVAQKLDDALEAQANTAKTAVLRSHAAREYFDQTHSEDRGDDGYLHIKLHAQEEREWLVPLCTSTRFPVQFVRATLAAALELPQLADWKACTGDADAEQERHDSAALRAMLS

SEQ ID NO: 41724 - protein, 203 aa, Oryza sativa
MPPRRGIEVRQAVGDGAAPRWRMSLLENTFSSFLQSIGGGVAADGAAARAVFGEGSLFSPFLFGKFFDPADAFPLWEFEPEVLLAALRRGARTTVDWAETDSEYYLRADIPGGRKCDVEVSGDDAMRVVDVSGLWRAAPPPPPPDGRDWRAGRWWEHGFVRRVELPEDADWRKVEAFFDDGEGLLEIKVPKSGDAHQAAAATA

SEQ ID NO: 41725 - protein, 233 aa, Oryza sativa
MARRLLRLRAHAAGLSQRLAPRLLPSRPYISDMRRSAFSDRLLRSLRSEISSRRAPSPPPSAAPFAVDDRPGEQWIRLRRAFGGDDDDEKEEVRVDATMVDGATAPTRSGEVAGAGPDDAAGPQLRMHISVNVEVTKAARRDLALTFECSAWPDEMEVERVYPVRRGGPAAAQQYMGRHFSELDDEMQSTVHDYLEHRGVNDELAAFLHSYMENKEQTELVRWFKNVECFIKK

SEQ ID NO: 41726 - protein, 171 aa, Oryza sativa
MTTTATPPTAPSAPDPRAAGSLLSHVQAVGSLHDDVRALPHPSVAGHDERRRRLQIRALPAPSSPTSAPLAPFTTTSARRRIPPLPATTSDDDGSRSVRRRLPSSPPLPAASSPRPLRRRADNDDDGDDDDDDGADDDGWRGALAGGAPWFFLFSWDDFRWRATGALAKMV

SEQ ID NO: 41727 - protein, 277 aa, Oryza sativa
MAFRLSNNVIGALNLVTLLLSAPILSGGIWMATRGDGGECDRHLSSPAIALGAVLMAVSLAGLVGACCRVTWLLWVYLLAMFALIVALLGFTAFAFAVTNRGAGEAVSGRGYREYRLGDYSTWLRRHVGSSKNWDKIRSCLAGADVCRSLQDRNETWAQFVADDLSPVQSGCCKPPTSCNFTYGGGTRWGKTARLSSADPDCDEWSNDADEVCYGCRSCKAGVVAALKRDWKRVAIVNVVFLAFIVVVYSVGCCAFKNSRRDSVHRRSGGWKQAGYA

SEQ ID NO: 41728 - protein, 250 aa, Oryza sativa
MGMCSKTRKKGSWRAEEDALLTRLVAQHGPHRWSIISGAIPGRSGKSCRLRWCNQLSPAVQHRPFTPQEDALLAAAHARHGNKWATIARLLPGRTDNSVKNHWNSNLRRCLRRQAKFKSKDPDLLPDPINIPPDCIVVLNDDDEPADRPVTPPAIIQAQAQETLPSLTLSLSLSLPGAAAAAAEVEVAPPPPRALAAASEIQDGSSRSSSASRVMLQVMRQMVREEVQRHTAQLAYSLMALASCSRRPPN

SEQ ID NO: 41729 - protein, 379 aa, Oryza sativa
MSKQTYNVVVLPGDGIGPEVVEQATRVLELISSKSDSFSINLKPFDFGGAAIDSTGKPLPDDTLEACKTADAILMGSVGGPKWGVGKVRPEQGLLALRKELDLYANIRPCLFPSESLLSHSPLKPEVAKGVSFIVVRELVKGLYFGDRQEANLDDPSSDGAAYDTMVYNKFDVERITKLASYLALQSSPPAPLHSIDKANVLATSRLWRKVVQDTVDTQFASQGITVDHQLVDSASMVMVSNPRKLNGIVLTENMFGDILSDESSVIPGALGLLPSASLSGLPDGKSRCNGLYEPIHGSAPDIAGRGIANPVGTILSAAMLLRYSLHQPELADKVEAAVRKVLDAKDIGGHELRTADLGGKHGSKDVGDAVIAALEALL

SEQ ID NO: 41730 - protein, 135 aa, Oryza sativa
MWASPGRLPATMAEEGGDDGEADVDASSYGRRTTTARGGGAAAMASSCWGRLGLAALWHRLRQLSVARRRRRHGGGGGGRSILGAGGLNYDPLSYAQNFDDGCLEPDFTVTARFAPPRSAGSPRLPPAAPAAASA

SEQ ID NO: 41731 - protein, 293 aa, Oryza sativa
MLLSDFGLSKRLDGGAQTSFSQTVNNPGGTVGWRAPEILRGDVNLDAGSESESSMGNNPKASSSREEKQRLTRAVDIFALGCLAYYVLSNGDHPFGSRFEREMNIIRKRVDLSRLDGLGEEGHEAQDLVLNMVSHDPRHRPSAAEVLTHPYFWDPNKRLNFLQDASDRFEIMDKDPPTAALVLLESKARNVLGTDWHRRCDKMFLDNLGKFRKYDPASVQDLLRAMRNKKHHYQDLPPTLKKILGSLPDGYLNYFTRRFPELFLHVYNTVVQQPLIRTEPVFREYFHCAEPEH

SEQ ID NO: 41732 - protein, 162 aa, Oryza sativa
MSASDDEQHNATFESADAGSSLTFPMQCSALRKNGHVVIKGRPCKIIDMSTSKTGKHGHAKVHLVATDIFTSKKYEDISPSTHNMDVPNVSRNEFQLVNIDDGYLNLMTNDGDTKDDVRVPDGELGEQIQAAFDDGKDLMVTIVSAMGEEHCLSFKDAPQGK

SEQ ID NO: 41733 - protein, 127 aa, Oryza sativa
MASSAAESSGQLLPPVPPLLPLLSPAVAPCRLWHELPDRQQRESDEVVAHHVRVRDALRLHGAPDAHLAAVDGRDLTGSTAALAPRPGSRPNSEGMNLRTWPPPISLMAVMRLVWSGTWGDCTAVRR

SEQ ID NO: 41734 - protein, 91 aa, Oryza sativa
MEDQTAAAAGLDSRVKASLVLGTESFAISSESGILSEQLAAMKEKSMEILKGYITKHNAPADVPDEPIEGLSDDEGDAPAKNPPKKPKKQK

SEQ ID NO: 41735 - protein, 465 aa, Oryza sativa
MRELITFACGQAGNQISSAFWQCILNEHGLDGDGRYIGSNEDEQLAKVGVFFEPSGQEGKYVPRSIQVDLEPGTMDTIRSGPLGKLFRPDNYINGESGAGNNFSKGYYTEGAELLDQVLDVARKEAEKTDMLQGFQLVHSLGGGTGSGLGTNLLTKLREEFPDRMLATWSVLPSPKVSDTVVEPYNATLSFHQLVENSDMTFCLDNEALYDICQRTLRTKNPTYSDLNSIISFAMSGCSTTLRFPGQLNSDLRKMGVNLVPFPRLHFFTTGFAPLVAPGSKAYQSLKTSELIAQGYDPKNIMAAIDPRHGKYLTVAAIFRGNVNARDVENEMYNLREKNPAGFVEWIPNNVLTSLCDIAPPQLKMSATFIANTTSIQELFKRTHDQFSLMFRRKAFLHWYTGEGMDEMEFTEAESNLMDLIAEYQQYESAGVDEVDEELYEQEYQGEVDGQQEYADDSVQYADEQ

SEQ ID NO: 41736 - protein, 94 aa, Oryza sativa
MCNGRECKRESAFRAASLLRERDAAKGEQQQRQPSVDGRGRQATEAEAEAVTMSRARARARARAWEAEVRRRHAAETEIMKTEKIMHLLLWGPN

SEQ ID NO: 41737 - protein, 92 aa, Oryza sativa
MASMAKSLLCISLVAILLLVETTAPHGQAYAIDCGAKCGYRCSKSGRPKMCLRACGTCCQCCGCVPPGTSGNENVCPCYANMTTHNGRHKCP

SEQ ID NO: 41738 - protein, 375 aa, Oryza sativa
MELRRLPLLLPSPPSPRSAPTTSPPPPTGGQMAPSKQYSEGGQLQLMDAERIEEEEECFESIDKLISQGINSGDVKKLQDAGIYTCNGLMMHTKKSLTGIKGLSEAKVDKICEAAEKLLSQGFITGSDLLIKRKSVVRITTGSQALDKLLGGGIETLCITEAFGEFRSGKTQLAHTLCVSAQLPIHMHGGNGKVAYIDTEGTFRPERIVPIAERFGMDANAVLDNIIYARAYTYEHQYNLLLGLAAKMAEEPFRLLIVDSVIALFRVDFSGRGELAERQQKLAQMLSRLTKIAEEFNVAVYITNQVIADPGGGMFITDLKKPAGGHVLAHAATIRLMLRKGKGEQRVCKIFDAPNLPEGEAVFQVTSGGIMDAKD

SEQ ID NO: 41739 - protein, 247 aa, Oryza sativa
MGLLDKLASKVGGNSGRPPSQQYGGGGGYGQQPPYQHQQQQHYGGGGYNQGPPQQSSGYPAAASPQPQGGEKPKDDDRPLPDGWVKQWDSNYSRYFYVDTRATPPRSIWVHPNDENKSSTPAAGGYAPPPGGPPDNRGYGQQPYPQQQYGQPQYGQQPYGGYQQQPMYQQQPMMAGGPMGGMGGRRFGGGGGGGMGMAGGAALGLGAGMLGGALISNQMNDAYQDGYQDGAQDDFGGGGDDFGGGDF

SEQ ID NO: 41740 - protein, 192 aa, Oryza sativa
MKFSAVLIAASLAVAVSAAPTSYRGSYGIANGNANGNANSASWSGNDNGNGNKGYGNGNGNGNLNYWGTNLGNDNGNGNKGALNGNANGNLNSGYNAGNENGNGNKGVGNGNGNGNANTGGSLNSWYDGTTGSGNGNGNKGYGNGNINGNGNTASFSGNDNGNGNTGALNGNLNGNGNTGVGSGNGNGNGNH

SEQ ID NO: 41741 - protein, 106 aa, Oryza sativa
MGDNGGAKRSCRTDARARAAGRPDLTPGGGGGSGARRSYGCGAGPRAAGWPDLTPGGGAKRSCGADAGARATMETGGVSALTPGRPRITPRLLPRSAPLLLSQSME

SEQ ID NO: 41742 - protein, 291 aa, Oryza sativa
MTGPSADNTTPTQLKGLDLSGNVLSLLAVVYGSSASWCTAASDYYVLYPPNTSRTKVFILTTMGIALPTSFGMVSGCVVSSALNNEPTWNAAYTENGGSGLGFLLQTALYPLGFAKFLLVLLVLSGINCNIINTYSAALSCQQFARPFARIPRVIWTVACFGVILAIALAGRDHLIDYLENFLSLLGYWCTSYFVIVATEHFLFRKADVANRYDLEGWNDPAKLPYGYAAITAFLLGVVMWCMGMVETWFVGPVGKLIGSSGGDVANEMTFAMTLVAYVPLRYLELKYAGK

SEQ ID NO: 41743 - protein, 256 aa, Oryza sativa
MTLACGLTALRRSRAELARPLVVSQARSELVEKPKEAPRLRSGAVKPRAEASRWRSRSPGRRLVRTPVQLPQIPISSWSSSPPNLLPPPWSSSLSDQRSRHGRRRGRRRRQIRRHRCSLPLSSPRRGEGSSRRAPRRQIRRHRYSPPPSSCRREEGSSRRARAREGRGAAGEPAPEGRGAAGELLAARSASTAAPRRRQTRRHRCSPPSTSRRRGEGRNRRGEGRGEENRATRCGCRWRKIEERERGIKKRGMGRD

SEQ ID NO: 41744 - protein, 222 aa, Oryza sativa
MSAAARFAATFTGKGGHAGVPHDAVDPVVAVSSAVLSLQQLVSRETDPLEAAVVSITILKGGDAYNVIPESASLGGTFRSMTDEGLAYLMKRIREIIEAQAGVNRCAAAVDFLEEELRPYPATVNDDGMYGHAKAVAEAMLGEANVRVAARSMGGEDFAFYARRSPGAFFFIGVGNETTMGPAAAVRPVHSPHFVLDERALPVGAALHAAVAIEYLNKHDCS

SEQ ID NO: 41745 - protein, 311 aa, Oryza sativa
MSRPNTRNKSKRPRADDCESPSAVFKKIHSTGAITKGDIKQLYMVWKPVCHGCHGNSKDSPNCFCGLIPAANGVRKSGLWQRTNEIIRALGPNPSTDLRDSTETPAGLTNLGATCYANSILQCLYMNTSFRLGIFSLEPDILKMHPVLDQLARLFAQLQSSKMAFIDSAPFIKTLELDNGVQQDSHEFLTLFLSLLEGSLSHSKVPGARTIVQHLFRGSVSHVTRCSSCGRDSEASSKMEDFYELELNIKGLNNLEQSLDDYLSTEALDGENQYFCESCQKRVDATRCIKLRSLPPVVNFQLKRYVFLPKV

SEQ ID NO: 41746 - protein, 57 aa, Oryza sativa
MATGGVAVRRAARQAVACGSAGGEAGGGSGAHGYVMFSSFFFFRICDSRSKMYLICV

SEQ ID NO: 41747 - protein, 28 aa, Oryza sativa
MCAVLGILVGRSDHRMRYASIFLSCFLI

SEQ ID NO: 41748 - protein, 67 aa, Oryza sativa
MHPYSPFRAVARHACAYQEPPPLLLVFRELQTTSFISADTYVFAWTSSTVSLLNSTPSEPPFAAGRL

SEQ ID NO: 41749 - protein, 365 aa, Oryza sativa
MRALSLARASSPPPLLLHLRRALAPASSSSPAPVLLLRPAVSCSSLFVSDRAAAARRSSGSSRRSMASQQFPPQNQETQPGKEHAMDPRPEAIIQSYKPANKLKDKVAIVTGGDSGIGRAVCLCFALEGATVAFTYVKGQEEKDAEETLRALRDIRARTGAKDPMAIPADLGYDDNCRKVVDEVAGAYGGAIDILVNNAAEQYERPSITDITEDDLERVFRTNIFSYFFMSKHAVKRMRDRRGGAGAGGCSIINTSSINAYKGNKTLLDYTATKGAIVAFTRALALQLAEEGIRVNGVAPGPIWTPLIPASFAEEKVRQFGSQVPMGRAGQPSEVAPSFVFLASDDASYMSGQMLHVNGGVIVNG

SEQ ID NO: 41750 - protein, 64 aa, Oryza sativa
MRVTVLGLAGCEASTRRRRGPIASRMAAHCGHTCTRAWTGRGTTELERYRPPWLDLFENLVLEG

SEQ ID NO: 41751 - protein, 250 aa, Oryza sativa
MPKIVLAGATGFIGSEILEQCLTARSITHVYCLTRRPLAEKYSTHPKVTQVLHDNFDDLPDVLFERFRGWGVGGCIWALGAPVNTHANLEEAQKTGISYPVQAAEKFARICAPNYMETQTGSYIYPFRFIFMSFWGAEENQFRSLWIWGDTRRIKGAAEKGLFEAMDASEVVDGKKCLDVISFRVGGVLAKGDAVTSMISMGTVPSITVDRLAAKAIHKCVVGDVDNRRVLENAEVLGEDWAMGNSIQSI

SEQ ID NO: 41752 - protein, 207 aa, Oryza sativa
MAAKVGIPKDVAAVAAPQVGGVRLFGKWDPQEVEVKDISLTDYIALRNAVYTPHTAGRYQKKAFKKAQTPIVERLVNSLMMHGRNNGKKLMAVRIVAHAFEIINLLTDANPIQILVDAIINTGPREDSTRIGSAGTVRRQAVDVSPLRRVNTAITLLTTGTRESAFRNVKSIAECLADELINAAKGSSNSYAIKKRDEMERVARSNR

SEQ ID NO: 41753 - protein, 160 aa, Oryza sativa
MLAINGAMSYPTLPRISKSLRNWLPDPYMRIYVANMHRSKHGSDTESFDRRGQFRQSQLEAELSECSSRYGKDALSYGDVLAMFRERRDVFDLFGMTAFLLEWSATYMLIWPADGYMRKDDILGVYDGSLFVVLAHRYKNGLGGGAFDSKTGGVFDIKNG

SEQ ID NO: 41754 - protein, 91 aa, Oryza sativa
MCLSSGYSGRAPRSPGCRRRPGRSPRRRRRTHMKPAMHPAVENCTGPRNFPSGTKWRRDDDNEMTAFSFLFYFLYVFISRSELIKLYFFSI

SEQ ID NO: 41755 - protein, 302 aa, Oryza sativa
MVAASRLLARASRQCVAAVAASAARRRRCPAAALSLPVVTAAKAAAAEPWLGVPYMLNQPLRYSTTIFQRFGFSSTSPELSDKEENQRKDQENSTNVSNEGTEDVDLSKEDLVQLVLEKDGLLKSKDEEINDMKDKVLRSYAEMENVIARTKRESENSKKYAVQNFSKSLLDVADNLTRASSVVKESFSKIDTSKDSTGAVPLLKTLLEGVDMTDKQLGEVFKKFGVEKFDPLNEKFDPSRHCAIFQIPDPSKPSGTVASVVKVGYMLHDRVLRPAEVGVTEGGPTTTEEAAENSEQKSSEV

SEQ ID NO: 41756 - protein, 214 aa, Oryza sativa
MSAGTDTTATALQWVLANLVKNPAMQDKLREEITAAAVDGEVREEDLQAMPYLKAVVLEGLRRHPPDHFLLPHTVEEETTLDGYRVPANTPVNFAVGEIGLDSEVWTSPEVFRPERFLAGGEGEDVDLTGSKEIKMMPFGAGRRICPGMALALLHLEYFVANLVREFEWREVAGDEVDLTQKLQFTVVMKRPLKATAVPLRGDRSAAAAVTGSA

SEQ ID NO: 41757 - protein, 112 aa, Oryza sativa
MWPNPGSGPQIQLLLHPTPATPPHGLANSKPPSLPCTLVLRSSRPQGVLTLRLATPVHLHAPKERPHRRHHWPAERPFARRGKGRHRHLRRLPPSSPVPTSSTPAVAASHCR

SEQ ID NO: 41758 - protein, 225 aa, Oryza sativa
MAYETSSDHQLAAAAEFLAALQVHLAGAEASSPTWGGRCAYDEDFMMYEFKVRRCPRSRAHEWTSCPYAHPGEAARRRDPSHVTYTGEPCPDFRVAARAACPRGSGCPFAHGTFETWLHPSRYRTRPCRSGMLCARPVCFFAHNDKELRIVGDDAAAATPSPRSPFTTSEDSPPPSPMDMKQIVLAMQQMDARKATRSVAPKTDMLQQELEEDAPELGWVSDLLM

SEQ ID NO: 41759 - protein, 262 aa, Oryza sativa
MVAQSAPNAANAAAKGNAASASSQLANISKMLGSHVTFTVGDKQSQTLSGKLWAYDPSLGVVGLECEPTTLPSHLQSAPAAAASVAQASQTSRNRFAQASSAVGFTIVKVSEIKKIEFQHSTDAANGAASQAQTLTPIHPVSLKAAQLREADAVKQSLTKVARTGKDVSQLGQQVFDALSKTLPCRWHNSHIVVMEEVVISGPGYDAASTNVPGFTQDQLQSYIDGTNTSPAPDGAQSKANSWQRVTKVLQGERRKMNAAAA

SEQ ID NO: 41760 - protein, 252 aa, Oryza sativa
MAEHKAAKSKSKSKSGGHGHDAAAASKKSKSGKAKANNAAAAAPATSLDALFRPCGDVKGLRFGAQLVTRALTVRRAAPLELPHLLRVADERQREAPLAFAPTTTAYIPTNFAILAHHAWHTLTLGLGTRNSKAAVFVFESAAMKAAADAAWPQVVPLGDAGRRLIRAAPGAPEMARFKFRKGCVTFYVYAARTAGARGFARADELRAVVEAVAKLKDFLDHTAMLALPGQRSIDVAAAADAAAAAPVGVVH

SEQ ID NO: 41761 - protein, 69 aa, Oryza sativa
MAVLRNVITGVGRRLVLLVLTLLVLAALDDQAPPMIMASAARVLLQQYPPTYGPPRCYPPYCAPRHARR

SEQ ID NO: 41762 - protein, 731 aa, Oryza sativa
MDPAASTSSREDGDTSESHHAQDDDFTLRAVLAGLLIGCLLAFTNLYLGLQSGWISIMSLQSSLLGFALFRVIPRQINLVGRRFVLMSSPFTPQENVLVQTTAAAVGVMPLSAGLVGVIPALKKLTWDKDGSGPIDLDFLQLLGWCFALAYFGVFFASPLREPMIVREKLTFPSGTATAQLIGVLHNKPLLTQRASTARGFRRRSHALDEAEAGEEDDERTALLSSQHRPASSDRDQNEAEASDRDNAGVDAISGSKGWKALAWAFSGSAGFTVLSYYIPVLYAMPLFDFLPPHNLAAMWGFWFTPSLNYIGQGIIIGLSTTVSMTAGALVGWAVLSPLAYYQGWAPGHPLDSETGSKGWILWISLAIMCSESIVGLAALVASNGLRDLKSWTAREDDRAGGRDKGDEDVDHEPAHRRTPTSWVVVGLIGSTVVAVVLIYVAFGAEGISPWATLLGIAMASLFAILGIRALGETDLNPVSGIGKISQLIFALVQPGNVVANLIAGGISEAGAMQAGDLMQDYKTGHLVGASPRSQFKGQLIGSTLGIVISSFAYKLYTDAYEIPGPQFPAPTAAVWLNLARLVNRGHLPDKVKLFMIVFGAVFAVSGLIKTLARTKALHDQGTVGNSTAGKIAKLVPSGIAFAVGMLNTPNFSLARLVGGLIAHWYYARNRHRVDAAKTPAALAGIGIIIVASGFVLGEGAASIVTLLLKQNGAQAWTCAGCRGGCGGGCS

SEQ ID NO: 41763 - protein, 101 aa, Oryza sativa
MAAASTSRDSYSENNGSSFSRQLRRLPARQQRGGGCSRRLRRQRLQQLCLATASCTRAVEWNPLVLPAWKTDYSSKLKSWMRPDLSRPIIYLSIDLCLYLY

SEQ ID NO: 41764 - protein, 252 aa, Oryza sativa
MDLTRRRRRRQPAPGAPLPSDAINDSGANPEYNLDEPTMEEKLATLNLLNGGGDGTAGEATQEQPLPVVMPPSADSVHVLLKQALRADDHASLLNCLYNKDHKVIVNSISLLTPADAVKLLKFFILLMQSRGAVLVSLLPWLQSLLSQHMSSIVSQESSLLLLNSLYHLIDARTSTFKSSLQLSTCLDYLFSEIDDDGSGEEEGSPPIIYEDKDTDDEESEVDDMETSGEGEDLGGVTDASEHSDGSEVMSD

SEQ ID NO: 41765 - protein, 89 aa, Oryza sativa
MGAWFRVGRIAAAARVLWRGPTPASAPSEVRERLAVETVKLFSPGMNQQDRSFWSYLIGYNCGALIILGNANRELDQRAKALAEEREAL

SEQ ID NO: 41766 - protein, 171 aa, Oryza sativa
MVTAARLLPLILFLTAMAVGCSAWEMNIRLPTERLAYGGGEAVVAPIIHALRPLLGSGRQLAARAGVACDSWRLGVEAHNVIDWRTVPAECEGYIGHYMLGEHYRRDFAVVVDEAVAYAETLKLAGNGKEIWVFDIDETSLSNLPYYAKHGFGVDVDDGRRKAASRGSDGR

SEQ ID NO: 41767 - protein, 75 aa, Oryza sativa
MELFSSAFFPAVMRVIESNIPVLATIPVPRLGRDIPGVARLRNHPGAVIYTLNTGNRDAMREGVYNHLSSLLQKR

SEQ ID NO: 41768 - protein, 64 aa, Oryza sativa
MGRGRRRATAATTTAATTMTPMRRGRRLCEGGDGRRRAAGWRGRPAAAPVCGFLLFVECVFAGG

SEQ ID NO: 41769 - protein, 100 aa, Oryza sativa
MADVLEFFSFSITSFASSSFFFLLSCGKFTPRRRLTSCNLSLVRFTEVLVEYNFRFGLVHFFSFSTKVWHCSEMLYNDVVFFSFPPVPMRREKQRERERE

SEQ ID NO: 41770 - protein, 275 aa, Oryza sativa
MSKVPAALNPTEEDISLLLAAQTHIGTKNADKQMAPYIYKRRADGIHLLNIGKTWEKIVLAARVLAAIENPADICVISGRQYGHRAVLKFAAQTGATAIAGRFTPGSFTNYITRSFKEPRVIVVTDPRVDHQAIREASYVNIPCISFVDSDSPLKFVDVAIPGNVRGRHSVGLLWWLLCRTVLRLKGGDLSVMPDMFFYRDPEEVEREQQEAAAAAQAAKETAEPAAENTEVQADVPLAVAANLATETGNVDWSAEGAQDWAADGAAEQPTSSWE

SEQ ID NO: 41771 - protein, 126 aa, Oryza sativa
MSSLSLPLSSPLHLSPHRSSTAAPATDGAGGGAAAAGRGTAAAPRVNDYDEARRRRRDAAAGATTTTRRRRRPGSRSGEPGRRRRARRRPGGAGADPTGAASSGSGGVVLAASGAATTTTIGTDTG

SEQ ID NO: 41772 - protein, 52 aa, Oryza sativa
MACMLRRRRSLSLNMAGHAQSGTGGMALKVCPRQRMERWRLVERRTSKVVRQ

SEQ ID NO: 41773 - protein, 145 aa, Oryza sativa
MRSMTDEGLAYLMKRIKEIVEGQAAVNRCGGGVDFMEESMRPYPAVVNDEGMYAHARASAERLLGAGGVRVAPQLMGAEDFGFYAARMPSAFFTIGVGNATTSSARAAHTTHSPHFVIDEAALPVGAAVHAAVAIDYLSKHASSM

SEQ ID NO: 41774 - protein, 129 aa, Oryza sativa
MPSKRESSARVDYVPALCTHRPSLLPIGGRFPIHPLLSFSSSPPPATTTTRQPPARCPPPPSAAAASQPPPPSAAATPPKERRRRRIRPLLSHRPPKELNAANPMAIGAAGLRILNYLNLSHNAPECRA

SEQ ID NO: 41775 - protein, 86 aa, Oryza sativa
MEVAMIRFPGWTPVNMCATRLSRWRRLSGCTPIAPSQPPPAGSNCCVSAPYLLTLSPSRSRSGSRTEGAGISSGRSLHGFRLSTGN

SEQ ID NO: 41776 - protein, 113 aa, Oryza sativa
MIVRSNAAGVTGADNVNKHHTIRPHPWIDLHRRCRLVYIDGHLASSDRLICKTLHRRHRPCPLRRQRPRHRQRHRSRHVRLQRLHQPGITIVVTAIRRRRTNQSGGLIANDVL

SEQ ID NO: 41777 - protein, 128 aa, Oryza sativa
MSSSSSSPLASPSAVAPSPPPGWFRQIAERPPPLSRPADRGAGEDQPPPDPLRPSDPPRRRPLRLPLHPAVVRSGRRPCRSASLESERRGRERIERDREMGGWRVGPHGPTIFYCLCVTDMWVPQFFI

SEQ ID NO: 41778 - protein, 323 aa, Oryza sativa
MPSPVRASTSIRRLSQTARQLSNSLHTMASAQDYKTRAVGSPNTLDYRVFLENAKTGLPASPFHDVPLFADESKTVLNMIVEIPRWTNAKVEISKEENFNAFKQDTKKGKLRFVRNCFPHKGYIWNYGAFPQTWEDPHHTHPDTKAKGDNDPLDVCEIGEQVGYTGQIKQVKVLGVMALLDEGETDWKVIVIDINDPLAPKLNDIEDVERHLPGLIRATNEWFRIYKIPDGKPENQFAFSGEAKNRKYATEIVHECNEAWKRLISGQADAGDISLTNSSVQGSKGFVGANDAAVTSVPKANPQPPAPIDASIDKWFFISSSSN

SEQ ID NO: 41779 - protein, 48 aa, Oryza sativa
MKNYVVQYVPCMCRVLVFLVALYVPSPSSPANICIIHVPACRVYSYVP

SEQ ID NO: 41780 - protein, 204 aa, Oryza sativa
MQRTAAATSMPAAATTSSNADAAGAAARRRRSPEPRTVVVSPIRTKALRCNNNSSSGIVVVQQAGACSHGGRPPESGAPGDAAADKVATPQAVQQQQQQELAGAEDDDDLPVPAVCIDLDLDDIELGGLDGFLISPWRGGGHDDGNAAAGAVPNLPMPIGYELGGAGGGGEAGAVDLEALLGQLEAEEDDDGDHHHHHHHHHHQ

SEQ ID NO: 41781 - protein, 202 aa, Oryza sativa
MHEYRLCQDLAHGVSNFIGAYALCRVIKRHEAGLHGEPPAAKAKGMISKVSSSSSLVTVEHQLSSRGNASPSFTPTNNGSPLVDEMFVGGGGGDPFQLLPSCVPYHGGDACGFDLPPLCMPQTQDPFFSDAGFTQAAPPLYGDVMGSVSEHELKWDTLGGYSGGGGGELWNAAAAPLLCRQASDGDDLTAWFTAADDNMSVF

SEQ ID NO: 41782 - protein, 79 aa, Oryza sativa; identical to SEQ ID NO: 37816

SEQ ID NO: 41783 - protein, 86 aa, Oryza sativa; identical to SEQ ID NO: 38545

SEQ ID NO: 41784 - protein, 161 aa, Oryza sativa
MRGSQSHELETDVPASELWKIYGTLRAAELLPELLPHILAKVELVTGDGGVGTIVRLTFPPGIPGLQSYKEKFIKVDNKNYVKEAEAVEGDILKLGFLSYMIRFEIIRKGANTSVIRSTIEYEIGDEHPELQAMVSTASLAATAEKFAEYIKTQKVAQANT

SEQ ID NO: 41785 - protein, 368 aa, Oryza sativa
MPSSPKVFSSATTSRRATLRRILSTPAFSAACLLFGLAGFLAAALSFSWSPGSAPRARCPDSSRPLSVSVAWDRRPGDASAGAVAAAGAAVDLPASHATGSRGRHKVMAFVGIFTGFGSVGRRRALRRTWLPADRQGLLRLEEATGLAFRFVIGKSNDKSKMAALEREVQEYDDFVLLDLEEEYSKLPYKTLAYFKAAYALYDSDFYVKADDDIYLRPDRLSLLLAKERSHTQTYIGCMKKGPVFTDPKLKWYEPQSFLLGSEYFLHAYGPIYALSADVVASLVALRNNSFRMFSNEDVTIGSWMLAMNVNHENTHALCSPECTESSIAVWDIPKCSGLCHPEVKMLELHRRKECTGGPSAVSESDDR

SEQ ID NO: 41786 - protein, 240 aa, Oryza sativa
MLRQPSSRCHRSKKLLRPKHILQVVLLVAVSVWLVYQLTRNRRRAVAVEGGGAAMDGEVTRRRLGRKGFIVFAGDASDGDGVRRSIGGRSNVATEAEMERGVTSDQVGDGDRGGEGDVETGEEEEEEDDDGDGYIADDGLPGDEDDDGGDLRHLQADEMDVISFGPHTNSSDSIAAGPLVNGVADDMNRTAVINTSVNDSGVSLNPPVTGSLRYNHRKATGNIEALGGLEPTITNDMEED

SEQ ID NO: 41787 - protein, 121 aa, Oryza sativa
MPAIRRPRTCVWDVEETGNHWIQEVGEPIWRGSCMICGIGVPFRTAAVSSTAGAAGSAAWRAPRQLHPTSSSAFLEGACSEALLSLRKAEKGIGAGFLEDAATSIPLRHGRAALLVLWHSI

SEQ ID NO: 41788 - protein, 430 aa, Oryza sativa
MVKDTKFYDTLGCAPDATESQLKTAYRKGALKHHPDKNAHSPESEEKFKEISHAYEVLSDPQKRQIYDQYGEEGLEQGGGMGGGGGMAAEDLFAQFFGGGGGGGGFGGMGGMFGGREPGPKKARTIHHVHKVSLEDIYRGKVSKLALQKSVICSKCDGRGGKEGAVKTCQGCQGQGMKTMMRQMGPMIQRFQTVCPDCNGEGEQVREKDKCKQCSGKKTIIERKVLHVHVDKGVQSGTKIDFRGEGDQMPGVEPGDVQFEIEQKPHPRFQRKGDDLYYHAEIDLLTALAGGAIYVEHLDERWLTVEILPGEVIAPGEVKVIRGQGMPSYRHHDHGNLYIQFDVKFPTSIQGPADKDGQSTSMSAQQIKALESVLPPRKPQSIPPPDAMTEDFQLERVDPMEGSRSKGAHSMDEDDDEMGGGGERVQCASQ

SEQ ID NO: 41789 - protein, 279 aa, Oryza sativa
MASKAAIKRLTKEAQLMDKGPPPLVYARPREDNILEWHYILRGPPDTPYAGGEYHGQLLFPPEFPFKPPGIKMQTPSGRFAPNTKICTSMSDYHPHTWQPGWNTSTILIGLLSFMCSDEMTTGSVTASSADRKKLAEQSHAFNLTQKKFCQIFPEYAGQQIKDLPNMGDNKQSSTSAGAGAASGDANKSEKVGSDSPEAPPLPKQGLRNRSAAIPASSGAGAAEEYDASPNGRRAEDARPPRNNRRRDLFGLRSSLVLLAVLAYLFVSRVMNASANGII

SEQ ID NO: 41790 - protein, 160 aa, Oryza sativa
MCAAAAAAATAGIISPPTPSLLWANTRATFVSFPRRSPPTTSLLSASSAPAPAPPSANPKYHNAKVNAGDEEVDGEELLQRFRREVARAGVMEEIRWRRRHEDARDKRKRKARSAARRFRRRHFKGPYPFGDEQEPKEGIMEDDKHDNWELPGGELPSYR

SEQ ID NO: 41791 - protein, 286 aa, Oryza sativa
MAAAAAGDWTVVRRRGRRRGDAAGDAASQPDAPPPLPVTPIPWSPSDPSLDPAHVSRLVERARAAISRVVASRLYGRLLLPGSPLRRRLALLAPTRLSLLGVGSFENSPSSRLQLALAALLRRDLLLLPESSAHADLFDPVLSAAECAAAAALGFTVPGVNDGCRRRADEPTLFYMPHCEASLYDALLAANWEPPSQLRHVCVLGNSFRNYAIQAEENRSGPAARAKHVLAAERFAWEERVSEKGGVDDDDDDLFNRAFNETSWHFFEVDDAADLAAAVASTGGRR

SEQ ID NO: 41792 - protein, 200 aa, Oryza sativa
MYGHVRLLARAVARGVGSVPGARAILFRVPETLPPAVLARMEADDGGGGGDGEDVIPVVDPDGLPDADGFLFGFPARFGAMPAQMQAFFDSTVPLCRHQRLAGKPAGLFVSTGTQAGGQETTAWTAITQLAHHGMLFVPIGYTFGEGMLEMGELRGGSPYGAGVFSGDGSRPPSELELALAEHHGKYMATLVKKMVHGAS

SEQ ID NO: 41793 - protein, 109 aa, Oryza sativa
MVPWEGYVSDETMGTFAPIALYWVYAGGYQLVLHRRPLERYRLHTRAEEEEKNLVALPAVVRGVLLQQLVQAIVAMILFMGWIPISRRRRSGLASSTTKTASCSCCKIS

SEQ ID NO: 41794 - protein, 112 aa, Oryza sativa
MAAEAGALMGADRREPEAGGGAAALGAVGIATVSVATTLAAVFQPPPGGLLADTFYRLALSGTFLGGMTLVGASVWVADNPAARRAAGKKLLYTAIPPLLAAMGLSVVALLW

SEQ ID NO: 41795 - protein, 219 aa, Oryza sativa
MTASKETVSEAVSKLKSRLNIESKVRTLTKKEQLVLSLEMQYPEDVGVLAAFFFNYVKLNPGEALYIGANEPHAYLSGECVECMATSDNVVRAGLTPKYRDVQTLCSMLTYKQNYPEILRGVPVQAYVTRYIPPSEEFEVDRCLLPSGESVTMSPVPGPSIFLVMTGEGKIEGDSMLDEGKAKEGDVFFVPAHTEVRILASGPGSMQLYRAGVNSRFFS

SEQ ID NO: 41796 - protein, 158 aa, Oryza sativa
MGGIDEAALDRLSLVTEMTKHIRVRASGGRSTASELGHFSPVFVWLLRDFYLDLTEDNRKITPRDYLELALRPVQGGGRDVSSKNAIRESIRALFPDRECITLVRPVNNEKDLQRLDQLPVCIIITSFELLSTSITFFVKVYSCILVQLCCTCWTLDC

SEQ ID NO: 41797 - protein, 275 aa, Oryza sativa
MAGSSYGDVHESARKLVGKVALITGGASGIGECTARLFVKHGAQVVVADIQDEAGARLCAELGSATASYVRCDVTSEDDVAAAVDHAVARYGKLDVMFNNAGIGGAACHSILESTKADFDRVLAVNLTGPFLGTKHAARVMVAAGRGGCIIGTASLASAVAGTASHAYTCAKRALVGLTENAAAELGRHGIRVNCVSPAAAATPLATGYVGLEGEAFEAAMEAVANLKGVRLRVEDIAAAVLFLASDDARYVSGHNLLIDGGCSIVNPSFGIFKD

SEQ ID NO: 41798 - protein, 27 aa, Oryza sativa
MMFLTHCMAFDLGVCKVAFVFLSFVNK

SEQ ID NO: 41799 - protein, 311 aa, Oryza sativa
MGGKSATKAAYFDKLKGLLEEYRSIFICGVDNVSSQQMHEIRAALRGEAVVLMGKNTMVRRALKGFVAENPEWERLLPHVKGNVGFIFTNGDLSEIKEKILANRVAAPARAGAFAPADVWVPAGNTGMEPGKTSFFQALGVPTKIARGTIEIVSDLKLIEAGNKVGASEAALLNLLNISPFTYGMTISQVYDQGQIFSADVLDIGEDQLLKTFSQAIQTIAALSLATNIPTIPATIHSIVNAYKKVLAVAVETEISWPEIEELKDRIANPDAYASAAPAAAAATGGDAPAAAAPAEAEEESDEDMGFGLFD

SEQ ID NO: 41800 - protein, 66 aa, Oryza sativa
MLQQAEFKRIVSPLKLQTRCLAAFPDQQGFLVMPCFLFGLNVGSVRCFFLIILAPMYILIAISVVN

SEQ ID NO: 41801 - protein, 131 aa, Oryza sativa
MKLKGINSSYCNYQKFHNNKSHSNTILLRKKLLHASALISQRRFSIPHYSTMPLVAPGINSDMGDKSEWVNKLMGKKISDAGSDEVSFAKKDLPESHRVVKPGDMQTMDHRPERLNVHVDEDGTVRDVTYG

SEQ ID NO: 41802 - protein, 170 aa, Oryza sativa
MELEDLFILDEMIKEKPNTHVQNPPIGIRKEIIQLAKIDNEGHLHIILHFSTNIICLAILSGSFFLGKEELVILNSWVQEFFYNLNDSVKAFFILLVTDFFVGFHSTRGWELLIRWVYNDLGWVPNELIFTIFVCSFPVILDTCLKFWVFFCLNRLSPSLVVIYHSISEA

SEQ ID NO: 41803 - protein, 178 aa, Oryza sativa
MAMAAAELGVGMAKAAALHNDDLARRRRRRGRCSHDSTWAGMALEAHGGHGDGVEGEAREAARGGPLLLAGLAWSSAALSPWLRWFREAGARERREGVRWSAGTRFQAMVEGGRQGRQGKRGARASGPFRRRAAMEAAEAALKSLGTERMRDVGRKIWLWVPQSHSWRASFGWPSLAT

SEQ ID NO: 41804 - protein, 286 aa, Oryza sativa
MKSLPSICTVHPHAHTPTPPPPPVAGGSRPSPMTTTTTSGAPTPPRFKRSPHRKKRQPRTRRVAAGETIAAGKPPHPACTAVSLQSPFGPALPRDFFEVDALDLAPRLLGKLLRRDEVVLRITEVEAYRPNDSACHGRFGITARTAPVFGSGGHAYVYLCYGLHMMLNVVADKEGVGAAVLIRSCAPVSGLATIQQRRGQQTDKPLLLTGPGKVGQALGLSTDWSNHPLYTPGGLEVLDGPEPENILVGPRVGIEYASPEHVAAPWRFAVAGTPWISAPKNTLRPR

SEQ ID NO: 41805 - protein, 215 aa, Oryza sativa
MSGREVREYTNLSDPKDRKWGKGKDKIDDEDITFQRMVAKMQEVAGERGGYLHGRGALDSDDLLYLKEQMEAEEDAERLLRRTEKRAFAAFKKAAILADSTPAVPAALRVEPKPKSDIRQQDLLKNIVGIKPKRTKVSSPSQPAENDKPKQSPEDSVNKVSSPQSQSGSRKESSQRDGAVSFEKPLLKPVEPRESKPQNATGSLLGLAYESSDEE

SEQ ID NO: 41806 - protein, 201 aa, Oryza sativa
MGITPSCIPLAPVAGGSSSTACKIIHVDGTVTRLARPVRASELMVDYPGQFVCDSGRLAVGCRVPGVAADELLEPRRAYFLLPMDMLYSVLTDEEMAALSSFHAATAASSSWKRIATGGGRRRDGSHGGRISEPTDHEGDDGSDDGARFFPVLSLQLHAAPDAAAAAAAGVKPSAGGGGVRRHRSWHPRLEAIDEVPCTGG

SEQ ID NO: 41807 - protein, 126 aa, Oryza sativa
MSLHAAGFGCCDRGGDGGSLAGFCAFRSAACSFGVPVGVGVCGCGSFSAGGAGASLFISGSASSGSRADCDSRSYSGSGTVSSDDAPPSFPLPTQSMSSSCWWLPPPALRLCRRALNLDPLPLPPP

SEQ ID NO: 41808 - protein, 96 aa, Oryza sativa
MASRSKLSGIQRQVLALYRGFLRTARLKSPEERHRIESVVSAEFRENARNIDRKNFVYIEYLLRRGKKQLEQLKDPDITGLSTLEINKVYKPLNLK

SEQ ID NO: 41809 - protein, 251 aa, Oryza sativa
MAARAPLPVPHAAATSPRPAAASSLLRARGPCASLLYPRRLRFSVAPVAAAKPEAVGRAGEAAAAPVEGLAKSLQGVEVFDLSGKAVPVVDLWKDRKAIVAFARHFGCVLCRKRADLLAAKQDAMEAAGVALVLIGPGTVEQAKAFYDQTKFKGEVYADPSHSSYNALEFAFGLFSTFTPSAGLKIIQLYMEGYRQDWELSFEKTTRTKGGWYQGGLLVAGLGIDNILYIHKDKEAGDDPDMDDVLKACCS

SEQ ID NO: 41810 - protein, 161 aa, Oryza sativa
MNPPPQKPERRGNSLTDLNDDVLSEIFFRIPPGDPGVLVRLSVVCKSWRRLLTDRDFLRGYRAFHRAPPILGFFCAEFGRTTFVPTTAFRPIIPSADWLLCDSRHGRALFDAYGLPVRLLVSDPMTGAERLLDAPERWRNIHWSATQWSTAVLCAAHVCDC

SEQ ID NO: 41811 - protein, 49 aa, Oryza sativa
MALQVSHVIVKHSNCLNQPTPQDNEMLHISGANAAKNAGQACGICICSC

SEQ ID NO: 41812 - protein, 244 aa, Oryza sativa
MDKGPIKAYTGSKIESFFVKSAISPDGTHILGGSSDGNVYLWQVDQPERGPIILEGHEGEATSVDWCASEVGKIATSSDDSKVRVWNTERRVFPNTSSPTVIRKRITAPNTGSRSASHELATTSRDVGVAACTSADGELPTGSRSPLQPRVLEFGTPESAKKRAFRLFQEDSLDIRKSPEAQMNSPSSVLSPPHSLKRRTIRDYFASSSSCEHTKHVHDLALLAHSSTVKNLKNAQYSYRCLKK

SEQ ID NO: 41813 - protein, 324 aa, Oryza sativa
MASSTSLLLPTAAAAARRSPSGHRAPPSAVLSPPRRLATLRCLGYARRRAQARHVVVCASAASAGSLDALIFDCDGVILESEHLHRQAYNDAFAHFGVSCEPASAAATDAPLYWDEAFYDDLQNRIGGGKPKMRWYFGENGWPTSKIFETPPSSDSDKEKLVDIIQDWKTERYKEILKSGTVKPRPGVLRLMDEVKGAGIKLAVCSAATKSSVIMCLENLIGLERFNGLDCFLAGDDVKLKKPDPSIYITAAEKLGVQSQNCLVVEDSVIGLQAAKGAGMSCIITYTPSTANQDFSDAIATYPDLSNVGLEDLKLLLQKSLVTG

SEQ ID NO: 41814 - protein, 103 aa, Oryza sativa
MASRRSRRLGSLVPFAAAVVLLLLIASAAAAAAGSPDRAGPARPPLVLPLTLAYPNATRLPASSARRGLGDGHNPNARMRLHDDLLTNGSVQFVFCPPLSLSR

SEQ ID NO: 41815 - protein, 224 aa, Oryza sativa
MAEFQEMAAEVPPSLKAITLTHVRYRRGDTLGLFLAWVSLVPVFISLGGFVSHFLFRRELQGICFAAGLLASQLLNELIKHSVAQSRPVYCELLEACDSHGWPSSHSQYTFFFATYLSLLTLRRSPSSRVVASLAWPLAFLTMLSRVYLGYHTVAQVFAGAVVGLVFGAIWYWIVNTMLVEYFPMIEESAIARWLYMKDTSHIPDVLKFEYDNARAARRKVATD

SEQ ID NO: 41816 - protein, 156 aa, Oryza sativa
MAPEYLAHGHLTEKADVYSYGILVLELVTGQRCSGSIGSHGGHFLLTKVWNHYKNKAVEMIADRSIYEDTIRDEVMHVVQIGLSCTQANAGDRPTMTKVVELLRSHRHDVEIILSDPPFLDVEAFEDIKQGEQSRLLSARSAHSVSGSSRSYLSGR

SEQ ID NO: 41817 - protein, 353 aa, Oryza sativa
MSPTIPEKQWAQVIEKTGGPVEYKEIPVQKPGPDEVLVNIKYSGVCHTDLHALKGDWPLPTKLPLVGGHEGAGVVVARGGLVQDIEVGDHAGVKWINGSCLVCDFCQQSDEPLCPKALLSGYTVDGSFQQYAIAKAAHVARLDKDTPLDAVAPVLCAGITVYKGLKESGASPGQSVAIVGAGGGLGSLAQQYAKAMGLRVIAIDTGDEKKKMCLEQLGASAFVDFATSKNVVKEVQEATQDGLGPHAVILVAVTEKPFQQAAEYVRPRGTVVCIGLPAGAYLRAPVFESVIKMVTIKGSYVGNRRDTTEALGFFRRGLIKAPFKVVGLSELQKVYDLMHEGKIAGRYVLDTSK

SEQ ID NO: 41818 - protein, 106 aa, Oryza sativa
MSTRPAPPQLMEAYPAPPPPCASKLKLWLPAVSPSAASCPCRGLHPSTSGAPPPMPARLGLELWRMAWAWISTPTISPRRHMHRRFFSTGVFPMKRCGAPSPPGRG

SEQ ID NO: 41819 - protein, 234 aa, Oryza sativa
MKVYWMQGAASHDAAAAAAAAAVLGGGHGVPRWPRMVFLVGAMTCLAISATAHLLACHSRRASVVFWQLDYAGISAMIVASFVPPVYYAFLCRRPARVTYLSAISALGALVVGALLSPPCSSPRFRRLRAALFLAMGLSGVVPALHALWLNWGHAACYLALSLEVAMGLAYAAGAWFYVSRVPEKWRPGVFDVVGHSHQIFHVLVLVGAVTHYVAVDVLLNWRETVAAACSATS

SEQ ID NO: 41820 - protein, 142 aa, Oryza sativa
MTAARARCGTPRGVDGGGHGRKRRAPAWPPATSSQRGMAVDGGGCNLRQRAPAHGYGRRKMQPPVTSFGVAAGDELRRGAARGQRRTWPPATSPAWRVAAEDATASNKPGVGRGSEGRGYRRRAPTWGVDDEGHGCRRRPLT

SEQ ID NO: 41821 - protein, 130 aa, Oryza sativa
MKFTCLVEFPFRGNIRSQWSCYPRCSSYAVYDDINIVLHMTAVHDEEESLVNLVHPFSCVFSTDEKGISHSSRAKNPTSRTLAVQGGHGSGLGLHFPWTFEQSSVQLLLPRQNSCIETVPGKFLSAHLFF

SEQ ID NO: 41822 - protein, 262 aa, Oryza sativa
MQPRCTLIHAVAVVAAAAAAALLLPPLAAGQPWPTCDTSAGTYKAGSAYESNLRDLAAALRADAAASPSALFATGNRGGAPDAVYGLLLCRGDLSVSDCFDCGTRALVYNQCYARFSNKGDFLAATDNAGGETLLISGTNITGGAGVVAAYGRAVTELLAATVRYAVEENPARLFATGQRVGDDARDPGFRNIYSMAQCSPDLPPASCRRCLDGVLARWWQVFPLNGEGARVAGARCYLRSELGVGPFYTGAPMVVLRADKV

SEQ ID NO: 41823 - protein, 157 aa, Oryza sativa
MPQEKVTSTSTLLSPSPSSRSGEGERADRRDGGGGALSPTRRGAGADEQDQNVRRPQPPLPPPQRHARLPHDLLRLPPAVAGIRPPRKCSSASSPPPPRDLMRGFACYRVVVRRCCTGSPASRATTRTSSPRPARSAPPPPTASPSSPPTPPHVCET

SEQ ID NO: 41824 - protein, 222 aa, Oryza sativa
MRETKRLDRSRRRGDHGQAAAAAMSLVVGGGELLVGVGDEWANPVHPLGLPGPADEGRAEGDGRVHGGAVERAADEDVRADDEADGDGGDGAEAALLGVNGGGVHGVDEAEGHDDLQHQGLPHGDAGQAEGAGGEPAGGEAEEEARHGGAQELGDPVEEAAEQGDVAADEGAEGHGRVHVAAGDVGADGHRHEQGEGVGHRRRDQPGGGRRSAAGQLACVRA

SEQ ID NO: 41825 - protein, 142 aa, Oryza sativa
MKSTQTHSEFHPKPPQMRTKPLKSTQVNSNHPEPTDLDSARKKRRLLLLLLLLAAAACAVRLRHSPGSGGAARGPPRQGRRGGGVPRSSLSPPPPPLHEASVALPPRRHRRRCDGSAAEGRIRSGGRIREVRQKKRRMRKSR

SEQ ID NO: 41826 - protein, 336 aa, Oryza sativa
MDPSCPPFPQPEAPPLPLQLQLQPGLPRLELPTLDLERVGGEDRAALVAACRDLGAFRVVNHGVPGELRRRLLELGKQLLGRDTFELKKARPGYFWGTAALKSLRVKEVNWLEGLHVDLVPGSSSSSSQVGDGDDDDDDGWMRIRALMAEYGDHMARIARKLFDALAAELGLDHHQAASYPAERQGFLRLYRYPPCPSSASCLGMEPHTDSSVLSIILGQDHVGGLQVIRDGAWRDVAPAPGELLVNLGDMMTAISGGSYQSVRHRVLASRPSTERVSCCYFAFPQEDAVVEAPSGIGGGVYRPFSYREFREQVQADIKAVGTKVGLSRFYATATR

SEQ ID NO: 41827 - protein, 322 aa, Oryza sativa
MELFSGLNMADAPVALTPREAASGVLGSVSMTCWIFLLVPQLIENYRNGNAEAISLLFVFVWFAGDVANLLGGLLAGLVPVILSIAVYFCIADGILIGQCLYYKIKNTRASSHPRRRSSTETPDPTTPLLGRRFSDSLASGQGRRRSSGSLRGYQAAGRRESQVEDPLAKIVEENEYGRKAWVKNTLSVLGIFLVGAAGWTVAWRTGMWAPAPQEIPHAPDEATGGQILGYASAVLYLGARLPQIYKNYCDKSCEGLSLLFFILSLLGNLTYGAGIIAHSTEREYIITNIPWLIGSLGTMVEDVTIFAQFRIYAAQPPLAVS

SEQ ID NO: 41828 - protein, 403 aa, Oryza sativa
MAGVDLEKCKRIVQYFWDPEPKNDTVPEAPIWCLGQEYTPTPKDVSKSTDVSRGERPGTNSDAAVGSSWPEAFLDDFESRIWMTYRSNFTPIPRNKTPEATSSMTLGVRLRSQLMDSQGFTSDTGWGCMIRSGQSLLANTLSMIQLGRDWRRGSSPEEESKLLAMFADHPDSPFSVHRFVQRGAESCGKYPGEWFGPSATARCIQLLSHECESPKLRVYITNNTSDVYEDEVARLGRDENGQPVPVLVLLGLRLGIEQVTSVYWDGLRAALQYPQSVGIAGGRPSASHYFVGVQDSHLFFLDPHSTRPALPVPQSSKVYSREDLDTCHTRRLRRIHIKDMDPSMLIGFLIRDESDWKDWKQRVQSTPGKPIIHILASGAPTEEGMERMEALDEVEALDDSEAE

SEQ ID NO: 41829 - protein, 355 aa, Oryza sativa
MKYSIPSLAVLATTVSAAAVDLTKRDTPLSVKLTHVEDSKVKVALTNNAETGYNLLIKESFLDDAPADKLTVTTKSSRAPFTGIFQRMLYTDLSEDVFRPIQAGETIEVEVELAEIYELAETATYDVSTSGSFLYAELNSTTLAEDALMYTSESIPVDIDSEKAANVVNAVDNISKRTVVQSDCTSSRRTAITNALSSCRSLASNAATAATSGSATRFNTFFKSTSSSVRSTVAARLRAVANDCGSTSSGVTRTYCTDVYGACSSGVLAYTLPAYNYIAYCPLFFNQLPALSRSCYAQDQATTVLHESTQAPAVYSPGTQDNGYGYSAATRLSSSQALANADSYALFANSVYNNC

SEQ ID NO: 41830 - protein, 157 aa, Oryza sativa
MACVNMYNPEHHHHQSSSFMAPRISFSSDFALEPPPPAQQQPAVRAPGDADFEFSVGSHPMMAADQLISKGRLLPLREAPHGHGGADAGGRPLTLRDELRTDSRHGRVPRAPNIRWKEFLGLKKAPKKAPTADAAAGATSSSADTQMDLGGQGSTRD

SEQ ID NO: 41831 - protein, 330 aa, Oryza sativa
MLLDLSHNNLSGAIPDCMTALELDFFIVSHNSLSGHIVPFSFFNSSTVMALDLSHNQFNGNIEWVQHLGESKYLSLGSNKFEGQISPSLCQLQSLRILDFSHNSLSGPLPSCIGNLSFGQNPVGIPLWSLICENHFRYPIFDYIGCYEERGFSFRTKGNIYVYKHNFINWMSGIDLSANMLSGQIPRELGNLGHIKALNLSYNFFAGPIPATFASMSSVESLDLSHNKLSGAIPWQLTRLSSLSVFSVMYNNLSGCIPNSGQFGSFDMDSYQGNNLLHPASEGSECAPSSGHSLPDDGDGKGNDPILYAVTAASFVVTFWITFAFTSFRM

SEQ ID NO: 41832 - protein, 304 aa, Oryza sativa
MDSVKWDKNRFEEIIKETSNFVKKVGYNPKTVPFVPISGWNGDNMIEASTNCPWYKGWEKETKAGKSTGKTLLEAIDAIEPPQRPTDKPLRLPLQDVYKIGGIGTVPVGRVETGIIKAGMVVTFAPAGVTTEVKSVEMHHEQLVEGVPGDNVGFNVKNVSVKEIRRGNVCGDSKNDPPKGCDSFTAQVIVLNHPGQISAGYSPVLDCHTAHIACKFDTLLEKIDRRTGKKMEDNPKFVKSGDASIVKMVPSKPMCVEAFTDYPPLGRFAVRDMRQTVAVGVIKSVEKSDKAGKVTKAAQKAAKK

SEQ ID NO: 41833 - protein, 125 aa, Oryza sativa
MARSGGLPKAFGRFSPNRLETREQQMAATVLTSLATTSCGVVQRWTPHRPSLLPPTTGQCSSLTTSSTAAAADPSLFSAGGDVRVRLPAQFFLIPQAALPTDRRLTSAFPPPQRIPLPPPAVAMP

SEQ ID NO: 41834 - protein, 150 aa, Oryza sativa
MCSRRRRSNRPGASTRHLHAEEAGARSWTNRRPHRHRHPPRPRQPRLAAQAQQAAAARRRGRAEAEQRHPHPHHRRHQEEGHCHHNHSSNPHHPRRRRRGQGRGERDHASGGGGNRGCRNNASCSEAGGEESNPPQGLFGLRTFFSKKVY

SEQ ID NO: 41835 - protein, 177 aa, Oryza sativa
MRKEQFKNSPNVEFRVVAPNDLSILAEPCDIFAPAALGGIINSTTIPMLNCKILCGAANNQLLDPVEHDHMIKNRGIIYVPDYLNNRMGIVNCANECFGYVKNDPAILKHFGRDWDNAVYVIASRILQTSRDANIPTGLAANKLADEFSEIENPIIGHRGWSIVKSLIEDKWENGQL

SEQ ID NO: 41836 - protein, 162 aa, Oryza sativa
MQARRAPATLLLRRLLSLCAMAAVLLLSPSPAAVASAEPTTADDIIPALSGDDRCWWPADAPTAAAAPAGGGTGYDDAIAAVADDAVVVVAAPAAATAHRFRPRYDSAVSPGAKRELEHEARCGPRVPVRRGFPWPEWKPNCRREHGVAGAGGLGRRPWDEP

SEQ ID NO: 41837 - protein, 265 aa, Oryza sativa; identical to SEQ ID NO: 40554

SEQ ID NO: 41838 - protein, 473 aa, Oryza sativa
MSALFAASRCASLRVMRPQCSHIAAASLLLSRWYSSKFPPHTVINMPALSPTMTQGNIASWSKKEGDQLAPGEAIAEIETDKATMDFEFQEDGYLAKILMGDGSHDIPVGKPIAVYVEESNDVAAFENFTAEDAGEGEAKPAESKEEPKQESKEESKDTSKESKAAPAKSESKSSSTPKPSGRIIASPLAKTIALEKGISLKNVKGSGPNGRIVAKDLENIKESAAAAPAAAAAAAPVGASYTDTPLTNMRKTIASRLLQSTQQSPSYIVSSEMSVSKLLKLRQSLNASAEDRYRLSVNDLLIKAIAKASLRVPEVNSAWLGEQGVIRTYNYVDVSVAVATPTGLITPIVKNADTKGLATISAEIKDLGKRAKANKLAPEEFQGGTVTLSNLGMNHAVTSFTSIINPPSCAIFAVGTVTKKAVPSDVNEQGFIFDDVMNITGTFDHRLVDGALGGEFMKALKKIVENPLEMLV

SEQ ID NO: 41839 - protein, 411 aa, Oryza sativa
MPLRARPPMEDAAGRDRLSDLPDEILHRIMSFLNARQAVQTCVLSRRWRNLWHTVPCINADFVEFDSIGYQGPVVPFKRFVNRLLEFRDPASVIDTFLLKYAMPDRLDGYKASNEEANRWIGHALQKQARILEVAVFFFPLDLDHSVFTSFYLRRIEFSHVYLRKGFFEQIETGCLLLEDLLLHQCFIWDGEISSQTLKVLTVDATELYTVKEMSISTPNLTSLTLSGLEYPKAVLKNMPLLVTASVSVTFDALNFDGYYDANDLRQYLWGLSAVRNLEFHYEGAELMIANNSQWCPEFVDVVNLTLGEWCLDANFHALIVFLQNSPRLVKLTLKLAKDRWTTPQRIIGELEERSFTCEHLKIVEVICLENDPQVIGVEDFFVRSGMTSVQFHIKHWRKDEEYKLPAFIQY

SEQ ID NO: 41840 - protein, 144 aa, Oryza sativa
MDPLESEGGSQKSNNKPKYSKFTQQELPACKPLLTPGIVVATFLLIGIIFVPIGLASLSASQEIVELVDRYDTNCVSTLDKVGFIQNTDTDKTCTRTLTVPKHMKSPIQIYYQIGDFYQNHRRYVKSRSDKQLRYKCCALDKGL

SEQ ID NO: 41841 - protein, 141 aa, Oryza sativa
MSSWMQHRRRSWTARLLSSASLPPVRLLVFFAIVIFFLSVSSYVDYKAIERRAEIGLRVFAAPLAAVTIFLLFLVLQHRRRYWTLRRQVHRHHAYADQAEAAGSGSPWVVALLLLLLLLMLSFQSSVHSIWFRPLWDSADY

SEQ ID NO: 41842 - protein, 700 aa, Oryza sativa
MSETFEFQAEISQLLSLIINTVYSNKEIFLRELISNGSDALDKIRYEALSDPSKLDSNKDLRLDIIPDEANKTLTIKDTGIGMTKADLVNNLGTIARSGTKQFMEALTAGADISMIGQFGVGFYSAYLVADRVTVVSKHNDDEQYVWESSAGGTFSIKHDTEGEQIGRGTKIILHLKDEQTDYLKEAKLKEVVKKHSEFISYPIYLHVLKETEKEVPDEEAEESKDEGDNKPKVEEVDEEDEKKEGEKETKKVKESKIEEEELNKTKPIWTRNPADISQEEYGAFYKSLSNDWEDHLAVKHFSVEGQLEFRAVLFVPKRAPFDLFEAKKTKNNIKLYVRRVFITDDATDLVPEWLSFVKGVVDSEDLPLNLSRETLQQNKIMKVIKKNIVKKTLELFTEIAEDKEQFDKFYTVFSKNIKLGVHEDSQNRNTLAKLLRYNSTKSGEDLTSLQDYVTRMPEHQKNMYYITGENIKAVEKSPFLDALKAKNFEVLYLVDPIDEYAFTQLKEFDGKKLVDITKDFELEESDEEKKQREEEEKSYEGLTKSLKNVLGDKVEKVVVSHKLVNSPCAIRTGQFGWSANMERIMKAQALRDTSMSSYMSSMKTFEISPKSAIIKELKTKVENDGENDRTVKSITTLLYETSLLVSGFTIDEPAAYAERIHKLVSLGLNVDEEASTAEEASTDAPAEAATGESAMEEVD

SEQ ID NO: 41843 - protein, 236 aa, Oryza sativa
MPTERRVLGQTQHTEQIPLGGQQINTMQTTGTTLPATGLATGTTTLARDTGFVQSSTLPSSGYVQSSTLPSSGFVQSSTLPSSGFVQSSTLPASGFASATERLSTTSASMPLKTASSGFVGTTGVVNQQSLGTASVTSNRIVEQPVLENVVERTFIEKRNLQNITEIHEQPVYEIHEKPVIENITAPAEVKRFGGQVLHEEIRQDQGFALPAKNVAVHRTREEYVAQVNEAPKINV

SEQ ID NO: 41844 - protein, 48 aa, Oryza sativa
MPVYLALVNEGDHLFFCLARKITSQIHYERKESVGYKVTATRLLLRLI

SEQ ID NO: 41845 - protein, 274 aa, Oryza sativa
MWILESPLLRDAGAAVLTGATALAVLRFWEEVGNRALLDQKLCRKLVHITVGLVYFLMWPLFSADDVYAPFLASLVIAFNIIKVTLIGLGIVKDDGVINSMTRNGDRRELLKGPLYYACAITLATVIFWRTSPISIAVICNLCAGDGVADIAGRRFGHVKLPYNPDKSYAGSIAMFLAGFLASILYMCYFHLFGFVEESWSMVIAFGVTSLAAAIVESLPISTRLDDNLTVPLASVLVGVLVFYYTGARNLCCMSADSSDISALVQNQMVLDRF

SEQ ID NO: 41846 - protein, 436 aa, Oryza sativa
MAVRISQDLNMMGEPSSNLSSLEQDERRNLFWSLYLLDRFVCCSFDRPPAIKDSDCLLNLPFNHSTTKPKSALTMHGLLSRESFNKSQGSGLFGISVGLASVLGRAVKCMMTTRPDSQAPWHKDSEFSTIHADLEYLKELAIDNAPVLAEPGQPRSQNDMEDTDREQTAHMVLSHTIYHLTHCILSHPFLLALKTQNYQHPEIPSSWLEETRATCLVHAGSLITVLVEAKAAGYMPVPSVYSYCILFASTIHALYLYSESPEISTGSAEYLRTALDYLSEISELWCNAQMMANALKSFVIQCSRYSDILLCHKPRLHELTQTETTILTAVVDYWTMMDPRNPVFDLAPFNADNFPDFSDKEFGYLTPPTTSGLVGDVMVSEDSLGYSTPGHKEAPSIDPDIILHYPAPMMSPIQSVDGGSPHWDWDNELDSLTERK

SEQ ID NO: 41847 - protein, 194 aa, Oryza sativa
MTPEQLIWLYSIMLSATVVKLALYIYCRSSGNSIVQAYAKDHYFDVVTNVVGLVAAVLGDKFFWWIDPVGAVLLAVYTIVNWSGTVYENAVTLVGQCAPSDMLQKLTYLAMKHDPRVRRVDTVRAYSFGALYFVEVDIELSEDMRLGEAHSIGESLQDKIEKLPEVERAFVHVDFESTHKPEHRVRSRLPSTEP

SEQ ID NO: 41848 - protein, 278 aa, Oryza sativa
MPRFCSLLQLNKSAQELAAHIGEVVVNKCFCTRRNPISISAAAIYLACQLEDKRKTQAEICKVTGLTEVTLRKVYKELLENWDDLLPPNYTPATPPEKAFPMTTIYSSRSSSGKDLYQDKQLDSAKLKSSEAAEPDHMVIVKEEEDKKIGPFSRPSAKTETHDLNQAIWTPNVSSTPFSSSPKLDHDKTETSVRGINLNEASCTMDTDRPDMPVKSPFAERWLNESKVIPSPSRQPAPWQLKQGAPSAGSSYHSMPYGLDLLSRGKRNTGDGGDKEGR

SEQ ID NO: 41849 - protein, 450 aa, Oryza sativa
MAAMAMDHDHDHASSPAPPARLPAPPYHHSPSAAAAAAVEEVATPPRKSAAGAGAQRSSPMPSPLQLSGCSLQELLLMSPPPGSARRNWSRHRGAGLDESLEMVAAPAAGTPPRRRRRVAAEQCAAPAVASPRNGRRARRRLEKEIEVEDDAARRARRRKSTRAAATKAAPAAADKVATAAADKEDTSMALVLASTDAIRGADALEQSGWEDLWERIVDLVMWKNVAKSALWFGLGSMFFFSCSFSREITFSPISALCHLGVMVLGLAFFKDSIPQSRQQVEGGRSFRLTEDDVLRAARAVLPVANSMISTAQVIFSGEPSMTLKVLPALLFGAKYGSLVTVWRLLATGFFTSFTLPKLYSCYSSQIHKRVEILRDRALEAWKSCPRKKLVAGTAVTMCWNMFSVKTRIIAAFISVVILRYNQKYRKAVVNAGAESCQDEQEQKMEIEES

SEQ ID NO: 41850 - protein, 237 aa, Oryza sativa
MVNSSWTRSHIENIWRIPERTRRVYPPCDTSALQMLPLERSTTPPILISVAQFRPEKAHGLQLEAFAIALKKLSPEFPKPKLQFVGSCRNKEDLERLQKLKDRSTELHIDELVEFHKDISYRDLVQLLGGAVAGLHSMTDEHFGISVVEYMAAGAIPIAHKSAGPMMDIVLDEDGQQTGFLASEKEEYAEAIVKVLRMPEAERHEMATAARKRAQRFSEHRFHEDFTDAVRPILSAT

SEQ ID NO: 41851 - protein, 41 aa, Oryza sativa
MPDVRAVELSQYSFSPFIFPPYIYNHLFDKFQTIFSLNLLL

SEQ ID NO: 41852 - protein, 223 aa, Oryza sativa
MARRPARCYRYCKNKPYPKSRFNRGVPDPKIRIFDLGRKKASVDDFPMCVHLVSNEYEQLSSEALEAARICANKYLVKIAGKEGFHLRVRVHPFHVVRINKMLSCAGADRLQTGMRGAFGKPQGLVARVNIGQILLSVRTRDSNRAAAIEALRRSMYKFPGRQKIIVSKNWGFTPVRREEYVQLRQEGKLRQDGAYVQFLRGHGLIEENMKRFPEAYENVSQA

SEQ ID NO: 41853 - protein, 209 aa, Oryza sativa
MGYGSSKPEAEAGSKHIFSSNSPVQFSSNLVDALQSNSETDSSRAKSLELQIQARVSEELQRIREREQKTLGEIEQRLAETKDAAATATATTTYTPNVSHTPGSLNLDAPRIPFAGREYTPVPAAPEDRPINRDVTRSSVQTEIDDLRSKLDGRKKLAPLDEGVEKAKADVVGCLRLNDRRPLDCWKEVEGFKREVARLEEGFVDRIVG

SEQ ID NO: 41854 - protein, 168 aa, Oryza sativa
MNNTTRTKMKILEETAVPACASQYELVLQITGEPMNVRDALSLVCEKLRNHCFSSEKTTYGNGHVPSSAIDELTTSSQNEIDSVQNSISAFDLGCLGSPQIQKPTIGCGTEINNPINEVEKPANGNGTGINNLNTGMQNENGIDVSNHGATSLEEKKTFERNQDRHHN

SEQ ID NO: 41855 - protein, 248 aa, Oryza sativa
MAAESETPRITELHVRMDCNGCEHKIRKTLRAIDGVSEVYVDAASQKVTVVGIADPERIVKAIRKTKRVPTIFSHTDPAAPPPPPAEGEAAPPPADAPPPEEAPAAEPAPSEAAPPPPAEADQAAAPPATDATVIHMVHDYPYTHDHHHGHGHHLFGRDHWPASHHPAGGMVNYGGGAPYYAAHSYSHRASPYVSEYGYVGSPAHHEGRFYSSHDYYYPAAAGGRGKGDGSQITSVFSDENPNACTIS

SEQ ID NO: 41856 - protein, 172 aa, Oryza sativa
MTMFVPEAELPAWVVCYIPATMSLLNILPAPKSFPFIVPYLLFENTMSVTKFNAMISGLFQLGSAYEWVVTKKSGRSSEGDLVSLVEKQPKQQRVGSAPNLDSLAKESHPKKDSKKKKHNRIYQKELALSFLLLTAAARSLLSVQGIHFYFLLFQGVSFLVVGLDLIGEQVE

SEQ ID NO: 41857 - protein, 429 aa, Oryza sativa
MMASTTSRAARQLRFGRQLCPTARTSTASSSTMLSRTFASTALARKDGDEPQGHLPGHPSSVFLTSLNDSFFDRVKPKQLSGNSNAQRQGRISFMMTSYGEEGAVIGSAAGLDTKDEVFAQYRESGVLLWREFSMDHYMSQVFGAEDDLCGGRQMPIHFGSTQHHFHTISSPLATQIPQAAGAGYALKRTKGRENNVVVCYFGEGAASEGDFHAGMNLASTTKSPVIFFVRNNGYAISTPAAEQFRGDGIASRGPGYGMLTIRVDGNDALAVRSAVQAAKAKAITEQRPVLIEAMTYRVGHHSTSDDSSAYRSKQAVESWKQMDNPLHRMRNFLTDRGWWNDALEEQTKAEHRKTVIEAMGRAEKKKRPQLSSLFEGTYRGELPGNLREQRAELAELLQKYGALPGWSKELAKHANAGKDMEQYRENKL

SEQ ID NO: 41858 - protein, 50 aa, Oryza sativa
MRKVAVVVEDGWISPSPSLPGDLPPPARSWVAAAGAEVSAVRQRHRGGHG

SEQ ID NO: 41859 - protein, 327 aa, Oryza sativa
MIVQLLQEILKRLNQTFEIQITSSDDKEKQSDLQALLCGVAQVILQKFSSCHEKSAILHFADQMMVLFLRVFSCNSSNVHEEAMLAIGALAYATGPEFVKYMPEFHKYLEMGLQNFGAYQVCCVSVGVVGDICHALDDKVLPYCDGIMSTLLKDLSSPELHRSVKPPILSCIGDIALTMGEHFEKYVPYTMPMLQGAAELCFRMDAPDDDSIEYQNELSRSIFEAYSGILQGFKNSKSELMVPYAGNIFQFVELVLKDNLLRNESVTKAGVAMVGDLADALGPNIKLLFKDSKFHSELLGQCCQSDDEQLRETASWVQGVITRVLVS

SEQ ID NO: 41860 - protein, 338 aa, Oryza sativa
MTSHPKARKHTSMAPGAILRVTALLRFILLVAGAATATATAARFSRLFSFGDSLTDTGNLVLLPAGRDVPERRLPYGQTFFHRATGRASDGRIAIDFIAEALELPRLKPYLAGEGADGFRHGANFAVGGATARDAGFFQRRGLRSVPVSLATEMGWFKELLPLLASPCPQEQRKITASSLFFVGEMGGNDYLNAIFQNRTLDEAKTFVPGIIDAIRSSLAELIGVGAKTVLVQGMLPIGCEPRVLELFKLKHGRSTAGDDSDYDAATGCLKSFNELAEQHNRALTAALDELRRAHPGTAIVYADLYRAVTDIAVSPRRYGFGGEPLFACCGGGGGRTT

SEQ ID NO: 41861 - protein, 241 aa, Oryza sativa
MDLGQFVSTKVVSSIFTMASSPSLALSFLVLLVLATFTTTTVLATNNLPPSSAPALSPASSAAAKEFLRATCTSKSELPELCFDILLPYASSFNGSQGKVARASAAIAIERHRGLLDELRGLKPGPGDVGAERRMLVMLLSDCVRDFDATYMFADETLARIDFLVSGRGSEEQRASDKLRANVWLTSAMDSGVSCTDWFNEEGSHGRPASSPVGKKVIAGCATATQYMSIALELLVNCITT

SEQ ID NO: 41862 - protein, 375 aa, Oryza sativa
MPSSKPRILIPGGAGYIGSHVALVTLLTRKYRVTVLDNYHNAFPAACKRLEQIAIDELPAGASQQDKDDCKVDVFKGDLRSKDDIRKVFDAYKGDDKIWGVILCAALKAVGESSEIPIDYYDVNVGGLVNLLKVMHDNGCNRLVYSSSATVYGTPPKVPIPESTRLAPESVYGRTKWMSEIIIRDVCDAYPEFRAIGLRYFNPAGAHKSGKIGEDPRGKPGNLLPLLAQMAVGKYREGGLKVFGNDYPTPDGTCVRDYIHIEDLAGGHVNAVEALERDDIFAADKTETHGKYRAFNLGKGVGMSVLNMVDAMRKVSGYEFPHTIVDRRTGDVPDLTADPSLAEKELGFKATRSLDDMAQDLWRWQSNNPQGYGEQ

SEQ ID NO: 41863 - protein, 302 aa, Oryza sativa
MSTIAITYWLLILYQSHLAPTCYALLKLSGSLITSSKIVCCYLKPFGTSHARMHLHVTTTELVKLILHVLFVLSRSLTSESSMTRSTSRKLRSWLSTLHGDRDAQARREQRKGWTVTIHDLSGSPVAMASMVTPFVPSPAGSGRVSRANPGAWLILQPTGAGPASWKPWARLEAWRERGPVDALGYRLELVFDSGPTECAVPIAESSISTKRGGQFVIDPATFPVGAAGAAWPFAGGFVMGSTAEGEGRASRPTVQVGVQHATCMGDVALFVALAAAVDLCMDACKLFSQRLRKELCHDQED

SEQ ID NO: 41864 - protein, 235 aa, Oryza sativa
MGMAAAGGYGRVLWLHGSGQTGEESRAQVAPYFAAPELASVRFSFPTAPTSSIPCYGGEVITAWFAIPEVPITARTARDEKEVLKAVERVHEMLDGEVAAGTSPSNIFVCGLSQGGALAIASVLLYPMTLGGCVVFSGSLPLSKTFAESIPSEARKTPVLWFHGMADGVVLFEAGHAGCAFLQEIGMHCEFKAYPALGHTLVDEELQYFRQWIKDRLSQGTGVPVPSLSDKMDLQ

SEQ ID NO: 41865 - protein, 147 aa, Oryza sativa
MDAVGVPSRPTTTRPHGSWEASASSILLLVPESIGKGRQMRTELASSSNRQCMCVLTSSGKPTSKGLTDRAKMQIGKQSSIFARTVARPRRRGREGREPRRPLSTPPIADALAPVPATVRIRVGRKKKPNRKDRDETEKFSHQFGHR

SEQ ID NO: 41866 - protein, 55 aa, Oryza sativa
MKTLLVRIGNLGLMILQFQLLLTVNTDVEVLASSTEMVLYEFLMQGEANSTRGSG

SEQ ID NO: 41867 - protein, 441 aa, Oryza sativa
MLPPLGQLPYLRRLHFTGMGSILSIGPELYGSGSLMGFPCLEELHFENMLEWRSWCGVEKECFFPKLLTLTIMDCPSLQMLPVEQWSDQVNYKWFPCLEMLDIQNCPSLDQLPPLPHSSTLSRISLKNAGIISLMELNDEEIVISGISDLVLERQLFLPFHNLRSLKSFGIPGCDNFMVLPLKGQGKHDISEVSTTMDDSGSSLSNISELKICGSGISEDVLHEILSNVGILDCLSIKDCPQVTSLELNPMVRLDYLIIEDCLELTTLKCMKTLIHLTELTVLRSPKFMEGWKNLVEEAEGSHLRITASLKRLHIDDLSFLTMPICRTLGYLQYLMIDTDQQTICLTPEQEQAFGTLTSLKTLVFSECSYLRSLPATLHQISSLKSLHLSSCESIDSLPHLGLPGSLERLFIAGCDLLRDKCVEGGIDQHKIAHVRETILA

SEQ ID NO: 41868 - protein, 188 aa, Oryza sativa
MHHNIRDTHHRHRHRVALVPRRRRRAARLAGDDGGAAERARRVRPEPPVDALDVEPVAAPWQEAAPLPVPHLPQAHRALHRRRRLAAGDVHEHRQRRDVQLPERRLAAAGAGAGGDGGHRQHVLRARGHGEPVEALEAHGEHGHDADRRRRRVRAEPEVAAQGHLRRVHFGARARQVYVRSINGDDAS

SEQ ID NO: 41869 - protein, 418 aa, Oryza sativa
MCKGKESVLKTVNLTNGEANLGSFFFTESSHGKRLRLAARVKYQDLAVRVQEATSYSFVVKDRRSKLNKKSNSPSKEEGIHCLKKISLKGKRCNDLAGKYITKVKHLMRCYHRDPAGLQKLTGMKNEDWNTMISHATTSDPGDEIHSYRVEKNTIIFFNDFFALVGMSVDGSYAPYHANNLNQLQQRKMNKWKESAYQKFEELEKLGCLIPDHVMINGQPVPVSPKNDASHSIQANPTCFNHQIALEGQGHRFQQQNGFSAVHVFTPYNVAGTSTQLKEPLQQYPYEQKSGREGPSMQHNGTSYSLTEENILNGLGSGLVQSTILSQNTAVVPGADPRHSGYASTSTADAAGTSCPVTDGVGPWDYPIFSDLYPNVEPSGLIYGHVVEADQAFLPDSHELANADNQFTGGNDDSAPFD

SEQ ID NO: 41870 - protein, 171 aa, Oryza sativa
MPSSAPASQRSHRAHAGLTASKPPPTARSFRWPHLPPCRPRQPPQPPSAPPRQPTLPPGVSPLTARASSRAPCRPPPPPAVPATCCLLPRLPPPASCYHLRRCELRRSETCLAMTSASSASRRTAPRVPPPPESPAPDPATGRPDQPPRGPNPPPAWPDSPCGPLRTPSSA

SEQ ID NO: 41871 - protein, 222 aa, Oryza sativa
MVLDATYLKAISRRATLYEMIRDYGQAANDLRKLISLIEKQANNSGLSPKVLNKHSDLKQARTRLLSVEDEAKRDTPLNLYLILGIEPSSSPADIKKAYRKAALRHHPDKAAQLLVRNEKPDDGFWRDVAKEVHADADHLFKAIGEAYNVLSDSDKRQEYDIEENLRNATKRVSKGGRMHRSPEQRYTKQYDRGFNPRPAASSWSFRLERVDHGAARIGWLG

SEQ ID NO: 41872 - protein, 72 aa, Oryza sativa
MEQYMRRTCSQLLRVIQWLDSTSIMMPSRCNHHRQSNSSMTTTLCCGVERNSQNCPRWTISTITCQNPSIIG

SEQ ID NO: 41873 - protein, 252 aa, Oryza sativa
MNLAQTTMRAEIGRITLDKTFSERQSLNASIVSAISRACEGWGVSVERYEIKDIRVPTQIRNAMDLEAEAERKKRKVILDSEAERQSQENIALGRKRAVELISEADMVEQKNSAMGEAFAIIQKASASAQAIHMIASAINSPGGEKAVTYKLAEEYIKQFGKLAQQTTTVIIPANVNDASSVVTQAVTIFDKLSNKGNANSTPSFSKQEALEQLVSHLYKDPSMLEQIKKQQGAAGEQTPQISAPSEQTPQQ

SEQ ID NO: 41874 - protein, 322 aa, Oryza sativa
MASPAKAQRRPEGASVLETLPALPLAIIIAKAGPRCAAALACASSTLRAAASGEALWRHFCSDDFALDAPLAPGDLPLPSFKDAYKAWFQSFGMYPLPLVKRVKIFWSSFRAWLCEYFPEGLRTLGEGVSEAEIAVAECNLGLVLPMPTKLLYRFCNGQLHIGRGEEVSYGVMGGYDYVHQRYTVRLLPLAHHAVQKNSNYIVVATSCFGEKIFLLDCASGRLYVGTKYWNEEREIMACVPKATIRLAVDDDHGMPQDGFLLWLEEHLSRLQDGLIKVQSCKFPMLARHISLYPVQLPYCSSASMHGIKVSKLAFLLVYCHA

SEQ ID NO: 41875 - protein, 376 aa, Oryza sativa
MEMTLSKAQRAYPHCSHMTAKLRAMTHQSEELVRAHRSETSFLEQVAVRTLPKSHHCLAMRLTSEYFLLDPKEREFPQRYTMQMGDLYHYAIFSDNVLASAVVVNSTISASKDPKRIMFHIVTDALNFPAMMMWFLTNPPNPATIQIKSLDNLKWLPADFSFRFKQKGIRDPRYTSALNHLRFYLPEVFPSLNKLVLLDHDIVVQRDLSGLWQIDLNGKVNGAVETCTSGDGYHRLENLVNFSDPSIINKFDAKACIHAFGMNIFDLKEWRRQGLTTAYNKWFQAGKRRRLWKAGSLPLGQIVFYNQTVPLDHRWHVLGLGHDRSIGRDAIERAAVIHYSGKLKPWLEISIPKYRDYWNNFLDYDNPYLQQCNIHM

SEQ ID NO: 41876 - protein, 77 aa, Oryza sativa
MTGQAIQLHHPRSQQGLLITRRMIGQATHLRRLRSRNHHSGTSSGTHSHRWTALRIRDLGVAMTMWSPTMNWHDYSV

SEQ ID NO: 41877 - protein, 88 aa, Oryza sativa
MGEGGAALHQVAIRGAYRRSQEDCAGEGERHAGRRSQDSCGGGARRKMTGGDAPALLGTPAVRLRLNGPGRAGRNIWAALVGERSEVD

SEQ ID NO: 41878 - protein, 193 aa, Oryza sativa
MAEIRRKLVIVGDGACGKTCLLIVFSKGTFPEVYVPTVFENYVADVEVDGKHVELALWDTAGQEDYDRLRPLSYPDSHVILICFAVDSPDSLDNVQEKWISEVLHFCQGLPIILVGCKKDLRFDQKTIEELHKTSQKPVTPEQAEDVRKKIGAQKYLECSAKTNEGVREVFEHATRAALLTRKEKKTKKCLIL

SEQ ID NO: 41879 - protein, 36 aa, Oryza sativa
MIYKRLPPGNKILDPRLILSFSSLHKSELISLARGL

SEQ ID NO: 41880 - protein, 578 aa, Oryza sativa
MEQLPKRPANYVPLSPVGFLPRANAVYGDRTSVIYGRVRFTWSQTYARCRRLASSLLSLGVRNHDVVSVLAPNVPAMYEMHFAVPMAGAVLNTINTRLDARAVAGILRHSEAKVFFVDYQYVRLASDALQIVADEGRHVPLVAVIDDIDVPTGVRLGELEYEGLVARGDPAAELPSLADEWDAVTLNYTSGTTSAPKGVVYSHRGAYLSTMSLLMSWVVGDEPVYLWTLPMFHCNGWTFTWGMAARGGVNVCIRDARAADIYRAIARHGVTHLCCAPVVFNILLEGGEAAAKQLAAPVHVLTGGAPPPAALLERVERIGFRVTHAYGLTEATGPALACEWRAQWDRLPLPERARLKSRQGVSVLSLADADVKDAKTMARVPRDGKTVGEIVLRGSSIMKGYLNNPEANSDAFKGEWFLTGDVGVVHADGYIEIKDRSKDVIISGGENICSKEVEEVLFQHPAVADAAVVAMPHPHWGETPCAFVVARDKAAGVCEDDVVAFCRKHMARFMVPKKVVVYDAIPRNGNGKVEKNLLREAAKKLAPAAVPAQKTKVKTTTTTVGGRRGEHPVAHVMAVSRL

SEQ ID NO: 41881 - protein, 188 aa, Oryza sativa
MGNHLASCTMARVPGAARGAKVVLPDGAVRAVKVPAKAAELMLEAPGHFLADARALRAGGRIAALGADEDLELGGLYAAFPMKRLGAPAAPADMARLAAAVSRDQAAARRSSATAKVAAVVVAPQHDAAMAEEEEDAARPRLDEMAVGDAAAEAEISELKQRISGGRRSRRPTLETIHEESYAPAARC

SEQ ID NO: 41882 - protein, 158 aa, Oryza sativa
MEVEYHEEYVRNSRGVQLFTCGWLPAKTSPKALVFLCHGYAMECSGYMRECGMRLAAAGYGVFGMDYEGHGKSMGARCYIRSFRRLVDDCHRFFKSICGKQQNLYPFFITSLFNLSAYFTFSYTISVHYQARLCLCVAMQCFNLAAVYCTSVLALVMT

SEQ ID NO: 41883 - protein, 69 aa, Oryza sativa
MARRCRVRSRRRVVLYMERRASGESSPEKERRWGRERWTRGGIESIENEVEDTSRARSDPFPLWKVRED

SEQ ID NO: 41884 - protein, 362 aa, Oryza sativa
MAASPLPRWAPTPSPTRPLRTPGTPSAGAGAASSSSSSSSSWRSCVPLLTTFSSVFGSSAARRGGGLSGGEPPPALPHAGRHDIVGGIAPLDGVEAAVERRRKDEMMMSATTACSRGVFLTWDDLSVTAPAAAAGCGGHGRRAVILDGLSGYARPGEVLALMGPSGCGKTTLLDALAGRLSPNMKMRGDILINGLREKLSFGTSAYVTQENVLMATLTVTEAVHYSAQLQLPDSMPAEDKRARADRAIRQMGLGAVAGVRIGGRVCKGISGGQRKRVSICAELLASPALLFLDEPTSGLDSAASYHVMSRIAGFARRDGMTVVAAVHQPSTEMFELFHGLCLLATGRTVYFGAASDAIEVTV

SEQ ID NO: 41885 - protein, 232 aa, Oryza sativa
MATPYHVQSPRSILLKMIATKQQPPALPPPPPPKLILQPRQRTSPAMWCAAIVCFAFSLLLIAAGAVILVVFLAVRPRAPSFDAAGATLNAVYVGSTSPAPYVNGDMTVAANVSNPNQKMDVVFRSAAVELFFGGRRMAAQALPAPFVQRRGQSQIISVHMVSSQVALPPELAVAMVNQVRSNRVVYTIRGTFKVQAKLWFWHYTYSMSALCDLELTAPPCGVLVARRCITR

SEQ ID NO: 41886 - protein, 491 aa, Oryza sativa
MPPLPRPPPTPTSAAPAPCPRQIAAVVLNHPSSALTPASTRSLSASLLAVAPSLPTPVADSVLKLLWHHAPRALLFFHSLLHLPPRAHAVGPSTLDLALDLSARLRRPRQLTNSILGLFPRHRLAFTPRTFPILFERLAVSQRRPDLAVRLFLSLHRSHRVAQDLPLFNSLLDALSKSRHAGKAASLVRALEQRFTPDVVTYNTLADGWCRVKDTSRALDVLRLMVESGIAPTKTTYNIILKGFFRAGQLRHAWDFFLQMKKRGSKDESCKPDVVSYTTMVHGLGVAGQLEKARKVFDEMAKEGCAPSVATYNALIQVICKKGNVEDAVTVFDGMRVKGYVPNVVTYTVLIRGLCHAGKIDRGLKLLERMKNGGCEPIVQTYNVLIRYLFEEGEMEKGLDLFEKMSKGEECLPNQDTYNIIISAMFMRKRAEDMVLAARMVEEMVDRGYLPRRFMFNRVLNGLMLTGNQELSRKLLRMQEKYRRLQREIRL

SEQ ID NO: 41887 - protein, 67 aa, Oryza sativa
MSTTGILFRPPPPSSDDGRSDGALTYRSGIVAPHESDTACTRTTGSGQPAPPLKQLLIVGADWLAST

SEQ ID NO: 41888 - protein, 499 aa, Oryza sativa
MGRVRPLHHAARRLLLLFPRPRAFSSAAAAAPSREPLHVCVVGSGPAGFYTADKMLKGHEGAQVDIIDRLPTPFGLVRSGVAPDHPETKIVVNQFSRVAANDRCQFYGNVTLGRDVSLSELRKTYDVVVLAYGAESDRSLGIPGEDLRGIHSAREFVWWYNGHPDMCNLAPDLQSTDSAVVLGQGNVALDVARILLRCTSELAATDIADYALDALRGSTIKKVYLVGRRGPVQAACTAKELREILGLKNVHVFIKEADLVTLPADEEEIRNSRIKRRVYELLSKAAIAHKGKNNNGQKELHFVFFRRPTRFLPSEDGVTVGAVQLEKTCLKDDGVAGKQVAVGTGEFEDLKCGLVLKSIGYKSLPVEGLPFDKYRGIVPNLKGRVLSSESENATVEPGLYVVGWLKRGPTGIVATNLHCAEETVASILEDDKKGLFMGPSDSKKQGRRGLLEILEQKNIRFVPFDGWEKIDSKEKMAGELKNKPREKITTWNEILMASN

SEQ ID NO: 41889 - protein, 478 aa, Oryza sativa
MSKFETRLFVNGEFMEAEHAETFSLSNPATGETVAEIPIAGEVDIDNAVKAAERAQPAWSRVPARRRAAIIRKFAALMDQNKHKLSELDSICMGKPLHGGLEDIQEAVDISNYFAGLVEIAGGETSLNSPEVLSISMRQPYGVVASIIPWNFPSMIWCHDVVPAAGAGNAVILKTSEKSPLSGIFLAKLAFEAGFPAGIINVVSGPGSTGALLSSHMKIRRISFTRSTGAGRAIMQAAAKSNLKAVSLELGGKSPLIVFDDADLEKTAAAAVGSITINSGQICTASSRLYVQKGVSETFKLKLKQKMEALKLGNPLQSGTEMGPQADKKQAEAIAKFLEIGNQEGVALTGGKPAKDKGDNFIQPTVFTGLSDSSRLNIDEIFGPVLVLHEFETEEEVIRRANATEYGLYASVFSKNIDTALRVARALEAGNVGVNTTSPFGAYELAFGGFKGSGVGRQKGSRSVLDWTEEKSVYINHE

SEQ ID NO: 41890 - protein, 154 aa, Oryza sativa
MEDAFRAQMKITEDAIKAHTAECLSSKKLLKAPRPLYQVFLVCVFVLAAVSILVIGFFDYALTVGEMTVVNFLNGKEFKAVKTDFMDEAEATLLDLAQQERVREVRNRYVQEAWTESMGCLIRALTLKSYRDSWFRTKEEDSNNSTTVATPSAK

SEQ ID NO: 41891 - protein, 87 aa, Oryza sativa
MNGYSEIEREKANLINATSISLEQLEKSKNETLYFEKQRAMNQVRQRVFQQAVQGALGTLNSCLNTELHFRTIRANISILGAMEWKS

SEQ ID NO: 41892 - protein, 740 aa, Oryza sativa
MFIYFVAVELNSSTSSSAEVLVFQRGHVPAYMMEGGKDSQDAERGEKTEANADAGDADVNAVEPQKDIFTWRDVTYDIHIKSEERRLLDHVSGFVKPGTLTALMGVSGAGKTTLLDVLAQRTTMGVVTGDMFVNGKPLDPSFQRSTGYVQQQDLHLETATVRESLRFSAMLRQPKTVSKQEKYDYVEEVIKMLNMEDFANAVVGVPGTGLNVEQRKLLTIGVELAAKPKLLLFLDEPTSGLDSQSSWAICAFLRKLADAGQAVLCTIHQPSAILFQEFDRLLFLARGGRTVYFGEIGANSRKLLDYFEKNGARKCDDEENPAEYMLEIVNAGKNDNGEDWHDVWKRSDMRQIVEQDIDRIHEEKQHEKVAGSDDPTATSEFAVPFTRQVVEVTRRVFQQYWRMPSYVGAKFGLGIAAGLFIGFTFYKAKTSQAGLQNVLFSAFMLTTIFTTLVQQIQPLFITQRELYEVRERPSKAYSWKAFMIANILVEIPYQIFTGILIWACFYYPVVGVDQSGSRQGLMLLFCVELLIYASSFAQMTIAALPDAQTASGVVTLLTFMSILFNGVLQAPSALPRFWIFMYRVSPFTYWVGGIASTLLHGRQVVCTESEVSRFDPPSGQTCQQYLSRYLQAAPGTLQNPQATADCRYCSIRDGDQFLAGSNIYYGERWRNFGLIWAFILFNIAVAVLTYWAFRVAKWGKGSKKGSKSKAEKTTEKVAQKPAQQGAAPPNREAGPVDPAT

SEQ ID NO: 41893 - protein, 412 aa, Oryza sativa
MKFSMRGQPKGIPWLVLAMLIATFAMLTEGATSLSPPSLSLTPTYAPVIKVIGKVYCYRCFNEAHPEESHGKEHLKGAMVKVTCQANDQALVGFGYTQDNGKYSVSITGLPLSSTYGADSCKVELHSAPGGSDCNVPIELNLSGLSVYSKSNEEVVLQANQVMAFASQKTFGFCSKPHIQPPIFPYNSPPPSPYQYPSPPFNYKSPPLPNQFSPPPFNKFPPPSHQYPSPPQSSYHSPPPYQYTPPNSYQAPPTSYNHPPPPYGYNSPIPPTNKYLPPPYYFNSPPPQYQHSPPANSYVSPPLAHQYPPPPYKSPPIPPYYFNSPPANHYSPPPYNFGSSPPTYQYSPPLLPKTPKYLPPKVPLEMSPPAHATSPQPLVHYSPPPPLQHAGISSTTPSVNSYQSPPPVNQLS

SEQ ID NO: 41894 - protein, 54 aa, Oryza sativa
MDSCLKLCVLTSLSVSHLISLSLFLPHVLYCSLISIFFEVVIYLSKLSCLIICV

SEQ ID NO: 41895 - protein, 228 aa, Oryza sativa
MASMAPSAMVLIVLLVLVVLPSSTLCSRAGPSSKHGHGGGHAKRVPPPASVPPPPPPPPAPAALVRATCNSTSYYDLCVAELSADPSSATADVRGLSSIAVSAAAANASGAAQAASALANATDAGTTAGVAGDGGGAVVQRLLATCAAKYGDARDALAAAKGSIAQQDYDMASVHVSAAAEYPQVCRTLFGRQSPGDYPPELAAAEVALRQLCSVALDIIALLSSSSN

SEQ ID NO: 41896 - protein, 587 aa, Oryza sativa
MLLLRQPALLVSAARPLLSALPRTFTPKATFTSSIFKMSEQRVRVGSAKEVAQGKMKEFTFAGEGDDAVKVLVSNVKGQLHATSSKCTHYGAPLANGVLTGDGRIICPWNGACFHAKNGEIEDAPALDSLLSLKLEVEGDDLFVTADPEKLKGKPGVAPSCKGGVKSIAKGKGVVVVGGGAGAINCVEELRKSGFQGAITIVSNEQAIIDRTKLSKALIADADKVTWRSKAHLDNVLGVQLENATVTAVDAKAKSVTLDNGRKLEYENLVLATGGTPKRIPIPGADLPNVLVLRQISDTKAINEAVGNEDGEASNKKNVVVIGSSFIGMEAAIALTKRANVSVVGMEKVPFERVLGEQVGGGLMKAQIKNGLKFYMEAGVSRIDGESGSGPKAVVIKNSEGKEESLPADVVILGVGAAPVTDFLKESGFQLEKDGGIAVDSKLRVEGHRDIFAIGDIAAAPTRASPHSRIEHWNVASNQGRAVAKTLAGTETDYDKVAIFWSALGSQLRYCGSGGPQFDTVHVNGKPEELKFSAYYAKGDEVVAVATMGVDPLMVQCSELLRIGAMPSLSDIKNGKDPLSLDLSAKM

SEQ ID NO: 41897 - protein, 75 aa, Oryza sativa
MEGRRSWLGKAGSHTPPRRCLTPRMAPGMDVAGRSAPCLCCAVCSCCGGEQTPPTPDKQTDEYSSPPKLRNLTKD

SEQ ID NO: 41898 - protein, 49 aa, Oryza sativa
MKSRMMRLLKREDLRKDTIPVATRNFQITPERRAKDQRGSAWFSRCDRT

SEQ ID NO: 41899 - protein, 535 aa, Oryza sativa
MAGGAVADVGYTPAGPVARPASVKQSLPAILVAAASAFGGVLFGYDTGTISGLIVMKNFKETFGQFDAGKGEYALTTNDESLVVSILSAGTFVGALAGAPISDILGRRWGMQVALLVFTVGVVMQMATTDLGVFIGGRVVAGLGVGILSTIVPMYQSETAPRWIRGAVVSGYQWAITIGLLCASLANNGTQNRSDSGAWRIPVGIQLAFAILLCGFFLILPESPRWLVKKGNHEQASKSLARLNSTDVDDPIVRSELSVIQTNLDIELTHSTGSYLDCFKNNDRKYLLRAMTGIFIQAFQQLTGINFIFYYGTKFFKSALPGTNPFVFSVISNVVNVVTTVPGMYMMERLGRRNLLIWGAVWMCICELIVAVVGTAVPVQNLAGGKTAVAFVCIYIAGFASTWGPAAWVVCGEIFPLAIRAKALSLCTASNWLWNFGIGYATPYLVDVGPGKAGLGPKVFFIWTGTCACCAVFAYLFIYETRLLSLEEVDEMYAQTTAIKSSAANAEIRARRSDLEGAVAPVKEDELATHDEKKY

SEQ ID NO: 41900 - protein, 198 aa, Oryza sativa
MRGLIILAIVISAVVCQKPTPCTTPKQWEARYFEYDNTKNEETRARISYDAQYQRERVIEEYILGTADNYYDILYLHSQKIQYVYDLKAKTCTKQTIDRKWRDFGIPQNATSLGESYIGSSAIPNAGVLTTIWTDKFTDDKGNQYNYLGVWTYEGCLPVHLVISSQSGGVDRHVNFFDITPGIENPNVFTPRPECLNL

SEQ ID NO: 41901 - protein, 335 aa, Oryza sativa
MAVALALLAAMSALSSCTSPATAELTRHEHPVAAGAPLRLLVVGDWGRKGGYNQTRVAEQMGKVAEETEIDFVVSTGDNFLENGLAGVDDMAFHDSFMDVYTAQSLHKPWYLVLGNHDYRGNVLAQIDPALRKIDSRFICMRSFIVSAGIVDFFFVDTTPFQLQYWTDPGEDHYDWRGVAPRDAYIANLLEDVDAAMKKSTATWKIAVGHHTMRSVSAHGDTQELLELLLPVLKENGVDFYINGHDHCLEHISSRNSPIQYFTSGGGSKAWRGIFQQNEDKLQFFYDGQGFLSLELSENRARFAFYDVFGEALYHWSFSKANLQKVQSSASVTEE

SEQ ID NO: 41902 - protein, 239 aa, Oryza sativa
MPSNPIIAASEEIISFHHVDIVTPSQKLLATQLSCDVSQGKSLLVTGPNGSGKSSIFRVLRGLWPIASGRLTMPSDGIFHVPQRPYTCLGTLRDQIIYPLSHEEAELKVLSLYKSGDKAITSGSLDDHLKTILENVRLVYLLEREGWDATPNWEDILSLGEQQGLGMACLFFHCPKFGILDECTNATSVDVEEHLYKIATSMGITVITSSQRPALIPFHSLELKLIDGEGKWELCTINQ

SEQ ID NO: 41903 - protein, 112 aa, Oryza sativa
MISSKSYATCLSSYSHIFTCRSSISLRSASASTARILQSMTFISSNSDAVAGNFLGSQEEQDGTWTEVYTLAKKPARVDRIEDAMADEGCSGEPKYVQIFCVLESVVWLADE

SEQ ID NO: 41904 - protein, 60 aa, Oryza sativa
MQLQCAKMNNCKFNKISWPWYFVIIPTQNWLQENYMGGQHHQPLKMRIAVVIRLTVLTLY

SEQ ID NO: 41905 - protein, 293 aa, Oryza sativa
MFKRSFAATKDRAGKARKVSKRSFRDDAKQRMREALNEATTPETSPSIGGASPKLNSAIVTIVVGKDQRLFAAHEDVLSRSPWFANACRDQFFSAPGQRRISLPDEEPEIFSAVLEYLYKSDYSPRLLHDRKRNTWSLEDLQDPIMTPRSERPDDPKKFVGFNESATIYHHGVGDYILRDTVIYCSALRLGLPDLQRLALRKQGLQTGIDVATILRSARFAYANTPASDSRLRAHYLALIIRSRKTFKRSGTMQMEMEKGDTQFFFDLFVAMCNHIDDISEEIGHVHSPNITK

SEQ ID NO: 41906 - protein, 454 aa, Oryza sativa
MAYYHFGDVVRLGTLCRNSKYIPIAIFSGVNHHLQPVVFGCALIVDDSEASFAWLFEKWLEAMPVGPPVSLVLEFNQEMAAAATKILPDTHCTFCEKHILGTVREELGSLYPEPELDHFITDLRKCIDCCRLEESFESCWDSVIRKYGFRNNELLQSLYEIRRQWAPAYTRKVFCARNLLPQSCQNLENVIEKHFSSKTQLWVAVQQLGQAVCNFYEKETQADYLTTFQMATVRTASPLEKQASSIFTRSIFEKFQDQFAESFGYHADRLEDDMLHKYRVTVSEGDEEAHTVSFNPEKKTVGCSCCLFESCGILCRHALRVFIIEGVRALPKAYILKRWTKHAKSIATVDDYIDLRGCRDDPSTTMYNDLHCDAIKCAKEGSASSELYSVAKEALHKALDEVVTLRKIRDQQNLQSCKRPIKKSAKGKDSDHSTIISSTRSASKNSLLEIDDIT

SEQ ID NO: 41907 - protein, 351 aa, Oryza sativa
MPTMPAVVSAAGAAAPCSNVVEDLVGFLRVLSDGTILRSPGPVFCPSTFPDEHPSVEWKEAVYDKPKNLHVRMYKPSPASGGVGAGGGGKLPVLVYFHGGGFCLGSCTWANVHSFCLRLAADAGAVVLSAGYRLAPEHRLPAAVDDAAGFLHWLRERAVDGDGDGDGWWLAEAADFGLVFVTGDSAGGTIAHHLAVRAGSAAAAAPDDPVAIRGYVLLMPFFGGVSRTPSEAGCPAEVFLNLDLFDRFWRLSLPPGATRDHPMANPFGPDSPAMDGVELPPVLVVAGGLDMLRDRAVDYAERLSAMGKPVELAEFAGEHHGFFTLGPGSDAAGELIAAVARFVDVAAPPPK

SEQ ID NO: 41908 - protein, 410 aa, Oryza sativa
MTARLALLASLLLLLQLVPPSSAVVLELHGNVYPIGHFFITMNIGDPAKSYFLDIDTGSTLTWLQCDAPCTNCNIVPHVLYKPTPKKLVTCADSLCTDLYTDLGKPKRCGSQKQCDYVIQYVDSSSMGVLVIDRFSLSASNGTNPTTIAFGCGYDQGKKNRNVPIPVDSILGLSRGKVTLLSQLKSQGVITKHVLGHCISSKGGGFLFFGDAQVPTSGVTWTPMNREHKYYSPGHGTLHFDSNSKAISAAPMAVIFDSGATYTYFAAQPYQATLSVVKSTLNSECKFLTEVTEKDRALTVCWKGKDKIVTIDEVKKCFRSLSLEFADGDKKATLEIPPEHYLIISQEGHVCLGILDGSKEHLSLAGTNLIGGITMLDQMVIYDSERSLLGWVNYQCDRIPRSESAITSRL

SEQ ID NO: 41909 - protein, 547 aa, Oryza sativa
MSNVSQASDVLCKLSHLRYLDLSFTGIKDLPEAFGNLYHLQVLDLRGCIIEKLPKNMNNLINLRHLYADSQTTALIYAVGQLTKLQELQEFRVRLEDGYKINELRDMKDLRKLYITNLEKVSSWQEATDAKLVEKKSLDYLQLKWVYQVPESRSTSQLNKDILDGLHPHFQLKRLKILNYMGIDFPYWVQRLTDLVAVNIINCRWLSVLPPLGELPRLKKLSLFGLSSITHINDQVYGTNDVIFPYLEELHFSELFSWEQWSEAEYKLLIPHLRKLGINACSKLSLLPIETLSSSVKELHLSSCTSYISMLPAYLKRLTSLTKLSIQDCSATLLIPCHSLTLLEHLQLESCFDVHFEGGMQYFTKLKKLEVHRCFDVTQNIYEQTSLVERYSLMGGLQSLIHLVIDDRFMYYRYYHMLNTLCSIRTMKFCAFDLSEFTTEDEEWLQQLQSLQEIQFASCRNLLRLPSNLNNMCNLKKVVLNDCCKLQSLPLNGLPDNLKEFHVSGGSEVLEQQCQKTDGDEWQKISHVPYVRINGRTIQMISHVLGS

SEQ ID NO: 41910 - protein, 381 aa, Oryza sativa
MAPHFVLGPGVPQQLLIQSAAAGDLPAFKKFARMLDGGKGRLKEAVEAVKNRGAGALHQAARYGRTAMCAYMVEELQVDIDAADELGHCEIVKVLLVKGANVDSSSDHGTPLHVAASKSQDGCMKILLDHHADCNKTFSTVCTPLIAAMMGRSLKCCKLLIEAGADVKGVGTFTPLIVAATEGLTDFYKCLLEGGADPDVPDKFGFLPIEIAARQNRRKDVEILLPVTSRIPSVHDWSVDGMITYVNKQVEVDPFFKIRPADLKLEGNRAYMRKDYLTAAKLYNMAIEHDPEDMTLYSNTSVCWLKMGKGMNALETAQVCRILRPDWPKGCYREGTAHMFMKDYEKACNAFLDGFKLDPANIEIENALREALKSLKASRAA

SEQ ID NO: 41911 - protein, 342 aa, Oryza sativa
MVLDSVDGLLLLQRDHDTAIRLLHPFTGDIADLPPLETLRPQMGNTTNSVLWNYNEEKHRIGFLRDVCASVSVNDTGSITVMLAFHLFNRVAFAASGDLQWTLSKCYFGRPCWRTLSYQGKLFMVKAKHDITGNSDILQIDPPNDQDAEGSPLPEKELAPKLVATIPKDKLFGPCFLAECDSEILIIGHDSRPTSLDSQTMLLPFAYNDIGNYTHTSVYRISDLTSGRFSPVASIGDHALFIGPRTICVSSKALPTIFCGDTGGYIFHTPPTELFFTQYHLSSRTWSPLIDGSIGNSPPPRPYSLIHHILTCCYRKYWNKGLIFYRETTPSWRVKRNCRVGG

SEQ ID NO: 41912 - protein, 206 aa, Oryza sativa
MFAYKKERDGYAKWMMGNLASGGAAGATSLLFVYSLDYARTRLANDAKSTKGGGDRQFNGLVDVYRKTLASDGIAGLYRGFGPSVVGIVVYRGLYFGMYDSIKPVLLVGPLEGSFLASFLLGWTVTTAAGVASYPLDTIRRRMMMTSGEAVKYSSSMDAARQIIAKEGTKSLFKGAGANILRGVAGAGVLSIYDQVQLILFGKKFK

SEQ ID NO: 41913 - protein, 321 aa, Oryza sativa
MGNRTEDNSKEGGSREKYITWSDDATQFMLEWYISLRKDKPTTFKWRKQHHQQCATALNDKLGLRVNRSQVHRHFRLCKEKWSWICAALGKSGYGFDATSCKFNIDPSEKEANKLGTTKYNYLTKPIKFFHLFEELFVGCSKADGSLAMDQFTANTSSDSDGSGSIKELEEYTFPLQDGGNDSDTIPRYSPTTDATSSGQKRKFVKSPTKKIVKHKTSRHKAEEDELIASILRLANSLASAQSVASVEVPSVGDPNASIWKRIEDLTIPASDKIELAIFLTKPEQECFRSYLRVASDESFQAWVIDYFGRKCATDGGYVTL

SEQ ID NO: 41914 - protein, 658 aa, Oryza sativa
MDGLVVHGYLVKYGFGAQCAVCNALISFYAKSNRIEDALMVFDEMPQRDIISWNSIIGGCASNGLYDKAVELFVRMWLEGQELDSTTLLSVMPACVQSHYSFIGGVVHGYSVRTGLISETSLGNALLDMYSNCSDWRSTNKIFRNMEQKNVVSWTAMITSYTRAGHFDKVAGLFQEMGLEGIRPDVFAITSALDAFAGNESLKHGKSVHGYAIRNGIEEVLPVANALMEMYVKCGYMEEARFIFDHVTKKDTISWNTLIGGYSRSNLANEAFTLFNEMLLQLRPNAVTMACILPAAASLSSLERGREMHAYAVRRGYLEDNFVANALVDMYVKCGALLLARRLFDMLTNKNLISWTIMIAGYGMHGRGRDAIALFEQMKGSGIQPDAGSFSAILYACSHSGLRDEGWRFFNAMRNEHRIEPKLKHYACMVDLLCHTGNLKEAYEFIETMPIEPDSSIWVSLLRGCRIHRNVKLAEKVAEMVFELEPENTGYYVLLANIYAEAERWEAVRKLKNKVGGRGLRENTGCSWIEVRGKAHIFFAENRNHPQGMRIAEFLDDVARRMQEEGHDPKKKYALMGADDAVHDEALCGHSSKLAVAFGVLNLSQGRPIRVTKNSRVCSHCHEAAKFISKVCGREIILRDSNRFHHFEEGRCSCRGYW

SEQ ID NO: 41915 - protein, 84 aa, Oryza sativa
MFRMIEAAAACVRYSASRRPRMSQVVRALDSLADIDLTNGVQPGQSELFNVANTAEVRMFQRMVLGNHDDSSDMSQYGWSSSRQ

SEQ ID NO: 41916 - protein, 402 aa, Oryza sativa
MELPNTKAAVILEQKYGLQLDQDTSDLPKKRGKKIKLSSEDRTHRCDCLEPVWPSRYHCLTCHETYLISTEFEGHNDGKCSKIHQSPDESRENDEPKVKVTKSDTKEKDSLECSSVIEPSSDRKLMQCPYDFEEICRKFITNDSNKETVKQIGLNGSNGVPSFVPSPAFFLEPAIVQSQNRKDDELKDWTSSLEECNAMSAQKLVQEVSKSGQSCPGNVGDEKVQKSKKPTPDNTSGEEAHSTTGKPTRLLAVNGGLVPESSLRPLIGRNSHILKQQKINLLDIEAALPEEALRASKCQQIRRRSWRAFVKDAESISQMVLAANLLEGMIKAEFLKNDWWYWSSFTAAMKTSTVSSLALRVYTLDDCIIYSKDQVPSVEPADNTRSGNRGGRRRRELESLAS

SEQ ID NO: 41917 - protein, 197 aa, Oryza sativa
MSRRRRRHPPPLRMERPMLPRRRRRLPRVARRRRRRRQPLPLPLRPRRRNRRRRPRRRKQRRPRKKRRNQLRPTRRKRRMTRRSRRRRGRRTARSPKRKARLRTRPRRRLRRCRLRRRRRRHPHRRRWSSRPPESPGTSRFVPRAPPSGAWRPLRATRRTIWWTACLTCSSGFSRPSTTAAETSSRCTLSCPSARTP

SEQ ID NO: 41918 - protein, 161 aa, Oryza sativa
MELVGRIRHANVAELRAYYYSKDEKLLVYDFYSRGSVSNMLHGKRGEDRTPLNWETRVRIALGAARGIAHIHTENNGKFVHGNIKASNVFLNNQQYGCVSDLGLASLMNPITARSRSLGYCAPEVTDSRKASQCSDVYSFGVFILELLTGRSPVQITGGGN

SEQ ID NO: 41919 - protein, 96 aa, Oryza sativa
MLLDELACAGGGCARGVRRNARVGQLHGHGQAARTGGCCSSTSPRLACKLILEIGGGGEHGLEAGIAMNSMLITGFAGCGACSEGRRGMGHPQTEC

SEQ ID NO: 41920 - protein, 289 aa, Oryza sativa
MIPGDAGAVTGRFLLRLLRVASYVGASPSTRAQLVRQAGAQLDEARAVDLLVPMPSSSDPPAYDVGAAEAVLEHFLALFQRPAPPDERRRMSAAMEKVARTFDEYLRAVALHADFPVGKFVDLAECLPDIARNDHDGLYHAIDTYLKEHPELSKADKKRLCRMIDCRKLSPDVRAQAISNDRMPLRTIVQLLFVEQERAMGGGGASGSNSAVAPDAIAMLAARKEKEDEPPAPAADHKSDVHRPRGDHGERARADGAAMTRSLSASTTKTAGAAAPRTAESRGSRMRNK

SEQ ID NO: 41921 - protein, 245 aa, Oryza sativa
MIHTASLIHDDVIDDSGMRRGKETIHQLYGTRVAVLAGDFMFAQSSWFLANLENIEVIKLISQVIKDFASGEIKQASTLFDCDITLDDYLLKSYYKTASLIAASTRSAAIFSGVSTAICEQMYEYGRNLGLSFQVVDDILDFTQSAEQLGKPAGSDLAKGNLTAPVIFALQDEPQLREIIDSEFSETNSLATAIELVHRSGGIKRAHELAREKGEIAIQSLQCLPRSEFRSTLENMVKYNLERID

SEQ ID NO: 41922 - protein, 310 aa, Oryza sativa
MAWKTSATCICRLVDYEIASRIASYAKSTRKSVVKISRVVSVVGNGVLAPRIAMFSSRGPSNEFPAILKPDISAPGVSILAAVGDSYKFMSGTSMACPHVSAVAALLKSVHPDWSPAMIKSAIVTTASVTDRFGMPIQAEGAPRKIADPFDFGGGQIDPDKSIDPGLVYDIDPKEYTKFFNCTLTLGPKDDCESYVGQLYQLNLPSIVVPDLKDSVTVWRTVTNVGGEEGTYKASIEAPAGVRISVEPSIITFTKGGSRNATFKVTFTARQRVQSGYTFGSLTWLDGVTHSVRIPIVVRTIIQDFVSDTS

SEQ ID NO: 41923 - protein, 272 aa, Oryza sativa
MCIQVVVSLRNKKKETKQMSSEFRVQKTLNSRKQKRRGVSFHQAPPELKHQQQLLPCSSPPHHHQLMMVVMVLMMPRRQPEPSQDPRLLLFRYLLRAAAAAFLGSFWFRCCCFSFFSGCLLLGRHRRGINRSDLLHCCCCFLCFFSRCVLLGRHRRGLNHSDLLLFCFCCCSCFLFFFFFFFFFSDGCALLGRRRRGLNRHDLLLFCCCCCCFLFFFFFSGCDLLGRRRRGLNHLGFLLFCCCCCYSRFSSGSRRFSFHGLGCLCTWSWSRL

SEQ ID NO: 41924 - protein, 39 aa, Oryza sativa
MKWSMKLWEVCVNLLQTQRLNMQCCHYKPQLMVALAMRT

SEQ ID NO: 41925 - protein, 360 aa, Oryza sativa
MSQDELQQLLASIDATLLATAKRREALGLLPGADDDADGGGRRRDADVAGTNSVGVHGYQHQEVHAPATCDPFHPYNAGVTLMQPGYNNAQYMGGHGAVDMSGYQLQMQMPGNGSNNHSRLAWGGFQPCNATFVQPVYGNLQCWYNNVVDGNGEPCDAIVPSAGDPYMDIAGNDVYGNQMQPAPAANGGWHDPGTWGYDGGEPCKAIVPSFGDPYMGIGVYGNQMQPAPAPAANGCWHNPAGTWGNDGEPCNAIVPSAGHPYIDIECDIDGNYIDTTVFDYQTTSTSDNFMDAPVQFIATGSDESIVTNVAGCDETEFSIDDLLQCSDASQHSSGLEELHYLSDLADGFDFGCNFDVLLD

SEQ ID NO: 41926 - protein, 407 aa, Oryza sativa
MDAAMEDAAAQSEREWDGGGGGGGADAVLGLAGAGASLSLCYHEAFGPHDELILLEAADDLLPDLLQGRVTVRGRPEEEAVLCTPSATYAMKFVGNSNSVFLIPPGESAAPTLRPNGADGDDNVASATDAVASIIKVASGNIELVRTAPRLDKLRKLLNERPYVLDEDLGSDLQQKGLYTWQDLCELVQASDGELTEQLSSISAVEIDGFWRMVDDSSANTILDMILHNSVLHDWSLNSMPENDVLDVMESDGFMRKIVTHCLNRFGTKVDKEARGCWSLDERRVCLQFARRALGAGKMKLENFMGKWERSIPSGMRADLQMLEGEVLCEKLGAETWVHAFSVADLPLAPADRFAALFQERPKWEWKDLQPYIRDLRVPGVSSEGLLIKYTRKTQPSADAEPIFTAR

SEQ ID NO: 41927 - protein, 203 aa, Oryza sativa
MSLLLSRHHLASIPLDAARGQTTGDGHRISRRHRVRCSHRRHHRALAFRSTMSRSLLPAPPHSTGPLASPTRSDVGTTTTRRRRASRASVAAPLRPSASPRLPPRAAAQHLPAIQPCNHHHHQAQNRTKLAVTHPHANTASPSREQTEARRGAAGGPAEAYALTSSSSRHRRPRRRGRGGEKRARGEQAAGVSGQRPTFLPFS

SEQ ID NO: 41928 - protein, 425 aa, Oryza sativa
MAAMDEPPQLFLCPISMELMEDPVTVSTGVTYDRRSIEEWLFVYGRTTCPATMQPLSNFDLTPNHTLKRVISSWLDRGSSSSSSSSPSTSTLSSPIHELATPLSRALEQERLLAALAELEETPFKVTKLKSMRARMAGDVAMQGEFVASGGVRVVGRVMAQALAESGGDFSAFAACEEAAAVLAALPLSDEASVRVVLAPECIRPVMALLQRGGAEARLHAMDILTKISSSGSGGDWTAGVDIDDVIKSLLELLSDEASTRLSSRALDVLLDVVERARGARAKAVEVGAVHVLVELLADADDRRVTERVLLLLKRLCKCPEGRLAFAEHDLSVAAVARTMLRVSELSTQLAVKVLWLVSVVAPSEKVLEDMMLTGAVAKLLGLLHVESSPSTKQKTVRMVRIHGVVWRQYACFPTDFRDYLRLLD

SEQ ID NO: 41929 - protein, 359 aa, Oryza sativa
MASARRWLCLILAAAAAAAASGAPAPEDDPGMPMAARHRCWMARVGRTYADAAEKARRFEVFRANAERIDAANRAGDLTYTLGLTPFADLTADEFRARHLMPDADVDEPATARVLFEQEEKAAKQHLPPSRPPAVWGSKDWRDLGAVTPVQDQGKNNCNSCWAFAVVAATEGLIKIETGNVTPLSAQQVLDCTGGDNTCKGGHIHEALRYIATASAGGRLSTDKSYRPYDGEKGTCAAGSGSASSSSVAVVIRGVQKVTPHDKDALRAAVERQPVAADMDSSDPEFRGFKGGRVYRGSAGCGKKRNHAVAVVGYGTASDGTPYWLLKNSWATDWGENGYMRIAVDADCGVSSRPAYPFV

SEQ ID NO: 41930 - protein, 177 aa, Oryza sativa
MASNGFPGSKGGGGSGAEAHHHPSMAGSGSGSSSGGRKMKSQLSFTAGPPHLSHIAEDGAFPDRAGAEASVPRTFSAGGSSGGGGFSIVGPWEESRDIISTLGGYESQFGGMASTSALEMAGMDRYLQLQHDQVPFKVRAKRGCATHPRSIAERVRTQYHDQNASIFAFAFSSDLDT

SEQ ID NO: 41931 - protein, 128 aa, Oryza sativa
MAGSSRPLNPPPQVDRATAVKLKAPDDCIVFYLSPSFGLERREVLAEAIRQRVELLAPRVMPVRLELLPPMEAPVLPHRAVPVGVRAVQEVGEDGGHRRRRGEDHVDDDIELQKERCCIIRIQKHSEK

SEQ ID NO: 41932 - protein, 208 aa, Oryza sativa
MLQVLSSMSNQATSDMERIGSMGRDMRIMSFFMMTQTTSAMLRFTQLDGEDFPLPPEIVARCNGHDGKHLTLVTRNSKPVNVRLEKRGQSFYISKGWKKFVELTDLRVGQCVRFSVSSPSTLDLLILDKHGTSLAIPPSKRDLKLKSKRSTHQDSKGHPSNTDPGPSRIINRRVTKSANNKPKFADLCFCAENVTLSTALKRHMKTLA

SEQ ID NO: 41933 - protein, 684 aa, Oryza sativa
MVWSSKANIPTNTTHAVLLDDGNLVLRSTSTTNASSTILWQSFDHPTDTVLQGGKIGWNNATGVNRRLVSRKNTVDQAPGMYSFELLGHNGPTSMVSTFNSSNPYWSSGDWNGRYFSNIPETVGQTWLSLNFTSNEQEKYIEYAIADPTVLSRTILDVSGQLKALVWFEGSRDWQTIFTAPKSQCDVYAFCGPFTVCNDITFPSCTCMKGFSVQSPEDWELDDRTGGCVRNTPLLCNSNKTAAGTADKFYPMTSVQLPDKAQSIGAATSADECAAACLSSCSCTAYSYGEGGCSVWHDKLLNVRQQGNGVLYLRLSAKEVLESRRNNRWGVILGASIGASTAALGLIFLLMIWIRKGKRYNLTMDNVQGGMGIIAFRYVDLQHATKNFSEKLGAGSFGSVFKGSLSDSTIIAVKRLDGARQGEKQFRAEVSSIGIIQHVNLVKLIGFCCEGDRRLLVYEHMPKSSLDAHLFPSSGAVLSWTIRYQIALGVARGLAYLHSSCRDCIIHCDIKPENILLDSSFTPKVADFGMAKFLGRDFSHVVTTMRGTIGYLAPEWISGTAITSKVDVYSYGMVLLEIISGSRNSSKQSSRDGVHEACFPVQVARNLLNRDIDSLVDANLHGEVKLEQVERVCKVACWCIQDNEFDRPTMSEVLQFLEGLSEVETPPMPRLLHTLAGGLDSKIM

SEQ ID NO: 41934 - protein, 104 aa, Oryza sativa
MEPLAAAERASWRTLVGRRSVKAVMEPLAVAERASWRTLVGRRSVKEKILATTNWNSSSIPSTSWSVRAPEAVVVLVATRWMEPRPSSRAVTRRASGPPLAAAV

SEQ ID NO: 41935 - protein, 683 aa, Oryza sativa
MMSRRESVQMAAINDWPTQLAILKVMFNSENLNAKYLDDENDEVKIESQNDYEFAQQIATSSTNSILRLILRNSRDEIIGKLNLNVDLSKSGLGESLNMSGVTSSSIDSMRSSIERISPPQPPPSTNQTSSSSSVASSRLLASTLSTATMPLTVVASSQPPPFTVAQLAWLENYLAKFKSDLVKEMSAERQQPRAESDLISFEPDSKASLESKVQQLFSAIFEACMLKRSLKSAYLEEELQSTGAFMAEFIKDQNMPDGSKCDPGVKFQKTWLIKNAGKLEWCDNKFPVKLVCIAGNILTEDDVDCVDVPETGVEQTASISVSLVAPPIEGTYFSEWVLCCHGFKFGPRIWCTIQVTGNTSNVERKDLSLAESMYSERSAKLTPHRQLSQQFSQHHHTASISTEDVDDEFVVIPDCFDLDKKWTQKRHLQLQEKQQQAAIERQEDQVTPVKTSVTDFGFQIDDDISLSSKAQTNASQDLIMLASDPALESATKALKDSNSNPNSTSSTGNKSSLESSIEGIGSDPNDCEVIKRGDEFVLSRLIGEKLTVSETRDPNIDDDDDSSEQVAVASEITTSDNCDDDSSASNNLVNSNITNAFGAMKDALSNLGRPSYVGSMPMASSDAASFLSPTSKDLDAKMKELISMGFANRQLNLKMLKKYNMDLEKVVQSILEIHDNDWALNR

SEQ ID NO: 41936 - protein, 203 aa, Oryza sativa
MGGGGGGTPRSSIGHILPGAGFVAVGVWHLFNHVKLFSQRPDTYVAPAWFPVPGARYLELALIIAGSGVEFAMEMFVGHSTLLPFAADGSSLPTASTTTSTPSSASPSPSTRPPRSTSTAPAPRPAARSASSSWRRCSRRSSSSSTSTPPTTPASRASSTGSCRWSSPRASPRRCSASATRGASPSASPGRRASPSTGCGSPS

SEQ ID NO: 41937 - protein, 391 aa, Oryza sativa
MKAQDMVSRSSCSKNKVFGSLPVDSIPEIDPSYRLFLEHLREDGNGYVLDAPRGDHGSPVFLRYAQDHASNGYANAKSGTNITKSSLRRSHCNQNSEGPGVTSDKAGSANAGHCFSLGTSFAMETSEIDESYATFLRLLKIKNGLMVIEPEPGVTIVYGQAEETPVGYDELRIATSTNGRDSLMTAFENMGEENAMNTDGDGLGKINNSASEREMDGLALENMGGQDLVCIDEHGLPPCTELSDLNVCGDEQGEPLALSCGIPSTFDEKLNDVLSKPYDLNEYKELLRKATDRKLVSRQRHLRNASKPYATRAVGLSFLDHYPDLAIQIDSADSDERKLCLLRKFFFWLENLCHEGAYMPWIDKPLACNPIDADDYETDDPTAIEIIQDGD

SEQ ID NO: 41938 - protein, 308 aa, Oryza sativa
MVDCSLVLRILGLQSMSESSRAFGVNASSSSSGGGGGGEAVAGTTGKNGGGGSVAFHRLFAFADGTDAALMLLGTLGAVANGAALPFMTVLFGGLIDAFGGAAGGDVVARVSEVSLQFIYLAVASAAASFIQVACWMITGERQAARIRSLYLRTILRQEVAFFDKHTNTGEVVGRMSGDTVLIQDAMGEKVGKFVQLLVTFLGGFGVAFAQGWLLTLVMLATIPPLVLSGAVMSNVVARMASLGQAAYADASVVVEQTIGSIRTVKTFRRTPQLPSISPRRHGPEHPAQHRLRRSPARSRRWRSTVGH

SEQ ID NO: 41939 - protein, 463 aa, Oryza sativa
MAVTGGGRPAVRQQAARGKQMQRTFNNVKITLICGFITLLVLRGTVGINLLTYGVGGGGGSDAVAAAEEARVVEDIERILREIRSDTDDDDDDEEEEPLGVDASTTTTTNSTTTTATAARRRSSNHTYTLGPKVTRWNAKRRQWLSRNPGFPSRDARGKPRILLVTGSQPAPCDDAAGDHYLLKATKNKIDYCRIHGIEIVHSMAHLDRELAGYWAKLPLLRRLMLSHPEVEWVWWMDSDALFTDMAFELPLARYDTSNLVIHGYPELLFAKRSWIALNTGSFLLRNCQWSLELLDAWAPMGPKGRVRDEAGKVLTASLTGRPAFEADDQSALIHILLTQKERWMEKVYVEDKYFLHGFWAGLVDKYEEMMERHHPGLGDERWPFVTHFVGCKPCGGYGDYPRERCLGGMERAFNFADNQVLRLYGFRHRSLASARVRRVANRTDNPLVNKEAALKMDAKIES

SEQ ID NO: 41940 - protein, 124 aa, Oryza sativa
MANKRQREARKRFREANPGLFPANPTPPADGTKKKKNNKKSMFKKTSKAGGGGAGRSKHPLRVPGMRPGERCFICKAADHVAKVCPEKSLWEKNKVSAYHHSSQNPCLLQALGDNFCSAQCLLL

SEQ ID NO: 41941 - protein, 330 aa, Oryza sativa
MGRPPCCDNGVGVKKGPWTPEEDIILVSYIQQHGPGNWRSVPENTGLMRCSKSCRLRWTNYLRPGIKRGNFTPHEEGIIIHLQALLGNKWAAIASYLPQRTDNDIKNYWNTHLKKKVKRLQQQQQSHPDHHHHHSFQTTPSSSNAAAVATTSPNYYNPNNSNSNSSNYLHNNNHNLESMQSMATAPSNEATTIPKLFQFQTWMKPSPATTSSAATAAAGSCYKQAMAMQELQEEQEGSAAAAAMASSIDGVSKDQDYHMCAVISGDDKSSSSEMMTAAAMAGHGEAATTTFSLLENWLLDDMPGQAAMSAAMDGFLEISAGYCCADPIMF

SEQ ID NO: 41942 - protein, 199 aa, Oryza sativa; identical to SEQ ID NO: 40369

SEQ ID NO: 41943 - protein, 336 aa, Oryza sativa
MASFHIATALSATLLLSLLVLGRSDATLPPPATPVPPSTACNGTTDPTFCRSVLPSNGTSNLYTYGRFSVAKSLANANKFLSLVNRYLSGGRLAAGAVAALQDCQLLSGLNIDFLSAAGATLNRTSSTLLDPQAEDVQTLLSAILTNQQTCADGLQAAASAWSVRNGLAVPMSNSTKLYSVSLSLFTRAWVRPSTKKPRTATPKPPRHGGRGRGLFDATDDEMVRRMALDGAAAAVSTFGAVTVDQSGAGNFTTVSDAVAAAPTNLDGTKGYFVIHVTAGVYAENVVVPKNKKYVMMVGDGIGQTVITGNRSVVDGWTTFNSATFGELICQRNFFS

SEQ ID NO: 41944 - protein, 102 aa, Oryza sativa
MRTMIQIFLMILELLKVWKSILVSLQKKQEVALRRMLQRKLKLRAHHTRSIMILLPPDQKGMAIKGLGNLLMLIIVKRNLHLTVSLMHKTGSRKQSLNHLLM

SEQ ID NO: 41945 - protein, 602 aa, Oryza sativa
MMPRMSKPAPASSASKPRRRASPSPSPSPGTAPKTAKNAVAGAGGGGQRRRSPLTDLNSGDASAARGGCFRFLVSSASSGSRSRTPVASPKVKKPRPEIGRRGRVVAAADQESRTRVVEKMMTRGRAETETARKHAPPPRGLPLLGEALTPQRKADAGATPAVSGATPPIHASISPEVLACGSATPACFAAGHHVVPGVADRRKCRPRGILAIAGEGASEELDPDPSRASIHWLSSPSGEVPGTCSTKCTNEASVNWLPSPREERGVDLLGDEIFVPRCSLEDAFWQISPKSTGLLSSPVLNGLLDLGTPASELSETTPSSGFLPLQKTPSTGDSLSPFSLIVKRASQSLSSRGLKSLCSQQGPGSCSYGSAADPTAISGESWSSKCSGLTRTCSRPLTKMDPVVECLEMMALSPRPGDADYCGNGALPAPLPDLSFQFAGAPMSLESIDLTSFKRSPCGIELKGEKSASFQKPVLADPRISWREGLVSRMFDMGDLDCCKWWSDDEDGPVFQGNEEALRDTELQSVIPSCLQECGDQTAAACGFGSVEFSCSGGGGEMCNDSKPSSNPVSVAESMRAEGFELVSSDDSDWTLFYKNGLFES

SEQ ID NO: 41946 - protein, 260 aa, Oryza sativa
MESVGVEPDIYTYNTLVDGYCKHGRIDDALTLFRDMLHKRVTLTSVSYNIILHGLFQARRTIVAKEMFHEMIESGMAVSIHTYATVLGGLCRNNCTDEANMLLEKLFSMNVKFDILTFNIVIRAMFKVGRRQEAKELFAAISTYGLVPTILTYRVMITNLIKEESFEDADNLFSSMEKSSCTPDSRILNEIIRMLLNKGEVAKAGNYLSKIDKKGILPEATTTSLLIYLFSVNGKYREYIKLLPEKYRFLREQAAVDNCI

SEQ ID NO: 41947 - protein, 165 aa, Oryza sativa
MASAPVSRAPLTMPAEMTSASIWRSAREAATTSARETDWPPPPSPPPSRSAGSASLSARKRSRDDDEVATSSPIRSVSPLNTPRSSAISRPPLPAGASRRVDGRRTSPAAPWSCPTPGASMATATATVSLTPAFAILLITTHQRLASKQQPNTIPLLSCLHDPML

SEQ ID NO: 41948 - protein, 140 aa, Oryza sativa
MGESCYVRRLSDLLQEQQEPFLLAGGASLADACRRRLLAFCHRRAAVSNKSRALGGLGAAVFCGAAVRRALLAGCFSCGARQSFRRLRHAGAGDIAAGCDVDDDEEEECARQLSPMSVLDLDINSDDESSSMLGVGHRKP

SEQ ID NO: 41949 - protein, 505 aa, Oryza sativa
MELLPWLLGFVVKYPEIMASAACFLLLFCRFRRRSKRIPTNWPVVGALPAIVANAGRVHDWVTEFLRAAAMSHVVEGPWGSPGDVLITADPANVAHMFTANFGNYPKGEEFAAMFDVLGGGIFNADGESWSFQRRKAHALLSDARFRAAVAASTSRKLGGGLVPLLDGVAASGAAVDLQDVFMRLTFDLTAMFVFGVDPGCLAADFPTVPFAAAMDDAEEVLFYRHVAPVPWLRLQSYLKIGHYKKMAKAREVLDASIAELIALRRERKAADANATGDADLLTAYLACQDEIGMDGAAFDAFLRDTTLNLMVAGRDTTSSALTWFFWLLSNHPGVEARILAELRAHPPSPTGAELKRLVYLHAALSESLRLYPPVPFEHKAAARPDTLPSGAAVGPTRRVIVSLYSMGRMEAVWGKGCEEFRPERWLTPAGRFRHERSCKFAAFNVGPRTCLGRDLAFAQMKAVVAAVVPRFRVAAAAAPPRPKLSIILHMRDGLKVKVHRRQED

SEQ ID NO: 41950 - protein, 117 aa, Oryza sativa
MTATTSFPPSPLSPPRAALDGNQELPVIVIASSNQLDNVGYRGGHLIVASSYPADPTSFLARAEVVLAMQIDVTRRGSASNGDEMEPQRGRLEVRGRAVATRPRALHHRLRFPLLTS

SEQ ID NO: 41951 - protein, 78 aa, Oryza sativa
MLSILSPPRCNENGIQEQMQLCKVAVQACTVLQIHDIVKTGAGTRVHLLDLCISNDIIQCSRQTRRRSLNSLGEYLTV

SEQ ID NO: 41952 - protein, 109 aa, Oryza sativa
MHTMLSALLLKLEQPHISDNISLLYLAHTCLIINISLLNVAGLTKSHYQTILPMYKIALSQGCFLLWPPHITRIVIPKQIPNPNAVKRKSRTSMEFFSAVCDIMFGSVG

SEQ ID NO: 41953 - protein, 69 aa, Oryza sativa
MTKNDLKMARFHDEIVARWWLDFAAAVCGALVQCGFFTHRGGDGMDWTGRADGCDEALTLIDRGQFGLL

SEQ ID NO: 41954 - protein, 430 aa, Oryza sativa
MSFKGFSKSITRAPQQFRSKFNMGENTKDAVYIDAARRFQELETETKKLHDESKKYFEAINGMLQHQIDFSQAMSEIYKPISGRMSDPDSIKPEGNPEGIEACEEYENVVKELQETLAPELDMIETRVIRPANELLDIIKVIRKTAVKREHKKLDYDRHRTTLKKLQDKKERTPKDEKALWKAEGDVEQATQDFEYFNDLLKDELPKLFKLEQEFIQPLFQSFYYMQLNIFYTLHERMQRCDIGYFNLNLDIEDAFHEKRGDIQEQAEALSICRYKTTGRPRPVRYGQARPAIEGGKPQGLLTQGTGSSDTKSERPASKFGTLQVNHQESDEAAPPPYSPGKQGAGLAAIAASKPKPPPPKPKPSRLTAAPAAETVTALYDFAAQADGDLSFSTGDVIEIVTRTQNENEWWTGKLNGKQGQFPGNYVSLS

SEQ ID NO: 41955 - protein, 123 aa, Oryza sativa
MAVATLSSRSRRACAEAASVLLVLLVIAPSVAAGGDTNGVYEPCADAAVQRGDGFTFGVAFAARGDFFSGGVQLSPCDGRLSLASKGAKLAVFRPEVDEISLLTVNTSAAGGFDPMVYTHEEP

SEQ ID NO: 41956 - protein, 89 aa, Oryza sativa
MVDDALVVLVLRRTRFPSSRRTAWVVLVGMLALLDQTMEEFLAWVVATMARLPSLETRSLHDARSATGFSPLATHTGVNLGTVLNQMPR

SEQ ID NO: 41957 - protein, 124 aa, Oryza sativa
MATGDDKPPSLDADIDMATGDDKPKPKPKPEPKAEDSKLKADDSIPMSKPEEPKPEAAAPMEDSMEVDGVGPSASASAEGVGAEEVEDEEDYVLREIDVYFTPKPFDEDTMVMAARRLPSVIVL

SEQ ID NO: 41958 - protein, 392 aa, Oryza sativa
MMDPEMMRVAQEQMRRMPPAALAAMQQQLMSNPSLLRFATEGIKTLTPDDLRRAGEQMSRTSAEEVLGMSRRLAAASPEELAATMKNAQAEQQRASSYAAVSGARALKDQGNALFRLARHADAAAKYALAVDNLRSVPSSASRSLRAVCGVNLMACHLKTGRLAECVELGSEVLGLDPGNVKAHYRRGQAYRELGRMEAAVADLRRAHELSPEEDAIADALRDAEEKLGAPRGLVIEEIVEEEEEAQGSEILPTSGATSSSTSGHSVPSPSPSPSAAAAAEMMNSMGDPAMGKMVASVVQGMDPETVSIIGKQFGVDLSRDDAARLQDAMKKLSPENLEKVMGWVNRARRAAEAARKAKELLLGSRRGWLVLAIVVLVLAFVLHHLLGFIGA

SEQ ID NO: 41959 - protein, 442 aa, Oryza sativa
MEALQAERAELDTAWARVEEGRRSVEAMVEAGRKAHHRHTSQLEARRRELVEIAREVEEERETALIATAVLDEARDDLRLQYGSRAAELEEKLDAARGVLDAAAARERRAAEKEAASRQREEALEVRATALEERARALDVKERDLADREAAVATREATLASHEAACAEEESALRLHEDALTERERALEEAEAAAQRLADSLFLREAAREEQARRKLEGARAERAALDQRAAELEARAKELDARAHSGGAAAGHGDLAARLAAAEHTIAKLQGALDSSAGEVEALRLASEVGPGMLRDAVSRLDRAGRQAGLWGGRHAKYAANQGGLAQCLSEMAGALQRLPEELEETIKSSSRDLARGAVELVLASYQARDPDFSPWAALEEFPPGTEDGARARVRDAADYIVHSFEGTAPRLAFALDSDEEGGDDGADDSGDEADGPGAPE

SEQ ID NO: 41960 - protein, 186 aa, Oryza sativa
MNSAAETETEGGGGAAAVEPQVVVVERVVTVEYLEPSMSRGLLGMFPDSSAFDFDYSQSGIWSPLNKVPRASSSPPPPPRSGGGGAEGSRDFLIANPKRRARAAIGGRSSRSRRRRLRLRREDGSFLNLHETGCARLDFSPPPPSSPLPAKEEGWRRVLKAAIRKFKSRQRRSRPAPLLQMMLPTL

SEQ ID NO: 41961 - protein, 167 aa, Oryza sativa; identical to SEQ ID NO: 36906

SEQ ID NO: 41962 - protein, 195 aa, Oryza sativa
MSSTSSMLSSSMTCSACRNRTRRLLLAEESLRVSGKAKAWHGHTRRRARSRWPMERSCATSPRAMERRPRRGRRATATRAAASLIRDLSLAVCFEEALLPPKRPIAPAATRCDGGVRSGGECGGGGGVASYPSLIPPALESWIGALWRAAARGESAKEKKIEGQVACLFWSPSIRWKNVGPILVFLPCQHIKINW

SEQ ID NO: 41963 - protein, 399 aa, Oryza sativa
MAAAVEAEGRGGEPVTPGTPAPDLSQATDDRRLLRSRYLAVKSRISDDKDDMARADSVKFRAVFTQVEDLHRLVQRPREQIADAEALLGIATSLVASVRTHSALGITPSDFVSGMLKKFGEKRRDDDEAASLRWLDVGLYTSRIFMAVPGCSTMVGPMNTEVLPRRVRVCRKRTAKPRGSECPEQLPDSSNAAKTDTDRNMSVIFDVLRKKKNARLENLVLNRKSFAQTVENIFALSFLVKDGRVEISVNDEDHHLVYPRNAPAASAITSGKVVYNHFVFRFDFKDWKLMKDMVVDGEELMQHRPPAPQVGTHGSSTTTTTTTTGGANEGPETETPAAPAHSTAIRKLCRNRGLVMHDMKEEAATMEEKRSAMDAQVSQLASKRRRLFQDDDDDDGDLE

SEQ ID NO: 41964 - protein, 333 aa, Oryza sativa
MDDYFFLQSLLLCVAAVALLQLAKVAATMRRRPRTPPGPWRLPVIGSMHHLVNALPHRAMRDLAGVHGPLMMLRLGETPVVVASSRGAARAVLKTHDANFATRPRLLAGEIVGYGWADILFSPSGDYWRKLRQLCAAEILSPKRVLSFRHIREDEVTARVEEIRAAAAPSTPVNLSVLFHSTTNDIVARAAFGRKRKSAPEFMAAIKAGVGLSSGFKIPDLFPTWTTALAAVTGMKRSLRGIHKTVDAILQEIIDERRCVRGDKINNGGAADDQNADENLVDVLIALQEKGGFGGKAASASTSTTTKSRPSFWTCSPAGRGRRRRRWSGRCQS

SEQ ID NO: 41965 - protein, 366 aa, Oryza sativa
MEPDASPTSTTSCSKQSKLPLALLTLECNSNKCFLFDPSTKQTRGATDMAAFFLDAATLAFENRGWLLMVQNYRHSPRREKTLRTVFLSTPATAGGWTCRCSAPSPVASSSSTSTPMGSHWWWPASRRPPIIPPSCPGDVYWTTYKNTNTSPPQQARHGRRRAAFTFIVDAALRGKQVVCADYRGRISVFDMTETAWRTPVPSPGWNWQEDHFLVTASGEGGGEEEEEEEVILVSCRRHDDQFCEFKFFKLDIAMAPSPLDAGDLDGFSWFLCRGRSSRLREEKGGRKVYTFCPDRLWGESRTIDLGNGKKRKMAPFNPRGLIEKSITNVYAHNLVDGVVEELLPASIVTEARHWVHSAVFSEPFA

SEQ ID NO: 41966 - protein, 138 aa, Oryza sativa
MPSSPWIPTAGAPPPRAAPAVVYSWLSERHPVKEAGAGAGASNAQESRPRVSPAENSEVETREHEEKVNKYQAVLAARLKAKYFSGKAFGKGTSALQSYDNSMAWHIMVYRRFACLFRQSDICLVRLSFFFFKKNFDI

SEQ ID NO: 41967 - protein, 400 aa, Oryza sativa
MADVTGGHSSPPAAAAETLPDDVLAEILLRLPPHPSFLSSASLVSKRWLRHTRNPSFLRRFREFHRTAPVLGFFLNSSHGALFFPTDAPLCRIADQVASLRRNTGDGLWWLVGCRHGRVLLRSCDWANLLVWDPMTEGFVCFPAPIQMVQADADRDAAVFCAASAGDEDRRSGAFNVAVVFVSGDHVFGCMFSSAIGAWGDVISTPVTLPLLMIYDEPAALAGEALYWIVNGSSLLEFNCGSQSLALISRPSDMPATHRWNIRPVSLEDDLLGLAFFNDFCLHLWVREVADDGATNWVPRKSVEMDKLLSLPVATEDSRRRIVPAWICGFSGDGNVVFIGTPAGIFLVELDTLKFKKVTDGSLLIKTVHPYESFYYVPNEKGGKQESAIVGNQVSEAGGK

SEQ ID NO: 41968 - protein, 117 aa, Oryza sativa
MNERRESLRRFLTGEVSVVVCTGVLGRGMDLLKVRQVILFDMPNSIDEYVHQVGRASRMGVEGMAIVFVNEEDRNLFRELVQILKTAGAPIPRELANSKYTTGIPLGGGKKRKLKSR

SEQ ID NO: 41969 - protein, 198 aa, Oryza sativa
MEALRRPEVVVNRRWSRSRLLPLLLPVARPSAPAPALEYGKICKEPVLVYDSRMPENVFDASKMIFFFFTLARQDRGSVEEASRQRQRQRERGERRGEAGQHAHAGATAVRRQQQRAQAAVAGVERLVQRRAAGAADVPSCDADAGAGAGDRVLQARRQVQPLEHAAARRGDRLRPRHCCSSSSTEEDQQMEKSSGCV

SEQ ID NO: 41970 - protein, 128 aa, Oryza sativa
MMLINWSFSFSRPWNTTCISGRNPTISSLESFNFNKSKKFPDLLAILSSLARRVFSLYMSSSTKPRFFIMYARKPLTLFCWLFCILLISKSSSSSSASEAIFLINSSQPVKLSSTTGLRSATSSTACR

SEQ ID NO: 41971 - protein, 154 aa, Oryza sativa
MLLPKYSLGSAGWRRPRLLMAARHMVCCSAGSRLARVMHLHSSELSAWNLVSAAAPAVSPAARSSWRARSLSATSDSDEKCSIRSHSSGGCSLSISSDRSAYGSTTGAPSPGEGDQRLNKGGGEVGAARQLARAISTHALRKSQNAVPSESAWL

SEQ ID NO: 41972 - protein, 83 aa, Oryza sativa
MIVSLPLNEKNPCVVSALGILSCSPVLRCLGDSRVLRCLGDSVLFSCPRFMMTSIVKDFLIIRAGISEAEDRRASDDLLRGSR

SEQ ID NO: 41973 - protein, 465 aa, Oryza sativa
MMTETVVVNAGLGVGHLAPMVELANLFPRHGLAVTVVLIEPPAKPPSFAAAVSRSMASNPRITFHVMPSPSCHSNVPELIRAMNAPLREYLRSSVPSARAVVFDMFCACALDVAAELGLPAYFFQCGGASHLAVGLHLPHVQAEINASFGEIGDEPLLFPSVPPFKPSDLPKAALDRNDEMYRWILGVFERLPESRGILVNTFQWLETKALRALGDGACVVGRPTPPVCCVGPLVSRSGEDKKHGCLSWLDAQPEKSVVFLCFGSMGSFPKEQLAEIAIGLERSGQRFLWVVRRPHAGEASLSGLLAGCHGTHGELDIDELMPEGFLERTKGRGLAAGSWAPQADVLRHRATGAFVTHCGWNSVLEGIAAGVPLLCWPLYAEQRLNKVFIMEEVGVGAVMAGYDGEVVRAEEVEAKVRWMLESNEASPIRERVALAKERAEEATRKSGSSHQSFVKFLIDFGVTK

SEQ ID NO: 41974 - protein, 43 aa, Oryza sativa
MNYNFILRIDQKQLVFAVVYMIYLTVLFDQIHFKKNLTINRRI

SEQ ID NO: 41975 - protein, 491 aa, Oryza sativa
MTVASLRRRRAAAAAAPQPGSVYRSHLVFERLWPDIRDDASSASAAASSLSSTSWRRSMLMTSHYQNPGELWMPCVNRKLIRPELPPSNGYLMIEANGGLNQQRLSICDAVAVASLLNATLVIPAFHFNSVWRDHSKFGDIFDEDHFIETLKEHVRVVKELPVDVLTRFDHNISSIPNMRTKAYSSPNHYMQKVLPKLLELGAVRIAPFSNRLAQSVPSNLQALRCFVNYQALRFAEPIRVLAEDMVERMVKRSTLTGGKFVSVHLRFEEDMVAFSCCTYDGGLKEKTEMENARERSWRGKFHRHGRVINPEANRRDGKCPLTPLEVGMMLRGMGFDNTTSLYVASGKIYNAEKYMAPLRQMFPLLATKDTLALPEELAEFEGHSSRLAALDYSVCLPSEVFVTTQGGNFPHFLMGHRRYLFGGNARTIKPDKRKLVLSFDDPNIRWNRFKRHMQDILHHSDMRGTALRKPNDSIYTFPMPECMCQQDGMM

SEQ ID NO: 41976 - protein, 223 aa, Oryza sativa
MDIQMRWPWQLLSRNVQADQMKIPILVDAEPERTREELGGLLSLASYIVCNGKFPEKWTSVPSIPSALLEILLQYPRACFAVVTLGENGCMMLERGKDGENYETEPVDIENVAESLRLKVDKDDILPTCVSSKFMRLTARGSGNIFARLLIGTAESIPASELVDTTGCGDAFIGAVLHGLSTEMPPEKMLPFACQVAGIKCRAIGARSGLPWQSDPRLTKYLC

SEQ ID NO: 41977 - protein, 615 aa, Oryza sativa
MAASSFSTSFSSSSSHEGDAGSSYIECFKYSRRATLRSVVGRPDGGAGLVGERAVVGGWVRSSAVVRARRAAAGPASPSRKPEVEATGLTCTEVLMSRVPLIRCIARLMAGGITAAASAGGSARRPAVGTALVRINDGSCVADLQIVVDSALLPLDQITATGACVLVEGKIEQVEGTLPQYVVQMKVEKILHIGPVDSEKYPRSNAHSSPDLVRGYPHLAARTATVASTARVRSELVHAVHAFFQSNGFFHVNTPTITTTTATSAGNRGKMLRLTRLFSKSDNGNRITPEAVRAAIKEKTKQVEALKRSESNKEALEAAEQDLQRANALSRQLEQGASAESSQDEFFHRPAYLTPCHTLHLETYACALSSVYTFSPVFQAESESLDSDRSLAERWTVDVELAFAELEDAISCAEDCVKSLCSTVSKDCSDELKFLSSNQAGDATSSVIEAAVSSPWQKIKYTEAVNTLLQVTDKTFESKLELGMPLSRVHLSYLADDLYKKPVIIYDYPKQLKPFYARLKEDLKTVSAFDLVVPKVGIVACGAQKEERMDNLTSRIEESGLQVEQLEWYLDTRRHGTVKHSGFSIDLESLILFVTGLKDVRDAIPFHRTKGHAKC

SEQ ID NO: 41978 - protein, 574 aa, Oryza sativa
MRTWRLAVLACLCAAAAAAPAEAKTHHHTWNITYQYKSPDCFRKLAVTINGESPGPTIRAAQGDTLVVTVHNMLDTENTAIHWHGIRQIGSPWADGTAGVTQCPILPGETFTYRFVVDRPGTYMYHAHYGMQRVAGLDGMLVVSVPDGVAEPFAYDGEHTVLLMDWWHQSVYEQAVGLASVPMVFVGEPQSLLINGRGVFNCSPPAASNGGGAACNAFGGECGWPTLFTASPGKTYRLRIGSLTSLASLSFEIEGHTMTVVEADGYYVTPVVVKNLFIYSGETYSVLVTADQDPSRSYWAASHVVSRDPTKTAPGRAVVRYASAAVDHPRTPPPTGPRWNDTASRVAQSRSFAALPGHVEPPPARPDRVLLLLNTQSKIDNHTKWAINGVSLSFPATPYLVAMKHGLRGEFDQRPPPDSYDHGSLNLSSPPASLAVRHAAYRLALGSVVDVVLQNTAIPPPNGRSETHPWHLHGHDFWVLGYGEGKFVPEVDGPGLNAASARGGAVMKNTVALHPMGWTAVRFRASNPGVWLFHCHLEAHVYMGMGVVFEEGVDVLPRLPASIMGCGRTKGHHY

SEQ ID NO: 41979 - protein, 331 aa, Oryza sativa
MKVKAIRVHKIGGPEVLTWEEVEIGEPSEGEIRIKNKAIGVNYVDIYYRTGLHQEPLPFVPGKEAVGVVSAVGPGVTGIEVGDVVGYADTPMGTYTEEQIIPATLAIPIPPSVDHITAASVLLKGMTTYVLVKQAFKIQAGHTVLVHAAAGGVGSLLCQWANALGATVIGTVSTQEKAIQAAEDGCHHVIIYTEEDFVAQVAEITSRKGVHVVYDAVGKDTFKGSMECLMPRGCMISYGQCSGRPDPVPVSDLASKSLILGRPGMRHYTATRDELLHAAGEVFAGVAAGVLRVRVNHVYPLHEAARAHADLEARRTSGSVVLLPAMPAADS

SEQ ID NO: 41980 - protein, 490 aa, Oryza sativa
MHQGAAGPGPSGGGGDRLSALPDAVLFRIVSHLKAREAVRTSGLSRRWRHVWASAPRVDVRYPCACDGRAVDQKSFRDFVTILLLRRRPLAPFKALRLSWSHDEDDVSAWIAHAVRRGAEEIDLSARRHHGYPVPDYKHFISPKIKILKLTHLGTTRFTADNTLDLLCSGCTSLEELELKDIKSLWGGIQSDSLKRLSIINCHVTSDGFLVEAPNLISLCCIRPARAVPWFSHMVSLVEATVVLDDSRLSDDYQQPVLEDDNDGSDYDDNFFAPKAEGPDDKRDNEADNDSGDKRNRDGSKSDLDDHDGEYDHEDGSESGDKEVDDLEGGDDRTVTYGEIADESSSYGIPIPSDEYGGNYGNHDYTIFGGDHMLDHLSDVRTLGLLGHQGEDIHRSRGGINPTGGSFACNNLKKVKITCRKDDVMVHMLAKFLQRNGISLQKIFVRRTSSTHNGEEGTGKDSSAKRKAQDEAARRAVKQLRRARNSRSPE

SEQ ID NO: 41981 - protein, 489 aa, Oryza sativa
MRKDAAAGGGGGGGIAAGPAPALLCFDLKPFLAALTVLTLAVRTVASSGNASVSSDPGGPPASLPEVGNKKPVAAAAAADPNRREFRAVGSAAALFVQMGAYRGGPYTFAVIGLASKPTHVYGKPWFRCEWVPNANGSAAAAAARPMRAANTYHMLPDWGYGRVYTVVVVNCTFARVPNADNAGGKLVLNAYYGASPARYERIVAMEEAPGAYDAAEFRPPHRYDYLYCGSSLYGNLSAARVREWMAYHARFFGLRSHFVFHDAGGVSPAVRAALEPWVRAGRATLQDVRAQAEYDGWYYNQFLVVNDCLHRYRHAARWTFFFDVDEYIFLPDGRSLEAVLAELEPYTQFTIEQNPMSSRLCARNPDEPETDYSNEWGFEKLVFRNSITGVRRDRKYAIQAKNAYATGVHMSENVIGNTTHKTEHLIRYYHYHNTINVIGEVCREFVPIPPNGGLIWSEKTPWYYDDSMKRIADTVREFERKTIGDVRV

SEQ ID NO: 41982 - protein, 361 aa, Oryza sativa
MKAPISHAVNADVPRALWRVERVLLLVVRVVDVVRQDPGWTIRHGEAERAVASQEQGVAAADVVDLRRRPRRGIHPVHLDRVRVPHPVVGQAPVRQPCRVGLEVRCTHAPAHHEPASAVAAAEPRRVDEVVGVPHHAILSGEYGRPLQGRLAAEVELVDGAVAAYPVEHPAVGAEADVDVQLVPRRRAYPRPVRVAQPREGHLAVGAVEEHDDAAAADDVGRRVRREEDAEVEVLRELARRQRHGRVDQRLHPQRPVVRVHHVHARDDGAAVVEQPPHRLDGGDRRQVADLLAGDGVDEVERRIVVGGGEPAVGGAEPPAVDVGPRERDGVGPVVGEAVEGGHVGVVGVGVGASGGGGGVE

SEQ ID NO: 41983 - protein, 492 aa, Oryza sativa
MGAAASTNKQPSPPANENMEEEAEAGGDRCCWSWLPEDVLLTVMGFMEVPDVVRSGAACSAWRAAAAAFRRLRLSTPRQPPCLLYACDAYGPDAAALYSPSTAATFCVPFRIPRAVAGAAHGWLFATDDEANPYLVNPVTGARATLPPITTLDRVRSRETLVVGGGGGVVYGVDVSPTVGENIRHITAERARDWMFRRVAVSGSPSAAAGCVVLLVHMPFSELSFARPGDARWTSLSGVAELSFARAPNMAMVGDWGSILAMGELHHRQYWTSIVHNHKNGLFYLLRHCGSIFSLDLTGGGAASSSSPSPVARTVLSSPSPHQYSSGPKPTQYLAVTPRGELLRVTRRWHQTAIVAPPDASNGRWHVEHAVATTGVEVEEIRTPPPPPLATAASTATAISVAGLGGCGDVALFLGKSSAACIPTEGFPMLRPNCAYLTDDAGGDVVRSPAARRDFGVWDFGSGRLQRLGDVWPLHHPWLYSPSPIWITPSLY

SEQ ID NO: 41984 - protein, 282 aa, Oryza sativa
MSSILRSIQLRNSIWSSFPVRFLKQQAGLSTVELLDPRSCGKRHFTTQVQEHGKEVAAAATILVFDLETTGYFHKDHRIVEFALCDLSGGKNSTFETLVNPERTVPDYVEHLIKIGTDLVCRPGIPRFSDVIPLLLAFVRSRQAPGKPVLWVAHNAKQFDARFLAQEFDRCSAPLPADWLFFDTLLLAKKMVKAEGKKRRTSLEALREHYGIVSHDDAHRAMRDVMILSQVFQKMTFDLKLTNEKLINEAMKLPFHVFCDSVCLLFLWTSFEQQSEPEREEI

SEQ ID NO: 41985 - protein, 296 aa, Oryza sativa
MMGHLITKMLLLLVSLAPVAAGEHGVAAAEPRLVEIPFNFSVHSWNELISNRLKAELADNPCRQEIEGIPTMAGLHGDDEPPAKWITVRLFGGGDRDDDQAKLLVAEDDAYVAGFANRTGHWHTFRGGRCYPALPATACTELPFGGSYRDLIGGVANLRAVPVGRSSAVGAMEVLSRYDPAATTAAADAKMALAKFMVMVTEAARLKPVRRAVVERWEQVSYLSSDEVRDVPYYGKMSLMILEWKRTGRWGELGPWANIDRARCPRPTGCEDEDDADADAGAGELRGLRAIHAGTS

SEQ ID NO: 41986 - protein, 78 aa, Oryza sativa
MITSIFSTTSLEYVAANLQLIKRRGGRRRRREGERRHGGGGGGGGVLWHRGHRRAAADQGDQEPVQIVINDIDSACYL

SEQ ID NO: 41987 - protein, 208 aa, Oryza sativa
MAAIKLDLPVPGGPYRSGQDVREVRVEGLVLVLLVEAHLEGPDLEPVVAVPATAVAVAVAAAGVVAADEAPPELGALMDVGHLLALLHAEHHALGLVDAADPEALHVGVDPGGEVPDAGEEQVPHLVRHQLVHDAAHQHRRRRQGRRRGDGPLVRLDGLVVGRHGWLAVRRAYCCCWLWYVSENLLSFQTKCLVVVLSGRMLVMVGVE

SEQ ID NO: 41988 - protein, 543 aa, Oryza sativa
MRRAFCCAFLMVALCGPVIADRACRYANKYNTEDIMLFEGVRREFLLDHAKMEARFMKQIGLDQDSQMTYDGQRLDLVSGLPDKHPHLFSAPSKESLHVGVLARTLYDLARNDTKSVAKALYTADEALAVLERKVESFEKFNSEFPGFGGFMPWVGYVPGNATTPTKVTPVANWLNPSRVPALDNGELFWAAYAVAHVLKTYYKNPTLALRWHNVCQRMIDNGPAIFYGGNGTVYTVTFLSNMSLPVSQNNYTGTGKLNDPYEGELFTDMLYLFSNLSQNDKDMLWVQKRGMLQAVNLTVKEPGLDGKTRTITVQRGFWFSAHEQWKYLMLPYYLSDINWRVFLNGERARTWYASTPSDAFNASDAGLQRPSPGMWASVNGPVPTNTSSFPYYSACGIQPIAFEEINYDGTITPYSSFPLFLADPAKAAGWLHNMIRTRKGQNCWGTTESFNVTGATVAPLTTWDSKISTLLAAMGGLAAINQEALPREQLKKLISRLDMEWSREFGWGPLAGEELDFLPPTTTVPFVLPDFTTCDDSSPQCA

SEQ ID NO: 41989 - protein, 462 aa, Oryza sativa
MASMNDQHGGATAHVLLVPLPAQGHMNPMLQFGRRLAYHGLRPTLVATRYVLSTSPPPGDPFRVAAFSDGFDAGGMASCPDPVEYCRRLEAVGSETLARVIDAEARVGRAATVLVYDPHMAWVPRVARAAGVPTAAFLSQPCAVDAIYGEVWAGRVPLPMDDGGDLRRRGVLSVDLATADLPPFVAAPELYPKYLDVSIRQFEDLLDADDVFVNSFNDLEPMEAEHMESTWRAKTVGPTLPSFFLDDGRLPANKNHGIDIFTGDAPCMEWLDKQAPCSVVLASYGTVYSLDGAELEELGNGLCNSGKPFLWVVRSSEGHKLSEELRGKCKEKGLIVSWCPQLEVLKHKATGCFLTHCGWNSTMEAIATAVPMVAMPQSADQPTIAKYVETAWEIGVRAQLDEKGSVTKEEVEISIKKVMDGKRAVEYKRNAAKWMQKAKEAAQVGGSSDKNIAEFVAKYLSN

SEQ ID NO: 41990 - protein, 317 aa, Oryza sativa
METQLPTVMELDSSEPANFTQPSRRYSYLEKIRSLSVVSGEVAGWSSSASASSSRSARSSYYSSSMSSNASGGPHNHRYAPYSNSSPGDIDLHGAQDIARQMVHDGFMVNLIREFDRAPGPALERWFSELDVGWLLRSAAAADKEQSELGLADLVRRWTRGYTVMAEALSATQTKVAGVPAIILPQAQRDHNNIMCDQELEDDLRLQFARFVEATVSKMLAFVDALAAENTRLSIDNLSRLVGLCSCIYSCFYKCNVVVITDSEEIVDSELQCLGRKVVGAFIITTTTLCNAIESMAMVAEAVPPVLIGWDSCENFK

SEQ ID NO: 41991 - protein, 164 aa, Oryza sativa
MSRRLSEPRRPSTMCFRERPLSLGPCPPQKSLVETTTSERRHPRSRIACPMISSARPFAYTSALSKKFTPASRHAWSSAFASFTSSWLPNVTHAPYDSWLTRSPDLPRFLYCIFAAFASAAAAFFLVDGEVGLDLQRERDREGLGVARMRCVFSALLLPASRTC

SEQ ID NO: 41992 - protein, 377 aa, Oryza sativa
MAFYNGASVVALLLLVSTAARAAGDGLLLNGNFEYQPSKSQMNGTRVMAEYAIPYWKITGFVEYISSGQKQGDMLLTVPEGAHAVRLGNEASIEQQISVTRGMYYSITFSAARTCAQSEKLNVSVAPGPESGELPIQTVYTSSGWDSYAWAFKAKRGLVSLIIHNHGEDDDPACGPLIDSVAIKTLYPPQATQNNMLRNGDFEEGPYMFPNAAWGVMVPPISEDDHSPLPGWMVMSDTKAVKCVDSAHFTVPHGARAVELVSGLETALMQEVRTVPGRSYRLEFSVGDASDGCVGSMQVKGYAGQGCTTVTYSSQGTGGHTRASLEFAAVANTTRVVFVSSTYITKWDGTLCGPVVDDASLVCVSQQQPPARRLLRL

SEQ ID NO: 41993 - protein, 50 aa, Oryza sativa
MASKQCPASSSALDWFTWAIKPWAIHRLIKLALRTPLPRAKMVEYHKQFL

SEQ ID NO: 41994 - protein, 57 aa, Oryza sativa
MSSVVRSRQGFLACQASNQLISLIIDSPGVYRQGMFSRMLQLLHMLGIRGSVVMCKV

SEQ ID NO: 41995 - protein, 442 aa, Oryza sativa
MVQLPAMKRVKGRAPLSVVVAIIGGLALAGIIFTEDLRGLTEVKEKVTDKEKKRTSLRTVMRTSALLSADQPPPPAVLSVEPATATPPPAPKMAFNATRCSVTDGYWAYDRSKKLPYTDQTCPYVDRQDSCQRNGRPDSDYLYWDWHLDDCLLPRFDPVSMLEKLRGKRIMFVGDSLQLGQWLSFVCLVNSAVPDTPGAKSMERSRTLSVYTVKEYNASIEFYWAPFLVESNSDRNIALGAGGRVLHVDAIEEHGKHWRRADILVFDSYVWWMTGYRIKSVWGSFGDDGYEELDAWVAYRLGLKTWANWVDSNVDPATTRVFFMSISTTHMRSEDWGREGGIRCYNETWPITQRGYRGSGSDRRMMEVMSDVLGRMRTPVTLLNITQLTEHRVDAHVSVYTETGGLLVTDEEKTDPQRYTDCIHWCIPGVPDTWNRLLYAHL

SEQ ID NO: 41996 - protein, 279 aa, Oryza sativa
MDPIPASKQKKDGEVELDLQPAVRRVGAALPLHLQLLPQRDGRQEPLDELPAALLPGDDHLLLRRRRRRRRRHRAHLRRGVEPEHVRLVAALEEPLAERVHDVVAVAFHLEHEEVVVPAHDVHVGAPRLAAGGGGDLSPDVVERHGAGEGGEALGLEEADEGPVVLHGDGPRPRREHRLQVEVPVRERRHVRLVVAEPPPLRRAVPDERVQLRPRRHRRVVGVQRRRQHGHQRRARALPAGAVVALVDGREEHRRPQLRLRVPARELPSLPASRQIIIL

SEQ ID NO: 41997 - protein, 333 aa, Oryza sativa
MASPDGGVGDGGAEPHEVMDDLLEMREQAAMLHSMLHGTSPSSCAAAASTRQLNQLIDGVMSRLQSSSLSVMSPGGGGGRRGSGGRKKKGAKAVAGPHRRSSSGRRRSKSPFVRMVTTKELEDGRQWRKYGQKHIQDSPNNPRSYYRCTHRPDQGCMATKQVQTSESNSSEFVISYYGEHTCSDPSTIPFVVEAEAPAADYANLISFGSSGGASTSRVDPLRQSRHRLMAEAVDPTPSCSFANCHSPVLSSECASEAAALSSSLPLSAVVGSAVTTPSTSIVGSAPADYDWPSGLAGGDMAGSFPSSPSSLGFMTGSFGNLPGDDDDMFGFDP

SEQ ID NO: 41998 - protein, 221 aa, Oryza sativa
MEPVGSIVGAVPKVASAIAKAVKTARRNKTRCRELAQRVKEVDDILREYKKVAMGDAAATTRKILGRLKDALDDALKLVESCGRSRDGLLFRLHRFVASDGLAAKLDDVNSRINNCLIALQAVNVAHLQKKMDRHLAVAAGGGDHRRTNNPREINAGKSGNKGNKGGQQHKQNGGKGGKRRKGKKAAGPPPQPQPCTPTGAVFPYYLVHSMEEDPTSCSVM

SEQ ID NO: 41999 - protein, 5 aa, Oryza sativa
MSRII

SEQ ID NO: 42000 - protein, 216 aa, Oryza sativa
MLPATNVRKECLFLLGTITNISCGKIVMSGEILVASVDDKSGTPLKCSKSTVRYRSPNSAKAIHSVSPLFTKNLITSTLHSASTSSGSHWYIFLLSSSNLSFFSQAVLSQLSSTTLSSELSPEAPSGGGRRRQRRAAHGALPSSVHNGGAGQIERRRCWADVAAALGEAARSGSSSSVATRARPERQLGSQIQVGLAGSSRGRRRRARQLTTAMAG

SEQ ID NO: 42001 - protein, 466 aa, Oryza sativa
MITRELLGWQQHRERSIQLPESEIHGAEASRGEELIPTTGAGPDAGDPFDVKKLIAAAAAPRELRLLLLVAAATRRRRRRGRGESGGVALEEGDVGEELVLAGEAGAAGAEPAVAAAVLLVGLEVGHDGEALGAAAAADMALLAVAPLVVVLHAQDRLQRLEARVHPVPLAPGVRARVPPLRLRRLLLPLRRRRRLRQRRRALVLVAVPAHVHPQVRVALEPLAADAAEVRVRRQDLVLLQLQHLVLLLLRRRRRILPRILLVAGSADAFVHGAAVSPYLEELVVVGATHLLLLIFPVRLVITSRAGALAGGEADRLCGSGRGGGRRGGAAEERGVLERREEAAGGGDELDDEACQVGVDKLLLRRRRRRRRGAAAGHGSDDVLDLPDLLLDEGEVVQHRVRAPVHVLDANRRQQLLRRRRRHAEESVIRHERVEERIHGGQVRSLIAHRVRHLVAIHCKLLNNLA

SEQ ID NO: 42002 - protein, 479 aa, Oryza sativa
MGSNDHRNVALAVDRVRVLSRRLVRPSSSSSSSSSGHAPPCDIHLTPWDLRFLSIDYIQKGVLLPKPPLSGDRLADALASSFARALALFYPFAGRLVAEERADDGTVTVALRCTGEGAEFVHAAAPGVAVSDVVSSLYTPPEVWSFYSYNLVLGADAATESRPVLSTQVTELADGVFVGMSLNHSVGDGTTFWKFMNAWSEINRRAGGAMSDDLMIREISTPAPVFRRWFVETSPVPIPMPVGKLQHIVRRLERPEVQECFFTFSATSARKLKAKANDEMSGAATSTISSLQAVLAHLWRGVCRARRLPPEQVTFYTVMVGCRGRVNGIPAGYVGNALMFGKAEATAGEIEEKGLGWTAWQLNRAVASFDEAGMRESLERWVREPEFTYMSKLQSGDAGGVALITGSSPRFDVFGNDFGWGRPVAVRSGAGNKIDGKATVFEGPDGAGSMSLEVCIAPDALRRLVADEEFMDAVTLPSS

SEQ ID NO: 42003 - protein, 156 aa, Oryza sativa
MSLSSYLTCNLVTRQRQRGGVEEDEYDGRRQPQTATCCTALKRGVTADGLLAQPRYAPVRTPQSALLLLDPPPPAPMTPTSSSSNSNHDDDDEKKKKQPMLQQQKQVRKCKSTVEEASASQLMECKGGGPPPRLRRSGGVRRDWSFEDLRANNTAA

SEQ ID NO: 42004 - protein, 443 aa, Oryza sativa
MLPSNRFERRPTLLLAAVALLVMSTIASGSVPCNDGFVEYECSDQYPVCCTWKVNNVVAACCPAGATCDLGEGFCLVHHVTNFTVPPPPPPQGGITVAVSEAAAFITFGAIGFIIAVVGCAFLAFKVFIMSQAYQQRRLQAEYERVLQGSSSSEDDDSTAKGDLTGDDNDDAGQCTLCFSHHINCVLLPCAHVCTCRACASKLTQCPLCRTEMKSFRPFKNRLYMKRPAPTGGATASGAAGGSGAPLLINDGREDSTPAPVVVVVASARRAVADTMDPRLGASEELTPTPRLPPATVQATPRQVAPLSARAVVPTPNPAAPQAEEPCPPAVVVVVDAAPSVVATEPTPPPQNANSAEEDDRHVAEADVPTDNTEAHDRNDDHVDSAPAAVVADETHSTTSSHRDDAQPDPIDAAVDDNALNATEGVVSPSEQRPRSPQVDGTA

SEQ ID NO: 42005 - protein, 315 aa, Oryza sativa
MASGSSSSNDAAADLTVLVDDFYFSVLSHGRNDDDDSADGDDGELFPISDEKYASELQLQEVIMSSSVAATTARSSSAPVIFIGECSSSHAASSSSRLTSIPAAAATTLVFCKICMDAVPPSAAHRASRGCDHAFCAACLAGYVGAKIQERIADVRCPEERCLGALDPELCQGILPREVFDRWGAALCEAMVLAAPRAYCPFKDCSAMMLDDAGEAVTESECPSCRRLFCAQCAVPWHAGVDCAAYKKLGKGDRGKEDLLVVEMAKGKKWKRCPKCKYFVEKSQGCLHITCRCGFEFCYGCGGQWGVTHASCSTA

SEQ ID NO: 42006 - protein, 178 aa, Oryza sativa
MRPSPLMKRFSKGPMDSGWGELPACAVVRITAASGLADKDVNHMVFLCHHWANVLLEELTMASGESPSFPPLESSAAATGWRGGMHSAAMSSSRWSTILYDLLFAIALRLKDLAVLRLVCKPWWDAFPGPPFLVCSTHLLEEPLVGESQVLGHFLPCKLQKIFPQIQSVGVDLLMYLG

SEQ ID NO: 42007 - protein, 76 aa, Oryza sativa
MRLLQNCPRRRALRLTSFLPRSSGAAPPRPVAGGADDLSFCGFARPLPRRSETHCLFPPLGNARSSSVYHSDSVCD

SEQ ID NO: 42008 - protein, 338 aa, Oryza sativa
MRPVSSAEEVGALLSRSDSSGRRRRSSPVQSASPRPAGCGCGGPRRQSSFRDDVGHAASETYLVTRLTFSLLQYLGLGYRWMSQLLALTIYAILLMPGFLQVGYYYFFSSQVRRSIVYGEQPRNRLDLYIPKDINRPCPVVAFVTGGAWIIGYKAWGSLLGRRLAERGIIVACIDYRNFPQGTIGDMVSDASQGISYVCNNIASYGGDPNRIYLVGQSAGAHIAACALIEQAVKESSGQSISWSVTQIKAYFGLSGGYNMHSLVDHFHERGLNRSIFFSIMEGEESLSRYSPEIVVKQSSSQTIALLPPIVLMHGTEDYSIPSSARFLLMPSADVHLR

SEQ ID NO: 42009 - protein, 414 aa, Oryza sativa
MCDYFLQRMEGDQAGGDLTDIVRAGGGAMPGSVVVDLPSTAAEWQLPAEPMLFPPPPSLSSTTDGCGAGGAAGADIFGGGGGDLFSGLVDPFSSDYSSGADFLDAMPDAMAKVGFDTAVVAGMQMSSPRSGGIKRRKNQARKVVCIPAPTAAGGRPSGEVVPSDLWAWRKYGQKPIKGSPYPRGYYRCSSSKGCSARKQVERSRTDPNMLVITYTSEHNHPWPTQRNALAGSTRSHHSKNSGGGGGSGSKGSQNDKSQQQPSVKEEQKDQATTATTTTTSTITTTNSASPVVVKEEEAALAGSSEALELERVMDTTAAGVVDHSELMDHVFSESYKPMIPETGQPDDFFADLAELESDPMSLIFSKEYMEAKPSGGDHAQEKAMAKELDPFDMLDWSTTTNSSAGSSFEQGKRG

SEQ ID NO: 42010 - protein, 419 aa, Oryza sativa
MEMEEVVEDAAHGIVIVGGGICGLATALALHRKGISSLVLERSEALRADGVAIGIHANGWRALEHLGVAAVLREATNAITAYRSVWQLQNKTTLLPARKELRCLTRKDLVETLAKNLPAGTIRFGCRVAAVDEDSGSRCPVLTTEDGHTIKAKVLIGCDGANSVVAKYLGLGNPSELPRLAILGLASYPDGHPFGTEFLTIAGDDLAVGRLPINDHLVDFFLSRRRHSTDMARDASAAREYVLEKLQECPADVVDMVRRCDHASSLWTTTKVWYRPPWQVALAAFFQLRRRAAVTVAGDAMHVMGPFIGQGGSSALEDAVVLARSLSSSRATVEGGADDLAGDRGRRHDQPQVDGEMGAAIGRYVRERRARVIRLSLESFTVGTLLRTKSAVVRLVCAVVMALLGTRSRRHADYDCGSL

SEQ ID NO: 42011 - protein, 451 aa, Oryza sativa
MEGGNSSKGAMEGGHRCRRPNVDDDDQIEEGEICYDCHVSGSETDDDEHHRRAVLPPRDNGDGCAEHKRCRLDNAATAPAPSAGPVLTTSNGSAIVAIASAAAAAAAAASTMAREVFACRICRKEFDTRKAVDGHMRVHRQQSIATPKYNAADNSRVTVVAEPRTDLDLSGPHGSSSAPPSPPAPANPPNHNQAVGHQPAAAAPNAGVVVVVEGAPQKSLPYMCKMQGCGRAFPTHQGLGGHAAGHQNRSKAAAAAASEQGSSGAGADGCHGGADSSKHRCRECGMEWKTGFALGGHMRKHQTKETVTVNEKEPNVAGKHISLGPPPLPDLTPAAAEVTSSEPLDQPPLLSMVVGAEVAAPALLALANEAAALPPQDDQAEEEAAAEAAAPAEAAALRPVEAGAEAADVGAAPEEPLLAPIAGMGTVRIFGFLVEKPAPGDGSGGEGSAPA

SEQ ID NO: 42012 - protein, 274 aa, Oryza sativa
MGVHAMSCHGGGGGGGEGALSRQGSVYSLTLNEVESHLGEPLRSMNLDDLLRTVLPAAAAAAETAGRKTVDEVWRDIQGASTGRHHATPMGEMTLEDFLSRAGVAVDGAASAAGAHWLRGHYPPPPPPTTTTLQYVGGSGAVVDGVYNRVDGHGVAGFLSQVGVAGRKRGGGVDGVVEKTVERRQKRMIKNRESAARSRARKQAYTNELENKISRLEEENQRLREHKAVADFSTFPSCVDFLKAFLTQKLEPVMQIVPQPEPKQQLRRTTSASF

SEQ ID NO: 42013 - protein, 172 aa, Oryza sativa
MDMQETASWTRPLPWLGSLSSSLESPGPINTCPTQAGRGASLTKPCCSPDLGGGSLPRSLCADPACAEALCCDFGQTIPGVAGPSRPENSRAGLRPRSCNSACFSVKSTWMSLPLASRQLGALFPGRRRLPVAPPLRVHCQPRAPSQLGARGLQPRWEKTRYPSRHWSHPDP

SEQ ID NO: 42014 - protein, 152 aa, Oryza sativa
MSNGKESNDNIRVFSSKVGDEADETTSSPAKSSEKAFDLQHVVHSGMTGQLEQSELQTSDSFSFSSDLESPNSITNHSSYDAFLDHIGFQLDSLECEIEQYISSQLAEQVDIQKPINAKWQKLSDVLKLVTETRERIAKIVDNTVKEAGSED

SEQ ID NO: 42015 - protein, 135 aa, Oryza sativa
MPVTLLHAEKDPSMGRPARSGAAGAASRASRSRWPSSGRSPISTTSARLSRHVSRLEWCSYGPTKTTHRSDGGRTSSATERSVGGTAMPVTSWSRLMAAVQPVPQKSSTSSAPAPRLRFTYFAASDASLLVCKPT

SEQ ID NO: 42016 - protein, 200 aa, Oryza sativa
MNIVDRLVHKTDEKIEQSTDVLKAIISPVMHEGENATWPPRDPEALKLMEKEISNREKEGQLDEGFLSEVNAQLRQAKQDGDKPGLQAMLQKVLQLYASNFLQKRSYAYKGGEVIVPESFLESVIKAPENEWNKLLLDGLTVGKGNVSPEEFYAVIKKRIERVLIRTEGGSYQQRILVEYLKEIQARAEEVVKVLQGPTI

SEQ ID NO: 42017 - protein, 503 aa, Oryza sativa
MALISSLQRPRKPRCPSHPMLSLSPSLVCLLVLLPFLSLLLLHRSAFPASRSPLLAHLTASSSSRSSASGFAGGDLREIEFSWNHLPFRQSRPPPARLKIAVFSRKWPVASAPGGMERHAHTLHTALAARGHRVHVFTSPPPHTEAAPPRSADGPQLHFLDGDPGVWRCDEAWKLYEAEAENDPFDVIHSESVAVFHRWARGVPNLVVSWHGISLEALHSGIYQDLARGDDERMSPAFNHSLAQSVYRVLSEVRFFRSYAHHVAISDATGEMLRDVYQIPSRRVHVILNGVDEAQFEPDAALGRAFREDLGLPKGADLVFGVSGRLVKDKGHPLLYEAFSKLVLRHPNVYLLVAGKGPWEQRYMDLGRNAKVLGAVPPEKLKAFYNALDVFVDPTLRPQGLDLTLMEAMQCGKPVLATRFPSIKGSIVVDDEFGYMFAPNVESLLEKLEAVVEEGARRAAQRGRACRDYAKTMFAATKMALAYERLFLCVKNDTFCAYPAEFD

SEQ ID NO: 42018 - protein, 183 aa, Oryza sativa
MSFRAKSCNRKIIGARWYADDFNKSQLEAAGEFLSPRDFDGHGTHVASTAAGSVVRNVSFYGLASGIAQGGAPKAHIAVYKACWSIGCSEATIFKAIDDAIHDGVDVLSLSILSPTGHTPAFHAVMKGIPVIYAAGNDGPYTQTVNSVAPWLLTVAASTMDRLFPTVVTLGDGQTLVVFSSVY

SEQ ID NO: 42019 - protein, 340 aa, Oryza sativa
MGKAGRWLRSFLAGKKDGGGRRSGERQQHGGGDATPAVEVAAASTREKKRWSFRRSSASASAAAMGKPAAVTAPSTPEPSVSGLASVSERARDVADLEGQSKHAMAVAAVATAAEGDDVSASAVEVVAAVMIQATYRGYLARKALCALRGLVKLQALIRGNLVRKQATATLRRMQALLVAQARLRAQRMRMLEEEEDDDVHGHGHHHHRRSSPHHPRHRRSYEMDRSGEEQAKIVEVDVGEPPPPHFERQPSRRRGGGVPRSVKMQRSSSHVGVPAAHGYHHHHLYSYGQYPWSVKQLDRSSASLKDSECGSTTSSVLTAATTVGYCRSLVGLDLHRGHY

SEQ ID NO: 42020 - protein, 193 aa, Oryza sativa
MAEIEGCGSVTVARQSGQDGVVRSHASTQAAWNAWRHAGSSRSSASSVNGDRQTAQSGELLGSAASDDAIVNSGSDSISRCFSSPTTSFFPSQTPLRRTGEASAASTLCTSRRVRGSGGGGGGGGDDLDRSLRSRWIETDASRTKARRAAMMRRDGRKDEAASEDPVTGSADGGDGDERVDAMARLSLSLRMV

SEQ ID NO: 42021 - protein, 405 aa, Oryza sativa
MAPVPATAAAAAPAAVVSTHEIRRAQRADGPATVLAIGTANPETCVPQDEYADFYFRVTKSEHLPELKNKLRRICNKSGIEKRFMFVNDDVMEAHPEFADRHLTSLDARVEIVSKVVPELAAAASAKAIAEWGRPATDITHLIFSTYSGVKAPGGDRLLASLLGLRPTVSRTVLSLHGCYGGGRALQLAKELAENNRGARVLVACAESTLIAFYGPEVGCNDTIIGQALFGDGSGAVIVGADPVGAVERPLFEMAFASQATVPDSEGAITMQHKKGGMDYHIGGGVPEMLAGSIERCLADAFGAIGVAARWRDLFWAVHPGGRRILDLIEEALGLDNGAMAASRQVLREYGNMSGTTVIFVLNELRRRFVADGAEGADWGALMAFGPGVTVETILLRVGSGLKGN

SEQ ID NO: 42022 - protein, 595 aa, Oryza sativa
MVCHVFSSFSSSLIRVLEAPLLLPAASASSSSSSSPASRSGGRRRRAAHVRPSPAIYPGRQELASHSSMLPTDFDIKVLIERHEALTDDVQEMLQHQRRRHQKTASGGRERIATVDHLRRLCMDHYFQDEVDDAMDACLLEELAHGGDLLDATLAFRLMREAGHHVSADEVLGRFTDDNGEFRLDYRKDIRGLLSLQDISHMNIGQEASLCKAKEFSTRNLESAINYLEPNLARYVRQSLDHPYHVSLNQYKARHHLSYLQTLPIRCTAMEELALADFQLNKLLHQMEMQEIKRWWMDLGLAQEIPVARDQVQKWFVWMMTAIQGASLSRCRIELTKIVSFVYIVDDIFDLVGTREELSCFTQAIRMWDLAAADSLPSCMRSCFRALHTVTNDIADMVEREHGVNPINHLKKAWAMLFDGFMTETKWLSAGQVPDSEEYLRNGVVTSGVPLVFVHLLFMLGHDVSQNAAEFVDHIPPVISCPAKILRLWDDLGSAKDEAQEGLDGSYKELYLKENPGLAAGEAEEHVRRLIAGEWEELNRECFSASPSRSSPATTFPAGFTQAALNAARMVGVMYGYDGERRLPVLDDYVRMLLF

SEQ ID NO: 42023 - protein, 74 aa, Oryza sativa
MLRTRVTAPPFLASLLSPLSATPPLPHPIVHPARAAEAQTSAAAPASAQLQTNAAAGAGSSGREDSGTAGPPAD

SEQ ID NO: 42024 - protein, 353 aa, Oryza sativa
MPPQPPPAASASASAPDPAVPAWLRGLPRAPEYRPTESEFADPIAFLSRVEREAAAYGICKVIPPHPRPSRRFVFAHLNRSLVSSCDAPAPSPAAASDSSIPPSSSSPPPVSAAVFTTRHQELGNPRRGRPTPQVLKQVWQSGERYTLDQFESKSRAFSKTHLAGLHEPTALAVESLFWKASADRPIYIEYANDVPGSGFAAPVQLQRKKKQKRETAPMDEWEKSSGWRLSNSPWNLQAIARAPGSLTRFMPDDVPGVTSPMVYIGMLFSWFAWYVEDHDLHSLNFLHTGAPKTWYAVPGDRAVELEEVIRVHGYGGNTDRIASLAVLGEKTTLMSPEVLIDNDWCNILVSLW

SEQ ID NO: 42025 - protein, 69 aa, Oryza sativa
MCGRCITGRRIGLRFAGKDQSVPDRQQIAHSQEQAPRRRRADPFPASNSMSAASASAAAAAPYRSGWFA

SEQ ID NO: 42026 - protein, 586 aa, Oryza sativa
MSPSIRMAPAPSSSLATAGHGKTKSGRSSSSAVRPALLAIAVSVMVVLLMAVLFGARWTPSGGHGGGADTSWVSAGARVVLNAVSSQQGADPVVKVAQPHDRLLGGLLSPDFNDTSCLSRYRASLYRRRSLHVLSSHLVSALRRYESLHRLCGPGTSAYERAVARLRSPSSSNTTSDAPSECRYLVWTPHAGLGNRMLSITSAFLYALLTGRVLLFHRSGDDMKDLFCEPFPGATWVLPEKDFPIRGMERFGIRTRESLGNALGRGEGGRDPPPPWMYVHLRHDYTRPGASDRLFFCDDGQDALRRVGWVVLLSDNYFVPGLFLIPRYERELSRMFPRRDAVFHHLGRYLFHPSNTVWGMVMRYHGSYLAKAEERVGVQVRTFSWAPISTDELYGQIVSCAQGENILPRVRESSSGSDNATAIPGSGRQQQQRPARRKAVLVVSLHGEYYERIRDMYYEHGAAGGDAVSVFQPTHLGGQRSEERMHNQKALAEMMLLSFSDVALTSAASTFGYVSHGLAGLRPWVLMVPVRKKAPNPPCRLAATVEPCFHTPPHYDCQARTKGDNGKTVRHVRHCEDLKDGVQLVD

SEQ ID NO: 42027 - protein, 127 aa, Oryza sativa
MRRGEDAAARSGRGWDLVRPEWSIARGGGSRVLDEAGAEGVLGGARHPFDKMPQRADDDDAWKVTVLQFASSLATNSSNGTRASFFLYSHTVRPSSPTAGHRLAHQNSERGEKGLLYFVDPFKTTVL

SEQ ID NO: 42028 - protein, 777 aa, Oryza sativa
MGKSRGSIAFFGTYRPPVPLDIFSCPANPPPQSAKDELLLTDGESYNQNGQPIPAAALKELLTFLGKKNPKLASECGATSEDAEKGRVTGLVFVSERDRGLETLHVALRFVAGGKQVKVLSLGNIYGADTFGGVRMEDSGCVAGGFKVGRTTVGHSLVYVSTKAPVKARRTPWTVVYRTDLADGKTERLTPLGQYDLSPAVSPSGKMVAVANFQQNRWNGEIENLKTDIVVMNVDKRAQGRSDRKVLIKDGGWPTWGSDNVIFFHRGFDTTPPSNTARWGVFRFDIAAGKEERVTDESIDAMTPAAISETQVAVATVREKSKQVLMKVERVVTQYRHIEIFDTASKTSVPITQKTRPEGDHYNPFVLDGGTRVGYHRCRTDKLLKVQNQKSTPTTSIQRRFDKVQPPESHADVGLFRVTGVFPSVSKNGKKLAFVDNEFKAVWLADGRGLRVVYKVRATKSVFSTSWNQNDDLDTLYVCEGPAFSIDKPVQIMRIPNVSREDYENMETFPLTDEEYNCAFPSTNAEGTKLVFRSSRNRVAGGERQHKNLYIIDAEKGEAAGVVPLTDGPWTDTHCSWSPREGCDWIVFSSTGRPEKDIVKGKDEPEKDHGLDPGYFAVYLVNAKDIKKGEVPVPVRVIHSAPTIAGHINHPVFSPDMKSIVFAADLAAVSADPISMPHFTHSVRPYGDIFSVNLRDTTDMAKNRDIQEFHRITHSRYEYSTPTWTGIADDEEDPNAKWKMLESLPNFTPWCPYARGEAGEKEGWHMTGHLTIQKRCC

SEQ ID NO: 42029 - protein, 30 aa, Oryza sativa
MGTTLPRSSSMGAAMLRRGHYSAHYRIQCF

SEQ ID NO: 42030 - protein, 140 aa, Oryza sativa
MPRSLKFNRPGGDFLGEEGDGAAAEAAAGGGDGCRRRRGGGAAGAGGRDRAGVLAAGLRRPPQLLARVQAMVPRLRGAARGVEKGVHGGLEPVWSLRQAAAAAAMPDLLKLDQNPARPVFLRTAAPSIPCPAIFTKAKHL

SEQ ID NO: 42031 - protein, 236 aa, Oryza sativa
MLAEGRQVYLPPPPPSKLPRLSGTDPTDGVVTMAAPSPLVLGLGLGLGGSGSDSSGSDAEASAATVREARPPSALTFMQRQELEQQVLIYRYFAAGAPVPVHLVLPIWKSIAAASSFGPQSFPSLTGLGSLCFDYRSSMEPEPGRCRRTDGKKWRCSRDVVPGHKYCERHVHRGHGRSRKPMEASAAVAPTYLPVRPALHTVATLATSAPSLSHLGFSSASKVLLAHTTTGTTRAT

SEQ ID NO: 42032 - protein, 35 aa, Oryza sativa
MSSLSRRGARRMMMMMPEMPAAEAEVVVIRVGKRW

SEQ ID NO: 42033 - protein, 404 aa, Oryza sativa
MTMAMASMKGENVTVSAAAAPRMKKLASMLCMKGGNGDGSYLNNSQAQALHARRMLHFLEETLDAMMERSSSDKLFTAADLGCSCGSNSLFIVDVIVRRVSEAYESRGRDAPEFQVFFSDLPSNDFNTLFQLLPPLLAPVAGSLEECLAAGEGAATATRPYHAAGVPGTFYGRLFPGESIDVFTSTFSLHWLSQVPEEVGDSASPAYNGGRVFVHRATEAVAAAYKRQFQADLARFLRSRAREMKRGGAMFLACLGRSSGDPADQGGAGLLFGTHFQDAWDDLVQEGVVEGEKRDSFNIPVYAPSLQEFRDVVRADGAFAIDRLELVRGGSPLVVDRPDDAAEVGRAMANSCKAVAGVLVDAHIGERRGAQLFERLERRAARHARELVEKMHFFHVVCSLSLAP

SEQ ID NO: 42034 - protein, 382 aa, Oryza sativa
MADKENSTPASAARLTRSSAAAGAQAKRSAAAGVADGGAPPAKRKRVALSDLPTLSNAVVVAPRQPHHPVVIKPSSKQPEPAAEAAAPSGGGGGSPVSSASTSTASPSSGWDPQYASDIYTYLRSMEVEARRQSAADYIEAVQVDVTANMRAILVDWLVEVADEYKLVADTLYLAVSYLDRYLSAHPLRRNRLQLLGVGAMLIAAKYEEISPPHVEDFCYITDNTYTRQEVVKMESDILKLLEFEMGNPTIKTFLRRFTRSCQEDKKRSSLLLEFMGSYLAELSLLDYGCLRFLPSVVAASVVFVAKLNIDPYTNPWSKKMQKLTGYKVSELKDCILAIHDLQLRKKCSNLTAIRDKYKQHKFKCVSTLLPPLISLRHTSKI

SEQ ID NO: 42035 - protein, 77 aa, Oryza sativa
MHKLRPQPAWDRTCTAAAASGLLWELDMRSELGAFELGKQAEAVECSLDVLLDALTARRLRLGRSITRKQRHNRNCI

SEQ ID NO: 42036 - protein, 433 aa, Oryza sativa
MSPKQTLPLWLSLHSSSTGRGEVLWTESVRGAACRQVASAYTAINSTLKGEMNSKKSKCTCTLTDDLVVDILSRLPLKSVCCFKCVCKSWASLFSDQYFCTKLPRRPAGLLYQDSNNSSIQIAKLPSGNSEIGTSLSFMPHHENLKLVDCSNGLILFTHGSKSDSPDSSHFIVCNPATQEWIALPDTCPRVNGSDYIAMLAFNPSSSCHFFVFNFQKRRSPHSGVFVITEVEIFSSEDFTWIADDAFETEIMMISMPHVLLHGVLYLRTVEHSVFAIETPHMYKPWIHRWTFELPGDSCPMNNYIWGCLGESSGILHYMQPNYDGCWLNVWRLESRHQQWSMTHSLSMIDAFGRGTLVHGDPFSVDWSADYGMLSFDLEREIVFLHDRVSSKVLSYSIRTGKLCEMGDLPRNSLYYVPYWRKFPVVEEDQYWL

SEQ ID NO: 42037 - protein, 88 aa, Oryza sativa
MASSRTRGSRRRTLPWTASPPSRRAGSSCSPTSRTRRKRTRFTRRLSASSASPPRRRRGRTPAVAPEPTWRGPSPRLSCSPSCPGTTA

SEQ ID NO: 42038 - protein, 384 aa, Oryza sativa
MAAMASSRGWGDLPPDLLALIADGLTIKAYTRVRAVCTAWRAAIPAASPSLLVRLDWNRHDAWFLSPRISTALHERLATLLPDRSVCLGSGHGWVAVHDPIFYELQFGLVDPLTGVDIPFSSFPHFAEHKLRVSKVVFAPHPTPTDFTAAAITGHDEGRVITYTAQGSSGWADAGCPRLGDRDSIADVVYHEERGGGGERAVYCLATSGDVHVLRLHDAGGAFEPLFDRGNAAFDAAAAFAPPYDTIRHCTNAKNLVVCDDGDMYQIWRNNTCTRMGPLPGGGEYRVEYNQMFVLRYHPRRRPCWVPVEDLGGRSVFVGKNNSVALRVDGGGGGGGVPGLRANCVYWTDICPARAKVFDMVSGKSTLCFHGVEDHRAICWYFLA

SEQ ID NO: 42039 - protein, 375 aa, Oryza sativa
MAAPEGQNKFAGVRFLPKDLELLAILDAKLRGSPLGPVEAIFHDTQILDFHPYKLYGIHRLDRSISLSLSLCRSPSSSPATEMYAEDEEEEGYIYFFSTMQFRCRKIVERAAQGGRWKVNNCETLEVGGVAVGRKFTMNFYEHIGGDNDLIWTNWGMQEFARIIGPNKELADLALYRLYKKKITRGTGEEKPEDIAAASDGDTESSMNKRRRVEASAAAMALPPPPPSPGLPGTMMFMAADQANVASTSQEWHGQFANGAAAAPSPSGCWPWAPPPTPSAVEPFSFWASASAATPPAAANYHPSPQPQPLPPQGGEYYSRHGAFSVAPVPASACSTPSPEAATSCLLATTSPLPAAGTEGSDSQQQEPPCELMEF

SEQ ID NO: 42040 - protein, 210 aa, Oryza sativa
MRGPSTTTMATFKQSFLKNLLSSLKSSSKNKAAMSTLSERKRAIKSSADIAMATARTGIAGAARWPHAILASSSSSSSSSSSSSSSSSMPRTTFPCKMMQGKVRRRCKSIVRRRTPLMSSSSEVARRLVKKRDKVLRRMIPGGELIADEISLLHEAMDYVVHLHAQVDVLRRVSRAAVARRSSASSSSSGGLAQLKERTVQISGETENPC

SEQ ID NO: 42041 - protein, 58 aa, Oryza sativa
MLGIVSSLFESFQVHAMTCFHEGMGLATLSHDMNSLSHDYCNMLIRLLVFRHNGLIKY

SEQ ID NO: 42042 - protein, 99 aa, Oryza sativa
MSSSWGPSSITSPDCMTTIMSALRIVDRRCAIMIVVRPIDAMSRASCTMRSDSVSNALVASSRSRILGDFRIALAIAILCFCPPDIWTPRSPTCCFISN

SEQ ID NO: 42043 - protein, 76 aa, Oryza sativa
MSFLNTFSTMKEGSPLSVFRRPMTAVIVSSSIISASVKAKSIYMSVNTVSAVHPLSPIVSKIYNGERNQHTWVPSS

SEQ ID NO: 42044 - protein, 136 aa, Oryza sativa
MFIPELDNRSDPQEPSRNPGIWQCTICEHGNDAKKKSCEQCGVLRYFSLYFNNALEVDGRAKRRDKHYAVSVLARTLFSPSSAKSKDVVLSGGFKASRNATGSTRATLDALHKTYMTRKERHINIGTLHLYIKRFW

SEQ ID NO: 42045 - protein, 416 aa, Oryza sativa
MSRVGSWGSMAFYSSSSSSRSQPVSAAEGKNGGKKEKRRSSISRSITCAGSICSTKESSVSSRGRGRRRRSGGGGGGDGGGGGSTSSRSLMGPGYHGDSAAAVSASSSFNSVMTAATSATATTTTTTTSSSATSPPSALSSPLSSIGGSFRAMQIRKLSGCYLHCHSVLDPRTLAAVVFSCPDCDEVFVKPDSLELHRSTRHAVSELGADDTSRNIVEIIFQSSWLKKNAPVCRIERILKVQSSDKTIKRFEQHKEAVKEKARSAGDEAGRNPRCVADGNELLRFHCTTFACSLGLAGGTALCCASSSPPPLHCKLCSIIKDGFRVDGNGRITTMATSGRAHDTAEVSPDGEKRAMLVCRVVAGRVKKLHSSNSSEDHDCDSVSPCSEGVYSDLDELFVFSPRAILPCFVVIYSGY

SEQ ID NO: 42046 - protein, 57 aa, Oryza sativa
MHPVFNTNESRYMQLESDMKCDLNASSWFHNNSSIEGRQPVMLPEYPPGLLHSRGEL

SEQ ID NO: 42047 - protein, 335 aa, Oryza sativa
MLQFGRRLAYHGLRPTLVTTRYVLSTTPPPGDPFRVAAISDGFDDDAGCMAAPPDYGEYHRSLEAHGARTLAELLVSEARAGRPARVLVYDPHLPWARRVARDDGVGAAAFMPQPCAVDLIYGEVCAGRLALPVTPADVSGLYTRGALGVELGHDDLPPFVATPELTPAFCEQSVAQFAGLEDADDVLVNSFSDLEPKEAAYMEATWRAKTVGPLLPSFYIGDGPLPSNTAYGFNLFTSTVPCMEWLDKQPPRSVVFVSYGTFSSYDAAKLEEVGNGLCNSGKPFLWVVRSNEEHKLSRELREKCGKRGLIVPFCPQLEVLAHKATGMGTNKNSN

SEQ ID NO: 42048 - protein, 446 aa, Oryza sativa
MREMSTLSHQHHHVLVLQLILLLPFLHLVVPGTPAAARKFSDVLASGRNVSDGDVLVSPGGSFTLGFFSPAATRRRYLGIWFSVSPDAAVHWVANRDHALNDTSGALMLTDAGVLLLLDGSGKVVWSSSATALPSATTSAAARLLDSGNLVVQGQGSGTALWQSFDYPTNTLLPGMKIGKNRWTGAEWYLLSWRSPADPSPGSYRYVTDGDEALPENVVLDGNGTEVYRTGVWNGRRFNGVPEMASFADMFSFQLTVSPGEVTYGYVAKAGAPFSRVVVTDDGVVRRLVWDAATRAWKTFFQAPGDSCDSYAKCGAFGLCDSNAGATSICRCVKGFSPASPAEWSMREYSGGCRRDVALDCGTDGFAVLRGVKLPDTRNASVDMGVKLDECRARCVANCSCVAYAAADLSGGGCIMWTKPFVDLRFIDNGQDIYQRLAKSEIGNLT

SEQ ID NO: 42049 - protein, 31 aa, Oryza sativa
MTCLPPFSKIHLNSKCSNCGVLLLNSSPTCT

SEQ ID NO: 42050 - protein, 214 aa, Oryza sativa
MGGFQFLEAPSDRSDSSVSSLVPTSPAPARLMARDTTKSREPRVNPQVRLAQAKRFAEGALEHYNRRKKDKFELVDAVPCIGIPEPHCIYTHINFTARSSKKGSQELLFFAELYHCQRRQEVFTARLSKKGSRGEPSNAGRSLVQRGFVVTCCEPLGPDSMVGRKLLERDDTKVVRKNTDFTYCYGCPQMISHPKGEMYIAGHCNIPHVYEGVR

SEQ ID NO: 42051 - protein, 555 aa, Oryza sativa
MNCRHLALRLRHLRRLLAVAPLSSLAAAHSANRSSPRLNPTSVPPPPRQLHLPTLQARRLCSTTHVVLPTNLQDERFAALSDRIYDAVIETAAGSSEGTEAALDALGAELTTPLVADVLHRLRYDEKLAFRFFVWASHQDGYEHEAATYNDVIDILSGTRYKARQFGVLCDVLDHMKRRRTRSVPVDDLLGILRAYTEKHLTHLRKLAKKRRVRMRTPPETDALNVLLDAFCKCGMVREAEVVFSRVKRKLLGNAETYSILFFGWCRARDPKRAMKVLEEMIQMKHTPENFTYNAAIDSFCSAGLVSEARDLFEFMRTEGSTISSPTAKTYSIMIAALAKAGQMEECFELISEMRKCGCMPDVSTYKDLIEGMLLVDKLDAAYCVLDEMAKAGFPPDIVTYNCFLKVLCGLQKADDALELCERMIEAHCEPSVHTYNMLMVMFFEMREPDRAINIWIEMDKRGCHRAVDTYETMIDGLFDSGRTEDATALLDEVINRGMKLSYKKFDAIMLRLSAVGNLGAIHRLSEHMRRFYNVAMSRRFAITQKKKSIGLRRK

SEQ ID NO: 42052 - protein, 261 aa, Oryza sativa
MVDAVTARVDALGLAHKLTVIRADAVEAEFPEFDVCVANIPYGISSPLIAKLLFGPYRFRAATLLLQKEFARRLVAAPGDSEYNRLAANVRMVADARLLMDVSKRDFVPMPKVDSSLVEIRPRAAEPNVDLAEWLAFTRSCFGQKNKTLGAIFKQKRKVLELFRRSRCAEERCDGNANAGGGSRLIALGGGDDDGDMSDGDSNEGHDGAPSFSEEEVAVFKAKITGALESCELAGKRPSKLSNDELLRLLKLLNEQGVRFQ

SEQ ID NO: 42053 - protein, 358 aa, Oryza sativa
MRLVVERVQVREQPVPHAERVPSRLGHGLPHIQLLPRRREVGMVPGERVERAELDPPVAELLRRLRVEPADVGADHRHAEDAEVEHGGDGVAEILPGALVVAGPVRGVGARPDERRARQDERPLALEPLQRLVRRDGLRESIQAVRIVLQDAIVVRRAGGDGVEAEPRRLAGGVDLVRRLVPPGVRQVLAVQAAHPWRRRVGQRAQVRRRDLAFPGAEVGCLVHVDPEAIHGHKVMKPPHLVDPPRDAIGVEEVREVDGAGPHLRQVWLPVQLDEDVALHAALVHAIGVVHGDAGVDEDNVLHALCMDLVKEFQQLGTRVVHGIKGEILRGVHVIVVVPDHVEGDLRVPVALHDALDH

SEQ ID NO: 42054 - protein, 445 aa, Oryza sativa
MSLLALPLLAFLSIFLTPTTAVSSSTLQLARSHSVTPNAGAPLSAWAASVAAQSAADTARIVSMLTSGAGPLTTRAKPKPKNRANPPVPIAPGRQILSIPNYIARAGLGTPAQTLLVAIDPSNDAAWVPCSACAGCAASSPSFSPTQSSTYRTVPCGSPQCAQVPSPSCPAGVGSSCGFNLTYAASTFQAVLGQDSLALENNVVVSYTFGCLRVVSGNSVPPQGLIGFGRGPLSFLSQTKDTYGSVFSYCLPNYRSSNFSGTLKLGPIGQPKRIKTTPLLYNPHRPSLYYVNMIGIRVGSKVVQVPQSALAFNPVTGSGTIIDAGTMFTRLAAPVYAAVRDAFRGRVRTPVAPPLGGFDTCYNVTVSVPTVTFMFAGAVAVTLPEENVMIHSSSGGVACLAMAAGPSDGVNAALNVLASMQQQNQRVLFDVANGRVGFSRELCTA

SEQ ID NO: 42055 - protein, 32 aa, Oryza sativa
MPPLPAPPSSAFNLARSPSRAHSQRLKECRRI

SEQ ID NO: 42056 - protein, 55 aa, Oryza sativa
MGHWNRGGGSMAVVLVARRPPPSSSHHRARLRPRAALPRVRERRAGGEKTGEGER

SEQ ID NO: 42057 - protein, 94 aa, Oryza sativa
MDLWYCQPLQKNATEIAKNKGVSVWKKLHLLYSFFFVRRVVAPILTFLFYRVVIPLSVMVPEISIPVWGMVCIPTAITIMNAIRNPGSLHLMPF

SEQ ID NO: 42058 - protein, 79 aa, Oryza sativa
MPSAGWFVELRPMAKEKAVVKLVVVVLPPPTSSSQSRTSCRCATRPALQTPRFVRLIRSPAWAASPMNTKFFAASAEKS

SEQ ID NO: 42059 - protein, 229 aa, Oryza sativa
MGNPMKQTIPNTCTILACAVCIEALHRLEWERLHGPGTFLCRAAAPRKLRRACIRDDILHPEEGVESKKMVLLLKKIKGMGGIRTTNAPPPAPFLLPLKSWRMYRQKGSLTRERAVHLLRTGGPYIGIIRVSLLYHFIDASVNDELVYRWVPPELRTAADVWLIDALVAGRATDNDICDLISETNGNHVIVCYGYRHRGGELQILILDNHAQTGPSRWIGFEERRKCVY

SEQ ID NO: 42060 - protein, 117 aa, Oryza sativa
MELALEGLAAGVEEERDSVDGEVGQGDNGKVSLPDLASATRSGLLGVRHAHEPPLRCGCVDREARTWRRCSCHIQPSPIWIRPPRCGRATPKPPTVVCGCVEAATRTWRWQGEAGRV

SEQ ID NO: 42061 - protein, 357 aa, Oryza sativa
MEEQPIKNAVHIGETPVTGDWACPDGGNTEVAAFLDKAGAEAEAEAEAEAESSGSHPLGEIAGSAGHLLLLKLWQREESRLGRRACALEALMDAARRDAFYLCAAFLAFHGLSLALLFAASVSASASAAVVSPPAEQRAACCSLAGGGGCRRPCRWSRPSRSRRPCSSGSAPGVRTATRALARCVQELRMKGAAFGLSKEPQYGGDEGQVRQRRGRRCVGPALVVLPEHRRRRHHVLRQVHLVLVGRRLRVEMALPSASSESDFMHVSKKTRCSPRLNKGSASPRLDKSNTAHSNKKTCAIKPTVHRNGPMGKSKCACKKELKLDNENADYMKEYRRELCKRLLYHCFNDLHPKRRF

SEQ ID NO: 42062 - protein, 230 aa, Oryza sativa
MHLMNVFLVDAPTTMSVMALLVAYSTIALEMSLPSKITSFNCICSLQSLVHADSWSITILLWLDMDELENAAPGEEPVHRPLDRLLAVLVPVDGDHRGAVPGLAVPAAVRRRRGGEGRQVHAPRTSPAKRSSESEKERKRQKKKKDSFASPPLPLLPSSSLSSGFLIKPTKNCRRFRCFFFFIFFGAKFRCCSVVNGRWLTYVFVALVSPLVIDCRCCSLIYFCMSLCAS

SEQ ID NO: 42063 - protein, 435 aa, Oryza sativa
MWDHCTSAPPPASLYAPKTAHIHRQLFPRAEVASSTAGRASRAKPASSTGRAPRANPASLHRPRLSRQTGLHLRRSRLSRRAGLCCHRLRLSVPSRPPTPPLNTVRRRMRLSAMPPLAVRDCHASPYRGDGRHHHSHCCPSIPAAISPSSRPFSPSSSSNGTRRRPPTVVARAAVAASSSPPSPRQTDSSGVGSAAGAARFATPTPSPRHLRRHHSSRCYPSIPAAILSSSRTLSLSSSFDDTRRRRPTVVAHAAVTANSSPPLSRPPDLRALDPPSARPGSPHRRHPLAALAVVAIPATRRRRRSPSRQIQAQIWRFPPPPPPTPRRRCHHHQTPPPHRSTPPPAAPPPDPAGGTDLASSAALEQVPLPCPSARTKPRRRRPCGRAALPAAARAVARQRRRKGETSAGEVVASRSPVGGGATREETGQYFVLVF

SEQ ID NO: 42064 - protein, 279 aa, Oryza sativa
MDGGGTPDGDPVPDMDMLMLSSALDGLDSYTDLVVGSSVADSIFSALTCFPPSQERLLHVSTPVGSNSRQDDSDVSITKEGTTTRRGDCAAGLASGEPVAAGIGSVPKPFDGVTLTERMLRALAMLKEASGGEAILVQVWMPVRNGEQHVLTTSDQPFLLDQKLTGYREVSRQFTFSAEEGPGLFPGLPGRVFMSGMPEWTSNVMYYHGSEYLRVDYARRHEVRGSLAMPVFNSSGGSCCAVLEVVMTREKDNFCLEMVNVSNALQGTHDLNTQHRKND

SEQ ID NO: 42065 - protein, 148 aa, Oryza sativa
MGSRRRRLQSPHRQEEVRAAAVAGDGDDVGEQALDGLDDPGGADEPLVELRRRRLHALHVLPVVPRRDAADGVADALAGPVDGHDGEHEAPAQLAGQTPEPAAGEGGAAAGFSKRRVVVLLLAIHLGSDFLPGVSWGSTAEARRNSHG

SEQ ID NO: 42066 - protein, 51 aa, Oryza sativa
MVYYFGIYTMLFYPNLFLDVPMPNTSYGFLILYLGHPEYSYLVVPVRSYYG

SEQ ID NO: 42067 - protein, 437 aa, Oryza sativa
MEDGDGDEGAAKRTKLSAAAAAAAAGEDRLSALPDDLLVQVLLRIGGTTAAARTSVLSRRWRSLWCLLPELDFVPEADGGSIRAALAAHEPPSLRHLLVAAQDAAPHGMAEWLPVAARRLAGDLLLFNMAPKRDAKDDDDEEGKDGSPFLELPCFGSATKLSLDLGFLPLAVPVSGVFARLTDLSLDSVRFHGPCEFGDAASSRRFPSLKNLNIRNTQGLSNFIIHSDSLLQLDLRSVRGLKQLNVVAPALQVLSVFFCFADTQARSQPVADIAAPQLETLQWEDAFDPSSVEFGEMASLRCLGTYFFLVYGLEDFKNNRDCLRLLKRFRRDAISRLTLTLAFLPKDLCDFEYLMENMTMLPDIVSLNLNVLANGHAIGPSLFHVLRMCTSVRRLKLVTHISLDLEVKAETIVSLFIYYRLTEEVQNAICIFIFCHT

SEQ ID NO: 42068 - protein, 46 aa, Oryza sativa
MIFNTFKHCYMRLWKGILNIILCGLLFKHLYKLRNPVKMGIFECYI

SEQ ID NO: 42069 - protein, 304 aa, Oryza sativa
MMMLRLVGAEARRRAATGAAGGERWLSAAAAAPTKGRLEGKIAIITGGASGLGKATAREFIREGAAAVFIADVNSDLGAEAAAELGPRAHFVRCDVADEGSVAAAVDGAVASHGRLDVMFNNAGVAGPLAGATEVASLDLAALDAVIAVNLRGTLAGIKHAARVMRPRGSGSILCTASVSGVMGGLGTYPYSVSKFAVAGAVRAAAAELSRHGVRVNCVSPFAVATPMVVAQFAQMLGGADEARVAAVVRGLGELRGAACEAEDVARAAAYLASDDAKYVSGHNLVVDGGFTSYKHLPIPQPHD

SEQ ID NO: 42070 - protein, 376 aa, Oryza sativa
MSTPGAAWRRNGSRTLDAAATAPGRTLGVGAAAAAPSFGRGSFGHAVGLPPPPRSRGHGRGSVAAATTVPAFSIDGSVGGDFTSSIGPHASSQPWFDAAGGDPSSPGSWDQDVRPPGGFMSYFGNEAQNSHLVGAVIHMSPLNQAHNGSSPPEVEILHGNDSVRTEKRIMWTPDEDVRVMSAWLEHSTDFTCGADKGGVQYWGEVVETYNKTTPPLRRRNAKQCKDRWNKINKWTDLFECAYAKARRVFTSGYSAEMWLDAAHKFYVDDNKECKDVVGPYMLTEVWKICRDVPKWKTYNENLKNARKRKAFHLEGESEENEDTCDQMPQRPIGQKAAKKAALAAKNGKLKGSSSSDDGHSKDSPIELDKFDRYSKF

SEQ ID NO: 42071 - protein, 383 aa, Oryza sativa
MASSPPFRLPLAVVLLLAIICVLLASPSCHADDLTATMTNEHEKEHQLMMMMMDRFHRWMATHNRSYASADEKLRRFEVYRSNMEFIEATNRNGSLTFKLGETPFTDLTHEEFLATYTGDVRLPPERRGMQDDSDEEDAVITTSAGYVAGAGAGRRTVAVPESVDWRKEGAVTPAKHQGQCAACWAFAAVAAIESLHKIKGGDLISLSEQELVDCDDTGEATCSKGYSDDAFLWVSKNKGIASDLIYPYVGHKESCKKQLLGVHNATVRGVVTLPENREDLIMAAVARQPVAVVFDAGDPLFQNYRGNGVYKGGTGCSTNVNHALTIVGYGTNHPDTGENYWIAKNSYGNLWGDNGFVYLAKDTADRTGVCGLAIWPTFPTIR

SEQ ID NO: 42072 - protein, 174 aa, Oryza sativa; identical to SEQ ID NO: 35346

SEQ ID NO: 42073 - protein, 117 aa, Oryza sativa
MAANCIVLLACNNLRFFFLFVAPLNDDGDIVVGVCGFCWLRACQRVCCLGRRRVEEEADRRAVVDGDAPALAPPCPDGELDEPLRRLLPLRRRRHDLHRLLVRHHVPHLPRRRRRTS

SEQ ID NO: 42074 - protein, 158 aa, Oryza sativa
MEIKMKGIFKGLKIISQIFALQKQQEMEIGCPTDVRHVSHIGVGTSDSCPSWMSEFRGLEELSAGSMGSFAQSRKTSWASQDFDKPPRATLPTEVCTDKSGQEAASCCHDIPRGPKNPRRKKAARASSASSFLSRSRSSSFVTACGDFSELRGGLRVA

SEQ ID NO: 42075 - protein, 139 aa, Oryza sativa
MRYISDGVPNRGSAGMLLNPRSPCLPNPLSPSPRFRLRPPPRGHRLLLQRPTLASVQDGALRLRLRGGWWRCGRRREAGRVQAEAAREVHGGGAAAAAGTGAAAPAVAGVVAVAVLFLRPHPLLFAPGLRRGRKARLFS

SEQ ID NO: 42076 - protein, 240 aa, Oryza sativa
MRVTETGSFQYLLEYLDYPDEEKTWTEVFEKNPAYGKRNSNVVRERECMLRPSYPELYWGDQVPEQFPKSNVIVSVCDTPKVGDLVEWLSEGSYWTAKVTKLLSEDMVKVQLLKPPIGEGGSYTAYCKDIRPALDWCLEKGWTVPLSQANGRCWHAARLIHHKSDTEMSGSDEESTSDDDEEEAQKSLKRASNSSQEAPGSNLEITSDTTSSSRINSQTATIATTKGISRSSPVSISTGP

SEQ ID NO: 42077 - protein, 318 aa, Oryza sativa
MLLRPRLSLLRAVAPRPVPPPPRASLPVRRTLSSPAGAARTASAGDAPPPAQRTGLKGGRKSAPPPPPPRGSSVNPALFFPPGVDRDAAVAAEMVIPASNIVVGPYAGDSRVKEAEFVKSSARARDCPKDDRPEFAVLGRSNVGKSSLINALIRRKEAALTSKKPGKTQTINHFLVNKSWYLVDLPGYGFAAASQSARTDWSSFTKGYFLNRDTLVGVLLLVDASIPPQKIDIDCANWLGRNNIGLTYVFTKCDKSKKGKGGRPEENIKEFQETISSLYPEPPPWIMTSSVTGLGRDGLLLHMSQLRNYWDNEATMSP

SEQ ID NO: 42078 - protein, 263 aa, Oryza sativa
MREGGERTVILVLHAADLVGQRRKEDCRAQRGSSPAADGEKGAPLSLAAQPASVVPHHPTRVHRPSPSSSAPTARSTHSVPRRARSRRFNAAATEWMGIRPEEEEGRRSSCRAASICGGQKRRRRGGARAAPPTSTVELLICRWRRRRMGRPVSALLLRPSVPSSPSAEPLHAAAIVRRAAQRGISPAAQEEEGEARRPENRGGVRAEMEKRAGGLGGDQTEDMGERNDFFLCGSYLRLHSNVRLVINIILLVSSSYVAALAP

SEQ ID NO: 42079 - protein, 155 aa, Oryza sativa
MSSSPRAPIPTPSPSPSPTAPRHGTDPSRPRRRALHRLRGLAPARRGAMRVTVAVGFAAAPRSCVRFPRGAAPRLISSRASSSSPPPPSQRPIPHSHRDTAKLRQGRGGVLATVAVALLPRHAAAYEAGGSAAVGVNWGTILPHTHAPRWQSWCG

SEQ ID NO: 42080 - protein, 447 aa, Oryza sativa
MAAWSELKQLPRVGEPSSSSCPPDHDDDDQEQIIVARTLASLNQTNGGKTPQQKEKQQSSNRPSSRRPSYPKSNASFYGRLHLQKHAYPSVPPEQAMYHMWHQVQATQQKPHFPMVPTMGSTGFPPPPTVLHMYPPPRGQFTMPSSQDGLGLIPCYPEASPVLPRYFSPYPASFVPRRPLPVNVHKIHEKRLVGADMVELPDAAVFSRYTAPDFSGTSENAVQDNKKEEYTESSPASEQESKSHTASSSATRSPSQQLESNQDIEIMGGLRLESKKPAEQPPESSPSRVNPVLLCETGQRHHYSFVRHGDPVHRNSPQISVATSPSPIRRGDPAHINIPQISVATPPECRSPRAQAPPRFGTRMPVNLPSSLYQQRPPWLAASVTIRTTIPVCSARPNVVNSSAGAAQPAVQILSASPRKEEPEARTNTSDTSNAATASSELNKLHI

SEQ ID NO: 42081 - protein, 185 aa, Oryza sativa
MENVFVIDQFTNPANPDAHFRWTGPEIWKDTAGKVDIFVAASGSGGTVTGVGRYLKMKNPSIKLICVEPAESAVISGGEPAFHNIQGIGPGFIPEILDRSQIDEIVTVTTQEAMDMARRLAREEGLLVGISSGANAAAILKVAAREENKGKMIVTMFSSGGERYLNSELFAQVKEECININKAFC

SEQ ID NO: 42082 - protein, 130 aa, Oryza sativa
MADPSFNFRVGLALRRALPYYNDAGPQSEFFEAATRGNVRRLRELASGKDAEGKAWLADMGFSGIGPLQAAARLGEVESCRCMVEELGFDINAGSQLGITALAAAALDGRLAAARYLLDHGADPNKKCNA

SEQ ID NO: 42083 - protein, 394 aa, Oryza sativa
MDTQLYTEFSFCNTLQISRRQAAWTCPENSGGAGARAHDAGLPASSRSVYTVWSPPWQSDPMTTTRPSGMTETAAAVRASSGTGATGRHAAGAEEMAPWRATRCPSRSMYMRSPASGAALQVLGHAPSSTKPSWTADQVDVAGSNHSAEPTNRPCAGVGYPPTTRNLPSTQSPRGSSRSSAMSGSAAHASASGSYASADRRAFFSSSWPPATNTFPPTAAHAKNDRRGPGMAAPRRHAPVRKSYTSTESVGAHVSGSQPPTTTSRFLPSTPPSTAATWQNSGKLPLAPPTSGSGVHLPSAGSNSTIRYEFPGTPPADDCLSAAGPASASSRRACTSASAGRARPSAFLRRLYAGDSTSAFHWREMRRTAGSWSNPTRMRHSLATSSGNPGISSL

SEQ ID NO: 42084 - protein, 389 aa, Oryza sativa
MRRFSPAAAALLLRRSLAAAAAAASPALRSGPRQLVRASLLDESLSTQTSSAASTMAVQYHQWSSSADGDDDEVLEAFNRDCCTDAGAGVLDDSASTAYVEKLCTSGNLPDAVQILRHLHDRKIHVGLGTFNLVLEQTGEVNNFVLFAKVFRYLLLSKIAPDLTSYTNVAKALQKLDDYELILKFVRQVMEITHDRDPTVMNRIVFTTAKYGQIDKCLIIFEELKKDQRGLDVVTFNTILDMLGKAGRVDQMLQEVKLMDELGHSPDIVTYNTVINCLRRLGRLDQCKIFAREMVERGIDPDLRTYTALIDIFGRAGHITEALEMFDQMKRSHQPSIYVYRALISDLKKAGQFELAQKLSEEMKTSASELLGPEDFKHKFKGRKINKNK

SEQ ID NO: 42085 - protein, 115 aa, Oryza sativa
MLSCSCSRTIEFTRAQRLRYLRYIRGALGAPIGNYVAPLRQFSFVCTSAQGTCSHMAGASSWMFAPCSHLSSQNSIVFPSPKWQIVEATTRLQTCLETARQVPLVITLYLNKPST

SEQ ID NO: 42086 - protein, 591 aa, Oryza sativa
MKRHNAAEVPVPVSYGGERDEKTGSKVDKMGGGAARRWRSGGCCSRLWLVLVVFATVTMLLRHRYDSGLGHGAAAVVRIEPVHRKVKPADRGGARPSFSDSGSAKPVTVDHKSATTDSSTGTESDGGGEPSSASSSLPAAAHPFSRALAAAGDKGDRCGGRYVYVQELPPRFNTDMVKNCVALFPWKDMCKFTANGGFGPPMSGGGGMFQETGWYNSDKYTVDIIFHERMRRYECLTDDPSLAAAVYVPFFAGLEVWRHLWGFNATARDAMALEVVDIITSRPEWRAMGGRDHFFTAGLITWDFRRLADGDAGWGSKLFSLPAIKNMTALVVEASPWHLNDAAIPFPTAFHPASDEAVFVWQDKVRRLERPWLFSFAGAARPGSAKSIRSELITQCRASSACSLMECRDGPSNKCGSAASYMRLFQSSTFCLQPQGDSYTRKSAFDAMLAGCIPVFFHPGTAYVQYTWHLPRNHADYSVYISEDDVRRNASIEERLRRIAPAAVERMRETVISLIPTVVYAQPSSRLDTMKDAFDVAVDAIVDKVTRLRRDIVDGRGEEEKLEMYSWKYPLLREGQKVEDPHEWDSLFAFA

SEQ ID NO: 42087 - protein, 399 aa, Oryza sativa
MEVAAASLSLFRTPQAHHLAELRVDGADQSPVAFSDPCAVGRKRRCLFPPFSPRKRMLLELPPFASTPTAPAPGSASPGALSSGGDRSTRTGGSGGGGGGGGGSSFSAMAERVLAPPSVSSGSGAAFAFAFLAASPKQQQPLTPMGSTASCGGAGSGFLPPDPSSSLTPMGSKSNGIGASAFLASPRPATRSANDGGGFAFFRSPEPERTAGDTTRSGAPFSAPPNLVSGPAGSPASAAAKEPSQIIGDGGLVAPPYTISSSPARKSRSSTLWSRRLAHAAAEGRTSPQPPRDEQLQITLPPPPQKVTKTVLAPATGEPSRGATLSSSAATTCCTFLTSPAKATNQEREARASSRMGGGEGATTAAAAAAAVACAGGEVVVSVTCSCGAREEFCFDHCH

SEQ ID NO: 42088 - protein, 600 aa, Oryza sativa
MLVRRLELLGEVAKLASSLHLPEDVSYTCETAAYFWLLHVYARWEQFLAACAQNQDKPSFVKDRFPFSEFFSDTPQPTFTGESFEKDMHAAKGCFKHLLTIFQELEECRAFELLKSTAERANYLMTKQAKIVAMTCTHAALKRRDFLQLGFKYDNLLMEESAQILEIETFIPMLLQRQEDGYARLKRCILIGDHHQLPPVVKNMAFQKYSHMDQSLFTRFVRLGVPYIELNAQGRARPSIAELYNWRYRELGDLPYVREEAIFHKANSGFSYDYQLVDVPDFRGRGESAPSPWFYQNEGEAEFIVSVYIYMRLIGYPANKISILTTYNGQKLLIRDVINRRCKPWNIEPPSKVTTVDKFQGQQNDFILLSLVRTRFVGHLRDVRRLIVAMSRARLGLYVFCRRSLFEQCYELQPTFQLLLQRPDKLGLNLEECTPFTERPLEETGNIHYVAGIEDIGHLVNFRLEHLRQMQYMQYYAPHANVPLSAVPENNADATENGNAGNGMHKANDVMAEENGDAVMRNKMEEDTIDTMQEENKMDGKNPEANDMAMEEKTVDGDDDPKNKMEEGNTEAKNKMEEGNTEAKDKMEEENDVAKNNMEE

SEQ ID NO: 42089 - protein, 180 aa, Oryza sativa
MLNYLNPIGAPVLSRRRGDGGGGGGRVLPAVVFPPDRPQRLRAPPHRRPLLPRRRDALLGELHHLLHRRHRRRAPPDPGVHGHHHLPSPEPLQRLQSHRIAVAAALDGRAAGDELDEEDAEGVDVALVGELVRAQVLRVHVPGGALPLRVLRLRALAAGHPRQPDAGQLRRQRVRQEHVR

SEQ ID NO: 42090 - protein, 140 aa, Oryza sativa
MGAASPRARSRFQWQTPRGHHRLLLVERNHQSSSPTRNPHRLLLQPPSRLHLTLLAQGLHLVELRPGTKPPRSRSTPASPIRAFSSCAYATSWRRTRELLRLGVARRVFDEMPKRTVARFNALFAGLAQRGEADEARRES

SEQ ID NO: 42091 - protein, 211 aa, Oryza sativa
MAVDNILASQNVGTQLRAYPPPIKYFEALLRQEHAELLEYVDDVDRVVALLKPLPPPKTVRYPVLFERAWGFGRLFPCDVTDESPQYHAYLQEFYRRNCSAPPSVAAAISLCLKNERILRSEWQNRGVQVHPYNLSLSDNILECASNLVDKMNAESATVAYAALVCVQTLHFHLQHLQFVVLKLLITSFAVVCASFAKRWLIPSVSPRRLS

SEQ ID NO: 42092 - protein, 529 aa, Oryza sativa
MAVIEIMKIVEELLLPALAADLTSRLVSLLIRSYRSRATTGVVEDDDLEKLQLLLLELHAAVDEGQGRHVTSQRLLLWLRELTQSMYRGYYVLDTFRYRSVSIQAQQQDDARGAAAKRLRTSAGAAVRLVLGSSSRDDDDSSRALARALAHLQAVLQNVTPFLQMLGTYRRVPRRVSVDTERCVPIGRHVEKQRIVAFLLKEDEAAAHVVGVLPIVGPRGTGKSTLIHDASHDARVRAHFAVIERFGLDEVLLPLHAAGAGAAAATDDTSSRSLEDHRIYLDAVHNIVRQERFARNRSLLILEDAPAVIEFAETAWVLPMAHGSKVVVTSEYDQTKAGLGATEEAIRTKKMSKEEYWYHFKALAFRGAANDPAGPAHPALAATAKEIASVLNGSFLGMHILIALMRSDPRECFWRAVLQSLVDLCRSSNSKRIKADMGYVQEFALIGRIALKLVLPMRLTLRSCSITKQGGDPQLGPELNRVAGGIAYSCRSDDSGCVDVILCRSRIPPYEIYKLSCVMEEEVHLERAS

SEQ ID NO: 42093 - protein, 82 aa, Oryza sativa
MVTDRYGSTSAASRRACRFMCRPTSVCSCSRCRFCHTTVHSTAIRLSTTPEFSPFNNDDDDDVASICLKTKLISQFTNTQKD

SEQ ID NO: 42094 - protein, 377 aa, Oryza sativa
MDGDSCYVNSLVVKINSPEWDDGTMMGASPPEEQHSTVEEVVVVRRNQKRTKNFSGKEDEGLVSAWLNVSKDVVQGIEQSRCAYWKRIYDYFHANKDFTSDRSQNSLMHRWSTIQENVTKFEGCLSRIGDRKQSWVSSQDKIMHACALYKAEDENHRPFHMMHCWNLLRNQQKWIDRSSQLPSHKKQKITNNSSLGMSTTTTDDTAAAPPPPPGFELSKTPESINAPPRCELSERPESRNAPPRCELSERPENRKGEKEKLRRGGDVVFVEDLDDLLAKKKEADVEKELKKDERYIQSHALEQEKVALEQAKVANETKNLEMRSKELELKTKEIDLKRMLEEERIMTMDISAMSGLQQQYYKSLQEEIVTRRFNSSG

SEQ ID NO: 42095 - protein, 453 aa, Oryza sativa
MSRLSFRPRPLDIHKKLPIVKSARELEDDETTLALRAAPPVLRHSQPEPAADGEAHPTSSKKNVQEIPTPQYDDVDTYERDYTRTFAQPTSYIRARGARAEIGEFVEYDLDNEDEDWLEDYNNERKNLNPEKLEVLLFKLETLDHKARERAGIITPTFLGPIPVILQLDSAMEALQYLSVRYAVFQAVYNYWKSKRERWQKPILRRLQPPPPVNDTNPYNVFRPREKAYRLHTRRMQRRENSVQSFDKLRVVRRNLEQAKALMGALIKREERKRETMECEVHLRRIQMRYKHEAQLIDDGIALSGLQQAGSSEDDYADSDDTANEQPYVRSVAFHPRFPDNKLSAVPPLRLKRERELKRRPHQNGWLFKRVPEMRDPEEPVMLFTRPIDPDKLKMAGIRPPLDPPIDSGTTAPPFRWQARIGRGGRIIFDRWNPFLQVPVGQETNHRPSMPEG

SEQ ID NO: 42096 - protein, 308 aa, Oryza sativa
MDANMLSAMMAAVGGDKPQPDTSEQINVSPLALLKMLKHGRAGVPMEVMGLMLGEFVDEYTVTVADVFAMPQSGTGVSVEAVDHAFQSEMLEMLRQTGRPEMVVGWYHSHPGFGCWLSGTDMATQQSFEQLHPRAVAVVIDPVQSVKGKVVMDAFRLVDHMAMVLGGAAGGEARQTTSNVGAVARPSAVALVHGLGRHYYSLAISYRMKEGEERMLACLSRSGWSDGFALRRFGAHDAGNEAAVRGMRDLAVGYGAQVREEDETPPERLAVVRAGKVDAKGKLEEKAMDAMSANIVQTLGMMLDTVTF

SEQ ID NO: 42097 - protein, 356 aa, Oryza sativa
MEGSSNSPDRQSSGGSPPEERGGGGSGGGGGRSAAGEPVRSRWTPKPEQILILESIFNSGMVNPPKDETVRIRKLLERFGAVGDANVFYWFQNRRSRSRRRQRQMQAAAAAAAAAASSSSPSANTSPAAASAATVQVGLPPGAVVHTMAMGGSACQYEQQASSSSSSGSTGGSSLGLFAHGAGASGAGGYLQASCGASASASSALAPGLMGDVVDSGGSDDLFAISRQMGFVGSPRCSPASSPATPSSAATAAQQQFYSCQLPAATITVFINGVPMEMPRGPIDLRAMFGQDVMLVHSTGALLPVNDYGILMQSLQIGESYFLVTIHLQALTSWSHRSLSTPISQCSFVFMKAPHF

SEQ ID NO: 42098 - protein, 295 aa, Oryza sativa
MAKMVSQCISPRQSFRVPRFSSARPTLSSRLAIGYANPSFCGVKRSNRPSFIAAALDVPKSMSSPNSESSLPLKEVIWAWCNADAVCFDVDSTVCLDEGIDELADFCGAGQAVAEWTAKAMTGSVPFEKALAARLSLFKPSLGQVEDCMEKRPPRISPGIAELVKMLKAKNVDVYLVSGGFRQMIKPVAMQLGIPPENIFANQLLFGTSGEYVGFDPSEPTSRSGGKAVAVQNIRQKCGYRTLFMVGDGATDLEARQPNGADLFICYAGVQMREAVASKADWLIFDFDELMGYLV

SEQ ID NO: 42099 - protein, 427 aa, Oryza sativa
MEYERIHKVQMGVMSPTKLRMKLLGSHGGSIGRVDEAKKSPRASPARLDADEDDDDHPKNSLLPQELDEDYPKDQSDSSRSRSDASHGRAGNGYDSGGFEFYREERPPPPPPAAVAVVGGTFFRQVPSKWNDAEKWLAGRHVVHSNPIFSKKAAAAAAAVSGRVAPEASASSSPPSVASRQRQQKRLRVSSEAAAVSMRDVGTEMTPMASKEQSRSGTPAGAATPSLSPLCSVPTSPRGAASASSASSERELQIRTRREIAALGLQLGKMNIASWASKDDDDELPRASPEKRPRPRPRPHSGDGGGEAKKREFEARAMAWQETHKCKLALRFQRKEVKIQEWESCQKAKFEAKMRHAEVQAEQMKARAKQKLSRRLSALSHKAEGKQARVEARRSRQAARLARQVHRIRETGAAPSRLRRCCSWLFL

SEQ ID NO: 42100 - protein, 138 aa, Oryza sativa
MRSARQAEELIREASFRARTDCVYFIENYTWNNNGPNLRHPPVIKNDFETHFTVLTIIRQCLEFIKLNRSQSKREENGEKGNSGDVKGILEKVLTANAKSSGELSVKPALEKVLTANAKSSGELSVKPADVKPVLTVQ

SEQ ID NO: 42101 - protein, 234 aa, Oryza sativa
MEAKVATVTRPPPSLFMVRTASHMGSSMPALPRCRRGGSRRSRCDSPTAPTRRRSGRRTWGGSSRRETCAPAPRPPPSGRCRRRRAPLPHPSARPGRGSSGTPPGAVNPPRRSERERERDGRDGCGDSDDDDMRMDAALRVGLMATWMKTALRIPSHAPSRFPRSTRSAHATMSLLGSPPPMCGNNGGCSESEAEAAITAVAASSSSSSVGLSLRAGDEPSTSAWAASGDARAW

SEQ ID NO: 42102 - protein, 43 aa, Oryza sativa
MDDKLYPPRGPARRNQVPSPEVTTAPPGDPSSWFGLIPSSCLM

SEQ ID NO: 42103 - protein, 108 aa, Oryza sativa
MVVAAAQDVARRPRPRNYRCGLRRLASRWTTSPSTALAGSGPHPAAAPSTRAVQHRRGGRGSSSPLSRGFAWIVPTGGSRRRGGSGNRSGTTATTEEEVGSRRNLGGS

SEQ ID NO: 42104 - protein, 63 aa, Oryza sativa
MAGRPRRGRGGSGGGEAQCWGLPPHRRVQRAASRRGLIWRAASTIEDSESSRRLALSRYQLQQ

SEQ ID NO: 42105 - protein, 104 aa, Oryza sativa
MAPPMQEGEERPGGSACVWMVTTLLLLSVLAGGGCLAGYVVLPPHEAPHWLPAVGLALVALPWAFWVATCSYRCVRRRAADRQAMGSAAVAPAATGSMRSCADS

SEQ ID NO: 42106 - protein, 149 aa, Oryza sativa; identical to SEQ ID NO: 39109

SEQ ID NO: 42107 - protein, 142 aa, Oryza sativa
MAAAAATVTAVQPAASSCGKRDGDNACVVDMCASLNLPRRPFFLFLTCYHVTRVRSLQAQEGEEGEVAAGGGGGGLPRRGGEQRGAALRGQVSTKYITAASHGDIVSARASCGLSVTVRFGFLGDLYSYSPCTRSIGTAVGL

SEQ ID NO: 42108 - protein, 73 aa, Oryza sativa
MRELMRRMSFSDRVGGGGGGDGGGGGAAAAVKRGLMRRLSFSDRRQELINPLLLTAISARLIDELIEQIKQMR

SEQ ID NO: 42109 - protein, 129 aa, Oryza sativa
MGAMGRTCLGDEGRRGDGDARTWAMAQLRVSWRESRRAVRGAAWRGAGPGTTRHGRDDAGAGVGPARCDARRDTTRCGCGAASAVRLGLGSDVAEGKEARLRCGTGVTGVAGSDVVHAVDGIGRLADSE

SEQ ID NO: 42110 - protein, 91 aa, Oryza sativa
MVKDLAPFAFHGDGDGENSSPWRQVWWCNLRLGIPRCHLLRGGGSGGVNLQPGIPVAISSLNILRNRTDSLGPINHESRIRYESRIRYDIL

SEQ ID NO: 42111 - protein, 60 aa, Oryza sativa
MLDCFLLDYFVLDCFCMCKCETDLLFSAIKLVNFCCFLINYLRMACVFALGKCLAKHCPC

SEQ ID NO: 42112 - protein, 84 aa, Oryza sativa
MRCDPVSLPPGDAAAAAHGWGGWGLGMFRGLRENPILLQSQRKESKPFLSDSWNLSRKNNNLNQSNLLFRFLNLSLLVSFYSKQ

SEQ ID NO: 42113 - protein, 53 aa, Oryza sativa
MKMDRWVTEPLGDSWLLATWRATWYITHYREKRMLVEMEELLCFFTVEHHYHR

SEQ ID NO: 42114 - protein, 101 aa, Oryza sativa
MVAASERQADRTPRRRGAAVIRVRVDRARTPPPAATGQPDDRSGERQRRGERRDGERPSPSGWGLAVAGSPPLPPRCHLLILNYAIFISCDHICSKSRPGD

SEQ ID NO: 42115 - protein, 124 aa, Oryza sativa
MPPPSTRARGAPRRSGPQIWPWRRRRPASHPAPRRQALPARRRRRRAEAVARPRRRRRGGGRASVACEPSWVGLGALLVGFFRMCIMGSWAVSFLGPTFWRFCWALGLMNSAPPFIGLGFYLPV

SEQ ID NO: 42116 - protein, 68 aa, Oryza sativa
MKDWAPAIIASALFALLCPGGILQMPGRNRPVDFMNMKTSLASIVVHAVIYGLLLMLFLVILEAHLYI

SEQ ID NO: 42117 - protein, 250 aa, Oryza sativa
MAAAGDGAGGGGEQLTVLGAWGSPFLVRVRLALDLKGLSYEYVEVDLAGKSDLLLAANPVHAKVPVLLHAGRPVCESMLIVEYLGEAFPSSSSSAAAATTILPAADDPYARAVARFWAAFVDGELLSGWMGIYDGGKTGEERAAALARTRAALDALEGALRERAGGRWFGGERVGLVDVALGGFVPAMLASEPTTGVRIVDADRTPLLAAWVERFCALEEAKAAMPPLERLIAAGKKRYADLQAAAAASE

SEQ ID NO: 42118 - protein, 193 aa, Oryza sativa
MDWRPDGAAPPVPVAAAPVVPVDFTVVKRRLGGGGDMEVRDASGGLAFRFVAAAAAGGGGGGGRALLDAAGGVLVTVRSGEGEWQAFRGNSLDYKDIIYTAKSISVCSNRNEVHVFMPPRSNFQDTKASYRLIGNTSRRACTIISGDSIVSQTNLLYKLKKVVYSTRKFRVTIYPGNDTLLVMAMVMNFFMEK

SEQ ID NO: 42119 - protein, 129 aa, Oryza sativa
MSRNNGKSSKLECLRLMSLSRARGGGGGGPSATVRPGGDSGGVNGANTSPRRLSSSSSSTASPPSSCVSSEGSPDAAGGGAGPPMVLAGCPRCMMYVMLSREDPRCPRCHSAVLLDFNDDDQRRPRQRR

SEQ ID NO: 42120 - protein, 136 aa, Oryza sativa
MAAWLTSHTTMASWLVPFRPCCVCRHAAALAPLTHTLPSTFASSSSVISPPPPPPWCSFLPPTPMEKTPPPPPETAPPRSTPRCLLLRHRCGHPGDAPAPAPARGGRSEERQEPMAAAATRRSTELGNRFAKVRIV

SEQ ID NO: 42121 - protein, 90 aa, Oryza sativa
MPSLARLPRTNQARRTRILSTSQSGSHAMSNTASSNVDLPSTSPGRTWTASRTTIAGRALWSHRSSDTTMPELPHPTTSTFLPRYASPDL

SEQ ID NO: 42122 - protein, 71 aa, Oryza sativa
MGPELLRWRRRSRFLSQQAMPKATTPRRTEPRRMERELELMEWKDAKLTDPFCRCLTVFRRYFFLFELKRL

SEQ ID NO: 42123 - protein, 25 aa, Oryza sativa
MRRRRMSRRAPRRPPPMRSSSRTPA

SEQ ID NO: 42124 - protein, 282 aa, Oryza sativa
MARRVSTTRLLLLLLLVAAAAAAAAAGDQEDPRGGGDNGTARLDRRTKMFLHAARASDGGATGMEKAGLGLFDAFFASLSMILVSEIGDETFIIAALMAMRHPKSTVLSGALSALVVMTILSTGLGRIVPNLISRKHTNSAATVLYAFFGLRLLYIAWRSDSKASQKKEIEEVEEKLEAGQGKSTFRRIFSRFCTPIFLESFVLTFLAEWGDRSQIATIALATHKNAVGVAVGATLGHTICTSFAVVGGSMLASKISQGTVATIGGLLFLGFSLSSYFYPPL

SEQ ID NO: 42125 - protein, 189 aa, Oryza sativa
MASGVAAPAPSVFEAARPALESGGGGGGAPPPGRADASFDTNMVIILAALFFALLFAIGLNSLARCALRCGGRGAAAAGGGGGGGGGGAAAAGVGCGGIKKRALRSIPVEVYCGGEETAETDVCAICLGEFADGEKVRVLPRCRHGFHVRCVDAWLVSHGSCPTCRRQVIGGGGSTPPPDSDTIAVVVA

SEQ ID NO: 42126 - protein, 97 aa, Oryza sativa
MKGHHHHHSLPPSPPPKRRCTALAAAVPALVVCSILLPLVFLLGLHRPGHGSEERAAVVISTEMGFSKHKHLDGRMKHKLLKVMLLADSAHWLTHNS

SEQ ID NO: 42127 - protein, 268 aa, Oryza sativa
MDPEPHRVDASLAPNPSRRQPLLRPGKTTAFKREERRKRKERKQQERLALDLERWEPLGAPPRPAAAAASPSRAALPDKPWVCDPPPEPEPSASWGCGWGPPAAEPPREPPVPAAVSPQAAAVEACRAFFGEHVDHDDGDDEDEEEEEGNVARFFQELLEKDAGLRGFYEAEREKGRFLCLVCEGIGARAGKRFAGCAALVQHAGSVARAGRRMAHRAFADAVGRLLGWSAGRTTALQTDSDNAGMCDEDIHCEDVPQSAEMEMCPHQ

SEQ ID NO: 42128 - protein, 93 aa, Oryza sativa
MASRSKLSGIQRQVLALYRGFLRTARLKSPEERHRIESVVSAEFRENARNIDRKNFVYIEYLLRRGKKQLEQLKDPDITGLSTLEINKASSLH

SEQ ID NO: 42129 - protein, 88 aa, Oryza sativa
MDDAGNSSKEAEAQAPAPANQAPATAAAAARGAIHRGPMLRLAAMQLMLFAAYEIVSSYAAPPVALPRLFAAFVAWLVGCLSLFVAPP

SEQ ID NO: 42130 - protein, 83 aa, Oryza sativa
MAVSAVAARSRAIARAASSSLLARGLLPTSRRATCINRLPLVSGGLLSTLPLHSAVASARLRSAIAPESQSWGLVPQGNSMPL

SEQ ID NO: 42131 - protein, 133 aa, Oryza sativa
MRDGGGGLDSRRRRSMRGGGDQCATAEVDARRWRSMPDGSGRCAMAGVDARRWARCAGGGRCPTAAASSMGDDGGGELDGQRRRRRRARWAMTAAVDARRQGRRRARWATTAPASMRDGPRWATTTWKNGRET

SEQ ID NO: 42132 - protein, 121 aa, Oryza sativa
MSAAASGERDELADSLAELFTNVSLMVRGELQGTNSQLSLLEKMNRRVAEEYNNYGDVASGLRVFVEQLNEKNQSFGEYVSQIDAIDQQVTEFEAVVSMLDKHVSLLEKKVKSAYNIAPTQ

SEQ ID NO: 42133 - protein, 76 aa, Oryza sativa
MAANFVCFFAGLCIGISIQANDEEQQRRRRLVELERRGEEREKQVAEMVSREEDRERERKKNLDKLDQIVQILRNL

SEQ ID NO: 42134 - protein, 192 aa, Oryza sativa
MAASSSLSPSLLLGCSFLIAAAVLLRRHDSAAATTTTTTHLHFYMHDAYTGPAPTAMRVVSGRSLLQSTTDIVDGSSPPRQFGDIVVLNNALTEGPDAGSARVGTAQGFGVRVSEGGLVTDLSMHLVMEAGEHRGSSVAIKGRIDVGVGVRESVVVGGTGRFRLARGYMASSSYDCSLAAGGVVEIHVYLQH

SEQ ID NO: 42135 - protein, 73 aa, Oryza sativa
MYPIPWSIVLPSGRPELRRRRAFAACIASAAASLRAAGERTAANMNKKSTKACAPEDAMCIQEMMMMMMRRED

SEQ ID NO: 42136 - protein, 243 aa, Oryza sativa
MNRESGGAMAARRFSFSWADEVEREEAAEQQQQQQEEDDDEENQPPPPPRRCGETGEQAKANPFGAARPREVVLAEKGVDWRARDRELDDASRRGSAIRSRSRVHGSKRHARDAPVAARRHEDSTPASRRRMISLPPVSYGSAWGGKRKCAGQDEPSRQDRPVAEHCRRVFGQLNIGEGGEFSRRSSTESRGSVCTDRTEASNAAAAETETSVGQRRMSRRRSRKNVRKMESTKSKKQQTLQL

SEQ ID NO: 42137 - protein, 99 aa, Oryza sativa
MPNVQVADVSNLTAGITVYKKDKMNCMLDAYVFNKSFKPWSLRVHSSLPSETQQEPEARHRHHHSSLGPLQPPQALSAPPQSAARFLGTWHGFRHCGSC

SEQ ID NO: 42138 - protein, 85 aa, Oryza sativa
MRGALGGRSRARQNAMRSGLVVLGAAAFGYLSFRVGFKPYLDRAQEAMDDTTHHGSASGAAAQPDHAGEEDDVATSKDPAVVLRD

SEQ ID NO: 42139 - protein, 91 aa, Oryza sativa
MVSGLDLGLLNTSRAGPLRCPIAGAVETGTRVFAELDDLDTAAFESPSAEEEEATKCPQSVMHSADEFHGRGRMVELSCGLTLGVTLRSRC

SEQ ID NO: 42140 - protein, 73 aa, Oryza sativa
MLQSLLPLLLRPVVRAAASVARRPASAVATVLHRAGALPRNRGLERLVRDDMLVGGDHNFIAHFVVGFMRCLC

SEQ ID NO: 42141 - protein, 231 aa, Oryza sativa
MAAPDVEYRCFVGGLAWATDDRSLEAAFSTYGEILDSKIINDRETGRSRGFGFVTFSSEQSMRDAIEGMNGKELDGRNITVNEAQSRRSGGGGGGYGGGGGGYGGGRGGGASTSHGLLLKRDLLTAMAELQCQGYWSFALSTLHVARAEPCHCLRRPLPASSASLSVSLKKRIEETKGKMIEKRRRKKKKKRKRREEMTQTCGAHCMPCQRNLEKLGQYCLGTFFFFLHSL

SEQ ID NO: 42142 - protein, 183 aa, Oryza sativa
MKASSLAAVAAAVLVAAACSGRAPVAEATIESTCGAAAKGDRRVDVGFCARQFASYHGAAEADAWGLAKIAALIGVNLADDAVFDIGAGKIRPSPGGGAKGDKAMDACAKAYDAVGVAFAEAADELGSRRYAAARQELARVAALVQRCDGGLSRAGARSPLPRYSADCQQVAIMGIAITNLLK

SEQ ID NO: 42143 - protein, 146 aa, Oryza sativa
MAVERLEREGRTRSGSSRPMSPTGSTMRSCFVVVAPPPASCCRCSSALARCHRQASGYGSHSARRRRPSTHELPPSPLRAHPVPPSPAPRCGTRRSRCRWRPSARELLLAPLCPRAAAGAPLLVSCCRWKGRERGKEERKRGRERR

SEQ ID NO: 42144 - protein, 13 aa, Oryza sativa
MNWIVNYVQQSFV

SEQ ID NO: 42145 - protein, 173 aa, Oryza sativa
MNRFRNVLLRKCKSLSRSLSRSSSYRNLRSMSTREHVVAGGDGGIVGGGDSKAVSAGGDGAVVFVGSSRRRYVISNKHLSHPLIAALIDDDVPAAAAGDGKEGGGGGGVVERRRSTSAATTTSSSTKPIAVNCEVVLFDHLLWMLDNAVDLRAGGDGDDDDAAMRELAQLYAY

SEQ ID NO: 42146 - protein, 124 aa, Oryza sativa
MLSRRTVSDMASVVPAARAVAGGGGEPARRPSSVEVGVDGAVRLRMRLPKSEVARLMKDSKDAAEAAERIMQLCVARDQGGAGAGAAVTLAASGPVSAMSGRKTSAMKKEKRTRFVALPDEIIG

SEQ ID NO: 42147 - protein, 108 aa, Oryza sativa
MLLHGAHAAFDCSGMLPEHATVFALIQGYRRVAVYSSRATNKGEQPPRSAHPRIHPLLCRRPTGLLATSALAKPGRCGARPRQPTATPFCAASPLSLPATAPASVLGT

SEQ ID NO: 42148 - protein, 15 aa, Oryza sativa
MAGEINALATAALVS

SEQ ID NO: 42149 - protein, 151 aa, Oryza sativa
MPQAPAVGRSPRLLAQAALTVGADRARSCSGYLGGGGSSSSSKRSGGGGRGGAVGDCADTLRDAEERLRQSAAEMSRMGRSGSPRFAWRLSNVQTWASAALTDASTCLDSLATYAAPGIDVDALRKRVGAVSQATSNALALVNNLDPHHHL

SEQ ID NO: 42150 - protein, 151 aa, Oryza sativa
MRRAPRLHALPSRALAFGGLPPPPLPRAQLQGITEPGAASRLGAAFLARALATTGLPAPRRPRALQVQRITEPGAASRFGAAFLARGGFSTDASAAAQDSAKPAAATGGEGGDGKSGKSEQGDAGKSVRGGMSPSKCLLLESSVVEIGPIA

SEQ ID NO: 42151 - protein, 187 aa, Oryza sativa
MADGDRQEAEAPVAGIKRVKEEEATASPSGGEKKKILPNWRKSSIPCEGSEILKKKKEAIAARPLWVSRDVPGAMECWIEEREKALAEEEADIASGKKKRKKVVKYKMPNEVIQQMMRYPYTYPECTEEELARRSASNRQLHRLRMFIDGKMFAYEQTLIDQYLKHGYAFDEAEISDEEEEEEEEQK

SEQ ID NO: 42152 - protein, 53 aa, Oryza sativa
MPMKEVQISTSSAVRQAAACGARLRQVSASTAALTAAWRRLQQAASGCGGCRR

SEQ ID NO: 42153 - protein, 198 aa, Oryza sativa
MSTPGVTGAVVWDSGVVLAKFLEHAVDSGLLTLRAARALELGAGCGLAGCVAALLGAHVLLTDLPDRLKLLRKNIDLNVGDDARGSARVAQLVWADDPHPDLLNPPLDYVLGSDVIYSEEAVDDLLLTLKHLSAPHTTIILAAELRNDAVLECFLEAAMADFQVGCIEQQQWHPDFRSTRVALFILLKKPPSQPDVLL

SEQ ID NO: 42154 - protein, 81 aa, Oryza sativa
MRRSSSLLPVCALVLAMLCVASLMDVTEGRRGGGGRAYIGGGGVGARGSATRTSGSPRGLSGGTWAACAGSSLLAAAAMLL

SEQ ID NO: 42155 - protein, 132 aa, Oryza sativa
MWIEGDALDLPFTDCYFDAVTVGYGLRNVVDKPKAMREIFRVLKPGSRASILDFNKSSSLFTTSLQSWMIDNVVVPLASGYGLTEEYKYLKSSILHYLTEKELEELAKEAGFSAAKHYELGGGLMGDLVATR

SEQ ID NO: 42156 - protein, 114 aa, Oryza sativa
MARQQLLGLFLVLAIMVAVVWGDPSGGCDQDRQDMIRECKKYEGWPAEPKIEPSEACCAVWQRANIPCLCAGVTKEKEKVWCMEKVVYVAKFCKKPFQPGYQCGSYTVPSSLGQ

SEQ ID NO: 42157 - protein, 71 aa, Oryza sativa
MAPREVPALGGAGPLLRPQVPQVQAEQARPPGEPPHPHPPAHTPDPSPLPRKLWLNLDWDVMVRFQSIGSG

SEQ ID NO: 42158 - protein, 167 aa, Oryza sativa
MEMPPPPSSAPAVVAAGRKPPEMTSAAAVAPMATVGNPHAPLGQSTSGKKLIFFGSAAAVAPFDLEDLLRASAEVLGKGAFGTTYKAVLESGATVAVKRLKDVTLTEPEFRDRIADIGELQHEFIVPLRAYYYSKDEKLLVYDFMPMGSLSAVLHGENLTVVFCCDS

SEQ ID NO: 42159 - protein, 48 aa, Oryza sativa
MPVRRLRISLLSSHHTGEIRGKPDAKRGPRSAKQGPKECCPILPLCVL

SEQ ID NO: 42160 - protein, 223 aa, Oryza sativa
MARARRGRQNAAASPPSLALQLQVASLVIVFVFAFSSAITPTRADHVEGHMSHEMFGYENDATGPAKWGSLHKEWAVCGDGKKQSPIDITTVEPQKVKEPLMQAYKAGATTIQNRGHDYMLKWKDGNSKLTVQGKEYTLKQVHWHEPSEHTINGTRFDAEMHMVHEDPSMARAVVSVLLSTKAGQPNAVLTEVVTTTCLTVHLKWFVSISSPTERPRNGNEHI

SEQ ID NO: 42161 - protein, 116 aa, Oryza sativa
MLPQSQSSSLQRLNHVEQMIVRAVNLAGAVMEELGNATGPRTEGVAGHCREFMLAMKEIQTTLREEIKSACEYRPFEKCDYSARIANEICCKKVEYVLEKLDAMQKNIEDVLLLVN

SEQ ID NO: 42162 - protein, 40 aa, Oryza sativa
MSSVRHSCSNFPITTKTFMLLSLQILGSSNSVTPFPSARA

SEQ ID NO: 42163 - protein, 165 aa, Oryza sativa
MKAPADHHHHHHHSSTPPPATKISIPISAAAGGAEAALLGKGRYKAWALAAIALLALWSMFAASVTIRWSSGDLAAEFGDLPDPLIDDLDPLEMEDREKLVRRMWDVYTRTGVDRVRLPRFWQEAFEAAYEELAGDDTQASETAVSEIARMSVHRPELEQSSNKY

SEQ ID NO: 42164 - protein, 266 aa, Oryza sativa
MHRLRHHAALTSSRLLVRDNQRITALARAGDVAAARRVFDAMPRRDAVSWNALLTALWRAGRDLPAARSLFDDMPSRNVISWNSIIAGCLAHGDLAAASAYFARAPRRNVASWNAMLAGLVRLGSMEDARSLFDQMPERNVVSYTTMVDGLARCGEVASARELFDAMPTRNLVSWAAMISGYVDNNMLEEARKLFEAMPEKNVVACTAMITGYCKEGDLQNARRLFDGIRAKDVISWNAIISGMLHRLQFPFLPIFFLFLLYLEYQ

SEQ ID NO: 42165 - protein, 27 aa, Oryza sativa
MPLTTHYIFSEFLLYFYRAWIGLQSLA

SEQ ID NO: 42166 - protein, 22 aa, Oryza sativa
MLDEKRERELTPRKDDAKEMQE

SEQ ID NO: 42167 - protein, 205 aa, Oryza sativa
MAGTGGRTGEPEATGVEAASAPERSESSRCMPFEDCVAGIKSSLKNPTVRFLMERMDKAGCPMPPGMITARNCGTADKNGSYGSRIGITVCCEEIRYKDEITQLLIHELIHAYDDCVVKDMDWKNCAHHACSEIRANHLSGDCHYKRELLRGFMKMRGHEQECVKRRALMSLRNNPHCSGTAAKDAVEAVWSICYNDTRPFDRAP

SEQ ID NO: 42168 - protein, 90 aa, Oryza sativa
MAAASQLLATATCLLALLLAAGWMVAAADARRLLDDVEYTGTAMPPAPAMAPVAEPGMDVHGGRMMLAEGRGLLAGGLRLAGRLLLGLGL

SEQ ID NO: 42169 - protein, 161 aa, Oryza sativa
MPTPTRVGDGGVDDMMRGHRWWTTAQGWLLMARRGSPCTFLWDPFTGRRVRLPPDHDGTVLTAEGSHRRRCLLSCCGPMDPTSCTDLVIDLADPELWYCRPGDNHWVKLHQQPYQYRNPAHRDAIISFLRKFTAIDGKFYTELHTGNVGVLEFSPEVAEGN

SEQ ID NO: 42170 - protein, 211 aa, Oryza sativa
MDPETAAFVGRDIDAATNGGEVAEERRRKVELVQEAIRELLEEKRTGERRRRQGGDGGGEEARRDHEEEEDDLLSSLLSKVDALQNDAALEQVKPNCSHPNPEISKEVKLGDVAKDLNKIKRQNMITHILLGTVIVMTAVWQFNEVSFLLAVKRKLSNPFKSLGDLIKSSLKGGGKPMIEAPPLPPVGVPDVTRNDLPLLLISNGNGNNDD

SEQ ID NO: 42171 - protein, 199 aa, Oryza sativa
MASGQVLGGRRQRERGGRRRGQGAIPGDPGRLLRALRLQQALPLRRRRLRRQRRRRRRRRSRSVGDGRFPWRDGADDEPGDACGELRGVAAAVRGHVPGRHRRRPLPVDAAAAVMAVASGGRQCTIAGGGGDFTQGREQAVLTGGDGHGLRFEQPAGHFGLLFRGAMDVAGREHCRRRWRRQEEKAEAAAGEPQRVVGC

SEQ ID NO: 42172 - protein, 9 aa, Oryza sativa
MFRKFCLEL

SEQ ID NO: 42173 - protein, 98 aa, Oryza sativa
MPPGDSLFQRTQPPVFTRSDDPLDADDWLRTIERKLTSSPYRPPAAPPPTAAASSIADCRRPPPLPPCTVGLAEKGKSERDEEGREEGKRERRLMWPC
